United States Patent Application Publication US 2026/0317762 A1 - sequence listing, part 3

SEQ ID NO: 17689 - DNA, 565 bp, synthetic construct
  source 1..565: mol_type = other DNA
tgggggggcttcggccctctcaccctcttttccggtggccacacgcccgggccaccgttactccactccactccctcgggactggtttggaggaacacaacagggcttcccatccctgttcctccctcaactccacttaccctttccccttaccaaccttatccacaccctattgactgattcctttggattttgacctcagaatgcctatctgacctcccacctgcctcccccttctcggattgccggtggtgcctggcggaaaaagcacaagtgtgttgttggctaccaaactcctacccgacaaaggtgcgtgtccgcgtgctgagtaatgggataggagatgccaataacaggctcgcccatgagtagagcatggactgcggtgcatgtgacttcagtcaccaggggcatagcattgctcacccctgaatcaagtcatcgagatttctctgacctctgaagtgcactgtggttgcgtggctgggaatccacgcttgaccatgtactgcttgatagagtcgcggctggccgactcatgggttaaagtcagttgacaagacac

SEQ ID NO: 17690 - DNA, 561 bp, synthetic construct
  source 1..561: mol_type = other DNA
ggggcttacggccctctcaccctcttttccggtggccattcgcccgggccaccgttactccactccactccctcgggactggtttggaggaacacaacagggcttcccatccctgtttatcctaattctacttaccttttcccttttaccgaccctatccacaccccactgactgattcctttggattttgacctcggaatgcctactagatctcccacttgcctctcccttcccggattgccggtggtgcctggcggaaaaagcacaagtgtgttgcaggctaccaaactcctacccgacaaaggtgcgtgtccgcgtgctgagtaatgggataggagatgcctacaacaggctcgcccatgagtagagcatggactgcggtgcatgtgacttcggtcaccacgggcatagcattgctcacccgtgaatcaagtcatcgagatttctctgacctctgaagtgcactgtggttgcgtggctgggaatccacgcttgaccatgtactgcttgatagagtcgcggctggccgactcatgggttaaagtcagttgacaagacac

SEQ ID NO: 17691 - DNA, 563 bp, synthetic construct
  source 1..563: mol_type = other DNA
gggggggcttcggccctctcaccctcttttccggtggccactcgcccgggccaccgttactccactccactccctcgggactggtttggaggaacataacagggcttcccatccctgtttacccttaattccacttaccctctccttttaccaaccctatccatacctcactgactgattcctttggattttgacctcagaatgcctacctgacctcccacttgcctctcccttctcggattgccggtggtgcctggcggaaaaagcacaagtgtgttgttggctaccaaactcctacccgacaaaggtgcgtgtccgcgtgctgagtaatgggataggagatgcctacaacaggctcgcccatgagtagagcatggactgcggtgcatgtgacttcggtcaccacgggcatagcattgctcacccgtgaatcaagtcatcgagatttctctgacctctgaagtgcactgtggttgcgtggctgggaatccacgcttgaccatgtactgcttgatagagtcgcggctggccgactcatgggttaaagtcagttgacaagacac

SEQ ID NO: 17692 - DNA, 562 bp, synthetic construct
  source 1..562: mol_type = other DNA
ggggggcctcggccctctcaccctcttttccggtggccactcgcccgggccaccgttacttcactccactcccttgggactggtttggaggaacacaacagggcttcccacccctgtttaccctacactccactcaccctctcccttaaccaaccctatccacatcccactgactgattcctttggattttgacttcagaatgcctacttgacctcccacttgcttctcccttcccggattgccggtggtgcctggcggaaaaagcacaagtgtgttgttggctaccaaacccctacccgacaaaagcgcgtgtccgcgtgctgagtaatgggataggggatgccaatgacaggctcgcccatgagtagagcatggactgcggtgcatgtgactttggtcaccaggggcatagcattgctcacccctgaatcaagtcatcgagatttctctgacctctgaagtgcactgtggttgcgtggctgggaatccacgcttgaccatgtactgcttgatagagtcgcggctggccgactcatgggttaaagtcagttgacaagacac

SEQ ID NO: 17693 - DNA, 1000 bp, synthetic construct; identical to SEQ ID NO: 1461
  source 1..1000: mol_type = other DNA

SEQ ID NO: 17694 - DNA, 561 bp, synthetic construct
  source 1..561: mol_type = other DNA
gggggcttcggccctctcaccctcttttccggtggccactcgcccgggccaccgttactccactccactccctcgggactggtttggaggaacataacagggcttcccatccctgtttacccttaattctgcttaccctctccttttaccaaccctgtccacaccccactgactgattcctttggattttgacctcagaatacctacctgacctcccacttgcctctcccttctcggattgccggtggtgcctggcggaaaaagcacaagtgtgttgttggctaccaaactcttacccgacaaaggtgcgtgtccgcgtgctgagtaatgggataggagatgccaatgacaggctcgcccatgagtagagcatggactgcggtgcatgtgacttcggtcaccaggggcatagcgttgctcacccctgaatcaagtcatcgagatttctctgacctctgaagtgcactgtggttgcgtggttgggaatccacgcttgaccatgtactgcttgatagagtcgcggctggccgactcatgggttaaagtcagttgacaagacac

SEQ ID NO: 17695 - DNA, 561 bp, synthetic construct
  source 1..561: mol_type = other DNA
ggggcttacggggctctcaccctcttttccggtggccactcgcccgggccaccgttactccactccactccttcgggactggtttggaggaacacaacagggcttcccacccctgtttacccttaactccactcacccctcccttgaaccaaccctatccacaccccactgactgactcctttggattttgacttcggaatgcctacctaacctcccacttgcctttccctttacggattgccggtggtgcctggcggaaaaagcacaagtgtgttgttggctaccaaactcctacccgacaaaggtgcgtgtccgcgtgctgagtaatgggataggagatgccaatgacaggctcgcccatgagtagagcatggactgcggtgcatgtgacttcggtcaccaggggcatagcattgctcacccctgaatcaagtcatcgagatttctctgacctctgaagtgcactgtggttgcgtggctgggaatccacgcttgaccatgtactgcttgatagagtcgcggctggccgactcatgggttaaagtcagttgacaagacac

SEQ ID NO: 17696 - DNA, 560 bp, synthetic construct
  source 1..560: mol_type = other DNA
ggggcttcggccctctcaccctcttttccggtggccgcccgcccgggccaccgttacttcactccactccctcgggactggtttggaggaacacaacagggcttcccatccctgttttcccttaataccacttaccttttccctaattaaccctacccaccacccaccgactgactccctttggattttgacctcagaatgcccacttgacctcccacttgcctcttcctttttggattgccggtggtgcctggcggaaaaagcacaagtgtgttgcaggctaccaaactcctacccgacaaaggtgcgtgtccgcgtgctgagtaatgggataggagatgcctacaacaggctcgcccatgagtagagcatggactgcggtgcatgtgacctcggtcaccacgggcatagcattgctcacccgtgaatcaagtcatcgagatctctctgacctctgaagtgcactgtggttgcgtggctgggaatccacgcttgaccatgtactgcttgatagagtcgcggctggccgactcatgggttaaagtcagttgacaagacac

SEQ ID NO: 17697 - DNA, 1000 bp, synthetic construct
  source 1..1000: mol_type = other DNA
cccccggtaaccccctttcgacgcgggtactgcgatagtgccaccccagtctttcctactcccgactcccgaccctaacccaggttcctcggtatgggaacacaaatttactcatcccctggatgctgactaatcagaggaacgtcagcattttccggcccaggctaagagaagtagataagttagaatccaaattgatttatcatccccttgacgaattcgcgttggaaaagtacctctcacttgccgctcttcacacccatcatcttaattcggcctctgtgttgagccccttgttgaagtgcttccctccatcgcgacgtggttggagatctaagtcaaccgactccgacgaaactaccatcatgcctccccgattatgtgatgctttccgccctgctgggtggagcatcctcgggttgagaaatccttcttcctttcaccttggaccccggtcccccggtctaagccgcttggaataagacagggttattttcacctctccttcttctactccacagtgctctatactgtggaagggtatgtgttgccccttccttcttggagaacgcgcgcggcggtctttccgtctctcgacaagcgtgcgtgcaacatgcagagtaacgcgaagaaagcagttcttggactagctttagtacctgcaagaaaacagctgtagcgaccacacaaaggcagcggaacccccctcctggcaacaggagcctctgcggccaaaagccacgtggataagatccacctttgtgtgcggtgcaaccccagcaccctggtttcttgaagatactctagtgaacccttgaatggcaatctcaagcgcctctgtaggaaagccaagaatgtccaggaggtaccccttccttgcggaagggatctgacctggagacacgtcacatgtgctttacacctgtgctcgtgtttaaaaactgtcacagctttcccaaaccaagtggtcttggttttcctttttatcactattgtcact

SEQ ID NO: 17698 - DNA, 1000 bp, synthetic construct
  source 1..1000: mol_type = other DNA
cccggttaccccctttcgacgcgggtactgcgatagtgccaccccagtccttcctactcccgactcccgaccccaacccaggttccttggaacaggaacaccaatttattcatcccttggatgctgactaatcagaggaacgtcagcattttccggcccaggctaagagaagtagataagttagaatctaaattatttatcatccccttgacgaattcgcgttggaaaagcacctctcacttgccgctcttcacacccatcattctaattcggcccctgtgttgagccccttgttgaagtgtttccctccatcgcgacgtggttggagatctaagttaaccgactccgacgaaactaccatcatgcctccccgattatgtgatgctttctgccctgctgggtggagcatcctcgggttgagaaatctttcttccttttaccttggactccggtcccccggtctaagccgcttggaataagacagggttatcttcactcctcttcttttctacttcacagtgttctatgctgtgaaagggtatgtgtcgccccttccttcttcggagaacacgcgtggcggttttttccgtctctcgacaagcgcgtgtgcgacatgcagagtctcgcgaagaaagcagttctcggtctagctttagtgcccacaagaaaacagctgtagcgaccacacaaaggcagcggaacccccctcctggtaacaggagcctctgcggccaaaagccacgtggataagatccacctttgtgtgcggtgcaaccccagcaccctgttttcttggtgacactctagtgaacccctgaatggcgatcttaagcgcctctgtagggaagccaggaatgtccaggaggtaccccttccgctcggaagggatctgacctggagacacatcacatgtgctttacacctgtgcttgtgtttaaaaattgtcgcagcttccccaaaccaagtggtcttggttttctctttttattatattgtcaat

SEQ ID NO: 17699 - DNA, 559 bp, synthetic construct
  source 1..559: mol_type = other DNA
gggcttcggccctctcaccctcttttccggtggccactcgcccgggccaccgttacttcactccactccctcgggactggtttggaggaacataacagggcttcccacccctgtttacccttaattccacttacccttccccttaaccaaccctatccacaccccactgactgattcctttggattttgacctcagaacgcctacttgacctcccacttgcctctcccttctcggattgccggtggtgcctggcggaaaaagcacaagtgtgttgcaggctaccaaactcctacccgacaaaggtgcgtgtccgcgtgctgagtaatgggataggagatgcctacaacaggctcgcccatgagtagagcatggactgcggtgcatgtgacttcggtcaccacgggcatagcattgctcacccgtgaatcaagtcatcgagatttctctgacctctgaagtgcactgtggttgcgtggctgggaatccacgcttgaccatgtactgcttgatagagtcgcggctggccgactcatgggttaaagtcagttgacaagacac

SEQ ID NO: 17700 - DNA, 1000 bp, synthetic construct; identical to SEQ ID NO: 1462
  source 1..1000: mol_type = other DNA

SEQ ID NO: 17701 - DNA, 1000 bp, synthetic construct
  source 1..1000: mol_type = other DNA
cccccggtcaccccctttcgacgcgggtactgcgatagtgccaccccagtctctcctactcccgactcccgaccctaacccaggttcctcggaacaggaacacaaatctactcatcccctggatgctgactaatcagaggaacgtcagcattttccggcccaggctaagagaagtagataaattagaatctaaattgatttatcatccccttgacgaattcgcgttggaaaagcacctctcacttgccgctcttcacacccatcattttaattcggcctctgtgttgagccccttgttgaagtgtttccctccatcgcgacgtggttggagatctaagtcaaccgactccgacgaaactaccatcatgcctccccgattatgtgatgctttctgccctgctgggtggagcatcctcgggttgagaaatccttcttccttttttccttggaccccggtcccccggtctaagccgcttggaatatgacagggttattttcacctctcttcttctactccacagtgtcctatactgtggaagggtatgtgttgccccttccttcttggagaacgtgcgcggcggtctttccgtctctcgacaagcgcgcgtgcaacatgcagagtaacgtgaagaaagcagttcttggactagctttagtgcccacaggaaaacagctgtagcgaccacacaaaggcagcggaacccccctcctggtaacaggagcctctgcggccaaaagccacgtggataagatccacctttgtgtgcggtgcaaccccagcaccctggtttcttgttgacactctagtgaacccttgaatggcaatctcaagcgcctctgcagggaagccaagaatgtccaggaggtaccccttcctcttggaagggatctgacctggagacacatcgcacgtgctttacacctgtgcttgtgtttaaaaattgtcacagcttccccaaaccaagtggtcttggttttctctttttaccactatctcaat

SEQ ID NO: 17702 - DNA, 556 bp, synthetic construct; identical to SEQ ID NO: 1423
  source 1..556: mol_type = other DNA

SEQ ID NO: 17703 - DNA, 1000 bp, synthetic construct
  source 1..1000: mol_type = other DNA
tcccccggttaccccctttcgacgcgggtactgcgatagtgccaccccagtctttcctactcccgactcccgaccctaacccaggttcctcggaacaggaacaccaatttactcatcccctggatgctgactaatcagaggaacgtcagcattttccggcccaggctaagagaagtagataagttagaatccaaattgatttatcatccccttgacgaattcgcgttggaaaaacacctctcacttgccgctcttcacacccattaatttaattcggcctctgtgttgagccccttgttgaagtgtttccctccatcgcgacgtggttggagatctaagtcaaccgactccgacgaaactaccatcatgcctccccgattatgtgatgctttctgccctgctgggtggagcaccctcgggttgagaaaaccttcttcctttttccttggactccggtcccccggtctaagccgctcggaatatgacagggttattttcacctcttcttttctactccacagtgttctatactgtggaagggtatgtgttgccccttccttcttggagaacgtgcgcggcggtctttccgtctctcgacaagcgcgcgtgcaacatacagagtaacgcgaagaaagcagttctcggtctagctctagtgcccacaagaaaacagctgtagcgaccacacaaaggcagcggaacccccctcctggtaacaggagcctctgcggccaaaagccacgtggataagatccacctttgtgtgcggtgcaaccccagcaccctggtttcttggtgacactctagtgaacccctgaatggcaatctcaagcgcctctgtagggaagccaagaatgtccaggaggtaccccttcctctcggaagggatctgacctggagacacatcacacgtgctttacacctgtgcttgtgtttaaaaattgttacagcttccccgaaccaagtggtcttggttttcactttttatcacactgtcaat

SEQ ID NO: 17704 - DNA, 1000 bp, synthetic construct; identical to SEQ ID NO: 1464
  source 1..1000: mol_type = other DNA

SEQ ID NO: 17705 - DNA, 1000 bp, synthetic construct
  source 1..1000: mol_type = other DNA
catcccccggtcaccccctttcgacgcgggtactgcgatagtgccaccccagtctctcctactcccgactcccgaccctaacccaggttcctcggaacaggaacaccaatttactcatcccctggatgctgactaatcagaggaacgtcagcattttccggcccaggctaagagaagtagataagttagaatccaaattgatttatcatcccctgacgaattcgcgttggaaaaacacctctcacttgccgctcttcacacccatcaatttaattcggcctctgtgttgagccccttgctgaagtgtttccctccatcgcgacgtggttggagatctaagtcaaccgactccgacgaaaactaccatcatgcctccccgattatgtgatgctttctgccctgctgggtggagcatcctcgggttgagaaatccttcttccttttccttggacctcggtcccccggtctaagccgctcggaatatgacagggttattttcacctcttctcttctactccacagtgctctatactatggaagggtatgtgttgccccttccttcttggagaacgtgcgtggcggtctttccgtctctcgacaagcgcgcgtgcaacatgcagagtaacgtgaagaaagcagttctcggtctagctctagtgcccacaagaaaacagctgtagcgaccacacaaaggcagcggaacccccctcctggtaacaggagcctctgcggccaaaagccacgtggataagatccacctttgtgtgcggtgcaaccccagcaccctggtttcttggtgcactctagtgaacccttgaatggcaatcttaagcgcctctgcaggaaagccaagaatgtccaggaggtaccccttcctttcggaagggatctgacctggagacacatcacatgtgctttacacctgtgcttgtgtttaaaaattgtccagcttccccaaaccaagtggtcttggttttctctttttactaacgttgtcaat

SEQ ID NO: 17706 - DNA, 1000 bp, synthetic construct; identical to SEQ ID NO: 139
  source 1..1000: mol_type = other DNA

SEQ ID NO: 17707 - DNA, 1000 bp, synthetic construct; identical to SEQ ID NO: 1465
  source 1..1000: mol_type = other DNA

SEQ ID NO: 17708 - DNA, 1000 bp, synthetic construct
  source 1..1000: mol_type = other DNA
cccccggtcaccccctttcgacgcgggtactgcgatagtgccaccccagtctctcctactcccgactcccgaccctaacccaggttcctcggaataggaacaccactttactcatcccctggatgctgactaatcagaggaacgtcagcattttccggcccaggctaagagaagtagataagttagaatccaaattgatttatcatccccttgacgaattcgcgttggaaaagcacctctcacttgccgctcttcacacccattaattcatttcggcctctgtgttgagccccttgttgaagtgtttccctccatcgcgacgtggttggagatctaagtcaaccgactccgacgaaactaccatcatgtctccccgattatgtgatgctttctgccctgctgggtggagcatcctcgggttgagaaatccttcttcctttcaccttggaccccggtcccccggtctaagccgcttggaataagacagggttattttcacctctttttcttctactccacagtgctctatactgtggaagggtatgtgttgccccttccttcttggagaacgtgcgcggcggtctttccgtctctcgacaagcgcgcgtgcaacatgcagagtaacgcgaagaaagcagttcttggactagctttagtatctgcaagaagacagctgtagcgaccacacaaaggcagcggaacccccctcctggtaacaggagcctctgcggccaaaagccacgtggataagatccacctttgtgtgcggtgcaaccccagcaccctggtttcttgaagatactctagtgaacccttgaatggcaatctcaagcgcctctgtaggaaagccaagaatgtccaggaggtaccccttcctcgcggaagggatctgacctggagacacgtcgcaagtgctttacacctgtgctcgtgtttaaaaattgtcacagctttcccaaaccaagtggtcttggttttcctttttattactattgacact

SEQ ID NO: 17709 - DNA, 1000 bp, synthetic construct
  source 1..1000: mol_type = other DNA
cccccggtcaccccctttcgacgcgggtactgcgatagtgccaccccagtctctcctactcccgactcccgaccctaacccaggttcctcggaataggaacaccactttactcatcccctggatgctgactaatcagaggaacgtcagcattttccggcccaggctaagagaagtagataagttagaatccaaattgatttatcatccccttgacgaattcgcgttggaaaagcacctctcacttgccgctcttcacacccattaattcatttcggcctctgtgttgagccccttgttgaagtgtttccctccatcgcgacgtggttggagatctaagtcaaccgactccgacgaaactaccatcatgtctccccgattatgtgatgctttctgccctgctgggtggagcatcctcgggttgagaaatccttcttcctttcaccttggaccccggtcccccggtctaagccgcttggaataagacagggttattttcacctctttttcttctactccacagtgctctatactgtggaagggtatgtgttgccccttccttcttggagaacgtgcgcggcggtctttccgtctctcgacaagcgcgcgtgcaacatgcagagtaacgcgaagaaagcagttcttggactagctttagtatctgcaagaagacagctgtagcgaccacacaaaggcagcggaacccccctcctggtaacaggagcctctgcggccaaaagccacgtggataagatccacctttgtgtgcggtgcaaccccagcaccctggtttcttgaagatactctagtgaacccttgaatggcaatctcaagcgcctctgtagggaagccaagaatgtccaggaggtaccccttcctcgcggaagggatctgacctggagacacgtcgcaagtgctttacacctgtgctcgtgtttaaaaattgtcacagctttcccaaaccaagtggtcttggttttcctttttattactattgacact

SEQ ID NO: 17710 - DNA, 370 bp, synthetic construct; identical to SEQ ID NO: 351
  source 1..370: mol_type = other DNA

SEQ ID NO: 17711 - DNA, 412 bp, synthetic construct; identical to SEQ ID NO: 449
  source 1..412: mol_type = other DNA

SEQ ID NO: 17712 - DNA, 471 bp, synthetic construct; identical to SEQ ID NO: 12
  source 1..471: mol_type = other DNA

SEQ ID NO: 17713 - DNA, 1000 bp, synthetic construct; identical to SEQ ID NO: 1466
  source 1..1000: mol_type = other DNA

SEQ ID NO: 17714 - DNA, 562 bp, synthetic construct
  source 1..562: mol_type = other DNA
gggggcttcggccctctcaccctcttttccggtggccacacgcccgggccaccgttactccactccactccctcgggactggtttggaggaacacaacagggcttcccatccctgttcctccctcaactccacttaccctttccccttaccaacctcatccacacctcattgactgattcctttggattttgacttcagaatgcctatctgacctcccacttgcctcccccttctcggattgccggtggtgcctggcggaaaaagcacaagtgtgttgttggctaccaaactcctacccgacaaaggtgcgtgtccgcgtgctgagtaatgggataggagatgccaataacaggctcgcccatgagtagagcatggactgcggtgcatgtgacttcagtcaccaggggcatagcattgctcacccctgaatcaagtcatcgagatttctctgacctctgaagtgcactgtggttgcgtggctgggaatccacgcttgaccatgtactgcttgatagagtcgcggctggccgactcatgggttaaagtcagttgacaagacac

SEQ ID NO: 17715 - DNA, 1000 bp, synthetic construct
  source 1..1000: mol_type = other DNA
agcgtcttcgcggtgaagaacaccccaggggtaccccctttgaacgcgggatctgcgaaagtgccaacccaagtcttttcctgttcttaccctactccctccttgggtccattggaaggaccaactatatcatcccttggatgctggctaatcagaggaaagtcagcattttccggcccaggctaagagaaacatataagttagatatgattttaatcccttgacgaattcaaaacttgatgttctccctcccttgctgcttgatcacacccacctctaaaattcggccttttgtgacaagccccttggtgaaaggacctctcttgtttcgacgtggttggaattaacatcaattccgacgaaagtgctattatgcctccccgattatgtgatgttttctgccctgctgggcggagcaccctcgggttgagataccttgactcttttcttttgggaccttggttcccccggtctaagccgcttggaatacgacagggttattttctatactcttacttctacttttacgggctctatccgtaaaaagggtatgtgttgccccttccatcttcggagaatccacacggcggtctttccgtctctcgaaaagtgtggatgcaacatgccggaaacggtgaagaaagcagttttctgtggaaatttagaatggacatcgaaacagctgtagcgacctcacagtagcagcggattcccctcttggtaacaagagcctctgcggccaaaagccccgtggataagatccactgctgtgagcggtgcaaccccagcaccctggttcgatggctattctctatggaaccagagaatggttttctcaagccctccggtagagaagccaagaatgtcctgaaggtaccccgcgtgcgggatctgatcaggagaccgaatggtaatgctttacattatcactttggtttaaaaattgtcacagcttctccaaaccaagtggtcttggttttccttttatccacatggcaag

SEQ ID NO: 17716 - DNA, 1000 bp, synthetic construct; identical to SEQ ID NO: 1467
  source 1..1000: mol_type = other DNA

SEQ ID NO: 17717 - DNA, 1000 bp, synthetic construct; identical to SEQ ID NO: 1468
  source 1..1000: mol_type = other DNA

SEQ ID NO: 17718 - DNA, 1000 bp, synthetic construct
  source 1..1000: mol_type = other DNA
taggatgatgtgttccaagtcagatgccaacgacttggtaaggacgaatttgcccgcactatgatacagttcccgcccgggacaactgatgccccattaagccacaacatggctgaaaagggtgttgggtccccccggattgtgtctgttcatagtgtgtgtaacgtggtttaccatctccactaacattggactaagcatttcatctttcctccccgattgtgtactcacttggctaacgctgggtggtcgcggttgggtccttgatttactttttctcgtctaagcattccaactgtcctccccgattatgtgctcattcagttaactgctgggtggtcatgactaacatcgaggaatcttctgtctacgcttactttgagctccggtcgcttgacgcttgtagggcgatagggttatcttcctgacaacatctttattctacctccataggctctatctatggagacggagtgtggcacccgtcccttctttgggagcttcggtagtgacgccctttgtcactctcgccagccgaggcatgcctggtgccaggtagcaaagaaagcatatgcttaaggacttgactgatttagcgcaagagtttgtagtgatgtccatagtgtctgcggattccccacacggcgacgtgtgccgcggaggccaaaagccacggtgttcacagcacccctatggatgcccacagaccccagtgggcactcttgttgccggactttcaggaaattaggtataggctcttctcaaactcctggcattggactaggtaagaatgccccggaggtaccccagtactccttcgggagtctgggatctgaccgggggccccacaaacatgctttacgtgtttcgtgcggtcaaaaattgtctaactagtcccaaccttgaacaagggattgttctttcctttttattactgagactggcctatggtgacaacagagattgactgtgaatacagttattttctggtgttcatcat

SEQ ID NO: 17719 - DNA, 1000 bp, synthetic construct
  source 1..1000: mol_type = other DNA
tagcatcttcgcggcaaagaacaccccaggggtaccccctttgaacgcgggacctgcgagagtgccaacccacgtcctttcccactcttaccccgattcccacctcgggtccaatgaaacgaccaatcatttcatcccttgaatgctggctaatcagaggaaagtcagcattttccggcccaggctaagagaaacatataagttagatttgattcaaatcccttgacgaattcggaacgagacgttctccctcccttgccgcttgttcacacccatattcgattcggcccattgtgacaagccccttggtgaaagaacctctctctttccgacgtggttggaattaacatcatttccgacgaaagtgctatcatgcctccccgattatgtgatgttttctgccctgctgggcggagcattctcgggttgagaaaccttgaatcttttcctttggaaccttggttcccccggtctaagccgcttggaatatgacagggttattttcattatcttatttctacttttatgggttctatccataaaaagggtatgtgttgccccttccttcttcggagaatccacacggcggtctttccgtctctcgacaagtgtggatgcaacatgccggaaacggtgaagaaaacagttttctgtggaagttcagagtgcgcatcgaaacagctgtagcgacctcacagtagcagcggactcccctcttggcgacaagagcctctgcggccaaaagccctgtggataagatccactgctgtgagcggtgcaaccccagcaccctgattcgatgaacattctttacggaaccagagaatggttttctcaagccctccggtagagaagccaagaatgtcctgaaggtaccccgctcgcgggatctgatcaggagaccaattgaccgtgctttacactgtcactttggtttaaaaactgtcacagcttctccaaaccaagtggtcttggttttccaattttgttacatggcagt

SEQ ID NO: 17720 - DNA, 1000 bp, synthetic construct
  source 1..1000: mol_type = other DNA
tagcatcttcgcggcaaagaacaccccaggggtaccccctttgaacgcgggtcctgcgaaagtgccaacccatgtctttcctactctttcccgactcccacctcgggtctaatgaaaagaccaaatatttcatcccttgaatgctggctaatcagaggaaagtcagcattttccggcccaggctaagagaaacatataagttagatttgattaaaatcccttgacgaaatcgaaacgagatgttttccctcccttgccgcttgttcacacccacttatctgattcggccttttgtgacaagcccctcggtgaaagaacctctctcttttcgacgtggttggaattgccatcatttccgacgaaagtgctatcatgcctccccgattatgtgatgttttctgccctgctgggcggagcattctcgggttgagaaaccttgaatctttacctttggaaccttggttcccccggtctaagccgcttggaatatgacagggttattttcttaatcttacttctacttttacgggttctatccgtaaaaagggtacgtgctgccccttccttctctggagaattcacacggcggtctttccgtctctcgacaagtgtgaatgcagcatgccggaaacggtgaagaaaacagttttctgtggaagtttagagtgtacatcgaagcagctgtagcgacctcacagtagcagcggattcccctcttggcgacaagagcctctgcggccaaaagccccgtggataagatccactgctgtgagcggtgcaaccccagcaccctgattcgatggccattctctacggaaccaggaaatggttttctcaagccctccggtagagaagccaagaatgtcctgaaggtaccccgcgtgcgggatctgatcaggagaccaattggcggtgctttacactgtcactttggtttaaaaattgtcacagcttctccaaaccaagtggtcttggttttccaattttattgactggcaat

SEQ ID NO: 17721 - DNA, 1000 bp, synthetic construct; identical to SEQ ID NO: 1469
  source 1..1000: mol_type = other DNA

SEQ ID NO: 17722 - DNA, 532 bp, synthetic construct; identical to SEQ ID NO: 1444
  source 1..532: mol_type = other DNA

SEQ ID NO: 17723 - DNA, 1000 bp, synthetic construct; identical to SEQ ID NO: 1470
  source 1..1000: mol_type = other DNA

SEQ ID NO: 17724 - DNA, 1000 bp, synthetic construct
  source 1..1000: mol_type = other DNA
taaaaccgcagggctggggagccggaatcctggggtctttttcgcgggacctgcgaaagtgccaacccaagtcttttcctgttcttaccctatttcctccttgggtccatcgaaaggaccaactacatcatcccttggatgctggctaatcagaggaaagtcagcattttccggcccaggctaagagaaacatataagttagatgtgattttaatcccttgacgaattcaaaacttgatgttctccctcccttgccgcttgatcacacccacctcttaaattcggccttttgtgacaagcccctcggtgaaagaacctctcttgttttgacgtggttggaattaacatcaattccgacgaaagtgctatcatgcctccccgattgtgtgatgttttctgccctgctgggcggagcaccctcgggttgagatatcttgactcttttcttttggaaccttggttcccccggtctaagccgcttggaatacgacagggttattttctatactcttatttctacttttacgggctctatccgtaaaaagggtatgtgttgccccttccatcttcggagaatccacacggcggtctttccgtctctcaaaaagtgtggatgcaacatgccggaaacggtgaagaaaacagttttctgtggaaatttagaatggacatcgaaacagctgtagcgacctcacagtagcagcggactcccctcttggcaacaagagcctctgcggccaaaagccctgtggataagatccactgctgtgagcggtgcaaccccagcaccctggttcgatggctactctctatggaaacagagaatggttttcttaagccctccggtagagaagccaagaatgtcctgaaggtaccccgcgtgcgggatctgatcaggagaccgaatggtaatgctttacattatcactttggtttaaaaattgtcacagcttctccaaaccaagtggtcttggttttccttttttactcatatgacaag

SEQ ID NO: 17725 - DNA, 528 bp, synthetic construct; identical to SEQ ID NO: 1443
  source 1..528: mol_type = other DNA

SEQ ID NO: 17726 - DNA, 957 bp, synthetic construct; identical to SEQ ID NO: 1299
  source 1..957: mol_type = other DNA

SEQ ID NO: 17727 - DNA, 1000 bp, synthetic construct; identical to SEQ ID NO: 1471
  source 1..1000: mol_type = other DNA

SEQ ID NO: 17728 - DNA, 1000 bp, synthetic construct
  source 1..1000: mol_type = other DNA
agcgtcttcgcggtgaagaacaccccaggggtaccccctttgaacgcgggacctgcgaaagtgccaacccaagtcttttcctgttcttaccctactccctccttgggtccattgaaaggaccaactatatcatcccttggatgctggctaatcagaggaaagtcagcattttccggcccaggctaagagaaacatataagttagatatgattttaatcccttgacgaattcaaaacttgatgttctccctcccttgccgcttgatcacacccacttccaaaattcggccttttgtgacaagccccttggtgaaaggacctctcttgtttcgacgtggttggaattaacatcaattccgacgaaagtgctatcatgcctccccgattatgtgatgttttctgccctgctgggcggagcaccctcgggttgagataccttgactcttttcttttggaaccttggttcccccggtctaagccgcttggaatacgacagggttattttctatgctcttacttctacttttacgggctctatccgtaaaaagggtatgtgttgccccttccatcttcggagaatccacacggcggtctttccgtctctcgaaaagtgtggatgcaacatgccggaaacggtgaagaaaacagttttctgtggaaatttagaatggacatcgaaacagctgtagcgacctcacagtagcagcggactcccctcttggtaacaagagcctctgcggccaaaagccccgtggataagatccactgctgtgagcggtgcaaccccagcaccctggttcgatggctattctctatggaaccagaggatggttttctcaagccctccggtagagaagccaagaatgtcctgaaggtaccccgcgtgcgggatctgatcaggagaccgaatggtaatgctttacattatcactttggtttaaaaattgtcacagcttctccaaaccaagtggtcttggttttccttttatccacatgacaag

SEQ ID NO: 17729 - DNA, 493 bp, synthetic construct; identical to SEQ ID NO: 1355
  source 1..493: mol_type = other DNA

SEQ ID NO: 17730 - DNA, 710 bp, synthetic construct; identical to SEQ ID NO: 1310
  source 1..710: mol_type = other DNA

SEQ ID NO: 17731 - DNA, 1000 bp, synthetic construct; identical to SEQ ID NO: 1472
  source 1..1000: mol_type = other DNA

SEQ ID NO: 17732 - DNA, 473 bp, synthetic construct
  source 1..473: mol_type = other DNA
ccatggtgtacatcggtttccgggcaaatacaagaaccccagttttcctggcaattccttgactgggttaaagaaataaggaaccagcccctctaacgccagacgagcggctttaaacttgaacttctggcacacttttctccactacccttttccccaaactcggactgactcactggattttgaccactccccctttgtctgaccactcttttggatctccctccaacatgccggtggtgcctggcggaaaaagcacaagttgtgtgagcaacacccccacaggtcccacggaacggtctgtgcccgcagatctagtacgtgcggatccctggttgcttccactgctcgcctgtgagtagagtaggtgctgggtgtgatgcgtcttcggacgcctcgggcatagcattgctcccccgagaatcaagccatcgagatttctctggcctctgaagtcacgcctggacgcgtag

SEQ ID NO: 17733 - DNA, 1000 bp, synthetic construct
  source 1..1000: mol_type = other DNA
gcatcctcgcggtgaagaacaccccaggggtaccccctttgaacgccggacccgcgaaagtgccaacccaagtcttttcctgttcttaccctactccctccttgggtccatcggaaggaccaactatatcatcccttggatgctggctaatcagaggaaagtcagcattttccggcccaggctaagagaaacatataagttagatatgattttaatcccttgacgaattcaaaacttgatgttctccctcccttgccgcttgatcacacccaccccttgaattcggccttttgtgacaagccccttggtgaaaggacctctcttgttttgacgtggttggaattaacatcaattccgacgaaagtgctaacatgcctccccgattgtgtgatgttttctgccctgctgggcggagcaccctcgggttgagataccttgactcttttcttttggaaccttggttcccccggtctaagccgcttggaatacgacagggttattttctgtactcttatttctacttttacgggctctatccgtaaaaagggtatgtgttgccccttccatcttcggagaatccacacggcggtctttccgtctctcaaaaagtgtggatgcaacatgccggaaacggtgaagaaagcagttttctgtggaaatttagagtggacatcgaaacagctgtagcgacctcacagtagcagcggactcccctcttggtaacaagagcctctgcggccaaaagccccgtggataagatccactgctgtgagcggtgcaaccccagcaccctggttcgatgactactctctatggaaccagagaatggttttctcaagccctccggtagagaagccaagaatgtcctgaaggtaccccgcgtgcgggatctgatcaggagaccgaatggtaatgctttacattatcactttggtttaaaaattgtcacagcttctccgaaccaagtggtcttggttttcctttttatccacatggcaag

SEQ ID NO: 17734 - DNA, 712 bp, synthetic construct; identical to SEQ ID NO: 868
  source 1..712: mol_type = other DNA

SEQ ID NO: 17735 - DNA, 1000 bp, synthetic construct; identical to SEQ ID NO: 1473
  source 1..1000: mol_type = other DNA

SEQ ID NO: 17736 - DNA, 537 bp, synthetic construct; identical to SEQ ID NO: 1442
  source 1..537: mol_type = other DNA

SEQ ID NO: 17737 - DNA, 1000 bp, synthetic construct
  source 1..1000: mol_type = other DNA
cactacgttacggttcccgcccgggacaactggtaccccattaggctacaacatggctgaaaagggtattgggtccccccggattgtgtccgttcgtagtgtgtgtaacgtggtttaccatctccactaacattggactaagcatttcatctttcctccccgattgtgtactcacttggctaacgctgggtggtcgcggttgggtccttgatttactttttctcgtctaagcattccgactgtcctccccgattatgtgctcattcagttaactgctgggtggtcatgactaacatcgaggaaccttctgtccacgcttactttgagctccggtcgcttgacgcttgtagggcgatagggttatcttcctgacaacatctttattctacctccataggctctatctatggagacggagtgtggcacccgtcccttctttgggagcttcggtagtgacgccctttgtcactctcgccagccgaggcatgcctggtgccaggtagcaaagaaagcatatgtttaaggacttgactgatttagcgcaagagtttgtagcgatgtccatagtgtctgcggattccccacacggcgacgtgtgccgcggaggccaaaagccacggtgttcacagcacccctatggatgcccacagaccccagtgggcactcttgttgccggactttcaggaaattaggcataggctcttctcaaactcctggcattggactaggtaagaatgccccggaggtaccccagtactccttcgggagtctgggatctgaccgggggccccacaaacatgctttacgtgtttcgtgcggtcaaaaattgtctaactagtcccaaccttgaacaagggattgttctttcctttttattactgagactggcctatggtgacaacagagattgactgtgaatacagttattttctggtgttcatcatttggtttttctccgtgctcttttacctttgtggtatttgttctttagataggcaaa

SEQ ID NO: 17738 - DNA, 977 bp, synthetic construct; identical to SEQ ID NO: 1453
  source 1..977: mol_type = other DNA

SEQ ID NO: 17739 - DNA, 428 bp, synthetic construct
  source 1..428: mol_type = other DNA
taccctctcctctaaccaaccctatccacaccccactgactgactcctttggattttgacctcagaatgcctacttgacctcccactagcctctccctttccggattgccggtggtgcctggcggaaaaagcacaagtgtgttgatggctaccaaactcctacccgacaaaggtgcgtgtccgcgtgctgagtaatgggataggagatgccattgacaggctcgcccatgagtagagcatggactgcggtgcatgtgacttcggtcaccaggggcatagcattgctcacccctgaatcaagtcatcgagatttctctgacctctgaagtgcactgtggttgcgtggctgggaatccacgcttgaccatgtactgcttgatagagtcgcggctggccgactcatgggttaaagtcagttgataagacac

SEQ ID NO: 17740 - DNA, 725 bp, synthetic construct; identical to SEQ ID NO: 909
  source 1..725: mol_type = other DNA

SEQ ID NO: 17741 - DNA, 673 bp, synthetic construct; identical to SEQ ID NO: 815
  source 1..673: mol_type = other DNA

SEQ ID NO: 17742 - DNA, 1000 bp, synthetic construct; identical to SEQ ID NO: 140
  source 1..1000: mol_type = other DNA

SEQ ID NO: 17743 - DNA, 944 bp, synthetic construct; identical to SEQ ID NO: 1298
  source 1..944: mol_type = other DNA

SEQ ID NO: 17744 - DNA, 1000 bp, synthetic construct; identical to SEQ ID NO: 1474
  source 1..1000: mol_type = other DNA

SEQ ID NO: 17745 - DNA, 951 bp, synthetic construct
  source 1..951: mol_type = other DNA
agtgccatccccccgtctctcctattccaactacccgaccctaacccagggtccaggaaaacggaacaatacaagtcatcccctgaatgctggctaaacagaggaaaggcagcattttccggcccaggctaaaagaaacacaataagttagaatctaaattaatcaccttgacgaattcgcaaagataagtcctccctcccttgccgctcgatcacacccagaactaataattcggcccctcgtgacgagccccttggtgaaaggacctctttcaatgcgacgtggttggagattaaaaccgactccgacgaaagtgctatcatgcctccccgattatgtgatgttttctgccctgctgggcggagcattctcgggttgatataccttgaatccttcatccttggacctcccggtcccccggtctaagccacttggaatatgacagggttattttccaaaattcttatttccactttcatgagttcttttcatgaaaagggtatgtgctgccccttccttcttggagaatccgcgtggcggtctttccgtctctcgaaaaacgtggatgcagcatgctggaaatggtgaagaaagtagttctttgtggaaacttagaacagacatcgaaacagctgtagcgacctcacagtagcagcggaaccccctcctggcgacaggagcctctgcggccaaaagccccgtggataagatccactgctgtgagcggtgcaaccccagcaccctggttcgatggttgttctctgtggaatcagagaatggctttcctaagccctccagtagagaagccaagaatgtcctgaaggtaccccgcgtgcgggatctgatcaggagaccaattgccagtgctctacactggcactttggtttaaaaattgtcacagcttctccaaaccaagtggtcttggttttctacttttaataattggttc

SEQ ID NO: 17746 - DNA, 509 bp, synthetic construct; identical to SEQ ID NO: 1447
  source 1..509: mol_type = other DNA

SEQ ID NO: 17747 - DNA, 509 bp, synthetic construct; identical to SEQ ID NO: 1448
  source 1..509: mol_type = other DNA

SEQ ID NO: 17748 - DNA, 510 bp, synthetic construct; identical to SEQ ID NO: 1445
  source 1..510: mol_type = other DNA

SEQ ID NO: 17749 - DNA, 510 bp, synthetic construct; identical to SEQ ID NO: 1450
  source 1..510: mol_type = other DNA

SEQ ID NO: 17750 - DNA, 708 bp, synthetic construct; identical to SEQ ID NO: 1365
  source 1..708: mol_type = other DNA

SEQ ID NO: 17751 - DNA, 718 bp, synthetic construct; identical to SEQ ID NO: 1367
  source 1..718: mol_type = other DNA

SEQ ID NO: 17752 - DNA, 1000 bp, synthetic construct; identical to SEQ ID NO: 1475
  source 1..1000: mol_type = other DNA

SEQ ID NO: 17753 - DNA, 962 bp, synthetic construct
  source 1..962: mol_type = other DNA
tttgaacgcgggacctgcgaaagtgccaacccacgtctttcccactcctaacccgactcccacctcgggtccaatgaaaggaccaaatatatcatcccttgaatgctggctaatcagaggaaagtcagcattttccggcccaggctaagagaaacacataagttagatttgactcaaatcccttgacgaattcgaaacgagatgttctccctcccttgccgcttgctcacacccacacatttaattcggcctcttgtgacaagccccttggtgaaagaacctctctctttttgacgtggttggaattaacatcatttccgacgaaagtgctatcatgcctccccgattgtgtgatgttttctgccctgctgggcggagcattctcgggttgagaaaccttgaatcttttcctttggaaccttggttcccccggtctaagccgcttggaatatgacagggttattttccttatcttacttctactttcacgggttctatccgtgaaaagggtacgtgttgccccttccttcttcggagaattcacacggcggtctttccgtctctcgacaggtgtgaatgcaacatgccggaaacggtgaagaaaacagttttctgcggaagtcttgagtgcgcatcgaaacagctgtagcgacctcacagtagcagcggactcccctcttggtgacaagagcctctgcggccaaaagccccgtggataagatccactgctgtgagcggtgcaaccccagcaccctgattcgatgaacattctttacggaaccagaagatggttttcttaagccctccggtagagaagccaagaatgtcctgaaggtaccccgcgtgcgggatctgatcaggagaccaattgactgtgctttacactgtcactttggtttaaaaactgtcacagcttctccaaaccaagtggtcttggttttccaattttactaactggcaat

SEQ ID NO: 17754 - DNA, 929 bp, synthetic construct
  source 1..929: mol_type = other DNA
accctaacccaggttcctcggtataggaacaccactttactcatcccctggatgctgactaatcagaggaacgtcagcattttccggcccaggctaagagaagtagataagttagaatccaaattgatttatcatccccttgacgaattcgcgttggaaaagcacctctcacttgccgctcttcacacccatcattttaattcggcctctgtgttgagccccttgttgaagtgtttctctccatcgcgacgtggttggagatctaagtcaaccgactccgacgaaactaccatcatgtctccccgattatgtgatgctttctgccctgctgggtggagtatcctcgggttgagaaatccttcttcctttcaccttggaccccggtcccccggtctaagccgcttggaataagacagggttattttcacctctttttcttctactccacagtgctctatactgtggaagggtatgtgttgccccttccttcttggagaacgtgcgcggcggtctttccgtctctcgacaagcgcgcgtgcaacatgcagagtaacgcgaagaaagcagttcttggactagctttagtatctgcaagaagacagctgtagcgaccacacaaaggcagcggaacccccctcctggtaacaggagcctctgcggccaaaagccacgtggataagatccacctttgtgtgcggtgcaaccccagcaccctggtttcttgaagatactctagtgaacccttgaatggcaatctcaagcgcctctgtaggaaagccaagaatgtccaggaggtaccccttcctcgcggaagggatctgacctggagacacgtcgcaagtgctttacacctgtgctcgtgtttaaaaattgtcacagctttcccaaaccaagtggtcttggttttcctttttattactattgacact

SEQ ID NO: 17755 - DNA, 1000 bp, synthetic construct
  source 1..1000: mol_type = other DNA
gcgtcttcgcggtgaagaacaccccaggggtaccccctttgaacgcgggacctgcgaaagtgccaacccaagtctttccctactcttaccctattccctccttgggtccattggaaggaccaactatatcatcccttggatgctggctaatcagaggaaagtcagcattttccggcccaggctaagagaaacatataagttagatatgattttaatcccttgacgaattcgaaacttgatgttctccctcccttgccgcttgatcacacccatctcttaaattcggccttttgtgacaagccccttggtgaaaggacctctctcgtttcgacgtggttggaattaacatcaattccgacgaaagtgctatcatgcctccccgattgtgtgatgttttctgtcctgctgggcggagcaccctcgggttgagataccttgactcttttcttttggaaccttggttcccccggtctaaaccgcttggaatacgacagggttattttctatactcttatttctacttttacgggctctatccgtaaaaagggtatgtgttgccccttccatcttcggagaatccacacggcggtctttccgtctcttgaaaagtgtggatgcaacatgccggaaacggtgaagaaagcagttttctgtggaaatttagaatggacatcgaaacagctgtagcgacctcacagtagcagcggaatcccctcttggtaacaagagcctctgcggccaaaagccccgtggataagatccactgctgtgagcggtgcaaccccagcaccctggttcgatgactattctctatggaaccagagaatggttttctcaagccctccggtagagaagccaagaatgtcctgaaggtaccccgcgtgcgggatctgatcaggagaccgaatggtaatgctttacattatcactttggtttaaaaattgtcacagcttctccaaaccaagtggtcttggttttcctttttattcatacggcaag

SEQ ID NO: 17756 - DNA, 529 bp, synthetic construct; identical to SEQ ID NO: 557
  source 1..529: mol_type = other DNA

SEQ ID NO: 17757 - DNA, 776 bp, synthetic construct; identical to SEQ ID NO: 1238
  source 1..776: mol_type = other DNA

SEQ ID NO: 17758 - DNA, 954 bp, synthetic construct
  source 1..954: mol_type = other DNA
gggtcctgcgaaagtgccaacccatgtcttttcccaccctttccccgattcccgcctcgggtctaatgaaaagaccaaatatcttatcccttgaatgctggctaatcagaggaaagtcagcattttccggcccaggctaagagaaacatataagttagatttgatttaaatcccttgacgaattcgaaacgagatgttctccctcccttgccgcttgttcacacccacttatttaattcggccttttgtgacaagcccctcggtgaaagaacctctctcttttcgacgtggttggaattgccatcatttccgacgaaagtgctatcatgcctccccgattatgtgatgttttctgccctgctgggcggagcattctcgggttgagaaaccttgaatctttttctttggaaccttggttcccccggtctaagccgcttggaatatgacagggttattttcttgatcttatttctacttttgcgggttctatccgtaaaaagggtacgtgctgccccttccttctctggagaattcacacggcggtctttccgtctctcaacaagtgtgaatgcagcatgccggaaacggtgaagaaaacagttttctgtggaaatttagagtgcacatcgaaacagctgtagcgacctcacagtagcagcggactcccctcttggcgacaagagcctctgcggccaaaagccccgtggataagatccactgctgtgagcggtgcaaccccagcaccctggttcgatgatcattctctatggaaccagaaaatggttttctcaagccctccggtagagaagccaagaatgtcctgaaggtaccccgcgtgcgggatctgatcaggagaccaattggcggtgctttacactgtcactttggtttaaaaattgtcacagcttctccaaaccaagtggtcttggttttccaattttgttgaatggcaat

SEQ ID NO: 17759 - DNA, 546 bp, synthetic construct; identical to SEQ ID NO: 1435
  source 1..546: mol_type = other DNA

SEQ ID NO: 17760 - DNA, 955 bp, synthetic construct
  source 1..955: mol_type = other DNA
acctgcgacagtgccaacccacatctcttcccactattattattccggttcccgccttaggtccattgaaaagaccaaacatgtcatcccttggatgctggctaatcagaggaaagtcagcattttccggcccaggctaagagaaacatataagttagaaatgattctaatcccttgacgaattcggaacgagaagttctccctcccttgccgcttgttcacacccatcatttaattcggccctttgtgacaagcccctcggtgaaaggacctctctctttccgacgtggttggaattaacatcttttccgacgaaagtgctattatgcctccccgattgtgtgatgctttctgccctgctgggcggagcgtcctcgggttgagaaaccttgaatcttttcctttggagccttggctcccccggtctaagccgcttggaatatgacagggttattttccaaactctttatttctactttcatgggttctatccatgaaaagggtatgtgttgccccttccttctttggagaatctgcgcggcggtctttccgtctctcaacaggcgtggatgcaacatgccggaaacggtgaagaaaacagttttctgtggaaatttagagtggacatcgaaacagctgtagcgacctcacagtagcagcggattcccctcttggcgacaagagcctctgcggccaaaagccccgtggataagatccactgctgtgagcggtgcaaccccagcaccctggttcgatggccattctctatggaaccagaaaatggttttctcaagccctccggtagagaagccaagaatgtcctgaaggtaccccgcgcgcgggatctgatcaggagaccaattggcagtgctttacgctgccactttggtttaaaaactgtcacagcttctccaaaccaagtggtcttggttttccaattttgttgactgacaat

SEQ ID NO: 17761 - DNA, 699 bp, synthetic construct; identical to SEQ ID NO: 1359
  source 1..699: mol_type = other DNA

SEQ ID NO: 17762 - DNA, 471 bp, synthetic construct
  source 1..471: mol_type = other DNA
aacacaacagggcttcccatccctgtttacccttttctccacttacccttccctttaaccaatcctatccacaccccactgactgattcctttggattttgacctcagaatgcctacttgacctcccacttgccactccctttccggattgccggtggtgcctggcggaaaaagcacaagtgtgttgatggctaccaaactcctacccgacaaaggtgcgtgtccgcgtgctgagtaatgggataggagatgccattgacaggctcgcccatgagtagagcatggactgcggtgcatgtgacttcggtcaccaggggcatagcattgctcacccctgaatcaagtcatcgagatttctctgacctctgaagtgcactgtggttgcgtggctgggaatccacgcttgaccatgtactgcttgatagagtcgcggctggccgactcatgggttaaagtcagttgataagacac

SEQ ID NO: 17763 - DNA, 891 bp, synthetic construct
  source 1..891: mol_type = other DNA
tttttacttctccctgatgctgactaatcagaggaaagttagcattttccggcccaggctaagagaagtagataagttagactcaaattgatacaacatccccttgacgaattcgcaacgaaaagtcgtccctcacttgccgcttgttcacacccatgaactcacaattcggccccctgtgacaagccccttgttgaaacgacctcttttaatgcgacgtggttggagatttgtcatcctatgactccgacgaaactaccatcatgcctccccgattatgtgatgctatccgccctgctgggtggagcattctcgggttgagtaacctacatcctttctccttggactccggtcccccggtctaagccgcttggaataagacagggttattttccaatcatctcctttctactcttaagtgttctatacttaagaagggtatgtgttgccccttccttcttggagaacgtgcgcggcggtctttccgtctctcgaaaagcgtgcgtgcaacatgcagagacctgtgaagaaagcagtttctgaactaaccttagtgcagacaagaaatcggctgtagcgacctcacactagcagcggacacccctcctggtaacaggagcccctgcggccaaaagccacgtggataagatccactggtgtgagcggtgcaaccccagcaccctggtttcttggttgtactctggtgaacccagagatggcaatcttaagcaactctgtagagaagccaagaatgtccggaaggtaccccgcttcagcgggatctgatccggagactcatctcatctgctatacagttgagcttgggtttaaaaactgtcacagcttctccaaaccaagtggtcttggttttccctttttacttacgatgtc

SEQ ID NO: 17764 - DNA, 734 bp, synthetic construct; identical to SEQ ID NO: 940
  source 1..734: mol_type = other DNA

SEQ ID NO: 17765 - DNA, 904 bp, synthetic construct
  source 1..904: mol_type = other DNA
gatccttttcagggtacctgatgcacatgtctacaaactgccaatcagctatgacaagtggtactagtgctctctgcccatggtcaaatgctacactcttgctatccccactaggggtactagctcacacacaccccaggattgtgttaccacaatgcacccctgggacggctacactctctccggaaagagggacggagggcctgggccccccggccccctttccgcgcgcccgacagcgcgttacgcggctacgactatggcaaacatagaagtcggctgcacagtcgggacttccccttgtgtgtcgtcccgtatcctcgtgtgtcacgagacccctacccctagactcttttgttagggttaagtccatgtgtatgcctagcttttaggtctccaaaacagcacgtggccatgttatgtacatctggtctagcagctactgtaccagtcacttgtgaaactcttgtgaacaggactgcacgtccgtttattgctagtattcccgtcccaggggtgcattgtggtaacacaatcctggggtgtgtgtgagctagtacccctagtggggatagcaagagtgtagcatttgaccatgggcagagagcactagtaccacttgtcatagctgattggcagtctgtagacatgtgcatcaggtaccctgaaaaggatctgagatgtagctaattagtccctgcagactgtcgaagttttcttccctattttatttattagaagatagtgttggtagtagttggtttatgtgcctactattagatttactcttagttttattgattttattggtgatagtaacactatacctatctcttcttgtgtttattgtgtcattggaagattttattttagattttgtcaataaatatcacttgtatacaag

SEQ ID NO: 17766 - DNA, 557 bp, synthetic construct; identical to SEQ ID NO: 601
  source 1..557: mol_type = other DNA

SEQ ID NO: 17767 - DNA, 675 bp, synthetic construct
  source 1..675: mol_type = other DNA
tgcctgagtaggattgtgaatttaggtatgagagggttagccaacccattctgaaccataatagatacgtcaatctgaatccatctaaatctatctcttaggcagtggtgctgaaatattgcaagctactagggatagacgtgatctgattcaagaacctatctaatgtggtgatgagaaggctaggtttatccatagtaatcccttgttctgaacaggcaatgcacatgtgcctgagtaggattgtgaatttaggtatgagagggttagccaacccattctgaaccataatagatacgtcaatctgaatccatctaaatctatctcttaggcagtggtgctgaaatattgcaagctactagggatagacgtgatctgattcaagaacctatctaatgtggtgatgagaaggctaggtttatccatagtaatcccttgttctgaacaggcaatgcacatgctctagtaggatctcgggctctgcgattggctctaaaccgaccaatccaggtagaggcactaagtgtaggacttgccaaaatgtattacatgctggtaccgactcactagtctggaaactccacactgaaagtgactggggggggccccatcacatttgtgctactgcttgatagagttgcggctggtcaacttggattggtataaccagttgaa

SEQ ID NO: 17768 - DNA, 420 bp, synthetic construct; identical to SEQ ID NO: 460
  source 1..420: mol_type = other DNA

SEQ ID NO: 17769 - DNA, 834 bp, synthetic construct
  source 1..834: mol_type = other DNA
cattttccggcccaggctaagagaaacatataagttagatttgatttaaatcccttgacgaattcgaaacgagatgttctccctcccttgccgcttgttcacacccacttatttaattcggccttttgtgacaagcccctcggtgaaagaacctctctcttttcgacgtggttggaattgccatcatttccgacgaaagtgctatcatgcctccccgattatgtgatgttttctgccctgctgggcggagcattctcgggttgagaaaccttgaatctttttctttggaaccttggttcccccggtctaagccgcttggaatatgacagggttattttcttgatcttatttctacttttgcgggttctatccgtaaaaagggtacgtgctgccccttccttctctggagaattcacacggcggtctttccgtctctcaacaagtgtgaatgcagcatgccggaaacggtgaagaaaacagttttctgtggaaatttagagtgcacatcgaaacagctgtagcgacctcacagtagcagcggactcccctcttggcgacaagagcctctgcggccaaaagccccgtggataagatccactgctgtgagcggtgcaaccccagcaccctggttcgatgatcattctctatggaaccagaaaatggttttctcaagccctccggtagagaagccaagaatgtcctgaaggtaccccgcgtgcgggatctgatcaggagaccaattggcggtgctttacactgtcactttggtttaaaaattgtcacagcttctccaaaccaagtggtcttggttttccaattttgttgaatggcaat

SEQ ID NO: 17770 - DNA, 859 bp, synthetic construct
  source 1..859: mol_type = other DNA
ctggctaatcagaggaaagtcagcattttccggcccaggctaagagaaacatataagttagatttgattcaaatcccttgacgaattcggaacgagacgttctccctcccttgccacttgttcacacccatacttttgattcggccttttgtgacaagtcccttggtgaaagaacctctctctttccgacgtggttggaattaacatcatttccgacgaaagtgctatcatgcctccccgattgtgtgatgttttctgccctgctgggcggagcattctcgggttgagaaaccttgaatcttttcctttggaaccctggttcccccggtctaagccgcttggaatacgacagggttattttccttattcttacttctacttttatgggttctatccataaaaagggtatgtgctgccccttccttctttggagaattcacacggcggtctttccgtctctcgacaagtgtgaatgcagcatgccggaaacggtgaagaaaacagttttctgtggaagtttagagtgcacatcgaaacagctgtagcgacctcacagtagcagcggaaccccctcttggcgacaagagcctctgcggccaaaagccccgtggataagatccactgctgtgagcggtgcaaccccagcaccctgattcgatggtcattctctacggaaccagaaaatggttttctcaagccctccggtagagaagccaagaatgtcctgaaggtaccccgcgcgcgggatctgatcaggagaccaattgacagtgctgtacgctgtcactttggtttaaaaactgtcacagcttctccaaaccaagtggtcttggttttccaaattttattgaatggcaat

SEQ ID NO: 17771 - DNA, 859 bp, synthetic construct
  source 1..859: mol_type = other DNA
ctggctaatcagaggaaagtcagcattttccggcccaggctaagagaaacatataagttagatttgattcaaatcccttgacgaattcggaacgagatgttctccctcccttgccacttgttcacacccacacttttgattcggccttttgtgacaagtcccttggtgaaagaacctctctctttccgacgtggttggaattaacatcatttccgacgaaagtgctatcatgcctccccgattgtgtgatgttttctgccctgctgggcggagcattctcgggttgagaaaccttgaatcttttcctttggaaccctggttcccccggtctaagccgcttggaatacgacagggttattttccttattcttacttctacttttatgggttctatccataaaaagggtatgtgctgccccttccttctttggagaattcacacggcggtctttccgtctctcgacaagtgtgaatgcagcatgccggaaacggtgaagaaaacagttttctgtggaagtttagagtgcacatcgaaacagctgtagcgacctcacagtagcagcggaaccccctcttggcgacaagagcctctgcggccaaaagccccgtggataagatccactgctgtgagcggtgcaaccccagcaccctgattcgatggtcattctctacggaaccagaaaatggttttctcaagccctccggtagagaagccaagaatgtcctgaaggtaccccgcgcgcgggatctgatcaggagaccaattgacagtgctgtacgctgtcactttggtttaaaaactgtcacagcttctccaaaccaagtggtcttggttttctaatttttattgaatggcaat

SEQ ID NO: 17772 - DNA, 857 bp, synthetic construct
  source 1..857: mol_type = other DNA
ctggctaatcagaggaaagtcagcattttccggcccaggctaagagaaacatataagttagatttgattcaaatcccttgacgaattcggaacgagatgttctccctcccttgccacttgttcacacccacacttttaattcggccctttgtgcaagtcccttggtgaaagaacctctctcttccgacgtggttggaattaacatcatttccgacgaaagtgctatcatgcctccccgattgtgtgatgttttctgccctgctgggcggagcattctcgggttgagaaaccttgaatcttttcctttggaaccctggttcccccggtctaagccgcttggaatacgacagggttattttccttattcttacttctacttttatgggttctatccataaaaagggtatgtgctgccccttccttctttggagaattcacacggcggtctttccgtctctcgacaagtgtgaatgcagcatgccggaaacggtgaagaaaacagttttctgtggaagtttagagtgcacatcgaaacagctgtagcgacctcacagtagcagcggaaccccctcttggcgacaagagcctctgcggccaaaagccccgtggataagatccactgctgtgagcggtgcaaccccagcaccctgattcgatggtcattctctacggaaccagaaaatggttttctcaagccctccggtagagaagccaagaatgtcctgaaggtaccccgcgcgcgggatctgatcaggagaccaattgacagtgctgtacgctgtcactttggtttaaaaactgtcacagcttctccaaaccaagtggtcttggttttctaatttttattgaatggcaat

SEQ ID NO: 17773 - DNA, 842 bp, synthetic construct
  source 1..842: mol_type = other DNA
gattcagcattttccggcccaggctaagagaaacatataagttagatatgattttaatcccttgacgaattcaaaacttgatgttctccctcccttgccgcttgatcacacccatctcttaaattcggccttttgtgacaagccccttagtgaaaggacctctcttgttttgacgtggttggaattaacatcaattccgacgaaagtgctatcatgcctccccgattgtgtgatgttttctgccctgctgggcggagcatcctcgggttgagataccttgactcttttcttttggaaccttggttcccccggtctaagccgcttggaatacgacagggttattttctatactcttatttctacttttacgggttctatccgtaaaaagaggtatgtgttgccccttccatcttcggagaatctacacggcggtctttccgtctctcaaaaagtgtggatgcaacatgccggaaacggtgaagaaagcagttctctgtggaaatttagagtggacatcgaaacagctgtagcgacctcacaatagcagcggactcccctcttggtaacaagagcctctgcggccaaaagccccgtggataagatccactgctgtgagcggtgcaaccccagcaccctggttcgatggctattctctatggaaccagaaaatggttttctcaagccctccggtagagaagccaagaatgtcctgaaggtaccccgcgtgcgggatctgatcaggagaccgaatgataatgctttacattatcactttggtttaaaaattgtcacagcttctccaaaccaagtggtcttggttttccttttattcacatggcaag

SEQ ID NO: 17774 - DNA, 751 bp, synthetic construct; identical to SEQ ID NO: 126
  source 1..751: mol_type = other DNA

SEQ ID NO: 17775 - DNA, 720 bp, synthetic construct; identical to SEQ ID NO: 1361
  source 1..720: mol_type = other DNA

SEQ ID NO: 17776 - DNA, 731 bp, synthetic construct; identical to SEQ ID NO: 931
  source 1..731: mol_type = other DNA

SEQ ID NO: 17777 - DNA, 724 bp, synthetic construct; identical to SEQ ID NO: 1362
  source 1..724: mol_type = other DNA

SEQ ID NO: 17778 - DNA, 839 bp, synthetic construct
  source 1..839: mol_type = other DNA
cagcattttccggcccaggctaagagaaacatataagttagatttgattcaaatcccttgacgaattcggagcgagacgttctccctcccttgccacttgctcacacccacacttttgattcggccttttgtgacaagtcccttggtgaaagaacctctctctttccgacgtggttggaattaacatcatttccgacgaaagtgctatcatgcctccccgattgtgtgatgttttctgccctgctgggcggagcattctcgggttgagaaaccttgaatcttttcctttggaaccctggttcccccggtctaagccgcttggaatacgacagggttattttccttattcttacttctacttttatgggttctatccataaaaagggtatgtgctgccccttccttctttggagaattcacacggcggtctttccgtctctcgacaagtgtgaatgcagcatgccggaaacggtgaagaaaacagttttctgtggaagtttagagtgcacatcgaaacagctgtagcgacctcacagtagcagcggaaccccctcttggcgacaagagcctctgcggccaaaagccccgtggataagatccactgctgtgagcggtgcaaccccagcaccctgattcgatggtcattctctacggaaccagaaaatggttttctcaagccctccggtagagaagccaagaatgtcctgaaggtaccccgcgcgcgggatctgatcaggagaccaattgacagtgctgtacgctgtcactttggtttaaaaactgtcacagcttctccaaaccaagtggtcttggttttccaatttttattgaatggcaat

SEQ ID NO: 17779 - DNA, 679 bp, synthetic construct; identical to SEQ ID NO: 89
  source 1..679: mol_type = other DNA

SEQ ID NO: 17780 - DNA, 619 bp, synthetic construct; identical to SEQ ID NO: 715
  source 1..619: mol_type = other DNA

SEQ ID NO: 17781 - DNA, 1000 bp, synthetic construct; identical to SEQ ID NO: 141
  source 1..1000: mol_type = other DNA

SEQ ID NO: 17782 - DNA, 468 bp, synthetic construct; identical to SEQ ID NO: 503
  source 1..468: mol_type = other DNA

SEQ ID NO: 17783 - DNA, 775 bp, synthetic construct; identical to SEQ ID NO: 1235
  source 1..775: mol_type = other DNA

SEQ ID NO: 17784 - DNA, 773 bp, synthetic construct
  source 1..773: mol_type = other DNA
ttgaaaggtggtcggagggtttctcaagaccctccgacgcctttcagcgcccggtctacaggggtgtaaatactgtgggcccgtttgccgtgggctacggctgcctgtgtctcaggggtaagtactggggccgcgttgaccgtgcggtacggttatgcttttagattaggatgtccgtctgtccggcactctcttttgcttaaaatggccttaaatccatgggaggcgtaaccatgggccctttgttacctagacatgattgcattgggggccgtccttggggcttaggccccagccatttctcttgactcgtctaagagtttacttcatccttttctttactttattttccaggctctcagcatgccgacggctctgaccactgcgcccggtggggttaactgcatgattagcatgcagctgtaggagttaaaagtgctgacaggccaattctgacgtaagtccactctatattaacttgatcaagtaaggttgattgatctttgtgagagggtaggctacgggtgaaaccctctaggttaatactcatattgagagatacctccagaaggtgaaggttggcggatattggtgagttcttttaggacaaaaacctttcaacgcctgtgggcccacctcactggcacaatgctttcatccccaattgtgatgggtagtttggactgaaatcaggagtaacctgccctacgagtttaggggtagttcaggggtatttaggcttccacatttgatagagtttatgagagtgagcc

SEQ ID NO: 17785 - DNA, 806 bp, synthetic construct
  source 1..806: mol_type = other DNA
tatagttagaaacgattctaatcccttgacgaattcggaacgagaagttctccctcccttgccgcttgttcacacccatcatttaattcggcatcttgtgacaagcccctcggtgaaagaacctctctctttccgacgtggttggaattaacatcctttccgacgaaaatgctatcatgcctccccgattatgtgatgctttctgccctgctgggcggagcgtcctcgggttgagagaccttgactcttttccattggaaccttggttcccccggtctaaaccgcttggaatatgacagggttattttctaaattctttacttctactttcatgggttctatccatgaaaagggtatgtgttgccccttccttctttggagaatctgcgcggcggtctttccgtctctcgacaagcgtggatgcaacatgccggaaacggtgaagaaaacagttttctgtggaaatttagattgtacatcgaaacagctgtagcgacctcacagtagcagcggactcccctcttggcgacaagagcctctgcggccaaaagccccgtggataagatccactgctgtgagcggtgcaaccccagcaccctgattcgatggacattctctatggaaccagaaaatggttttctcaagccttccggtagagaagccaagaatgtcctgaaggtaccccgcgtgcgggatctgatcaggagaccaattggcagtgctttacgctgtcactttggtttaaaaactgtcacagcttctccaaaccaagtggtcttggttttccaattttattgactgacaat

SEQ ID NO: 17786 - DNA, 1000 bp, synthetic construct; identical to SEQ ID NO: 142
  source 1..1000: mol_type = other DNA

SEQ ID NO: 17787 - DNA, 317 bp, synthetic construct
  source 1..317: mol_type = other DNA
cggagcatgttggccgtgggaacacctccttggtaacaaggacccacggggccgaaagccatgtcctaacggacccaacatgtgtgcaaccccagcacggcagctttactgtgaaacccacttcaaggtgacattgatactggtactcaaacactggtgacaggctaaggatgcccttcaggtaccccgaggtaacaagcgacactcgggatctgagaaggggactgggacttctttaaagtgcccagtttaaaaagcttctacgcctgaataggtgaccggaggccggcacctttccttttataaccactgaacac

SEQ ID NO: 17788 - DNA, 624 bp, synthetic construct; identical to SEQ ID NO: 736
  source 1..624: mol_type = other DNA

SEQ ID NO: 17789 - DNA, 624 bp, synthetic construct; identical to SEQ ID NO: 1368
  source 1..624: mol_type = other DNA

SEQ ID NO: 17790 - DNA, 683 bp, synthetic construct; identical to SEQ ID NO: 821
  source 1..683: mol_type = other DNA

SEQ ID NO: 17791 - DNA, 1000 bp, synthetic construct; identical to SEQ ID NO: 1476
  source 1..1000: mol_type = other DNA

SEQ ID NO: 17792 - DNA, 918 bp, synthetic construct
  source 1..918: mol_type = other DNA
ttgaaagggggttgaatgtttgactgtgcagcagggaggccatgggtaccccacttttaggagatgaccaaacgcagtaaccgcaagcaattgcctgtagcgtcagtaaaacgcaatacacaagatttgagcctgtagcgtcagtaaaacgctgcaaccacaagctattgactgtagcgtcagtaaaacgcaaacattcttgtggcgctcgcgtagcgctcaagtgcagagcttcccggctttaagggttactgctcgtaatgagagcacatgacattttgccaagatttcctggcaattgtcacgggagagaggagcccgttctcgggcacttttctctcaaacaatgttggcgcgcctcggcgcgccccccctttttcagccccctgtcattgactggtcgaaggcgctcgcaataagactggtcgttgcttggcttttctattgtttcaggctttagcgcgcccttgcgcggcgggccgtcaagcccgtgtgctgtacagcaccaggtaaccggacagcggcttgctggattttcccggtgccattgctctggatggtgtcaccaagctggcagatgcggagtgaaccttacgaagcgacacacctgtggtagcgctgcccagaagggagcggagctcccccgccgcgaggcggtcctctctggccaaaagcccagcgttaatagcgccttctgggatgcaggaaccccacctgccaggtgtgaagtggactaagtggatctccaatttggcctgttctgaactacaccatctactgctgtgaagaatgtcctgaaggcaagctggttacagccctgatcaggagccccgctcgtgactctcgatcgacgcggggtcaaaaactgtctaagcagcagcagaaacgcgggagcgtttctttttcctcatttgtttc

SEQ ID NO: 17793 - DNA, 1000 bp, synthetic construct; identical to SEQ ID NO: 143
  source 1..1000: mol_type = other DNA

SEQ ID NO: 17794 - DNA, 911 bp, synthetic construct
  source 1..911: mol_type = other DNA
ttgaaagggggttgaatgtttgactgtgcagcagggaggccatgggtaccccacttttgaaagttgaacctgtagcgtcagtaaaacgcagaaaccaaacgcaattgcctgtagcgtcagtaaaacgctgtaactgcatgaattgcacctgtagcgtcagtaaaacgcggaaactgcaagcaaatacctgtagcgtcagtaaaacgcgcacatttacatacagagcttcccggctttaagggttactgctcgtaatgagagcacatgacaatttgtcgagactacggcaactgtcacgggagagaggagcccgttttcgggcacttgtctcctaaacaatattggcgcgcatttgcgcgcccccccccatttcagccccctgtcattgactggtcgaaggcgttcgcaataagactggtcgtcacttggctgttctatcgtttcaggctttagcgcgccctcgcgcggcgggccgtcaagcccgtgcgctgtatagcgccaggtaaccggacagcggcttgctggattttcccggtgccattgctctggatggtgtcaccaagctgacaaatgcggactgaacctcacaaagcgacacacctgtggtagcgctgcccaaaagggagcggaactcccccgccgcgaggcggtcctctctggccaaaagcccagcgttaatagcgccttttgggatgcaggagccccacctgccaggtgtgaagtggagtgagtggatctccaatttggtctgttctgaactacaccatctactgctgtgaagaatgccctggaggcaagctggttacagccctgaccaggggccctgcccgtgactctcgatcggcgcagggtcaaaaattgtctaagcagcagcaggaacgcgggagcgtttcttttccctttgtatcgac

SEQ ID NO: 17795 - DNA, 501 bp, synthetic construct
  source 1..501: mol_type = other DNA
gtttctgagcactggtaagagcttagacaaacgtttttaaaatttattttctctgcaacttttgttcgtgtttatttttatttgttaattttgtgcctaaacatttgttgcgaagtatttgattcattagcaatatttattattgtttatttagatggcattcaaagtggtgggaatatcgaacccaagcgtcgtatgttatcttcttgaacaattttgaatttttgcgacatgatcattgaaaagaataggtgtttaagaactcaaggaatgttaacaatggtgggtgacaggtgtccccatataatttgttaacatgatttggactggttatctagtaagaagaaccatcgaacgcacgagcgagcattgcttgcggggcagttaccctgcgtcgatgtaagtgtgtaccggggggtgcacatgttgattctttatggcctgatagggtgcgtcattcgcgcctagataattagtataatgcgaatggaataaatttac

SEQ ID NO: 17796 - DNA, 610 bp, synthetic construct; identical to SEQ ID NO: 45
  source 1..610: mol_type = other DNA

SEQ ID NO: 17797 - DNA, 410 bp, synthetic construct; identical to SEQ ID NO: 446
  source 1..410: mol_type = other DNA

SEQ ID NO: 17798 - DNA, 718 bp, synthetic construct
  source 1..718: mol_type = other DNA
agggacggagggcctgggccccccggccccctttccgcgcgcccgacagcgcgttacgcggctacgactatggtaaacatagaagtcggctgcacagtcgggacttccctttgtgtgttgtcccgtatcctcgtgtgtcacgagacccctacccctagactcttttgttagggttaagtccacgtgtatgcctagcttttaggtctccaaaacagcacgtggccatgttatgtacatctggtctagcagctactgtaccagtcacttgtgaaactcttgtgaacaggattgcacgtccgcttattgctagtattcccgtcccgggggtgcactgtggtaacacagtcctgggatgtgtgtgagctagtacccctattggggatagcaagagtgtagctcttgactatgggcagaaagcactagtactacttgtcatagctgattggcagtttgtagacatgtgcatcaggtaccctgaaaaggatctgagatgtagctaattggtccctgcaaactgtcgaaattttcttccttcttctttttatttaatacagagtggtattagtaatagttggtttatgtgtttgttactagatctacttttctttgtattgattttattggtaatagtgttgctatactttatcctccttgtggttattttatcattagaagattttattctggattttgttagtagatattatttgtacataag

SEQ ID NO: 17799 - DNA, 534 bp, synthetic construct; identical to SEQ ID NO: 1338
  source 1..534: mol_type = other DNA

SEQ ID NO: 17800 - DNA, 496 bp, synthetic construct; identical to SEQ ID NO: 523
  source 1..496: mol_type = other DNA

SEQ ID NO: 17801 - DNA, 729 bp, synthetic construct
  source 1..729: mol_type = other DNA
cacttatttaattcggccttttgtgacaagcccctcggtgaaagaacctctctcttttcgacgtggttggaattgccatcatttccgacgaaagtgctatcatgcctccccgattatgtgatgttttctgccctgctgggcggagcattctcgggttgagaaaccttgaatctttttctttggaaccttggttcccccggtctaagccgcttggaatatgacagggttattttcttgatcttatttctacttttgcgggttctatccgtaaaaagggtacgtgctgccccttccttctctggagaattcacacggcggtctttccgtctctcaacaagtgtgaatgcagcatgccggaaacggtgaagaaaacagttttctgtggaaatttagagtgcacatcgaaacagctgtagcgacctcacagtagcagcggactcccctcttggcgacaagagcctctgcggccaaaagccccgtggataagatccactgctgtgagcggtgcaaccccagcaccctggttcgatgatcattctctatggaaccagaaaatggttttctcaagccctccggtagagaagccaagaatgtcctgaaggtaccccgcgtgcgggatctgatcaggagaccaattggcggtgctttacactgtcactttggtttaaaaattgtcacagcttctccaaaccaagtggtcttggttttccaattttgttgaatggcaat

SEQ ID NO: 17802 - DNA, 772 bp, synthetic construct
  source 1..772: mol_type = other DNA
ttcaaaacttgatgttctccctcccttgctgcttgatcacacccacctctaaaattcggccttttgtgacaagccccctggtgaaaggacctctcttgtttcgacgtggttggaattaacatcaattccgacgaaagtgctatcatgcctccccgattatgtgatgttttctgccctgctgggcggagcaccctcgggttgagataccttgactcttttcttttggaaccttggttcccccggtctaagccgcttggaatacgacagggttattttctatactcttacttctacttttacgggctctatccgtaaaaagggtatgtgttgccccttccatcttcggagaatccacacggcggtctttccgtctctcgaaaagtgtggatgcaacatgccggaaacggtgaagaaagcagttttctgtggaaatttagaatggacatcgaaacagctgtagcgacctcacagtagcagcggactcccctcttggtaacaagagcctctgcggccaaaagccccgtggataagatccactgctgtgagcggtgcaaccccagcaccctggttcgatggctattctctatggaaccagagaatggttttctcaagccctccggtagagaagccaagaatgtcctgaaggtaccccgcgtgcgggatctgatcaggagaccgaatggtaatgctttacattatcactttggtttaaaaattgtcacagcttctccaaaccaagtggtcttggttttccttttatccacatggcaag

SEQ ID NO: 17803 - DNA, 733 bp, synthetic construct
  source 1..733: mol_type = other DNA
taaccatacccggagttttgacagggtgttccaacctgtcctggccatacattcatctacggatgtttgtatgacccgctttctattgccccaataaccctctttgcaaccacaagctttactcaggctagtagcccgactagctgtttggaagaaaaggttagggcatacgccaacaacaccgaccccactggtcgaaggccacttggcaataagactggtggaacaaggtcgcctgtagttgtttggaacaattctttctaatgacttatgtcagcggtggactcacaccgtaatccttctaccctatccccacgcttgtggaactaggaagggatgagtgattcaagtaagtactgtcagaatggtgaaaataatctgattctgaaacacaatggatccatcgaaagatggggctatacgcctgcggaacaacacatggtaacatgtgccccaggggccgaaagccacggtgataagatcacccgtatagtttgagatcgtatcaatgttcattgtttagtaagatgatttgaaatctaactgagctgatggctaactgcttgtcttattgcggcctaaggatgtcctgcaggtacctttagataaccttaagagactattgatctgagcaggagccaaggtggtctttcccagccttggttaaaaaacgtctaagccgcggcagggggcgggaggccccctttcctcccaaaattataatactgattgt

SEQ ID NO: 17804 - DNA, 501 bp, synthetic construct
  source 1..501: mol_type = other DNA
gtttctgagcactggtaagagcttagacaaacgtttttaaaatttattttctctgcaacttttgtttgtgtttatttttatttgttaattttgcgcctaagcatttgttgcgaagtatttgattcattagtaatattacttattgtttatttagatggtattcaaagtggtgggagtatcgaacccaagcgtcgtatgctatctccttgaacaatttttaatcattgcgaagtgatcattgaaaaggataggtgtttaagaactcaaagagtgttaataatgttgggtgacaggtgtccccatagaatttattaacatgatttggactggttatctagtaagaagaaccatcgaacgcacgagcgagcattgcttgcggggcagttaccctgcgtcgatgtaagtgtgtaccggggggtgcacatgttgattctttatggcctgatagggtgcgtcattcgcgcctagataattagtataatgcgaatggaataaatttac

SEQ ID NO: 17805 - DNA, 501 bp, synthetic construct
  source 1..501: mol_type = other DNA
gtttctgagcactggtaagagcttagacaaacgtttttaaaatttattttctctgcaacttttgtttgtgtttatttttatttgttaattttgcgcctaagcatttgttgcgaagtatttgattcattagtaatattgactattgtttatttagatggtattcaaagtggtgggagtatcgaacccaagcgtcgtatgctatctccttgaacaatttttaattattgcgacctgatcattgaaaaggataagtgtttaagaactcaaggagtgttaataatgttgggtgacaggtgtccccatagaatttgttaacatgatttggactggttatctagtaagaagaaccatcgaacgcacgaacgagcattgctcgtggggcagttaccctgcgtcgatgtaagtgtgtaccggggggtacacatgttgattctttatggcctgatagggtgcgtcattcgcgcctagataattagtataatgcggatggaataaatttac

SEQ ID NO: 17806 - DNA, 487 bp, synthetic construct; identical to SEQ ID NO: 1318
  source 1..487: mol_type = other DNA

SEQ ID NO: 17807 - DNA, 523 bp, synthetic construct; identical to SEQ ID NO: 1337
  source 1..523: mol_type = other DNA

SEQ ID NO: 17808 - DNA, 1000 bp, synthetic construct; identical to SEQ ID NO: 1477
  source 1..1000: mol_type = other DNA

SEQ ID NO: 17809 - DNA, 880 bp, synthetic construct
  source 1..880: mol_type = other DNA
ttaattaaaagttgaacctgtagcgtcagtaaaacgcagtaaccgcaagcaattgcctgtagcgtcagtaaaacgcaatacacaagatttgagcctgtagcgtcagtaaaacgctgcaaccacaagctattgactgtagcgtcagtaaaacgcaaacattcttgtggcgctcgcgtagcgctcaagtgcagagcttcccggctttaagggttactgctcgtaatgagagcacatgacattttgccaagatttcctagcaattgtcacgggagagaggagcccgttctcgggcacttttctctcaaacaatgttggcgcgcctcggcgcgccccccctttttcagccccctgtcattgactggtcgaaggcgctcgcaataagactggtcgttgcttggcttttctattgtttcaggctttagcgcgcccttgcgcggcgggccgtcaagcccgtgtgctgtacagcaccaggtaaccggacagcggcttgctggattttcccggtgccattgctctggatggtgtcaccaagctggcagatgcggagtgaaccttacgaagcgacacacctgtggtagcgctgcccagaagggagcggagctcccccgccgcgaggcggtcctctctggccaaaagcccagcgttaatagcgccttctgggatgcaggaaccccacctgccaggtgtgaagtggactaagtggatctccaatttggcctgttctgaactacaccatctactgctgtgaagaatgtcctgaaggcaagctggttacagccctgatcaggagccccgctcgtgactctcgatcgacgcggggtcaaaaactgtctaagcagcagcagaaacgcgggagcgtttctttttccttatttgtttc

SEQ ID NO: 17810 - DNA, 317 bp, synthetic construct
  source 1..317: mol_type = other DNA
cggagcatggtggccgtgggaactcctccttggtgacaagggcccacggggccgaaagccacgtccaaacggacccaacatgtgtgcaaccccagcacggcaactttactgcgaacaccaccttaaggtgacactggtactggtactcggtcactggtgacaggctaaggatgcccttcaggtaccccgaggtaacacgggacactcgggatctgagaaggggattgggacttctttaaagtgcccagtttaaaaagcttctacgcctgaataggcgaccggaggccggcgcctttccattacccactactaaatcc

SEQ ID NO: 17811 - DNA, 1000 bp, synthetic construct; identical to SEQ ID NO: 1478
  source 1..1000: mol_type = other DNA

SEQ ID NO: 17812 - DNA, 522 bp, synthetic construct; identical to SEQ ID NO: 547
  source 1..522: mol_type = other DNA

SEQ ID NO: 17813 - DNA, 708 bp, synthetic construct
  source 1..708: mol_type = other DNA
ttgaaagccgggggtgggagatccggattgccagtctgctcgatatcgcaggctgggtccgtgactacccactccccctttcaacgtgaaggctacgatagtgccagggcgggtactgccgtaagtgccaccccaaaacaacaacaaaccccccctaacattactggccgacgccgcttggaataaggccggtgtgcgtttgtctatatgttatttcccaccatattgccgtcttttggcaatgtgtgggcccggaaacctggccctgtcttcttgacgagcattcctaggggtctttcccctctcgccaaaggaatgcaaggtctgttgaatgtcgtgaaggaagcagttcctctggaagcttcttgaagacaaacaacgtctgtagcggccctttgcaggcagcggaaccccccacctggcgacaggtgcctctgcggccaaaagccacgtgtataagatacacctgcaaaggcggcacaaccccagtgccacgttgtgagttggatagttgtggaaagagtcaaatggctctcctcaagcgtattcaacaaggggctgaaggatgcccagaaggtaccccattgtatgggatctgatctggggcctcggtgcacatgctttacatgtgtttagtcgaggttaaaaaacgtctaggcccccctaaccacggggacgtggttttcctttgaaaaacacgatgataat

SEQ ID NO: 17814 - DNA, 709 bp, synthetic construct
  source 1..709: mol_type = other DNA
ttgaaagccgggggtgggagatccggattgccagtctgctcgatatcgcaggctgggtccgtgactacccactccccctttcaacgtgaaggctacgatagtgccagggcgggtactgccgtaagtgccaccccaaaacaacaacaaacccccccctaacgttactggccgaagccgcttggaataaggccggtgtgcgtttgtctatatgttattttccaccatattgccgtcttttggcaatgtgagggcccggaaacctggccctgtcttcttgacgagcattcctaggggtctttcccctctcgccaaaggaatgcaaggtctgttgaatgtcgtgaaggaagcagttcctctggaagcttcttgaagacaaacaacgtctgtagcgaccctttgcaggcagcggaaccccccacctggcgacaggtgcctctgcggccaaaagccacgtgtataagatacacctgcaaaggcggcacaaccccagtgccacgttgtgagttggatagttgtggaaagagtcaaatggctctcctcaagcgtattcaacaaggggctgaaggatgcccagaaggtaccccattgtatgggatctgatctggggcctcggtgcacatgctttacatgtgtttagtcgaggttaaaaaacgtctaggcccccctaaccacggggacgtggttttcctttgaaaaacacgatgataat

SEQ ID NO: 17815 - DNA, 708 bp, synthetic construct
  source 1..708: mol_type = other DNA
ttgaaagccgggggtgggagatccggattgccagtctgctcgatatcgcaggctgggtccgtgactacccactccccctttcaacgtgaaggctacgatagtgccagggcgggtactgccgtaagtgccaccccaaaacaacaacaaaccccccctaacattactggccgacgccgcttggaataaggccggtgtgcgtttgtctatatgttatttcccaccacattgccgtcttttggcaatgtgtgggcccggaaacctggccctgtcttcttgacgagcattcctaggggtctttcccctctcgccaaaggaatgcaaggtctgttgaatgtcgtgaaggaagcagttcctctggaagcttcttgaagacaaacaacgtctgtagcggccctttgcaggcagcggaaccccccacctggcgacaggtgcctctgcggccaaaagccacgtgtataagatacacctgcaaaggcggcacaaccccagtgccacgttgtgagttggatagttgtggaaagagtcaaatggctctcctcaagcgtattcaacaaggggctgaaggatgcccagaaggtaccccattgtatgggatctgatctggggcctcggtgcacatgctttacatgtgtttagtcgaggttaaaaaacgtctaggccccccgaaccacggggacgtggttttcctttgaaaaacacgatgataat

SEQ ID NO: 17816 - DNA, 710 bp, synthetic construct; identical to SEQ ID NO: 856
  source 1..710: mol_type = other DNA

SEQ ID NO: 17817 - DNA, 704 bp, synthetic construct; identical to SEQ ID NO: 845
  source 1..704: mol_type = other DNA

SEQ ID NO: 17818 - DNA, 1000 bp, synthetic construct; identical to SEQ ID NO: 1479
  source 1..1000: mol_type = other DNA

SEQ ID NO: 17819 - DNA, 662 bp, synthetic construct; identical to SEQ ID NO: 798
  source 1..662: mol_type = other DNA

SEQ ID NO: 17820 - DNA, 1000 bp, synthetic construct; identical to SEQ ID NO: 1480
  source 1..1000: mol_type = other DNA

SEQ ID NO: 17821 - DNA, 524 bp, synthetic construct; identical to SEQ ID NO: 551
  source 1..524: mol_type = other DNA

SEQ ID NO: 17822 - DNA, 460 bp, synthetic construct; identical to SEQ ID NO: 499
  source 1..460: mol_type = other DNA

SEQ ID NO: 17823 - DNA, 419 bp, synthetic construct; identical to SEQ ID NO: 456
  source 1..419: mol_type = other DNA

SEQ ID NO: 17824 - DNA, 623 bp, synthetic construct; identical to SEQ ID NO: 732
  source 1..623: mol_type = other DNA

SEQ ID NO: 17825 - DNA, 1000 bp, synthetic construct; identical to SEQ ID NO: 1481
  source 1..1000: mol_type = other DNA

SEQ ID NO: 17826 - DNA, 869 bp, synthetic construct
  source 1..869: mol_type = other DNA
ctctctttgaccctggccactggggttcagtggcactacatctctctctcttctttatctatatcgtttctttactttactttactttactatatttcttactttactatatttcttactttacttatctatatatatctaatctttactatcttttctaactttattttcttatttcttatctttattcttttgtaactaataagcaagttttactgcctgcaaactgcttcaatgggaccaccgcttcggcgacccctttgttgagtttgtatgtttttaagtaatctttgcaaccatacgattattttagccgcctctctataatgatcttgttatagtgggacgtgaaacattggtttttctcacacacgtccggtcacccgggcgtgtgttcttccgtaagtcctatccacataccatcgtgggtaggccagcatgtttgcacaggctgtgacagtgtgggtgggctttccacctctcaacaacacactgaattgcaatgcactcacggaggaaatgacaatttggttatagttttgaactgtgctagtaatttctttcacattaagccatgttgcctgcggaatcacatgtggtaacacatgcctcagggcccaaaaggcacgggttagcagccccttcatggtgtgttagaagtgaaaacacatagtatgagctataatatctttgttgtcttctctgtagtgtaccccgccaaatgtaaggatgcccagcaggtacccattttatggatctgagctggggattgatagtgtatctataaatgcactgatcaatttaaaaagcgtctaagtttggcacaaacactggggacagtgtttttcctttattcttttatttgatta

SEQ ID NO: 17827 - DNA, 622 bp, synthetic construct
  source 1..622: mol_type = other DNA
tttgaaagcgggtgcatgcatggccattttccagcacaggttcagctggtatggcatgcatgcatcgactgcttgggggtgtccctgacccccttaattcaacgtctagcccacgatacgggcaccctatccaatttgtatccctttacctcccatggactgacttgtatggacttggatctaaattggattatcctttacttgtggtggttagccaaccatgctctggtgtaatgattccatgtgttcatttggctaagtgccgaccttggaggtgggggtgaaattttgcaagccactagcgtcgtcaactttagcctctggagatgttggattagttgcattctggacagaccaagcctcgtctataccgtgggctaatggtcttcgttgtgaagcggattaccggtagtagcatcttagacttccaaggttgtcatgagtgtgtctgtagagtaggcacacatctgtccaggcacaagcacatctctcgatcgctccagactagttcctgagggacagatgttgtggggggcttgggaaaacccccttaacctacactaccggatagggtcgcggctggtcgagtcccacacactatataccagtagacttttatgca

SEQ ID NO: 17828 - DNA, 696 bp, synthetic construct; identical to SEQ ID NO: 835
  source 1..696: mol_type = other DNA

SEQ ID NO: 17829 - DNA, 1000 bp, synthetic construct
  source 1..1000: mol_type = other DNA
gcatcttcgcggtgtagaacaccccaggggtaccccctttgaacgcgggacctgcgacagtgccaacccacgtcttttcccacttctgccccgattctcacctcgggtccaatgaaaggaccaaatatttcatcccttgagtgctggctaatcagaggaaagtcagcattttccggcccaggctaagagaaacatataagttagatttgattctgatcccttgacgaattcggaacgagacgttctccctcccttgccacttgttcacacccacattttgattcggccttttgtgacaagtcccttggtgaaagaacctctctctttccgacgtggttggaattaacatcatttccgacgaaagtgctatcatgcctccccgattgtgtgatgttttctgccctgctgggcggagcattctcgggttgagaaaccttgaatcttttcctttggaaccttggttcccccggtctaagccgcttggaatatgacagggttattttccttattcttatttctacttttatgggttctatccataaaaagggtatgtgctgccccttccttctttggagaattcacacggcggcctttccgtctctcgacaagtgtgaatgcagcatgccggaaacggtgaagaaaacagttttctgtggaagttcagagtgcacatcgaaacagctgtagcgacctcacagtagcagcggaaccccctcttggcgacaagagcctctgcggccaaaagccccgtggataagatccactgctgtgagcggtgcaaccccagcaccctgattcgatggtcactctttacggaaccagaaaatggttttctcaagcccttcggtagagaagccaagaatgtcctgaaggtaccccgcgtgcgggatctgatcaggagaccaattgacagtgctatacgctgtcactttggtttaaaaactgtcacagcttctccaaaccaagtggtcttggttttccaattttgttgactggcaat

SEQ ID NO: 17830 - DNA, 1000 bp, synthetic construct
  source 1..1000: mol_type = other DNA
ggctcactcctgtacaccgtgggtccgcgcagtgctgacttaacacttaagtaatgtataggccgagaattacaccgctcggctcccacctttcaccaccgtgggattaacaggttcaatgtacaaattcctgtctttggctatgtcaaagcaatacagtgtgtgcacatcgtacacgctcaaggcggagacttaggcctcacagattgtgttttgtgttattggatgctggatggtcacgttggagactgcatgtggcagtcttgaaacgtgtggtttgacgtctatccattatggcagtgggtggagtactgcaaagatgtcaccgtgctttacacggtttttgaaccccacaccggctgtttggcgcttgcaggacagcaggtttattttcttgtgttctctatttctagccaacagggtactatcctgttgggcggagtgatactcccgttcctccttggacagattgcctccacggtctttgtggatctcaaggtgatcaagtcactggtgaatagagcgaaggttgaggagacctgaggaatttccatgtggctttgccaggagttgtagcgatgctgtgtgtgtgtgcggatttcccctcatggcaacatgagcctcacaggccaaaagccctgtccgaaaggacccacacagtggagcaatcccagctccctcctacaaagctttgtgagaatgaactcacgtctattcttctttattctctatttacatcaggccccaaagatgtcctgaaggtaccttgtgtatctgggtatgagcaccatcgactacccggacttgcacttcggtgcagacgcacgtggtgtcccagcccctctgcttcggcaggggggcttttgctcgctcagcacgagatctgatcaggagtcccccccggtgtgctctacacccggcgggggattaaaaattgcccaaggcctggcaaaacaacctaggggactaggttttccttttgttaacaatgtctgtcatt

SEQ ID NO: 17831 - DNA, 424 bp, synthetic construct
  source 1..424: mol_type = other DNA
gttacccgcctcagtacttcgagaaacctagtacgcttgatgattccaaattggtatgatccggtcaaccccagaccagaaactgtggatgggggtcaccattcctagtatggcaacatacaggtgtccccgcgtgtgtcacaggcccttacgggtgccatttcggatgagtctggccgaagagtctattgagctactgttgatacctccggccccctgaatgcggctaatctcaaccccggagccactgggtggtgaaccaaccacttggtggtcgtaatgagcaattctgggacggaaccgactactttggggtgtccgtgtttcttttgttcatattaaactgttttatggtcacaacacaacttggtacgatttgtgattattcactgctcacttgtcacagtaaatatacacaatcatc

SEQ ID NO: 17832 - DNA, 711 bp, synthetic construct; identical to SEQ ID NO: 859
  source 1..711: mol_type = other DNA

SEQ ID NO: 17833 - DNA, 563 bp, synthetic construct; identical to SEQ ID NO: 25
  source 1..563: mol_type = other DNA

SEQ ID NO: 17834 - DNA, 788 bp, synthetic construct; identical to SEQ ID NO: 131
  source 1..788: mol_type = other DNA

SEQ ID NO: 17835 - DNA, 576 bp, synthetic construct; identical to SEQ ID NO: 627
  source 1..576: mol_type = other DNA

SEQ ID NO: 17836 - DNA, 636 bp, synthetic construct; identical to SEQ ID NO: 67
  source 1..636: mol_type = other DNA

SEQ ID NO: 17837 - DNA, 305 bp, synthetic construct; identical to SEQ ID NO: 283
  source 1..305: mol_type = other DNA

SEQ ID NO: 17838 - DNA, 793 bp, synthetic construct
  source 1..793: mol_type = other DNA
taagtaaaacgctgtaactgcatgatttgcgcctgtagcgccagtaaaacgcagaaaccacaagcaaaaacctgtagcgtcagtaaaacgcgcacattcacatacagagcttcccggctttaagggttactgctcgtaatgagagcacatgacaacttgtcgagattacggcaactgtcacgggagagaggagcccgttttcgggcacttgtctcctaaacaatgttggcgcgcatttgcgcgccccccccctttttcagccccctgtcattgactggtcgaagcgttcgcaataagactggtcgtcacttggctgttctatcgtttcaggctttagcgcgcccttgcgcggcgggccgtcaagcccgtgcgctgtatagcgccaggtaaccggacagcggcgtgctggattttcccggtgccattgctctggatggtgtcaccaagctgacaaatgcggagtgaacctcacaaagcgacacgcctgtggtagcgctgcccaaaagggagcggaactccccgccgaggcggtcctctctggccaaaagcccagcgttgatagcgccttttgggatgcaggaaccccacctgccaggtgtgaagtggagtgagcggatctccaatttggtctgttctgaactacaccatttactgctgtgaagaatgccctggaggcaagctggttacagccctgaccaggccctgcccgtgactctcgaccggcgcagggtcaaaaattgtctaagcagcagcaggaacgcgggagcgtttcttttccttttgtactgacatg

SEQ ID NO: 17839 - DNA, 762 bp, synthetic construct; identical to SEQ ID NO: 1225
  source 1..762: mol_type = other DNA

SEQ ID NO: 17840 - DNA, 1000 bp, synthetic construct
  source 1..1000: mol_type = other DNA
ggctcactcctgtacaccgtgagtccgcgcagtgctgacttaacacttaagtaatgtataggccgaggattacaccgctcggctcccacctttcaccaccgtgggattaacaggttcaatgcacaaattcctgtccttggctatgtcaaagcaatacagtgtgtacatggcgtgcacgctcaaagcggagacttaggcctcacagattgtgttttgtgttattggatgctggatggtcacgttggagactgcatgtggcagtcttgaaacgtgtggtttgacgtctatccattatggcagtgggtggagtactgcaaagatgtcaccgtgctttacacggtttttgaaccccacaccggctgtttggcgcttgcaggacagcaggtttattttcttatgttctccatttctagccaacagggttctatcctgttgggcggagtgatactcccgttccttcttggacagattgcctccacgttctttgtggatctcaaggtgatcaagtcactggtgaatagagcgaaggttgaggagacctgaggaatttccatgtggctttgccaggagttgtagcgatgctgtgtgtgtgtgcggatttcccctcatggcaacatgagcctcacaggccaaaagccctgtccgaaaggacccacacagtggagcaaccccagctccctcctacaaagctttgtgagaatgaactcaagtttattctactttattctctatttacatcaggccccaaagatgtcctgaaggtaccttgtgtatctgggcacgagcaccatcagctacccggacttgtatttcggtacagacacatgtggtgacccagcccctctgcttcggcaggggggctttcgctcgctcagcacgagatctgatcaggagcccctcccagtgtgctttacacctggcgaggggttaaaaattgcccaaggcctggcaaaacaacctaggggactaggttttccttttattaataatatctgtcatt

SEQ ID NO: 17841 - DNA, 573 bp, synthetic construct; identical to SEQ ID NO: 622
  source 1..573: mol_type = other DNA

SEQ ID NO: 17842 - DNA, 684 bp, synthetic construct
  source 1..684: mol_type = other DNA
ttctcccctctttggatgcccatagtgcgggggtataaataccgcactccctttggctgttccgagggtatcggaacctatttgtttgttttcagtctgtctgtcagctttatgtgtgctcgtcccctttagggcactcatttcagcttgctttcattcttttcttccccggttctcaccttaccggaggcactggccgttgcgcccggcggggtcaacctagtggttagcactaggctgtaggtgtctaaagtggtgacattaagacttggtgactgattccagcactgttaactgatgttggggatgacttgattgatcttctggaaggggtaggctacgggtgaaaccccttatcttaatactactatgtagagatagattcagtaggttaagggcagtggataaggttgagttcagtttggacaataagccttcaacactggtggacccaatctcactgaccagatgctttcttgtctgaaccttcagaggggtgtttcttctggataggtttccttgacactgatgcctgagacccattgggtcgggccttaaatcatggaactccacaggactttcatggcctagcttctgccttagacagactctggggccccacgaccctctgggcccttcggggtactcaggggcacttaggttttccacattcaaaaagagtta

SEQ ID NO: 17843 - DNA, 557 bp, synthetic construct; identical to SEQ ID NO: 602
  source 1..557: mol_type = other DNA

SEQ ID NO: 17844 - DNA, 331 bp, synthetic construct
  source 1..331: mol_type = other DNA
gcaagtggaaacgcgattttatatgtggctggccaccacggaataacggcaattgtttacatgtgggaagtgcaacctccctagccgatagcccttgaccgggtgtgtaggataggaaaggtgcccactgtgagcgacaggttatggtagagtggatacctagccaggggcaatgggactgctttgcatatccctaatgaagcatcgagagttctctgctcattacccggtgacggttgtgtggggggggccccacacactagatccatactgcctgatagggtcgcggctggccgaccataacctgtatagtcagttgattttaaccaag

SEQ ID NO: 17845 - DNA, 512 bp, synthetic construct
  source 1..512: mol_type = other DNA
ttttctcccctccccctccaactaccttttccccctcttgtaacgctagaagtttgtgcaaaccgcctgtagggtactgcaatccagcagtgcataggctaagcttttcttgttaccccaccccacattatactgaggaggattgtgaaattgtgttagtatgggttagtagcggtgacccgggtaaccccaacccagaaactcacggatgagatgaacaggaccccacatggtaacgtgtgtgttcgtctgccccgcaaggtgaggccgtgagagctttgcacgcgaaaaccttgaaaacccaaaagtaccttgagctcttcgctattttgtgtttcctccaggaccctgaatgcggctaaacctaacccgcgatccgcacgtagcaacccagctagagtgtggtcgtaatgcgcaagttgcgggcggtaccgactactttggtgttcctgtgtttcctttattttattttgaatttttatggtgacaacagctagaaaataagagtgaac

SEQ ID NO: 17846 - DNA, 721 bp, synthetic construct; identical to SEQ ID NO: 897
  source 1..721: mol_type = other DNA

SEQ ID NO: 17847 - DNA, 507 bp, synthetic construct
  source 1..507: mol_type = other DNA
acgaaacgcgccgtcgcttgaggaggacttgtacaaacacgatccattcaggttcccacaaccgacacaaaccgtgcaacttgaaactccgcctggtctttccaggtctggaggggtgacattttgtactgtgcttgactccacgctcggtccactggcgggtgttagtaacagcactgttgcttcgtagcggagcatggtggccgcgggaactcctccttggtaacaaggacccgcggggccgaaagccacgtcttcacggacccaccatgtgtgcaaccccagcacggcaactttactgtgaaaaccactttaaggtgacactgatactggtactcaaccactggtgacaggctaaggatgcccttcaggtaccccgaggtaacacgcgacactcgggatctgagaaggggactggggcttctttaaaagcgcctagtttaaaaagcttctacgcctgaataggtgaccggaggccggcacctttcttttaaacaactattttga

SEQ ID NO: 17848 - DNA, 934 bp, synthetic construct; identical to SEQ ID NO: 1297
  source 1..934: mol_type = other DNA

SEQ ID NO: 17849 - DNA, 966 bp, synthetic construct; identical to SEQ ID NO: 1300
  source 1..966: mol_type = other DNA

SEQ ID NO: 17850 - DNA, 548 bp, synthetic construct; identical to SEQ ID NO: 586
  source 1..548: mol_type = other DNA

SEQ ID NO: 17851 - DNA, 551 bp, synthetic construct; identical to SEQ ID NO: 594
  source 1..551: mol_type = other DNA

SEQ ID NO: 17852 - DNA, 751 bp, synthetic construct; identical to SEQ ID NO: 1207
  source 1..751: mol_type = other DNA

SEQ ID NO: 17853 - DNA, 484 bp, synthetic construct; identical to SEQ ID NO: 1366
  source 1..484: mol_type = other DNA

SEQ ID NO: 17854 - DNA, 818 bp, synthetic construct
  source 1..818: mol_type = other DNA
ctctctctttgaccctggctactggggttcagtagcatctttctttttcttactatactttactttcgacttctttctttacttattctttacttttctatcttcttttatatcttaactttacttattcaaacttttctatttctttctttattttcttatgtaactcttctttttaagttttattttgcctacttgtgagcttatgcgggaccactgtcttagacaaccccacatttgtcatgagtaagtacacgcaaccattacgattactttttaaccgtctgaccttttgataacaactgaagttaggcgtgaaacatgcatttataccaaagtagccccgcatttccccactacggtgggggggctaccctactggctttggaactgtagccattatgtgttgcctggctttcaggatctcacaacacaacagttctctcacaatggaatatgggtgagattgcagtgacatgaacaagtatctagtagtacatagactcaagcctagttgcctgcggaacaacatgtggtaacacatgccccagggtccaaaagacaagggttaacagccccttctaggtgtctgtgtgtgaagaatactttagtagtgttgttatgatctcacctgttagtacagaatgagtatggcttggtgaaggatgtcctacaggtacccattatatggatctgagtaggagaccactagtggtggctttaccgccaggtgagtggtttaaaaagcgtctagccaagccaacagcactagggatagtgctttctatattttatattttcagtgtatatggtgacaa

SEQ ID NO: 17855 - DNA, 718 bp, synthetic construct
  source 1..718: mol_type = other DNA
ggtggggtgggtacactcctcgctcaatgagtgggggtgtggctcattgcccacacctggttggttcccaggttcatacaataaccatcaataaacttctcaacatctaagctactactatcccacactaaactggacgaagccgcttggaataagtctagtttcattctgtgtgtgttttgcactgaaattatttctgtctctggggtgctttacacttcagtaggggctgtacccgggcggtcccactcttcacaggaatctgcacaggtggctttcacctctggacagtgcattccacacccgctccacagtagaagatgatgtgtgtctttgcttgtgaaaagcttgtgaaaatcgtgtgtaggcgtagcggctacttgagtgccagcggactacccctagtggtaacactagcctctgggcccaaaaggcatgtcaattgaccactcaggtacacaaccccagtgatgcacacgtctagtaacggcttagtaacgagcattgattgatcatttgaaaactgctaggaggtttaggtatgacgggctgaaggatgccctgaaggtacccataggtaaccttaagcgactatggatctgatcaggggcccaccatgtactacatgggtagaagtcttcggaccttgggttaaaaaacgtctaggcccgccccccacagggatgtggggtttcccttataaccccaatattgtata

SEQ ID NO: 17856 - DNA, 717 bp, synthetic construct
  source 1..717: mol_type = other DNA
ggtggggtgggtacacttctcgctcgatgagtgggggtgtggctcattgcccacacctggttggttcccaggttcatacaataaccatcaataaacttttaacatctaagatagtattatcccatactagactggacgaagccgcttggaataagtctagtcttatcttgtatgtgtcctgcactgaacttgtttctgtctctggagtgctctacacttcagtaggggctgtacccgggcggtcccactcttcacaggaatctgcacaggtggctttcacctctggacagtgcattccacacccgctccacggtagaagatgatgtgtgtctttgcttgtgaaaagcttgtgaaaatcgtgtgtaggcgtagcggctacttgagtgccagcggattacccctagtggtaacactagcctctgggcccaaaaggcatgtcatttgaccactcaggtacacaaccccagtgatgcacacgcttagtaatggcttagtaacaaacattgattgatcatttgaaagctgttaggaggtttaggtatgacgggctgaaggatgccctgaaggtacccataggtaaccttaagcgactatggatctgatcaggggcccaccatgtaacacatgggtagaagtcttcggaccttgggttaaaaaacgtctaggcccgccccccacagggatgtggggtttcccttataaccccaatattgtata

SEQ ID NO: 17857 - DNA, 715 bp, synthetic construct; identical to SEQ ID NO: 881
  source 1..715: mol_type = other DNA

SEQ ID NO: 17858 - DNA, 489 bp, synthetic construct; identical to SEQ ID NO: 513
  source 1..489: mol_type = other DNA

SEQ ID NO: 17859 - DNA, 732 bp, synthetic construct; identical to SEQ ID NO: 933
  source 1..732: mol_type = other DNA

SEQ ID NO: 17860 - DNA, 480 bp, synthetic construct
  source 1..480: mol_type = other DNA
gtgtggggtacatgcgtattacggtacgcatgtattccacactcatttcccccctccacccttaaggtggttgtatccacataccccaccctcccctccacaaaggatggatctacggacttgaatctttggcaagtaatatggtatgatcattggatacggacaaatggcagtagcgtggcgagctatggaaaaatcgcaattgtcgatagccatgttagtgacgcgcttcggcgtgctcctttggtgattcggcgactggttacaggagagtaggcagtgagctatgggcaaacctctgcagtattactcagagggaatgtgcaattgagacttgacgagcgtttcgtagagacgtggcgcatgctcttggcattaccatagtgagcttccaggttgggaaacctggactgggcctatactacctgatagggtcgcggctggccgcctgtaactagtatagtcagttgaaaccccccc

SEQ ID NO: 17861 - DNA, 489 bp, synthetic construct
  source 1..489: mol_type = other DNA
ttgaaatgggtgtggggtacatgcgtattacggtacgcatatatttcacactcatttcccccctccacccttaaggtggttgtatccccataccttaccctcccttccaaagcggacagacaaacggatttggacttacggcaaatacatatggtatgattttggatacaccttaacggcagtagcgtggcgagctatggaaaaatcgcaattgtcgatagccatgttagtgacgcgcttcggcgtgctcctttggtgattcggcgactggttacaggagagtaggcagtgagctatgggcaaacctctgcagtattactcagagggaatgtgcaattgagacttgacgagcgtctcttcggagatgtggcgcatgctcttggcattaccatagtgagcttccaggttgggaaacctggactgggcctatactacctgatagggtcgcggctggccgcctgtaactagtatagtcagttgaaacccccc

SEQ ID NO: 17862 - DNA, 489 bp, synthetic construct
  source 1..489: mol_type = other DNA
ttgaaatgggtgtggggtacatgcgtattacggtacgcatgtattccacactcatttccccccctccacccttaaggtggttgtatccccataccttaccctcccttctaaaacagatggacaaatggatttgaacttatggcaagtgaatatggtatgactttggatacactttaacggcagtagcgtggcgagctatggaaaaatcgcaattgtcgatagccatgttagtgacgcgcttcggcgtgctcctttggtgattcggcgactggttacaggagagtaggcagtgagctatgggcaaacctctacagtattacttagagggaatgtgcaattgagacttgacgagcgtctcttagagatgtggcgcatgctcttggcattaccatagtgagcttccaggttgggaaacctggactgggcctatactacctgatagggtcgcggctggccgcctgtaactagtatagtcagttgaaacccccc

SEQ ID NO: 17863 - DNA, 465 bp, synthetic construct
  source 1..465: mol_type = other DNA
tattacggtacgcatgtattccacactcatttcccccctccacccttaaggtggttgtatccccataccctaccctcccttccacaaaggacggacaaatggacccgaccttacggcgagtacatatggtatgattctggatacaccttaacggcagtagcgtggcgagctatggaaaaatcgcaattgtcgatagccatgttagtgacgcgcttcggcgtgctcctttggtgattcggcgactggttacaggagagtaggcagtgagctatgggcaaacctctacagtattacttagagggaatgtgcaattgagacttgacgagcgtctcctcggagatgtggcgcatgctcttggcattaccatagtgagcttccaggttgggaaacctggactgggcctatactacctgatagggtcgcggctggccgcctgtaactagtatagtcagttgaaaccccccc

SEQ ID NO: 17864 - DNA, 457 bp, synthetic construct
  source 1..457: mol_type = other DNA
tacgcatgtattccacactcatttcccccctccacccttaaggtggttgtatccccataccttaccctcccttccacaatggacggacaaatggatttgacctcacggcaaacacatatggtatgatttcggatacaccttaacggcagtagcgtggcgagctatggaaaaatcgcaattgtcgatagccatgttagtgacgcgcttcggcgtgctcctttggtgattcggcgactggttacaggagagtaggcagtgagctatgggcaaacctctacagtattacttagagggaatgtgcaattgagacttgacgagcgtctcctcggagatgtggcgcatgctcttggcattaccatagtgagcttccaggttgggaaacctggactgggcctatactacctgatagggtcgcggctggccgcctgtaactagtatagtcagttgaaaccccccc

SEQ ID NO: 17865 - DNA, 527 bp, synthetic construct; identical to SEQ ID NO: 553
  source 1..527: mol_type = other DNA

SEQ ID NO: 17866 - DNA, 713 bp, synthetic construct; identical to SEQ ID NO: 872
  source 1..713: mol_type = other DNA

SEQ ID NO: 17867 - DNA, 713 bp, synthetic construct
  source 1..713: mol_type = other DNA
atttcaaccctctcccttttggacttctctggtctggggaagtaaaataccagactcccgtttgcctagggtataggctattatttatgtttgttttgttatgtatgtcttttaatgttttgtaaatattaattccagcaggttctggtttctgaatttgtcctctttaaggcactcataatgctttctttcatcttcatttccctggctctcaccttgccagatggactgacccatgcgcccgtgggggttaaccacaggactagcctgtggctgtaggttctgaaagaggtgacattaagactatggttgtgattccacatgttttaactggtatgatgtagtagcaattgatctttggtatggggtaggctacgggtgaaaccccataggttaatactaatatttagagatacctccagtaggtgaagtgcacaggataagattgagttgttttgacaaaagatcttcaactgtggtggacaccatctcactgggccaatgcttttgttatgaaaccatattgggcatgtctcttggatgagcattcatggacactgatgcctagactagggtgaatattgccttaaatcatagagttctttgggattttatggccttgcttctgttgaacagacactggggcttatggtattcaccctggcctctggggtaatcaggggcatttaggttttccacatctatataatgct

SEQ ID NO: 17868 - DNA, 480 bp, synthetic construct
  source 1..480: mol_type = other DNA
gtgtggggtacatgcgtattacggtacgcatgtattccacactcatttcccccctccacccttaaggtggttgtatccacataccccaccctcccctccacaaaggatggatctacggacttgaatctttggcaagtaatatggtatgatcattggatacggacaaatggcagtagcgtggcgagctatggaaaaatcgcaattgtcgatagccatgttagtgacgcgcttcggcgtgctcctttggtgattcggcgactggttacaggagagtaggcagtgagctatgggcaaacctctgcagtattactcagagggaatgtgcaattgagacttgacgagcgtctcgtagagacgtggcgcatgctcttggcattaccatagtgagcttccaggttgggaaacctggactgggcctatactacctgatagggtcgcggctggccgcctgtaactagtatagtcagttgaaaccccccc

SEQ ID NO: 17869 - DNA, 465 bp, synthetic construct
  source 1..465: mol_type = other DNA
acatgggggtacgcatgtattccacactcatttcccccctccacccttaaggtggttgtatccccataccttaccctccctcccacaacggtcggactaatggacttggactaatggcaagcacaaatggtatgactctggatacacctcaatggcagtagcgtggcgagctatggaaaaatcgcaattgtcgatagccatgttagtgacgcgcttcggcgtgctcctttggtgattcggcgactggttacaggagagtaggcagtgagctatgggcaaacctctacagtattacttagagggaatgtgcaattgagacttgacgagcgtctctttgagatgtggcgcatgctcttggcattaccatagtgagcttccaggttgggaaacctggactgggcctatactacctgatagggtcgcggctggccgcctgtaactagtatagtcagttgaaaccccccc

SEQ ID NO: 17870 - DNA, 491 bp, synthetic construct; identical to SEQ ID NO: 516
  source 1..491: mol_type = other DNA

SEQ ID NO: 17871 - DNA, 490 bp, synthetic construct
  source 1..490: mol_type = other DNA
ttgaaatgggtgtggggtacatgcgtattacggtacgcatgtattccacactcatttcccccctccacccttaaggtggttgtatccctcataccttaccctcccttccaaacaggacggacaaatggacttggacttacggcaagaacatatggtatggcttttggatacggatgaatggcagtagcgtggcgagctatggaaaaatcgcaattgttgatagccatgttagtgacgcgcttcggcgtgctcctttggtgattcggcgactggttacaggagagtaggcagtgagctatgggcaaacctctgcagtattactcagagggaatgtgcaattgagacttgacgagcgtctctttgagatgtggcgcatgctcttggcattaccatagtgagcttccaggttgggaaacctggactgggcctatactacctgatagggtcgcggctggccgcctgtaactagtatagtcagttgaaacccccc

SEQ ID NO: 17872 - DNA, 475 bp, synthetic construct; identical to SEQ ID NO: 504
  source 1..475: mol_type = other DNA

SEQ ID NO: 17873 - DNA, 711 bp, synthetic construct; identical to SEQ ID NO: 860
  source 1..711: mol_type = other DNA

SEQ ID NO: 17874 - DNA, 455 bp, synthetic construct
  source 1..455: mol_type = other DNA
cgcatgtaatccacactcatttcccccctccacccttaaggtggttgtacccactcaccctaccctcccttccaaagcggatggactttacgtgtttgaaactttggcaaccacaaaaggaatggtatttggatacggatgaatggcagtagcgtggcgagctatggaaaaatcgcaattgtcgatagccatgttagtgacgcgcttcggcgtgctcctttggtgattcggcgactggttacaggagagtaggcagtgagctatgggcaaacctctacagtattacttagagggaatgtgcaattgagacttgacgagcgtctctttgagatgtggcgcatgctcttggcattaccatagtgagcttccaggttgggaaacctggactgggcctatactacctgatagggtcgcggctggccgcctgtaactagtatagtcagttgaaacccccc

SEQ ID NO: 17875 - DNA, 541 bp, synthetic construct
  source 1..541: mol_type = other DNA
aaaatggggtgcatatagcatggttcccatgctgtatgctaccccattttctcccctccccctccaactaccttttccccctctattgtaacttagaagctagtacacatagcccaataggagcaccacacccagtggtgtatagggcaagcacttctgtttccccggcttagccgttaacccccacagtactacgcgactgttagtaggtaacgtaactagtgaaggttgatccggaggtaaaccccagcctccagaaacgtgagatgagggttcagtgaccccctatggtaacatagactgatccctgcgctggctcacgggcttcgtgcactgaatctaggtaaagttactgaagccacgagtgtgctactgtggtttcctccagcgccttgaatgcggctaaccctaaccccggagcacatgcatatgatccaatatgtagtgtgtcgtaatgagcaattctgggacgggaccgactactttaggttgctgtgtttcctttatttttatatatcaatttatggtgacaagttacaag

SEQ ID NO: 17876 - DNA, 541 bp, synthetic construct
  source 1..541: mol_type = other DNA
aaaatggagtgcatatagcatggttcccatgctgtatgctaccccattttcttccctccccctccaactaccttttccccctctattgtaacttagaagctaatacacatagcccaataggggcaccacacccagtggtgtatagggcaagcacttctgtttccccggctttgccgttaacccccacagtactacgcgactgttagtaggtaacgtaactagtgaaggttgatccggaggtaaaccccaacctccagaaacgtgagatgagggttcagtaaccccctatggtaacatagactgatccctgcgctggctcacgggcttcgtgcactgaatctaggtaaagttactgaagccacgagtgtgctactgtggtttcctccagcgccttgaatgcggctaaccctaaccccggagcacatgcatataatccaatatgtagtgtgtcgtaatgagtaattctgggacgggaccgactactttaggttgctgtgtttcctttatttttatatatcaatttatggtgacaagttacaag

SEQ ID NO: 17877 - DNA, 476 bp, synthetic construct
  source 1..476: mol_type = other DNA
ggtacatgcgtattacggtacgcatgtattccacactcatttcccccctccacccttaaggtggttgtatcccacataccccacccttccttccacaaaggacggactaatggactttgacttctggcaagtacatatggtatgattattggatacgactgaatggcagtagcgtggcgagctatggaaaaatcgcaattgtcgatagccatgtcagtgacgcgcttcggcgtgctcctttggtgattcggcgactggttacaggagagtaggcagtgagctatgggcaaacctctgcagtattactcagagggaatgtgcaattgagacttgacgagcgtctcgaaagagatgtggcgcatgctcttggcattaccatagtgagcttccaggttgggaaacctggactgggcctatactacctgatagggtcgcggctggccgcctgtaactagtatagtcagttgaaacccccc

SEQ ID NO: 17878 - DNA, 476 bp, synthetic construct
  source 1..476: mol_type = other DNA
ggggtacatgcgtattacggtacgcatgtattccacactcatttcccccctccacccttaaggtggttgtatccccataccttaacctcccctccacacaggacggataaatggacttggacttttggcaagaacatatggtatgactattggatacgatttaacggcagtagcgtggcgagctatggaaaaatcgcaattgtcgatagccatgttagtgacgcgcttcggcgtgctcctttggtgattcggcgactggttacaggagagtaggcagtgagctatgggcaaacctctgcagtattactcagagggaatgtgcaattgagacttgacgagcgtctctttgagatgtggcgcatgctcttggcattaccatagtgagcttccaggttgggaaacctggactgggcctatactacctgatagggtcgcggctggccgcctgtaactagtatagtcagttgaaacccccc

SEQ ID NO: 17879 - DNA, 528 bp, synthetic construct
  source 1..528: mol_type = other DNA
atagcatggtttcccatgctgtatgctaccccattttctcccctccccctccaactaccttttccccctctattgtaacttagaagctagtacacatagcccaataggagcaccacatccagtggtgtatagggcaagcacttctgtttccccggcctagccgttaccccccacagtactacgcaactgttagtaggtaatgtgactagtgaaggttgatccggaggtaaaccccaacctccagaaacgtgagatgagggttcagtggccccctatggtaacatagactgatccctgcgctggctcacgggcttcgtgcactgaatctaggtaaagttactgaagccacgagtgtgctactgtggtttcctccagcgccttgaatgcggctaaccctaaccccggagcacatgcatataatccaatatgtagtgtgtcgtaatgagtaattctgggacgggaccgactactttaggttgctgtgtttcctttgtttttatatatcaatttatggtgacaagttacaag

SEQ ID NO: 17880 - DNA, 410 bp, synthetic construct
  source 1..410: mol_type = other DNA
ttttctcccctccccctccacttaccttttccccctcttgtaacgctagaagtttgtgcaaatcgcctgtagggtactgcaatccagcagtgcataggcaaagcttttcttgttaccccaccccacattatactgaggaggatggtgaaattgtgttagtatgggttagtagcggtgacccgggtaaccccaacccagaaactcacggatgagatgaacaggaccccacatggtaacgtgtgtgttcgtctgccccgcaaggtgaggccgtgagagctttgcacgcgaaaaccttgaaaacccaaaagtaccttgagctcttcgctattttgtgtttcctccaggaccctgaatgcggctaaacccaacccgcgatccgcacgtagcaacccagctagagtgtggtcgta

SEQ ID NO: 17881 - DNA, 491 bp, synthetic construct
  source 1..491: mol_type = other DNA
ttgaaatgggtgtggggtacacgcgtattacggtacgcatgtattccacactcatttcccccctccacccttaaggtggttgtatccacataccctaccctcccttccacaaaggacggaccctctggacctgaacttttggcaagcacatacggaatggttattggatacgattgaatggcagtagcgtggcgagctatggaaaaatcgcaattgtcgatagccatgttagtgacgcgcttcggcgtgctcctttggtgattcggcgactggttacaggagagtaggcagtgagctatgggcaaacctctgcagtattactcagagggaatgtgcaattgagacttgacgagcgtctcttggagatgtggcgcatgctcttggcattaccatagtgagcttccaggttgggaaacctggactgggcctatactacctgatagggtcgcggctggccgcctgtaactagtatagtcagttgaaaccccccc

SEQ ID NO: 17882 - DNA, 544 bp, synthetic construct; identical to SEQ ID NO: 584
  source 1..544: mol_type = other DNA

SEQ ID NO: 17883 - DNA, 524 bp, synthetic construct
  source 1..524: mol_type = other DNA
gcatggttcccatgctgtatgctaccccattttctcccctccccctccaactaccttttccccctctattgtaacttagaagctagtacacatagcccaataggagcaccacatccagtggtgtatagggcaagcacttctgtttccccggcctagccgttaccccccacagtactacgcaactgttagtaggtaatgtgactagtgaaggttgatccggaggtaaaccccaacctccagaaacgtgagatgagggttcagtggccccctatggtaacatagactgatccctgcgctggctcacgggcttcgtgcactgaatctaggtaaagttactgaagccacgagtgtgctactgtggtttcctccagcgccttgaatgcggctaaccctaaccccggagcacatgcatataatccaatatgtagtgtgtcgtaatgagtaattctgggacgggaccgactactttaggttgctgtgtttcctttgtttttatatatcaatttatggtgacaagttacaag

SEQ ID NO: 17884 - DNA, 476 bp, synthetic construct
  source 1..476: mol_type = other DNA
ggggtacatgcgtattacggtacgcatgtattccacactcatttcccccctccacccttaaggtggttgtatccccataccttaacctcccctccacacaggacggataaatggacttggacttttggcaagaacatatggtatgattattggatacgatttaacggcagtagcgtggcgagctatggaaaaatcgcaattgtcgatagccatgttagtgacgcgcttcggcgtgctcctttggtgattcggcgactggttacaggagagtaggcagtgagctatgggcaaacctctgcagtattactcagagggaatgtgcaattgagacttgacgagcgtctctttgagatgtggcgcatgctcttggcattaccatagtgagcttccaggttgggaaacctggactgggcctatactacctgatagggtcgcggctggccgcctgtaactagtatagtcagttgaaacccccc

SEQ ID NO: 17885 - DNA, 889 bp, synthetic construct
  source 1..889: mol_type = other DNA
tgcacgtacagggaacatagccctgaagacgtgcaccccgctttccgacctgcaagtcgttaaactgcaattggtctttgggatagaccttaaacatcctagtaggacggatttcacggtctgacttggaaatgttaacctggacttgagtttggattgtgattccccgggaatgtggagtacccggttaggcaggacttatttttactgcctctccaccttagtttatcacctccttatgaaggatccattagtactattatgatgaaaatggatgaatgggctagcgccagttagattgcctagagactacctccctggtaacagggactctagggcccaaaaggctaggtggtcggattagcaaccaagaaagggtttatgattaacccaatctgaacttgcgtcctaagccacccgtctaacccctgaccccgaggcgttcgtctattagtagttgtaatgtggaaagtgttggtctcttataaggattgtttaagctaagaaatcttggatccgtgagagtagatgccctggaggttattactgaccaggggaccgtgactatagcgctccgctaaaccggtttaaaaaccatgaaattgtgggtccaagtgcttttcttaattttatttttatttaatggattgcattgacgaagttgattgtgcacagtgtgatcaaccatcaataaccctgagagtggtgttgaaagtgattcaattttttgagtgtgcttttgaatgggtgcatcacctaccaaaaacctcagagacagtggaagaagtcaattgccatcagccagagaatttcgaggattgagttgggaaaataaaccttgtactcagttgacaacggattgttgtaaaggaggtcaattgattggaaa

SEQ ID NO: 17886 - DNA, 477 bp, synthetic construct
  source 1..477: mol_type = other DNA
ggggtacatgcgtattacggtacgcatgtattccacactcatttcccccctccacccttaaggtggttgtatccccataccttaacctcccctccacacaggacggatctatggaatttgacttttggcaagaacatatggtatgattaatggatacgatttaacggcagtagcgtggcgagctatggaaaaatcgcaattgtcgatagccatgttagtgacgcgcttcggcgtgctcctttggtgattcggcgactggttacaggagagtaggcagtgaactgtgggcaaacctctgcagtattactcagagggaatgtgcaattgagacttgacgagcgtctctttgagatgtggcgcatgctcttggcattaccatagtgagcttccaggttgggaaacctggacagggcctatactacctgatagggtcgcggctggccgcctgtaactagtatagtcagttgaaaccccccc

SEQ ID NO: 17887 - DNA, 491 bp, synthetic construct
  source 1..491: mol_type = other DNA
ttgaaatgggtgtggggtacatgcgtattacggtacgcatgtattccacactcatttcccccctccacccttaaggtggttgtatccacataccctaccctcccttccacacaggacggacttttggacttggactttcggcaagcacatatggtatgattgctggatacaccttgaatggcagtagcgtggcgagctatggaaaaatcgcaattgtcgatagccatgttagtgacgcgcttcggcgtgctcctttggtgattcggcgactggttacaggagagtaggcagtgagctatgggcaaacctctgcagtattactcagagggaatgtgcaattgagacttgacgagcgtctctttgagatgtggcgcatgctcttggcgttaccatagtgagcttccaggttgggaaacctggactgggcctatactacctgatagggtcgcggctggccgcctgtaactagtatagtcagttgaaaccccccc

SEQ ID NO: 17888 - DNA, 491 bp, synthetic construct
  source 1..491: mol_type = other DNA
ttgaaatgggtgtggggtacatgcgtattacggtacgcatgtattccacactcatttcccccctccacccttaaggtggttgtatccacataccctaccctcccttccacacaggacggacttttggacttggaccttcggcaagcacatatggtatgattactggatacaccttgaatggcagtagcgtggcgagctatggaaaaatcgcaattgtcgatagccatgttagtgacgcgcttcggcgtgctcctttggtgattcggcgactggttacaggagagtaggcagtgagctatgggcaaacctctgcagtattactcagagggaatgtgcaattgagacttgacgagcgtctcctagagatgtggcgcatgctcttggcattaccatagtgagcttccaggttgggaaacctggactgggcctatactacctgatagggtcgcggctggccgcctgtaactagtatagtcagttgaaaccccccc

SEQ ID NO: 17889 - DNA, 489 bp, synthetic construct; identical to SEQ ID NO: 514
  source 1..489: mol_type = other DNA

SEQ ID NO: 17890 - DNA, 581 bp, synthetic construct; identical to SEQ ID NO: 634
  source 1..581: mol_type = other DNA

SEQ ID NO: 17891 - DNA, 489 bp, synthetic construct
  source 1..489: mol_type = other DNA
gaaatgagtgtggggtacatgcgtattacggtacgcatgtattccacactcatttcccccctccacccttaaggtggttgtatcccacataccttatcctcccctccacacaggacggatctatggactttgacctttggcaagtatatatggtatgattattggatacgattaaacggcagtagcgtggcgagctatggaaaaatcgcaattgtcgatagccatgttagtgacgcgcttcggcgtgctcctttggtgattcggcgactggttacaggagagtaggcagtgagctatgggcaaacctctgcagtattactcagagggaatgtgcaattgagacttgacgagcgtctctttgagatgtggcgcatgctcttggcattaccatagtgagcttccaggttgggaaacctggactgggcctatactacctgatagggtcgcggctggccgcctgtaactagtatagtcagttgaaaccccccc

SEQ ID NO: 17892 - DNA, 468 bp, synthetic construct
  source 1..468: mol_type = other DNA
cgtattacggtacgcatgtattccacactcatttcccccctccacccttaaggtggttgtatcccatataccccacccttccttccacaaaggacggactaatggactttgacttctggcaagtacatatggtatgattattggatacgactgaatggcagtagcgtggcgagctatggaaaaatcgcaattgtcgatagccatgtcagtgacgcgcttcggcgtgctcctttggtgattcggcgactggttacaggagagtaggcagtgagctatgggcaaacctctgcagtattactcagagggaatgtgcaattgagacttgacgagcgtctcgaaagagatgtggcgcatgctcttggcattaccatagtgagcttccaggttgggaaacctggactgggcctatactacctgatagggtcgcggctggccgcctgtaactagtatagtcagttgaaacccccc

SEQ ID NO: 17893 - DNA, 468 bp, synthetic construct
  source 1..468: mol_type = other DNA
gcgtattacggtacgcatgtattccacactcatttcccccctccacccttaaggtggttgtatccccataccttaccctcccttccacactggacggacaaatggacttgaacttatggcaagcacacatggtatgactaatggatacacctaaacggtagtagcgtggcgagctatggaaaaatcgcaattgtcgatagccatgttagtgacgcgcttcggcgtgctcctttggtgattcggcgactggttacaggagagtaggcagtgagctatgggcaaacctctgcagtattactcagagggaatgtgcaattgagacttgacgagcgtctcttggagatgtggcgcatgctcttggcattaccatagtgagcttccaggttgggaaacctggactgggcctatactacctgatagggtcgcggctggccgcctgtaactagtatagtcagttgaaaccccccc

SEQ ID NO: 17894 - DNA, 488 bp, synthetic construct; identical to SEQ ID NO: 14
  source 1..488: mol_type = other DNA

SEQ ID NO: 17895 - DNA, 754 bp, synthetic construct; identical to SEQ ID NO: 129
  source 1..754: mol_type = other DNA

SEQ ID NO: 17896 - DNA, 444 bp, synthetic construct
  source 1..444: mol_type = other DNA
ccacactcatttcccccctccacccttaaggtggttgtatccccataccctaccctcccttccaaagcggatggataaatggacttgacctcacggcgagtacaaatggtatgattttggatgcaccttaatggtagtagcgtggcgagctatggaaaaatcgcaattgtcgatagccatgttagtgacgtgcttcggcgtgctcctttggtgattcggcgactggttacaggagagtaggcagtgagctatgggcaaacctctacagtattacttagagggaatgtgcaattgagacttgacgagcgtctctttgagatgtggcgcatgctcttggcattaccatagtgagcttccaggttgggaaacctggactgggcctatactacctgatagggtcgcggctggccgcctgtaactagtatagtcagttgaaaccccccc

SEQ ID NO: 17897 - DNA, 465 bp, synthetic construct
  source 1..465: mol_type = other DNA
attacggtacgcatgtattccacactcatttcccccctccacccttaaggtggttgtatcccacataccttaccctcccctccacacaggacggatctatggactttgacctttggcaagcatatatggtatgattattggatacgattaaacggcagtagcgtggcgagctatggaaaaatcgcaattgtcgatagccatgttagtgacgcgcttcggcgtgctcctttggtgattcggcgactggttacaggagagtaggcagtgagctatgggcaaacctctgcagtattactcagagggaatgtgcaattgagacttgacgagcgtctctttgagatgtggcgcatgctcttggcattaccatagtgagcttccaggttgggaaacctggactgggcctatactacctgatagggtcgcggctggccgcctgtaactagtatagtcagttgaaaccccccc

SEQ ID NO: 17898 - DNA, 468 bp, synthetic construct
  source 1..468: mol_type = other DNA
gcgtattacggtacgcatgtattccacactcatttcccccctccacccttaaggtggttgtatccccataccttaacctcccctccacacaggacggatctatggaacttgacttttggcaagaacatatggtatgattgatggatacgatttaacggcagtagcgtggcgagctatggaaaaatcgcaattgtcgatagccatgttagtgacgcgcttcggcgtgctcctttggtgattcggcgactggttacaggagagtaggcagtgagctatgggcaaacctctgcagtattactcagagggaatgtgcaattgagacttgacgagcgtctctttgagatgtggcgcatgctcttggcattaccatagtgagcttccaggttgggaaacctggactgggcctatactacctgatagggtcgcggctggccgcctgtaactagtatagtcagttgaaaccccccc

SEQ ID NO: 17899 - DNA, 464 bp, synthetic construct; identical to SEQ ID NO: 500
  source 1..464: mol_type = other DNA

SEQ ID NO: 17900 - DNA, 548 bp, synthetic construct; identical to SEQ ID NO: 587
  source 1..548: mol_type = other DNA

SEQ ID NO: 17901 - DNA, 401 bp, synthetic construct
  source 1..401: mol_type = other DNA
ggaaacttaccctcccttccacacagaacggataaatggacttgaacttatggcaagaacatacggtatgattttggatacacctaaatggcagtagcgtggcgagctatggaaaaatcgcaattgtcgatagccatgttagtgacgcgcttcggtgtgctcctttggtgattcggcgactggttacaggagagtaggcagtgagctatgggcaaacctctgcagtattactcagagggaatgtgcaattgagacttgacgagcgtctctttgagatgtggcgcatgctcttggcattaccatagtgagcttccaggttgggaaacctggactgggcctatactacctgatagggtcgcggctggccgcctgtaactagtatagtcagttgaaaccccccc

SEQ ID NO: 17902 - DNA, 423 bp, synthetic construct
  source 1..423: mol_type = other DNA
ccttaaggtggttgtatcccacataccccaccctcccttccaaagcggatggattgctggaccctgactaatggcaagtctatatggtatgatatttggatacatttgaatggcagtagcgtggcgagctatggaaaaatcgcaattgtcgatagccatgttagtgacgcgcttcggcgtgctcctttggtgattcggcgactggttacaggagagtaggcagtgagctatgggcaaacctctacagtattacttagagggaatgtgcaattgagacttgacgagcgtctctttgagatgtggcgcatgctcttggcattaccatagtgagcttccaggttgggaaacctggactgggcctatactacctgatagggtcgcggctggccgcctgtaactagtatagtcagttgaaaccccccc

SEQ ID NO: 17903 - DNA, 666 bp, synthetic construct; identical to SEQ ID NO: 804
  source 1..666: mol_type = other DNA

SEQ ID NO: 17904 - DNA, 468 bp, synthetic construct
  source 1..468: mol_type = other DNA
gcgtattacggtacgcatgtattccacactcatttccccccctccacccttaaggtggttgtatccacttaccctatcctcccttccaaaacggacggacttttggacttgaaacttcggcaagcaatatggtatgatttttggatacacttgaatggcagtagcgtggcgagctatggaaaaatcgcaattgtcgatagccatgttagtgacgcgcttcggcgtgctcctttggtgattcggcgactggttacaggagagtaggcagtgagctatgggcaaacctctgcagtattactcagagggaatgtgcaattgagacttgacgagcgtctcgtagagatgtggcgcatgctcttggcattaccatagtgagcttccaggttgggaaacctggactgggcctatactacctgatagggtcgcggctggccgcctgtaactagtatagtcagttgaaaccccccc

SEQ ID NO: 17905 - DNA, 477 bp, synthetic construct
  source 1..477: mol_type = other DNA
ggggtacatgcgtattacggtacgcatgtattccacactcatttcccccctccacccttaaggtggttgtatccccataccttaccctcccctccacataggacggataaacggactttgacatatggcaagtacacatggtatgatatttggatacacttgaatggcagtagcgtggcgagctatggaaaaatcgcaattgtcgatagccatgttagtgacgcgcttcggcgtgctcctttggtgattcggcgactggttacaggagagtaggcagtgagctatgggcaaacctctgcagtattactcagagggaatgtgcaattgagacttgacgagcacctcgtagaggtgtggcgcatgctcttggcattaccatagtgagcttccaggttgggaaacctggactgggcctatactacctgatagggtcgcggctggccgcctgtaactagtatagtcagttgaaaccccccc

SEQ ID NO: 17906 - DNA, 1000 bp, synthetic construct
  source 1..1000: mol_type = other DNA
gctcactcctgtacaccgtgagtccgcgcagtgctgacttaacacttaagtaatgtatagaccgagaattacaccgctcggctcccacctttcaccaccgtgggattaacaggttcaatgcacaaattcctgtctttggctatgtcaaagcaatacagtgtgtacgcatcgtacgcgctcaaggcggagacttaggcctcacagattgtgttttgtgttattggatgctggatggtcacgttggagactgcatgtggcagtcttgaaacgtgtggtttgacgtctatccattatggcagtgggtggagtactgcaaagatgtcaccgtgctttacacggtttttgaaccccacaccggctgtttggcgcttgcaggacagcaggtttattttcttgtgttctctatttctagccaacagggtactatcctgttgggcggagtgatactcccgttccttcttggacagattgcctccacggtctttgtggatctcaaggtgatcaagtcactggtgaatagagcgaaggttgaggagacctgaggaatttccatgtggctttgccaggagttgtagcgatgctgtgtgtgtgtgcggatttcccctcatggtaacatgagcctcacaggccaaaagccctgtccgaaaggacccacacagtggagcaacccccagctccctcctacaaagctttgtgagaatgaactcacgtttattcttctttattctctatttacatcaggccccaaagatgtcctgaaggtaccttgtgtatctgggcatgagcaccatcgactacccggacttgtactttggtacagacgcatgtggtgtctcagcccctctgctccggcaggggggcttttgctcgctcagcacgagatctgatcaggagtcccccccggtgtgctttacacccggcgggagattaaaaattgcccaaggcctggcaaaacaacctaggggactaggttttccttttatcaacaatgtctgtcatt

SEQ ID NO: 17907 - DNA, 461 bp, synthetic construct
  source 1..461: mol_type = other DNA
acggtacgcatgtattccacactcatttcccccctccacccttaaggtggttgtatcccacataccttaccctcccctccacataggacggatctatggactttgacctttggcaagcacatatggtatgattattggatacgattaaacggcagtagcgtggcgagctatggaaaaatcgcaattgtcgatagccatgttagtgacgcgcttcggcgtgctcctttggtgattcggcgactggttacaggagagtaggcagtgagctatgggcaaacctctgcagtattactcagagggaatgtgcaattgagacttgacgagcgtctctttgagatgtggcgcatgctcttggcattaccatagtgagcttccaggttgggaaacctggactgggcctatactacctgatagggtcgcggctggccgcctgtaactagtatagtcagttgaaacccccc

SEQ ID NO: 17908 - DNA, 477 bp, synthetic construct
  source 1..477: mol_type = other DNA
ggggtacatgcgtattacggtacgcatgtattccacactcatttcccccctccacccttaaggtggttgtatcccacataccttatcctcccctccacacaggacggatctaaggactttgacctttggcaagtatatatggtatgattattggatacgattgaacggcagtagcgtggcgagctatggaaaaatcgcaattgtcgatagccatgttagtgacgcgcttcggcgtgctcctttggtgattcggcgactggttacaggagagtaggcagtgagctatgggcaaacctctgcagtattactcagagggaatgtgcaattgagacttgacgagcgtctctttgagatgtggcgcatgctcttggcattaccatagcgagcttccaggttgggagacctggactgggcctatactacctgatagggtcgcggctggccgcctgtaactagtatagtcagttgaaacccccc

SEQ ID NO: 17909 - DNA, 452 bp, synthetic construct
  source 1..452: mol_type = other DNA
atgtattccacactcatttcccccctccacccttaaggtggttgtatcccacataccttatcctcccctccacacaggatggatttatggactttgacctttggctagcacatatggtatgattattggatacgattaaacggcagtagcgtggcgagctatggaaaaatcgcaattgtcgatagccatgttagtgacgcgcttcggcgtgctcctttggtgattcggcgactggttacaggagagtaggcagtgagctatgggcaaacctctgcagtgttactcagagggaatgtgcaattgagacttgacgagcgtctcctagagatgtggcgcatgctcttggcattaccatagtgagcttccaggttgggagacctggactgggcctatactacctgatagggtcgcggctggccgcctgtaactagtatagtcagttgaaacccccc

SEQ ID NO: 17910 - DNA, 762 bp, synthetic construct; identical to SEQ ID NO: 130
  source 1..762: mol_type = other DNA

SEQ ID NO: 17911 - DNA, 446 bp, synthetic construct
  source 1..446: mol_type = other DNA
ccacactcatttcccccctccacccttaaggtggttgtatcccacataccttatcctcccttccacacaggacggatctatggactttgacctttggcaagcatatatggtatgattattggatacgattaaacggcagtagcgtggcgagctatggaaaaatcgcaattgtcgatagccatgttagtgacgcgcttcggcgtgctcctttggtgattcggcgactggttacaggagagtaggcagtgagctatgggcaaacctctgcagtattactcagagggaatgtgcaattgagacttgacgagcgtctctttgagatgtggcgcatgctcttggcattaccatagtgagcttccaggttgggaaacctggactgggcctatactacctgatagggtcgcggctggccgcctgtaactagtatagtcagttgaaaccccccc

SEQ ID NO: 17912 - DNA, 467 bp, synthetic construct
  source 1..467: mol_type = other DNA
gtattacggtacgcatgtattccacactcatttcccccctccacccttaaggtggttgtatcccacataccttatcctcccctccacacaggatggatttatggactttgacctttggcaagcacatatggtatgattattggatacgattaaacggcagtagcgtggcgagctatggaaaaatcgcaattgtcgatagccatgttagtgacgcgcttcggcgtgctcctttggtgattcggcgactggttacaggagagtaggcagtgagctatgggcaaacctctgcagtattactcagagggaatgtgcaattgagacttgacgagcgtctctttgagatgtggcgcatgctcttggcattaccatagtgagcttccaggttgggaaacctggactgggcctatactacctgatagggtcgcggctggccgcctgtaactagtatagtcagttgaaaccccccc

SEQ ID NO: 17913 - DNA, 460 bp, synthetic construct
  source 1..460: mol_type = other DNA
cggtacgcatgtattccacactcatttcccccctccacccttaaggtggttgtatccccataccctaccctcccttccacatcggatggataaacggacttggacttaaggcgagcatatatggtatgattgatggatacacttaaatggcagtagcgtggcgagctatggaaaaatcgcaattgtcgatagccatgttagtgacgcgcttcggcgtgctcctttggtgattcggcgactggttacaggagagtaggcagtgagctatgggcaaacctctgcagtattactcagagggaatgtgcaattgagacttgacgagcgtctcctagagatgtggcgcatgctcttggcattaccatagtgagcttccaggttgggaaacctggactgggcctatactacctgatagggtcgcggctggccgcctgtaactagtatagtcagttgaaaccccccc

SEQ ID NO: 17914 - DNA, 455 bp, synthetic construct; identical to SEQ ID NO: 494
  source 1..455: mol_type = other DNA

SEQ ID NO: 17915 - DNA, 441 bp, synthetic construct
  source 1..441: mol_type = other DNA
acactcatttcccccctccacccttaaggtggttgtatccccataccctaccctcccttccaaagcggatggacacaaggacttggactcacggcaagtgcacatggtatgattttggatacaccttaacggcagtagcgtggcgagctatggaaaaatcgcaattgtcgatagccatgttagtgacgcgcttcggcgtgctcctttggtgattcggcgactggttacaggagagtaggcagtgaactatgggcaaacctctgcagtattactcagagggaatgtgcaattgaggcttgacgagcgtctcgtagagatgtggcgcatgctcttggcattaccatagtgagcttccaggttgggaaacctggactgggcctatactacctgatagggtcgcggctggccgcctgtaactagtatagtcagttgaaacccccc

SEQ ID NO: 17916 - DNA, 566 bp, synthetic construct
  source 1..566: mol_type = other DNA
agtaaagcagatagaggttctggactggcaaactttacctcgaaacacgcccgtttttcctgctgtgtttcacagtctgtcctgtcacacttgtggcggcttgcgacactgtgaacatagtgagaccgaccaagacaacaacttcaaatgatgaacctcgaacacctagactggatccgtagctggacatgttagggcaaggatctcccccctggtaacaggagccttgctggccaaaagccccgctctttgagcctagcatgttgttgaccccggactgtccagtttagttagtacatgggattcacttgtcatggttcctctgaactcgatctctagtgcggcagcctaaggatgccctccaggtaccccggggtaacaagcgacacccgggatctgaggaggggactactttacgtagtttaaaaaacgtctaagctgttacggtgaccagaggctggcacctttcatttttaaaacaaactactgattacaattgaagtgataacggttttacagactttcaaactagtaacacaagtactgttttccaacgcacgcatttt

SEQ ID NO: 17917 - DNA, 430 bp, synthetic construct; identical to SEQ ID NO: 473
  source 1..430: mol_type = other DNA

SEQ ID NO: 17918 - DNA, 734 bp, synthetic construct
  source 1..734: mol_type = other DNA
ttcaagaggggtctccggagttttccggaacccctcttggaagtccatggtgaggggacttgatacctcaccgccgtttgcctaggctataggctaaatttccctttccctgtccttcccctatttccttttgttttgtttgtaaatattaattcctgcaggttcagggttctttaatctgtttctctataagaacactcaatttttcacgctttctgtctcctttcttccagggctctccccttgccctaggctctggccgttgcgcccggcggggtcaactccatgattagcatggagctgtaggagtctaaattggggacgcagatgtttgggacgtcgccttgcagtgttaacttggctttcatgaacctctttgatcttccacaaggggtaggctacgggtgaaacctcttaggctaatacttcaatgaagagatgccttggatagggtaacagcggcggatattggtgagttgttaagacaaaaaccattcaacgccggaggactggctctcatccagtggatgcattgagggaattgattgtcagggctgtctctaggtttaatctcagacctctctgtgcttagggcaaacactatttggccttaaatgggatcctgtgagagggggtccctccattgacagctggactgttctttggggccttatgtggtgtttgcctctgaggtactcaggggcatttaggtttttcctcattcttaaataata

SEQ ID NO: 17919 - DNA, 447 bp, synthetic construct
  source 1..447: mol_type = other DNA
tattccacactcatttcccccctccaccattaaggtggttgtatccccataccttaccctcccttccacactggacggataaatggacttggatttatggcaagtacatatggtatgaatctggatacacttgaatggcagtagcgtggcgagctatggaaaaatcgcaactgtcgatagccatgttagtgacgcgcttcggcgtgctcctttggtgattcggcgactggttacaggagagtaggcagtgagctatgggcaaacctctgcagtattactcagagggaatgtgcaattgagacttgacgagcgtctctctgagatgtggcgcatgctcttggcattaccatagtgagcttccaggttgggaaacctggactgggcctatactacctgatagggtcgcggctggccgcctgtaactagtatagtcagttgaaacccccc

SEQ ID NO: 17920 - DNA, 663 bp, synthetic construct; identical to SEQ ID NO: 799
  source 1..663: mol_type = other DNA

SEQ ID NO: 17921 - DNA, 634 bp, synthetic construct; identical to SEQ ID NO: 761
  source 1..634: mol_type = other DNA

SEQ ID NO: 17922 - DNA, 417 bp, synthetic construct
  source 1..417: mol_type = other DNA
ttaaggtggttgtatcccataccctaccctcccttccacaaaggacggataaatggacttgaacttatggcatggacatacggtatgattttggatacaccttaatggcagtagcgtggcgagctatggaaaaatcgcaattgtcgatagccatgttagtgacgcgcttcggcgtgctcctttggtgattcggcgactggttacaggagagtaggcagtgagctatgggcaaacctctgcagtattactcagagggaatgtgcaattgagacttgacgagcgtctcctcgagacgtggcgcatgctcttggcattaccatagtgagcttccaggttgggaaacctggactgggcctatactacctgatagggtcgcggctggccgcctgtaactagtatagtcagttgaaacccccc

SEQ ID NO: 17923 - DNA, 733 bp, synthetic construct
  source 1..733: mol_type = other DNA
ttcaagaggggtctccggagttttccggagcctctcttggaagtccatggtgaggggacttgatacctcaccgccgtttgcctaggctataggctaaacttccctttccctgcctttcccctattttcctttgttttgtttgtaaatattaattcctgcaggttcagggttctttaatctgtttctctataagaacactcaattttcacgctttctgtctcctttcttccagggctctccccttgccctaggctctggccgttgcgcccggcggggtcaactccatgattagcatggagctgtaggagtctaaattggggacgcagatgtttgggacgtcgccttgcagtgttaacttggctttcatgaacctctttgatcttccacaaggggtaggctacgggtgaaacctcttaggctaatacttctatgaagagatgccttggatagggtaacagcggcggatattggtgagttgttaagacaaaaaccattcaacgccggaggactggctctcatccagtggatgcattgagtgaattgactgtcagggctgtctctaggtttaatctcagacctctctgtgcttagggcaaacactatttggccttaaatgggatcctgtgagagggggtccctccattgacagctggactgttctttggggccttatgtggtgtttgcctctgaggtactcaggggcatttaggtttttcctcattctctaataata

SEQ ID NO: 17924 - DNA, 733 bp, synthetic construct
  source 1..733: mol_type = other DNA
ttcaagaggggtgtccggagttttccggagcctctcttggaagtccatggtgaggggacttgatacctcaccgccgtttgcctaggctataggctaaatttccctttccctgtccttcccctattcccctttgttttgtttgtaaatattaattcctgcaggttcagggttctttaatttgtttctctataagaacactcaattttcacgctttctgtcttctttcttccagggctctccccttgccctaggctctggccgttgcgcccggcggggtcaactccatgattagcatggagctgtaggagtctaaattggggacgcagatgtttgggacgtcgccttgcagtgttaacttggctctcatgaacctctttgatcttccacaaggggtaggctacgggtgaaacctcttaggctaatacttctatgaagagatgccttggatagggtaacagcggcggatattggtgagttgttaagacaaaaaccattcaacgccggaggactggctctcatccagtggatgcattgagtgaattgattgtcagggctgtctctaggtttaatcccagacctctctgtgcttagggcaaacactatttggccttaaatgggaccctgtgagagggggtccctccattgacagctggactgttctttggggccttatgtggtgtttgcctctgaggtactcaggggcatttaggtttttcctcattcttaaacaata

SEQ ID NO: 17925 - DNA, 733 bp, synthetic construct
  source 1..733: mol_type = other DNA
ttcaagaggggtgtccggagttttccggagcctctcttggaagtccatggtgaggggacttgatacctcaccgccgtttgcctaggctataggctaaatttccctttccctgtccttcccctattcccctttgttttgtttgtaaatattaattcctgcaggttcagggttctttaatctgtttctctataagaacactcaattttcacgctttctgtcttctttcttccagggctctccccttgccctaggctctggccgttgcgcccggcggggtcaactccatgattagcatggagctgtaggagtctaaattggggacgcagatgtttgggacgtcgccttgcagtgttaacttggctctcatgaacctctttgatctttcacaaggggtaggctacgggtgaaacctcttaggctaatacttctatgaagagatgccttggatagggtaacagcggcggatattggtgagttgttaagacaaaaaccattcaacgccggaggactggctctcatccagtggatgcattgagtgaattgattgtcagggctgtctctaggtttaatcccagacctctctgtgcttagggcaaacactatttggccttaaatgggatcctgtgagagggggtccctccattgacagctggactgttctttggggccttatgtagtgtttgcctctgaggtactcaggggcatttaggtttttcctcattcttaaacaata

SEQ ID NO: 17926 - DNA, 603 bp, synthetic construct; identical to SEQ ID NO: 38
  source 1..603: mol_type = other DNA

SEQ ID NO: 17927 - DNA, 733 bp, synthetic construct
  source 1..733: mol_type = other DNA
ttcaagaggggtctccggagttttccggagcccctcttggaagtccatggtgaggggacttgatacctcaccgccgtttgcctaggctataggctaagtttccctttccctgtcccttccttatttccctttgtcttgtttgtaaatattaattcctgcaggttcagggttctttaatctgtttctctataagaacactcaattttcacgctttctgtcttctttcttccagggctctccccttgccctaggctctggccgttgcgcccggcggggtcaacttcatgattagcatggagctgtaggagtctaaattggggacgcagatgtttgggacgtcgccttgcagtgttaacttggctctcatgaacctctttgatcttccataaggggtaggctacgggtgaaactccttaggctaatacttctatgaagagatgccttggatagggtaacagcggcggatattggtgagttgttaagacaaaaaccattcaacgccggaggactggctctcatccagtggatgcattgagtgaattgattgtcagggctgtctctaggtttaatctcagacctctctgtgcttagggcaaacactatttggccttaaatgggatcctgtgagagggggtccctccattgacagctggactgttctttggggccttatgtagtgtttgcctctgaggtactcaggggcatttaggtttttcctcattcttaaacaata

SEQ ID NO: 17928 - DNA, 733 bp, synthetic construct
  source 1..733: mol_type = other DNA
ttcaagaggggtctccggagttttccggagcccctcttggaagtccgtggtgaggggacttgatacctcaccgccgtttgcctaggctataggctaagtttccctttccctgtcccttccttatttccctttgtcttgtttgtaaatattaattcctgcaggttcagggttctttaatctgtttctctataagaacactcaattttcacgctttctgtcttctttcttccagggctctccccttgccctaggctctggccgttgcgcccggcggggtcaacttcatgattagcatggagctgtaggagtctaaattggggacgcagatgtttgggacgtcgccttgcagtgttaacttggctctcatgaacctctttgatcttccataaggggtaggctacgggtgaaactccttaggctaatacttctatgaagagatgccttggatagggtaacagcggcggatattggtgagttgttaagacaaaaaccattcaacgccggaggactggctctcatccagtggatgcattgagtgaattgattgtcagggctgtctctaggtttaatctcagacctctctgtgcttagggcaaacactatttggccttaaatgggatcctgtgagagggggtccctccattgacagctggactgttctttggggccttatgtagtgtttgcctctgaggtactcaggggcatttaggtttttcctcattcttaaacaata

SEQ ID NO: 17929 - DNA, 733 bp, synthetic construct
  source 1..733: mol_type = other DNA
ttcaagaggggtctccggagttttccggagcccctcttggaagtccatggtgaggggacttgatacctcaccgccgtttgcctaggctataggctaagtttccctttccctgtcccttccttatttccctttgtcttgtttgtaaatattaattcctgcaggttcagggttctttaatctgtttctctataagaacactcaatttttacgctttctgtcttctttcttccagggctctccccttgccctaggctctggccgttgcgcccggcggggtcaacttcatgattagcatggagctgtaggagtctaaattggggacgcagatgtttgggacgtcgccttgcagtgttaacttggctctcatgaacctctttgatcttccataaggggtaggctacgggtgaaactccttaggctaatacttctatgaagagatgccttggatagggtaacagcggcggatattggtgagttgttaagacaaaaaccattcaacgccggaggactggctctcatccagtggatgcattgagtgaattgattgtcagggctgtctctaggtttaatctcagacctctctgtgcttagggcaaacactatttggccttaaatgggatcctgtgagagggggtccctccattgacagctggactgttctttggggccttatgtagtgtttgcctctgaggtactcaggggcatttaggtttttcctcattcttaaacaata

SEQ ID NO: 17930 - DNA, 733 bp, synthetic construct
  source 1..733: mol_type = other DNA
ttcaagaggggtctccggagttttccggagcctctcttggaagtccatggtgaggggacttgatacctcaccgccgtttgcctaggctataggctaaatttccctttccctgtccttcccctattcccctttgttttgtttgtaaatattaattcctgcaggttcagggctctttaatctgtttctctataagaacactcaattttcacgctttctgtcttctttcttccagggctctccccttgccctaggctctggccgttgcgcccggcggggtcaactccatgattagcatggagctgtaggagtctaaattggggacgcagatgtttgggacgtcgccttgcagtgttaacttggctctcatgaacctctttgatcttccacaaggggtaggctacgggtgaaacctcttaggctaatacttctatgaagagatgccttggatagggtaacagcggcggatattggtgagttgttaagacaaaaaccattcaacgccggaggactggctctcatccagtggatgcattgagtgaattgattgtcagggctgtctctaggtttaatcccagacctctctgtgcttagggcaaacactatttggccttaaatgggaccctgtgagagggggtccctccattgacagctggactgttctttggggccttatgtggtgtttgcctctgaggtactcaggggcatttaggtttttcctcattcttaaacaata

SEQ ID NO: 17931 - DNA, 734 bp, synthetic construct
  source 1..734: mol_type = other DNA
ttcaagaggggtttccggagttttccggaacccctcttggaagtccatggtgaggggacttgatacctcaccgccgtttgcctaggctataggctaaatttccctttccctgtccttcccctatttccttttgttttgtttgtaaatattaattcctgcaggttcagggttctttaatctgtttctctataagaacactcaatttttcacgctttctgtctcctttcttccagggctctccccttgccctaggctctggccgttgcgcccggcggggtcaactccatgattagcatggagctgtaggagtctaaattggggacgcagatgtttgggacgtcgccttgcagtgttaacttggctctcatgaacctctttgatcttccacaaggggtaggctacgggtgaaacctcttaggctaatacttcaatgaagagatgccttggatagggtaacagcggcggatattggtgagttgttaagacaaaaaccattcaacgccggaggactggctctcatccagtggatgcattgagggaattgattgtcagggctgtctctaggtttaatctcagacctctctgtgcttagggcaaacactatttggccttaaatgggatcctgtgagagggggtccctccattgacagctggactgttctttggggccttatgtggtgtttgcctctgaggtactcaggggcatttaggtttttcctcattcttaaataata

SEQ ID NO: 17932 - DNA, 418 bp, synthetic construct
  source 1..418: mol_type = other DNA
taaggtggttgtatccccatacctcgccctcccttccacacaggacggataaatgaacttgaacttatggcaagaataaatggtatgattctggatacacttgaatggcagtagcgtggcgagctatggaaaaatcgcaattgtcgatagccatgtcagtgacgcgcttcggtgtgctcctttggtgattcggcgactggttacaggagagtaggcagtgagctatgggcaaacctctgcagtattactcagagggaatgtgcaattgagacttgacgagcgtctctttgagatgtggcgcatgctcttggcattaccatagtgagcttccaggttgggaaacctggactgggcctatactacctgatagggtcgcggctggccgcctgtaactagtatagtcagttgaaaccccccc

SEQ ID NO: 17933 - DNA, 716 bp, synthetic construct; identical to SEQ ID NO: 886
  source 1..716: mol_type = other DNA

SEQ ID NO: 17934 - DNA, 716 bp, synthetic construct
  source 1..716: mol_type = other DNA
ttcaagaggggtctccggagatttcctgagtccctcttgggagtccatggtgaggggacttgatacctcaccgccgtttgcctaggctataggctaaatttccctttcccctttccctttacttttgtaagtattaattcctgcaggttcaggtctcttggatttgttccactttatggacactcatttcacgctttctgtctgcttttcttccagggctctccccttgccctaggctctggccgttgcgcccggcggggtcaactccatgattagcatggagctgtaggagtctaaattggggacgcagatgttgggaacgtcaccttgcagtgttaacttggctttcatgaagctttttgatcttccacaagaggtaggctacgggtgaaacctcttaagctaatacttctatgaagagatgctttggatagggtaacagcggcggatattggtgagttgtttgacaaaaaccattcaacgccggaggactggctctcatccagtggatgcattaagtggattgtctgtcagggctgtctctaggtttaattcctgacctctctgtgcttagggcaaacaaaacttggtcttaaatgaggtcctgtgagaggggacctcgccattgaatgctggacatttctttggggccttatgttttgtttgcctctgaggtactcaggggcatttaggtttttcctcatcaattaataatt

SEQ ID NO: 17935 - DNA, 733 bp, synthetic construct
  source 1..733: mol_type = other DNA
ttcaagaggggtctccggagttttccggagcctctcttggaagtccatggtgaggggacttgatacctcaccgccgtttgcctaggctataggctaaacctccctttccctgccctccccctatttccctttgttttgtttgtaaatattaattcctgcaggttcaggcttctttaatctgtttctctataagaacactcaattttcacgctttctgtctcctttcttccagggctctccccttgccctaggctctggccgttgcgcccggcggggtcaactccatgattagcatggagctgtaggagtctaaattggggacgcagatgtttgggacgtcaccttgcagtgttaacttggctttcatgaacctctttgatcttccataaggggtaggctacgggtgaaacctcttaggctaatacttctatgaagagatgctttggatagggtaacagcggcggatattggtgagttgttaagacaaaaaccattcaacgccggaggactggctctcatccagtggatgcattgagtggattgactgtcagggctgtctctaggtttaatctcagacctctctgtgcttagggcaaacactatttggccttaaatgggatcctgtgagagggggtccctccattgacagctggactgttctttggggccttatgtggtgtttgcctctgaggtactcaggggcatttaggtttttcctcattctttaataata

SEQ ID NO: 17936 - DNA, 733 bp, synthetic construct
  source 1..733: mol_type = other DNA
ttcaagaggggtttccggagttttccggagcccctcttggaagtccatggtgaggggacttgatacctcaccgccgtttgcctaggctataggctaaatttccctttccctgtccttcccccattccccttcgttttatttgtaaatattaattcctgcaggttcagggttctttaatctgtttctctataagaacactcacctttcacgctttctgtcttctttcttccagggctctccccttgccctaggctctggccgttgcgcccggcggggtcaactccatgattagcatggagctgtaggagtctaaattggggacgcagatgtttgggacgtcgccttgcagtgttaacttggctctcatgaacctctttgatcttccacaaggggtaggctacgggtgaaacctcttaggctaatacttctatgaagagatgccttggatagggtaacagcggcggatattggtgagttgttaagacaaaaaccattcaacgccggaggactgactctcatccagtggatgcattgagtgaattgattgtcagggctgtctctaggtttaatctcagacctctctgtgcttagggcaaacactatttggccttaaatgggattctgtgagagggggtccctccattgacagctggactgttctttggggccttatgtggtgtttgcctctgaggtactcaggggcatttaggtttttcctcattcttaaacaata

SEQ ID NO: 17937 - DNA, 733 bp, synthetic construct
  source 1..733: mol_type = other DNA
ttcaagaggggtttccggagttttccggagcccctcttggaagtccatggtgaggggacttgatacctcaccgccgtttgcctaggctataggctaaatttccctttccctgtccttcccctattcccttttgttttgtttgtaaatattaattcctgcaggttcagggttctttaatttgtttctctgtaagaacactcacctttcacgctttctgtcttctttcttccagggctctccccttgccctaggctctggccgttgcgcccggcggggtcaactccatgattagcatggagctgtaggagtctaaattggggacgcagatgtttgggacgtcgccttgcagtgttaacttggctctcatgaacctctttgatcttccacaaggggtaggctacgggtgaaacctcttaggctaatacttctatgaagagatgccttggatagggtaacagcggcggatattggtgagttgttaagacaaaaaccattcaacgccggaggactgactctcatccagtggatgcattgagtgaattgattgtcagggctgtctctaggtttaatctcagacctctctgtgcttagggcaaacactatttggccttaaatgggatcctgtgagagggggtccctccattgacagctggactgttctttggggccttatgtggtgtttgcctctgaggtactcaggggcatttaggtttttcctcattcttaaacaata

SEQ ID NO: 17938 - DNA, 733 bp, synthetic construct
  source 1..733: mol_type = other DNA
ttcaagaggggtttccggagttttccggagcccctcttggaagtccatggtgaggggacttgatacctcaccgccgtttgcctaggctataggctaaatttccctttccctgtccttacccccttccccttcgttttatttgtaaatattaattcctgcaggttcagggttctttaatctgtttctctataagaacactcacctttcacgctttctgtcttctttcttccagggctctccccttgccctaggctctggccgttgcgcccggcggggtcaactccatgattagcatggagctgtaggagtctaaattggggacgcagatgtttgggacgtcgccttgcagtgttaacttggctctcatgaacctctttgatcttccacaaggggtaggctacgggtgaaacctcttaggctaatacttctatgaagagatgccttggatagggtaacagcggcggatattggtgagttgttaagacaaaaaccattcaacgccggaggactgactctcatccagtggatgcattgagtgaattgattgtcagggctgtctctaggtttaatctcagacctctctgtgcttagggcaaacactatttggccttaaatgggatcctgtgagagggggtccctccattgacagctggactgttctttggggccttatgtggtgtttgcctctgaggtactcaggggcatttaggtttttcctcattcttaaataata

SEQ ID NO: 17939 - DNA, 733 bp, synthetic construct
  source 1..733: mol_type = other DNA
ttcaagaggggtttccggagttttccggagcccctcttggaagtccatggtgaggggacttgatacctcaccgccgtttgcctaggctataggctaaatttccctttccctgtccttcccctattcccctttgttttatttgtaaatattaattcctgcaggttcagggttctttaatctgtttctctataagaacactcatttttcacgctttctgtcttctttcttccagggctctccccttgccctaggctctggccgttgcgcccggcggggtcaactccatgattagcatggagctgtaggagtctaaattggggacgcagatgtttgggacgtcgccttgcagtgttaacttggctctcatgaacctctttgatcttccacaaggggtaggctacgggtgaaacctcttaggctaatacttctatgaagagatgccttggatagggtaacagcggcggatattggtgagttgttaagacaaaaaccattcaacgccggaggactgactctcatccagtggatgcattgagtgaattgattgtcagggctgtctctaggtttaatctcagacctctctgtgcttagggcaaacactatttggccttaaatgggatcctgtgagagggggtccctccattgacagctggactgttctttggggccttatgtggtgtttgcctctgaggtactcaggggcatttaggtttttcctcattcttaaacaata

SEQ ID NO: 17940 - DNA, 733 bp, synthetic construct
  source 1..733: mol_type = other DNA
ttcaagaggggtttccggagttttccggagcccctcttggaagtccatggtgaggggacttgatacctcaccgccgtttgcctaggctataggctaaatttccctttccctgtccttcccctattcccctttgttttgtttgtaaatattaattcctgcaggttcagggttctttaatctgtttctctataagaacactcacctttcacgctttctgtctcctttcttccagggctctccccttgccctaggctctggccgttgcgcccggcggggtcaactccatgattagcatggagctgtaggagtctaaattggggacgcagatgtttgggacgtcgccttgcagtgttaacttggctctcatgaacctctttgatcttccacaaggggtaggctacgggtgaaacctcttaggctaatacttctatgaagagatgccttggatagggtaacagcggcggatattggtgagttgttaagacaaaaaccattcaacgccggaggactgactctcatccagtggatgcattgagtgaattgattgtcagggctgtctctaggtttaatctcagacctctctgtgcttagggcaaacactatttggccttaaatgggatcctgtgagagggggtccctccattgacagctggactgttctttggggccttatgtggtgtttgcctctgaggtactcaggggcatttaggtttttcctcatttttaaacaata

SEQ ID NO: 17941 - DNA, 733 bp, synthetic construct
  source 1..733: mol_type = other DNA
ttcaagaggggtttccggagttttccggagcccctcttggaagtccatggtgaggggacttgatacctcaccgccgtttgcctaggctataggctaaatttccctttccctgtccttcccctattcccctttgttttgtttgtaaatattaattcctgcaggttcagggttctttaatctgtttctctataagaacactcacttttcacgctttctgtcttctcttttccagggctctccccttgccctaggctctggccgttgcgcccggcggggtcaactccatggttagcatggagctgtaggagtctaaattggggacgcagatgtttgggacgtcgccttgcagtgttaacttggctctcatgaacctctttgatcttccacaaggggtaggctacgggtgaaacctcttaggctaatacttctaagaagagatgccttggatagggtaacagcggcggatattggtgagttgttaagacaaaaaccattcaacgccggaggactgactctcatccagtggatgcattgagtgaattgattgtcagggctgtctctaggtttaatctcagacctctctgtgcttagggcaaacactatttggccttaaatgggatcctgtgagagggggtccctccattgacagctggactgttctttggggccttatgtggtgtttgcctctgaggtactcaggggcatttaggtttttcctcattctcaaacaata

SEQ ID NO: 17942 - DNA, 733 bp, synthetic construct
  source 1..733: mol_type = other DNA
ttcaagaggggtctccggagttttccggagcctctcttggaagtccatggtgaggggacttgatacctcaccgccgtttgcctaggctataggctaaatttccctctccctgtccttcccctattcccctttgttttgtttgtaaatattaattcctgcaggttcagggttctttaatctgtttctctataagaacactcgattttcacgctttctgtcttctttcttccagggctctccccttgccctaggctctggccgttgcgcccggcggggtcaactccatgattagcatggagctgtaggagtctaaattggggacgcagatgtttgggacgtcgccttgcagtgttaacttggctctcatgaacctctttgatcttccacaaggggtaggctacgggtgaaacctcttaggctaatacttctatgaagagatgccttggatagggtaacagcggcggatattggtgagttgttaagacaaaaaccattcaacgccggaggactggctctcatccagtggatgcattgagtgaattgattgtcagggctgtctctaggtttaatcccagacctctctgtgcttagggcaaacactatttggccttaaatgggatcctgtgagagggggtccctccattggcagctggactgttctttggggccttatgtggtgtttgcctctgaggtactcaggggcatttaggtttttcctcattcttaaacaata

SEQ ID NO: 17943 - DNA, 733 bp, synthetic construct
  source 1..733: mol_type = other DNA
ttcaagaggggtctccggagttttccggagcccctcttggaagtccatggtgaggggacttgatacctcaccgccgtttgcctaggctataggctaaatttccctttccctgtccttcccctcttcccttttgttttatttgtaaatattaattcctgcaggttcagggttctttaatctgtttctctataagaacactcaagtttcacgctttctgtcttctttcttccagggctctccccttgccctaggctctggccgttgcgcccggcggggtcaactccatgattagcatggagctgtaggagtctaaattggggacgcagatgtttgggacgtcgccttgcagtgttaacttggctctcatgaacctctttgatcttccacaaggggtaggctacgggtgaaacctcttaggctaatacttctatgaagagatgccttgggtagggcaacagcggcggatattggtgagttgttaagacaaaaaccattcaacgccggaggactggctctcatccagtggatgcattgagtgaattgattgtcagggctgtctctaggtttaatctcagacctctctgtgcttagggcaaacaccatttggccttaaatgggatcctgtgagagggggtccctccattgacagctggactgttcttcggggccttatgtggtgtttgcctctgaggtactcaggggcatttaggtttttcctcattcttaaacaata

SEQ ID NO: 17944 - DNA, 733 bp, synthetic construct
  source 1..733: mol_type = other DNA
ttcaagaggggtttccggagttttccggagcccctcttggaagtccatggtgaggggacttgatacctcaccgccgtttgcctaggctataggctaaatttccctttccctgtccttcccttatttccctttatcttgtttgtaaatattaattcctgcaggttcagggttctttaatctgtttctctataagaacactcaattttcacgctttctgtcttctttcttccagggctctccccttgccctaggctctggccgttgcgcccggcggggtcaactccatgattagcatggagctgtaggagtctaaattggggacgcagatgtttgggacgtcgccttgcagtgttaacttggctctcatgaacctctttgatctttcacaaggggtaggctacgggtgaaaccccttaggctaatacttctatgaagagatgccttggatagggtaacagcggcggatattggtgagttgttaagacaaaaaccattcaacgccggaggactggctctcatccagtggatgcattgagtgaattgattgtcagggctgtctttaggtttaatctcagacctctctgtgcttagggcaaacactatttggccttaaatgggatcctgtgagagggggtccctccattgacagctggactgttctttggggccttatgtagtgtttgcctctgaggtactcaggggcatttaggtttttcctcactcttaaacaata

SEQ ID NO: 17945 - DNA, 733 bp, synthetic construct
  source 1..733: mol_type = other DNA
ttcaagaggggtctccggagttttccggagcccctcttggaagtccatggtgaggggacttgatacctcaccgccgtttgcctaggctataggctaaatttccctttccctgtcctttccctattcccctttgttttgtttgtaaatattaattcctgcaggttcagggttctttaatctgtttctctataagaacactcaattttcacgctttctgtcttctttcttccagggctctccccttgccctaggctctggccgttgcgcccggcggggtcaactccatgattagcatggagctgtaggagtctaaattggggacgcagatgtttgggacgtcgccttgcagtgttaacttggctctcatgaacctctttgatcttccacaaggggtaggctacgggtgaaacctcttaggctaatacttctatgaagagatgccttggatagggtaacagcggtggatattggtgagttgttaagacaaaaaccattcaacgccggaggactggctctcatccagtggatgcattgagtgaattgattgtcagggctgtctctaggtttaatcccagacctctctgtgcttagggcaaacactatttggccttaaatgggatcctgtgagagggggtccctccattgacagttggactgttctttggggccttatgtggtgtttgcctctgaggtactcaggggcatttaggtttttcctcattcttaaacaata

SEQ ID NO: 17946 - DNA, 443 bp, synthetic construct; identical to SEQ ID NO: 485
  source 1..443: mol_type = other DNA

SEQ ID NO: 17947 - DNA, 733 bp, synthetic construct
  source 1..733: mol_type = other DNA
ttcaagaggggtctccggagttttccggagcctctcttggaagtccatggtgaggggacttgatacctcaccgccgtttgcctaggctataggctaaatttccctttccctgtccttcccctattcccctttgttttgtttgtaaatattaattcctgcaggttcagggttctttaatctgtttctctataagaacactcaattttcacgctttctgtcttctttcttccagggctctccccttgccctaggctctggccgttgcgcccggcggggtcaactccatgattagcatggagctgtaggagtctaaattggggacgcagatgtttgggacgtcgccttgcagtgttaacttggctctcatgaacctctttgatctttcacaaggggtaggctacgggtgaaacctcttaggctaatacttctatgaagagatgccttggatagggtaacagcggcggatattggtgagttgttaagacaaaaaccattcaacgccggaggactggctctcatccagtggatgcattgagtgaattgattgtcagggctgtctctaggtttaatcccagacctctctgtgcttagggcaaacactatttggccttaaatgggatcctgtgagagggggtccctccattgacagctggactgttctttggggccttatgtagtgtttgcctctgaggtactcaggggcatttaggtttttcctcattcttaaacaata

SEQ ID NO: 17948 - DNA, 443 bp, synthetic construct; identical to SEQ ID NO: 486
  source 1..443: mol_type = other DNA

SEQ ID NO: 17949 - DNA, 527 bp, synthetic construct; identical to SEQ ID NO: 554
  source 1..527: mol_type = other DNA

SEQ ID NO: 17950 - DNA, 750 bp, synthetic construct
  source 1..750: mol_type = other DNA
ttcaagagaggtctccgggaattccggagtccctcttggaagtccatggtgaggggacttgatacctcaccgccgtttgcctaggctataggctaaattttccctttcccttttccctttcctattccctttgttttgtttgtaaatgttgattttgtaaatattagttcctgcaggttcagggttcttagatctgtttctctataagaacactcattttcacgctttctgtcttctttcttccagggctctccccttgccctaggctctggccgttgcgcccggcggggtcaactccatgattagcatggagctgtaggagtctaaattggggacacagatgtttggaacgtcaccttgcagtgttaacttggctttcatgaatctctttgatcttccacaaggggtaggctacgggtgaaacctcttaggctaatacttctatgaagagatgccttggatagggtaacagcggcggatattggtgagttgttaagacaaaaaccattcaacgccggaggactgactctcatccagtggatgcattgagtggattgactgtcagggctgtctttaggcttaattccagacctctctgtgcttggggcaaacatcatttggccttaaatgggattctgtgagaggggatccctccattaacagctggactgttctttggggccttatgtggtgtttgccgctgaggtactcaggggcatttaggtttttcctcattcttaaataataata

SEQ ID NO: 17951 - DNA, 749 bp, synthetic construct
  source 1..749: mol_type = other DNA
ttcaagaggggtctccggaggtttccggagcccctcttggaagtccatggtgaggggacttgatacctcaccgccgtttgcctaggctataggctaaatttccctttccctgtccttcccttatttccctttgttttgcttgtaaatattgattgtaaatattgattcctgcaggttcagggttctttaatcatgtttctctataagaacactcaattttcacgctttctgtcttctttcttccagggctctccccttgccctaggctctggccgttgcgcccggcggggtcaactccatgattagcatggagctgtaggagtctaaattggggacgcagatgtttgggacgtcaccttgcagtgttaacttggctctcatgaacctctttgatcttccacaaggggtaggctacgggtgaaacctcttaggctaatacttctatgaagagatgctttggatagggtaacagcggcggatattggtgagttgttaagacaaaaaccattcaacgccggaggactggctctcatccagtggatgcattgagtggattgattgtcagggctgtctctaggtttaatctcaagacctctctgtgcttagggcaaacaccatttggccttaaatgggatcctgtgagagggggtcccctccattgacagctggactgttctttggggccttatgtggtgtttgcctctgaggtactcaggggcatttaggtttttcctcattcttaaacaata

SEQ ID NO: 17952 - DNA, 749 bp, synthetic construct
  source 1..749: mol_type = other DNA
ttcaagaggggtttccggagatttccggagcccctcttggaagtccatggtgaggggacttgatacctcaccgccgtttgcctaggctataggctaaatttccctttccctgtccttcccttatttccctttgttttgcttgtaaatattgattgtaaatattgattcctgcaggttcagggttctttaatcatgtttctctataagaacactcaattttcacgctttctgtcttctttcttccagggctctccccttgccctaggctctggccgttgcgcccggcggggtcaactccatgattagcatggagctgtaggagtctaaattggggacgcagatgtttgggacgtcaccttgcagtgttaacttggctctcatgaacctctttgatcttccacaaggggtaggctacgggtgaaacctcttaggctaatacttctatgaagagatgctttggatagggtaacagcggcggatattggtgagttgttaagacaaaaaccattcaacgccggaggactggctctcatccagtggatgcattgagtggattgattgtcagggctgtctctaggtttaatctcaagacctctctgtgcttagggcaaacaccatttggccttaaatgggatcctgtgagagggggtcccctccattgacagctggactgttctttggggccttatgtggtgtttgccgctgaggtactcaggggcatttaggtttttcctcattcttaaacaata

SEQ ID NO: 17953 - DNA, 746 bp, synthetic construct
  source 1..746: mol_type = other DNA
ttcaagaagggtctccgggaatttccggagtccctcttggaagtccatggtgaggggacttgatacctcaccgccgtttgcctaggctataggctaaattttccctttcccttttccctttcctattccctttgttttgcttgtaaatattgatttgtaaatattgattcctgcaggttcagggttcttaaatctgtttctctataagaacactcatttcacgctttctgtcttctttcttccagggctctccccttgccctaggctctggccgttgcgcccggcggggtcaactccatgattagcatggagctgtaggagtctaaattggggacacagatgtttggaacgtcaccttgcagtgttaacttggctttcatgaatctctttgatcttccacaaggggtaggctacgggtgaaacctcttaggctaatacttctatgaagagatgccttggatagggtaacagcggcggatattggtgagttgttaagacaaaaaccattcaacgccggaggactgactctcatccagtggatgcattgagtggattgactgtcggggctgtctttaggcttaattccagacctctctgtgcttggggcaaacatcatttggccttaaatgggattctgtgagaggggatccctccattgccagctggactgttctttggggccttatgtggtgtttgccgctgaggtactcaggggcatttaggtttttcctcattcttaaataata

SEQ ID NO: 17954 - DNA, 707 bp, synthetic construct; identical to SEQ ID NO: 103
  source 1..707: mol_type = other DNA

SEQ ID NO: 17955 - DNA, 558 bp, synthetic construct; identical to SEQ ID NO: 604
  source 1..558: mol_type = other DNA

SEQ ID NO: 17956 - DNA, 625 bp, synthetic construct; identical to SEQ ID NO: 64
  source 1..625: mol_type = other DNA

SEQ ID NO: 17957 - DNA, 715 bp, synthetic construct
  source 1..715: mol_type = other DNA
ttcaagaggggcctccgggttttccggagcccctcttgggagtccatggtgaggggacttgatacctcaccgccgtttgcctaggctataggctaattttcccttttccctttccctgtgttattgtaaatattaattcctgcaggttcagggttcttgaatttgttctgctgtacagacactcatttcacgctctctgtctgcttttcttccagggctctccccttgccctaggctctggccgttgcgcccggcggggtcaactccatgattagcatggagctgtaggagtctaaattggggacacagatgttgggaacgtcaccttgcagtgttaacttggctttcatgaaactccttgatcttccacaagaggtaggctacgggtgaaacctcttaagctaatacttctatgaagagatgctttggatagggtaacagcggcggatattggtgagttgtatgacaaaaaccattcaacgccggaggactggctctcatccagtggatgcattgagtgaattgactgtcagggctgtctttaggcttaattcctgacctctctgtgcttagggcaaacaaaatttggccttaaatgaggctctgtgagagggggcctcgccattgaatgctggacatttctttggggccttatgttttgtttgcctctgaggtactcaggggcatttaggtttttcctcatcaataaataaat

SEQ ID NO: 17958 - DNA, 715 bp, synthetic construct
  source 1..715: mol_type = other DNA
ttcaagaggggcctccgggattcccggaatccctcttgggagtccatggtgaggggacttgatacctcaccgccgtttgcctaggctataggctaaacttccctttcccctttccctttattgttgtaaatattaattcctgcaggttcaggtctcttggatttgttccactttatggacactcatttcacgctttctgtctgcttttcttccagggctctccccttgccctaggctctggccgttgcgcccggcggggtcaactccatgactagcatggagctgtaggagtctaaattggggacacagatgttgggaacgtcaccttgcagtgttaacttggctttcatgaagctttttgatcttccacaagaggtaggctacgggtgaaacctcttaagctaatacttctatgaagagatgctttggatagggtaacagcggtggatattggtgagttgtttgacaaaaaccattcaacgccggaggactggctctcatccagtggatgcattaagtggattgtctgtcagggctgtctctaggtttaattcctgacctctctgtgcttagggcaaacaaaacttggccttaaatgaggtcctgtgagaggggacctcgccattgaatgctggacatttctttggggccttatgttttgtttgcctctgaggtactcaggggcatttaggtttttcctcatcaataaataatt

SEQ ID NO: 17959 - DNA, 416 bp, synthetic construct
  source 1..416: mol_type = other DNA
gtggttgtatcccacataccttaccctcccctccacacaggacggatcaatggactttgacctttggcaagcatatatggtatgattattggatacgattaaacggcagtagcgtggcgagctatggaaaaatcgcaattgtcgatagccatgttagtgacgcgcttcggcgtgctcctttggtgattcggcgactggttacaggagagtaggcagtgagctatgggcaaacctctgcagtattactcagagggaatgtgcaattgagacttgacgagcgtctctttgagatgtggcgcatgctcttggcattaccatagtgagcttccaggttgggaaacctggactgggcctatactacctgatagggtcgcggctggccgcctgtaactagtatagtcagttgaaaccccccc

SEQ ID NO: 17960 - DNA, 734 bp, synthetic construct
  source 1..734: mol_type = other DNA
ttcaagaggggtctccgggaatttccggagtccctcttggaagtccatggtgaggggacttgatacctcaccgccgtttgcctaggctataggctaaattttccctttcccttttccctttcctattccctttgttttgcttgtaaatattaattcctgcaggttcagggttcttaaatctgtttctctataagaacactcatttttcacgctttctgtcttctttcttccagggctctccccttgccctaggctctggccgttgcgcccggcggggtcaactccatgattagcatggagctgtaggagtctaaattggggacacagatgtttggaacgtcaccttgcagtgttaacttggctttcatgaatctctttgatcttccacaaggggtaggctacgggtgaaacctcttaggctaatacttctatgaagagatgccttggatagggtaacagcggcggatattggtgagttgttaagacaaaaaccattcaacgccggaggactgactctcatccagtggatgcattgagtggattgactgtcagggctgtctttaggcttaattccagacctctctgtgcttagggcaaacatcatttggccttaaatgggattctgtgagaggggatccctccattgacagctggactgttctttggggccttatgtggtgtttgcctctgaggtactcaggggcatttaggtttttcctcattcttaaataata

SEQ ID NO: 17961 - DNA, 733 bp, synthetic construct
  source 1..733: mol_type = other DNA
ttcaagaggggtctccggaggtttccggagcccctcttggaagtccatggtgaggggacttgatacctcaccgccgtttgcctaggctataggctaaatttccctttccctgtccctcccttatttccctttgttttgcttgtaaatattaattcctgcaggttcagggttctttaatctgtttctctataagaacactcaattttcacgctttctgtcttctttcttccagggctctccccttgccctaggctctggccgttgcgcccggcggggtcaactccatgattagcatggagctgtaggagtctaaattggggacgcagatgtttgggacgtcaccttgcagtgttaacttggctctcatgaacctctttgatcttccacaaggggtaggctacgggtgaaacctcttaggctaatacttctatgaagagatgctttggatagggtaacagcggcggatattggtgagttgttaagacaaaaaccattcaacgccggaggactggctctcatccagtggatgcattgagtggattgattgtcagggctgtctctaggtttaatctcagacctctctgtgcttagggcaaacaccatttggccttaaatgggatcctgtgagagggggtccctccattgacagctggactgttctttggggccttatgtggtgtttgcctctgaggtactcaggggcatttaggtttttcctcattcttaaacaata

SEQ ID NO: 17962 - DNA, 734 bp, synthetic construct
  source 1..734: mol_type = other DNA
ttcaagaggggtctccggagttttccggagcccctcttgggagtccatggtgaggggacttgatacctcaccgccgtttgcctaggctataggctaaatttccctttccctatccttctcctattcccctttgttttgtttgtaaatattaattcctgcaggttcagggttctttaatctgtttctctataagaacactcaattttcacgctttctgtcttctttcttccagggctctccccttgccctaggctctggccgttgcgcccggcggggtcaactccatgattagcatggagctgtaggagtctaaattggggacgcagatgtttgggacgtcaccttgcagtgttaacttggctctcatgaacctctttgatcttccacaaggggtaggctacgggtgaaacctcttaggctaatacttctatgaagagatgccttggatagggtaacagcggcggatattggtgagttgttaagacaaaaaccattcaacgccgaaggactggctctcatccagtggatgcattgagtgaattgattgtcagggctgtctctaggtttaatcccagacctctctgtgcttagggcaaacactcatttggccttaaatgggatcctgtgagagggggtccctccattggcagctggactgttctttggggccttatgtggtgtttgcctctgaggtactcaggggcatttaggtttttcctcattcttaaacaata

SEQ ID NO: 17963 - DNA, 715 bp, synthetic construct
  source 1..715: mol_type = other DNA
ttcaagaggggtctccggaattcccggagtccctcttgggagtccatggtgaggggacttgatacctcaccgccgtttgcctaggctataggctaaatttccctttcccctttccctttattgttgtaaatattaattcctgcaggttcaggtttcttggatttgttccactttatggacactcatttcacgctttctgtctgcttttcttccagggctctccccttgccctaggctctggccgttgcgcccggcggggtcaactccatgattagcatggagctgtaggagtctaaattggggacacagatgttgggaacgtcaccttgcagtgttaacttggctttcatgaagctttttgatcttccacaaggggtaggctacgggtgaaacctcttaagctaatacttctatgaagagatgctttggatagggtaacagcggcggatattggtgagttatttgacaaaaaccattcaacgccggaggactggctctcatccagtggatgcattaagtggattgtctgtcagggctgtctctaggtttaattcctgacctctctgtgcttagggcaaacaaaacttggccttaaatgaggtcctgtgagagggggcctcgccattgaatgctggacatttctttggggccttttgttttgtttgcctctgaggtactcaggggcatttaggtttttcctcatcaataaataatt

SEQ ID NO: 17964 - DNA, 716 bp, synthetic construct
  source 1..716: mol_type = other DNA
ttcaagaggggcctccgggattcccggagtccctcttgggagtccatggtgaggggacttgatacctcaccgccgtttgcctaggctataggctaaattttcccttttccctttccctttattattgtaaatattaattcctgcaggttcagggctcttggatttgttccactatatggacactcatttcacgctttctgtctgctatttttccagggctctccccttgccctaggctctggccgttgcgcccggcggggtcaactccatgattagcatggagctgtaggagtctaaattggggacacagatgttgggaacgtcaccttgcagtgttaacttggctttcatgaagctttttgatcttccacaagaggtaggctacgggtgaaacctcttaagctaatacttctatgaagagatgctttggatagggtaacagcggcggatattggtgagttgtttgacaaaaaccattcaacgccggaggactggctctcatccagtggatgcattaagtggattgtctgtcagggctgtctctaggcttaattcctgacctctctgtgcttagggcaaacaaaacttggccttaaatgaggtcctgtgagaggggacctcgccattgaatgctggacatttctttggggccttatgttttgtttgcctctgaggtactcaggggcatttaggtttttcctcattaattaattatt

SEQ ID NO: 17965 - DNA, 715 bp, synthetic construct
  source 1..715: mol_type = other DNA
ttcaagaggggcctccgggttttccggagcccctcttgggagtccatggtgaggggacttgatacctcaccgccgtttgcctaggctataggctaattttcccttttccctttccctgtgttattgtaaatattaattcctgcaggttcagggttcttgaatttgttctgctgtacggacactcatttcacgctctctgtctgcttttcttccagggctctccccttgccctaggctctggccgttgcgcccggcggggtcaactccatgattagcatggagctgtaggagtctaaattggggacacagatgttgggaacgtcaccttgcagtgttaacttggctttcatgaaactccttgatcttccacaagaggtaggctacgggtgaaacctcttaagctaatacttctatgaagagatgctttggatagggtaacagcggcggatattggtgagttgtatgacaaaaaccattcaacgccggaggactggctctcatccagtggatgcattgagtgaattgactgtcagggctgtctttaggcttaattcctgacctctctgtgcttagggcaaacaaaatttggccttaaatgaggctctgtgagagggggcctcgccattgaatgctggacatttctttggggccttatgttttgtttgcctctgaggtactcaggggcatttaggtttttcctcatcaataaataaat

SEQ ID NO: 17966 - DNA, 715 bp, synthetic construct
  source 1..715: mol_type = other DNA
ttcaagaggggcctccgggattcccggaatccctcttgggagtccatggtgaggggacttgatacctcaccgccgtttgcctaggctatgggctaaatttccctttcccctttccctttattgttgtaaatattaattcctgcaggttcaggtctcttgaatttgttccactttatggacactcatttcacgctttctgtctgctcttcttccagggctctccccttgccctaggctctggccgttgcgcccggcggggtcaactccatgattagcatggagctgtaggagtctaaattggggacacagatgttgggaacgtcaccttgcagtgttaacttggctttcatgaagctttttgatcttccacaagaggtaggctacgggtgaaacctcttaagctaatacttctatgaagagatgctttggatagggtaacagcggcggatattggtgagttgtttgacaaaaaccattcaacgccggaggactggctctcatccagtggatgcattaagtggattgtctgtcagggctgtctctaggtttaattcctgacctctctgtgcttagggcaaacaaaacttggccttaaatgaggtcctgtgagaggggacctcgccattgaatgctggacatttctttggggccttatgttttgtttgcctctgaggtactcaggggcatttaggtttttcctcatcaataaataatt

SEQ ID NO: 17967 - DNA, 733 bp, synthetic construct
  source 1..733: mol_type = other DNA
ttcaagaggggtctccggagttttccggagcccctcttggaagtccatggtgaggggacttgatacctcaccgccgtttgcctaggctataggctaaatttccctttccctgtccttcccctattcccctttgttttgtttgtaaatattaattcctgcaggttcagggttctttaatctgtttctctataagaacactcaattttcacgctttctgtcttctttcttccagggctctccccttgccctaggctctggccgttgcgcccggcggggtcaactccatgattagcatggagctgtaggagtctaaattggggacgcagatgtttgggacgtcaccttgcagtgttaacttggctttcatgaacctctttgatctttcacaagaggtaggctacgggtgaaacctcttaggctaatacttctatgaagagatgccttggatagggtaacagcggcggatattggtgagttgttaagacaaaaaccattcaacgccgaaggactggttctcatccagtggatgcattgagtgaattgattgtcaaggctgtctctaggtttaatcccagacctctctgtgcttagggcaaacactatttggccttaaatgggatcctgtgagagggggtccctccattgacagctggactgttctttggggccttatgtggtgtttgcctctgaggtactcaggggcatttaggtttttcctcattcttaaacaata

SEQ ID NO: 17968 - DNA, 733 bp, synthetic construct
  source 1..733: mol_type = other DNA
ttcaagaggggtctccggagttttccggagcccctcttggaagtccatggtgaggggacttgatacctcaccgccgtttgcctaggctataggctaaatttccctttccctgtcctttccctatttccctttgtcttgtttgtaaatataaatgcctgcaagttcagggttcttcaatctgtttctctataagaacactcaaatttcacgctttctgtcttctttcttccatggctctccccttgccctaggcacagggcgtcgcgcccggcggggtcaactccatcattagcatggagctgtaggagtctaaattggggacgcagatgtttgggacgtcaccttgcagtgttaacttggctttcatgaacctctttgatcttccacaaggggtaggctacgggtgaaaccccttaggctaatacttctatgaagagatgccttggatatggtaacagcggcggatattggtgaattgttaagacaaaaaccattcaacgccgaaggactggctctcatccagtggatgcattgagtgaattgattgtcagggctgtctctaggtttaatctcagacctctctgtgcttagggcaaacactatttggccttaaatgggatcctgtgagagggggtccctccattgacagctggactgttctttggggccttatgtagtgtttgcctctgaggtactcaggggcatttaggtttttcctcactcttaaacaaca

SEQ ID NO: 17969 - DNA, 733 bp, synthetic construct
  source 1..733: mol_type = other DNA
ttcaagaggggtctccggagatttccggagcccctcttggaagtccatggtgaggggacttgatacctcaccgccgtttgcctaggctataggctaaatttccctttccctgtcctttccctatttccttttgttttgtttgtaaatattaattcctgcaggttcagggttctttaatctgtttctctataagaacactcaattttcacgctttctgtctcctttcttccagggctctccccttgccctaggctctggccgttgcgcccggcggggtcaactccatgattagcatggagctgtaggagtctaaattggggacgcagatgtttgggacgtcgccttgcagtgttaacttggctttcatgaacctctttgatcttccacaaggggtaggctacgggtgaaacctcttaggctaatacttctatgaagagatgccttggatagggtaacagcggcggatattggtgagttgttaagacaaaaaccattcaacgccgaaggactggctctcatccagtggatgcattgagggaattgattgtcagggctgtctctaggtttaatctcagacctctctgtgcttagggcaaacactatttggccttaaatgggatcctgtgagagggggtccctccattgacagctggactgttctttggggccttatgtggtgtttgcctctgaggtactcaggggcatttaggtttttcctcattcttaaacaata

SEQ ID NO: 17970 - DNA, 733 bp, synthetic construct
  source 1..733: mol_type = other DNA
ttcaagaggggtctccggagttttccggagtccctcttggaagtccatggtgaggggacttgatacctcaccgccgtttgcctaggctataggctaaatttcccattccctgtccttcccctatttccctttgttttgtttgtaaatattaattcctgcaggttcagggttctttaatctgtttctctataagaacactcaattttcacgctttctgtcttctttcttccagggctctccccttgccctaggctctggccgttgcgcccggcggggtcaactccatgattagcatggagctgtaggagtctaaattggggacgcagatgtttgggacgtcaccttgcagtgttaacttggctttcatgaacctctttgatcttccacaaggggtaggctacgggtgaaaccccttaggctaatacttctatgaagagatgccttggatagggtaacagcggcggatattggtgagttgttaagacaaaaaccattcaacgccgaaggactggctctcatccagtggatgcattgagtgaattgattgtcagggctgtctctaggtttaatctcagacctctctgtgcttagggcaaacactatttggccttaaatgggatcctgtgagagggggtccctccattgacagctggactgttctttggggccttatgtggtgtttgcctctgaggtactcaggggcatttaggtttttcctcattcttaaatgata

SEQ ID NO: 17971 - DNA, 733 bp, synthetic construct
  source 1..733: mol_type = other DNA
ttcaagaggggtgtccggagttttccggagtccctcttggaagtccatggtgaggggacttgatacctcaccgccgtttgcctaggctataggctaaattttcccttccctgtccttcccctatttccccttgttttgtttgtaaatattaattcctgcaggttcagggttctttaatctgtttctctataagaacactcaattttcacgctttctgtcttctttcttccagggctctccccttgccctaggctctggccgttgcgcccggcggggtcaactccatgattagcatggagctgtaggagtctaaattggggacgcagatgtttgggacgtcgccttgcagtgttaacttggctctcatgaacctctttgatcttccacaaggggtaggctacgggtgaaacctcttaggctaatacttctatgaagagatgccttggatagggtaacagcggcggatattggtgagttgttaagacaaaaaccattcaacgccggaggactggctctcatccagtggatgcattgagtgaattgattgtcagggctgtctctaggtttaatctcagacctctctgtgcttagggcaaacactatttggccttaaatgggatcctgtgagagggggtccctccattgacagctggactgttctttggggccttatgtggtgtttgcctctgaggtactcaggggcatttaggtttttcctcattcttaaataata

SEQ ID NO: 17972 - DNA, 733 bp, synthetic construct
  source 1..733: mol_type = other DNA
ttcaagaggggtgtccggagttttccggagcctctcttggaagtccatggtgaggggacttgatacctcaccgccgtttgcctaggctataggctaaatttccctttccctgtccttcccctatttccctttgttttgtttgtaaatattaattcctgcaggttcagggttctttaatctgtttctctataagaacactcaattttcacgctttctgtcttctttcttccagggctctccccttgccctaggctctggccgttgcgcccggcggggtcaactccatgattagcatggagctgtaggagtctaaattggggacgcagatgtttgggacgtcaccttgcagtgttaacttggctctcatgaacctctttgatcttccacaaggggtaggctacgggtgaaacctcttaggctaatacttctatgaagagatgccttggatagggtaacagcggcggatattggtgagttgttaagacaaaaaccattcaacgccggaggactggctctcatccagtggatgcattgagtgaattgattgtcagggctgtctctaggtttaatcccagacctctctgtgcttagggcaaacactatttggccttaaatgggatcctgtgagagggggtccctccattgccagctggactgttctttggggccttatgtggtgtttgcctctgaggtactcaggggcatttaggtttttcctcattcttaaataata

SEQ ID NO: 17973 - DNA, 715 bp, synthetic construct
  source 1..715: mol_type = other DNA
ttcaagaggggcctccgggattcccagagttcctcttgggagtccatggtgaggggacttgatacctcaccgccgtttgcctaggctataggctaaacttccctttcccctttccctttattgttgtaaatattaattcctgcaggttcaggtctcttggatttgttccactttatggacactcatttcacgctttctgtctgcttttcttccagggctctccccttgccctaggctctggccgttgcgcccggcggggtcaactccatgattagcatggagctgtaggagtctaaattggggacacagatgttgggaacgtcaccttgcagtgttaacttggctttcatgaagctttttgatcttccacaagaggtaggctacgggtgaaacctcttaggctaatacttctatgaagagatgctttggatagggtaacagcggcggatattggtgagttgtttgacaaaaaccattcaacgccggaggactggctctcatccagtggatgcattaagtggattgtctgtcagggctgtctctaggtttaattcctgacctctctgtgcttagggcaaacaaaactcggccttaaatgaggtcctgtgagaggggacctcgccattgaatgctggacgtttctttggggccttatgttttgtttgcctctgaggtactcaggggcatttaggtttttcctcatcaataaataatt

SEQ ID NO: 17974 - DNA, 733 bp, synthetic construct
  source 1..733: mol_type = other DNA
ttcaagaggggtctccggagttttccggagcccctcttggaagtccatggtgaggggacttgatacctcaccgccgtttgcctaggctataggctaaatttccctttccctgtcccttccctatttccctttgttttgtttgtaaatattaattcctgcaggttcagggttctttaatctgtttctctataagaacactcaattttcacgctttctgtcttctttcttccagggctctccccttgccctaggctctggccgttgcgcccggcggggtcaactccatgattagcatggagctgtaggagtctaaattggggacgcagatgtttgagacgtcgccttgcagtgttaacttggctctcatgaatctctttgatcttccacaaggggtaggctacgggtgaaacctcttaggctaatacttctatgaagagatgctttggatagggtaacagcggcggatattggtgagttgttaagacaaaaaccattcaacgccggaggactggctctcatccagtggatgcattgagtggattgattgtcagggctgtctctaggtttaatctcggacctctctgtgcttagggcaaacaccatttggccttaaatgggatcctgtgagagggggtccctccattgacagctggactgttctttggggccttatgtggtgtttgcctctgaggtactcaggggcatttaggtttttcctcattcttaaacaata

SEQ ID NO: 17975 - DNA, 732 bp, synthetic construct
  source 1..732: mol_type = other DNA
ttcaagaggggtgtccggagttttccgagcctctcttggaagtccatggtgaggggacttgatacctcaccgccgttcgcctaggctataggctaaatttccctttccctgtccttcccctatttccctttgttttgtttgtaaatattaattcctgcgggttcagggttctttaatctgtttctctataagaacactcaattttcacgctttctgtcttctttcttccagggctctccccttgccctaggctctggccgttgcgcccggcggggtcaactccatgattagcatggagctgtaggagtctaaattggggacgcagatgtttgggacgtcaccttgcagtgttaacttggctctcatgaacctctttgatcttccacaaggggtaggctacgggtgaaacctcttaggctaatacttctatgaagagatgccttggatagggtaacagcggcggatattggtgagttgttaagacaaaaaccattcaacgccggaggactggctctcatccagtggatgcattgagtgaattgattgtcagggctgtctctaggtttaatcccagacctctctgtgcttagggcaaacactatttggccttaaatgggatcctgtgagagggggtccctccattgccagctggactgttctttggggccttatgtggtgtttgcctctgaggtactcaggggcatttaggtttttcctcattcttaaataata

SEQ ID NO: 17976 - DNA, 715 bp, synthetic construct
  source 1..715: mol_type = other DNA
ttcaagaggggcctccgggattcccggagtccctcttgggagtccatggtgaggggacttgatacctcaccgccgtttgcctaggctataggctaaacttcccttttccctttccctttattattgtaaatattaattcctgcaggctcagggttcttggatttgttccactatatggacactcatttcacgctttctgtcttcttttcttccagggctctccccttgccctaggctctggccgttgcgcccggcggggtcaactccatgattagcatggagctgtaggagtctaaattggggacacagatgttgggaacgtcaccttgcagtgttaacttggctttcatgaagctttttgatcttccacaagaggtaggctacgggtgaaacctcttaagctagtacttctatgaagagatgctttggatagggtaacagcggcggatattggtgagttatttgacaaaagccattcaacgccggaggactggctctcatccagtggatgcattaagtggattgtctgtcagggctgtctctaggtttaattcctgacctctctgtgcttagggcaaacaaaacttggccttaaatgaggtcctgtgagaggggacctcgccattgaatgctggacatttctttggggccttatgttttgtttgcctctgaggtactcaggggcatttaggtttttcctcatcaataaataatt

SEQ ID NO: 17977 - DNA, 715 bp, synthetic construct
  source 1..715: mol_type = other DNA
ttcaagaggggtctccgggattcccggagtccctcttgggagtccatggtgaggggacttgatacctcaccgccgtttgcctaggctataggctaaattttcctttcccctttccctttattgttgtaaatattaattcctgcaggttcaggtctcttggatttgttccactttatggacactcatttcacgctttctgtctgcttttcttccagggctctccccttgccctaggctctggccgttgcgcccggcggggtcaactccatgattagcatggagctgtaggagtctaaattggggacacagatgttgggaacgtcaccttgcagtgttaacttggctttcatgaagctttttgatcttccacaagaggtaggctacgggtgaaacctcttaagctaatacttctatgaagagatgctttggatagggtaacagcggcggatattggtgagttgcttgacaaaaaccattcaacgccggaggactggctctcatccagtggatgcattaagtggattgtctgtcagggctgtctctaggtttaattcctggcctctctgtgcttagggcaaacaaaacttggccttaaatgaggtcctgtgagaggggacctcgccattgaatgctggacatttctttggggccttatgttttgtttgcctctgaggtactcaggggcatttaggtttttcctcatcaataaataatt

SEQ ID NO: 17978 - DNA, 732 bp, synthetic construct
  source 1..732: mol_type = other DNA
ttcaagaagggtctccgggaatttccggagtccctcttggaagtccatggtgaggggacttgatacctcaccgccgtttgcctaggctataggctaaattttccctttcccttttccctttcctattccctttgttttgcttgtaaatattgattcctgcaggttcagggttcttaaatctgtttctctataagaacactcatttcacgctttctgtcttctttcttccagggctctccccttgccctaggctctggccgttgcgcccggcggggtcaactccatgattagcatggagctgtaggagtctaaattggggacacagatgtttggaacgtcaccttgcagtgttaacttggctttcatgaatctctttgatcttccacaaggggtaggctacgggtgaaacctcttaggctaatacttctatgaagagatgccttggatagggtaacagcggcggatattggtgagttgttaagacaaaaaccattcaacgccggaggactgactctcatccagtggatgcattgagtggattgactgtcagggctgtctttaggcttaattccagacctctctgtgcttagggcaaacatcatttggccttaaatgggattctgtgagaggggatccctccattgacagctggactgttctttggggccttatgtggtgtttgccgctgaggtactcaggggcatttaggtttttcctcattcttaaataata

SEQ ID NO: 17979 - DNA, 638 bp, synthetic construct; identical to SEQ ID NO: 764
  source 1..638: mol_type = other DNA

SEQ ID NO: 17980 - DNA, 589 bp, synthetic construct; identical to SEQ ID NO: 27
  source 1..589: mol_type = other DNA

SEQ ID NO: 17981 - DNA, 600 bp, synthetic construct; identical to SEQ ID NO: 650
  source 1..600: mol_type = other DNA

SEQ ID NO: 17982 - DNA, 600 bp, synthetic construct
  source 1..600: mol_type = other DNA
agctttcttatccttcatttgtgaacccactagtctaagccgcttggaatacgatgagtggaaacgttcattctaaatggagtgaaacatgcttaattttctagctcgtgctggtctttccagtgcggggcggccctgtctggccgtaactctacagagtgtcacgccgtgcttgcggatctcacgtggcacatgacaaggctctcgctggaattgtgagtctgatgtatgtggagtaacagtgaaaagtgcatgatcacacatctgtgtgggctatgagcctgcggaacaacaactggtaacagttgcctcaggggccgaaagccacggtgttaacagcaccctcatagtttgatctatcccaggatagtgatgttgtgtacctagtaattgccaatccccatgccttggtatcacggcataccggagagttcgcgggtgaaggatgcccagaaggtacccgtaggtaaccttaagagactatggatctgatctggggccctgtctggagtgctttacacacagctcagggttaaaaaacgtctagcccgccaagacccgagggattcgggttttcccttaaaaacccgactagagcat

SEQ ID NO: 17983 - DNA, 440 bp, synthetic construct
  source 1..440: mol_type = other DNA
tcatttcccccctccacccttaaggtggttgtatcccacataccttatcctcccctccacacaggatggatctatggactttgacctttggcaagcatatatggtatgattattggatacgattaaacggcagtagcgtggcgagctatggaaaaatcgcaattgtcgatagccatgttagtgacgcgcttcggcgtgctcctttggtgattcggcgactggttacaggagagtaggcagtgagctatgggcaaacctctgcagtattactcagagggaatgtgcaattgagacttgacgagcgtctctttgagatgtggcgcatgctcttggcattaccatagtgagcttccaggttgggaaacctggactgggcctatactacctgatagggtcgcggctggccgcctgtaactagtatagtcagttgaaaccccccc

SEQ ID NO: 17984 - DNA, 734 bp, synthetic construct
  source 1..734: mol_type = other DNA
ttcaagaggggtctccgggaatttccggagtccctcttggaagtccatggtgaggggacttgatacctcaccgccgtttgcctaggctataggctaaattttccctttcccttttccctttcctattccctttgttttgcttgtaaatattgattcctgcaggttcagggttcttaaatctgtttctctataagaacactcatttttcacgctttctgtcttctttcttccagggctctccccttgccctaggctctggccgttgcgcccggcggggtcaactccatgattagcatggagctgtaggagtctaaattggggacacagatgtttggaacgtcaccttgcagtgttaacttggctttcatgaatctctttgatcttccacaaggggtaggctacgggtgaaacctcttaggctaatacttctatgaagagatgccttggatagggtaacagcggcggatattggtgagttgttaagacaaaaaccattcaacgccggaggactgactctcatccagtggatgcattgagtggattgactgtcagggctgtctctaggcttaattccagacctctctgtgcttggggcaaacatcatttggccttaaatgggattctgtgagaggggatccctccattgccagctggactgttctttggggccttaggtggtgtttgccgctgaggtactcaggggcatttaggtttttcctcattcttaaataata

SEQ ID NO: 17985 - DNA, 726 bp, synthetic construct
  source 1..726: mol_type = other DNA
ttcaagaggggtctccggggatttccggagtccctcttggaagtccatggtgaggggacttgatacctcaccgccgtttgcctaggctataggctaaattttccctttccccttccccttccttgttttgattgtaaatattaattcctgcaggttcagggttcttaaatctgtttctctataagcaacactgaattttcacgctttctgtcttttttcttccagggctctccccttgccctaggctctggccgttgcgcccggcggggtcaagtccatgattagcatggagctgaaggagtctaaattggggacacagatgtttggaacgtcaccttgcagtgttaacttggctttcatgaatctctttgatcttccacaagaggtaggctacgggtgaaacctcttaggctaatacttctatgaagagatgctttggatagggtaacagcggcggatattggtgagttgttaagacaaaaaccattcaacgccggaggactgactctcatccagtggatgcattgagtggattgactgtcagggctgtctctaggcttaattccagacctctctgtgcttagggcaaacatcatttggccttaaatggggttctgtgagaggggatccctccattgacagctggactgttctttggggccttatgtggtgtttgcctctgaggtactcaggggcatttaggtttttcctcattctcaaataata

SEQ ID NO: 17986 - DNA, 587 bp, synthetic construct
  source 1..587: mol_type = other DNA
tgcgggtttgctgctttcacagagtaaagcagatagagattttgtactggcacacttaatctcgaaacgcgctcgttctgctgtgtagttcagtctgtcctgtcacacttgtgacggctcgcgacactgtacacatagtgaaaccgaccaagacaaaagcttcaaataatgaacctcgaaatcccaaactggatccgtagctggacatgttagggtaaggaacacccccctggtgacagggaccttactggccaaaagccccgctctctgagcctagcatgttgttgatcccgaactgttcagtttggttagtacagggaatttctttgctgtctttgttcagaactcggtttctagtgagacagcctaaggatgccctccaggtaccccggggtaacaagcgacacccaggatctgaggaggggaccgccctgcgcggtttaaaaaacttctaagctgttatggtgaccagaggctggcacctttcactttaaaacacttattaactggtcacaaacaaaagaatcccgttttacagactttcaaactagttacacaagtactgtttcacttacaacaattgttat

SEQ ID NO: 17987 - DNA, 729 bp, synthetic construct
  source 1..729: mol_type = other DNA
ttcaagaggggtctccgggaatttccggagtccctcttggaagtccatggtgaggggacttgatacctcaccgccgtttgcctaggctataggctaaattttccctttcccttttccctttcccattcccttttgcttgtaaatattgattcctgcaggttcagggttcttaaatctgtttctctataagaacactcattttcacgctttctgtcttctttcttccagggctctccccttgccctaggctctggccgttgcgcccggcggggtcaactccatgattagcatggagctgtaggagtctaaattggggacacagatgtttggaacgtcaccttgcagtgttaacttggctttcatgaatctctttgatcttccacaaggggtaggctacgggtgaaacctcttaggctaatacttctatgaagagatgccttggatagggtaacagcggcggatattggtgagttgttaagacaaaaaccattcaacgccggaggactgactctcatccagtggatgcattgagtggattgactgtcagggctgtctttaggcttaattccagacctctctgtgcttagggcaaacatcatttggccttaaatgggattctgtgagaggggatccctccattgacagctggactgttctttggggccttatgtggtgtttgcctctgaggtactcaggggcatttaggtttttcctcattcttaaataata

SEQ ID NO: 17988 - DNA, 729 bp, synthetic construct
  source 1..729: mol_type = other DNA
ttcaagaggggtctccgggaatttccagagtccctcttggaagtccatggtgaggggacttgatacctcaccgccgtttgcctaggccataggctaaattttccccttcccttttccctttcccattcccttttgcttgtaaatattgattcctgcaggttcagggttcttaaatctgtttctctataagaacactcattttcacgctttctgtcttctttcttccagggctctccccttgccctaggctctggccgttgcgcccggcggggtcaactccatgattagcatggagctgtaggagtctaaattggggacacagatgtttggaacgtcaccttgcagtgttaacttggctttcatgaatctctttgatcttccacaaggggtaggctacgggtgaaacctcttaggctaatacttctatgaagagatgccttggatagggtaacagcggcggatattggtgagttgttaagacaaaaaccattcaacgccggaggactgactctcatccagtggatgcattgagtggattgactgtcagggctgtctttaggcttaattccagacctctctgtgcttggggcaaacatcatttggccttaaatgggattctgtgagaggggatccctccattaacagctggactgttctttggggccttatgtggtgtttgccgctgaggtactcaggggcatttaggtttttcctcattcttaaataata

SEQ ID NO: 17989 - DNA, 715 bp, synthetic construct
  source 1..715: mol_type = other DNA
ttcaagaggggcctccgggattcccggagttcctcttgggagtccatggtgaggggacttgatacctcaccgccgtttgcctaggctataggctaaacttccctttcccctttccctttattgttgtaaatattaattcctgcaggttcaggtttcttggatttgttccactttatggacactcatttcacgctttctgtctgcttttcttccagggctctccccttgccctaggctctggccgttgcgcccggcggggtcaactccatgattagcatggagctgtaggagtctaaattggggacacagatgttgggaacctcaccttgcattgttaacttggctttcatgaagctttttgatcttccacaagaggtaggctacgggtgaaacctcttaagctaatacttctatgaagagatgctttggatagggtaacagcggcggatattggtgagttgtttgacaaaaaccattcaacgccggaggactggctctcatccagtggatgcattaagtggattgtctgtcagggctgtctctaggtttaattcctgacctctctgtgcttagggcaaacaaaacttggccttaaatgaggtcctgtgagaggggacctcgccattgaatgctggacatttctttggggccttatgttttgtttgcctctgaggtactcaggggcatttaggtttttcctcatcaataaataatt

SEQ ID NO: 17990 - DNA, 663 bp, synthetic construct; identical to SEQ ID NO: 80
  source 1..663: mol_type = other DNA

SEQ ID NO: 17991 - DNA, 503 bp, synthetic construct
  source 1..503: mol_type = other DNA
ttattttcttgatcttatttctacttttgcgggttctatccgtaaaaagggtacgtgctgccccttccttctctggagaattcacacggcggtctttccgtctctcaacaagtgtgaatgcagcatgccggaaacggtgaagaaaacagttttctgtggaaatttagagtgcacatcgaaacagctgtagcgacctcacagtagcagcggactcccctcttggcgacaagagcctctgcggccaaaagccccgtggataagatccactgctgtgagcggtgcaaccccagcaccctggttcgatgatcattctctatggaaccagaaaatggttttctcaagccctccggtagagaagccaagaatgtcctgaaggtaccccgcgtgcgggatctgatcaggagaccaattggcggtgctttacactgtcactttggtttaaaaattgtcacagcttctccaaaccaagtggtcttggttttccaattttgttgaatggcaat

SEQ ID NO: 17992 - DNA, 601 bp, synthetic construct
  source 1..601: mol_type = other DNA
agctttcctacccttcatttgtgaacccactagtccaagccgcttggaatacgatgagtggaaatgttcattctaaatggagtgaaacatgcttaattttctagtccatgctggtctttccagtgtggagcggccctgtctggccgtaattctccagagcgtcacgccatacttgtggacctcacgtgccgcatgacagcgctgcagctggaactgggtgcgcggtgcccatagagtaacagcgaaaagtgttagatcaagctttgcttgggctatgagcctgcggaataacaactggtaacagttgcctcaggggccgaaagccacggtgttaacagcaccctcatagtttgatccaccccagggtggtgatgtttaacagttagtagttgccaatctgtgttcactgaaatctcggcataccgtgcagtgtacaggggtgaaggatgcccagaaggtacccgtaggtaaccttaagagactatggatctgatctggggccttgtccggagtgctttacacacggctcaaggttaaaaaacgtctagccccacagagcccgagggattcgggttttcccttaaaaacccgactagagctt

SEQ ID NO: 17993 - DNA, 418 bp, synthetic construct
  source 1..418: mol_type = other DNA
ttaaggtggttgtatccccataccttaccctcccttccacactggacggataaatggacttggatttatggcaagtacatatggtatgaatctggatacacttgaatggcagtagcgtggcgagctatggaaaaatcgcaactgtcgatagccatgttagtgacgcgcttcggcgtgctcctttggtgattcggcgactggttacaggagagtaggcagtgagctatgggcaaacctctgcagtattactcagagggaatgtgcaattgagacttgacgagcgtctctttgagatgtggcgcatgctcttggcattaccatagtgagcttccaggttgggaaacctggactgggcctatactacctgatagggtcgcggctggccgcctgtaactagtatagtcagttgaaacccccc

SEQ ID NO: 17994 - DNA, 724 bp, synthetic construct
  source 1..724: mol_type = other DNA
gtctccgggaatttccggagtccctcttggaagtccatggtgaggggacttgatacctcaccgccgtttgcctaggctataggctaaattttccctttcccttttccctttcctattccctttgttttgcttgtaaatattgattcctgcaggttcagggttcttaaatctgtttctctataagaacactcatttttcacgctttctgtcttctttcttccagggctctccccttgccctaggctctggccgttgcgcccggcggggtcaactccatgattagcatggagctgtaggagtctaaattggggacacagatgtttggaacgtcaccttgcagtgttaacttggctttcatgaatctctttgatcttccacaaggggtaggctacgggtgaaacctcttaggctaatacttctatgaagagatgccttggatagggtaacagcggcggatattggtgagttgttaagacaaaaaccattcaacgccggaggactgactctcatccagtggatgcattgagtggattgactgtcagggctgtctttaggcttaattccagacctctctgtgcttagggcaaacatcatttggccttaaatgggattctgtgagaggggatccctccattgacagctggactgttctttggggccttatgtggtgtttgccgctgaggtactcaggggcatttaggtttttcctcattcttaaataata

SEQ ID NO: 17995 - DNA, 417 bp, synthetic construct
  source 1..417: mol_type = other DNA
ttaaggtggttgtatcccataccctaccctcccttccacaaaggacggataaatggacttgaacttatggcacgaacgtatggtatgattctggatacaccttaatggtagtagcgtggcgagctatggaaaaatcgcaattgtcgatagccatgttagtgacgcgcttcggcgtgctcctttggtgattcggcgactggttacaggagagtaggcagtgagctatgggcaaacctctgcagtattactcagagggaatgtgcaattgagacttgacgagcgtctctttgagatgtggcgcatgctcttggcattaccatagtgagcttccaggttgggaaacctggactgggcctatactacctgatagggtcgcggctggccgcctgtaactagtatagtcagttgaaacccccc

SEQ ID NO: 17996 - DNA, 717 bp, synthetic construct
  source 1..717: mol_type = other DNA
ggaaatttccggagtccctcttggaagtccatggtgaggggacttgatacctcaccgccgtttgcctaggctataggctaaattttcccttcccctttcccttccctattccctttattttgtttgtaaatattaattcctgcaggttcagggttctcaaatctgtttctctataagaacactcatttttcacgctttctgtcttctttcttccagggctctccccttgccctaggctctggccgttgcgcccggcggggtcaactccatgattagcatggagctgtaggagtctaaattggggacacagatgtttgggacgtcaccttgcagtgttaacttggctttcatgaatctctttgatcttccacaaggggtaggctacgggtgaaacctcttaggctaatacttctatgaagagatgctttggatagggtaacagcggcggatattggtgagttgttaagacaaaaaccattcaacgccggaggactgactctcatccagtggatgcattgagtggattgactgtcagggctgtctctaggcttaattccagacctctctgtgcttagggcaaacatcatttggccttaaatgggattctgtgagaggggatccctccattgactgctggactgttctttggggccttatgtggtgtttgcctctgaggtactcaggggcatttaggtttttcctcattctcaaataatg

SEQ ID NO: 17997 - DNA, 715 bp, synthetic construct
  source 1..715: mol_type = other DNA
ttcaagaggggcctccgggattcccggagtctctcttgggagtccatggtgaggggacttgatacctcaccgccgtgtgcctaggctataggctaaatttccctttcccctctccctttattcttgtatatattaattcctgcaggttcaggtctcttggatttgttccactttatggacactcatttcacgctttctgtctgcttttcttccagggctctccccttgccctaggctctggccgttgcgcccggcggggtcaactccatgattagcatggagctgtaggagtctaaattggggacacagatgttgggaacgtcaccttgcagtgttaacttggctttcatgaagctttttgatcttccacaagaggtaggctacgggtgaaacctcttaagctaatacttctatgaagagatgctttggatagggtaacagcggcggatattggtgagttgtttgacaaaaaccattcaacgccggaggactggctctcatccagtggatgcattaagtggattgtctgtcagggctgtctctaggtttaattcctgacctctctgtgcttagggcaaacaaaacttggccttaaatgaggtcctgtgagaggggacctcgccatcgaatgctggacatttctttggggccttatgttttgtttgcctctgaggtactcaggggcatttaggtttttcctcatcaataaataatt

SEQ ID NO: 17998 - DNA, 716 bp, synthetic construct; identical to SEQ ID NO: 887
  source 1..716: mol_type = other DNA

SEQ ID NO: 17999 - DNA, 717 bp, synthetic construct
  source 1..717: mol_type = other DNA
ggaaatttccggagtccctcttggaagtccatggtgaggggacttgatacctcaccgccgtttgcctaggctataggctaaattttcccttcccctttcccttccctattccctttattttgtttgtaaatattaattcctgcaggttcagggttctcaaatctgtttctctataagaacactcatttttcacgctttctgtcttctttcttctagggctctccccttgccctaggctctggccgttgcgcccggcggggtcaactccatgattagcatggagctgtaggagtctaaattggggacacagatgtttgggacgtcaccttgcagtgttaacttggctttcatgaatctctttgatcttccacaaggggtaggctacgggtgaaacctcttaggctaatacttctatgaagagatgctttggatagggtaacagcggcggatattggtgagttgttaagacaaaaaccattcaacgccggaggactgactctcatccagtggatgcattgagtggattgactgtcagggctgtctctaggcttaattccagacctctctgtgcttagggcaaacatcatttggccttaaatgggattctgtgagaggggatccctccattgactgctggactgttctttggggccttatgtggtgtttgcctctgaggtactcaggggcatttaggtttttcctcattctcaaataata

SEQ ID NO: 18000 - DNA, 715 bp, synthetic construct
  source 1..715: mol_type = other DNA
ttcaagaggggtctccgggttttctggagcccctcttgggagtccatggtgaggggacttgatacctcaccgccgtttgcctaggctataggctaattttcccttttccttttccctgtgttattgtaaatattaattcctgcaggttcagggttcttgaatttgttctgctgtacggacactcttttcacgctctctgtctgcttttcttccagggctctccccttgccctaggctctggccgttgcgcccggcggggtcaactccatgattagcatggagctgtaggagtctaaattggggacacagatgttgggaacgtcaccttgcagtgttaacttggctttcatgaaactccttgatcttccacaagaggtaggctacgggtgaaacctcttaagctaatacttctatgaagagatgctttggatagggtaacagcggcggatattggtgagttgtatgacaaaaaccattcaacgccggaggactggctctcatccagtggatgcattgagtgaattgactgtcagggctgtctttaggcttaattcctgacctctctgtgcttagggcaaacaaaatttggccttaaatgaggctctgtgagagggggcctcgccattgaatgctggacatttctttggggccttatgttttgtttgccgctgaggtactcaggggcatttaggtttttcctcatcaataaataaat

SEQ ID NO: 18001 - DNA, 716 bp, synthetic construct
  source 1..716: mol_type = other DNA
gggaatttccggagtccctcttggaagtccatggtgaggggacttgatacctcaccgccgtttgcctaggctataggctaaattttccccttccctttccctttcctattcccttgttttgcttgtaaatattaattcctgcaggttcagggttcttaaatctgtttctctataagaacactcatttttcacgctttctgtcttctttcttccagggctctccccttgccctaggctctggccgttgcgcccggcggggtcaactccatgattagcatggagctgtaggagtctaaattggggacacagatgtttggaacgtcaccttgcagtgttaacttggctttcatgaatctctttgatcttccacaaggggtaggctacgggtgaaacctcttaggctaatacttctatgaagagatgctttggatagggtaacagcggcggatattggtgagttgttaagacaaaaaccattcaacgccggaggactgactctcatccagtggatgcattgagtggattgactgtcagggctgtctctaggcttaattccagacctctctgtgcttagggcaaacatcatttggccttaaatgggattctgtgagaggggatccctccattgactgctggaccgttctttggggccttatgtggtgtttgcctctgaggtactcaggggcatttaggtttttcctcatttttaaataata

SEQ ID NO: 18002 - DNA, 703 bp, synthetic construct
  source 1..703: mol_type = other DNA
cccctcttggaagtccatggtgaggggacttgatacctcaccgccgtttgcctaggctataggctaaatttccctttccctgtccttcccttatttccctttgttttacttgtaaatattaattcctgcaggttcagggttctttaatctgtttctctataagaacactcaattttcacgctttctgtcttctttcttccagggctctccccttgccctaggctctggccgttgcgcccggcggggtcaactccatgattagcatggagctgtaggagtctaaattggggacgcagatgtttgggacgtcaccttgcagtgttaacttggctctcatgaacctctttgatcttccacaaggggtaggctacgggtgaaacctcttaggctaatacttctatgaagagatgctttggatagggtaacagcggcggatattggtgagttgttgagacaaaaaccattcaacgccggaggactggctctcatccagtggatgcattgagtggattgattgtcagggctgtctctaggtttaatctcagacctctctgtgcttagggcaaacaccatttggccttaaatgggatcccgtgagagggggtccctccattgacagctggactgttctttggggccttatgtggtgtttgcctctgaggtactcaggggcatttaggtttttcctcatttttaaacaata

SEQ ID NO: 18003 - DNA, 411 bp, synthetic construct
  source 1..411: mol_type = other DNA
tggttgtatcccataccctaccctcccttccacaaaggacggataaatggacttgaacttatggcacgaacgtatggtatgattctggatacaccttaatggtagtagcgtggcgagctatggaaaaatcgcaattgtcgatagccatgttagtgacgcgcttcggcgtgctcctttggtgattcggcgactggttacaggagagtgggcagtgagctatgggcaaacctctgcagtattactcagagggaatgtgcaattgagacttgacgagcgtctctttgagatgtggcgcatgctcttggcattaccatagtgagcttccaggttgggaaacctgggctgggcctatactacctgatagggtcgcggctggccgcctgtaactagtatagtcagttgaaacccccc

SEQ ID NO: 18004 - DNA, 411 bp, synthetic construct
  source 1..411: mol_type = other DNA
tggttgtatcccataccctaccctcccttccacaaaggacggataaatggacttgaacttatggcacgaacgtatggtatgattctggatacaccttaatggtagtagcgtggcgagctatggaaaaatcgcaattgtcgatagccatgttagtgacgcgcttcggcgtgctcctttggtgattcggcgactggttacaggagagtaggcagtgagctatgggcaaacctctgcagtattactcagagggaatgtgcaattgagacttgacgagcgtctctttgagatgtggcgcatgctcttggcattaccatagtgagcttccaggttgggaaacctggactgggcctatactacctgatagggtcgcggctggccgcctgtaactagtatagtcagttgaaacccccc

SEQ ID NO: 18005 - DNA, 717 bp, synthetic construct
  source 1..717: mol_type = other DNA
ggagatttccggagcccctcttggaagtccatggtgaggggacttgatacctcaccgccgtttgcctaggctataggctatatttccctttccctgtccttcccttatttccctttgttttgtttgtaaatattaattcctgcaggttcagggttctttaatctgtttctctataagaacactcaattttcacgctttctgtcttctttcttccagggctctccccttgccctaggctctggccgttgcgcccggcggggtcaactccatgattagcatggagctgtaggagtctaaattggggacgcagatgtttgggacgtcaccttgcagtgttaacttggctctcatgaacctctttgatcttccacaaggggtaggctacgggtgaaacctcttaggctaatacttctatgaagagatgctttggatagggtaacagcggcggacattggtgagttgttaagacaaaaaccattcaacgccggaggactggctctcatccagtggatgcattgagtggattgattgtcagggctgtctctaggcttaatctcagacctctctgtgcttagggcaaacaccatttggccttaaatgggatcctgtgagagggggtccctccattgacagctggactgttctttggggccttatgtggtgtttgcctctgaggtactcaggggcatttaggtttttcctcattcttaaacaata

SEQ ID NO: 18006 - DNA, 717 bp, synthetic construct
  source 1..717: mol_type = other DNA
ggaaatttccggagtccctcttggaagtccatggtgaggggacttgatacctcaccgccgtttgcctaggctataggctaaattttcccttcccctttcccttccctattccctttattttgtttgtaaatattaattcctgcaggttcagggttctcaaatctgtttctctataagaacactcatttttcacgctttctgtcttctttcttccagggctctccccttgccctaggctctggccgttgcgcccggcggggtcaactccatgattagcatggagctgtaggagtctaaattggggacacagatgtttgggacgtcaccttgcagtgttaacttggctttcatgaatctctttgatcttccacaaggggtaggctacgggtgaaacctcttaggctaatacttctatgaagagatgctttggatagggtaacagcggcggatattggtgagttgttaagacaaaaaccattcaacgccggaggactgactctcatccagtggatgcattgagtggattgactgtcagggctgtctctaggcttaattccagacctctctgtgcttagggcaaacatcatttggccttaaatgggattctgtgagaggggatccctccattgactgctggactgttctttggggccttatgtggtgtttgcctctgaggtactcaggggcatttaggtttttcctcattctcaaataata

SEQ ID NO: 18007 - DNA, 717 bp, synthetic construct
  source 1..717: mol_type = other DNA
ggagatttccggagcccctcttggaagtccatggtgaggggacttgatacctcaccgccgtttgcctaggctataggctaaatttccctttccctgtccttcccttatttccctttgttttgcttgtaaatattaattcctgcaggttcagggttctttaatctgtttctctataagaacactcaattttcacgctttctgtcttctttcttccagggctctccccttgccctaggctctggccgttgcgcccggcggggtcaactccatgattagcatggagctgtaggagtctaaattggggacgcagatgtttgggacgtcaccttgcagtgttaacttggctctcatgaacctctttgatcttccacaagaggtaggctacgggtgaaacctcttaggctaatacttctatgaagagatgctttggatagggtaacagcggcggacattggtgagttgttaagacaaaaaccattcaacgccggaggactggctctcatccagtggatgcattgagtggattgattgtcagggctgtctctaggtttaatctcagacctctctgtgcttagggcaaacaccatttggccttaaatgggatcctgtgagagggggtccctccattgacagctggactgttctttggggccttatgtggtgtttgcctctgaggtactcaggggcatttaggtttttcctcattcttaaacaata

SEQ ID NO: 18008 - DNA, 697 bp, synthetic construct
  source 1..697: mol_type = other DNA
ttggaagtccatggtgaggggacttgatacctcaccgccgtttgcctaggctataggctaaatttccctttccctgtccttcccctatttccttttgttttgtttgtaaatattaattcctgcaggttcagggttctttaatctgtttctctataagaacactcaattttcacgctttctgtcttctttcttccagggctctccccttgccctaggctctggccgttgcgcccggcggggtcaactccatgattagcatggagctgtaggagtctaaattggggacgcagatgtttgggacgtcgccttgcagtgttaacttggctctcatgaacctctttgatcttccacaaggggtaggctacgggtgaaacctcttaggctaatacttctatgaagagatgccttggatagggtaacagcggcggatattggtgagttgttaagacaaaaaccattcaacgccggaggactggctctcatccagtggatgcattgagtggattgattgtcagggctgtctctaggtttaatctcagacctctctgtgcttagggcaaacactatttggccttaaatgggatcctgtgagagggggtccctccattgacagctggactgttctttggggccttatgtggtgtttgcctctgaggtactcaggggcatttaggtttttcctcattcttaaacaata

SEQ ID NO: 18009 - DNA, 737 bp, synthetic construct; identical to SEQ ID NO: 117
  source 1..737: mol_type = other DNA

SEQ ID NO: 18010 - DNA, 430 bp, synthetic construct; identical to SEQ ID NO: 474
  source 1..430: mol_type = other DNA

SEQ ID NO: 18011 - DNA, 719 bp, synthetic construct
  source 1..719: mol_type = other DNA
ccggagatttccggagcccctcttggaagtccatggtgaggggacttgatacctcaccgccgtttgcctaggctataggctatatttccctttccctgtccttcccttatttccctttgttttgtttgtaaatattaattcctgcaggttcagggttctttaatctgtttctctataagaacactcaattttcacgctttctgtcttctttcttccagggctctccccttgccctaggctctggccgttgcgcccggcggggtcaactccatgattagcatggagctgtaggagtctaaattggggacgcagatgtttgggacgtcaccttgcagtgttaacttggctctcatgaacctctttgatcttccacaaggggtaggctacgggtgaaacctcttaggctaatacttctatgaagagatgctttggatagggtaacagcggcggacattggtgagttgttaagacaaaaaccattcaacgccggaggactggctctcatccagtggatgcattgagtggattgattgtcagggctgtctctaggcttaatctcagacctctctgtgcttagggcaaacaccatttggccttaaatgggatcctgtgagagggggtccctccattgacagctggactgttctttggggccttatgtggtgtttgcctctgaggtactcaggggcatttaggtttttcctcattcttaaacaata

SEQ ID NO: 18012 - DNA, 407 bp, synthetic construct
  source 1..407: mol_type = other DNA
tgtatcccataccctaccctcccttccacaaaggacggataaatggacttgaacttatggcacgaacgtatggtatgattctggatacaccttaatggtagtagcgtggcgagctatggaaaaatcgcaattgtcgatagccatgttagtgacgcgcttcggcgtgctcctttggtgattcggcgactggttacaggagagtaggcagtgagctatgggcaaacctctgcagtattactcagagggaatgtgcaattgagacttgacgagcgtctctttgagatgtggcgcatgctcttggcattaccatagtgagcttccaggttgggaaacctggactgggcctatactacctgatagggtcgcggctggccgcctgtaactagtatagtcagttgaaacccccc

SEQ ID NO: 18013 - DNA, 656 bp, synthetic construct; identical to SEQ ID NO: 794
  source 1..656: mol_type = other DNA

SEQ ID NO: 18014 - DNA, 694 bp, synthetic construct
  source 1..694: mol_type = other DNA
gaagtccatggtgaggggacttgatacctcaccgccgtttgcctaggctataggctaaaccttcctttccctgcccttcccttatttccctttgttttgtttgtaaatattaattcctgcaggttcagggttctttaatctgtttctctataagaacactcaattttcacgctttctgtctcctttcttccagggctctccccttgccctaggctctggccgttgcgcccggcggggtcaactccatgattagcatggagctgtaggagtctaaattggggacgcagatgtttgggacgtcgccttgcagtgttaacttggctttcatgaacctctttgatcttccacaaggggtaggctacgggtgaaaccccttaggctaatacttctatgaagagatgccttggatagggtaacagcggcggatattggtgagttgttaagacaaaaaccattcaacgccggaggactggctctcatccagtggatgcattgagtggattgactgtcagggctgtctctaggtttaatctcagacctctctgtgcttagggcaaacaccatttggccttaaatgggatcctgtgagagggggtccctccattgacagctggactgttctttggggccttatgtggtgtttgcctctgaggtactcaggggcatttaggtttttcctcattctctaacaata

SEQ ID NO: 18015 - DNA, 679 bp, synthetic construct
  source 1..679: mol_type = other DNA
tggaagtccatggtgaggggacttgatacctcaccgccgtttgcctaggctataggctaaatttccctttcccctttccctttattgttgtaaatattaattcctgcaggttcaggtctcttggatttgttccactttatggacactcatttcacgctttctgtctgcttttcttccagggctctccccttgccctaggctctggccgttgcgcccggcggggtcaactccatgactagcatggagctgtaggagtctaaattggggacacagatgttgggaacgtcaccttgcagtgttaacttggctttcatgaagctttttgatcttccacaagaggtaggctacgggtgaaacctcttaagctaatacttctatgaagagatgctttggatagggtaacagcggcggatattggtgagttgcttgacaaaaaccattcaacgccggaggactggctctcatccagtggatgcattaagtggattgtctgtcagggctgtctctaggtttaattcctgacctctctgtgcttagggcaaacaaaacttggccttaaatgaggtcctgtgagaggggacctcgccattgaatgctggacatttctttggggccttatgttttgtttgcctctgaggtactcaggggcatttaggtttttcctcatcaataaataatt

SEQ ID NO: 18016 - DNA, 734 bp, synthetic construct
  source 1..734: mol_type = other DNA
ttcaagaggggtctccgggaatttccggagtccctcttggaagtccatggtgaggggacttgatacctcaccgccgtttgcctaggctataggctaaattttccctttcccttttccctttcctattccctttgttttgcttgtaaatattaattcctgcaggttcagggttctttaatctgtttctctataagaacactcaattttcacgctttctgtcttctttcttccagggctctccccttgccctaggctctggccgttgcgcccggcggggtcaactccatgattagcatggagctgtaggagtctaaattggggacacagatgtttgggacgtcgccttgcagtgttaacttggctctcatgaacctttttgatcttccacaaggggtaggctacgggtgaaacctcttaggctaatacttctatgaagagatgccttggatagggtaacagcggcggatattggtgagttgttaagacaaaaaccattcaacgccggaggactgactctcatccagtggatgcattgagtggattgattgtcagggctgtctctaggtttaatctcagacctctctgtgcttagggcaaacaccatttggccttaaatgggatcctgtgagagggggtccctccattgacagctggactgttctttggggccttatgtggtgtttgcctctgaggtactcaggggcatttaggtttttcctcatttttaaataatt

SEQ ID NO: 18017 - DNA, 617 bp, synthetic construct; identical to SEQ ID NO: 57
  source 1..617: mol_type = other DNA

SEQ ID NO: 18018 - DNA, 732 bp, synthetic construct
  source 1..732: mol_type = other DNA
ttcaagaggggtctccgggaatttccggagtccctcttggaagtccatggtgaggggacttgatacctcaccgccgtttgcctaggctataggctaaatttccctttccctgtcccttccctatttccctttatttgtttgtaaatattaattcctgcaggttcagggttctttaatctgtttctctataagaacactcaattttcacgctttctgtcttctttcttccagggctctccccttgccctaggctctggccgttgcgcccggcggggtcaactccatgattagcatggagctgtaggagtctaaattggggacacagatgtttgggacgtcgccttgcagtgttaacttggctctcatgaacctttttgatcttccacaaggggtaggctacgggtgaaacctcttaggctaatacttctatgaagagatgccttggatagggtaacagcggcggatattggtgagttgttaagacaaaaaccattcaacgccggaggactgactctcatccagtggatgcattgagtggattgattgtcagggctgtctctaggtttaatctcagacctctctgtgcttagggcaaacaccatttggccttaaatgggatcctgtgagagggggtccctccattgacagctggactgttctttggggccttatgtggtgtttgcctctgaggtactcaggggcatttaggtttttcctcatttttaaataatt

SEQ ID NO: 18019 - DNA, 687 bp, synthetic construct
  source 1..687: mol_type = other DNA
atggtgaggggacttgatacctcaccgccgtttgcctaggctataggctaaatttccctttccctgtcccttccctatttccctttgttttatttgtaaatattagttcctgcaggttcagggttctttagtctgtttctctataagaacactcaattttcacgctttctgtcttctttcttccagggctctccccttgccctaggctctggccgttgcgcccggcggggtcaactccatgattagcatggagctgtaggagtctaaattggggacgcagatgtttgagacgtcgccttgcagtgttaacttggctctcatgaacctctttgatcttccacaaggggtaggctacgggtgaaacctcttaggctaatacttctatgaagagatgctttggatagggtaacagcggcggatattggtgagttgttaagacaaaaaccattcaacgccggaggactggctctcatccagtggatgcattgagtggattgattgtcagggctgtctctaggtttaatctcagacctctctgtgcttagggcaaacaccatttggccttaaatgggatcctgtgagagggggtccctccatttacagctggactgtactttggggccttatgtggtgtttgccgctgaggtactcaggggcatttaggtttttcctcattcttaaacaata

SEQ ID NO: 18020 - DNA, 632 bp, synthetic construct; identical to SEQ ID NO: 757
  source 1..632: mol_type = other DNA

SEQ ID NO: 18021 - DNA, 513 bp, synthetic construct; identical to SEQ ID NO: 540
  source 1..513: mol_type = other DNA

SEQ ID NO: 18022 - DNA, 687 bp, synthetic construct
  source 1..687: mol_type = other DNA
atggtgaggggacttgatacctcaccgccgtttgcctaggctataggctaaatttccctttccctgtcccttccctatttccctttgttttatttgtaaatattaattcctgcaggttcagggttctttaatctgtttctctataagaacactcaattttcacgctttctgtcttctttcttccagggctctccccttgccctaggctctggccgttgcgcccggcggggtcaactccatgattagcatggagctgtaggagtctaaattggggacgcagatgtttgagacgtcgccttgcagtgttaacttggctctcatgaacctctttgatcttccacaaggggtaggctacgggtgaaacctcttaggctaatacttctatgaagagatgctttggatagggtaacagcggcggatattggtgagttgttaagacaaaaaccattcaacgccggaggactggctctcatccagtggatgcattgagtggattgattgtcagggctgtctctaggtttaatctcagacctctctgtgcttagggcaaacaccatttggccttaaatgggatcctgtgagagggggtccctccattgacagctggactgtactttggggccttatgtggtgtttgcctctgaggtactcaggggcatttaggtttttcctcattcttaaacaata

SEQ ID NO: 18023 - DNA, 838 bp, synthetic construct
  source 1..838: mol_type = other DNA
ccacacatccccgctttcaacgtctggcccacgaaacgggccacctttcggactgaccattggtttattattgaaattggcttggaaatgctgacactgtaagttggtttgtgatttaaacaatggttgatctggactctctttgagagatttacctggtggcttggcacagcctccttaaggacatctggtccagaaaggcccggtcaagacttatattggactggtcccctgtccactgagtattctgttctgaaccgtgtaggcagggctagcgccaccatgattgccaagggactacctccctggtgacagggacccttgggcccaaaaggctaggtggcaactctcatgtcaagagaggggtatccaccccaatctgaatcatgtggtgtgaagccactcgtcatggctctgaccccgagactgtctacatttagtaagatggatgaaaactggatttggagaccactctgattgtcttgatgagaaagtccgctatttgactgagtagatgccctccagctacccttactggatgtgaggaggggaccgtgactatagcgttccgctaaaccggtttaaaaaacatgaaaggtcaaatatgtggcgccattttccatttttatcaataaccatatgcctgacgaagttgattgtgctgagtgttctaagccttcctggactgtcagattaaaattggcttttctgcaatattttggttgccagtttgtatgggtttatcactcaggaaagaatcaagagaaagattgaaaatcttggattgtgcaactaaagctcatttttgtccttgtgaaggcaaccagagattgcagtc

SEQ ID NO: 18024 - DNA, 734 bp, synthetic construct
  source 1..734: mol_type = other DNA
ttcaagaggggtctccggagttttccggagcccctcttggaagtccatggtgaggggacttgatacctcaccgccgtttgcctaggctataggctaaacttccctttccctgtccttcccctatttccctttgttttgtttgtaaatattaattcctgcaagttcagggtcctttaatctgtatctctataagaacactcaattttcacgctttctgtcttctttcttccagggctctccccttgccctaggctctggccgttgcgcccggcggggtcaactccatgattagcatggagctgtaggagtctaaattggggacacagatgtttgggacgtctccttgcagtgttaacttggctcttcataaacctctttgatcttccacaagaagtacgctacgggtgaaacctcttaggctaatacttctatgaaaagataccttggatagggtaacaccggcggatattggtgagttgttaagacaaaaaccattcaacgccgaaggactggctctcatccagtggatgcattgagtgaattgattgtcagggctgtctctaggtttaatctcagacctctctgtgcttagggcaaacactatttggccttaaatgggatcctgtgagagggggtccctccattgacagctggactgttctttggggccttatgtggtgtttgcctctgaggtactcaggggcatttaggtttttcctcactcttaaacaata

SEQ ID NO: 18025 - DNA, 687 bp, synthetic construct
  source 1..687: mol_type = other DNA
tggtgaggggacttgatacctcaccgccgtttgcctaggctataggctaaatttccctttccctgtccttcccctatttccttttgttttgtttgtaaatattaattcctgcaggttcagggttctttaatctgtttctctgtaagaacactcaatttttcacgctttctgtctcctttcttccagggctctccccttgccctaggctctggccgttgcgcccggcggggtcaactccatgattagcatggagctgtaggagtctaaattggggacgcagatgtttgggacgtcgccttgcagtgttaacttggctctcatgaacctctttgatcttccacaaggggtaggctacgggtgaaacctcttaggctaatacttcaatgaagagatgccttggatagggtaacagcggcggatattggtgagttgttaagacaaaaaccattcaacgccggaggactggctctcatccagtggatgcattgagggaattgattgtcagggctgtctctaggtttaatctcagacctctctgtgcttagggcaaacactatttggccttaaatgggatcctgtgagagggggtccctccattgacagctggactgttctttggggccttatgtggtgtttgcctctgaggtactcaggggcatttaggtttttcctcattcttaaataata

SEQ ID NO: 18026 - DNA, 703 bp, synthetic construct
  source 1..703: mol_type = other DNA
ctccgggattcccggagtccctcttgggagtccatggtgaggggacttgatacctcaccgccgtttgcctaggctataggctaaatttccctttcccctttccctttattgttgtaaatattaattcctgcaggttcaggttccttggatttgttccactttatggacactcatttcacgctttctgtctgcttttcttccagggctctccccttgccctaggctctggccgttgcgcccggcggggtcaactccatgattagcatggagctgtaggagtctaaattggggacacagatgttgggaacgtcaccttgcagtgttaacttggctttcatgaagctttttgatcttccacaagaggtaggctacgggtgaaacctcttaagctaatacttctatgaagagatgctttggatagggtaacagcggcggacattggtgagttgtttgacaaaaaccattcaacgccggaggactggctctcatccagtggatgcattaagtggattgtctgtcagggctgtctctaggtttaattcctgacctctctgtgcttagggcaaacaaaacttggccttaaatgaggtcctgtgagaggggacctcgccattgaatgctggacatttctttggggccttatgttttgtttgcctctgaggtactcaggggcatttaggtttttcctcatcaataaataatt

SEQ ID NO: 18027 - DNA, 576 bp, synthetic construct
  source 1..576: mol_type = other DNA
aatattggcgcgcgcatttgcgcgcccccccccatttcagccccctgtcattgactggtcgaaggcgttcgcaataagactggtcgtcacttggctgttctatcgtttcaggctttagcgcgccctcgcgcggcgggccgtcaagcccgtgcgctgtatagcgccaggtaaccggacagcggcttgctggattttcccggtgccattgctctggatggtgtcaccaagctgacaaatgcggactgaacctcacaaagcgacacacctgtggtagcgctgcccaaaagggagcggaactcccccgccgcgaggcggtcctctctggccaaaagcccagcgttaatagcgccttttgggatgcaggagccccacctgccaggtgtgaagtggagtgagtggatctccaatttggtctgttctgaactacaccatctactgctgtgaagaatgccctggaggcaagctggttacagccctgaccaggggccctgcccgtgactctcgatcggcgcagggtcaaaaattgtctaagcagcagcaggaacgcgggagcgtttcttttccctttgtatcgac

SEQ ID NO: 18028 - DNA, 571 bp, synthetic construct; identical to SEQ ID NO: 619
  source 1..571: mol_type = other DNA

SEQ ID NO: 18029 - DNA, 574 bp, synthetic construct
  source 1..574: mol_type = other DNA
aatattggcgcgcatttgcgcgcccccccccatttcagccccctgtcattgactggtcgaaggcgttcgcaataagactggtcgtcacttggctgttctatcgtttcaggctttagcgcgccctcgcgcggcgggccgtcaagcccgtgcgctgtatagcgccaggtaaccggacagcggcttgctggattttcccggtgccattgctctggatggtgtcaccaagctgacaaatgcggactgaacctcacaaagcgacacacctgtggtagcgctgcccaaaagggagcggaactcccccgccgcgaggcggtcctctctggccaaaagcccagcgttaatagcgccttttgggatgcaggagccccacctgccaggtgtgaagtggagtgagtggatctccaatttggtctgttctgaactacaccatctactgctgtgaagaatgccctggaggcaagctggttacagccctgaccaggggccctgcccgtgactctcgatcggcgcagggtcaaaaattgtctaagcagcagcaggaacgcgggagcgtttcttttccctttgtatcgac

SEQ ID NO: 18030 - DNA, 693 bp, synthetic construct
  source 1..693: mol_type = other DNA
gagtccatggtgaggggacttgatacctcaccgccgtttgcctaggctataggctaaatttccctttccctgtccttcccctattcccctttgttttggttgtaaatattaattcctgcaggttcagggttctttaatctgtttctctataagaacactcacctttcacgctttctgtcttctttcttccagggctctccccttgccctaggctctggccgttgcgcccggcggggtcaactccatgattagcatggagctgtaggagtctaaattggggacgcagatgtttgggacgtcgccttgcagtgttaacttggctctcatgaacctctttgatcttccacaaggggtaggctacgggtgaaacctcttaggctaatacttctatgaagagatgccttggatagggtaacagcggcggatattggtgagttgttaagacaaaaaccattcaacgccggaggactgactctcatccagtggatgcattgagtgaattgattgtcagggctgtctctaggtttaatctcagacctctctgtgcttagggcaaacatcatttggccttaaatgggatcctgtgagagggggtccctccattgacagctggactgttctttggggccttatgtggtgtttgcctctgaggtactcaggggcatttaggtttttcctcattcttaaacaata

SEQ ID NO: 18031 - DNA, 458 bp, synthetic construct
  source 1..458: mol_type = other DNA
cttgccgtaattcttcagaccgtcacgccgtgcttgcggatctcacgtgccggatgacagggctgtagctggaactgagtgtctagtgcacattgtgtaacagtgaaaactttgtgatcaccgaaaggtgggctagtagcctgcggaacaacaactggtaacagttgcctcaggggccaaaagccacggtgttaacagcaccctactagtttgatggaagtaattcctgatgttgcagagctagtaattgccaaactctgtgcattggtatcttggcataccgtgcagtctacgccagtgaaggatgccctgaaggtacccgtaggtaaccttaagagactatggatctgatcaggggctctctccgtactgctttacaggcggctgagagttaaaaaacgtctagctggccccagcccaagggattgggctttccctttaaagcccacaacttgcat

SEQ ID NO: 18032 - DNA, 419 bp, synthetic construct; identical to SEQ ID NO: 457
  source 1..419: mol_type = other DNA

SEQ ID NO: 18033 - DNA, 718 bp, synthetic construct
  source 1..718: mol_type = other DNA
gtccctcttggaagtccatggtgaggggacttgatacctcaccgccgtttgcctaggctataggctaaattttccctttcccttttctcctttcctattccctttgttttgcttgtaaatattgatttgtaaatattgattcctgcaggttcagggttcttaaatctgtttctctataagaacactcatttcacgctttctgtcttctttcttccagggctctccccttgccctaggctctggccgttgcgcccggcggggtcaactccatgattagcatggagctgtaggagtctaaattggggacacagatgtttggaacgtcaccttgcagtgttaacttggctttcatgaatctctttgatcttccacaaggggtaggctacgggtgaaacctcttaggctaatacttctatgaagagatgccttggatagggtaacagcggcggatattggtgagttgttaagacaaaaaccattcaacgccggaggactgactctcatccagtggatgcattgagtggattgactgtcggggctgtctttaggcttaattccagacctctctgtgcttggggcaaacatcatttggccttaaatgggattctgtgagaggggatccctccattgccagctggactgttctttggggccttatgtggtgtttgccgctgaggtactcaggggcatttaggtttttcctcattcttaaataata

SEQ ID NO: 18034 - DNA, 685 bp, synthetic construct; identical to SEQ ID NO: 822
  source 1..685: mol_type = other DNA

SEQ ID NO: 18035 - DNA, 680 bp, synthetic construct
  source 1..680: mol_type = other DNA
tatagggagatacctcaccgccgtttgcctaggctataggctaaatttccctttccctgtccttcccctatttccttttgttttgtttgtaaatattaattcctgcaggttcagggttctttaatctgtttctctataagaacactcaattttcacgctttctgtcttctttcttccagggctctccccttgccctaggctctggccgttgcgcccggcggggtcaactccatgattagcatggagctgtaggagtctaaattggggacgcagatgtttgggacgtcaccttgcagtgttaacttggctctcatgaacctctttgatcttccacaaggggtaggctacgggtgaaacctcttaggctaatacttctatgaagagatgccttggatagggtaacagcggcggatattggtgagttgttaagacaaaaaccattcaacgccggaggactggctctcatccagtggatgcattgagtgaattgattgtcagggctgtctctaggtttaatctcagacctctctgtgcttagggcaaacactatttggccttaaatgggatcctgtgagagggggtccctccattgacagctggactgttctttggggccttatgtggtgtttgcctctgaggtactcaggggcatttaggtttttcctcattcttaaacaata

SEQ ID NO: 18036 - DNA, 251 bp, synthetic construct
  source 1..251: mol_type = other DNA
ccgcactttcgaaacttgggctcaagaaggccaacttggaagaaaccctgctcgtcgtttcaaaagaatacaatggatggtctcggtttaggacttcctgcatcatccgtgttacgggtggtgttggtcgtgtcatctaccttcgccagatcatcacgactgagcatgctgtaccatcatggcaccacgctcctgcgactacaaacgtctcccaccgtagacgcaggaatgttggtctcactcaatccatc

SEQ ID NO: 18037 - DNA, 730 bp, synthetic construct; identical to SEQ ID NO: 926
  source 1..730: mol_type = other DNA

SEQ ID NO: 18038 - DNA, 316 bp, synthetic construct; identical to SEQ ID NO: 301
  source 1..316: mol_type = other DNA

SEQ ID NO: 18039 - DNA, 551 bp, synthetic construct
  source 1..551: mol_type = other DNA
ccgaccccactggtcgaaggccacttggcaataagactggtggaacaaggtcgcctgtagttgattggaaccttctttctaatgacttatgtcagcggtgctactcacaccgtaactctcctaccctatccccacgcttgtggaactaggaggggatgagtgattcaagtaagtactgtcagaatggtgaaaataatctgattctgaaacgctatggatccatcgaaagatggggctacacgcctgcggaacaacacatggtaacatgtgccccaggggccgaaagccacggtgataggatcacccgtgtagtttgagatcatatcaatgttcatagtctagtaagatgatttgaaatctaactggtctgatggctaactgcttgtcttattgcggcctaaggatgtcctgcaggtacctttagagaaccttaagagactattgatctgagcaggagccaaggtggtctttcccagccttggttaaaaagcgtctaagccgcggcagggggcgggaggccccctttcctcccaaactataatatagattgt

SEQ ID NO: 18040 - DNA, 683 bp, synthetic construct
  source 1..683: mol_type = other DNA
tatagggagatacctcaccgccgtttgcctaggctataggctaaattttccctttccccttccccttccttgttttgattgtaaatataaattcctgcaggttcagggttcttgaattggcattaaatttgtttctctataagaacactcaattttcacgctttctgtcttctttcttccagggctctccccttgccctaggctctggccgttgcgcccggcggggtcaactccatgattagcatggagctgtaggagtctaaattggggacacagatgtttggaacgtcaccttgcagtgttaacttggctttcatgaatctctttgatcttccacaagaggtaggctacgggtgaaacctcttaggctaatacttctatgaagagatgctttggatagggtaacagcggcggatattggtgagttgttaagacaaaaaccattcaacgccggaggactgactctcatccagtggatgcattgagtggattgactgtcagggctgtctctaggcttaattccagacctctctgtgcttggggcaaacatcatttggccttaaaaggggttctgtgagaggggatccctccattaacagctggactgttctttggggccttatgtggtgtttgccgctgaggtactcaggggcatttaggtttttcctcattctcaaataata

SEQ ID NO: 18041 - DNA, 683 bp, synthetic construct
  source 1..683: mol_type = other DNA
tatagggagatacctcaccgccgtttgcctaggctataggctaaattttccctttccccttccccttccttgttttgattgtaaatataaattcctgcaggttcagggttctttaaattggcattgaatttgtttctctataagaacactcattttcacgctttctgtcttctttcttccagggctctccccttgccctaggctctggccgttgcgcccggcggggtcaactccatgattagcatggagctgtaggagtctaaattggggacacagatgtttggaacgtcaccttgcagtgttaacttggctttcatgaatctctttgatcttccacaagaggtaggctacgggtgaaacctcttaggctaatacttctatgaagagatgctttggatagggtaacagcggcggatattggtgagttgttaagacaaaaaccattcaacgccggaggactgactctcatccagtggatgcattgagtggattgactgtcagggctgtctctaggcttaattccagacctctctgtgcttagggcaaacatcatttggccttaaaaggggttctgtgagaggggatccctccattaacagctggactgttctttggggccttatgtggtgtttgccgctgaggtactcaggggcatttaggtttttcctcattctcaaataata

SEQ ID NO: 18042 - DNA, 687 bp, synthetic construct
  source 1..687: mol_type = other DNA
atggtgaggggacttgatacctcaccgccgtttgcctaggctataggctaaatttccctttccctgtcctttccctatttccctttgttttgtttgtaaatattaattcctgcaggttcaggattctttaatctgtttctctataagaacactcaattttcacgctttctgtcttctttcttccagggctctccccttgccctaggctctggccgttgcgcccggcggggtcaactccatgattagcatggagctgtaggagtctaaattggggacgcagatgtttgggacgtcgccttgcagtgttaacttggctctcatgaacctctttgatcttccacaaggggtaggctacgggtgaaacctcttaggctaatacttctatgaagagatgccttggatagggtaacagcggcggatattggtgagttgttaagacaaaaaccattcaacgccggaggactggctctcatccagtggatgcattgagtgaattgattgtcagggctgtctctaggtttaatctcagacctctctgtgcttagggcaaacactatttggccttaaatgggatcctgtgagaggggatccctccattgacagctggactgttctttggggcctaaggtagtgtttgcctctgaggtactcaggggcatttaggtttttcctcatttttaaacaata

SEQ ID NO: 18043 - DNA, 682 bp, synthetic construct
  source 1..682: mol_type = other DNA
tatagggagatacctcaccgccgtttgcctaggctataggctaaattttccctttccccttccccttccttgttttgattgtaaatataaattcctgcaggttcagggttcttaaattggcattgaatttgtttctctataagaacactcattttcacgctttctgtcttctttcttccagggctctccccttgccctaggctctggccgttgcgcccggcggggtcaactccatgattagcatggagctgtaggagtctaaattggggacacagatgtttggaacgtcaccttgcagtgttaacttggctttcatgaatctctttgatcttccacaagaggtaggctacgggtgaaacctcttaggctaatacttctatgaagagatgctttggatagggtaacagcggcggatattggtgagttgttaagacaaaaaccattcaacgccggaggactgactctcatccagtggatgcattgagtggattgactgtcagggctgtctctaggcttaattccagacctctctgtgcttagggcaaacatcatttggccttaaaaggggttctgtgagaggggatccctccattaacagctggactgttctttggggccttatgtggtgtttgccgctgaggtactcaggggcatttaggtttttcctcattctcaaataata

SEQ ID NO: 18044 - DNA, 532 bp, synthetic construct; identical to SEQ ID NO: 566
  source 1..532: mol_type = other DNA

SEQ ID NO: 18045 - DNA, 716 bp, synthetic construct
  source 1..716: mol_type = other DNA
gggaatttccggagtccctcttggaagtccatggtgaggggacttgatacctcaccgccgtttgcctaggctataggctaaattttccccttccctttccctttcctattcccttgttttgcttgtaaatattaattcctgcaggttcagggttcttaaatctgtttctctataagaacactcatttttcacgctttctgtcttctttcttccagggctctccccttgccctaggctctggccgttgcgcccggcggggtcaactccatgattagcatggagctgtaggagtctaaattggggacacagatgtttggaacgtcaccttgcagtgttaacttggctttcatgaatctctttgatcttccacaaggggtaggctacgggtgaaacctcttaggctaatacttctatgaagagatgctttggatagggtaacagcggcggatattggtgagttgttaagacaaaaaccattcaacgccggaggactgactctcatccagtggatgcattgagtggattgactgtcagggctgtctctaggcttaattccagacctctctgtgcttagggcaaacatcatttggccttaaatgggattctgtgagaggggatccctccattgactgctggactgttctttggggccttatgtggtgtttgcctctgaggtactcaggggcatttaggtttttcctcatttttaaataata

SEQ ID NO: 18046 - DNA, 373 bp, synthetic construct
  source 1..373: mol_type = other DNA
gatcaatggaccttgacttctggcaagtacatatggtatgattattggatacgactgaatggcagtagcgtggcgagctatggaaaaatcgcaattgtcgatagccatgttagtgacgcgcttcggcgtgctcctttggtgattcggcgactggttacaggagagtaggcagtgagctatgggcaaacctctgcagtattactcagagggaatgtgcaattgagacttgacgagcgtctcgttagagatgtggcgcatgctcttggcattaccatagtgagcttccaggttgggaaacctggactgggcctatactacctgatagggtcgcggctggccgcctgtaactagtatagtcagttgaaaccccccc

SEQ ID NO: 18047 - DNA, 685 bp, synthetic construct
  source 1..685: mol_type = other DNA
ccctcttggaagtccatggtgaggggacctgatacctcaccgccgtttgcctaggctataggctatttctccccttcccttttccctgttttgtgtaaatattaattcctgcaggttcagggttctttaatctgtttctctataagaacactcattttcacgctttctgtcttgtttgttccagggctgtccccttgccctaggctctggccgttgcttcccgcggggtcaactccatgattagcatggagctgtaggagtctaaattggggacgcagatgtttgggacgtcaccttgcagtattaacttggctctcatgaagctctttgatcttccacaagaggtaggctacgggtgaaacctcttaagctagtacttctatgaagagatgctttggatagggtaacagcggcgcatattggtgagttgttaagacaaaaacctttcaacgccggaggactggctctcatccagtggatgcattgagtggattgtttgtcagggctgtctctaggcttaatctcagacctctctgtgcttagggcaaacattacttggccttaaatgggattctgtgagaggggatccctccattgattgctggacttttctttggggccttaggtggtgtttgcctctgaggtactcaggggcatttaggtttttcctcactctcaaataact

SEQ ID NO: 18048 - DNA, 350 bp, synthetic construct
  source 1..350: mol_type = other DNA
ggcgagcatatatggtatgattgatggatacacttaaatggcagtagcgtggcgagctatggaaaaatcgcaattgtcgatagccatgttagtgacgcgcttcggcgtgctcctttggtgattcggcgactggttacaggagagtaggcagtgagctatgggcaaacctctgcagtattactcagagggaatgtgcaattgagacttgacgagcgtctcctagagatgtggcgcatgctcttggcattaccatagtgagcttccaggttgggaaacctggactgggcctatactacctgatagggtcgcggctggccgcctgtaactagtatagtcagttgaaacccccc

SEQ ID NO: 18049 - DNA, 717 bp, synthetic construct
  source 1..717: mol_type = other DNA
gtccctcttggaagtccatggtgaggggacttgatacctcaccgccgtttgcctaggctataggctaaattttccctttcccttttccctttcctattccctttgttttgcttgtaaatattgatttgtaaatattgattcctgcaggttcagggttcttaaatctgtttctctataagaacactcatttcacgctttctgtcttctttcttccagggctctccccttgccctaggctctggccgttgcgcccggcggggtcaactccatgattagcatggagctgtaggagtctaaattggggacacagatgtttggaacgtcaccttgcagtgttaacttggctttcatgaatctctttgatcttccacaaggggtaggctacgggtgaaacctcttaggctaatacttctatgaagagatgccttggatagggtaacagcggcggatattggtgagttgttaagacaaaaaccattcaacgccggaggactgactctcatccagtggatgcattgagtggattgactgtcggggctgtctttaggcttaattccagacctctctgtgcttggggcaaacatcatttggccttaaatgggattctgtgagaggggatccctccattgccagctggactgttctttggggccttatgtggtgtttgccgctgaggtactcaggggcatttaggtttttcctcattcttaaataata

SEQ ID NO: 18050 - DNA, 717 bp, synthetic construct
  source 1..717: mol_type = other DNA
gtccctcttggaagtccatggtgaggggacttgatacctcaccgccgtttgcctaggctataggccaaattttccctttcccttttccctttcctattccctttgttttgcttgtaaatattgatttgtaaatattgattcctgcaggttcagggttcttaaatctgtttctctataagaacactcatttcacgctttctgtcttctttcttccagggctctccccttgccctaggctctggccgttgcgcctggcggggtcaactccatgattagcatggagctgtaggagtctaaattggggacacagatgtttggaacgtcaccttgcagtgttaacttggctttcatgaatctctttgatcttccacaaggggtaggctacgggtgaaacctcttaggctaatacttctatgaagagatgccttggatagggtaacagcggcggatattggtgagttgttaagacaaaaaccattcaacgccggaggactgactctcatccagtggatgcattgagtggattgactgtcggggctgtctttaggcttaattccagacctctctgtgcttggggcaaacatcatttggccttaaatgggattctgtgagaggggatccctccattgccagctggactgttctttggggccttatgtggtgtttgccgctgaggtactcaggggcatttaggtttttcctcattcttaaataata

SEQ ID NO: 18051 - DNA, 668 bp, synthetic construct; identical to SEQ ID NO: 810
  source 1..668: mol_type = other DNA

SEQ ID NO: 18052 - DNA, 687 bp, synthetic construct
  source 1..687: mol_type = other DNA
gtggtgaggggacttgatacctcaccgccgtttgcctaggctataggctaaatttccctttccctgtcccttccctatttccctttgttttatttgtaaatattagttcctgcaggttcagggttctttagtctgtttctctataagaacactcaattttcacgctttctgtcttctttcttccagggctctcccctagccctaggctctggccgttgcgcccggcggggtcaactccatgattagcatggagctgtaggagtctaaattggggacgcaaatgtttgagacgtcgccttgcagtgttaacttggctctcatgaacctctctgatcttccacaaggggtaggctacgggtgaaacctcttaggctaatacttctatgaagagatgctttggatagggtaacagcggcggatattggtgagttgttaagacaaaaaccattcaacgccggaggactggctctcatccagtggatgcattgagtggattgattgtcagggctgtctctaggtttaatctcagacctctctgtgcttagggcaaacaccatttggccttaaatgggatcctgtgagagggggtccctccatttacagctggactgtactttggggccttatgtggtgtttgccgctgaggtactcaggggcatttaggtttttcctcattcttaaacaata

SEQ ID NO: 18053 - DNA, 705 bp, synthetic construct
  source 1..705: mol_type = other DNA
cggagcccctcttggaagaccatggtgaggggacttgatacctcaccgccgtttgcctaggctataggctaaatttccctttccctttccctttcctatttccctttgttttgcttgtaaatattaattcctgcaggttcagggttctttaatctgtttctctataagaacactcaatttcacgcttctgtcttctttcttccagggctctccccttgccctaggctctggccgttgcgcccggcggggtcaactccatgattagcatggagctgtaggagtctaaattggggacgcagatgtttggaacgtcgccttgcagtgttaacttggctctcatgaacctctttgatcttccacaaggggtaggctacgggtgaaacctcttaggctaatacttctatgaagagatgccttggatagggtaacagcggcggatattggtgagttgttaagacaaaaaccattcaacgccggaggctggctctcatccagtggatgcattgagtggattgattgtcagggctgtctctaggtttaatctcagacctctctgtgcttagggcaaacaccatttggccttaaatgggatcctgtgagaggggatccctccatttacagctggactgtactttggggccttatgtggtgtgtgccactgaggtacccaggggcatttaggtttttcctcattcttaaacaata

SEQ ID NO: 18054 - DNA, 736 bp, synthetic construct; identical to SEQ ID NO: 116
  source 1..736: mol_type = other DNA

SEQ ID NO: 18055 - DNA, 686 bp, synthetic construct
  source 1..686: mol_type = other DNA
catggtgaggggacttgatacctcaccgccgtttgcctaggctataggctaaattttccccttccctccctttcctatttcccttgttttgtttgtaaatattaattcctgcaggttcagggtccttaaatctgtttctctataagaacactcaattttcacgctttctatcttctttcttccagggctctccccttgccctaggctctggccgttgcgcccggcggggtcaactccatgattagcatggagctgtaggagtctaaattggggacacagatgtttggaacgccaccttgcagtgttaacttggccttcatgaatctctttgatcttccacaagaggtaggctacgggtgaaacctcttaggctaatacttctatgaagagatgccttggatagggtaacagcggcggatattggtgagttgttaagacaaaaaccattcaacgccggaggactggctctcatccagtggatgcattgagtggattgattgtcagggctgtctctaggcttaattccagacctctctgtgcttagggcaaacatcacttggccttaaatgggattctgtgagaggggatccctccattgacagctggactgttctttggggccttatgtggtgtttgcctctgaggtactcaggggcatttaggtttttcctcattctcaaataata

SEQ ID NO: 18056 - DNA, 303 bp, synthetic construct; identical to SEQ ID NO: 281
  source 1..303: mol_type = other DNA

SEQ ID NO: 18057 - DNA, 717 bp, synthetic construct
  source 1..717: mol_type = other DNA
gtccctcttggaagtccatggtgaggggacttgatacctcaccgccgtttgcctaggctataggctaaattttccctttcccttttccctttcctattccctttgttttgcttgtaaatattgatttgtaaatattgattcctgcaggttcagggttcttaaatctgtttctctataagaacactcatttcacgctttctgtcttctttcttccagggctctccccttgccctaggctctggccgttgcgcccggcggggtcaactccatgattagcatggagctgtaggagtctaaattggggacacagatgtttggaacgtcaccttgcagtgttaacttggctttcatgaatctctttgatcttccacaaggggtaggctacgggtgaaacctcttaggctaatacttctatgaagagatgccttggatagggtaacagcggcggatattggtgagttgttaagacaaaaaccattcaacgccggaggactgactctcatccagtggatgcattgagtggattgactgtcggggctgtctttaggcttaattccagacctctctgtgcttggggcaaacatcatttggccttaaatgggattctgtgagaggggatccctccattgacagctggactgttctttggggccttatgtggtgtttgccgctgaggtactcaggggcatttaggtttttcctcattcttaaataata

SEQ ID NO: 18058 - DNA, 717 bp, synthetic construct
  source 1..717: mol_type = other DNA
gtccctcttggaagtccatggtgaggggacttgatacctcaccgccgtttgcctaggctataggctaaattttccctttcccttttccctttcctattccctttgttttgtttgtaaatattgatttgtaaatattgattcctgcaggttcagggttcttaaatctgtttctctataagaacactcatttcacgctttctgtcttctttcttccagggctctccccttgccctaggctctggccgttgcgcccggcggggtcaactccatgattagcatggagctgtaggagtctaaattggggacacagatgtttggaacgtcaccttgcagtgttaacttggctttcatgaatctctttgatcttccacaaggggtaggctacgggtgaaacctcttaggctaatacttctatgaagagatgccttggatagggtaacagcggcggatattggtgagttgttaagacaaaaaccattcaacgccggaggactgactctcatccagtggatgcattgagtggattgactgtcggggctgtctttaggcttaattccagacctctctgtgcttggggcaaacatcatttggccttaaatgggattctgtgagaggggatccctccattgacagctggactgttctttggggccttatgtggtgtttgccgctgaggtactcaggggcatttaggtttttcctcattcttaaataata

SEQ ID NO: 18059 - DNA, 717 bp, synthetic construct
  source 1..717: mol_type = other DNA
gtccctcttggaagtccatggtgaggggacttgatacctcaccgccgtttgcctaggctataggctaaattttccctttcccttttccctttcctattccctttgttttgtttgtaaatgttgatttgtaaatattgattcctgcaggttcagggttcttaaatctgtttctctataagaacactcatttcacgctttctgtcttctttcttccagggctctccccttgccctaggctctggccgttgcgcccggcggggtcaactccatgattagcatggagctgtaggagtctaaattggggacacagatgtttggaacgtcaccttgcagtgttaacttggctttcatgaatctctttgatcttccacaaggggtaggctacgggtgaaacctcttaggctaatacttctatgaagagatgccttggatagggtaacagcggcggatattggtgagttgttaagacaaaaaccattcaacgccggaggactgactctcatccagtggatgcattgagtggattgactgtcggggctgtctttaggcttaattccagacctctctgtgcttggggcaaacatcatttggccttaaatgggattctgtgagaggggatccctccattgacagctggactgttctttggggccttatgtggtgtttgccgctgaggtactcaggggcatttaggtttttcctcattcttaaataata

SEQ ID NO: 18060 - DNA, 717 bp, synthetic construct
  source 1..717: mol_type = other DNA
gtccctcttggaagtccatggtgaggggacttgatacctcaccgccgtttgcctaggctataggctaaattttccctttcccttttccctttcctattccctttgttttgtttgtaaatgttgatttgtaaatattgattcctgcaggttcagggttcttaaatctgtttctctataagaacactcatttcacgctttctgtcttctttcttccagggctctccccttgccctaggctctggccgttgcgcccggcggggtcaactccatgattagcatggagctgtaggagtctaaattggggacacagatgtttggaacgtcaccttgcagtgttaacttggctttcatgaatctctttgatcttccacaaggggtaggctacgggtgaaacctcttaggctaatacttctatgaagagatgccttggatagggtaacagcggcggatattggtgagttgttaagacaaaaaccattcaacgccggaggactggctctcatccagtggatgcattgagtggattgactgtcggggctgtctttaggcttaattccagacctctctgtgcttggggcaaacatcatttggccttaaatgggattctgtgagaggggatccctccattgacagctggactgttctttggggccttatgtggtgtttgccgctgaggtactcaggggcatttaggtttttcctcattcttaaataata

SEQ ID NO: 18061 - DNA, 717 bp, synthetic construct
  source 1..717: mol_type = other DNA
gtccctcttggaagtccatggtgaggggacttgatacctcaccgccgtttgcctaggctataggctaaattttccctttcccttttccctttcctattccctttgttttgtttgtaaatgttgatttgtaaatattgattcctgcaggttcagggttcttaaatctgtttctctataagaacactcatttcacgctttctgtcttctttcttccagggctctccccttgccctaggctctggccgttgcgcccggcggggtcaactccatgattagcatggagctgtaggagtctaaattggggacacagatgtttggaacgtcaccttgcagtgttaactcggctttcatgaatctctttgatcttccacaaggggtaggctacgggtgaaacctcttaggctaatacttctatgaagagatgccttggatagggtaacagcggcggatattggtgagttgttaagacaaaaaccattcaacgccggaggactgactctcatccagtggatgcattgagtggattgactgtcggggctgtctttaggcttaattccagacctctctgtgctcggggcaaacatcatttggccttaaatgggattctgtgagaggggatccctccattgacagctggactgttctttggggccttatgtggtgtttgccgctgaggtactcaggggcatttaggtttttcctcattctcaaataata

SEQ ID NO: 18062 - DNA, 684 bp, synthetic construct
  source 1..684: mol_type = other DNA
cctcttggaagtccatggtgaggggacctgatacctcaccgccgtttgcctaggctataggctatttgtccctttccctctcccctgttttgtgtaaatattaattcctgcaggttcagggttctttaatctgtttctctataagaacactcattttcacgctttctgtctgctttcttccagggctctccccttgccctaggctctggccgttgcgcccggcggggtcaactccatgattagcatggagctgtaggagtctaaattggggacgcagatgtttgggacgtcaccttgcagtgttaacttggctctcatgaaactctttgatcttccacaagaggtaggctacgggtgaaacctcttaagctagtacttctatgaagagatgctttggatagggtaacagcggcggatattggtgagttgttaagacaaaaacctttcaacgccggaggactggctctcatccagtggatgcattgagtggattgtttgtcagggctgtctctaggcttaatctcagacctctctgcgcttagggcaaacattacttggccttaaatgggatcctgtgagaggggatccctccattgactgctggacttttctttggggccttaggtagtgtttgcctctgaggtactcaggggcatttaggtttttcctcactcttaaataatt

SEQ ID NO: 18063 - DNA, 512 bp, synthetic construct; identical to SEQ ID NO: 537
  source 1..512: mol_type = other DNA

SEQ ID NO: 18064 - DNA, 712 bp, synthetic construct
  source 1..712: mol_type = other DNA
ttgggcaaccatgatgaggggttgtaaattacctcatccccgtttgcctagggtgataggctttttatgttttatgtttgttagtatgttttatgtttattggtctagtttgttaactgtaaatattaatttctgcaggttcagagttcttaatcatgttcctctataaggacactctctttaagtctaggccataagtgatcctagagataggtgaacctttcatatctggtctatgttagggcctttatatccctgggggcaatctttgtgccccttatttctcctgtctttcttcttttcttccgggctctcacggtgccaatggaacgaccggtgcgcccgccggggttaactccaaggatagcttggagctgtagttgctaaaagccgtgatgaaggaagcagactatcaagttagttaggtatcaactgaaacatgaattccactatgatctttgtgagtgggtaggctacgggtgaaacccactaggttaatactcatattgagagatacctccattaggctaaggttggcggtaaaggtgagtttaacgacgtatcctttcaacgcctgtggaccagtctcaatggcacaatgcgtagtggatgaagtgtgtagggcctactaaggagatgctctgtggaattcaccctcccgaaaggtcgtaggggtactcaggggcatttaggtttccacactttaaatttc

SEQ ID NO: 18065 - DNA, 323 bp, synthetic construct; identical to SEQ ID NO: 309
  source 1..323: mol_type = other DNA

SEQ ID NO: 18066 - DNA, 684 bp, synthetic construct
  source 1..684: mol_type = other DNA
ccctcttggaagtccactgtgagggacctgatacctcaccgccgtttgcctaggctttaggctatttttccctttccctttcccctgttttgtgtaaatattaattcctgcaggttcaggtttctttaatctgtttctctataagaacactcattttcacgctttctgtctgctttcttccagggctctccccttgccctaggctctggccgttgcgcccggcggggtcaactccatgattagcatggagctgtaggagtctaaattggggacgcagatgtttgggacgtcaccttgcagtgttaacttggctctcatgaagctctttgatcttccacaagaggtaggctacgggtgaaacctcttaagctagtacttctatgaagagatgctttggatagggtaacagcggcggatattggtgagttgttaagacaaaaacctttcaacgccggaggactggctctcatccagtggatgcattgagtggattgtttgtcagggctgtctctaggcttaatctcagacctctctgtgcttagggcaaacactacttggccttaaatgggattctgtgagaggggatccctccattgactgctggacttttctttggggccttaggtagagtttgcctctgaggtactcaggggcatttaggtttttcctcatttttatataact

SEQ ID NO: 18067 - DNA, 563 bp, synthetic construct
  source 1..563: mol_type = other DNA
gcagatagaggttctggattggcaaactttacctcgaaacacgcccgtttttcctgctgtgttttacagactgtcctgccacacttgtggcggcttgtggcactgtgaacatagtgagaccgaccaagacaacagtttcaagtgctgaacatcgaacgtctaaactggatccgtagctggacatgttagggcaagggtctcccccctggtaacaggagccttgctggccaaaagccccgctctttgagcctagcatgttgtcgaccccggactgttcagtttagttagtacatgggattcacttgtcacggttcctctgaactcggtctctagtgcggcagcctaaggatgccctccaggtaccccgaggtaacaagcgacactcgggatctgaggaggggactactttacgtggtttaaaaaacgtctaagctgctacggtgaccagaggctggcacctttcacttttaaaaatacactactgactacaattgaagtgataacggttttacagactttcaaactagttacacaagtactgtttttccaacacacacaatttt

SEQ ID NO: 18068 - DNA, 712 bp, synthetic construct
  source 1..712: mol_type = other DNA
atttccggagtccctcttggaagtccatggtgaggggacttgatacctcaccgccgtttgcctaggctataggctaaatttccttgcccttttcccttccctattccctttgttttgtttgtaaatattaattcctgcaggttcagggttcttaaatctgtttctctataagaacactcatttttcacgctttctgtctcctttcttccagggctctccccttgccctaggctctggccgttgcgcccggcggggtcaactccatgattagcatggagctgtaggagtctaaattggggacacagatgtttggaacgtcaccttgcagtgttaacttggctttcatgaatctctttgatcttccacaaggggtaggctacgggtgaaacctcttaggctaatacttctatgaagagatgctttggatagggtaacagcggcggatattggtgagttgttaagacaaaaaccattcaacgccggaggactgactctcatccagtggatgcattgagtggattgactgtcagggctgtctttaggcttaattccagacctctctgtgcttagggcaaacatcatttggccttaaatgggattctgtgagagggaatccctccattgacagctggactgttctttggggccttatgtgatgtttgcctctgaggtactcaggggcatttaggtttttcctcatttttaaacaata

SEQ ID NO: 18069 - DNA, 665 bp, synthetic construct
  source 1..665: mol_type = other DNA
gaggggacctgatacctcaccgccgtttgcctaggctataggctatttgtccctttccctctcccctgttttgtgtaaatattaattcctgcaggttcagggttctttaatctgtttctctataagaacactcattttcacgctttctgtctgctttcttccagggctctccccttgccctaggctctggccgttgcgcccggcggggtcaactccatgattagcatggagctgtaggagtctaaattggggacgcagatgtttgggacgtcaccttgcagtgttaacttggctctcatgaaactctttgatcttccacaagaggtaggctacgggtgaaacctcttaagctagtacttctatgaagagatgctttggatagggtaacagcggcggatattggtgagttgttaagacaaaaacctttcaacgccggaggactggctctcatccagtggatgcattgagtggattgtttgtcagggctgtctctaggcttaatctcagacctctctgcgcttagggcaaacattacttggccttaaatgggatcctgtgagaggggatccctccattgactgctggacttttctttggggccttaggtagtgtttgcctctgaggtactcaggggcatttaggtttttcctcactcttaaataatt

SEQ ID NO: 18070 - DNA, 697 bp, synthetic construct
  source 1..697: mol_type = other DNA
ccctctgggaagtccatggtgaggggacttgatacctcaccgccgtttgcctaggctataggctaaattttccctttccctttccctttcctattccctttgtttgtaaatattaattcctgcaggttcagggttcttaaatctgtttctctataagaacactcatttttcacgctttctgtcttctttcttccagggctctccccttgccctaggctctggccgttgcgcccggcggggtcaactccatgattagcatggagctgtaggagtctaaattggggacacagatgtttgggacgtcaccttgcagtgttaacttggctttcatgaatctctttgatcttccacaaggggtaggctacgggtgaaacctcttaggctaatacttctatgaagagatgccttggatagggtaacagcggcggacattggtgagttgttaagacaaaaaccattcaacgccggaggactgactctcatccagtggatgcattgagtggattgactgtcaaggctgtctctaggcttaattccagacctctctgtgcttagggcaaacatcatttggccttaaatgggatcctgtgagaggggatccctccattgacagctggactgtcctttggggccttatgtggtgtttgcctctgaggtactcaggggcatttaggtttttcctcactctcaaacaata

SEQ ID NO: 18071 - DNA, 664 bp, synthetic construct
  source 1..664: mol_type = other DNA
ccgccgtttgcctaggctataggctaaattttccctttcccttttccctttcctattccctttgttttgcttgtaaatattaattcctgcaggttcagggttcttaaatctgtttctctataagaacactcatttttcacgctttctgtcttctttcttccagggctctccccttgccctaggctctggccgttgcgcccggcggggtcaactccatgattagcatggagctgtaggagtctaaattggggacacagatgtttggaacgtcaccttgcagtgttaacttggctttcatgaatctctttgatcttccacaaggggtaggctacgggtgaaacctcttaggctaatacttctatgaagagatgccttggatagggtaacagcggcggatattggtgagttgttaagacaaaaaccattcaacgccggaggactgactctcatccagtggatgcattgagtggattgactgtcagggctgtctttaggcttaattccagacctctctgtgcttagggcaaacatcatttggccttaaatgggattctgtgagaggggatccctccattgacagctggactgttctttggggccttatgtggtgtttgcctctgaggtactcaggggcatttaggtttttcctcattcttaaataata

SEQ ID NO: 18072 - DNA, 684 bp, synthetic construct
  source 1..684: mol_type = other DNA
tgaggggacttgatacctcaccgccgtttgcctaggctataggctaaatttccctttccctgtccttcccctatttccttttgttttgtttgtaaatattaattcctgcaggttcagggttctttaatctgtttctctataagaacactcaatttttcacgctttctgtctcctttcttccagggctctccccttgccctaggctctggccgttgcgcccggcggggtcaactccatgattagcatggagctgtaggagtctaaattggggacgcagatgtttgggacgtcgccttgcagtgttaacttggctttcatgaacctctttgatcttccacaaggggtaggctacgggtgaaacctcttaggctaatacttcaatgaagagatgccttggatagggtaacagcggcggatattggtgagttgttaagacaaaaaccattcaacgccggaggactggctctcatccagtggatgcattgagggaattgattgtcagggctgtctctaggtttaatctcagacctctctgtgcttagggcaaacactatttggccttaaatgggatcctgtgagagggggtccctccattgacagctggactgttctttggggccttatgtggtgtttgcctctgaggtactcaggggcatttaggtttttcctcattcttaaataata

SEQ ID NO: 18073 - DNA, 549 bp, synthetic construct
  source 1..549: mol_type = other DNA
ttcaaagaggggtccgggattttcctggtccccctctttgggcacccttggctcgggggtgtgaataccgtgctcgcgtttgccgtgcgttaacggcttcatttatgtttgtttgtctgttttattatgtttgtttgtctgtttgttatgttggtattgttcgtgtttaatgttatgaccacattacactccagccaatgaagaacagatggtgcggttattgctggcggaattcctaacgtcctggatccgttggtacgcatcacaaaacaatttgcagagagagtggtgaaacggcttgggaatccctgagtacagggaaatcacactgatagctcatcttggctgttttcagtcatggaccttatgcagtgtaatttgggtgtaccccccatagcttaggaggaatgttctgtcttggcactagagtgggacgctgatgcctccgtgtctaggatggtctaagggacagaatggggtgcctctgatgccatactacctgatagggtgctctcacggcctctgcatcttagtgagaagttcaatttt

SEQ ID NO: 18074 - DNA, 675 bp, synthetic construct
  source 1..675: mol_type = other DNA
ggtccatggtgaggggacctgatacctcaccgccgtttgcctaggctataggctatttctccctttccctttcccttgttttgtgtaaatattaattcctgcaggttcagggttctttaatctgtttctctataagaacactcattttcacgctttctgtctgctttcttccagggctctccccttgccctaggctctggccgttgcgcccggcggggtcaactccatggctagcatggagctgtaggagtctaaattggggacgcagatgtttgggacgtcaccttgcagtgttaacttggctctcatgaagctctttgatcttccacaagaggtaggctacgggtgaaacctcttaagctagtacttctatgaagagatgctttggatagggtaacagcggcggatattggtgagttgttaagacaaaaacctttcaacgccggaggactggctctcatccagtggatgcattgagtggattgtttgtcagggctgtctctaggcttaatctcagacctctctgtgcttagggcaaacattacttggccttaaatgggatcctgtgagaggggatccctccattgactgctggacttttctttggggccttaggtggtgtttgcctctgaggtactcaggggcatttaggtttttcctcactctcaaataatt

SEQ ID NO: 18075 - DNA, 504 bp, synthetic construct
  source 1..504: mol_type = other DNA
tctagcatggaaaatcacacatgcagcccgatttcgggcttgggaacccgttcatcaagatcccataacctttcttttcttttgtctatcccttgagtagctaggctcgcggcagggtcttgtatatacctgcactagctgccacgaagtgctacagaaaccattagtatatatttagaaaccacctgttgacgtaactgtgattgattgcctggggctgagggcatggtaacatgcaccccaggggccaaaagcctagtgggtaacaacccaccattcatgatgcccttcttggcacaacaagtggatctctctatctatagaacatgggagtatggtatggagtggtgtaaggagcacgctagtagatgccccataggtacccttctggatctgagtgggggccatgaggaggtctttccctctgaattggttaaaaaccatgaacgtttgctccgcccatctttcttctaattttatcaacttacttgaattctgatcaca

SEQ ID NO: 18076 - DNA, 487 bp, synthetic construct; identical to SEQ ID NO: 511
  source 1..487: mol_type = other DNA

SEQ ID NO: 18077 - DNA, 723 bp, synthetic construct; identical to SEQ ID NO: 901
  source 1..723: mol_type = other DNA

SEQ ID NO: 18078 - DNA, 668 bp, synthetic construct
  source 1..668: mol_type = other DNA
ctcaccgccgtttgcctaggctataggctaaatttccctttccctgtccttcccctatttccctttgttttgcttgtaaatatcaattcctgcaggttcagggctctttaatctgtttctctataagaacactcaattttcacgctttctgtcttcttttcttccagggctctccccttgccctaggctctggccgttgcgcccggcggggtcaactccatgattagcatggagctgtaggagtctaaattggggacgcagatgtttgggacgtcgccttgcagtgttaacttagctctcatgaacctctttgatcttccacaaggggtaggctacgggtgaaacctcttaggctaatacttctatgaagagatgctttggatagggtaacagcggcggatattggtgagttgttaagacaaaaaccattcaacgccggaggactggctctcatccagtggatgcattgagtggattgattgttagggctgtctctaggtttaatctcggacctctctgtgcttagggcaaacaccatttggccttaaatgggatcctgtgagagggggtccctcctttgacagcaggactgttctttggggccttatgtggtgtttgcctctgaggtactcaggggcatttaggtttttcctcattcttaaataata

SEQ ID NO: 18079 - DNA, 696 bp, synthetic construct; identical to SEQ ID NO: 96
  source 1..696: mol_type = other DNA

SEQ ID NO: 18080 - DNA, 684 bp, synthetic construct
  source 1..684: mol_type = other DNA
cctcttggaagtccatggtgaggggacctgatacctcaccgccgtttgcctaggctataggctatttgtccctttccctctcccctgttttgtgtaaatattaattcctgcaggttcagggttctttaatctgtttctctataagaacactcattttcacgctttctgtctgctttcttccagggctctccccttgccctaggctctggccgttgcgcccggcggggtcaactccatgattagcatggagctgtaagagtctaaattggggacgcagatgtttgggacgtcaccttgcagtgttaacttggctctcatgaagctctttgatcttccacaagaggtaggctacgggtgaaacctcttaagctagtacttctatgaagagatgctttggatagggtaacagcggcggatattggtgagttgtcaagacaaaaacctttcaacgccggaggactggctctcatccagtggatgcattgagtggattgtttgtcagggctgtctctaggcttaatctcagacctctctgcgcttagggcaaacattacttggccttaaatgggatcctgtgagaggggatccctccattgactgctggacttttctttggggccttaggtagtgtttgcctctgaggtactcaggggcatttaggtttttcctcactctcaaataatt

SEQ ID NO: 18081 - DNA, 684 bp, synthetic construct
  source 1..684: mol_type = other DNA
cctcttggaagtccatggtgaggggacctgatacctcaccgccgtttgcctaggctataggctatttgtccctttccctctcccctgttttgtgtaaatattaattcctgcaggttcagggttctttaatctgtttctctataagaacactcattttcacgctttctgtctgctttcttccagggctctccccttgccctaggctctggccgttgcgcccggcggggtcaactccatgattagcatggagctgtaggagtctaaattggggacgcagatgtttgggacgtcaccttgcagtgttaacttggctctcatgaagctctttgatcttccacaagaggtaggctacgggtgaaacctcttaagctagtacttctatgaagagatgctttggatagggtaacagcggcggatattggtgagttgttaagacaaaaacctttcaacgccggaggactggctctcatccagtggatgcattgagtggattgtttgtcagggctgtctctaggcttaatctcagacctctctgcgcttagggcaaacattacttggccttaaatgggatcctgtgagaggggatccctccattgactgctggacttttctttggggccttaggtagtgtttgcctctgaggtactcaggggcatttaggtttttcctcactcttaaataatt

SEQ ID NO: 18082 - DNA, 663 bp, synthetic construct
  source 1..663: mol_type = other DNA
ccgccgtttgcctaggctataggctaaatttcccttccctgtccttcccctatttccctttgttttgcttgtaaatatcaattcctgcaggttcagggctctttaatctgtttctctataagaacactcaattttcacgctttctgtcttcttttcttccagggctctccccttgccctaggctctggccgttgcgcccggcggggtcaactccatgattagcatggagctgtaggagtctaaattggggacgcagatgtttgggacgtcgccttgcagtgttaacttagctctcatgaacctctttgatcttccacaaggggtaggctacgggtgaaacctcttaggctaatacttctatgaagagatgctttggatagggtaacagcggcggatattggtgagttgttaagacaaaaaccattcaacgccggaggactggctctcatccagtggatgcattgagtggattgattgttagggctgtctctaggtttaatctcggacctctctgtgcttagggcaaacaccatttggccttaaatgggatcctgtgagagggggtccctcctttgacagcaggactgttctttggggccttatgtggtgtttgcctctgaggtactcaggggcatttaggtttttcctcattcttaaataata

SEQ ID NO: 18083 - DNA, 299 bp, synthetic construct
  source 1..299: mol_type = other DNA
tggccaccggggaagaacggcaattgtgcacctcctctacaacccacgccgaccctgcctaaccatggcaccagtaggagtgggcccctgtagtgggtcaaggtgtgcgacagtcagtggtagagtagacaatcctgaccgggcaataggactgcattgcatatccttaggtggtattgagaaacctctgccacccaccggcgtggatctctatggggggggccccatagactgggtctatactgcctgatagggtcgcggctggtcgaccactgactgtataaccagttgtactcaac

SEQ ID NO: 18084 - DNA, 299 bp, synthetic construct
  source 1..299: mol_type = other DNA
tggccaccggggaaaaacggctattgtgcacctcctctacaacctacgccgaccatgcctaaccatggcatcaataggagtgggcccctgtagtgggtcaaggtgtgcgacagtcagtggtagagtagacaatcctaaccgggcaataggactgcattgcatatccttaggtggtattgagaagcctctgccacccaccggcatggatttctatggggggggccccatagactgggtctatactgcctgatagggtcgcggctggtcgaccactgactgtataaccagttgtgcataac

SEQ ID NO: 18085 - DNA, 413 bp, synthetic construct; identical to SEQ ID NO: 450
  source 1..413: mol_type = other DNA

SEQ ID NO: 18086 - DNA, 700 bp, synthetic construct
  source 1..700: mol_type = other DNA
gtccctcttggaagtccatggtgaggggacttgatacctcaccgccgtttgcctaggctataggctaaattttccctttcccttttccctttcccattcccttttgcttgtaaatattgattcctgcaggttcagggttcttaaatctgtttctctataagaacactcattttcacgctttctgtcttctttcttccagggctctccccttgccctaggctctggccgttgcgcccggcggggtcaactccatgattagcatggagctgtaggagtctaaattggggacacagatgtttggaacgtcaccttgcagtgttaacttggctttcatgaatctctttgatcttccacaaggggtaggctacgggtgaaacctcttaggctaatacttctatgaagagatgccttggatagggtaacagcggcggatattggtgagttgttaagacaaaaaccattcaacgccggaggactgactctcatccagtggatgcattgagtggattgactgtcagggctgtctttaggcttaattccagacctctctgtgcttggggcaaacatcatttggccttaaatgggattctgtgagaggggatccctccattaacagctggactgttctttggggccttatgtggtgtttgccgctgaggtactcaggggcatttaggtttttcctcattcttaaataata

SEQ ID NO: 18087 - DNA, 643 bp, synthetic construct
  source 1..643: mol_type = other DNA
gcctaggctataggctaaatttccctttcccctttccctttattgttgtaaatattaattcctgcaggttcaggtttcttggatttgttccactttatggacactcatttcacgctttctgtctgcttttcttccagggctctccccttgccctaggctctggccgttgcgcccggcggggtcaactccatgattagcatggagctgtaggagtctaaattggggacacagatgttgggaacgtcaccttgcagtgttaacttggctttcatgaagctttttgatcttccacaagaggtaggctacgggtgaaacctcttaagctaatacttctatgaagagatgctttggatagggtaacagcggcggatattggtgagttattcgacaaaaaccattcaacgccggaggactggctctcatccagtggatgcattaagtggattgtctgtcagggctgtctctaggtttaattcctgacctctctgtgcttagggcaaacaaaacttggccttaaatgaggtcctgtgagaggggacctcgccattgaatgctgaacatttctttggggccttatgttttgtttgcctctgaggtactcaggggcatttaggtttttcctcatcaataaataattatgaat

SEQ ID NO: 18088 - DNA, 656 bp, synthetic construct
  source 1..656: mol_type = other DNA
gcctaggctataggctaaattttccctttcccccttttccctttcctattccccttgttttgtttgtaaatattaattcctgcaggttcagggttctcaaatctgtttctctataagaacactctttttcacgctttctgtctcctttcttccagggctctccccttgccctaggctctggccgttgcgcccggcggggtcaactccatgactagcatggagctgtaggagtctaaattggggacacagatgtttggaacgtcaccttgcagtattaacttggctttcatgaatctctttgatcttccacaaggggtaggctacgggtgaaacctcttaggctaatacttctatgaagagatgctttggatagggtaacagcggcggatattggtgagttgttaagacaaaaaccattcaacgccggaggactgactctcatccagtggatgcattgagtggattgactgtcagggctgtctctaggcttaattccagacctctctgtgcttagggcaaacatcatttggccttaaatgggattctgtgagaggggatccctccattgacagctggactgttctttggggccttatgtggtgtttgcctctgaggtactcaggggcatttaggtttttcctcattctcaaataaca

SEQ ID NO: 18089 - DNA, 666 bp, synthetic construct
  source 1..666: mol_type = other DNA
tcaccgccgtttgcctaggctataggctaaatttcccttcccctgtcctttccctgtctccctttgtcttgtttgtaaatattaattcctgcaggctcagggttctttaatctgtttctctataagaacactcagttttcacgctttctgtcttctttcttccagggctctccccttgccctaggctctggccgttgcgcccggcggggtcaactccatgattagcatggagctgtaggagtctaaattggggacgcagatgtttgagacgtcgccttgcagtgttaacttggctctcatgaacctctttgatcttccacaaggggtaggctacgggtgaaacctcttaggctaatacttctatgaagagatgctttggatagggtaacagcggcggatattggtgagttgttaagacaaaaaccattcaacgccggaggactggctctcatccagtggatgcattgagtggattgattgtcagggctgtctctaggtttaatctcagacctctctgtgcttagggcaaacaccatttggccttaaatgggatcctgtgagagggggtccctccattgacagctggactgttctttggggccttaagtggtgtttgcctctgaggtactcaggggcatttaggtttttcctcattctcaaataata

SEQ ID NO: 18090 - DNA, 643 bp, synthetic construct
  source 1..643: mol_type = other DNA
gcctaggctataggctaaatttccctttcccctttccctttattgctgtagatattaattcctgcaggttcaggtctcttggatttgttccactttatggacactcatttcacgctttctgtctgcttttcttccagggctctccccttgccctaggctctggccgttgcgcccggcggggtcaactccatgattagcatggagctgtaggagcctaaattggggacacagatgttgggaacgtcaccttgcagtgttaacttggctttcatgaagctttttgatcttccacaagaggtaggctacgggtgaaacctcttaagctaatacttctatgaagagatgctttggatagggtaacagcggcggatattggtgagttatttgacaaaaaccattcaacgccggaggactggctctcatccagtggatgcattaagtggattgtctgtcagggctgtctctaggtttaattcctgacctctctgtgcttagggcaaacaaaacttggccttaaatgaggtcctgtgagaggggacctcgccattgaatgctggacatttctttggggccttatgttttgtttgcctctgaggtactcaggggcatttaggtttttcctcatcaataaatagttatgaat

SEQ ID NO: 18091 - DNA, 518 bp, synthetic construct; identical to SEQ ID NO: 543
  source 1..518: mol_type = other DNA

SEQ ID NO: 18092 - DNA, 349 bp, synthetic construct
  source 1..349: mol_type = other DNA
aagaacatatggtatgactattggatacaccttgaatggcagtagcgtggcgagctatggaaaaatcgcaattgtcgatagccatgttagtgacgcgcttcggcgtgctcctttggtgattcggcgactggttacaggagagtaggcagtgagctatgggcaaacctctgcagtattactcagagggaatgtgcaattgagacttgacgagcgtctctttgagatgtggcgcatgctcttggcattaccatagtgagcttccaggttgggaaacctggactgggcctatactacctgatagggtcgcggctggccgcctgtaactagtatagtcagttgaaaccccccc

SEQ ID NO: 18093 - DNA, 665 bp, synthetic construct
  source 1..665: mol_type = other DNA
gaggggacctgatacctcaccgccgtttgcctaggctataggctatttgtccctttccctctcccctgttttgtgtaaatattaattcctgcaggttcagggttctttaatctgtttctctataagaacactcattttcacgctttctgtctgctttcttccagggctctccccttgccctaggctctggccgttgcgcccggcggggtcaactccatgattagcatggagctgtaggagtctaaattggggacgcagatgtttgggacgtcaccttgcagtgttaacttggctctcatgaagctctttgatcttccacaagaggtaggctacgggtgaaacctcttaagctagtacttctatgaagagatgctttggatagggtaacagcggcggatattggtgagttgttaagacaaaaacctttcaacgccggaggactggctctcatccagtggatgcattgagtggattgtttgtcagggctgtctctaggcttaattccagacctctctgcgcttagggcaaacattacttggccttaaatgggatcctgtgagaggggatccctccattgactgctggacttttctttggggccttaggtagtgtttgcctctgaggtactcaggggcatttaggtttttcctcactcttaaataatt

SEQ ID NO: 18094 - DNA, 665 bp, synthetic construct
  source 1..665: mol_type = other DNA
gaggggacctgatacctcaccgccgtttgcctaggctataggctatttgtccctttccctctcccctgttttgtgtaaatattaattcctgcaggttcagggttctttaatctgtttctctataagaacactcattttcacgctttctgtctgctttcttccagggctctccccttgccctaggctctggccgttgcgcccggcggggtcaactccatgattagcatggagctgtaggagtctaaattggggacgcagatgtttgggacgtcaccttgcagtgttaacttggctctcatgaagctctttgatcttccacaagaggtaggctacgggtgaaacctcttaagctagtacttctatgaagagatgctttggatagggtaacagcggcggatattggtgagttgttaagacaaaaacctttcaacgccggaggactggctctcatccagtggatgcattgagtggattgtttgtcagggctgtctctaggcttaatctcagacctctctgcgcttagggcaaacattacttggccttaaatgggatcctgtgagaggggatccctccattgactgctggacttttctttggggccttaggtagtgtttgcctctgaggtactcaggggcatttaggtttttcctcactcttaaataatt

SEQ ID NO: 18095 - DNA, 708 bp, synthetic construct; identical to SEQ ID NO: 105
  source 1..708: mol_type = other DNA

SEQ ID NO: 18096 - DNA, 676 bp, synthetic construct
  source 1..676: mol_type = other DNA
acttgatacctcaccgccgtttgcctaggctataggctaaaccttcctttccctgcccttcccttatttccctttgttttgtttgtaaatattaattcctgcaggttcagggttctttaatctgtttctctataagaacactcaattttcacgctttctgtctcctttcttccagggctctccccttgccctaggctctggccgttgcgcccggcggggtcaactccatgattagcatggagctgtaggagtctgaattggggacgcagatgtttgggacgtcgccttgcagtgttaacttggctttcatgaacctctttgatcttccacaaggggtaggctacgggtgaaaccccttaggctaatacttctatgaagagatgccttggatagggtaacagcggcggatattggtgagttgttaagacaaaaaccattcaacgccggaggactggctctcatccagtggatgcattgagtggattgactgtcagggctgtctctaggtttaatctcagacctctctgtgcttagggcaaacaccatttggccttaaatgggatcctgtgagagggggtccctccattgacagctggactgttctttggggccttatgtggtgtttgcctctgaggtactcaggggcatttaggtttttcctcattctctaacaata

SEQ ID NO: 18097 - DNA, 609 bp, synthetic construct; identical to SEQ ID NO: 44
  source 1..609: mol_type = other DNA

SEQ ID NO: 18098 - DNA, 522 bp, synthetic construct
  source 1..522: mol_type = other DNA
gggacgtcagcgcacgaaacgcgcggttgctctttgcgttcttgtacaaacacgatcttgacgcaggaatcttagaccaacccaacccgtgcacctgcaagtttcgcccggtctttccgggtcttgagagacaaacagatgtactgagatcaactccacgattggtctactagcgggtactagtaacacccactttgcttcgtagcggagcacatgagcggtgggacctcccccatggtaacatggacccaccgggccaaaagccacgcctcacggcctcatgtgtgtgcaaccccagcacggcaacttgtttgtgaaacataccttaaggtaacactgagactggtacttgatttctggagacaggctaaggatgcccttcaggtaccctgaggtaacaagagacacttcgggatctgagaaggggaccaggagttctatcaaactgccggtttaaaaagcttctatgcctggataggtgaccggaggccggcaccttttcctttactttaaacttacttt

SEQ ID NO: 18099 - DNA, 301 bp, synthetic construct; identical to SEQ ID NO: 1340
  source 1..301: mol_type = other DNA

SEQ ID NO: 18100 - DNA, 641 bp, synthetic construct
  source 1..641: mol_type = other DNA
gtttgcctaggctataggctaaatttcccttttccctttccctttattgttgtaaatattaattcctgcaggttcaggtttcttggatttgttccactttatggacactcatttcacgctttctgtctgcttttcttccagggctctccccttgccctaggctctggccgttgcgcccggcggggtcaactccatgattagcatggagctgtaggagtctaaattggggacacagatgttgggaacgtcaccttgcagtgttaacttggctttcatgaagctttttgatcttccacaagaggtaggctacgggtgaaacctcttaagctaatacttctatgaagagatgctttggatagggtaacagcggcggatattggtgagttatttgacaaaaaccattcaacgccggaggactggctctcatccagtggatgcattaagtggattgtctgtcagggctgtctctaggtttaattcctgacctctctgtgcttagggcaaacaaaacttggccttaaatgaggtcctgtgagaggggacctcgccattgaatgctggacatttctttggggccttatgttttgtttgcctctgaggtactcaggggcatttaggtttttcctcatcaataaataatt

SEQ ID NO: 18101 - DNA, 525 bp, synthetic construct
  source 1..525: mol_type = other DNA
aaacgggacgtcagcgcacgaaacgcgccgccactttcggaacacttgtacaaacacgatctgacgcaggtatccctaactggcattctcgtgcaacttggagtctcgcctggtctttccaggtctagggaggcaacactttgtactgaaaccaactccacaactggtctactggcgggtgctagtaacgactttgttgcttcgtagcggagcatgcgagccgcgggaactcccccctggtaacagggacccgcggggccgaaagccacgtccctcggacctcgcatgtgtgcaaccccagcacggcaacactgtagtgaaacacactttaaggtaacactgagactggtacttggtttctggggacaggctaaggatgccctccaggtaccccgaggtaacaagcgacactcgggatctgaggaggggactggggcttctataaaagcgcccagtttaaaaagcttctatgcctgaataggtgaccggaggccggcaccttttcttttgtacacgaatcacttt

SEQ ID NO: 18102 - DNA, 713 bp, synthetic construct; identical to SEQ ID NO: 873
  source 1..713: mol_type = other DNA

SEQ ID NO: 18103 - DNA, 419 bp, synthetic construct
  source 1..419: mol_type = other DNA
ggtgaacatcgaacgtctgaactggatccgtagctggacatgttagggcaagggtctcccccctggtaacaggagccttgctggccaaaagccccgctctctgagcctagcatgttgtcgaccccggactgttcagtttagttagtacatgggattcacttgtcatggttcctctgaactcggtctctagtgcggcagcctaaggatgccctccaggtaccccgaggtaacaagcgacactcgggatctgaggaggggactactttacgtggtttaaaaaacgtctaagctgctacggtgaccagaggctggcacctttcactttttaaacacactattgactacaattgaagtgataacggttttacagactttcaaactagttacacaagtactgtttttccaacacacacaatttt

SEQ ID NO: 18104 - DNA, 663 bp, synthetic construct
  source 1..663: mol_type = other DNA
aggggggggctgggccctcatgcccagtccttcctttccccttccggggggtaaaccggctgtgtttgctagaggcacagaggagcaacacccaacctgcttttgtggggaacggtgcggctccgattcctgcgtcgccaaaggtgttagcgcacccaaacggcgcatctaccaatgctattggtgtggtctgcgagttctagcctactcgtttctcccctatccattcactcacgcacaaaaagtgtgttgtaactacaagatttagccctcgcacgagatgtgcgataaccgcaagactgactcaagcgcggaaagcgctgtaaccacatgctgttagtccctttatggctgcgagatggctatccacctcggatcactgaactggagctcgaccctccttagtaagggaaccgagaggccttcttgcaacaagctccgacacagagtccacgtgattgctaccaccatgagtacatggttctcccctctcgacccaggacttctttttgaatatccacggctcgatccagagggtggggcatgatccccctagcatagcgagctacagcgggaactgtagctaggccttagcgtgccttggatactgcctgatagggcgacggcctagtcgtgtcggttctataggtagcacatataaat

SEQ ID NO: 18105 - DNA, 1000 bp, synthetic construct; identical to SEQ ID NO: 144
  source 1..1000: mol_type = other DNA

SEQ ID NO: 18106 - DNA, 604 bp, synthetic construct; identical to SEQ ID NO: 39
  source 1..604: mol_type = other DNA

SEQ ID NO: 18107 - DNA, 695 bp, synthetic construct; identical to SEQ ID NO: 95
  source 1..695: mol_type = other DNA

SEQ ID NO: 18108 - DNA, 695 bp, synthetic construct
  source 1..695: mol_type = other DNA
tctcctagagagcttggccgtcgggccttataccccgacttgctgagtttctttaggagagcccctttcccagccttgaggcggctggtcaataaaagcctcaaatgtaacgaacatctaagaccattaaacttaccctatgcctggtctccacttttcgaaggcaacttgcaataagaagagtggaatcaagacgcttaaagcatggagacagtttccttttttaacccacattagtgtggggtggcagatggcgtgccataactctaatagtgagataccacgcttgtggaccttatgctcacacagccatcctctagtaagtttgtaagacgtctggtgacgtgtgggaatttattggatacaacattctgctgtaaagcatcctaatgccagcggaacaacacctggtaacaggtgcctctggggccaaaagccaaggtttaacagaccctttaggattggttcaaacctggaatgttgtggaaaatacttagtacctgccgatctggtagtagtgcaaacactagttgtaaggcccacgaaggatgcccagaaggtacccgtaggtaacaagtgacactatggatctgatctggggctggatacctctatcttggtgattcagttaaaaaacgtctagtgggccaaacccaggggggatccctggtttctttttattttataatgtcact

SEQ ID NO: 18109 - DNA, 696 bp, synthetic construct; identical to SEQ ID NO: 97
  source 1..696: mol_type = other DNA

SEQ ID NO: 18110 - DNA, 709 bp, synthetic construct; identical to SEQ ID NO: 110
  source 1..709: mol_type = other DNA

SEQ ID NO: 18111 - DNA, 683 bp, synthetic construct; identical to SEQ ID NO: 93
  source 1..683: mol_type = other DNA

SEQ ID NO: 18112 - DNA, 633 bp, synthetic construct
  source 1..633: mol_type = other DNA
ctttcccagccttgaggtggctggtcaataaaaacctcaactgtaactaacatccaagctgattttatagataccccatgcctggtccccactagtcgaaagcacctggcaataagatgagtggaaaagggcgcttaaagcatggtgttagtatacatttctaacctgtgactatcacggggtggcagatggcgtgccataactctattagtgagataccacgtttgtggaccttatgctcacacagccatcctctagtaagcttgcaaggcgtctgatgacgtgtgggaactaattggaaatgacagtttgctgctaagcatcctattgccagcggatcaacacctggtaacaggtgcctctggggccaaaagccaaggtttaacagaccctttaggattggttcaaacctgaactgttgtggaagattctcagtacctgctaatttggtagttaggcaagcactagttgtaaggcccacgaaggatgcccagaaggtacccgtaggtaacaagtgacactatggatctgatctggggccagctacctctttcatggtgagttggttaaaaaacgtctagtgggccaaacccaggggggatccctggtttcctttattttatcatagtcatt

SEQ ID NO: 18113 - DNA, 707 bp, synthetic construct
  source 1..707: mol_type = other DNA
tttgaaagggtctcctagagagcttggccgtcgggccttataccccgacttgctgagcttctctaggagagtccctttcccagccttgaggcggctggtcaataaaagcctcaattgtaacaaacatctaagattattatattaaccccatgcctggtctccactggttgaaggcaacttgcaataaaatgagtgggaacaagacgcttaaagcatggtgtgaactaactttctaacccacattttgtgtggggtggcagatggcgtgccataattctactagtgagataccacgcttgtggaccttatgctcacacagccatcctctagtaagtttgtgagacgtctggtgacgtgtgggaacttattggaagcaacattttgctgcaaagcatcctattgccagcggaacaacacctggtaacaggtgcctctggggccaaaagccaaggtctaacaaaccctttaggattggttctaaacctgagatgttgtggaagatacttagtacctgccgatctggtagtactgcaaacactagttgtaaggcccacgaaggatgcccagaaggtacccataggtaacaagtgacactatggatctgatctggggccaggtacctctatcttggtgacctggttaaaaagcgtctagtgggccaaacccgggggggatccccggtttccttttattttatcaatgctaca

SEQ ID NO: 18114 - DNA, 709 bp, synthetic construct; identical to SEQ ID NO: 111
  source 1..709: mol_type = other DNA

SEQ ID NO: 18115 - DNA, 590 bp, synthetic construct
  source 1..590: mol_type = other DNA
gtaaatattaattcctgcaggttcaggtctcttggatttgttccactttatggacactcatttcacgctttctgtctgcttttcttccagggctctccccttgccctaggctctggccgttgcgcccggcggggtcaactccatgattagcatggagctgtaggagtctaaattggggacgcagatgttgggaacgtcaccttgcagtgttaacttggctttcatgaagctttttgatcttccacaagaggtaggctacgggtgaaacctcttaagctaatacttctatgaagagatgctttggatagggtaacagcggcggatattggtgagttgtttgacaaaaaccattcaacgccggaggacgggctctcatccagtggatgcattaagtggattgtctgtcagggctgtctctaggtttaattcctgacctctctgtgcttagggcaaacaaaatttggccttaaatgaggtcctgtgagaggggacctcgccattgaatgctggacatttctttggggccttatgttttgtttgcctctgaggtactcaggggcatttaggtttttcctcatcaattaataatt

SEQ ID NO: 18116 - DNA, 319 bp, synthetic construct
  source 1..319: mol_type = other DNA
cttgaatggcagtagcgtggcgagctatggaaaaatcgcaattgtcgatagccatgttagtgacgcgcttcggcgtgctcctttggtgattcggcgactggttacaggagagtaggcagtgagctatgggcaaacctctgcagtattactcagagggaatgtgcaattgagacttgacgagcgtctctttgagatgtggcgcatgctcttggcattaccatagtgagcttccaggttgggaaacctggactgggcctatactacctgatagggtcgcggctggccgcctgtaactagtatagtcagttgaaaccccccc

SEQ ID NO: 18117 - DNA, 707 bp, synthetic construct; identical to SEQ ID NO: 104
  source 1..707: mol_type = other DNA

SEQ ID NO: 18118 - DNA, 673 bp, synthetic construct; identical to SEQ ID NO: 86
  source 1..673: mol_type = other DNA

SEQ ID NO: 18119 - DNA, 518 bp, synthetic construct; identical to SEQ ID NO: 544
  source 1..518: mol_type = other DNA

SEQ ID NO: 18120 - DNA, 712 bp, synthetic construct; identical to SEQ ID NO: 113
  source 1..712: mol_type = other DNA

SEQ ID NO: 18121 - DNA, 651 bp, synthetic construct
  source 1..651: mol_type = other DNA
aggctataggctaaatttccctttccctgttcctttccctatctccctttgttttgcttgtaaatattaattcctgcaggttcagggttctttaatctgtttctctataagaacactcaattttcacgctttctgtcttctttcttccagggctctccccttgccctaggctctggccgttgcgcccggcggggtcaactccatgattagcatggagctgtaggagtctaaattggggacgcagatgtttgggacgtcaccttgcagtgttaacttggctctcatgaacctctttgatcttccacaaggggtaggctacgggtgaaacctcttaggctaatacttctatgaagagatgctttggatagggtaacagcggcggatattggtgagttgttaagacaaaaaccattcaacgccggaggactggctctcatccagtggatgcattgagtggattgattgtcagggctgtctctaggcttaatctcagacctctctgtgcttagggcaaacaccatttggccttaaatgggatcctgtgagagggggtccctccattgacagctggactgttctttggggccttatgtggtgtttgcctctgaggtactcaggggcatttaggtttttcctcattctttaaaaata

SEQ ID NO: 18122 - DNA, 651 bp, synthetic construct
  source 1..651: mol_type = other DNA
aggctataggctaaatttccctttccctgttcctttccctatttccctttgttttgcttgtaaatattaattcctgcaggttcagggttctttaatctgtttctctataagaacactcaattttcacgctttctgtcttctttcttccagggctctccccttgccctaggctctggccgttgcgcccggcggggtcaactccatgattagcatggagctgtaggagtctaaattggggacgcagatgtttgggacgtcaccttgcagtgttaacttggctctcatgaacctctttgatcttccacaaggggtaggctacgggtgaaacctcttaggctaatacttctatgaagagatgctttggatagggtaacagcggcggacattggtgagttgttaagacaaaaaccattcaacgccggaggactggctctcatccagtggatgcattgagtggattgattgtcagggctgtctctaggtttaatctcagacctctctgtgcttagggcaaacaccatttggccttaaatgggatcctgtgagagggggtccctccattgacagctggactgttctttggggccttatgtggtgtttgcctctgaggtactcaggggcatttaggttcttcctcattcttaaacaata

SEQ ID NO: 18123 - DNA, 651 bp, synthetic construct
  source 1..651: mol_type = other DNA
aggctataggctaaatttccctttccctgttcctttccctatctccctttgttttgcttgtaaatattaattcttgcaggttcagggttctttaatctgtttctctataagaacactcaattttcacgctttctgtcttctttcttccagggctctccccttgccctaggctctggccgttgcgcccggcggggtcaactccatgattagcatggagctgtaggagtctaaattggggacgcagatgtttgggacgtcaccttgcagtgttaacttggctctcatgaacctctttgatcttccacaaggggtaggctacgggtgaaacctcttaggctaatacttctatgaagagatgctttggatagggtaacagcggcggatattggtgagttgttaagacaaaaaccattcaacgccggaggactggctctcatccagtggatgcattgagtggattgattgtcagggctgtctctaggcttaatctcagacctctctgtgcttagggcaaacaccatttggccttaaatgggatcctgtgagagggggtccctccattgacagctggactgttctttggggccttatgtggtgtttgcctctgaggtactcaggggcatttaggtttttcctcattctttaaaaata

SEQ ID NO: 18124 - DNA, 713 bp, synthetic construct
  source 1..713: mol_type = other DNA
gctcctctgtgcctctagcaaacacagccggtttaccccccggaaggggaaaggaaggactgggcatgagggcccagccccccctttccccttccggggggtaaaccggctgtgtttgctagaggcacagaggagcaacatccaacctgcttttgtggggaacggtgcggctccaattcctgcgtcgccaaaggtgttagcgcacccaaacggcgcatctaccaatgctattggtgtggtctgcgagttctagcctactcgtttctcccctactcactcattcacgcacaaaaactgtgttgtaactacaagatttagccctcgcacgggatgtgcgataaccgcaagattgactcaagcgcggaaagcgctgtaaccacatgctgttagtccctttatggctgcgagatggctgtccacctcggatcactgaactggagctcgaccctccttagtaagggaaccgagaggccttcttgcaacaagctccgacacagagtccacgtgattgctaccaccatgagtacatggttctcccctctcgacccaggacttctttttgaatatccacggctcgatccagagggtggggcatgatccccctagcatagcgagctacagcgggaactgtagctaggccttagcgtgccttggatactgcctgatagggcgacggcctagtcgtgtcggttctataggtagcacatacaaat

SEQ ID NO: 18125 - DNA, 858 bp, synthetic construct
  source 1..858: mol_type = other DNA
atgtcaaagcaatacagtatgtacacagtgtacacgctcaaggcggagatttaggcctcacagattgtgttttgtgttattggatgctggatggtcacgttggagactgcatgtggcagtcttgaaacgtgtggtttgacgtctatccgttatggcagtgggtggagcactgcaaagacgtcaccgtgctttacacggtttttgaaccccacaccggctgtttggcgcttgcaggacagcaggtttattttcatatgttctttatttctagccaacagggttctatcctgttgggcggagtgatactcccgttccttcttggacagattgcctccacgatctttgtggaccttaaggtgatcaagtcactggtgaattgagcgaaggttgaggaagcctgaggaatttccatgtggctttgccaggagttgtagcgatgctgtgtgtgtgtgcggatttcccctcatggcaacatgagcctcacaggccaaaagccccgtccgaaaggacccacacagtggagcaaccccagctccctcctacaaagctttgtgtgaatgaactcatgtttattcttctttattctctatttacatcaggccccaaagatgtcctgaaggtaccttgtgtatctgggcgtgagcaccatcaactacccggacttgcactttggtgcagacgcatgtggtgacccagcccctctgcttcggcggaggggcttttgctcgctcagcacgagatctgatcaggagtccctcccagtgtgctttacacctggcgaggggttaaaaattgcccaaggcctggcacaacaacctaggggactaggttttccttttattaacaatgtctgtcaat

SEQ ID NO: 18126 - DNA, 700 bp, synthetic construct
  source 1..700: mol_type = other DNA
tttgaaaggggtctcctagagagcttggccgtcgggccttataccccgatttgctgagcttctctaggagagcccttttcccagccagaggtggctggttaaacaatacctattgtaacaaaacatctaagacacaacaaccgcacacctggtctccactggccgaaggcaactagcaataaggtaggtgggttcagacgcttaaagtgtgttgtacatattcttttctaacctgtgttttacacagggtggcagatggcgtgccataaccctaatagtgagataccacgcttgtggaccttatgctcacacagccatcctctagtaagtttgtaagacgtctgatgacgtgtgggaacttgttggagataacattttgctgcaaagcatcccattgccagcggatccacatctggtaacagatgcctctggggccaaaagccaaggtttaacagaccctttgggattggttcaaacctgaattgttatggaagacatttagtacctgctgatttggtagtagtgcaaacactagttgtaaggcccacgaaggatgcccagaaggtacccgtaggtaacaagtgacactatggatctgatctggggctaactacctctatctaggtgagttggttaaaaaacgtctagtgggccaaatccaggggggatccctggtttcttttttatttgaataatcact

SEQ ID NO: 18127 - DNA, 700 bp, synthetic construct
  source 1..700: mol_type = other DNA
tttgaaaggggtctcctagagagcttggccgtcgggccttataccccgatttgctgagcttctctaggagagcccttttcccagccagaggtggctggttaaacaatacctattgtaacaaaacatctaagacacaacaaccgcacacctggtctccactggccgaaggcaactagcaataaggtaggtgggttcagacgcttaaagtgtgttgtacatattcttttctaacctgtgttttacacagggtggcagatggcgtgccataaccctaatagtgagataccacgcttgtggaccttatgctcacacagccatcctctagtaagtttgtaagacgtctgatgacgtgtgggaacttgttggagataacattttgctgcaaagcatcccattgccagcggatccacatctggtaacagatgcctctggggccaaaagccaaggtttaacagaccctttgggattggttcaaacctgaattgttatggaagacatttagtacctgctgatttggtagtagtgcaaacactagttgtaaggcccacgaaggatgcccagaaggtacccgtaggtaacaagtgacactatggatctgatctggggctaactacctctatctaggtgagttggttaaaaaacgtctagtgggccaaacccaggggggatccctggtttcttttttatttgaataatcact

SEQ ID NO: 18128 - DNA, 700 bp, synthetic construct
  source 1..700: mol_type = other DNA
tttgaaaggggtctcctagagagcttggccgtcgggccttataccccgatttgctgagcttctctaggagagcccttttcccagccagaggtggctggttaaacaatacctattgtaacaaaacatctaagacacaacaaccgcacacctggtctccactggccgaaggcaactagcaataaggtaggtgggttcagacgcttaaagtgtgttgtacatattcttttctaacctgtgttttacacagggtggcagatggcgtgccataaccctaatagtgagataccacgcttgtggaccttatgctcacacagccatcctctagtaagtttgtaagacgtctgatgacgtgtgggaacttgttggagataacattttgctgcaaagcatcccattgccagcggatccacatctggtaacagatgcctctggggccaaaagccaaggtttaacagaccctttgggattggttcaaacctgaattgttatggaagacatttagtacctgctgatttggtagtagtgcaaacactagttgtaaggcccacgaaggatgcccagaaggtacccgtaggtaacaagtgacactatggatctgatctggggctaactacctctatctaggtgagttggttaaaaaacgtctagtgggccaaacccaggggggatccctggtttctttttaatttgaataatcact

SEQ ID NO: 18129 - DNA, 700 bp, synthetic construct
  source 1..700: mol_type = other DNA
tttgaaaggggtctcctagagagcttggccgtcgggccttataccccgatttgctgagcttctctaggagagcccttttcccagccagaggtggctggttaaacaatacctattgtaacaaaacatctaagacacaacaaccgcacacctggtctccactggccgaaggcaactagcaataaggtaggtgggttcagacgcttaaagtgtgttgtacatattcttttctaacctgtgttttacacagggtggcagatggcgtgccataaccctaatagtgagataccacgcttgtggaccttatgctcacacagccatcctctagtaagtttgtaagacgtctgatgacgtgtgggaacttgttggagataacattttgctgcaaagcatcccattgccagcggatccacatctggtaacagatgcctctggggccaaaagccaaggtttaacagaccctttgggattggttcaaacctgaattgttatggaagacatttagtacctgctgatttggtagtagtgcaaacactagttgtaaggcccacgaaggatgcccagaaggtacccgtaggtaacaagtgacactatggatctgatctggggctaactacctctatctaggtgagttggttaaaaaacgtctagtgggccaaatccaggggggatccctggtttcctttttatttgaataatcact

SEQ ID NO: 18130 - DNA, 700 bp, synthetic construct
  source 1..700: mol_type = other DNA
tttgaaaggggtctcctagagagcttggccgtcgggccttataccccgatttgctgagcttctctaggagagcccttttcccagccagaggtggctggttaaataatacctattgtaacaaaacatctaagacacaacaaccgcacacctggtctccactggccgaaggcaactagcaataaggtaggtgggttcagacgcttaaagtgtgttgtacatattcttttctaacctgtgtttcacacagggtggcagatggcgtgccataaccctaatagtgagataccacgcttgtggaccttatgctcacacagccatcctctagtaagtttgtaagacgtctgatgacgtgtgggaacttgttggagataacattttgctgcaaagcatcccattgccagcggatccacatctggtaacagatgcctctggggccaaaagccaaggtttaacagaccctttgggattggttcaaacctgaattgttatggaagacatttagtacctgctgatttggtagtagtgcaaacactagttgtaaggcccacgaaggatgcccagaaggtacccgtaggtaacaagtgacactatggatctgatctggggctaactacctctatctaggtgagttggttaaaaaacgtctagtgggccaaacccaggggggatccctggtttctttttaatttgaataatcact

SEQ ID NO: 18131 - DNA, 700 bp, synthetic construct
  source 1..700: mol_type = other DNA
tttgaaaggggtctcctagagagcttggccgtcgggccttataccccgatttgctgagcttctctaggagagcccttttcccagccagaggtggctggttaaataatacctattgtaacaaaacatctaagacacaacaaccgcacacctggtctccactggccgaaggcaactagcaataaggtaggtgggttcagacgcttaaagtgtgttgtacatattcttttctaacctgtgttttacacagggtggcagatggcgtgccataaccctaatagtgagataccacgcttgtggaccttatgctcacacagccatcctctagtaagtttgtaagacgtctgatgacgtgtgggaacttgttggagataacattttgctgcaaagcatcccattgccagcggatccacatctggtaacagatgcctctggggccaaaagccaaggtttaacagaccctttgggattggttcaaacctgaattgttatggaagacatttagtacctgctgatttggtagtagtgcaaacactagttgtaaggcccacgaaggatgcccagaaggtacccgtaggtaacaagtgacactatggatctgatctggggctaactacctctatctaggtgagttggttaaaaaacgtctagtgggccaaacccaggggggatccctggtttcttttttatttgaataatcact

SEQ ID NO: 18132 - DNA, 700 bp, synthetic construct
  source 1..700: mol_type = other DNA
tttgaaaggggtctcctagagagcttggccgtcgggccttataccccgatttgctgagcttctctaggagagcccttttcccagccagaggtggctggctaaataatacctattgtaacaaaacatctaagacacaacaaccgcacacctggtctccactggccgaaggcaactagcaataaggtaggtgggttcagacgcttaaagtgtgttgtgcatattcttttctaacctgtgttttacacggggtggcagatggcgtgccataaccctaatagtgagataccacgcttgtggaccttatgctcacacagccatcctctagtaagtttgtaagacgtctgatgacgtgtgggaacttgttggagataacattttgctgcaaagcatcccattgccagcggatccacatctggtaacagatgcctctggggccaaaagccaaggtttaacagaccctttgggattggttcaaacctgaattgttatggaagacatttagtacctgctgatttggtagtagtgcaaacactagttgtaaggcccacgaaggatgcccagaaggtacccgtaggtaacaagtgacactatggatctgatctggggctaactacctctatctaggtgagttggttaaaaaacgtctagtgggccaaacccaggggggatccctggtttcttttttatttgaataatcact

SEQ ID NO: 18133 - DNA, 700 bp, synthetic construct
  source 1..700: mol_type = other DNA
tttgaaaggggtctcctagagagcttggccgtcgggccttataccccgatttgctgagcttctctaggagagcccttttcccagccagaggtggctggctaaataatacctattgtaacaaaacatctaagacacaacaaccgcacacctggtctccactggccgaaggcaactagcaataaggtaggtgggttcagacgcttaaagtgtgttgtacatattcttttctaacctgtgttttacacagggtggcagatggcgtgccataaccctaatagtgagataccacgcttgtggaccttatgctcacacagccatcctctagtaagtttgtaagacgtctgatgacgtgtgggaacttgttggagataacattttgctgcaaagcatcccattgccagcggatccacatctggtaacagatgcctctggggccaaaagccaaggtttaacagaccctttgggattggttcaaacctgaattgttatggaagacatttagtacctgctgatttggtagtagtgcaaacactagttgtaaggcccacgaaggatgcccagaaggtacccgtaggtaacaagtgacactatggatctgatctggggctaactacctctatctaggtgagttggttaaaaaacgtctagtgggccaaacccaggggggatccctggtttcttttttatttgaataatcact

SEQ ID NO: 18134 - DNA, 560 bp, synthetic construct; identical to SEQ ID NO: 606
  source 1..560: mol_type = other DNA

SEQ ID NO: 18135 - DNA, 517 bp, synthetic construct
  source 1..517: mol_type = other DNA
gggacgtcagcgcacgaaacgcgccgttgcttgaggaggacttgtacaaacacggttcacacgagttcccacaaccaacacaaaccgtgcaacttggaatcccgcctggtctttccaggtctggaggggtaacactttgtactgtgattgactccacgctcggtccactggcgagtgttagtagtagaactgttgtttcgcagcggagcatggtggccgcgggacttcctccttggtaacaaggacccgcggggccgaaagccacgtctttgacccaccatgtgtgcaaccccagcacggcaaccttactacgaaaaccactttaaggtgacactgacactggtactcaaccactggtgacaggctaaggatgcccttcaggtaccccgaggtaacacgcgacactcgggatctgagaaggggactggggcttctgtaaaagcgcccagtttaaaaagcttctatgcctgaataggcgaccggaggccggcgcctttccttacctaccactgtttac

SEQ ID NO: 18136 - DNA, 681 bp, synthetic construct; identical to SEQ ID NO: 92
  source 1..681: mol_type = other DNA

SEQ ID NO: 18137 - DNA, 848 bp, synthetic construct
  source 1..848: mol_type = other DNA
caacacagtgtgtacttggcgtacacgctcaaggcggagacttaggcctcacagattgtgtcttgtgttattgaatgctggatggtcacgttggagactgcatgtggcagtcttgaaacgtgtggtttgacgtctatccattatggcagtgggtggagtactgcaaagatgtcaccgtgctttacacggtttttgaaccccacaccggctgtttggcgcttgcaggacagcaggtttattttcttatattctctatttctagccaacagggcgctatcctgttgggcggagtgatactcccgttccttcttggacagattgcctccacgtcctttgtggatctcaaggtgatcaagtcactggtggatagagcgaaggttgaggagacctgagagatttccatgtggctttgccaggagttgtagcgatgctgtgtgtgtgtgcggatctcccctcatggtaacatgagcctcacaggccgaaagccctgtccgaaaggacccacacagtggagcaatcccagctccctcctacaaagctttgtgagaatgaactcacgtttattcttctttattctctatttacatcaggccccagagatgtcctgaaggtaccttgtgtatctgggcatgagcaccatcaactacccggacttgcactttggtgcagatgcatgtggtgacccagcccctctgcttcggcagaggggcttttgctcgctcagcacaagatctgatcaggagcccctctcagtgtgctttacacctggcgaggggttaaaaattgcccaaggcctggcaaaacaacctaggggactaggttttcttttattaacaatgtctgtcatt

SEQ ID NO: 18138 - DNA, 701 bp, synthetic construct; identical to SEQ ID NO: 99
  source 1..701: mol_type = other DNA

SEQ ID NO: 18139 - DNA, 596 bp, synthetic construct
  source 1..596: mol_type = other DNA
actgtaactaacatctaagctgattaaccagccacctcaaggctggtccccactcgtcgaaggcatctagcaataagataagtggaagaaggatgcttaaagcatagtgctagtatgcatttctaacctgtgattatcacggggtggcaggtggcgtgccataactctattagtgagataccacgcttgtggaccttatgctcacacagccatcctctagtaagcttgcaaggcgtctaatgacgtgtgggaacttattggaaacaacagtttgctgcaaagcatcctattgccagcggaacaacacctggtaacaggtgcctctggggccaaaagccaaggtttaacagaccctttaggattggttcacacctgaactgttgtggaagatatttagtacctactgacttggtagttaggcaaacactagttgtaaggcccacgaaggatgcccagaaggtacccgtaggtaacaagagacactatggatctgatctggggccaactaccactatcatggtgagttggttaaaaaacgtctagtgggccaaacccaggggggatccctggtttccttttactttaatacaatcatt

SEQ ID NO: 18140 - DNA, 663 bp, synthetic construct
  source 1..663: mol_type = other DNA
gaaagggggggctgggccctgatgcccagtccttcctttccccttccggggggttaaccggctgtgtttgctagaggcacagaggggcaacatccaacctgtttttgcggggaacggtgcggctccgattcctgcgtcgccaaaggtgttagcgcacccaaacggcgcacctaccaatgttattggtgtggtctgcgagttctagcctactcgtttctcccccgaccattcactcacccacgaaaagtgtgttgtaaccataagatttaacccccgcacgggatgtgcgataaccgtaagactggctcaagcgcggaaagcgctgtaaccacatgctgttagtccctttatggctgcaagatggctacccacctcggatcactgaactggagctcgaccctccttagtaagggaaccgagaggccttcgtgcaacaagctccgacacagagtccacgtgactgctaccaccatgagtacatggttctcccctctcgacccaggacttctttttgaatatccacggctcgatccagagggtggggcatgacccctagcatagcgagctacagcgggaactgtagctaggccttagcgtgccttggatactgcctgatagggcgacggcctagtcgtgtcggttctataggtagcacatacaaat

SEQ ID NO: 18141 - DNA, 517 bp, synthetic construct
  source 1..517: mol_type = other DNA
acgtcagcgcacgaaacgcgccgtcgcttgaggaggacttgtacaaacacgatccattcaggttcccacaaccgacacaaaccgtgcaacttgaaactccgcctggtctttccaggtctggaggggtgacattttgtactgtgcttgactccacgctcggtccactggcgggtgttagtaacagcactgttgcttcgtagcggagcatggtggccgcgggaactcctccttggtaacaagaacccgcggggccgaaagccacgtcttcacggacccaccatgtgtgcaaccccagcacggcaactttactgtgaaaaccactttaaggtgacactgatactggtactcaaccactggtgacaggctaaggatgcccttcaggtaccccgaggtaacacgcgacactcgggatctgagaaggggactggggcttctttaaaagcgcctagtttaaaaagcttctatgcctgaataggtgaccggaggccggcacctttcttttaaacaactatttaaa

SEQ ID NO: 18142 - DNA, 687 bp, synthetic construct
  source 1..687: mol_type = other DNA
ggacttgatacctcaccgccgtttgcctaggctataggctaatttttcccctccctcccctttccctttcctatttcccttgttttgtttgtaaatattaattcctgcaggttcagggttcttaaatctgtttctctataagaacactctttttcacgctttctgtcttctttcttccagggctctccccttgccctaggctctggccgttgcgcccggcggggtcaactccatgattagcatggagctgtaggagtctaaattggggacacagatgtttggaacgtcaccttgcagtgttaacttggctttcatgaatctctttgatcttccacaaggggtaggctacgggtgaaacctcttaggctaatacttctatgaagagatgctttggatagggtaacagcggcggatattggtgagttgttaagacaaaaaccattcaacgccggaggactgactctcatccagtggatgcattgagtggattgactgtcagggctgtctctaggcttaattccagacctctctgtgcttagggcaaacatcatttggccttaaatgggattctgtgagaggggatccctccattgacagctggactgttctttggggccttatgtggtgtttgcctctgaggtactcaggggcatttaggtttttcctcattctcaaacaataatgaat

SEQ ID NO: 18143 - DNA, 618 bp, synthetic construct
  source 1..618: mol_type = other DNA
cctttcctattccctttgttttgtttgtaaatattaattcctgcaggttcagggttcttaaatctgtttctctataaaaacactcatttttcacgctttctgtcttctttcttccagggctctccccttgccctaggctctggccgttgcgcccggcggggtcaactccatgactagcatggagctgtaggagtctaaattggggacacaaatgtttggaacgtcaccttgcagtgttaacttggctttcatgaatctctttgatcttccacaaggggtaggctacgggtgaaacctcttaggctaatacttctatgaagagatgctttggatagggtaacagcggcggatattggtgagttgttaagacaaaaaccattcaacgccggaggactgactctcatccagtggatgcattgagtggattgactgtcagggctgtctctaggcttaattccagacctctctgtgcttagggcaaacatcatttggccttaaatgggattctgtgagaggggatccctccattgactgctggactgttctttggggccttatgtggtgtttgcctgtgaggtactcggggtcatttgggtttttccttattctcaaataata

SEQ ID NO: 18144 - DNA, 713 bp, synthetic construct
  source 1..713: mol_type = other DNA
gctcctctgtgcctctagcaaacacagccggtttaccccccggaaggggaaaggaaggactgggcatgagggcccggccccccctttccccttccggggggtaaaccggctgtgtttgctagaggcacagaggagcaacatccaacctgcttttgtggggaacggtgcggctccaattcctgcgtcgccaaaggtgttagcgcacccaaacggcgcatctaccaatgctattggtgtggtctgcgagttctagcctactcgtttctcccctactcactcattcacgcacaaaaactgtgttgtaactacaagatttagccctcgcacgggatgtgcgataaccgcaagattgactcaagcgcggaaagcgctgtaaccacatgctgttagtccctttatggctgcgagatggctgtccacctcggatcactgaactggagctcgaccctccttagtaagggaaccgagaggccttcttgcaacaagctccgacacagagtccacgtgattgctaccaccatgagtacatggttctcccctctcgacccaggacttctttttgaatatccacggctcgatccagagggtggggcatgatccccctagcatagcgagctacagcgggaactgtagctaggccttagcgtgccttggatactgcctgatagggcgacggcctagtcgtgtcggttctataggtagcacatacaaat

SEQ ID NO: 18145 - DNA, 700 bp, synthetic construct
  source 1..700: mol_type = other DNA
tttgaaaggggtctcctagagagcttggccgtcgggccttataccccgatttgctgagcttctctaggagagcccttttcccagccagaggtggctggttaaataatacctattgtaacgaaacatctaagatacaataaccacacacctggtttccactggccgaaggcaactagcaataaggcaggtgggttcagacgcttaaagtgtgttgtacatattcttttctaacctgtgttctacacagggtggcagatggcgtgccataactctaatagtgagataccacgcttgtggaccttatgctcacacagccatcctctagtaagtttgtaagacgtctgatgacgtgtgggaacttgttggagataacagtttgctgcaaagcatcccactgccagcggatccacatctggtaacagatgcctctggggccaaaagccaaggtttaacaaaccctttgggattggttcaaacctgaactgttatggaagacatttagtacctgctgatttggtagtaatgcaaacactagttgtaaggcccacgaaggatgcccagaaggtacccgtaggtaacaagtgacactatggatctgatctggggccagctacctctatctaggtgagttggttaaaaaacgtctagtgggccaaacccaggggggatccctggtttcctttttatttgagtagtcact

SEQ ID NO: 18146 - DNA, 692 bp, synthetic construct; identical to SEQ ID NO: 94
  source 1..692: mol_type = other DNA

SEQ ID NO: 18147 - DNA, 700 bp, synthetic construct
  source 1..700: mol_type = other DNA
tttgaaaggggtctcctagagagcttggccgtcgggccttataccccgatttgctgagcttctctaggagagcccttttcccagccagaggtggctggttaaataatacctattgtaacaaaacatctaagatacaacaaccacacacctggtttccactggctgaaggcaactagcaataaggcaggtgggttcaaacgcttaaagtgtgttgtatatattcttttctaacctgtgttctacacagggtggcagatggcgtgccataactctaatagtgagataccacgcttgtggaccttatgctcacacagccatcctctagtaagtttgtaagacgtctgatgacgtgtgggaacttgttggagataacattttgctgcaaagcatcccattgccagcggatccacatctggtaacagatgcctctggggccaaaagccaaggtttaacagaccctttgggattggttcaaacctgaattgttatggaagacatttagtacctgctgatttggtagtagtgcaaacactagttgtaaggcccacgaaggatgcccagaaggtacccgtaggtaacaagtgacactatggatctgatctggggccaactacctctatctaggtgagttggttaaaaaacatctagtgggccaaacccaggggggatccctggtttcctttttatttgaataatcact

SEQ ID NO: 18148 - DNA, 617 bp, synthetic construct
  source 1..617: mol_type = other DNA
gagggttaaccggctgtgtttgctagaggcacagaggggcaacatccaacctgcttttgcggggaacggtgcggctccgattcctgcgtcgccaaaggtgttagcgcacccaaacggcgcatctaccaatgctattggtgtggtctgcgagttctagcctactcgtttctcccctatccattcactcactcacgaaaagtgtgttgtaaccacaagatttagcccccgcacgagatgtgcgataaccgtaagactgactcaagcgcggaaagcgctgtaaccacatgctgttagtccctttatggctgcaagatggctatccacctcggatcactgaactggagctcgaccctccttagtaagggaaccgagaggccttcgtgcaacaagctccgacacagagtccacgtgattgctaccaccatgagtacatggttctcccctctcgacccaggacttctttttgaatatccacggctcgatccagagggtggggcatgatccccctagcatagcgagctacagcgggaactgtagctaggccttagcgtgccttggatactgcctgatagggcgacggcctagtcgtgtcggttctataggtagcacatacaaat

SEQ ID NO: 18149 - DNA, 595 bp, synthetic construct
  source 1..595: mol_type = other DNA
tttgtaaatattaattcctgcaggttcagggttcttaaatctgtttctctataagaacactcatttttcacgctctctgtcttctttcttccagggctctccccttgccctaggctctggccgttgcgcccggcggggtcaactccatgattagcatggagctgtaggagtctaaattggggacacagatgtttgggacgtcaccttgcagtgttaacttggctttcatgaatctctttgatcttccacaaggggtaggctacgggtgaaacctcttaggctaatacttctatgaagagatgctttggatagggtaacagcggcggatattggtgagttgttaagacaaaaaccattcaacgccggaggactgactctcatccagtggatgcattgagtggattgactgtcagggctgtctctaggcttaattccagacctctctgtgcttagggcaaacatcatttggccttaaatgggattctgtgagaggggatccctccattgactgctggactgttctttggggccttatgtggtgtttgcctctgaggtactcaggggcatttaggtttttcctcattctcaaataata

SEQ ID NO: 18150 - DNA, 517 bp, synthetic construct; identical to SEQ ID NO: 542
  source 1..517: mol_type = other DNA

SEQ ID NO: 18151 - DNA, 669 bp, synthetic construct; identical to SEQ ID NO: 84
  source 1..669: mol_type = other DNA

SEQ ID NO: 18152 - DNA, 680 bp, synthetic construct
  source 1..680: mol_type = other DNA
cgtcgggccttataccccgacttgctgagcttctctaggagagtccctttcccagccctgaggcggctggtcaataaaagcctcaattgtaacaaacatctaagcttattacattaaccccatgcctggtctccactagttgaaggcaacttgcaataaaatgagtggaaacaagacgcttaaagcatggtgtaaactaacttttctagcccacactttgtgtggggtggcagatggcgtgccataattctattagtgagataccacgcttgtggaccttatgctcacacagccatcctctagtaagtttgtgtgacgtctggtgacgtgtgggaacttattggaaacaacattttgctgtaaagcatcctattgccagcggaacaacgcctggtaacaggtgcctctggggccgaaagccgaggtttagcagaccctttaggattggtttgaaacctgaaatgttgtggaagatacttagtacctaccgatctggtagtagtgcaaacactagttgtaaggcccacgaaggatgcccagaaggtacctgtaggtaacaagcgacactatggatctgatctggggccaggtacctctatcttggtgacctggttaaaaaacgtctagtgggccaaacccgggggggatccccggtttcctattattttatcaatgctact

SEQ ID NO: 18153 - DNA, 680 bp, synthetic construct
  source 1..680: mol_type = other DNA
cgtcgggccttataccccgacttgctgagcttctctaggagagtccctttcccagccctgaggcggctggtcaataaaagcctcaattgtaacaaacatctaagattattaaattaaccccatgcctggtctccactagttgaaggcaacttgcaataaaatgagtggaaacaagacgcttaaagcatggtgtaaattaatttttctagcccacactttgtgtggggtggcagatggcgtgccataattctattagtgagataccacgcttgtggaccttatgctcacacagccatcctctagtgagtttgtgcgacgtctggtgacgtgtgggaacttattggaaacaacattttgctgtaaagcatcctattgccagcggaacaacacctggtaacaggtgcctctggggccaaaagccaaggtttaacagaccctttaggattggttataaacctgaaatgttgtggaagatacttagtacctaccgatctggtagtagtgcaaacactagttgtaaggcccacgaaggatgcccagaaggtacccataggtaacaagtgacactatggatctgatctggggtcaggtacctctatcttggtgacctggttaaaaaacgtctagtgggccaaacccgggggggatccccggtttccttttgttttactaatgctact

SEQ ID NO: 18154 - DNA, 674 bp, synthetic construct; identical to SEQ ID NO: 87
  source 1..674: mol_type = other DNA

SEQ ID NO: 18155 - DNA, 862 bp, synthetic construct
  source 1..862: mol_type = other DNA
ggctatgtcaaagcaatacagtgtgtgcaaggcgtacacgctcaaggcggagacttaggcctcacagattgtgttttgtgttattggatgctggatggtcacgttggagactgcatgtggcagtcttgaaacgtgtggtttgacgtctatccattacggcagtgggtggagtactgcaaagatgtcaccgtgctttacacggtttttgaaccccacaccggctgtttggcgcttgcaggacagcaggtttattttcttatgttctttatttctagccagcagggttctatcctgttgggcggagtgatactcccgttccttcttggacagattgcctccacgacctttgtggatctcaaggtgatcaagtcactggtgaatagagcgaaggttgaggagacctgaggaatttccatgtggctttgccaggagttgtagcgatgctgtgtgtgtgtgcggatttcccctcatggcaacatgagcctcacaggccgaaagccctgtccgaaaggacccacacagtggagcaaccccagctccctcctacaaagctttgtgagaatgaactcacgtttattcttctttattctctatttacatcaggccccaaagatgtcctgaaggtaccttgtgtatctgggcatgagcaccatcaactacccggacttgcactttggtgcagacgcatgtggtgacccagcccctctgcttcggcagaggggctttcgctcgctcagcacgagatctgatcaggagcccctcccagtgtgctttacacctggcggggggttaaaaattgcccaaggcctggcacaataacctaggggactaggtttaccttttgttaacaatgtctgtcatt

SEQ ID NO: 18156 - DNA, 668 bp, synthetic construct
  source 1..668: mol_type = other DNA
tttgaaagggggggctgggccctcatgcccagtccttcctttccccttccggggggtaaaccggctgtgtttgctagaggcacagaggagcaacatccaacctgcttttgtggggaacggtgcggctccaattcctgcgtcgccaaaggtgttagcgcacccaaacggcgcatctaccaatgctattggtgtggtctgcgagttctagcctactcgtttctcccctactcactcatttacacacaaaaactgtgttgtaactacaagatttggccctcgcacgggatgtgcgacaaccgcaagattgactcaagcgcggaaagcgctgtaaccacatgctgttagtccctttatggctgcgagatggctatccacctcggatcactgaactggagctcgaccctccttagtaagggaaccgagaggccttcctgcaacaagctccgacacagagtccacgtgattgctaccaccatgagtacatggttctcccctctcgacccaggacttctttttgaatatccacggctcgatccagagggtggggcatgatccccctagcatagcgagctacagcgggaactgtagctaggccttagcgtgccttggatactgcctgatagggcgacggcctagtcgtgtcggttctataggtagcacatacaaat

SEQ ID NO: 18157 - DNA, 594 bp, synthetic construct; identical to SEQ ID NO: 33
  source 1..594: mol_type = other DNA

SEQ ID NO: 18158 - DNA, 560 bp, synthetic construct; identical to SEQ ID NO: 607
  source 1..560: mol_type = other DNA

SEQ ID NO: 18159 - DNA, 668 bp, synthetic construct; identical to SEQ ID NO: 83
  source 1..668: mol_type = other DNA

SEQ ID NO: 18160 - DNA, 668 bp, synthetic construct
  source 1..668: mol_type = other DNA
tttgaaatggggggctgggccctcatgcccagtccttcctttccccttccggggggtaaaccggccgtgtttgctagaggcacggaggagcaacatccaacctgcttttgtggggaacggtgcggctccaattcctgcgtcgccaaaggtgttagcgcacccaaacggcgcatctaccaatgctattggtgtggtctgcgagttctagcctactcgtttctcccctatccactcactcacccacgaaaagtgtgttgtaactacaagatttagccctcgcacgagatgtgcgataaccgcaagattgactcaagcgcggaaagcgctgtaaccacatgctgttagtccctttatggctgcgagatggctatccacctcggatcactgaactggagctcgaccctccttagtaagggaaccgagaggccttcttgcaacaagctccgacacagagtccacgtgattgctaccaccatgagtacatggttctcccctctcgacccaggacttctttttgaatatccacggctcgatccagagggtggggcatgatccccctagcatagcgagctacagcgggaactgtagctaggccttagcgtgccttggatactgcctgatagggcgacggcctagtcgtgtcggttctataggtagcacatacaaat

SEQ ID NO: 18161 - DNA, 395 bp, synthetic construct; identical to SEQ ID NO: 431
  source 1..395: mol_type = other DNA

SEQ ID NO: 18162 - DNA, 668 bp, synthetic construct
  source 1..668: mol_type = other DNA
tttgaaatggggggctgggccctgatgcccagtccttcctttccccttccggggggttaaccggctgtgtttgctagaggcacagaggagcaacatccaacctgcttttgtggggaacggtgcggctccaattcctgcgtcgccaaaggtgttagcgcacccaaacggcgcatctaccaatgccattggtgtggtctgcgagttctagcctactcgtttttcccctactcactcattcacgcacaaaaagcgtgttgtaactacaagacttagccctcgcacgggatgtgcggtaaccgcaagattgactcaagcgcggaaagcgctgtaaccacatgctgttagtccctttatggctgcaagatggctatccacctcggatcactgaactggagctcgaccctccttagtaagggaaccgagaggccttcttgcaacaagctccgacacagagtccacgtgattgctaccaccatgagtacatggttctcccctctcgacccaggacttctttttgaatatccacggctcgatccagagggtggggcatgatccccctagcatagcgaactacagcgggaactgtagttaggccttagcgtgccttggatactgcctgatagggcgacggcctagtcgtgtcggttctataggtagcacatacaaat

SEQ ID NO: 18163 - DNA, 615 bp, synthetic construct
  source 1..615: mol_type = other DNA
gggttaaccggctgtgtttgctagaggcacagaggggcaacatccaacctgcttttgcggggaacggtgcggctccgattcctgcgtcgccaaaggtgttagcgcacccaaacggcgcatctaccaatgctattggtgtggtctgcgagttctagcctactcgtttctcccctatccattcactcactcacgaaaagtgtgttgtaaccacaagatttagcccccgcacgagatgtgcgataaccgtaagactgactcaagcgcggaaagcgctgtaaccacatgctgttagtccctttatggctgcaagatggctatccacctcggatcactgaactggagctcgaccctccttagtaagggaaccgagaggccttcgtgcaacaagctccgacacagagtccacgtgattgctaccaccatgagtacatggttctcccctctcgacccaggacttctttttgaatatccacggctcgatccagagggtggggcatgatccccctagcatagcgagctacagcgggaactgtagctaggccttagcgtgccttggatactgcctgatagggcgacggcctagtcgtgtcggttctataggtagcacatacaaat

SEQ ID NO: 18164 - DNA, 668 bp, synthetic construct
  source 1..668: mol_type = other DNA
tttgaaatggggggctgggccctgatgcccagtccttcctttccccttccggggggttaaccggctgtgtttgctagaggcacagaggagcaacatccaacctgcttttgtggggaacggtgcggctccgattcctgcgtcgccaaaggtgttagcgcacccaaacggcgcatctaccaatgctattggtgtggtctgcgagttctagcctactcgtttctcccctgctcactcatttacacacaaaaactgtgttgtaactacaagatttggccctcgcacgggatgtgcgataaccgcaagactgactcaagcgcggaaggcgctgtaaccacatgctgttagtccttttatggctgcgagatggctatccacctcggatcactgaactggagctcgaccctccttagtaagggaaccgagaggccttcctgcaacaagctccgacacagagtccacgtgattgctaccaccatgagtacatggttctcccctctcgacccaggacttctttttgaatatccacggctcgatccagagggtggggcatgatccccctagcatagcgagctacagcgggaactgtagctaggccttagcgtgccttggatactgcctgatagggcgacggcctagtcgtgtcggttctataggtagcacatacaaat

SEQ ID NO: 18165 - DNA, 674 bp, synthetic construct
  source 1..674: mol_type = other DNA
ggccttataccccgacttgccgagtttctctaggagagtccctttcccagccttgaggcggctggtcaataaaagcctcaaacgtaactaacatctaagattgattcaataaccccatgcctgatccccaccagtcgaagacaacttgtaataagacgggtggaataaggatgcttaaagcatggtgtaaatattcttttctaacccatggtttcatggggtggcagatggcgtgccataactctattagtgagataccacgcttgtggaacttatgctcacacagccatcctctagtaagtttgtgagatgtctaatgacgtgtgggaacttattggaagcaacaatttgccatacggcatcctactgccagcggatccacacctggtaacaggtgcccctggggccgaaagccaaggtttaacagaccctttaggattggttaaaacctgaattgttgtggaagatactcagtacctgctgatttggtagtaatgcaaacactagttgtaaggcccacgaaggatgcccagaaggtacccgtaggtaacaagtgacactatggatctgatctggggccaactacttctatcatggtgagttggttaaaaaacgtctagtgggccaaacccaggggggatccctggtttcctttttattttactacagccaat

SEQ ID NO: 18166 - DNA, 666 bp, synthetic construct; identical to SEQ ID NO: 805
  source 1..666: mol_type = other DNA

SEQ ID NO: 18167 - DNA, 492 bp, synthetic construct; identical to SEQ ID NO: 518
  source 1..492: mol_type = other DNA

SEQ ID NO: 18168 - DNA, 680 bp, synthetic construct; identical to SEQ ID NO: 91
  source 1..680: mol_type = other DNA

SEQ ID NO: 18169 - DNA, 636 bp, synthetic construct
  source 1..636: mol_type = other DNA
tccctttcccagccctgaggtggctggttaataatagcctcaaacgtaaccaacatctaagaagattgtataaaccctatgcctggcccccactattcgaaggcaacttgcaataagaagagtggaatcagggtgcttaaagcatagagacagttttcatttctaacccacatgattgtggggtggcagatggcgtgccataattctaatagtgagataccacgcttgtggaccttatgctcacacagccatcctctagtaagtttgtgagacgtctggtgacgtgtgggaacttattggaaacaacattttgctgcaaagcatcctactgccagcggaacaacacctggtaacaggtgcctctggggccaaaagccaaggtttaacagaccctttaggattggttctgaacctgagatgttgtggaaaatatttagtacctgctgatctggtagtaatgcaagcactagttgtaaggcccacgaaggatgcccagaaggtacccgtaggtaacaagtgacactatggatctgatctggggccaactacctctatcttggtgagttggttaaaaaacgtctagtgggccaaacccaggggggatccctggtttccttttattttatcatagttaat

SEQ ID NO: 18170 - DNA, 665 bp, synthetic construct
  source 1..665: mol_type = other DNA
gggggggctgggccctcatgcccagtccttcctttccccttccggggggtaaaccggctgtgtttgctagaggcacagaggagcaacatccaacctgcttttgtggggaacggtgcggctccaattcctgcgtcgccaaaggtgttagcgcacccaaacggcgcatctaccaatgctattggtgtggcctgcgagttctagcctactcgtttctcccctattcactcactcacgcacgcacaaaaagtgtgttgtaactacaagatttagccctcgcacgggatgtgcgataaccgcaagattgactcaagcgcggaaagcgctgtaaccacatgctgttagtccctttatggctgcgagatggctatccacctcggatcactgaactggagctcgaccctccttagtaagggaaccgagaggccttcttgcaacaagctccgacacagagtccacgtgattgctaccaccatgagtacatggttctcccctctcgacccaggacttctttttgaatatccacggctcgatccagagggtggggcatgatccccctagcatagcgagctacagcgggaactgtagctaggccttagcgtgccttggatactgcctgatagggcgacggcctagtcgtgtcggttctataggtagcacatacaaat

SEQ ID NO: 18171 - DNA, 664 bp, synthetic construct
  source 1..664: mol_type = other DNA
aaagggggggctgggccctcatgcccagtccttcctttccccttccggggggttaaccggctgtgtttgctagaggcacagaggggcaacatccaacctgcttttgcggggaatggtgcggctccgattcctgcgtcgccaaaggtgttagcgcacccaaacggcgcacctaccaatgttattggtgtggtctgcgagttctagcctactcgtttctcccccaaccattcactcacccacgaaaagtgtgttgtaaccacaagatttgacccccgcacgagatgtgcgataaccgtaagactggctcaagcgcggaaagcgctgtaaccacatgctgttagtccctttatggctgcaagatggctacccacctcggatcactgaactggagctcgaccctccttagtaagggaaccgagaggccttcgtgcaacaagctccgacacagagtccacgtgactgctaccaccatgagtacatggttctcccctctcgacccaggacttctttttgaatatccacggctcgatccagagggtggggcatgatccccctagcatagcgagctacagcgggaactgtagctaggccttagcgtgccttggatactgcctgatagggcgacggcctagtcgtgtcggttctataggtagcacatacaaat

SEQ ID NO: 18172 - DNA, 673 bp, synthetic construct
  source 1..673: mol_type = other DNA
cgtcgggccttataccccgacttgctgagcttctctaggagagcccttttcccagccagaggtggctggttaaataatacctactgtaacaaaacatctaagatgcaacaaccacacacctggtttccactggccgaaggcaactagcaataaggcaggtgggttcagacgcttaaagtgtgttgtacatattcttttctaacctgtgttctacacagggtggcagatggcgtgccataactctaatagtgagataccatgcttgtggaccttatgctcacacagccatcctctagtaagtttgtaagacgtctgatgacgtgtgggaacttgttggagataacagtttgctgcaaagcatcccattgccagcggatctacatctggtaacagatgcctctggggccaaaagccacggtttaatagaccctttgggattggttcaaacctgaactgctatggaagacacttagtacctgctgatttggtagtaatgcaaacactagttgtaaggcccacgaaggatgcccagaaggtacccgtaggtaacaagtgacactatggatctgatctggggccaactacctctatctaggtgagttggttaaaaaacgtctagtgggccaaacccaggggggatccctggtttccttttttaatttaagtaatcact

SEQ ID NO: 18173 - DNA, 673 bp, synthetic construct
  source 1..673: mol_type = other DNA
cgtcgggccttataccccgacttgctgagcttctctaggagagcccttttcccagccagaggtggctggttaaataatacctactgtaacaaaacatctaagatgcaacaaccacacacctggtttccactggccgaaggcaactagcaataaggcaggtgggttcagacgcttaaagtgtgttgtacatattcttttctaacctgtgttctacacagggtggcagatggcgtgccataactctaatagtgagataccatgcttgtggaccttatgctcacacagccatcctctagtaagtttgtaagacgtctgatgacgtgtgggaacttgttggagataacagtttgctgcaaagcatcccattgccagcggatctacatctggtaacagatgcctctggggccaaaagccacggtttaatagaccctttgggattggttcaaacctgaactgctatggaagacacttagtacctgctgatttggtagtaatgcaaacactagttgtaaggcccacgaaggatgcccagaaggtacccgtaggtaacaagtgacactatggatctgatctggggccaactacctctatctaggtgagttggttaaaaaacgtctagtgggccaaacccaggggggatccctggtttcctttttaaatttaagtaatcact

SEQ ID NO: 18174 - DNA, 673 bp, synthetic construct
  source 1..673: mol_type = other DNA
cgtcgggccttataccccgatttgctgagcttctctaggagagcccttttcccagccagaggtggctggttaaataatacctactgtaacaaaacatctaagatacaacaaccacacacctggtttccactggccgaaggcaactagcaataaggcaggtgggttcagacgcttaaagtgtgttgtacatattcttttctaacctgtgttctacacagggtggcagatggcgtgccataactctaatagtgagataccacgcttgtggaccttatgctcacacagccatcctctagtaagtttgtaagacgtctgatgacgtgtgggaacttgttggagataacagtttgctgcaaagcatcccactgccagcggatctacatctggtaacagatgcctctggggccaaaagccaaggtttaacagaccctttgggattggttcaaacctgaactgttatggaagacatttagtacctgctgatttggtagtaatgcaaacactagttgtaaggcccacgaaggatgcccagaaggtacccgtaggtaacaagtgacactatggatctgatctggggccagctacctctatctaggtgagttggttaaaaaacgtctagtgggccaaacccgggggggatccctgatttccttttttagtttgagtaatcact

SEQ ID NO: 18175 - DNA, 672 bp, synthetic construct
  source 1..672: mol_type = other DNA
cgtcgggccttataccccgacttgctgagcttctctaggagagcccttttcccagccagaggtggctggttaaataatacctactgtaacaaaacatctaagatacaacaaccacacacctggtttccactggccgaaggcaactagcaataaggcaggtgggttcagacgcttaaagtgtgttgtacatattcttttctaacctgtgttctacacggggtggcagatggcgtgccataactctaatagtgagataccacgcttgtggaccttatgctcacacagccatcctctagtaagtttgtaagacgtctgatgacgtgtgggaacttgttggagataacagtttgctgcaaagcatcccattgccagcggatctacatctggtaacagatgcctctggggccaaaagccaaggtttaacagaccctttgggattggttcaaacctgaactgttatggaagacacttagtacctgctgatttggtagtaatgcaaacactagttgtaaggcccacgaaggatgcccagaaggtacccgtaggtaacaagtgacactatggatctgatctggggccagctacctctatctaggtgagttggttaaaaaacgtctagtgggccaaacccaggggggatccctggtttccttttttatttaagtaatcact

SEQ ID NO: 18176 - DNA, 594 bp, synthetic construct
  source 1..594: mol_type = other DNA
gatgttagttacagttgaggcttttattatacaaccttgtacctggtccccactagtcgaaggctacttgcaataagataagtggactaaggacgcttaaagtacaatgtaaacaatcttttctaatccacaattttgtggagtggcagatggcgtgccataaccctattagtgagataccacgcttgtggaccttatgctcacacagccatcctctagtaagtttgtgagatgtctggtgatgtgtgggaacttatgggaagtaatgtcttgctgtaaagcatccattagccagcgggtaaacacctggtaacaggtgcctctggggccaaaagccaaggtttaacagaccctaatggattggttcaaacctgggacattgtggaacatacttagtacctgctgatctggtagttatgcaaacactagttgtaaggcccacgaaggatgcccagaaggtacccgtaggtaacaagagacactatggatctgatctggggctgagtacttctatcttagtgactcagttaaaaaacgtctagtgggccaaacccgggggggatccccggtttcctttattttacaactaccatc

SEQ ID NO: 18177 - DNA, 664 bp, synthetic construct; identical to SEQ ID NO: 81
  source 1..664: mol_type = other DNA

SEQ ID NO: 18178 - DNA, 661 bp, synthetic construct
  source 1..661: mol_type = other DNA
gggggggctgggccctcatgcccagtccttcctttccccttccggggggttaaccggctgtgtttgctagaggcacagaggggcaacatccaacctgcttttgcggggaacggtgcggctccgattcctgcgtcgccaaaggtgttagcgcacccaaacggcgcatctaccaatgctattggtgtggtctgcgagttctagcctactcgtttctcccctatccattcactcactcacgaaaagtgtgttgtaaccacaagatttagcccccgcacgagatgtgcgataaccgtaagactgactcaagcgcggaaagcgctgtaaccacatgctgttagtccctttatggctgcaagatggctatccacctcggatcactgaactggagctcgaccctccttagtaagggaaccgagaggccttcgtgcaacaagctccgacacagagtccacgtgattgctaccaccatgagtacatggttctcccctctcgacccaggacttctttttgaatatccacggctcgatccagagggtggggcatgatccccctagcatagcgagctacagcgggaactgtagctaggccttagcgtgccttggatactgcctgatagggcgacggcctagtcgtgtcggttctataggtagcacatacaaat

SEQ ID NO: 18179 - DNA, 661 bp, synthetic construct
  source 1..661: mol_type = other DNA
gggggggctgggccctgatgcccagtccttcctttccccttccggggggttaaccggctgtgtttgctagaggcacagaggggcaacatccaacctgtttttgcggggaacggtgcggctccgattcctgcgtcgccaaaggtgttagcgcacccaaacggcgcacctaccaatgttattggtgtggtctgcgagttctagcctactcgtttctcccccgaccattcactcacccacgaaaagtgtgttgtaaccataagatttaacccccgcacgggatgtgcgataaccgtaagactggctcaagcgcggaaagcgctgtaaccacatgctgttagtccctttatggctgcaagatggctacccacctcggatcactgaactggagctcgaccctccttagtaagggaaccgagaggccttcgtgcaacaagctccgacacagagtccacgtgactgctaccaccatgagtacatggttctcccctctcgacccaggacttctttttgaatatccacggctcgatccagagggtggggcatgatccccctagcatagcgagctacagcgggaactgtagctaggccttagcgtgccttggatactgcctgatagggcgacggcctagtcgtgtcggttctataggtagcacatacaaat

SEQ ID NO: 18180 - DNA, 667 bp, synthetic construct; identical to SEQ ID NO: 82
  source 1..667: mol_type = other DNA

SEQ ID NO: 18181 - DNA, 594 bp, synthetic construct
  source 1..594: mol_type = other DNA
ataatcttagatgtttgttacagttgcattaaccccatgcctggtctccactagttgaaggcaacttgcaataaaatgagtggaaacaagacgcttaaagcatggtgtaaattaacttttctaacccacaccttgtgtggggtggcagatggcgtgccataactctattagtgagataccacgcttgtggaacttatgctcacacagccatcctctagtaagtctgtgagatgtctggtgacgtgtgggaacttattggaaacaacattttgctgtaaagcatcctattgccagcggaacaacacctggtaacaggtgcctctggggccaaaagccaaggtttagcagaccctttaggattggtttaaaacctgaaatgttgtggaagatacttagtacctaccgatctggtagtattgcagactctagttgtaaggcccacgaaggatgcccagaaggtacccgtaggtaacaagagacactatggatctgatctggggccaggtacctctatttcggtgacctggttaaaaaacgtctagtgggccaaacccgggggggatccccggtttcctttatcttacaactgctatc

SEQ ID NO: 18182 - DNA, 660 bp, synthetic construct
  source 1..660: mol_type = other DNA
ggggggctgggccctcatgcccagtccttcctttccccttccggagggttaaccggctgtgtttgctagaggcacagaggggcaacatccaacctgcttttgcggggaacggtgcggctccgattcctgcgtcgccaaaggtgttagcgcacccaaacggcgcatctaccaatgctattggtgtggtctgcgagttctagcctactcgtttctcccctatccattcactcactcacgaaaagtgtgttgtaaccacaagatttagcccccgcacgagatgtgcgataaccgtaagactgactcaagcgcggaaagcgctgtaaccacatgctgttagtccctttatggctgcaagatggctatccacctcggatcactgaactggagctcgaccctccttagtaagggaaccgagaggccttcgtgcaacaagctccgacacagagtccacgtgattgctaccaccatgagtacatggttctcccctctcgacccaggacttctttttgaatatccacggctcgatccagagggtggggcatgatccccctagcatagcgagctacagcgggaactgtagctaggccttagcgtgccttggatactgcctgatagggcgacggcctagtcgtgtcggttctataggtagcacatacaaat

SEQ ID NO: 18183 - DNA, 660 bp, synthetic construct
  source 1..660: mol_type = other DNA
ggggggctgggccctgacgcccagcccttcctttccccttccggggggttaaccggctgtgtttgctagaggcacagaggggcaacatccaacctgcttttgtggggaacggtgcggctccgattcccgcgtcgccaaaggtgttagcgcacccaaacggcgcatctaccaatgttattggtgtggtctgcgagttctagcctactccgtttctcccccgaccattcactcgcccacgaaaaagtgtgttgtaaccataagatttaacccccgcacgggatgtgcgataaccgtaagactgactcaagcgcggaaggcgctgtaaccacatgctgttagttcctttatggctgcaagatggctaccaacctcggatcactgaactggagctcgaccccccttagtaagggaaccgagaggccttcgtgcaaaaagctccgacacagagtccacgtgactgctaccaccatgagtacatggttctcccctctcgacccaggacttctttttgaatatccacggctcgatacagagggtggggcatgacccctagcatagcgagctacagcgggaactgtagctaggtcttagcgcaccttggatactgcctgatagggcgacggcctagtcgtgtcggttctataggtagcacatataaat

SEQ ID NO: 18184 - DNA, 666 bp, synthetic construct
  source 1..666: mol_type = other DNA
tttgaaagggggggccgggccctcatgcccagtctttcctttccccttccggggggtaaaccggctgtgtttgctagaggcacagaggagcaacatccaacctgcttttgtggggaacggtgcggctccaattcctgcgtcgccaaaggtgttagcgcacccaaacggcgcatctaccaatgctattggtgtggtctgcgagttctagcctactcgtttctcccctactcactcattcacgcacaaaaattgtgttgtaactacaagatttagccctcgcacgggatgtgcgataaccgcaagattgactcaagcgcggaaagcgctgtaaccacatgctgttagtccctatatggctgcgagatggctatccacctcggatcactgaactggagctcgaccctccttagtaagggaaccgagaggccttcttgcaacaagctccgacacagagtccacgtgattgctaccaccatgagtacatggttctcccctctcgacccaggacttctttttgaatatccacggctcgatccagagggtggggcatgacccctagcatagcgagctacagcgggaactgtagctaggccttagcgtgccttggatactgcctgatagggcgacggcctagtcgtgtcggttctataggtagcacatacaaat

SEQ ID NO: 18185 - DNA, 671 bp, synthetic construct; identical to SEQ ID NO: 811
  source 1..671: mol_type = other DNA

SEQ ID NO: 18186 - DNA, 661 bp, synthetic construct
  source 1..661: mol_type = other DNA
gggggggctgggccctcatgcccagtccttcctttccccttccggggggttaaccggctgtgtttgctagaggcacagaggggcaacatccaacctgctcttgcggggaacggtgcggctccaattcctgcgtcgccaaaggtgttggcgcacccaaacggcgcatctaccaatgctattggtgtggtctgcgagttctagcctactcgtttctcccctatccattcactcactcacgaaaagtgtgttgtaaccacaagatttagcccccgcacgagatgtgcgataaccgtaagactgactcaagcgcggaaagcgctgtaaccacatgctgttagtccctttatggctgcaagatggctatccacctcggatcactgaactggagctcgaccctccttagtaagggaaccgagaggccttcgtgcaacaagctccgacacagagtccacgtgattgctaccaccatgagtacatggttctcccctctcgacccaggacttctttttgaatatccacggctcgatccagagggtggggcatgatccccctagcatagcgagctacagcgggaactgtagctaggccttagcgtgccttggatactgcctgatagggcgacggcctagtcgtgtcggttctataggtagcacatacaaat

SEQ ID NO: 18187 - DNA, 658 bp, synthetic construct
  source 1..658: mol_type = other DNA
ggggggctggggcctgacgcccagcccttcctttccccttccggggggttaaccggctgtgtttgctagaggcacagaggggcaacatccaacctgcttttgcggggaacggtgcggctccgattcctgcgccgccacaggtgttagcgcacccaaacggcgcacctaccaatgttattggtgtggtctgcgagttctagcctactcgtttctcccccgaccattcattcgttcacgaaaagtgtgttgtaaccataagatttaacccccgcacgggatgtgcgacaaccgtaagactggctcaagcgcggaaggcgctgtaaccacaagctgttagtccctttatggctgcaagatggctacccacctcggatcactgaactggagctcgaccctccttagtaagggaaccgagaggccttcgtgcaaaaagctccgacacagagtccacgtgactgctaccaccatgagtacatggttctcccctctcgacccaggacttctttttgaatatccacggctcgatccagagggtggggcatgacccctagcatagcgagctacagcgggaactgtagctaggtcttagcgtaccttggatactgcctgatagggcgacggcctagtcgtgtcggttctataggtagcacatacaaat

SEQ ID NO: 18188 - DNA, 592 bp, synthetic construct; identical to SEQ ID NO: 29
  source 1..592: mol_type = other DNA

SEQ ID NO: 18189 - DNA, 668 bp, synthetic construct
  source 1..668: mol_type = other DNA
tttgaaatggggggctgggccctcatgcccagtccttcctttccccttccggggggtaaaccggctgtgtttgctagaggcacagaggagcaacatccaacctgctcttgtggggaacggtgcggctccaattcctgcgtcgccaaaggtgttagcgcacccaaacggcgcatctaccaatgctattggtgtggtctgcgagttctagcctactcgtttctcccctatccactcactcacgcacaaaaagtgtgttgtaactacaagacttagccctcgcacgagatgtgcgataaccgcaagattgactcaagcgcggaaagcgctgtaaccacatgctgttagtccctttatggctgcgagatggctatccacctcggatcactgaactggagctcgaccctccttagtaagggaaccgagaggccttcttgcaacaagctccgacacagagtccacgtgattgctaccaccatgagtacatggttctcccctctcgacccaggacttctttttgaatatccacggctcgatccagagggtggggcatgatccccctagcatagcgagctacagcgggaactgtagctaggccttagcgtgctttggatactgcctgatagggcgacggcctagtcgtgtcggttctataggtagcacatacaaat

SEQ ID NO: 18190 - DNA, 374 bp, synthetic construct
  source 1..374: mol_type = other DNA
ggacacttggattgggactttcagcgagcacaaatggtatgattactggatacaccttgaacggcagtagcgtggcgagctatggaaaaatcgcaattgtcgatagccatgtcagtgacgcgcttcggcgtgctcctttggtgattcggcgactggttacaggagagtaggcagtgagctatgggcaaacctctacagtattacttagagggaatgtgcaattgagacttgacgagcgtctctttgagatgtggcgcatgctcttggcattaccatagtgagcttccaggttgggaaacctggactgggcctatactacctgatagggtcgcggctggccgcctgtaactagtatagtcagttgaaaccccccc

SEQ ID NO: 18191 - DNA, 596 bp, synthetic construct
  source 1..596: mol_type = other DNA
actgtaactaacatctaagctgaatatacagacaccctatgcctggtccccactcgtcgaaggcatctagcaataagataagtggaagaaggatgcttaaagcatagtgttagtatgcatttctaacctgtgattatcacggggtggcagatggcgtgccataactctattagtgagataccacgcttgtggaccttatgctcacacagccatcctctagtaagtttgcaaggcatctgatgacgtgtgggaacttattggaaacaacagtttgctgcaaagcatcctattgccagcggaacaacacctggtaacaggtgcctctggggccaaaagccaaggtttaacagaccctttaggattggttcacacctgaactgtcgtggaagatatttagtacctactgacttggtagttaggcaaacactagttgtaaggcccacgaaggatgcccagaaggtacccgtaggtaacaagagacactatggatctgatctggggccaactaccactatcatggtgagttggttaaaaaacgtctagtgggccaaacccaggggggatccctggtttccttttactttaatacaatcatt

SEQ ID NO: 18192 - DNA, 594 bp, synthetic construct
  source 1..594: mol_type = other DNA
tagaggcacagaggagcaacatccaacctgcttttgtggggaacggtgcggttccaattcctgcgtcgccaaaggtgttagcgcacccaaacggcgcatctaccaatgctattggtgtggtctgcgagttctagcctactcgtttcttccctatccactcactcacgcacaaaaagtgagttgtaactacgagattcagccctcgcacgagatgtgcggtaaccgcaagattgactcaagcgcggaaagcgctgcaaccacatgcagttagtccctttatggctgcgagatggctatccacctcggatcactgaactggagctcgaccctccttagtaagggaaccgagaggccttcttgcaacaagctccgacacagagtccacgtgattgctaccaccatgagtacatggttctcccctctcgacccaggacttctttttgaatatccacggctcgatccagagggtggggcatgatccccctagcatagcgagctacagcgggaactgtagctaggccttagcgtgccttggatactgcctgatagggcgacggcctagtcgtgtcggttctataggtagcacatacaaat

SEQ ID NO: 18193 - DNA, 594 bp, synthetic construct
  source 1..594: mol_type = other DNA
tagaggcacagaggagcaacacccaacctgctcttgtggggaacggtgcggctccaattcctgcgtcgccaaaggtgttagcgcacccaaacggcgcatctaccaatgctattggtgtggtctgcgagttctagcctactcgtttctcccctattcattcactcacgcacaaaaagtgtgttgtaactacaagatttagccctcgcacgggatgtgcgataaccgcaagactgactcaagcgcggaaagcgctgtaaccgcatgctgttagtccctttatggctgcgagatggctatccacctcggatcactgaactggagctcgaccctccttagtaagggaaccgagaggccttcttgcaacaagctccgacacagagtccacgtgattgctaccaccatgagtacatggttctcccctctcgacccaggacttctttttgaatatccacggctcgatccagagggtggggcatgatccccctagcatagcgagctacagcgggaactgtagctaggccttagcgtgccttggatactgcctgatagggcgacggcctagtcgtgtcggttctataggtagcacatacaact

SEQ ID NO: 18194 - DNA, 594 bp, synthetic construct
  source 1..594: mol_type = other DNA
tagaggcacagaggagcaacatccaacctgcttttgtggggaacggtgcggctccaattcctgcgtcgccaaaggtgttagcgcacccaaacggcgcatctaccaatgctattggtgtggtctgcgagttctagcctactcgtttctcccctactcactcattcacgcacaaaaactgtgttgtaactacaagatttagccctcgcacgggatgtgcgataaccgcaagattgactcaagcgcggaaagcgctgtaaccacatgctgttagtccctttatggctgcgagatggctatccacctcggatcactgaactggagctcgaccctccttagtaagggaaccgagaggccttcttgcaacaagctccgacacagagtccacgtgattgctaccaccatgagtacatggttctcccctctcgacccaggacttctttttgaatatccacggctcgatccagagggtggggcatgatccccctagcatagcgagctacagcgggaactgtagctaggccttagcgtgccttggatactgcctgatagggcgacggcctagtcgtgtcggttctataggtagcacatacaaat

SEQ ID NO: 18195 - DNA, 653 bp, synthetic construct; identical to SEQ ID NO: 78
  source 1..653: mol_type = other DNA

SEQ ID NO: 18196 - DNA, 595 bp, synthetic construct
  source 1..595: mol_type = other DNA
actgtaacaaacatctaagattattgcattaaccccatgcctggtctccattagttgaaggcaacttgcaataaaatgagtggaaacaagacgcttaaagcatggtgtaaattaacttttctaacccacatctcatgtggggtggcagatggcgtgccataactctattagtgagataccacgcttgtggaccttatgctcacacagccatcctctagtaagtttgtgagacgtctggtgacgtgtgggaacttattggaaacaacattttgctgtaaagcatcctactgccagcggaacaacacctggtaacaggtgcctctggggccaaaagccaaggtttaacagaccctttaggattggtttaaaacctgaaatgttgtggaagatactcagtacctaccaatctggtagtattgcaaacactagttgtaaggcccacgaaggatgcccagaaggtacccgtaggtaacgagagacactatggatctgatctggggccaggtacctctatcttggtgacctggttaaaaaacgtctagtgggccaaacccgggggggatccccggtttccttttattttaccaatgccatt

SEQ ID NO: 18197 - DNA, 596 bp, synthetic construct; identical to SEQ ID NO: 36
  source 1..596: mol_type = other DNA

SEQ ID NO: 18198 - DNA, 593 bp, synthetic construct
  source 1..593: mol_type = other DNA
agaggcacagaggagcaacatccaacctgcttttgtggggaacggtgcggttccaattcctgcgtcgccaaaggtgttagcgcacccaaacggcgcatctaccaatgctattggtgtggtctgcgagttctagcctactcgtttctcccctatccactcactcacgcacaaaaagtgtgttgtaactacgagattcagccctcgcacgagatgtgcggtaaccgcaagattgactcaagcgcggaaagcgctgcaaccacatgcagttagtccctttatggctgcgagatggctatccacctcggatcactgaactggagctcgaccctccttagtaagggaaccgagaggccttcttgcaacaagctccgacacagagtccacgtgattgctaccaccatgagtacatggttctcccctctcgacccaggacttctttttgaatatccacggctcgatccagagggtggggcatgatccccctagcatagcgagctacagcgggaactgtagctaggccttagcgtgccttggatactgcctgatagggcgacggcctagtcgtgtcggttctataggtagcacatacaaat

SEQ ID NO: 18199 - DNA, 616 bp, synthetic construct
  source 1..616: mol_type = other DNA
ggggtaaaccggctgtgtttgctagaggcacagaggagcaacatccaacctgcttttgtggggaacggtgcggctccaattcctgcgtcgccaaaggtgttagcgcacccaaacggcgcatctaccaatgctattggtgtggtctgcgagttctagcctactcgtttctcccctactcactcattcacgcacaaaaactgtgttgtaactacaagatttagccctcgcacgggatgtgcgataaccgcaagattgactcaagcgcggaaagcgctgtaaccacatgctgttagtccctttatggctgcgagatggctatccacctcggatcactgaactggagctcgaccctccttagtaagggaaccgagaggccttcttgcaacaagctccgacacagagtccacgtgattgctaccaccatgagtacatggttctcccctctcgacccaggacttctttttgaatatccacggctcgatccagagggtggggcatgatccccctagcatagcgagctacagcgggaactgtagctaggccttagcgtgccttggatactgcctgatagggcgacggcctagtcgtgtcggttctataggtagcacatacaaat

SEQ ID NO: 18200 - DNA, 597 bp, synthetic construct
  source 1..597: mol_type = other DNA
gctgagactaacatctaagctgattaaccagtcaccccatgcctggtccccactcgtcgaaggcatctagcaataagataagtggaagaaggatgcttaaagcatagtgttaatatgcatttctaacctgtgattatcacggggtggcagatggcgtgccataactctattagtgagataccacgcttgtggaccttatgctcacacagccatcctctagtaagtttgcaaggcatctgatgacgtgtgggaacttattggaaacaacagtttgctgcaaagcatcctactgccagcggaacaacacctggtaacaggtgcctctggggccaaaagccaaggtttaacagaccctttaggattggttcacacctgaactgttgtgaaagatatttagtacctactgacttggtagttaggcaaacactagttgtaaggcccacgaaggatgcccagaaggtacccgtaggtaacaagagacactatggatctgatctggggccaactaccactatcatggtgagttggccccagatcagatccttaagcgaaacccaggggggatccctggtttccttttactttaatacaatcatt

SEQ ID NO: 18201 - DNA, 642 bp, synthetic construct
  source 1..642: mol_type = other DNA
gcccagccccccctttccccttccggggggtaaaccggctgtgtttgctagaggcacagaggggcaacatccaacctgcttttgtggggaacggtgcggctccaattcctgcgtcgccaaaggtgttagcgcacccaaacggcgcatctaccaatgctattggtgtggtctgcgagttctagcctactcgtttctcccctatccattcactcacgcacaaaaagtgtgttgtaactacaagatttggccctcgcacgagatgtgcgataaccgcaagactgactcaagcgtggaaagcgctgtaaccacatgctgttagtccctttatggctgcgagatggctatccacctcggatcactgaactggagctcgaccctccttagtaagggaaccgagaggccttcttgcaacaagctccgacacagagtccacgtgattgctaccaccatgagtacatggttctcccctctcgacccaggacttctttttgaatatccacggctcgatccagagggtggggcatgatccccctagcatagcgagctacagcgggaactgtagctaggccttagcgtgccttggatactgcctgatagggcgacggcctagtcgtgtcggttctataggtagcacatacaaat

SEQ ID NO: 18202 - DNA, 642 bp, synthetic construct
  source 1..642: mol_type = other DNA
gcccagccccccctttccccttccggggggtaaaccggctgtgtttgctagaggcacagaggagcaacatccaacctgcttttgtggggaacggtgcggctccaattcctgcgtcgccaaaggtgttagcgcacccaaacggcgcatctaccaatgctattggtgtggtctgcgagttctagcctactcgtttctcccctatccactcactcacgcacaaaaagtgtgttgtaactacaagatttagccctcgcacgagatgtgcggtaaccgcaagattgactcaagcgcggaaagcgctgtaaccacatgctgttagtccctttatggctgcgagatggctatccacctcggatcactgaactggagctcgaccctccttagtaagggaaccgagaggccttcttgcaacaagctccgacacagagtccacgtgattgctaccaccatgagtacatggttctcccctctcgacccaggacttctttttgaatatccacggctcgatccagagggtggggcatgatccccctagcatagcgagctacagcgggaactgtagctaggccttagcgtgccttggatactgcctgatagggcgacggcctagtcgtgtcggttctataggtagcacatacaaat

SEQ ID NO: 18203 - DNA, 668 bp, synthetic construct
  source 1..668: mol_type = other DNA
taccccgacttgctgagcttctctaggagagtccctttcccagccttgaggcggctggtcaataaaagcctcaattgtaacaaacatctaagattattacattaaccccatgcctggtctccactagttgaaggcaacttgcaataaaatgagtggaaacaagacgcttaaagtatggtgtaaattaacatttctaactcacattttgtgtggggtggcagatggcgtgccataattctattagtgagataccatgcttgtggaccttatgctcacacagccatcctctagtaagtttgtaagacgtctggtgacgtgtgggaacttattggaaacaacattttgctgtaaagcatcctattgccagcggaataacacctggtaacaggtgcctctggggccaaaagccaaggtttaacaaaccctttaggattggttctaaacctgagatgttgtggaagatacttagtacctaccgatctggtagtagtgcaaacactagttgtaaggcccacgaaggatgcccagaaggtacccataggtaacaagtgacactatggatctgatctggggccaggtacctctatcttggtgacctggttaaaaaacgtctagtgggccaaacccgggggggaaccccggtttccttttattttgtcagtgccact

SEQ ID NO: 18204 - DNA, 668 bp, synthetic construct
  source 1..668: mol_type = other DNA
tttgaaatggggggctgggccctcatgcccagtccttcctttccccttccggggggtaaaccggctgtgtttgctagaggcacagaggagcaacatccaacctgcttttgtggggaacggtgcggctccgattcctgcgtcgccaaaggtgttagcgcacccaaacggcgcatctaccaatgctattggtgtggtctgcgagttctagcctactcgtttctcccccatccactcactcgcgcacaaaaagtgtgttgtaactacaagatttagccctcgcacgggatgtgtgataaccacaagattgactcaagcgcggaaagcgatgtaaccacatgctgttagtccctttatggctgcgagagggctatccacctcggatcactgaactggagctcgaccctccttagtaagggaaccgagaggccttcttgcaacaagctccgacacagagtccacgtgattgctaccaccatgagtacatggttctcccctctcgacccaggacttctttttgaatatccacggctcgatccagagggtggggcatgatccccctagcatagcgagctacagcgggaactgtagctaggccttagcgtgccttggatactgcctgatagggcgacggcctagtcgtgtcggttctataggtagcacatacaaat

SEQ ID NO: 18205 - DNA, 668 bp, synthetic construct
  source 1..668: mol_type = other DNA
tttgaaatggggggctgggccctcatgcccagtccttcctttccccttccggggggtaaaccggctgtgtttgctagaggcacagaggagcaacatccaacctgctcttgtggggaacggtgcggctccaattcctgcgtcgccaaaggtgttagcgcacccaaacggcgcatctaccaatgctattggtgtggtctgcgagttctagcctactcgtttctcccctactcactcattcacgcacaaaaactgtgttgtaactacaagatttagccctcgcacgggatgtgcgataaccgcaagattgactcaagcgcggaaagcgctgtaaccacatgctgttagtccctttatggctgcgagatggctatccacctcggatcactgaactggagctcgaccctccttagtaagggaaccgagaggccttcttgcaacaagctccgacacagagtccacgtgattgctaccaccatgagtacatggttctcccctctcgacccaggacttctttttgaatatccacggctcgatccagagggtggggcatgatccccctagcatagcgagctacagcgggaactgtagctaggccttagcgtgccttggatactgcctgatagggcgacggcctagtcgtgtcggttctataggtagcacatacaaat

SEQ ID NO: 18206 - DNA, 668 bp, synthetic construct
  source 1..668: mol_type = other DNA
tttgaaatggggggctgggccctcatgcccagtccttcctttccccttccggggggtaaaccggctgtgtttgctagaggcacagaggagcaacacccaacctgcttttgtggggaacggtgcggctccgattcctgcgtcgccaaaggtgttagcgcacccaaacggcgcatctaccaatgctattggtgtggtctgcgagttctagcctactcgtttctcccccatccactcactcgcgcacaaaaagtgtgttgtaactacaagatttagccctcgcacgggatgtgcgataaccacaagattgactcaagcgcggaaagcgctgtaaccacatgctgttagtccctttatggctgcgggatggctatccacctcgggtcactgaactggagctcgaccctccttagtaagggaactgagaggccttcttgcaacaagctccgacacagagtccacgtgattgctaccaccatgagtacatggttctcccctctcgacccaggacttctttttgaatatccacggctcgatccagagggtggggcatgatccccctagcatagcgagctacagcgggaactgtagctaggccttagcgtgccttggatactgcctgatagggcgacggcctagccgtgtcggttctataggtagcacatacaaat

SEQ ID NO: 18207 - DNA, 668 bp, synthetic construct
  source 1..668: mol_type = other DNA
tttgaaatggggggctgggccctcatgcccagtccttcctttccccttccggggggtaaaccggctgtgtttgctagaggcacagaggagcaacatccaacctgcttttgtggggaacggtgcggctccaattcctgcgtcgccaaaggtgttagcgcacccaaacggcgcatctaccaatgccattggtgtggtctgcgagttctagcctactcgtttctcccctactcactcattcacgcacaaaaactgtgttgtaactacaagatttggccctcgcacgggatgtgcgataaccgcaagattgactcaagcgcggaaagcgctgtaaccacatgctgttagtccctttatggctgcgagatggctatccacctcggatcactgaactggagctcgaccctccttagtaagggaaccgagaggccttcttgcaacaagctccgacacagagtccacgtgattgctaccaccatgagtacatggttctcccctctcgacccaggacttctttttgaatatccacggctcgatccagagggtggggcatgatccccctagcatagcgagctacagcgggaactgtagctaggccttagcgtgccttggatactgcctgatagggcgacggcctagtcgtgtcggttctataggtagcacatacaaat

SEQ ID NO: 18208 - DNA, 668 bp, synthetic construct
  source 1..668: mol_type = other DNA
tttgaaatggggggctgggcccttatgcccagtccttcctttccccttccggggggtaaaccggctgtgtttgctagaggcacagaggagcaacatccaacctgcttgtgtggggaacggtgcggctccaattcctgcgtcgccaaaggtgttagcgcacccaaacggcgcatctaccaatgctattggtgtggtctgcgagttctagcctactcgtttctcccctactcactcattcacgcacaaaaactgtgttgtaattacaagatttagccctcgcacgggatgtgcgataaccgcaagattgactcaagcgcggaaagcgctgtaaccacatgctgttagtccctttatggctgcgagatggctatccacctcggatcactgaactggagctcgaccctccttagtaagggaaccgagaggccttcttgcaacaagctccgacacagagtccacgtgattgctaccaccatgagtacatggttctcccctctcgacccaggacttctttttgaatatccacggctcgatccagagggtggggcatgatccccctagcatagcgagctacagcgggaactgtagctaggccttagcgtgccttggatactgcctgatagggcgacggcctagtcgtgtcggttctataggtagcacatacaaat

SEQ ID NO: 18209 - DNA, 668 bp, synthetic construct
  source 1..668: mol_type = other DNA
tttgaaatggggggctgggccctcatgcccagtccttcctttccccttccggggggtaaaccggctgtgtttgctagaggcacagaggagcaacatccaacctgcttttgtggggaacggtgcggctccgactcctgcgtcgccaaaggtgttagcgcacccaaacggcgcatctaccaatgctattggtgtggtctgcgagttctagcctactcgtttctcccccatccactcactcgcgcacaaaaagtgtgttgcgactacaagatttagccctcgcacgggatgtgcgataaccacaagattgactcaagcgcggaaagcgctgtaaccacatgctgttagtccctttatggctgcgagatggctatccacctcggatcactgaactggagctcgaccctccttagtaagggaaccgagaggccttcttgcaacaagctccgacacagagtccacgtgattgctaccaccatgagtacatggttctcccctctcgacccaggacttctttttgaatatccacggctcgatccagagggtggggcatgatccccctagcatagcgagctacagcgggaactgtagctaggccttagcgtgccttggatactgcctgatagggcgacggcctagtcgtgtcggttctataggtagcacatacaaat

SEQ ID NO: 18210 - DNA, 668 bp, synthetic construct
  source 1..668: mol_type = other DNA
tttgaaatggggggctgggccctcatgcccagtccttcctttccccttccggggggtaaaccggctgtgtttgctagaggcacagaggagcaacatccaacctgctcttgtggggaacggtgcggctccaattcctgcgtcgccaaaggtgttagcgcacccaaacggcgcatctaccaatgctattggtgtggtctgcgagttctagcctactcgtttctcccctatccactcactcacgcacaaaaagtgtgttgtaactacaagacttagccctcgcacgagatgtgcgataaccgcaagattgactcaagcgcggaaagcgctgtaaccacatgctgttagtccctttatggctgcgagatggctatccacctcggatcactgaactggagctcgaccctccttagtaagggaaccgagaggccttcttgcaacaagctccgacacagagtccacgtgattgctaccaccatgagtacatggttctcccctctcgacccaggacatctttttgaatatccacggctcgatccagagggtggggcatgatccccctagcatagcgagctacagcgggaactgtagctaggccttagcgtgctttggatactgcctgatagggcgacggcctagtcgtgtcggttctataggtagcacatacaaat

SEQ ID NO: 18211 - DNA, 593 bp, synthetic construct; identical to SEQ ID NO: 32
  source 1..593: mol_type = other DNA

SEQ ID NO: 18212 - DNA, 668 bp, synthetic construct
  source 1..668: mol_type = other DNA
tttgaaatggggggctgggccctcatgcccagtccttcctttccccttccggggggtaaaccggctgtgtttgctagaggcacagaggagcaacatccaacctgctcttgtggggaacggtgcggctccaattcctgcgtcgccaaaggtgttagcgcacccaaacggcgcatctaccaatgctattggtgtggtctgcgagttctagcctactcgtttctcccctatccactcactcacgcacaaaaagtgtgttgtaactacaagatttagccctcgcacgagatgtgcgataaccgcaagattgactcaagcgcggaaagcgctgtaaccacatgctgttagtccctttatggctgcgagatggctatccacctcggatcactgaactggagctcgaccctccttagtaagggaaccgagaggccttcttgcaacaagctccgacacagagtccacgtgattgctaccaccatgagtacatggttctcccctctcgacccaggacttctttttgaatatccacggctcgacccagagggtggggcatgatccccctagcatagcgagctacagcgggaactgtagctaggccttagcgtgctttggatactgcctgatagggcgacggcctagtcgtgtcggttctataggtagcacatacaaat

SEQ ID NO: 18213 - DNA, 595 bp, synthetic construct
  source 1..595: mol_type = other DNA
actgtaacaaacatctaagattgttgcattaaccccatgcctggtctccactagttgaaggcaacttgcaataaaatgagtggaaacaagacgcttaaagcatggtgtaaattaacttttctaacccacaccttgtgtggggtggcagatggcgtgccataactctattagtgagataccacgcttgtggaacttatgctcacacagccatcctctagtaagtttgtgagatgtctggtgacgtgtgggaacttattggaaacaacattttgctgtaaagcatcctattgccagcggaactacacctggtaacaggtgcctctggggccaaaagccaaggtttaacagaccctttaggattggtttaaaacctgaaatgttgtggaagatacttagtacctaccgatctggtagtattgcagacactagttgtaaggcccacgaaggatgcccagaaggtacccgtaggtaacaagagacactatggatctgatctggggccaggtacctctatcttggtgacctggttaaagcatccttcgtgggccaaacccgggggggatccccggtttcattttgttttaccaatgccact

SEQ ID NO: 18214 - DNA, 595 bp, synthetic construct
  source 1..595: mol_type = other DNA
actgtaacaaacatctaagattgttgcattaaccccatgcctggtctccactagttgaaggcaacttgcaataaaatgagtggaaacaagacgcttaaagcatggtgtaaattaacttttctaacccacaccttgtgtggggtggcagatggcgtgccataactctattagtgagataccacgcttgtggaacttatgctcacacagccatcctctagtaagtttgtgagatgtctggtgacgtgtgggaacttattggaaacaacattttgctgtaaagcatcctattgccagcggaactacacctggtaacaggtgcctctggggccaaaagccaaggtttaacagaccctttaggattggttttaaacctgaaatgttgtggaagatacttagtacctaccgatctggtagtattgcagacactagttgtaaggcccacgaaggatgcccagaaggtacccgtaggtaacaagagacactatggatctgatctggggccaggtacctctatcttggtgacctggttaaaaaacgtctagtgggccaaacccgggggggatccccggtttcattttgttttaccaatgccact

SEQ ID NO: 18215 - DNA, 672 bp, synthetic construct; identical to SEQ ID NO: 85
  source 1..672: mol_type = other DNA

SEQ ID NO: 18216 - DNA, 668 bp, synthetic construct
  source 1..668: mol_type = other DNA
tttgaaggggggggctgggccctcatgcccagtccttcctttccccttccggggggtaaaccggctgtgtttgctagaggcacagaggagcaacacccaacctgcttttgtggggaacggtgcggctccgattcctgcgtcgccaaaggtgttagcgcacccaaacggcgcatctaccaatgctattggtgtggtctgcgagttctagcctactcgtttctcccctatccattcactcacgcacaaaaagtgtgttgtaactacaagatttagccctcgcacgagatgtgcgataaccgcaagactgactcaagcgcggaaagcgctgtaaccacatgctgttagtccctttatggctgcgagatggctatccacctcggatcactgaactggagctcgaccctccttagtaagggaaccgagaggccttcttgcaacaagctccgacacagagtccacgtgattgctaccaccatgagtacatggttctcccctctcgacccaggacttctttttgaatatccacggctcgatccagagggtggggcatgatccccctagcatagcgagctacagcgggaactgtagctaggccttagcgtgccttggatactgcctgatagggcgacggcctagtcgtgtcggttctataggtagcacatataaat

SEQ ID NO: 18217 - DNA, 672 bp, synthetic construct
  source 1..672: mol_type = other DNA
gatttttgaaatggggggctgggccctcatgcctagtccttcctttccccttccggggggtaaaccggctgtgtttgctagaggcacagaggagcaacatccaacctgctcttgtggggaacggtgcggctccaattcctgcgtcgccaaaggtgttagcgcacccaaacggcgcatctaccaatgctattggtgtggtctgcgagttctagcctactcgtttctcccctatccactcactcacgcacaaaaagtgggttgtaaccgcaagatttagccctcgcacgagatgtgcgataaccgcaagattgactcaagcgcggaaagcgctgtaaccacatgctgttagtccctttatggctgcgagatggctatccacctcggatcactgaactggagctcgaccctccttagtaagggaaccgagaggccttcttgcaacaagctccgacacagagtccacgtgattgctaccaccatgagtacatggttctcccctctcgacccaggacttctttttgaatatccacggctcggctcagagggtggggcatgatccccctagcatagcgagctacagcgggaactgtagctaggccttagcgtgctttggatactgcctgatagggcgacggcctagtcgtgtcggttctataggtagcacatacaaat

SEQ ID NO: 18218 - DNA, 595 bp, synthetic construct; identical to SEQ ID NO: 34
  source 1..595: mol_type = other DNA

SEQ ID NO: 18219 - DNA, 595 bp, synthetic construct
  source 1..595: mol_type = other DNA
actgtaacaaacatctaagattgttacattaaccccatgcctggtctccactagttgaaggcaacttgcaataaaatgagtggaaacaagacgcttaaagcatggtgtaaattaacttttctaacccacaccttgtgtggggtggcagatggcgtgccataactctattagtgagataccacgcttgtggaacttatgctcacacagccatcctctagtaagtttgtgagatgtctggtgacgtgtgggaacttattggaaacaacattttgctgtaaagcatcctattgccagcggaactacacctggtaacaggtgcctctggggccaaaagccaaggtttaacagaccctttaggattggtttaaaacctgaaatgttgtggaagatacttagtacctaccgatctggtagtattgcagacactagttgtaaggcccacgaaggatgcccagaaggtacccgtagggaacaagagacactatggatctggtctggggccaggtacctctatcttggtgacctggttaaaaaacgtctagtgggccaaacccgggggggatccccggtttcattttgttttaccaatgccact

SEQ ID NO: 18220 - DNA, 595 bp, synthetic construct; identical to SEQ ID NO: 35
  source 1..595: mol_type = other DNA

SEQ ID NO: 18221 - DNA, 666 bp, synthetic construct
  source 1..666: mol_type = other DNA
tttgaaatggggggctgggccctgacgcccagcccttcctttccccttccggggggttaaccggctgtgtttgctagaggcacagaggggcaacatccaacctgcttttgcggggaacggtgcggctccgattcctgcgccgccaaaggtgttagcgcacccaaacggcgcacctaccaatgttattggtgtggtctgcgagttctagcctactcgtttctcccccgaccattcactcgccctcgaaaagtgtgttgtaaccataagatttaacccccgcacgggatgtgtgataaccgtaagactggctcaagcgcggaaggcgctgtaaccacatgctgttagtccctttatggctgcaagatggctacccacctcggatcactgaactggagctcgaccctccttagtaagggaaccgagaggccttcgtgcaaaaagctccgacacagagtccacgtgactgctaccaccatgagtacatggttctcccctctcgacccaggacttctttttgaatatccacggctcgatccagagggtggggcatgacccctagcatagcgagctacagcgggaactgtagctaggtcttagcgtaccttggatactgcctgatagggcgacggcctagtcgtgtcggttctataggtagcacatacaaat

SEQ ID NO: 18222 - DNA, 645 bp, synthetic construct
  source 1..645: mol_type = other DNA
gatgcccagtccttcctttccccttccggggggttaaccggctgtgtttgctagaggcacagaggggcaacatccaacctgtttttgcggggaacggtgcggctccgattcctgcgtcgccaaaggtgttagcgcacccaaacggcgcatctaccaatgctattggtgtggtctgcgagttctagcctactcgtttctcccccaaccattcactcacccacgaaaagtgtgttgtaaccacaagatttaacccccgcacgagatgtgcgataaccgtaagattggctcaagcgcggaaagcgctgtaaccacatgctgttagtccctttatggctgcaagatggctacccacctcggatcactgaactggagctcgaccctccttagtaagggaaccgagaggccttcgtgcaacaagctccgacacagagtccacgtgactgctaccaccatgagtacatggttctcccctctcgacccaggacttctttttgaatatccacggctcgatccagagggtggggcatgatccccctagcatagcgagctacagcgggaactgtagctaggccttagcgtgccttggatactgcctgatagggcgacggcctagtcgtgtcggttctataggtagcacatacaaat

SEQ ID NO: 18223 - DNA, 636 bp, synthetic construct
  source 1..636: mol_type = other DNA
tccctttcccagccctgaggtggctggttaataatagcctcaagcgtaaccaacatctaagaagattgtataaaccctatgcctggcccccactattcgaaggcaacttgcaataagaagagtggaatcagggtgcttaaagcatagagacagttttcatttctaacccacatgattgtggggtggcagatggcgtgccataattctaatagtgagataccacgcttgtggaccttatgctcacacagccatcctctagtaagtttgtgagacgtctggtgacgtgtgggaacttattggaaacaacattttgctgcaaagcatcctactgccagcggaacaacacctggtaacaggtgcctctggggccaaaagccaaggtttaacagaccctttaggattggttctgaacctgagatgttgtggaaaatatttagtacctgctgatctggtagtaatgcaagcactagttgtaaggcccacgaaggatgcccagaaggtacccgtaggtaacaagtgacactatggatctgatctggggccaactacctctatcttggtgagttggttaaaaaacgtctagtgggccaaacccaggggggatccctggtttccttttattttatcatagttaat

SEQ ID NO: 18224 - DNA, 672 bp, synthetic construct; identical to SEQ ID NO: 813
  source 1..672: mol_type = other DNA

SEQ ID NO: 18225 - DNA, 672 bp, synthetic construct
  source 1..672: mol_type = other DNA
ccctttttgaatggggggctgggccctcatgtccagcccttcctttccccttccggggggtaaaccggctgtgtttgctagaggcacagaggagcaacatccaacctgcttttgtggggaacggtgcggctccaattcctgcgtcgccaaaggtgttagcgcacccaaacggcgcatctaccaatgctattggtgtggtctgcgagttctagcctactcgtttctcccctgctcactcatttacacacaaaaactgcgttgtaactacaagatttggccctcgcacgggatgtgcgataaccgcaagactgactcaagcgcggaaggcgctgtaaccacatgctgttagtccctttatggctgcgagatggctatccacctcggatcactgaactggagttcgaccctccttagtaagggaaccgagaggccttcccgcaacaagctccgacacagagtccacgtgattgctaccaccatgagtacatggttctcccctctcgacccaggacttctttttgaatatccacggctcgatccagagggtggggcatgatccccctagcatagcgagctacagcgggaactgtagctaggccttagcgtgccttggatactgcctgatagggcgacggcctagtcgtgtcggttctataggtagcacatacaaat

SEQ ID NO: 18226 - DNA, 672 bp, synthetic construct
  source 1..672: mol_type = other DNA
ccctttttgaatggggggctgggccctcatgtccagcccttcctttccccttccggggggtaaaccggctgtgtttgctagaggcacagaggagcaacatccaacctgcttttgtggggaacggtgcggctccaattcctgcgtcgccaaaggtgttagcgcacccaaacggcgcatctaccaatgctattggtgtggtctgcgagttctagcctactcgtttctcccctgctcactcatttacacacaaaaactgtgttgtaactacaagatttggccctcgcacgggatgtgcgataaccgcaagactgactcaagcgcggaaggcgctgtaaccacatgctgttagtccctttatggctgcgagatggctatccacctcggatcactgaactggagttcgactctccttagtaagggaaccgagaggccttcccgcaacaagctccgacacacagtccacgtgattgctaccaccatgagtacatggttctcccctctcgacccaggacttctttttgaatatccacggctcgatccagagggtggggcatgatccccctagcatagcgagctacagcgggaactgtagctaggccttagcgtgccttggatactgcctgatagggcgacggcctagtcgtgtcggttctataggtagcacatacaaat

SEQ ID NO: 18227 - DNA, 665 bp, synthetic construct
  source 1..665: mol_type = other DNA
tttgaaatggggggctgggcgtgacgcccagcccttcctttccccttccggggggttaaccggctgtgtttgctagaggcacagaggggcaccatccaacctgcttttgcggggaacggtgcggctccgattcctgcgccgccaaaggtgttagcgcacccaaacggcgcacctaccaatgttattggtgtggtctgcgagttctagcctactcgtttctcccctgaccatttactcgcccacgaaaagtgtgttgcaaccataagatttaacccccgcacgggatgtgcgataaccgtaagactggctcaagcgcggaaggcgctgtaaccacatgctgttagtccctttatggctgcaagatggctacccacctcggatcactgaactggagctcgaccctccttagtaagggaaccgagaggccttcgcgcaaaaagctccgacacagagtccacgtgattgctaccaccatgagtacatggttctcccctctcgacccaggacttctttttgaatatccacggctcgatccagagggtggggcatgacccctagcatagcgagctacagcgggaactgtagctaggtcttagcgtaccttggatactgcctgatagggcgacggcctagtcgtgtcggttctataggtagcacatacaaat

SEQ ID NO: 18228 - DNA, 667 bp, synthetic construct
  source 1..667: mol_type = other DNA
gggaaagggggggctgggccctcatgcccagtccttcctttccccttccggggggtaaaccggctgtgtctgctagaggcacagaggagcaacatccaacctgctcttgtggggaacggtgcggctccaattcctgcgtcgccaaaggtgttagcgcacccaaacggcgcatctaccaatgctattggtgtggtctgcgagttctagcctactcgtttctcccctatccactcactcacgcacaaaaagtgtgttgtaactacaagacttagccctcgcacgatatgtgcggtaaccgcaagattgactcaagcgcggaaagcgctgtaaccacatgctgttagtccctttatggctgcgggatggctatccacctcggatcactgaactggagctcgaccctccttagtaagggaaccgagaggccttcttgcaacaagctccgacacagagtccacgtgattgctaccaccatgagtacatggttctcccctctcgacccaggacttctttttgaatatccacggctcgacccagagggtggggcatgatccccctagcatagcgagctacagcgggaactgtagctaggccttagcgtgctttggatactgcctgatagggtgacggcctagtcgtgtcggttctataggtagcacatacaaat

SEQ ID NO: 18229 - DNA, 668 bp, synthetic construct
  source 1..668: mol_type = other DNA
tttgaaatggggggctgggccctcatgcccagtccttcctttccccttccggggggtaaaccggctgtgcttgctagaggcacagaggagcaacatccaacctgcttttgtggggaacggtgcggctccaattcctgcgtcgccaaaggtgctagcgcacccaaacggcgcatctaccaatgctattggtgtggtctgcgagttctagcctactcgtttctcccctactcactcattcacgcacaaaaactgtgttgtaactacaagattcagcccacgcacgggatgtgcgacaaccgcaagattgactcaagcgcggaaagcgctgtaaccacatgctgttagtccctttatggctgcgaaatggctatccacctcggatcactgaactggagctcgaccctccttagtaagggaaccgagaggccttcttgcaacaagctccgacacagagtccacgtgattgctaccaccatgagtacatggttctcccctctcgacccaggacttctttttgaatatccacggctcgatccagagggtggggcatgatccccctagcatagcgagctacagcgggaactgtagctaggccttagcgtgccttggatactgcctgatagggcgacggcctagtcgtgtcggttctataggtagcacatacaaat

SEQ ID NO: 18230 - DNA, 670 bp, synthetic construct
  source 1..670: mol_type = other DNA
tttgaaatggggggctgggcccttatgcccagtccttcctttccccttccggggggtaaaccggctgtgtttgctagaggcacagaggagcaacatccaacctgcttttgtggggaacggtgcggctccaattcctgcgtcgccaaaggtgttagcgcacccaaacggcgcatctaccaatgctattggtgtggtctgcgagttctagcctactcgttttcttcccctactcactcattcacgcacaaaaagtgtgttgtaactacaagatttagccctcgcacgggatgtgcgataaccgcaagattgactcaagcgcggaaagcgctgtaaccacatgctgttagtccctccgtggctgcgagatggctatccacctcggatcactgaactggagctcgaccctccttagtaagggaaccgagaggccttcttgcaacaagctccgacacagagtccacgtgattgctaccaccatgagtacatggttctcccctctcgacccaggacttctttttgaatatccacggctcgatccagagggtggggcatgatccccctagcatagcgagctacagcgggaactgtagctaggccttagcgtgccttggatactgcctgatagggcgacggcctagtcgtgtcggttctataggtagcacatacaaat

SEQ ID NO: 18231 - DNA, 669 bp, synthetic construct
  source 1..669: mol_type = other DNA
tttgaaatggggggctgggccctcatgtccagtccttcctttccccttccggggggtaagccggctgtgtttgctagaggcacagaggagcaacatccaacctgcttttgtgggaaacggtgcggctccaattcctgcgtcgccaaaggtgttagcgcacccaaacggcgcatctaccaatgctattggtgtggtctgcgagttctagcctactcgttttctcccctatcaatccactcacgcacaaaaattgtgttgtgactacaagatttagccctcgcacgagatatgcgataaccacaagactgactcaagcgcggaaagcgctgtaaccacatgctgttagtccctttatggctgcgagatggctatccacctcggatcactgaactggagctcgaccctccttagtaagggaaccgagaggccttcttgcaacaagctccgacacagagtccacgtgattgctaccaccatgagtacatggttctcccctctcgacccaggacttctttttgaatatccacggctcgatccagagggtggggcatgatccccctagcatagcgagctacagcgggaactgtagctaggccttagcgtgccttggatactgcctgatagggcgacggcctagtcgtgtcggttctataggtagcacatacaaat

SEQ ID NO: 18232 - DNA, 668 bp, synthetic construct
  source 1..668: mol_type = other DNA
tttgaaatggggggctgggccctcatgcccagtccttcctttccccttccggggggtaaaccggctgtgtttgctagaggcacagaggagcaacatccaacctgctttcgtggggaacggtgcggctccaattcctgcgtcgccaaaggtgttagcgcacccaaacggcgcatctaccaatgccattggtgtggtctgcgagttctagcctactcgtttttcccctactcactcattcacgcacaaaaagtgtgttgtaactacaagatttagccctcgcacgagatgtgtggtaaccgtaagattgactcaagcgcggaaagcgctgtaaccacatgctgttagtccctttatggctgcgagatggctatccacctcggatcactgaactggagctcgaccctccttagtaagggaaccgagaggccttcttgcaacaagctccgacacagagtccacgtgattgctaccaccatgagtacatggttctcccctctcgacccaggacttctttttgaatatccacggctcgatccagagggtggggcatgatccccctagcatagcgagctacagcgggaactgtagctaggccttagcgtgccttggatactgcctgatagggcgacggcctagtcgtgtcggttctataggtagcacatacaaat

SEQ ID NO: 18233 - DNA, 668 bp, synthetic construct
  source 1..668: mol_type = other DNA
tttgaaatggggggctgggccctcatgcccagtccttcctttccccttccggggggtaaaccggctgtgtttgctagaggcacagaggagcaacatccaacctgcttttgtggggaacggtgcggctccaatttctgcgtcgccaaaggtgttagcgcacccaaacggcgcatctaccaatgccattggtgtggtctgcgggttctagcctactcgtttttcccctactcactcattcacgcacaaaaagtgtgttgtaactacaagatttagccctcgcacgagatgtgcggtaaccgtaagattgactcaagcgcggaaagcgctgtaaccacatgctgttagtccctttatggctgcgagatggctatccacctcggatcactgaactggagttcgaccctccttagtaagggaaccgagaggccttcttgcaacaagctccgacacagagtccacgtgactgctaccaccatgagtacatggttctcccctctcgacccaggacttctttttgaatatccacggctcgatccagagggtggggcatgatccccctagcatagcgagctacagcgggaactgtagctaggccttagcgtgccttggatactgcctgatagggcgacggcctagtcgtgtcggttctataggtaacacatacaaat

SEQ ID NO: 18234 - DNA, 668 bp, synthetic construct
  source 1..668: mol_type = other DNA
tttgaaatggggggctgggccctcatgtccagtccttcctttccccttccggggggtaaaccggctgtgtttgctagaggcacagaggagcaacatccaacctgcttttgtggggaacggtgcggctccaattcctgcgtcgccaaaggtgttagcgcacccaaacggcgcatctaccaatgctattggtgtggtctgcgagttctagcctactcgtttctcccttactcactcattcacgcacaaaaactgcgttgtaactacaagatttagccctcgcacgggatgtgcgataaccgcaagattgactcaagcgcggaaagcgctgtaaccacatgctgttagtccctttatggctgcgagatggctatccacctcggatcactgaactggagctcgaccctccttagtaagggaaccgagaggccttcttgcaacaagctccgacacagagtccacgtgattgctaccaccatgagtacatggttctcccctctcgacccaggacttctttttgaatatccacggctcgatccagagggtggggcatgatccccctagcatagcgagctgcagcgggaactgtagctaggccttagcgtgccttggatactgcctgatagggcgacggcctagtcgtgtcggttctataggtagcacatacaaat

SEQ ID NO: 18235 - DNA, 668 bp, synthetic construct
  source 1..668: mol_type = other DNA
tttgaaatggggggctgggccctcatgtccagtccttcctttccccttccggggggtaaaccggctgtgtttgctagaggcacagaggagcaacatccaacctgcttttgtggggaacggtgcggctccaattcctgcgtcgccaaaggtgttagcgcacccaaacggcgcatctaccaatgctattggtgtggtctgcgagttctagcctactcgtttctcccttactcactcattcacgcacaaaaactgtgttgtaactacaagatttagccctcgcacgggatgtgcgataaccgcaagattgactcaagcgcggaaagcgctgtaaccacatgctgttagtccctttatggctgcgagatggctatccacctcggatcactgaactggagctcgaccctccttagtaagggaaccgagaggccctcttgcaacaagctccgacacagagtccacgtgattgctaccaccatgagtacatggttctcccctctcgacccaggacttctttttgaatatccacggctcgatccagagggtggggcatgatccccctagcatagcgagctgcagcgggaactgtagctaggccttagcgtgccttggatactgcctgatagggcgacggcctagtcgtgtcggttctataggtagcacatacaaat

SEQ ID NO: 18236 - DNA, 668 bp, synthetic construct
  source 1..668: mol_type = other DNA
tttgaaatggggggctgggccctcatgtccagtccttcctttccccttccggggggtaaaccggctgtgtttgctagaggcacagaggagcaacatccaacctgcttttgtggggaacggtgcggctccaattcctgcgtcgccaaaggtgttagcgcacccaaacggcgcatctaccaatgctattggtgtggtctgcgagttctagcctactcgtttctcccttactcactcattcacgcacaaaaactgtgttgtaactacaagatttagccctcgcacgggatgtgcgataaccgcaagattgactcaagcgcggaaagcgctgtaaccacatgctgttagtccctttatggctgcgagatggctatccacctcggatcactgaactggagctcgaccctccttagtaagggaaccgagaggccttcttgcaacaagctccgacacagagtccacgtgattgctaccaccatgagtacatggttctcccctctcgacccaggacttctttttgaatatccacggctcgatccagagggtggggcatgatccccctagcatagcgagctgcagcgggaactgtagctaggccttagcgtgccttggataccgcctgatagggcgacggcctagtcgtgtcggttctataggtagcacatacaaat

SEQ ID NO: 18237 - DNA, 668 bp, synthetic construct
  source 1..668: mol_type = other DNA
tttgaaatggggggctgggccctcatgtccagtccttcctttccccttccggggggtaaaccggctgtgtttgctagaggcacagaggagcaacatccaacctgcttttgtggggaacggtgcggctccaattcctgcgtcgccaaaggtgttagcgcacccaaacggcgcatctaccaatgctattggtgtggtctgcgagttctagcctactcgtttctcccttactcactcattcacgcacaaaagctgtgttgtaactacaagatttagccctcgcacgggatgtgcgataaccgcaagattgactcaagcgcggaaagcgctgtaaccacatgctgttagtccctttatggctgcgagatggctatccacctcggatcactgaactggagcccgaccctccttagtaagggaaccgagaggccttcttgcaacaagctccgacacagagtccacgtgattgctaccaccatgagtacatggttctcccctctcgacccaggacttctttttgaatatccacggctcgatccagagggtggggcatgatccccctagcatagcgagctgcagcgggaactgtagctaggccttagcgtgccttggatactgcctgatagggcgacggcctagtcgtgtcggttctataggtagcacatacaaat

SEQ ID NO: 18238 - DNA, 668 bp, synthetic construct
  source 1..668: mol_type = other DNA
tttgaaatggggggctgggccctcatgcccagtccttcctttccccttccggggggtaaaccggctgtgtttgctagaggcacagaggagcaacatccaacctgcttttgtggggaacggtgcggctccgattcctgcgtcgccaaaggtgttagcgcacccaaacggcgcatctaccaatgctattggtgtggtctgcgagttctagcctactcgtttctcccccatccactcactcgcgcacaaaaagtgtgttgtgactacaagatttagccctcgcacgggatgtgcgataaccacaagattgactcaagcgcggaaagcgctgtaaccacatgctgttagtccctttatggctgcgagatggctatccacctcggatcactgaactggagctcgaccctccttagtaagggaaccgagaggccttcttgcaacaagctccgatacagagtccacgtgattgctaccaccatgagtacatggttctcccctctcgacccaggacttctttttgaatatccacggctcgatccagagggtggggcatgatccccctagcatagcgagctacagcgggaactgtagctaggccttagcgtgccttggatactgcctgatagggcgacggcctagtcgtgtcggttctataggtagcacatacaaat

SEQ ID NO: 18239 - DNA, 668 bp, synthetic construct
  source 1..668: mol_type = other DNA
tttgaaatggggggctgggccctcatgcccagtccttcctttccccttccggggggtaaaccggctgtgtttgctagaggcacagaggagcaacatccaacctgcttttgtggggaacggtgcggctccgattcctgcgtcgccaaaggtgttagcgcacccaaacggcgcatctaccaatgctattggtgtggtctgcgagttctagcctactcgtttctcccccatccactcactcgcgcacaaaaagtgtgttgtgactacaagatttagccctcgcacgggatgtgcgataaccacaagattgactcaagcgcggaaagcgctgtaaccacatgctgttagtccctttatggctgcgagacggctatccacctcggatcactgaactggagctcgaccctctttagtaagggaaccgagaggccttcttgcaacaagctccgacacagagtccacgtgattgctaccaccatgagtacatggttctcccctctcgacccaggacttctttttgaatatccacggctcgatccagagggtggggcatgatccccctagcatagcgagctacagcgggaactgtagctaggccttagcgtgccttggatactgcctgatagggcgacggcctagtcgtgtcggttctataggtagcacatataaat

SEQ ID NO: 18240 - DNA, 668 bp, synthetic construct
  source 1..668: mol_type = other DNA
tttgaaatggggggctgggccctcatgcccagtctttcctttccccttccggggggtaaaccggctgtgtttgctagaggcacagaggagcaacatccaacctgcttttgtggggaacggtgcggctccgattcctgcgtcgccaaaggtgttagcgcacccaaacggcgcatctaccaatgctattggtgtggtctgcgagttctagcctactcgtttctcccccatccactcactcgcgcacaaaaagtgtgttgtgactacaagatttagccctcgcacgggatgtgcgataaccacaagattgactcaagcgcggaaagcgctgtaaccacatgctgttagtccctttatggctgcgagatggctatccacctcggatcactgaactggagctcgaccctccttagtaagggaaccgagaggccttcttgcaacaagctccgacacagagtccacgtgattgctaccaccatgagtacatggttctcccctctcgacccaggacttctttttgaatatccacggctcgatccagagggtggggcatgatccccctagcatagcgagctacagcgggaactgtagctaggccttagcgtgccttggatactgcctgatagggcgacggcctagtcgtgtcggttctataggtagcacatataaat

SEQ ID NO: 18241 - DNA, 668 bp, synthetic construct
  source 1..668: mol_type = other DNA
tttgaaatggggggctgggccctcatgcctagtccttcctttccccttccggggggtaaaccggctgtgtttgctagaggcacagaggagcaacatccaacctgctcttgtggggaacggtgcggctccaattcctgcgtcgccaaaggtgttagcgcacccaaacggcgcatctaccaatgctattggtgtggtctgcgagttctagcctactcgtttctcccctatccactcactcacgcacaaaaagtgtgttgtaaccgcaagatttagccctcgcacgagatgtgcgataaccgcaagattgactcaagcgcggaaagcgctgtaaccacatgctgttagtccctttatggctgcgagatggctatccacctcggatcactgaactggagctcgaccctccttagtaagggaaccgagaggccttcttgcaacaagctccgacacagagtccacgtgattgctaccaccatgagtacatggttctcccctctcgacccaggacttctttttgaatatccacggctcggctcagagggtggggcatgatccccctagcatagcgagctacagcgggaactgtagctaggccttagcgtgctttggatactgcctgatagggcgacggcctagtcgtgtcggttctataggtagcacatacaaat

SEQ ID NO: 18242 - DNA, 668 bp, synthetic construct
  source 1..668: mol_type = other DNA
tttgaaatggggggctgggccctcatgcctagtccttcctttccccttccggggggtaaaccggctgtgtttgctagaggcacagaggagcaacatccaacctgctcttgtggggaacggtgcggctccaattcctgcgtcgccaaaggtgttagcgcacccaaacggcgcatctaccaatgctattggtgtggtctgcgagttctagcctactcgtttctcccctatccactcactcacgcacaaaaagtgtgttgtaaccgcaagatttagccctcgcacgagatgtgcgataaccgcaagattgtctcaagcgcggaaagcgctgtaaccacatgctgttagtccctttatggctgcgagatggctatccacctcggatcactgaactggagctcgaccctccttagtaagggaaccgagaggccttcttgcaacaagctccgacacagagtccacgtgattgctaccaccatgagtacatggttctcccctctcgacccaggacttctttttgaatatccacggctcgacccagagggtggggcatgatccccctagcatagcgagctacagcgggaactgtagctaggccttagcgtgctttggatactgcctgatagggcgacggcctagtcgtgtcggttctataggtagcacatacaaat

SEQ ID NO: 18243 - DNA, 668 bp, synthetic construct
  source 1..668: mol_type = other DNA
tttgaaatggggggctgggccctcatgcctagtccttcctttccccttccggggggtaaaccggctgtgtttgctagaggcacagaggagcaacatccaacctgctcttgtggggaacggtgcggctccaattcctgcgtcgccaaaggtgttagcgcacccaaacggcgcatctaccaatgctattggtgtggtctgcgagttctagcctactcgtttctcccctatccactcactcacgcacaaaaagtgtgttgtaaccgcaagatttagccctcgcacgagatgtgcgataaccgcaagattgactcaagcgcggaaagcgctgtaaccacatgctgttagtccctttatggctgcgagatggctatccacctcggatcactgaactggagctcgaccctccttagtaagggaaccgagaggccttcttgcaacaagctccgacacagagtccacgtgattgctaccaccatgagtacatggttctcccctctcgacccaggacttctttttgaatatccacggctcgacccagagggtggggcatgatccccctagcatagcgagctacagcgggaactgtagctaggccttagcgtgctttggatactgcctgatagggcgacggcctagtcgtgtcggttctataggtagcacatacaaat

SEQ ID NO: 18244 - DNA, 668 bp, synthetic construct
  source 1..668: mol_type = other DNA
tttgaaatggggggctgggccctcatgcccagtccttcctttccccttccggggggtaaaccggctgtgtttgctagaggcacagaggagcaacacccaacctgcttttgtggggaacggtgcggctccaattcctgcgtcgccaaaggtgttagcgcacccaaacggcgcatctaccaatgctattggtgtggtctgcgagttctagcctactcgtttctcccctatccactcactcacgcacaaaaagtgtgttgtaactacaagacttagccctcgcacgagatgtgcgataaccgcaagattgactcaagcgcggaaagcgctgtaaccacatgctgttagtccctttatggctgcgagatggctatccacctcggatcactgaactggagctcgaccctccttagtaagggaaccgagaggccttcttgcaacaagctccgacacagagtccacgtgattgctaccaccatgagtacatggttctcccctctcgacccaggacttctttttgaatatccacggctcgacccagagggtggggcatgatccccctagcatagcgagctacagcgggaactgtagctaggccttagcgtgctttggatactgcctgatagggcgacggcctagtcgtgtcggttctataggtagcacatacaaat

SEQ ID NO: 18245 - DNA, 668 bp, synthetic construct
  source 1..668: mol_type = other DNA
tttgaaatggggggctgggccctcatgcccagtccttcctttccccttccggggggtaaaccggctgtgtttgctagaggcacagaggagcaacacccaacctgcttttgtggggaacggtgcggctccaattcctgcgtcgccaaaggtgttagcgcacccaaacggcgcatctaccaatgctattggtgtggtctgcgagttctagcctactcgtttctcccctatccactcactcacgcacaaaaagtgtgttgtaactacaagacttagccctcgcacgagatgtgcgataaccgcaagattgactcaagcgcggaaagcgctgtaaccacatgctgttagtccctttatggctgcgagatggctatccacctcggatcactgaactggagctcgaccctccttagtaagggaaccgagaggccttcttgcatcaagctccgacacagagtccacgtgattgctaccaccatgagtacatggttctcccctctcgacccaggacttctttttgaatatccacggctcgacccagagggtggggcatgatccccctagcatagcgagctacagcgggaactgtagctaggccttagcgtgctttggatactgcctgatagggcgacggcctagtcgtgtcggttctataggtagcacatacaaat

SEQ ID NO: 18246 - DNA, 668 bp, synthetic construct
  source 1..668: mol_type = other DNA
tttgaaatggggggctgggccctcatgcccagtccttcctttccccttccggggggtaaaccggctgtgtttgctagaggcacagaggagcaacatccaacctgctcttgtggggaacggtgcggctccaattcctgcgtcgccaaaggtgttagcgcacccaaacggcgcatctaccaatgctattggtgtggtctgcgagttctagcctactcgtttctcccctattcactcactcacgcacaaaaagtgtgttgtaactacaaggcttagccctcgcacgagaagtgcgataaccgcaagattgactcaagcgcggaaagcgctgtaaccacatgctgttagtccctttatggctgcgagatggctatccacctcggatcactgaactggagctcgaccctccttagtaagggaaccgagaggccttcttgcaacaagctccgacacagagtccacgtgattgctaccaccatgagtacatggttctcccctctcgacccaggacttctttttgaatatccacggctcgacccagagggtggggcatgatccccctagcatagcgagctacagcgggaactgtagctaggccttagcgtgctttggatactgcctgatagggcgacggcctagtcgtgtcggttctataggtagcacatacaaat

SEQ ID NO: 18247 - DNA, 668 bp, synthetic construct
  source 1..668: mol_type = other DNA
tttgaaatggggggctgggccctcatgcccagtccttcctttccccttccggggggtaaaccggctgtgtttgctagaggcacagaggagcaacatctaacctgcttttgtggggaacggtgcggctccgattcctgcgtcgccaaaggtgttagcgcacccaaacggcgcatctaccaatgctattggtgtggtctgcgagttctagcctactcgtttctcccccatccactcactcgcgcacaaaaagtgtgttgtgactacaagatttagccctcgcacgggatgtgcgataaccacaagattgactcaagcgcggaaagcgctgtaaccacatgctgttagtccctttatggctgcgagatggctatccacctcggatcactgaactggagctcgaccctccttagtaagggaaccgagaggccttcttgcaacaagctccgacacagagtccacgtgattgctaccaccatgagtacatggttctcccctctcgacccaggacttctttttgaatatccacggctcgatccagagggtggggcatgatccccctagcatagcgagctacagcgggaactgtagctaggccttagcgtgccttggatactgcctgatagggcgacggcctagtcgtgtcggttctataggtagcacatacaaat

SEQ ID NO: 18248 - DNA, 668 bp, synthetic construct
  source 1..668: mol_type = other DNA
tttgaaatggggggctgggccctcatgcccagtccttcctttccccttccggggggtaaaccggctgtgtttgctagaggcacagaggagcaacatccaacctgcttttgtggggaacggtgcggctccaattcctgcgtcgccaaaggtgttagcgcacccaaacggcgcatctaccaatgctattggtgtggtctgcgagttctagcctactcgtttctcccctactcactcattcacacacaagaactgtgttgtgactacaagatttggccctcgcacgggatgtgcgataaccgcaagattgactcaagtgcggaaagcgctgtaaccacatgctgttagtccctttatggctgcgagatggctatccacctcgggtcactgaactggagctcgaccctccttagtaagggaaccgagaggccttcctgcaacaagctccgacacagagtccacgtgattgctaccaccatgagtacatggttctcccctctcgacccaggacttctttttgaatatccacggctcgatccagagggtggggcatgatccccctagcatagcgagctacagcgggaactgtagctaggccttagcgtgccttggatactgcctgatagggcgacggcctagtcgtgtcggttctataggtagcacatacaaat

SEQ ID NO: 18249 - DNA, 668 bp, synthetic construct
  source 1..668: mol_type = other DNA
tttgaaatggggggctgggccctcaagcccagtccttcctttccccttccggggggtaaaccggctgtgtttgctagaggcacagaggagcaacatccaacctgcttttgtggggaacggtgcggctccaattcctgcgtcgccaaaggtgttagcgcacccaaacggcgcatctaccaatgctattggtgtggtctgcgagttctagcctactcgtttctcccctactcactcattcacgcacaaaaactgtgttgtaactacaagatttagccctcgcacgggatgtgcgataaccgcaagattgactcaagcgcggaaagcgctgtaaccacatgctgttagtccctttatggctgcgagatggctatccacctcggatcactgaactggagctcgaccctccttagtaagggaaccgagaggccttcttgcaacaagctccgacacagagtccacgtgattgctaccaccatgagtacatggttctcccctctcgacccaggacttctttttgaatatccacggctcgatccagagggtggggcatgatccccctagcatagcgagctacagcgggaactgtagctaggccttagcgtgccttggatactgcctgatagggcgacggcctagtcgtgtcggttctataggtagcacatacaaat

SEQ ID NO: 18250 - DNA, 661 bp, synthetic construct
  source 1..661: mol_type = other DNA
aattgggggctgggccctgacgcccaacccttcctttccccttccggggggttaaccggctgtgtttgctagaggcacagaggggcaacatccaacctgcttttgtggggaacggtgcggctccgattcccgcgtcgccaaaggtgttagcgcacccaaacggcgcatctaccaatgttattggtgtggtctgcgagttctagcctactcgtttctcccccgaccattcactcgcccacgaaaagtgtgttgtaaccataagatttaacccccgcacgggatgtgcgataaccgtaagactgactcaagcgcggaaggcgctgtaaccacatgctgttagttcctttatggctgcaagatggctaccaacctcggatcactgaactggagctcgaccccccttagtaagggaaccgagaggccttcgtgcaaaaagctccgacacagagtccacgtgactgctaccaccatgagtacatggttctcccctctcgacccaggacttctttttgaatatccacggctcgatacagagggtggggcatgacccctagcatagcgagctacagcgggaactgtagctaggtcttagcgcaccttggatactgcctgatagggcgacggcctagtcgtgtcggttctataggtagcacatataaat

SEQ ID NO: 18251 - DNA, 668 bp, synthetic construct
  source 1..668: mol_type = other DNA
tttttgatggggggctgggccctcacgcccagtccttcctttccccttccggggggtaaaccggctgtgtttgctagaggcacagaggagcaacacccaacctgcttttgtggggaacggtgcggctccaattcctgcgtcgccaaaggtattagcgcacccaaacggcgcatctaccaatgctattggtgtggtctgcgagttctagcctactcgtttctcccctactcactcattcacgcacaaaaactgtgttgtaactacaagatttagccctcgcacgggatgtgcgacaaccgcaagattgactcaagcgcggaaagcgctgtaaccacacgttgttagtccctttatggctgcgagatggctatccacctcggatcactgaactggagctcgaccctccttagtaagggaaccgagaggccttcttgcaacaagctccgacacagagtccacgtgattgctaccaccatgagtacatggttctcccctctcgacccaggacttctttttgaatatccacggctcgatccagagggtggggcatgatccccctagcatagcgagctacagcgggaactgtagctaggccttagcgtgccttggatactgcctgatagggcgacggcctagtcgtgtcggttctataggtagcacatacaaat

SEQ ID NO: 18252 - DNA, 668 bp, synthetic construct
  source 1..668: mol_type = other DNA
tttgaaatggggggctgggccctcacgcccagtccttcctttccccttccggggggtaaaccggctgtgtttgctagaggcacagaggagcaacacccaacctgcttttgtggggaacggtgcggctccaattcctgcgtcgccaaaggtattagcgcacccaaacggcgcatctaccaatgctattggtgtggtctgcgagttctagcctactcgtttctcccctactcactcattcacgcacaaaaactgtgttgtaactacaagatttagccctcgcacgggatgtgcgacaaccgcaagattgactcaagcgcggaaagcgctgtaaccacacgttgttagtccctttatggctgcgagatggctatccacctcggatcactgaactggagctcgaccctccttagtaagggaaccgagaggccttcttgcaacaagctccgacacagagtccacgtgattgctaccaccatgagtacatggttctcccctctcgacccaggacttctttttgaatatccacggctcgatccagagggtggggcatgatccccctagcatagcgagctacagcgggaactgtagctaggccttagcgtgccttggatactgcctgatagggcgacggcctagtcgtgtcggttctataggtagcacatacaaat

SEQ ID NO: 18253 - DNA, 667 bp, synthetic construct
  source 1..667: mol_type = other DNA
ttgaaatggggggctgggccctcatgcccagtccttcctttccccttccggggggtaaaccggctgtgtttgctagaggcacagaggagcaacatccaacctgcttttgtggggaacggtgcggctccaattcctgcgtcgccaaaggtgttagcgcacccaaacggcgcatctaccaatgctattggtgtggtctgcgagttctagcctactcgtttctcccctactcactcattcacgcacaaaaactgtgttgtaactacaagatttagccctcgcacgggatgtgcgataaccgcaagattgactcaagcgcggaaagcgctgtaaccacatgctgttagtccctttatggctgcgagatggctatccacctcggatcactgaactggagctcgaccctccttagtaagggaaccgagaggccttcttgcaacaagctccgacacagagtccacgtgattgctaccaccatgagtacatggttctcccctctcgacccaggacttctttttgaatatccacggctcgatccagagggtggggcatgatccccctagcatagcgagctacagcgggaactgtagctaggccttagcgtgccttggatactgcctgatagggcgacggcctagtcgtgtcggttctataggtagcacatacaaat

SEQ ID NO: 18254 - DNA, 668 bp, synthetic construct
  source 1..668: mol_type = other DNA
tttgaaatggggggctgggccctcatgtccagtccttcctttccccttccggggggtaaaccggctgtgtttgctagaggcacagaggagcaacatccaacctgcttttgtggggaacggtgcggctccaattcctgcgtcgccaaaggtgttagcgcacccaaacggcgcatctaccaatgctattggtgtggtctgcgagttctagcctactcgtttctcccttactcactcattcacgcacaaaaactgtgttgtaactacaagatttagccctcgcacgggatgtgcgataaccgcaagattgactcaagcgcggaaagcgctgtaaccacatgctgttagtccctttatggctgcgagatggctatccacctcggatcactgaactggagctcgaccctccttagtaagggaaccgagaggccttcttgcaacaagctccgacacagagtccacgtgattgctaccaccatgagtacatggttctcccctctcgacccaggacttctttttgaatatccacggctcgatccagagggtggggcatgatccccctagcatagcgagctgcagcgggaactgtagctaggccttagcgtgccttggatactgcctgatagggcgacggcctagtcgtgtcggttctataggtagcacatacaaat

SEQ ID NO: 18255 - DNA, 668 bp, synthetic construct
  source 1..668: mol_type = other DNA
tttgaaatggggggctgggccctcatgtccagtccttcctttccccttccggggggtaaaccggctgtgtttgctagaggcacagaggagcaacatccaacctgcttttgtggggaacggtgcggctccaattcctgcgtcgccaaaggtgttagcgcacccaaacggcgcatctaccaatgctattggtgtggtctgcgagttctagcctactcgtttctcccttactcactcattcacgcacaaaaactgtgttgtaactacaagatttagccctcgcacgggatgtgcgataaccgcaagattgactcaagcgcggaaagcgctgtaaccacatgctgttagtccctttatggctgcgagatggctatccacctcggatcactgaactggagctcgaccctccttagtaagggaaccgagaggccttcttgcaacaagctccgacacagagtccacgtgattgctaccaccatgagtacatggttctcccctctcgacccaggacttctttttgaatatccacggctcgatccagagggtggggcatgatccccctagcatagcgagctgcagcgggaactgtagctaggccttagcgtgccttggatactgcctgatagggcgacggcctagtcgtgtcggttctatgggtagcacatacaaat

SEQ ID NO: 18256 - DNA, 668 bp, synthetic construct
  source 1..668: mol_type = other DNA
tttgaaatggggggctgggccctcatgcccagtccttcctttccccttccggggggtaaaccggctgtgtttgctagaggcacagaggagcaacatccaacctgcttttgtggggaacggtgcggctccaattcctgcgtcgccagaggtgttagcgcacccaaacggcgcatctaccaatgctattggtgtggtctgcgagttctagcctactcgtttctcccttactcactcattcgcgcacaaaaactgtgttgtaactacaagatttagccctcgcacgggatgtgcgataaccgcaagattgactcaagcgcggaaagcgctgtaaccacatgctgttagtccctttatggctgcgagatggctatccacctcggatcactgaactggagctcgaccctccttagtaagggaaccgagaggccttcttgcaacaagctccgacacagagtccacgtgattgctaccaccatgagtacatggttctcccctctcgacccaggacttctttttgaatatccacggctcgatccagagggtggggcatgatccccctagcatagcgagctgcagcgggaactgtagctaggccttagcgtgccttggatactgcctgatagggcgacggcctagtcgtgtcggttctataggtagcacatacaaat

SEQ ID NO: 18257 - DNA, 668 bp, synthetic construct
  source 1..668: mol_type = other DNA
tttgaaatggggggctgggccctcatgcccaacccttcctttccccttccggggggtaaaccggctgtgtttgctagaggcacagaggagcaacatccaacctgcttttgtggggaacggtgcggctccaattcctgcgtcgccaaaggtgttagcgcacccaaacggcgcatctaccaatgctattggtgtggtctgcgagttctagcctactcgtttcttccctgctcactcatttacacacaaaaactgtgttgtaactacaagatttggccctcgcacgggatgtgcgataatcgcaagactgactcaagcgcggaaagcgctgtaaccacatgctgttagtccctttatggctgcgagatggctatccacctcggatcactgaactggagctcgaccctccttagtaagggaaccgagaggccttcctgcaacaagctccgacacagagtccacgtgattgctaccaccatgagtacatggttctcccctctcgacccaggacttctttttgaatatccacggctcgatccagagggtggggcatgatccccctagcatagcgagctacagcgggaactgtagctaggccttagcgtgccttggatactgcctgatagggcgacggcctagtcgtgtcggttctataggtagcacatacaaat

SEQ ID NO: 18258 - DNA, 668 bp, synthetic construct
  source 1..668: mol_type = other DNA
tttgaaatggggggctgggccctcatgcccagtccttcctttccccttccggggggtaaaccggctgtgtttgctagaggcacagaggagcaacatccaacctgcttttgtggggaacggtgcggctccaattcctgcgtcgccaaaggtgttagcgcacccaaacggcgcatctaccaatgctattggtgtggtctgcgagttctagcctactcgtttctcccctactcactcattcacgcacaaaaactgtgttgtaaccacaagatttagccctcgcacgggatgtgcgataaccgcaagattgactcaagcgcggaaagcgctgtaaccacatgctgttagtccctttatggctgcgagatggctatccacctcggatcactgaactggagctcgaccctccttagtaagggaaccgagaggccttcttgcaacaagctccgacacagagtccgcgtgattgctaccaccatgagtacatggttctcccctctcgacccaggacttctttttgaatatccacggctcgatccagagggtggggcatgatccccctagcatagcgagctacagcgggaactgtagctaggccttagcgtgccttggatactgcctgatagggcgacggcctagtcgtgtcggttctataggtagcacatacaaat

SEQ ID NO: 18259 - DNA, 667 bp, synthetic construct
  source 1..667: mol_type = other DNA
ttgaaatggggggctgggccctcatgcccagtccttcctttccccttccggggggtaaaccggctgtgtttgctagaggcacagaggagcaacatccaacctgcttttgtggggaacggtgcggctccaattcctgcgtcgccaaaggtgttagcgcacccaaacggcgcatctaccaatgctattggtgtggtctgcgagttctagcctactcgtttctcccctactcactcattcacgcacaaaaactgtgttgtaactacaagatttagccctcgcacgggatgtgcgataaccgcaagattgactcaagcgcggaaagcgctgtaaccacatgctgttagtccctttatggctgcgagatggctatccacctcggatcactgaactggagctcgaccctccttagtaagggaaccgagaggccttcttgcaacaagctccgacacagagtccacgtgattgctaccaccatgagtacatggttctcccctctcgacccaggatttctttttgaatatccacggctcgatccagagggtggggcatgatccccctagcatagcgagctacagcgggaactgtagctaggccttagcgtgccttggatactgcctgatagggcgacggcctagtcgtgtcggttctataggtagcacatacaaat

SEQ ID NO: 18260 - DNA, 667 bp, synthetic construct
  source 1..667: mol_type = other DNA
tttgaaatggggggctgggccctcatgcccagtccttcctttccccttccggggggtaaaccggctgtgtttgctagaggcacagaggagcaacatccaacctgcttttgtggggaacggtgcggctccaattcctgcgtcgccaaaggtgttagcgcacccaaacggcgcatctaccaatgctattggtgtggtctgcgagttctagcctactcgtttctcccttactcactcattcacgcacaaaaactgtgttgtaactacaagatttagccctcgcacgggatgtgcgataaccgcaagattgactcaagcgcggaaagcgctgtaaccacatgctgttagtccctttatggctgcgagatggctatccacctcggatcactgaactggagctcgaccctccttagtaagggaaccgagaggccttcttgcaacaagctccgacacagagtccacgtgattgctaccaccatgagtacatggttctcccctctcgacccaggacttctttttgaatatccacggctcgatccagagggtggggcatgatccccctagcatagcgagctgcagcgggaactgtagctaggccttagcgtgccttgatactgcctgatggggcgacggcctagtcgtgtcggttctataggtagcacatacaaat

SEQ ID NO: 18261 - DNA, 649 bp, synthetic construct
  source 1..649: mol_type = other DNA
tgctgagcttctctaggagagcccttttcccagccagaggtggctggttaaataatacctattgtaacaagacatctaagatacaacaaccacacacctggtttccactggccgaaggcaactagcaataaggtaggtgggttcagacgcttaaagtgtgttgtacatattcttttctaacctgtgttctacacagggtggcagatggcgtgccataactctaatagtgagataccacgcttgtggaccttatgctcacacagccatcctctagtaagtttgtaagacgtctgatgacgtgtgggaacttgttggagataacagtttgctgcaaagcatcccactgccagcggatccacatctggtaacagatgcctctggggccaaaagccaaggtttaacagaccctttgggattggttcaaacctgaactgttatggaagacatttagtacctgctgatttggtagtaatgcaaacactagttgtaaggcccacgaaggatgcccagaaggtacccgtaggtaacaagtgacactatggatctgatctggggccagctacctctatctaggtgagttggttaaaaaacgtctagtgggccaaacccaggggggatccctggtttcctttttatttagataaccact

SEQ ID NO: 18262 - DNA, 667 bp, synthetic construct
  source 1..667: mol_type = other DNA
ttgaaagggggggctgggccctcatgcccagtccttcctttccccttccggggggtaaaccggctgtgtttgctagaggcacagaggagcaacatccaacctgcttttgtggggaacagtgcggctccaattcctgcgtcgccaaaggtgttagcgcacccaaacggcgcatctaccaatgctattggtgtggtctgcgagttctagcctactcgtttctcccctactcactcatttacacacaaaaactgtgttgtaactacaggatttggccctcgcacgggatgtgcgataaccgcaagattgactcaagcgcggaaagcgttgtaaccacatgctgttagtccctttatggctgtgagatggctatccacctcggatcactgaactggagctcgaccctccttagtaagggaaccgagaggccttcctgcaacaagctccgacacagagtccacgtgattgctaccaccatgagtacatggttctcccctctcgacccaggacttctttttgaatatccacggctcgatccagagggtggggcatgatccccctagcatagcgagctacagcgggaactgtagctaggccttagcgtgccttggatactgcctgatagggcgacggcctagtcgtgtcggttctataggtagcacatacaaat

SEQ ID NO: 18263 - DNA, 667 bp, synthetic construct
  source 1..667: mol_type = other DNA
ttgaaagggggggctgggccctcatgcccagtccttcctttccccttccggggggtaaaccggctgtgtttgctagaggcacagaggagcaacatccaacctgcttttgtggggaacagtgcggctccaattcctgcgtcgccaaaggtgttagcgcacccaaacggcgcatctaccaatgctattggtgtggtctgcgagttctagcctactcgtttctcccctactcactcatttacacacaaaaactgtgttgtaactacaagatttggccctcgcacgggatgtgcgataaccgcaagattgactcaagcgcggaaagcgttgtaaccacatgctgttagtccctttatggctgtgagatggctatccacctcggatcactgaactggagctcgaccctccttagtaagggaaccgagaggccttcctgcaacaagctccgacacagagtccacgtgattgctaccaccatgagtacatggttctcccctctcgacccaggacttctttttgaatatccacggctcgatccagagggtggggcatgatccccctagcatagcgagctacagcgggaactgtagctaggccttagcgtgccttggatactgcctgatagggcgacggcctagtcgtgtcggttctataggtagcacatacaaat

SEQ ID NO: 18264 - DNA, 667 bp, synthetic construct
  source 1..667: mol_type = other DNA
ttgaaagggggggctgggccctcatgcccagtccttcctttccccttccggggggtaaaccggctgtgtttgctagaggcacaggggagcaacatccaacctgcttttgtggggaacagtgcggctccaattcctgcgtcgccaaaggtgttagcgcacccaaacggcgcacctaccaatgctattggtgtggtctgcgagttctagcctactcgtttctcccctactcactcatttacacacaaaaactgtgttgtaactacaagatttggccctcgcacgggatgtgcgataaccgcaagattgactcaagcgcggaaagcgttgtaaccacatgctgttagtccctttatggctgtgagatggctatccacctcggatcactgaactggagctcgaccctccttagtaagggaaccgagaggccttcctgcaacaagctccgacacagagtccacgtgattgctaccaccatgagtacatggttctcccctctcgacccaggacttctttttgaatatccacggctcgatccagagggtggggcatgatccccctagcatagcgagctacagcgggaactgtagctaggccttagcgtgccttggatactgcctgatagggcgacggcctagtcgtgtcggttctataggtagcacatacaaat

SEQ ID NO: 18265 - DNA, 669 bp, synthetic construct
  source 1..669: mol_type = other DNA
tttgaaatggggggctgggccctcatgcccagtccttcctttccccttccggggggtaaaccggctgtgtttgctagaggcacagaggagcaacatccaacctgcttttgtggggaacggtgcggctccaatccctgcgtcgccaaaggtgttagcgcacccaaacggcgcatctaccaatgctattggtgtggtctgcgagttctagcctactcgtttcccccctactcactcattcacgcacaaaaagtgtgttgtaactacaagatttagccctcgcacgggatgtgcgataaccgcaagattgactcaagcgcggaaagcgctgtaaccacatgctgttagtcccttttaaggctgcgagatggctatccacctcggatcactgaactggagctcgaccctccttagtaagggaaccgagaggccttcttgcaacaagctccgacacagagtccacgtgattgctaccaccatgagtacatggttctcccctctcgacccaggacttctttttgaatatccacggctcgatccagagggtggggcatgatccccctagcatagcgagctacagcgggaactgtagctaggccttagcgtgccttggatactgcctgatagggcgacggcctagtcgtgtcggttctataggtagcacatacaaat

SEQ ID NO: 18266 - DNA, 667 bp, synthetic construct
  source 1..667: mol_type = other DNA
ttgaaagggggggctgggccctcatgcccagtccttcctttccccttccggggggtaaaccggctgtgtttgctagaggcacagaggagcaacatccaacctgcttttgtggggaacggtgcggctccaattcctgcgtcgccaaaggtgttagcgcacccaaacggcgcatctaccaatgctattggtgtggtctgcgagttctagcctactcgtttctcccctactcactcattcacgcacaaaaactgtgttgtaactacaagatttagccctcgcacgggatgtgcgataaccgcaagatcgactcaagcgcggaaagcgctgtaaccacatgctgttagtccctttatggctgcgagatggctatccacctcggatcactgaactggagctcgaccctccttagtaagggaaccgagaggccttcttgcaacaagctccgacacagagtccacgtgattgctaccaccatgagtacatggttctcccctctcgacccaggacttctttttgaatatccacggctcgatccagagggtggggcatgatccccctagcatagcgagctacagcgggaactgtagctaggccttagcgtgccttggatactgcctgatagggcgacggcctagtcgtgtcggttctataggtagcacatacaaat

SEQ ID NO: 18267 - DNA, 662 bp, synthetic construct
  source 1..662: mol_type = other DNA
aggaaggactgggcatgagggcccggccccccctttccccttccggggggtaaaccggctgtgtttgctagaggcacagaggagcaacatccaacctgcttttgtggggaacggtgcggctccaattcctgcgtcgccaaaggtgttagcgcacccaaacggcgcatctaccaatgctattggtgtggtctgcgagttctagcctactcgtttctcccctactcactcattcacgcacaaaaactgtgttgtaactacaagatttagccctcgcacgggatgtgcgataaccgcaagattgactcaagcgcggaaagcgctgtaaccacatgctgttagtccctttatggctgcgagatggctgtccacctcggatcactgaactggagctcgaccctccttagtaagggaaccgagaggccttcttgcaacaagctccgacacagagtccacgtgattgctaccaccatgagtacatggttctcccctctcgacccaggacttctttttgaatatccacggctcgatccagagggtggggcatgatccccctagcatagcgagctacagcgggaactgtagctaggccttagcgtgccttggatactgcctgatagggcgacggcctagtcgtgtcggttctataggtagcacatacaaat

SEQ ID NO: 18268 - DNA, 668 bp, synthetic construct
  source 1..668: mol_type = other DNA
ggggaaagggggggctgggccctcatgcccagtccttcctttccccttccggggggtaaaccggctgtgtttgctagaggcacagaggagcaacatccaacctgcttttgtggggaacggtgcggctccaattcctgcgtcgccaaaggtgttaacgcacccaaacggcgcatctaccaatgctattggtgtggtctgcgagttctagcctactcgtttctcccctactcactcattcacgcacaaaaactgtgttgtaactacaagatttagccctcgcacgggatgtgcgataaccgcaagattaactcaagcgcggaaagcgctgtaaccacatgctgttagtccctttatggctgcgagatggctatccacctcggatcactgaactggagctcgaccctccttagtaagggaaccgagaggccttcttgcaacaagctccgacacagagtccacgtgattgctaccaccatgagtacatggttctcccctctcgacccaggacttctttttgaatatccacggctcgatccagagggtggggcatgatccccctagcatagcgagctacagcgggaactgtagctaggccttagcgtgccttggatactgcctgatagggcgacggcctagtcgtgtcggttctataggtagcacatacaaac

SEQ ID NO: 18269 - DNA, 666 bp, synthetic construct
  source 1..666: mol_type = other DNA
tgaaagggggggctgggccctcatgcccagtccttcctttccccttccggggggtaaaccggctgtgtttgctagaggcacagaggagcaacatccaacctgcttttgtggggaacggtgcggctccaattcctgcgtcgccaaaggtgttaccgcacccaaacggcgcatctaccaatgcaattggtgtggtctgcgagttctagcctactcgtttctcccctactcactcattcacgcacaaaaactgtgttgtaactacaagatttagccctcgcacgagatgtgcgataaccgcaagattgactcaagcgcggaaagcgctgtaaccacatgctgttagtccctttatggctgcgagatggctatccacctcggatcactgaactggagctcgaccctccttagtaagggaaccgagaggccttcttgcaacaagctccgacacagagtccacgtgattgctaccaccatgagtacatggttctcccctctcgacccaggacttctttttgaatatccacggctcgatccagagggtggggcatgatccccctagcatagcgagctacagcgggaactgtagctaggccttagcgtgccttggatactgcctgatagggcgacggcctagtcgtgtcggttctataggtagcacatacaaat

SEQ ID NO: 18270 - DNA, 667 bp, synthetic construct
  source 1..667: mol_type = other DNA
ttgaaatggggggctgggccctcatgcccagtccttcctttccccttccggggggtaaaccggctgtgtttgctagaggcacagaggagcaacatccaacctgcttttgtggggaacggtgcggctccaattcctgcgtcgccaaaggtgttagcgcacccaaacggcgcatctaccaatgctattggtgtggtctgcgagttctagcctactcgtttctcccctactcactcattcacgcacaaaaactgtgttgtaactacaagatttagccctcgcacgggatgtgcgataaccgcaagatcgactcaagcgcggaaagcgctgtaaccacatgctgttagtccctttatggctgcgagatggctatccacctcggatcactgaactggagctcgaccctccttagtaagggaaccgagaggccttcttgcaacaagctccgacacagagtccacgtgattgctaccaccatgagtacatggttctcccctctcgacccaggacttctttttgaatatccacggctcgatccagagggtggggcatgatccccctagcatagcgagctacagcgggaactgtagctaggccttagcgtgccttggatactgcctgatagggcgacggcctagtcgtgtcggttctataggtagcacatacaaat

SEQ ID NO: 18271 - DNA, 667 bp, synthetic construct
  source 1..667: mol_type = other DNA
ttttgatggggggctgggccctcacgcccagtccttcctttccccttccggggggtaaaccggctgtgtttgctagaggcacagaggagcaacacccaacctgcttttgtggggaacggtgcggctccaattcctgcgtcgccaaaggtattagcgcacccaaacggcgcatctaccaatgctattggtgtggtctgcgagttctagcctactcgtttctcccctactcactcattcacgcacaaaaactgtgttgtaactacaagatttagccctcgcacgggatgtgcgacaaccgcaagattgactcaagcgcggaaagcgctgtaaccacacgttgttagtccctttatggctgcgagatggctatccacctcggatcactgaactggagctcgaccctccttagtaagggaaccgagaggccttcttgcaacaagctccgacacagagtccacgtgattgctaccaccatgagtacatggttctcccctctcgacccaggacttctttttgaatatccacggctcgatccagagggtggggcatgatccccctagcatagcgagctacagcgggaactgtagctaggccttagcgtgccttggatactgcctgatagggcgacggcctagtcgtgtcggttctataggtagcacatacaaat

SEQ ID NO: 18272 - DNA, 668 bp, synthetic construct
  source 1..668: mol_type = other DNA
tttgaaatggggggctgggccctcatgcccagtccttccttcccccttccggggggtaaaccggctgtgtttgctagaggcacagaggagtaacatccaacctgctcttgtggggaacggtgcggctccaattcctgcgtcgccaaaggtgttagcgcacccaaacggcgcatctaccaatgctattggtgtggtctgcgagttctagcctactcgtttctcccctatccactcattcacgcacaaaaagtgtgttgtaactacaagacttagcccccgcacgagatgtgcgataaccgcaagattgactcaagcgcggaaagcgctgtaaccacatgctgttagttcctttatggctgcgagatggctatccacctcggatcactgaactggagctcgaccctccttagtaagggaaccgagaggccttcttgcaacaagctccgacacagagtccacgtgactgctaccaccatgagtacatggttctcccctctcgacccaggacttctttttgaatatccacggctcgacccagagggtggggcatgatccccctagcatagcgagctacagcgggaactgtagctaggccttagcgtgctttggatactgcctgatagggcgacggcctagtcgtgtcggttctataggtagcacatacaaat

SEQ ID NO: 18273 - DNA, 666 bp, synthetic construct
  source 1..666: mol_type = other DNA
ttgaatggggggctgggccctcatgcccagtccttcctttccccttccggggggtaaaccggctgtgtttgctagaggcacagaggagcaacatccaacctgcttttgtggggaacggtgcggctccaattcctgcgtcgccaaaggtgttagcgcacccaaacggcgcatctaccaatgccattggtgtggtctgcgagttctagcctactcgtttttcccctactcactcattcacgcacaaaaagtgtgttgtaactacaagatttagccctcgcacgggatgtgcggtaaccacaagattgactcaagcgcggaaagcgctgtaaccacatgctgttagtccctttatggctgcgagatggctatccacctcggatcactgaactggagctcgaccctccttagtaagggaaccgagaggccttcttgcaacaagctccgacacagagtccacgtgattgctaccaccatgagtacatggttctcccctctcgacccaggacttctttttgaatatccacggctcgatccagagggtggggcatgatccccctagcatagcgagctacagcgggaactgtagctaggccttagcgtgccttggatactgcctgatagggcgacggcctagtcgtgtcggttctataggtagcacatacaaat

SEQ ID NO: 18274 - DNA, 668 bp, synthetic construct
  source 1..668: mol_type = other DNA
tttgaaatggggggctgggccctcatgcccagtccttccttcccccttccggggggtaaaccggctgtgtttgctagaggcacagaggagtaacatccaacctgctcttgtggggaacggtgcggctccaattcctgcgtcgccaaaggtgttagcgcacccaaacggcgcatctaccaatgctattggtgtggtctgcgagttctagcctactcgtttctcccctactcactcattcacgcacaaaaactgtgttgtaactacaagatttagccctcgcacgggatgtgcgataaccgcaagattgactcaagcgcggaaagcgctgtaaccacatgctgttagtccctttatggctgcgagatggctatccacctcggatcactgaactggagctcgaccctccttagtaagggaaccgagaggccttcttgcaacaagctccgacacagagtccacgtgattgctaccaccatgagtacatggttctcccctctcgacccaggacttctttttgaatatccacggctcgatccagagggtggggcatgatccccctagcatagcgagctacagcgggaactgtagctaggccttagcgtgccttggatactgcctgatagggcgacggcctagtcgtgtcggttctataggtagcacatacaaat

SEQ ID NO: 18275 - DNA, 620 bp, synthetic construct; identical to SEQ ID NO: 61
  source 1..620: mol_type = other DNA

SEQ ID NO: 18276 - DNA, 663 bp, synthetic construct
  source 1..663: mol_type = other DNA
ggggggctgggccctcatgcccagtccttcctttccccttccggggggtaaaccggctgtgtttgctagaggcacagaggagcaacatccaacctgcttttgtggggaacggtgcggctccaattcctgcgtcgccaaaggtgttagcgcacccaaacggcgcatctaccaatgctattggtgtggtctgcgagttctagcctactcgtttctcccctactcactcatttacgcacaaaaactgtgttataactacaagatttagccctcgcacgggatgtgcgataaccgcaagactgactcaagcgcggaaagcgctgtaaccacatgctgttagtccctttatggctgcgagatggctatccacctcggatcactgaactggagctcgaccctccttagtaagggaaccgagaggccttcttgcaacaagctccgacacagagtccacgtgattgctaccaccatgagtacatggttctcccctctcgacccaggacttcttttttgaatatccacggctcgatccagagggtgggggcatgatcccccctagcatagcgagctacagcgggaactgtagctaggccttagcgtgccttggatactgcctgatagggcgacggcctagtcgtgtcggttctataggtagcacatacaaat

SEQ ID NO: 18277 - DNA, 669 bp, synthetic construct
  source 1..669: mol_type = other DNA
tttgaaatggggggctgggccctcatgcccagtccttcctttccccttccggggggtaaaccggctgtgtttgctagaggcacagaggagcaacatccaacctgcttttgtggggaacggtgcggctccaattcctgcgtcgccaaaggtgttagcgcacccaaacggcgcatctaccaatgctattggtgtggtctgcgagttctagcctactcgtttctcccctactcactcattcacgcacaaaaagctgtgttgtaactacaagatttagccctcgcacgggatgtgcgataaccgcaagattgactcaagcgcggaaagcgctgtaaccacatgctgttagtccctttatggctgcgagatggctatccacctcggatcactgaactggagctcgaccctccttagtaagggaatcgagaggccttcttgcaacaagctccgacacagagtccacgtgactgctaccaccatgagtacatggttctcccctctcgacccaggacttctttttgaatatccacggctcgatccagagggtggggcatgatccccctagcatagcgagctacagcgggaactgtagctaggccttagcgtgccttggatactgcctgatagggcgacggcctagtcgtgtcggttctataggtagcgcatacaaat

SEQ ID NO: 18278 - DNA, 636 bp, synthetic construct
  source 1..636: mol_type = other DNA
agtccttcctttccccttccggggggtaaaccggctgtgtttgctagaggcacagaggagcaacatccaacctgcttttgtggggaacggtgcggctccaattcctgcgtcgccaaaggtgttagcgcacccaaacggcgcatctaccaatgctattggtgtggtctgcgagttctagcctactcgtttctcccctactcactcattcacacacaaaaactgtgttgtaactacaagatttggccctcgcacgggatgtgcgataaccgcaagattgactcaagcgcggaaagcgctgtaaccacatgctgttagtccctttatggctgcgagatggctatccacctcggatcactgaactggagctcgaccctccttagtaagggaaccgagaggccttcctgcaacaagctccgacacagagtccacgtgattgctaccaccatgagtacatggttctcccctctcgacccaggacttctttttgaatatccacggctcgatccagagggtggggcatgacccctagcatagcgagctacagcgggaactgtagctaggccttagcgtgccttggatactgcctgatagggcgacggcctagtcgtgtcggttctataggtagcacatacaaat

SEQ ID NO: 18279 - DNA, 638 bp, synthetic construct
  source 1..638: mol_type = other DNA
tccctttcccagccttgaggcggctggtcaataaaaacctcaatcgtaacaaacatctaagattattacattaaccccatgcctggtctccactagttgaaggcaacttgcaataaaatgagtggaaacaagacgcttaaagcatggtgtaaattaacttttctaacccgcattttgtgtggggtggcagatggcgtgccataattctattagtgagataccacgcttgtggaccttatgctcacacagccatcctctagtaagtttgtgagacgtctggtgacgtgtgggaacttattggaaacaacattttgctgtgaagcatcctattgccggcggaacaacacctggtaacaggtgcctccggggccaaaagccaaggtttagcagacccattaggattggttttcaaacctgaaatgttgtggaaaatacttagtacctaccgatctggtagtagtgcagacactagttgtaaggcccacgaaggatgcccagaaggtacccgtaggtaacaagtgacactatggatctgatctggggtcaggtacctctatcttggtggcctggttaaaaaacgtctagtgggccaaacccgggggggatccccggtttccttttattttatcactgccact

SEQ ID NO: 18280 - DNA, 678 bp, synthetic construct
  source 1..678: mol_type = other DNA
gcttggccgtcgggccttataccccgatttgctgagcttctctaggagagtccttttcccagccagaggtggctggtcaaataatacctattgtaacgaaacatctaagatacaacaaccacacacctggtctccactggctgaaggcaactagcaataaggcaggtgggttcagacgcttaaagtgtgttgtatatattcttttctaacctgtgttctacgcagggtggcagatggcgtgccataactctaatagtgagataccacgcttgtggaccttatgctcacacagccatcctctagtaagtttgtaagacgtctgatgacgtgtgggaacttgttggagataacagtttgctgcaaagcatcccactgccagcggatccacatctggtaacagatgcctctggggccaaaagccaaggtttaacagaccctttgggattggttcaaacctgaactgttatggaagacatttagtacctgctgatttggtagtaatgcaaacactagttgtaaggcccacgaaggatgcccagaaggtacccgtaggtaacaagtgacactatggatctgatctggggccagctacctctatctaggtgagttggttaaaaaacgtctagtgggccaaacccaggggggatccctggtttcctttttatttgagtagtcact

SEQ ID NO: 18281 - DNA, 257 bp, synthetic construct
  source 1..257: mol_type = other DNA
atgagctatccacaacccccacctggtgacaggagtggacgctgcgctggcacaggagttcattgaacagttcactgtcaagtaatgaagatgaagagcctattgtgctacggaggtttcctccggccctgtgaatgcggctaatcccaaccactggtccagtatccccaatccaggggatggctggtcgtaacgggtaacccggtggcggaaccgactactttcaggtgtccgtgtttccaatttattataatttc

SEQ ID NO: 18282 - DNA, 661 bp, synthetic construct
  source 1..661: mol_type = other DNA
ggggggctgggccctcatgcccagtccttcctttccccttccggggggttaaccggctgtgtttgctagaggcacagaggggcaacatccaacctgtttttgcggggaacggtgcggctccgattcctgcgtcgccaaaggtgttagcgcacccaaacggcgcatctaccaatgctattggtgtggtctgcgagttctagcctactcgtttctcccccaaccattcactcacccacgaaaagtgtgttgtaaccacaagatttaacccccgcacgagatgtgcgataaccgtaagattggctcaagcgcggaaagcgctgtaaccacatgctgttagtccctttatggctgcaagatggctacccacctcggatcactgaactggagctcgaccctccttagtaagggaaccgagaggccttcgtgcaacaagctccgacacagagtccacgtgactgctaccaccatgagtacatggttctcccctctcgacccaggacttctttttgaatatccacggctcgatccagagggtggggcatgatcccccctagcatagcgagctacagcgggaactgtagctaggccttagcgtgccttggatactgcctgatagggcgacggcctagtcgtgtcggttctataggtagcacatacaaat

SEQ ID NO: 18283 - DNA, 663 bp, synthetic construct
  source 1..663: mol_type = other DNA
gggggggggctgggccctcatgcccagtccttcctttccccttccggggggtaaaccggctgtgtttgctagaggcacagaggagcaacatccaacctgcttttgtggggaacggtgcggctccaattcctgcgttgccaaaggtgttagcgcacccaaacggcgcatctaccaatgctattggtgtggtctgcgagttctagcctactcgtttctcccctactcacttattcacacacaaaaactgtgttgtaactacaagatttggccttcgcacgggatgtgcgataaccgcaagattgactcaagcgcggaaagcgctgtaaccacatgctgttagtccctttatggctgcgagatggctatccacctcggatcactgaactggagctcgaccctccttagtaagggaaccgagaggccttcctgcaacaagctccgacacagagtccacgtgattgctaccaccatgagtacatggttctcccctctcgacccaggacttctttttgaatatccacggctcgatccagagggtggggcatgatccccctagcatagcgagctacagcgggaactgtagctaggccttagcgtgccttggatactgcctgatagggcgacggcctagtcgtgtcggttctataggtagcacatacaaat

SEQ ID NO: 18284 - DNA, 668 bp, synthetic construct
  source 1..668: mol_type = other DNA
tttgaaatggggggctgggccctcatgcccagtccttcctttccccttccggggggtaaaccggctgtgtttgctagaggcacagaggagtaacatccaacctgctcttgtggggaacggtgcggctccaattcctgcgtcgccaaaggtgttagcgcacccaaacggcgcatctaccaatgctattggtgtggtctgcgagttctagcctactcgtttctcccctatccactcattcacgcacaaaaagtgtgttgtaactacaagacttagcccccgcacgagatgtgcgataaccgcaagattgactcaagcgcggaaagcgctgtaaccacatgctgttagttcctttatggctgcgagatggctatccacctcggatcactgaactggagctcgaccctccttagtaagggaaccgagaggccttcttgcaacaagctccgacacagagtccacgtgactgctaccaccatgagtacatggttctcccctctcgacccaggacttctttttgaatatccacggctcgacccagagggtggggcatgatccccctagcatagcgagctacagcgggaactgtagctaggccttagcgtgctttggatactgcctgatagggcgacggcctagtcgtgtcggttctataggtagcacatacaaat

SEQ ID NO: 18285 - DNA, 643 bp, synthetic construct
  source 1..643: mol_type = other DNA
gcttctctaggagagcccttttcccagccagaggtggctggttaaatactacctatagtaacaaaacatctaagatacaacaaccacacacctggtttccactggccgaaggcaactagcaataaggcaggtgggttcagacgcttaaagtgtgttgtacatattcttttctaacctgtgttctacacagggtggcagatggcgtgccataactctaatagtgagataccacgcttgtggaccttatgctcacacagccatcctctagtaagtttgtgagacgtctgatgacgtgtgggaacttgttggagataacagtttgctgcaaagcatcccactgccagcggattcacatctggtaacagatgcctctggggccaaaagccaaggtttaacagaccctttgggattggttcaaacctgaactgttatggaagacatttagtacctgctgatttggtagtaatgcaaacactagttgtaaggcccacgaaggatgcccagaaggtacccgtaggtaacaagtgacactatggatctgatctggggccagctacctctatctaggtgagttggttaaaaaacgtctagtgggccaaacccaggggggatccctggtttcctttttatttagataaccact

SEQ ID NO: 18286 - DNA, 662 bp, synthetic construct
  source 1..662: mol_type = other DNA
aggaaggactgggcatgagggcccagccccccctttccccttccggggggtaaaccggctgtgtttgctagaggcacagaggagcaacatccaacctgcttttgtggggaacggtgcggctccaattcctgcgtcgccaaaggtgttagcgcacccaaacggcgcatctaccaatgctattggtgtggcctgcgagttctagcctactcgtttctcccctattcactcactcacgcacaaaaagtgtgttgtaactacaagatttagccctcgcacgggatgtgcgataaccgcaagattgactcaagcgcggaaagcgctgtaaccacatgctgttagtccctttatggctgcgagatggctatccacctcggatcactgaactggagctcgaccctccttagtaagggaaccgagaggccttcttgcaacaagctccgacacagagtccacgtgattgctaccaccatgagtacatggttctcccctctcgacccaggacttctttttgaatatccacggctcgatccagagggtggggcatgatccccctagcatagcgagctacagcgggaactgtagctaggccttagcgtgccttggatactgcctgatagggcgacggcctagtcgtgtcggttctataggtagcacatacaaat

SEQ ID NO: 18287 - DNA, 667 bp, synthetic construct
  source 1..667: mol_type = other DNA
tttgaaatgggggctgggccctcatgcccagtccttcctttccccttccggggggtaaaccggctgtgtttgctagaggcacagaggagtaacatccaacctgctcttgtggggaacggtgcggctccaattcctgcgtcgccaaaggtgttagcgcacccaaacggcgcatctaccaatgctattggtgtggtctgcgagttctagcctactcgtttctcccctatccactcattcacgcacaaaaagtgtgttgtaactacaagacttagcccccgcacgagatgtgcgataaccgcaagattgactcaagcgcggaaagcgctgtaaccacatgctgttagttcctttatggctgcgagatggctatccacctcggatcactgaactggagctcgaccctccttagtaagggaaccgagaggccttcttgcaacaagctccgacacagagtccacgtgactgctaccaccatgagtacatggttctcccctctcgacccaggacttctttttgaatatccacggctcgacccagagggtggggcatgatccccctagcatagcgagctacagcgggaactgtagctaggccttagcgtgctttggatactgcctgatagggcgacggcctagtcgtgtcggttctataggtagcacatacaaat

SEQ ID NO: 18288 - DNA, 660 bp, synthetic construct
  source 1..660: mol_type = other DNA
gggggggctgggccctgacgcccagcccttcctttcccccttccggggggttaaccggctgtgtttgctagaggcacagaggggcaccatccaacctgcttttgcggggaacggtgcggctccgattcctgcgccgccaaaggtgttagcgcacccaaacggcgcacctaccaatgttattggtgtggtctgcgagttctagcctactcgtttctcccctgaccatttactcgcccacgaaaagtgtgttgcaaccataagatttaacccccgcacgggatgtgcgataaccgtaagactggctcaagcgcggaaggcgctgtaaccacatgctgttagtccctttatggctgcaagatggctacccacctcggatcactgaactggagctcgaccctccttagtaagggaaccgagaggccttcgcgcaaaaagctccgacacagagtccacgtgattgctaccaccatgagtacatggttctcccctctcgacccaggacttctttttgaatatccacggctcgatccagagggtggggcatgacccctagcatagcgagctacagcgggaactgtagctaggtcttagcgtaccttggatactgcctgatagggcgacggcctagtcgtgtcggttctataggtagcacatacaaat

SEQ ID NO: 18289 - DNA, 662 bp, synthetic construct
  source 1..662: mol_type = other DNA
ggggggggctgggccctcatgcccagtccttcctttccccttccggggggtaaaccggctgtgtttgctagaggcacagaggagcaacatccaacctgcttttgtgtggaacggtgcggctccacttcctgcgtcgccaaaggtgttagcgcacccaaacggcgcatctaccaatgctattggtgtggtctgcgagttctagcctactcgtttctcccctactcactcattcacgcacaaaaactgtgttgtaactacaagatttagccctcgcacgggatgtgcgataaccgcaagattgactcaagcgcggaaagcgctgtaaccacatgctgttagtccctttatggctgcgagatggctatccacctcggatcactgaactggagctcgaccctccttagtaagggaaccgagaggccttcttgcaacaagctccgacacagagtccacgtgattgctaccaccatgagtacatggttctcccctctcgacccaggacttctttttgaatatccacggctcgatccagagggtggggcatgatccccctagcatagcgagctacagcgggaactgtagctaggccttagcgtgccttggatactgcctgatagggcgacggcctagtcgtgtcggttctataggtagcacatacaaat

SEQ ID NO: 18290 - DNA, 643 bp, synthetic construct
  source 1..643: mol_type = other DNA
cttctctaggagagcccttttcccagccagaggtggctggttaaataatacctattgtaacaaaacatctaagatacaacaaccacacacctggtttccactggccgaaggcaactagcaataaggcaggtgggttcagacgcttaaagtgtgttgtacatattcttttctaacctgtgttttacacagggtggcagatggcgtgccataactctaatagtgagataccacgcttgtggaccttatgctcacacagccatcctctagtaagtttgtgagacgtctgatgacgtgtgggaacttgttggagataacagtttgctgcaaagcatcccactgccagcggattcacatctggtaacagatgcctctggggccaaaagccaaggtttaacagaccctttgggattggttcaaacctgaactgttatggaagacatttagtacctgctgatttggtagtaatgcaaacactagttgtaaggcccacgaaggatgcccagaaggtacccgtaggtaacaagtgacactatggatctgatctggggccagctacctctatctaggtgagttggttaaaaaacgtctagtgggccaaacccaggggggatccctggtttcctttttaatttgagtaatcact

SEQ ID NO: 18291 - DNA, 668 bp, synthetic construct
  source 1..668: mol_type = other DNA
tttgaaatggggggctgggccctcatgcctagcccttcctttccccttccggggggtaaaccggctgtgtttgctagaggcacagaggagcaacacccaacctgcttttgtggggaacggtgcggctccaattcctgcgtcgccaaaggtgttagcgcacccaaacggcgcatctaccaatgctattggtgtggtctgcgagttctagcctactcgtttctcccctgctcactcatttacacacaaaaactgtgttgtaattacaagatttggccctcgcacgggatgtgcgataaccgtaagactgactcaagcgcggaaagcgctgtaaccacatgctgttagtccctttatggctgcgagatggctatccacctcggatcactgaactggagctcgaccctccttagtaagggaaccgagaggccttcctgcaacaagctccgacacagagtccacgtgactgctaccaccatgagtacatggttctcccctctcgacccaggacttctttttgaatatccacggctcgatccagagggtggggcatgatccccctagcatagcgagctacagcgggaactgtagctaggccttagcgtgccttggatactgcctgatagggcgacggcctagtcgtgtcggttctataggtagcacatacaaat

SEQ ID NO: 18292 - DNA, 658 bp, synthetic construct
  source 1..658: mol_type = other DNA
ggggctgggccctcatgcccagtctttcctttccccttccggggggtaaaccggctgtgtttgctagaggcacagtggagcaacatccaacctgcttttgtggggaacggtgcggctccaattcctgcgtcgccaaaggtgttagcgcacccaaacggcgcgtctaccaatgctattggtgtggtctgcgagttctagcctactcgtttctcccctactcactcattcacgcacaaaaactgtgttgtaactacaaggtttagccctcgcacgggatgtgcgataaccgcaagatcgactcaagcgcggaaagcgctgtaaccacatgctgttagtccctttatggctgcgagatggctacccacctcggatcactgaactggagctcgaccctccttagtaagggaaccgagaggccttcttgcaacaagctccgacacagagtccacgtgattgctaccaccatgagtacatggttctcccctctcgacccaggacttctttttgaatatccacggctcgatccagagggtggggcatgatccccctagcatagcgagctacagcgggaactgtagctaggccttagcgtgccttggatactgcctgatagggcgacggcctagtcgtgtcggttctataggtagcacatacaaat

SEQ ID NO: 18293 - DNA, 668 bp, synthetic construct
  source 1..668: mol_type = other DNA
tttgaaatggggggctgggccctcatgccaagcccttcctttccccttccggggggtaaaccggctgtgtttgctagaggcacagaggagcaacacccaacctgcttttgtggggaacggtgcggctccaattcctgcgtcgccaaaggtgttagcgcacccaaacggcgcatctaccaatgctattggtgtggtctgcgagttctagcctactcgtttctcccctgctcactcatttacacacaaaaactgtgttgtaactacaaggtttggccctcgcacgggatgtgcgataaccgtaagactgactcaagcgcggaaagcgctgtaaccacatgctgttagtccctttatggctgcgagatggctatccacctcggatcactgaactggagctcgaccctccttagtaagggaaccgagaggccttcctgcaacaagctccgacacagagtccacgtgattgctaccaccatgagtacatggttctcccctctcgacccaggacttctttttgaatatccacggctcgatccagagggtggggcatgatccccctagcatagcgagctacagcgggaactgtagctaggccttagcgtgccttggatactgcctgatagggcgacggcctagtcgtgtcggttctataggtagcacatacaaat

SEQ ID NO: 18294 - DNA, 658 bp, synthetic construct
  source 1..658: mol_type = other DNA
ggggggctgggccctgatgcccagtccttcctttccccttccggggggttaaccggctgtgtttgctagaggcacagaggggcaacatccaacctgtttttgcggggaacggtgcggctccgattcctgcgtcgccaaaggtgttagcgcacccaaacggcgcacctaccaatgttattggtgtggtctgcgagttctagcctactcgtttctcccccgaccattcactcacccacgaaaagtgtgttgtaaccataagatttaacccccgcacgggatgtgcgataaccgtaagactggctcaagcgcggaaagcgctgtaaccacatgctgttagtccctttatggctgcaagatggctacccacctcggatcactgaactggagctcgaccctccttagtaagggaaccgagaggccttcgtgcaacaagctccgacacagagtccacgtgactgctaccaccatgagtacatggttctcccctctcgacccaggacttctttttgaatatccacggctcgatccagagggtggggcatgacccctagcatagcgagctacagcgggaactgtagctaggccttagcgtgccttggatactgcctgatagggcgacggcctagtcgtgtcggttctataggtagcacatacaaat

SEQ ID NO: 18295 - DNA, 667 bp, synthetic construct; identical to SEQ ID NO: 809
  source 1..667: mol_type = other DNA

SEQ ID NO: 18296 - DNA, 655 bp, synthetic construct
  source 1..655: mol_type = other DNA
gctgggccctcatgcccagtccttcctttccccttccggggggtaaaccggctgtgtttgctagaggcacagaggagcaacatccaacctgcttttgtggggaacggtgcggctccaattcctgcgtcgccaaaggtgttaacgcacccaaacggcgcatctaccaatgctattggtgtggtctgcgagttctagcctactcgtttctcccctactcactcattcacgcacaaaaactgtgttgtaactacaagatttagccctcgcacgggatgtgcgataaccgcaagattaactcaagcgcggaaagcgctgtaaccacatgctgttagtccctttatggctgcgagatggctatccacctcggatcactgaactggagctcgaccctccttagtaagggaaccgagaggccttcttgcaacaagctccgacacagagtccacgtgattgctaccaccatgagtacatggttctcccctctcgacccaggacttctttttgaatatccacggctcgatccagagggtggggcatgatccccctagcatagcgagctacagcgggaactgtagctaggccttagcgtgccttggatactgcctgatagggcgacggcctagtcgtgtcggttctataggtagcacatacaaac

SEQ ID NO: 18297 - DNA, 637 bp, synthetic construct
  source 1..637: mol_type = other DNA
agtccctttcccagccctgaggcggctggtcaataaaagcctcaaatgtaactaacatctaagattgatttaataaccccatgcctgatccccaccagtcgaagacaactagtaataagacgggtggaataaggatgcttaaagcatggcgtaaatattcttttctaacccatgattccatggggtggcagatggcgtgccataactctattagtgagataccatgcttgtggaacttatgctcacacagccatcctctagtaagtttgtgagatgtctaatgacgtgtgggaacttatcggaagcaacaatttgccgtacggcatcctactgccagcggattcacacctggtaacaggtgcccctggggccaaaagccaaggtttaacagaccctttaggattggttaaaacctgaattgttgtggaagatactcagtacctgctgatttggtaataatgcaaacactagttgtaaggcccacgaaggatgcccagaaggtacccgtaggtaacaagtgacactatggatctgatctggggccaactacttctatcatggtgagttggtttaaaaacgtctagtgggccaaacccaggggggatccctggtttctttttatttcactactgccaat

SEQ ID NO: 18298 - DNA, 659 bp, synthetic construct
  source 1..659: mol_type = other DNA
gggggctgggccctgatgcccagtccttcctttccccttccggggggtaaaccggctgtgtttgctagaggcacagaggagcaacatccaacctgcttttgtggggaacggtgcggctccaattcctgcgtcgccaaaggtgttagcgcacccaaacggcgcatctaccaatgctattggtgtggtctgcgagttctagcctactcgtttctcccctactcactcattcacgcacaaaaactgtgttgtaactacaagatttagccctcgcacgggatgtgcgataaccgcaagattgactcaagcgcggaaagcgctgtaaccacatgctgttagtccctttatggctgcgagatggctatccacctcggatcactgaactggagctcgaccctccttagtaagggaaccgagaggccttcttgcaacaagctccgacacagagtccacgtgattgctaccaccatgagtacatggttctcccctctcgacccaggacttctttttgaatatccacggctcgatccagagggtggggcatgatccccctagcatagcgagctacagcgggaactgtagctaggccttagcgtgccttggatactgcctgatagggcgacggcctagtcgtgtcggttctataggtagcacatacaaat

SEQ ID NO: 18299 - DNA, 655 bp, synthetic construct
  source 1..655: mol_type = other DNA
gctgggccctcatgcccagtccttcctttccccttccggggggtaaaccggctgtgtttgctagaggcacagaggagcaacatccaacctgcttttgtggggaacggtgcggctccaattcccgcgtcgccaaaggtgttagcgcacccaaacggcgcatctaccaatgctattggtgtggtctgcgagttctagcctactcgtttctcccctactcactcattcacgcacaaaaactgtgttgtaactacaagatttagccctcgcacgggatgtgcgataaccgcaagattgactcaagcgcggaaagcgctgtaaccacatgctgttagtccctttatggctgcgagatggctatccacctcggatcactgaactggagctcgaccctccttagtaagggaaccgagaggccttcttgcaacaagctccgacacagagtccacgtgattgctaccaccatgagtacatggttctcccctctcgacccaggacttctttttgaatatccacggctcgatccagagggtggggcatgatccccctagcatagcgagctacagcgggaactgtagctaggccttagcgtgccttggatactgcctgatagggcgacggcctagtcgtgtcggttctataggtagcacatacaaat

SEQ ID NO: 18300 - DNA, 500 bp, synthetic construct; identical to SEQ ID NO: 527
  source 1..500: mol_type = other DNA

SEQ ID NO: 18301 - DNA, 637 bp, synthetic construct
  source 1..637: mol_type = other DNA
cagtccttcctttccccttccggggggtaaaccggctgtgtttgctagaggcacagaggagcaacatccaacctgcttttgtggggaacggtgcggctccaattcctgcgtcgccaaaggtgttagcgcacccaaacggcgcatctaccaatgctattggtgtggtctgcgagttctagcctactcgtttctcccctactcactcattcacgcacaaaaactgtgttgtaactacaagatttagccctcgcacgggatgtgcgataaccgcaagattgactcaagcgcggaaagcgctgtaaccacatgctgttagtccctttatggctgcgagatggctatccacctcggatcactgaactggagctcgaccctccttagtaagggaaccgagaggccttcttgcaacaagctccgacacagagtccacgtgattgctaccaccatgagtacatggttctcccctctcgacccaggacttctttttgaatatccacggctcgatccagagggtggggcatgacccctagcatagcgagctacagcgggaactgtagctaggccttagcgtgccttggatactgcctgatagggcgacggcctagtcgtgtcggttctataggtagcacatacaaat

SEQ ID NO: 18302 - DNA, 544 bp, synthetic construct; identical to SEQ ID NO: 22
  source 1..544: mol_type = other DNA

SEQ ID NO: 18303 - DNA, 654 bp, synthetic construct
  source 1..654: mol_type = other DNA
gccctcatgcccagtccttcctttccccttccggggggtaaaccggctgtgtttgctagaggcacagaggagcaacatctaacctgcttttgcggggaacggtgcggctccgattcctgcgtcgccaaaggtgttagcgcacccaaacggcgcatctaccaacgctattggtgtggtctgcgagttctagcctactcgtttctcccccatccactcactcgcgcacaaaaaaaaagtgtgttgtgactacaagatttagccctcgcacgggatgtgcgataaccacaggatcgactcaagcgcggaaagcgctgtaaccacatgctgttagtccctttatggctgcgagatggctatccacctcgggtcactgaactggagctcgaccctccttagtaagggaaccgagaggccttcttgcaacaagctccgacacagagtccacgtgattgctaccaccatgagtacatggttctcccctctcgacccaggacttctttttgaatatccacggctcgatccagagggtggggcatgatccccctagcatagcgagctacagcgggaactgtagctaggccttagcgtgccttggatactgcctgatagggcgacggcctagtcgtgtcggttctataggtagcacatacaaat

SEQ ID NO: 18304 - DNA, 654 bp, synthetic construct
  source 1..654: mol_type = other DNA
ctgggccctcatgcccagtccttcctttccccttccggggggtaaaccggctgtgtttgctagaggcacagaggagcaacatccaacctgcttttgtggggaacggtgcggctccaattcctgcgtcgccaaaggtgttagcgcacccaaacggcgcatctaccaatgctattggtgtggtctgcgagttctagcctactcgtttctcccctatccactcactcacgcacaaaaagtgtgctgtaattacaagatttagccctcgcacgagatgtgcgataaccgcaagattgactcaagcgcggaaagcgctgtaaccacatgctgttagtcccttcatggctgcgagatggctatccacctcggatcactgaactggagctcgaccctccttagtaagggaaccgagaggccttcttgcaacaagctccgacacagagtccacgtgattgctaccaccatgagtacatggttctcccctctcgacccaggacttctttttgaatatccacggctcgatccagagggtggggcatgatccccctagcatagcgagctacagcgggaactgtagctaggccttagcgtgccttggatactgcctgatagggcgacggcctagtcgtgtcggttctataggtagcacatacaaat

SEQ ID NO: 18305 - DNA, 654 bp, synthetic construct
  source 1..654: mol_type = other DNA
ctgggccctcatgcccagtccttcctttccccttccggggggtaaaccggctgtgtttgctagaggcacagaggagcaacatccaacctgcttttgtggggaacggtgcggctccaattcctgcgtcgccaaaggtgttagcgcacccaaacggcgcatctaccaatgctattggtgtggtctgcgagttctagcctactcgtttctcccttatccactcactcacgcacaaaaagtgtgctgtaactacaagatttagccctcgcacgagatgtgcgataaccgcaagattgactcaagcgcggaaagcgctgtaaccacatgctgttagtcccttcatggctgcgagatggctatccacctcggatcactgaactggagctcgaccctccttagtaagggaaccgagaggccttcttgcaacaagctccgacacagagtccacgtgattgctaccaccatgagtacatggttctcccctctcgacccaggacttctttttgaatatccacggctcgatccagagggtggggcatgatccccctagcatagcgagctacagcgggaactgtagctaggccttagcgtgccttggatactgcctgatagggcgacggcctagtcgtgtcggttctataggtagcacatacaaat

SEQ ID NO: 18306 - DNA, 561 bp, synthetic construct; identical to SEQ ID NO: 610
  source 1..561: mol_type = other DNA

SEQ ID NO: 18307 - DNA, 663 bp, synthetic construct
  source 1..663: mol_type = other DNA
aaggaaggactgggcatgagggcccagcccttcctttccccttccggggggtaaaccggctgtgtttgctagaggcacagaggagcaacatccaacctgcttttgtggggaacggtgcggctccaattcctgcgtcgccaaaggtgttagcgcacccaaacggcgcatctaccaatgctattggtgtggtctgcgagttctagcctactcgtttctcccctactcactcattcacgcacaaaaactgtgttgtaattacaagatttagccctcgcacgggatgtgcgataaccgcaagattgactcaagcgcggaaagcgctgtaaccacatgctgttagtccctttatggctgcgagatggctatccacctcggatcactgaactggagctcgaccctccttagtaagggaaccgagaggccttcttgcaacaagctccgacacagagtccacgtgattgctaccaccatgagtacatggttctcccctctcgacccaggacttctttttgaatatccacggctcgatccagagggtggggcatgatccccctagcatagcgagctacagcgggaactgtagctaggccttagcgtgccttggatactgcctgatagggcgacggcctagtcgtgtcggttctataggtagcacatataaat

SEQ ID NO: 18308 - DNA, 663 bp, synthetic construct
  source 1..663: mol_type = other DNA
aaggaaggactgggcatgagggcccagcccttcctttccccttccggggggtaaaccggctgtgtttgctagaggcacagaggagcaacatccaacctgcttttgtggggaacggtgcggctccaattcctgcgtcgccaaaggtgttagcgcacccaaacggcgcatctaccaatgctattggtgtggtctgcgagttctagcctactcgtttctcccctactcactcattcacacacaaaaactgtgttgtaactacaagatgtagccctcgcacgggatgtgcgataaccgcaagattgactcaagcgcggaaagcgctgtaaccacatgctgttagtccctttatggctgcgagatggctatccacctcggatcactgaactggagctcgaccctccttagtaagggaaccgagaggccttcttgcaacaagctccgacacagagtccacgtgattgctaccaccatgagtacatggttctcccctctcgacccaggacttctttttgaatatccacggctcgatccagagggtggggcatgatccccctagcatagcgagctacagcgggaactgtagctaggccttagcgtgccttggatactgcctgatagggcgacggcctagtcgtgtcggttctataggtagcacatacaaat

SEQ ID NO: 18309 - DNA, 663 bp, synthetic construct
  source 1..663: mol_type = other DNA
aaggaaggactgggcatgagggcccagcccttcctttccccttccggggggtaaaccggctgtgtttgctagaggcacagaggagcaacatccaacctgcttttgtggggaacggtgcggctccaattcctgcgtcgccaaaggtgttagcgcacccaaacggcgcatctaccaatgctattggtgtggtctgcgagttctagcctactcgtttttcccctactcactcattcacacacaaaaactgtgttgtaactacaagatttggccctcgcacgggatgtgcgataaccgcaagattgactcaagcgcggaaagcgctgtaaccacatgctgttagtccctttatggctgcgagatggctatccacctcggatcactgaactggagctcgaccctccttagtaagggaaccgagaggccttcctgcaacaagctccgacacagagtccacgtgattgctaccaccatgagtacatggttctcccctctcgacccaggacttctttttgaatatccacggctcgatccagagggtggggcatgatccccctagcatagcgagctacagcgggaactgtagctaggccttagcgtgccttggatactgcctgatagggcgacggcctagtcgtgtcggttctataggtagcacatacaaat

SEQ ID NO: 18310 - DNA, 663 bp, synthetic construct
  source 1..663: mol_type = other DNA
aaggaaggactgggcatgagggcccagcccttcctttccccttccggggggtaaaccggctgtgtttgctagaggcacagaggagcaacatccaacctgcttttgtggggaacggtgcggctccaattcctgcgtcgccaaaggtgttagcgcacccaaacggcgcatctaccaatgctattggtgtggtctgcgagttctagcctactcgtttctcccctactcactcattcacgcacaaaaactgtgttgtaactacaagatttagccctcgcacgggatgtgcgataaccgcaagattgactcaagcgcggaaagcgctgtaaccacatgctgttagtccctttatggctgcgggatggctatccacctcggatcactgaactggagctcgaccctccttagtaagggaaccgagaggccttcttgcaacaagctccgacacagagtccacgtgattgctaccaccatgagtacatggttctcccctctcgacccaggacttctttttgaatatccacggctcgatccagagggtggggcatgatccccctagcatagcgagctacagcgggaactgtagctaggccttagcgtgccttggatactgcctgatagggcgacggcctagtcgtgtcggttctataggtagcacatacaaat

SEQ ID NO: 18311 - DNA, 677 bp, synthetic construct; identical to SEQ ID NO: 88
  source 1..677: mol_type = other DNA

SEQ ID NO: 18312 - DNA, 663 bp, synthetic construct
  source 1..663: mol_type = other DNA
aaggaaggactgggcatgagggcccagcccttcctttccccttccggggggtaaaccggctgtgtttgctagaggcacagaggagcaacatccaacctgcttttgtggggaacggtgcggctccaattcctgcgtcgccaaaggtgttagcgcacccaaacggcgcatctaccaatgctattggtgtggtctgcgagttctagcctactcgtttctcccctattcactcactcacgcacaaaaagtgtgttgtaactacaagatttagccctcgcacgggatgtgcgataaccgcaagattgactcaagcgcggaaagcgctgtaaccacatgctgttagtccctttatggctgcgagatggctatccacctcggatcactgaactggagctcgaccctccttagtaagggaaccgagaggccttcttgcaacaagctccgacacagagtccacgtgattgctaccaccatgagtacatggttctcccctctcgacccaggacttctttttgaatatccacggctcgatccagagggtggggcatgatccccctagcatagcgagctacagcgggaactgtagctaggccttagcgtgccttggatactgcctgatagggcgacggcctagtcgtgtcggttctataggtagcacatacaaat

SEQ ID NO: 18313 - DNA, 654 bp, synthetic construct
  source 1..654: mol_type = other DNA
ctgggccctcatgcccagtccttcctttccccttccggggggtaaaccggctgtgtttgctagaggcacagaggagcaacatccaacctgcttttgtggggaacggtgcggctccaattcccgcgtcgccaaaggtgttagcgcacccaaacggcgcatctaccaatgctattggtgtggtctgcgagttctagcctactcgtttctcccctactcactcattcacgcacaaaaactgtgttgtaactacaagatttagccctcgcacgggatgtgcgataaccgcaagattgactcaagcgcggaaagcgctgtaaccacatgctgttagtccctttatggctgcgagatggctatccacctcggatcactgaactggagctcgaccctccttagtaagggaaccgagaggccttcttgcaacaagctccgacacagagtccacgtgattgctaccaccatgagtacatggttctcccctctcgacccaggacttctttttgaatatccacggctcgatccagagggtggggcatgatccccctagcatagcgagctacagcgggaactgtagctaggccttagcgtgccttggatactgcctgatagggcgacggcctagtcgtgtcggttctataggtagcacatacaaat

SEQ ID NO: 18314 - DNA, 650 bp, synthetic construct
  source 1..650: mol_type = other DNA
gccctcatgcccagtccttcctttccccttccggggggtaaaccggctgtgtttgctagaggcacagaggagcaacatccaacctgcttttgtggggaacggtgcggctccaattcctgcgtcgccaaaggtgttagcgcacccaaacggcgcatctaccaatgccattggtgtggtctgcgagttctagcctactcgtttttcccctactcactcattcacgcacaaaaagtgtgttgtaactacaagatttagccctcgcacgggatgtgcggtaaccgcaagattgactcaagcgcggaaagcgctgtaaccacatgctgttagtccctttatggctgcgagatggctatccacctcggatcactgaactggagctcgaccctccttagtaagggaaccgagaggccttcttgcaacaagctccgacacagagtccacgtgattgctaccaccatgagtacatggttctcccctctcgacccaggacttctttttgaatatccacggctcgatccagagggtggggcatgatccccctagcatagcgagctacagcgggaactgtagctaggccttagcgtgccttggatactgcctgatagggcgacggcctagtcgtgtcggttctataggtagcacatacaaat

SEQ ID NO: 18315 - DNA, 662 bp, synthetic construct
  source 1..662: mol_type = other DNA
aggaaggactgggcatgagggcccagtcccccctttccccttccggggggtaaaccggctgtgtttgctagaggcacagaggagcaacatccaacctgcttttgtggggaacggtgcggctccaattcctgcgtcgccaaaggtgttagcgcacccaaacggcgcatctaccaatgctattggtgtggtctgcgagttctagcctactcgtttctcccctactcactcattcacacacaaaaactgtgttgtaactacaagatttagccctcgcacgggatgtgcgataaccgcaagattgactcaagcgcggaaagcgctgtaaccacatgctgttagtccctttatggctgcgagatggctatccacctcggatcactgaactggagctcgaccctccttagtaagggaaccgagaggccttcttgcaacaagctccgacacagagtccacgtgattgctaccaccatgagtacatggttctcccctctcgacccaggacttctttttgaatatccacggctcgatccagagggtggggcatgatccccctagcatagcgagctacagcgggaactgtagctaggccttagcgtgccttggatactgcctgatagggcgacggcctagtcgtgtcggttctataggtagcacatacaaat

SEQ ID NO: 18316 - DNA, 650 bp, synthetic construct
  source 1..650: mol_type = other DNA
gccctcatgcccagtccttcctttccccttccggggggtaaaccggctgtgtttgctagaggcacagaggagcaacatccaacctgcttttgtggggaacggtgcggctccaattcctgcgtcgccaaaggtgttagcgcacccaaacggcgcatctaccaatgctattggtgtggtctgcgagttctagcctactcgtttcttccctgctcactcaattagacacaaaaactgtgttgtagctacaagatttggccctcgcacgggatgtgcgataaccgcaagactgactcaagcgcggaaagcgctgtaaccacatgctgttagtccctttatggctgcgagatggctatccacctcggatcactgaactggagctcgaccctccttagtaagggaaccgagaggccttcctgcaacaagctccgacacagagtccacgtgattgctaccaccatgagtacatggttctcccctctcgacccaggacttctttttgaatatccacggctcgatccagagggtggggcatgatccccctagcatagcgagctacagcgggaactgtagctaggccttagcgtgccttggatactgcctgatagggcgacggcctagtcgtgtcggttctataggtagcacatacaaat

SEQ ID NO: 18317 - DNA, 650 bp, synthetic construct
  source 1..650: mol_type = other DNA
gccctcatgcccagtccttcctttccccttccggggggtaaaccggctgtgtttgctagaggcacagaggagcaacatccaacctgcttttgtggggaacggtgcggctccaattcctgcgccgccaaaggtgttagcgcacccaaacggcgcatctaccaatgctattggtgtggtctgcgagttctagcctactcgtttctcccctactcactcattcacgcacaaaaactgtgttgtaactacaagatttagccctcgcacgggatgtgcgataaccgcaagattgactcaagcgcggaaagcgctgtaaccacatgctgttagtccctttatggctgtgagatggctatccacctcggatcactgaactggagctcgaccctccttagtaagggaaccgagaggccttcttgcaacaagctccggcacagagtccacgtgattgctaccaccatgagtacatggttctcccctctcgacccaggacttctttttgaatatccacggctcgatccagagggtggggcatgatccccctagcatagcgagctacagcgggaactgtagctaggccttagcgtgccttggatactgcctgatagggcgacggcctagtcgtgtcggttctataggtagcacatacaaat

SEQ ID NO: 18318 - DNA, 650 bp, synthetic construct
  source 1..650: mol_type = other DNA
gccctcatgcccagtccttcctttccccttccggggggtaacccggctgtgtttgctagaggcacagaggagcaacatccaacctgcttttgtggggaacggtgcggctccaattcctgcgtcgccaaaggtgttagcgcacccaaacggcgcatctaccaatgctattggtgtggtctgcgagttctagcctactcgtttctcccctactcactcatttacgcacaaaaactgtgttataactacaagatttagccctcgcacgggatgtgcgataaccgcaagattgactcaagcgcggaaagcgctgtaaccacatgctgttagtccctttatggctgcgagatggctatccacctcggatcactgaactggagctcgaccctccttagtaagggaaccgagagaccttcttgcaacaagctccgacacagagtccacgtgattgctaccaccatgagtacatggttctcccctctcgacccaggacttctttttgaatatccacggctcgatccagagggtggggcatgatccccctagcatagcgagctacagcgggaactgtagctaggccttagcgtgccttggatactgcctgatagggcgacggcctagtcgtgtcggttctataggtagcacatataaat

SEQ ID NO: 18319 - DNA, 650 bp, synthetic construct
  source 1..650: mol_type = other DNA
gccctcatgcccagtccttcctttccccttccggggggtaacccggctgtgtttgctagaggcacagaggagcaacatccaacctgcttttgtggggaacggtgcggctccaattcctgcgtcgccaaaggtgttagcgcacccaaacggcgcatctaccaatgctattggtgtggtctgcgagttctagcctactcgtttctcccctactcactcatttacgcacaaaaactgtgttataactacaagatttagccctcgcacgggatgtgcgataaccgcaagattgactcaagcgcggaaagcgctgtaaccacatgctgttagtccctttatggctgcgagatggctatccacctcggatcactgaactggagcccgaccctccttagtaagggaaccgagaggccttcttgcaacaagctccgacacagagtccacgtgattgctaccaccatgagtacatggttctcccctctcgacccaggacttctttttgaatatccacggctcgatccagagggtggggcatgatccccctagcatagcgagctacagcgggaactgtagctaggccttagcgtgccttggatactgcctgatagggcgacggcctagtcgtgtcggttctataggtagcacatataaat

SEQ ID NO: 18320 - DNA, 663 bp, synthetic construct
  source 1..663: mol_type = other DNA
aaggaaggactgggcatgagggcccagccccccctttccccttccggggggtaaaccggctgtgtttgctagaggcacagaggagcaacatccaacctgcttttgtggggaacggtgcggctccaattcctgcgtcgccaaaggtgttagcgcacccaaacggcgcatctaccaatgctattggtgtggtctgcgagttctagcctactcgtttctcccctactcactcactcacgcacaaaaagtgtgttgtaactacaagatttagccctcgcacgggatgtgcgataaccgcaagattgactcaagcgcggaaagcgctgtaaccacatgctgttagtccctttatggctgcgagatggctatccacctcggatcactgaactggagctcgaccctccttagtaagggaaccgagaggccttcttgcaacaagctccgacacagagtccacgtgattgctaccaccatgagtacatggttctcccctctcgacccaggacttctttttgaatatccacggctcgatccagagggtggggcatgatccccctagcatagcgagctacagcgggaactgtagctaggccttagcgtgccttggatactgcctgatagggcgacggcctagtcgtgtcggttctataggtagcacatacaaat

SEQ ID NO: 18321 - DNA, 663 bp, synthetic construct
  source 1..663: mol_type = other DNA
aaggaaggactgggcatgagggcccagccccccctttccccttccggggggtaaaccggctgtgtttgctagaggcacagaggagcaacatccaacctgcttttgtggggaacggtgcggctccaattcctgcgtcgccaaaggtgttagcgcacccaaacggcgcatctaccaatgctattggtgtggtctgcgagttctagcctactcgtttctcccctactcactcattcacacacaaaaactgtgttgtaactacaagatttggccctcgcacgggatgtgcgataaccgcaagattgactcaagcgcggaaagcgctgtaaccacatgctgttagtccctttatggctgcgagatggctatccacctcggatcactgaactggagctcgaccctccttagtaagggaaccgagaggccttcctgcaacaagctccgacacagagtccacgtgattgctaccaccatgagtacatggttctcccctctcgacccaggacttctttttgaatatccacggctcgatccagagggtggggcatgatccccctagcatagcgagctacagcgggaactgtagctaggccttagcgtgccttggatactgcctgatagggcgacggcctagtcgtgtcggttctataggtagcacatacaaat

SEQ ID NO: 18322 - DNA, 663 bp, synthetic construct
  source 1..663: mol_type = other DNA
aaggaaggactgggcatgagggcccagcccttcctttccccttccggggggtaaaccggctgtgtttgctagaggcacagaggagcaacatccaacctgcttttgtggggaacggtgcggctccaattcctgcgtcgccaaaggtgttagcgcacccaaacggcgcatctaccaatgctattggtgtggtctgcgagttctagcctactcgtttctcccctattcactcattcacgcacaaaaagtgtgttttaactacaagatttagccctcgcacgggatgtgcgataaccgcaagattgactcaagcgcggaaagcgctgtaaccacatgctgttagtccctttatggctgcgagatggctatccacctcggatcactgaactggagctcgaccctccttagtaagggaaccgagaggccttcttgcaacaagctccgacacagagtccacgtgattgctaccaccatgagtacatggttctcccctctcgacccaggacttctttttgaatatccacggctcgatccagagggtggggcatgatccccctagcatagcgagctacagcgggaactgtagctaggccttagcgtgccttggatactgcctgatagggcgacggcctagtcgtgtcggttctataggtagcacatacaaat

SEQ ID NO: 18323 - DNA, 663 bp, synthetic construct
  source 1..663: mol_type = other DNA
aaggaaggactgggcatgagggcccagtccttcctttccccttccggggggtaaaccggctgtgtttgctagaggcacagaggagcaacatccaacctgcttttgtggggaacggtgcggctccaattcctgcgtcgccaaaggtgttagcgcacccaaacggcgcatctaccaatgctattggtgtggtctgcgagttctagcctactcgtttctcccctactcactcattcacacacaaaaactgtgttgtaactacaagatttggccctcgcacgggatgtgcgataaccgcaagattgactcaagcgcggaaagcgctgtaaccacatgctgttagtccctttatggctgcgagatggctatccacctcggatcactgaactggagctcgaccctccttagtaagggaaccgagaggccttcctgcaacaagctccgacacagagtccacgtgattgctaccaccatgagtacatggttctcccctctcgacccaggacttctttttgaatatccacggctcgatccagagggtggggcatgatccccctagcatagcgagctacagcgggaactgtagctaggccttagcgtgccttggatactgcctgatagggcgacggcctagtcgtgtcggttctataggtagcacatacaaat

SEQ ID NO: 18324 - DNA, 663 bp, synthetic construct
  source 1..663: mol_type = other DNA
aaggaaggactgggcatgagggcccagcccttcctttccccttccggggggtaaaccggctgtgtttgctagaggcacagaggagcaacatccaacctgcttttgtggggaacggtgcggctccaattcctgcgtcgccaaaggtgttagcgcacccaaacggcgcatctaccaatgctattggtgtggtctgcgagttctagcctactcgtttctcccctactcactcattcacgcacaaaaagtgtgttgtaactacaagatttagccctcgcacgggatgtgcgataaccgcaagattgactcaagcgcggaaagcgctgtaaccacatgctgttagtccctttatggctgcgagatggctatccacctcggatcactgaactggagctcgaccctccttagtaagggaaccgagaggccttcttgcaacaagctccgacacagagtccacgtgattgctaccaccatgagtacatggttctcccctctcgacccaggacttctttttgaatatccacggctcgatccagagggtggggcatgatccccctagcatagcgagctacagcgggaactgtagctaggccttagcgtgccttggatactgcctgatagggcgacggcctagtcgtgtcggttctataggtagcacatacaaat

SEQ ID NO: 18325 - DNA, 663 bp, synthetic construct
  source 1..663: mol_type = other DNA
aaggaaggactgggcatgagggcccagcccttcctttccccttccggggggtaaaccggctgtgtttgctagaggcacagaggagcaacatccaacctgcttttgtggggaacggtgcggctccaattcctgcgtcgccaaaggtgttagcgcacccaaacggcgcatctaccaatgctattggtgtggtctgcgagttctagcctactcgtttctcccctactcactcactcacgcacaaaaagtgtgttgtaactacaagatttagccctcgcacgggatgtgcgataaccgcaagattgactcaagcgcggaaagcgctgtaaccacatgctgttagtccctttatggctgcgagatggctatccacctcggatcactgaactggagctcgaccctccttagtaagggaaccgagaggccttcttgcaacaagctccgacacagagtccacgtgattgctaccaccatgagtacatggttctcccctctcgacccaggacttctttttgaatatccacggctcgatccagagggtggggcatgatccccctagcatagcgagctacagcgggaactgtagctaggccttagcgtgccttggatactgcctgatagggcgacggcctagtcgtgtcggttctataggtagcacatacaaat

SEQ ID NO: 18326 - DNA, 675 bp, synthetic construct
  source 1..675: mol_type = other DNA
ccgtcgggccttataccccgatttgctgagcttctctaggagagcccttttcccagccagaggtggctggttaaacaatacctattgtaacaaaacatctaagacataacaaccgcacacctggtctccactggccgaaggcaactagcaataaggtaggtgggttcagacgcttaaagtgtgttgtatatattcttttctaacctgtgttttacacagggtggcagatggcgtgccataaccctaatagtgagataccacgcttgtggaccttatgctcacacagccatcctctagtaagtttgtaagacgtctgatgacgtgtgggaacttgttggagataacattttgctgcaaagcatcccattgccagcggatccacatctggtaacagatgcctctggggccaaaagccaaggtttaacagaccctttgggattggttcaaacctgaattgttatggaagacatttagtacctgctgatttggtagtagtgcaaacactagttgtaaggcccacgaaggatgcccagaaggtacccgtaggtaacaagtgacactatggatctgatctggggccaactacctctatctaggtgagttggttaaaaaacgtctagtgggccaaacccaggggggatccctggtttccttttttaaatttgaataatcact

SEQ ID NO: 18327 - DNA, 675 bp, synthetic construct
  source 1..675: mol_type = other DNA
ccgtcgggccttataccccgatttgctgagcttctctaggagagcccttttcccagccagaggtggctggttaaacaatacctattgtaacaaaacatctaagacataacaaccgcacacctggtctccactggccgaaggcaactagcaataaggtaggtgggttcagacgcttaaagtgtgttgtatatattcttttctaacctgtgttttacacagggtggcagatggcgtgccataaccctaatagtgagataccacgcttgtggaccttatgctcacacagccatcctctagtaagtttgtaagacgtctgatgacgtgtgggaacttgttggagataacattttgctgcaaagcatcccattgccagcggatccacatctggtaacagatgcctctggggccaaaagccaaggtttaacagaccctttgggattggttcaaacctgaattgttatggaagacatttagtacctgctgatttggtagtagtgcaaacactagttgtaaggcccacgaaggatgcccagaaggtacccgtaggtaacaagtgacactatggatctgatctggggctaactacctctatctaggtgagttggttaaaaaacgtctagtgggccaaacccaggggggatccctggtttccttttttttatttgaataatcact

SEQ ID NO: 18328 - DNA, 663 bp, synthetic construct
  source 1..663: mol_type = other DNA
aaggaaggactgggcatgagggcccagtccttcctttccccttccggggggtaaaccggctgtgtttgctagaggcacagaggagcaacatccaacctgcttttgtggggaacggtgcggctccaattcctgcgtcgccaaaggtgttagcgcacccaaacggcgcatctaccaatgctattggtgtggtctgcgagttctagcctactcgtttctcccctactcactcattcacgcacaaaaactgtgttgtaactacaagatttagccctcgcacgggatgtgcgataaccgcaagattgactcaagcgcggaaagcgctgtaaccacatgctgttagtccctttatggctgcgagatggctattcacctcggatcactgaactggagctcgaccctccttagtaagggaaccgagaggccttcttgcaacaagctccgacacagagtccacgtgattgctaccaccatgagtacatggttctcccctctcgacccaggacttctttttgaatatccacggctcgatccagagggtggggcatgatccccctagcatagcgagctacagcgggaactgtagctaggccttagcgtgccttggatactgcctgatagggcgacggcctagtcgtgtcggttctataggtagcacatacaaat

SEQ ID NO: 18329 - DNA, 663 bp, synthetic construct
  source 1..663: mol_type = other DNA
aaggaaggactgggcatgagggcccagccccccctttccccttccggggggtaaaccggctgtgtttgctagaggcacagaggagcaacatccaacctgcttttgtggggaacggtgcggctccaattcctgcgtcgccaaaggtgttagcgcacccaaacggcgcatctaccaatgctattggtgtggtctgcgagttctagcctactcgtttctcccctactcactcattcacgcacaaaaactgtgttgtaactacaagatttagccctcgcacgggatgtgcgataaccgcaagattgactcaagcgcggaaagcgctgtaaccacatgctgttagtccctttatggctgcgagatggctattcacctcggatcactgaactggagctcgaccctccttagtaagggaaccgagaggccttcttgcaacaagctccgacacagagtccacgtgattgctaccaccatgagtacatggttctcccctctcgacccaggacttctttttgaatatccacggctcgatccagagggtggggcatgatccccctagcatagcgagctacagcgggaactgtagctaggccttagcgtgccttggatactgcctgatagggcgacggcctagtcgtgtcggttctataggtagcacatacaaat

SEQ ID NO: 18330 - DNA, 663 bp, synthetic construct
  source 1..663: mol_type = other DNA
aaggaaggactgggcatgagggcccagcccttcctttccccttccggggggtaaaccggctgtgtttgctagaggcacagaggagcaacatccaacctgcttttgtggggaacggtgcggctccaattcctgcgtcgccaaaggtgttagcgcacccaaacggcgcatctaccaatgctattggtgtggtctgcgagttctagcctactcgtttctcccctactcactcattcacacacaaaaactgtgttgtaactacaagatttagccctcgcacgggatgtgcgataaccgcaagattgactcaagcgcggaaagcgctgtaaccacatgctgttagtccctttatggctgcgagatggctatccacctcggatcactgaactggagctcgaccctccttagtaagggaaccgagaggccttcttgcaacaagctccgacacagagtccacgtgattgctaccaccatgagtacatggttctcccctctcgacccaggacttctttttgaatatccacggctcgatccagagggtggggcatgatccccctagcatagcgagctacagcgggaactgtagctaggccttagcgtgccttggatactgcctgatagggcgacggcctagtcgtgtcggttctataggtagcacatacaaat

SEQ ID NO: 18331 - DNA, 663 bp, synthetic construct
  source 1..663: mol_type = other DNA
aaggaaggactgggcatgagggcccagtccttcctttccccttccggggggtaaaccggctgtgtttgctagaggcacagaggagcaacatccaacctgcttttgtggggaacggtgcggctccaattcctgcgtcgccaaaggtgttagcgcacccaaacggcgcatctaccaatgctattggtgtggtctgcgagttctagcctactcgtttctcccctactcactcattcacgcacaaaaactgtgttgtaactacaagatttagccctcgcacgggatgtgcgataaccgcaagattgactcaagcgcggaaagcgctgtaaccacatgctgttagtccctttatggctgcgagatggctatccgcctcggatcactgaactggagctcgaccctccttagtaagggaaccgagaggccttcctgcaacaagctccgacacagagtccacgtgattgctaccaccatgagtacatggttctcccctctcgacccaggacttctttttgaatatccacggctcgatccagagggtggggcatgatccccctagcatagcgagctacagcgggaactgtagctaggccttagcgtgccttggatactgcctgatagggcgacggcctagtcgtgtcggttctataggtagcacatacaaat

SEQ ID NO: 18332 - DNA, 663 bp, synthetic construct
  source 1..663: mol_type = other DNA
aaggaagggctgggcatgagggcccagtccttcctttccccttccggggggtaaaccggctgtgtttgctagaggcacagaggagcaacatccaacctgcttttgtggggaacggtgcggctccaattcctgcgtcgccaaaggtgttagcgcacccaaacggcgcatctaccaatgctattggtgtggtctgcgagttctagcctactcgtttctcccctactcactcattcacacacaaaaactgtgttgtgactataagatttggccctcgcacgggatgtgcgataaccgcaagattgactcaagcgcggaaagcgctgtaaccacatgctgttagtccctttatggctgcgagatggctatccacctcggatcactgaactggagctcgaccctccttagtaagggaaccgagaggccttcctgcaacaagctccgacacagagtccacgtgattgctaccaccatgagtacatggttctcccctctcgacccaggacttctttttgaatatccacggctcgatccagagggtggggcatgatccccctagcatagcgagctacagcgggaactgtagctaggccttagcgtgccttggatactgcctgatagggcgacggcctagtcgtgtcggttctataggtagcacatacaaat

SEQ ID NO: 18333 - DNA, 663 bp, synthetic construct
  source 1..663: mol_type = other DNA
aaggaaggactgggcatgagggcccagtccttcctttccccttccggggggtaaaccggctgtgtttgctagaggcacagaggagcaacatccaacctgcttttgtggggaacggtgcggctccaattcctgcgtcgccaaaggtgttagcgcacccaaacggcgcatctaccaatgctattggtgtggtctgcgagttctagcctactcgtttctcccctactcactcattcacacacaaaaactgtgttgtaactacaagatttggccctcgcacgggatgtgcgataaccgtaagattgactcaagcgcggaaagcgctgtaaccacatgctgttagtccctttatggctgcgagatggctatccacctcggatcactgaactggagctcgaccctccttagtaagggaaccgagaggccttcctgcaacaagctccgacacagagtccacgtgattgctaccaccatgagtacatggttctcccctctcgacccaggacttctttttgaatatccacggctcgatccagagggtggggcatgatccccctagcatagcgagctacagcgggaactgtagctaggccttagcgtgccttggatactgcctgatagggcgacggcctagtcgtgtcggttctataggtagcacatacaaat

SEQ ID NO: 18334 - DNA, 663 bp, synthetic construct
  source 1..663: mol_type = other DNA
aaggaaggactgggcatgagggcccagcccttcctttccccttccggggggtaaaccggctgtgtttgctagaggcacagaggagcaacatccaacctgctttcgtggggaacggtgcggctccaattcctgcgtcgccacaggtgttaacgcacccaaacggcgcatctaccaatgctattggtgtggtctgcgagttctagcctactcgtttctcccctactcactcattcacgcacaaaaactgtgttgtaactacaagatttagccctcgcacgggatgtgcgataaccgcaagattgactcaagcgcggaaagcgctgtaaccacatgctgttagtccctttatggctgcgagatggctatccacctcggatcactgaactggagctcgaccctccttagtaagggaaccgagaggccttcttgcaacaagctccgacacagagtccacgtgattgctaccaccatgagtacatggttctcccctctcgacccaggacttctttttgaatatccacggctcgatccagagggtggggcatgatccccctagcatagcgagctacagcgggaactgtagctaggccttagcgtgccttggatactgcctgatagggcgacggcctagtcgtgtcggttctataggtagcacatacaaat

SEQ ID NO: 18335 - DNA, 663 bp, synthetic construct
  source 1..663: mol_type = other DNA
aaggaaggactgggcatgagggcccagcccttcctttccccttccggggggtaaaccggctgtgtttgctagaggcacagaggagcaacatccaacctgctttcgtggggaacggtgcggctccaattcctgcgtcgccacaggtgttagcgcacccaaacggcgcatctaccaatgctattggtgtggtctgcgagttctagcctactcgtttctcccctactcactcattcacgcacaaaaactgtgttgtaactacaagatttagccctcgcacgggatgtgcgataaccgcaagattgactcaagcgcggaaagcgctgtaaccacatgctgttagtccctttatggctgcgagatggctatccacctcggatcactgaactggagctcgaccctccttagtaagggaaccgagaggccttcttgcaacaagctccgacacagagtccacgtgattgctaccaccatgagtacatggttctcccctctcgacccaggacttctttttgaatatccacggctcgatccagagggtggggcatgatccccctagcatagcgagctacagcgggaactgtagctaggccttagcgtgccttggatactgcctgatagggcgacggcctagtcgtgtcggttctataggtagcacatacaaat

SEQ ID NO: 18336 - DNA, 663 bp, synthetic construct
  source 1..663: mol_type = other DNA
aaggaaggactgggcatgagggcccagccccccctttccccttccggggggtaaaccggctgtgtttgctagaggcacagaggagcaacatccaacctgcttttgtggggaacggtgcggctccaattcctgcgtcgccaaaggtgttagcgcacccaaacggcgcatctaccaatgctattggtgtggtctgcgagttctagcctactcgtttctcccctactcactcattcacgcacaaaaactgtgttgtaactacaagatttagccctcgcacgggatgtgcgataaccgcaagattgactcaagcgcggaaagcgctgtaaccacatgctgttagtccctttatggctgcgagatggctatccacctcggatcactgaactggagctcgaccctccttagtaagggaaccgagaggccttcttgcaacaagctccgacacagagtccacgtgattgctaccaccatgagtacatggttctcccctctcgacccaggacttctttttgaatatccacggctcgatccagagggtggggcatgatccccctagcatagcgagctacagcgggaactgtagctaggccttagcgtgccttggatactgcctgatagggcgacggcctagtcgtgtcggttctataggtagcacatacaaat

SEQ ID NO: 18337 - DNA, 663 bp, synthetic construct
  source 1..663: mol_type = other DNA
aaggaaagactgggcatgagggcccagtctttcctttccccttccggggggtaaaccggctgtgtttgctagaggcacagaggagcaacatccaacctgcttttgtggggaacggtgcggctccgattcctgcgtcgccaaaggtgttagcgcacccaaacggcgcatctaccaatgctattggtgtggtctgcgagttctagcctactcgtttctcccctattcactcactcacgcacaaaaagtttgttgtaactacaagatttagccctcgcacgggatgtgcgataaccgcaagattgactcaagcgcggaaagcgctgtaaccacatgctgttagtccctttatggctgcgagatggctatccacctcggatcactgaactggagctcgaccctccttagtaagggaaccgagaggccttcttgcaacaagctccgacacagagtccacgtgattgctaccaccatgagtacatggttctcccctctcgacccaggacttctttttgaatatccacggctcgatccagagggtggggcatgatccccctagcatagcgagctacagcgggaactgtagctaggccttagcgtgccttggatactgcctgatagggcgacggcctagtcgtgtcggttctataggtagcacatacaaat

SEQ ID NO: 18338 - DNA, 663 bp, synthetic construct
  source 1..663: mol_type = other DNA
aaggaaggactgggcatgagggcccagtccttcctttccccttccggggggtataccggctgtgtttgctagaggcacagaggagcaacatccaacctgcttttgtggggaacggtgcgactccaattcctgcgtcgccaaaggtgttagtgcacccaaacggcgcatctaccaatgctattggtgtggtctgcgagttctagcctactcgtttttcccctactcactcattcacgcacaaaaagtgtgttgtaactacaagatttagccctcgcacgggatgtgcgataaccgcaagattgactcaagcgcggaaagcgctgtaaccacatgctgttagtccctttatggctgcgagatggctatccacctcggatcactgaactggagctcgaccctccttagtaagggaaccgagaggccttcttgcaacaagctccgacacagagtccacgtgattgctaccaccatgagtacatggttctcccctctcgacccaggacttctttttgaatatccacggctcgatccagagggtggggcatgatccccctagcatagcgagctacagcgggaactgtagctaggccttagcgtgccttggatactgcctgatagggcgacggcctagtcgtgtcggttctataggtagcacatacaaat

SEQ ID NO: 18339 - DNA, 663 bp, synthetic construct
  source 1..663: mol_type = other DNA
aaggaaggactgggcatgagggcccagtcccccctttccccttccggggggtaaaccggctgtgtttgctagaggcacagaggagcaacatccaacctgcttttgtggggaacggtgcggctccaattcctgcgtcgccaaaggtgttagcgcactcaaacggcgcatctaccaatgctattggtgtggtctgcgagttctagcctactcgtttctcccctattcactcactcacgcacaaaaagtgtgttgtaactacaagatttagccctcgcacgggatgtgcgataaccgcaagattgactcaagcgcggaaagcgctgtaaccacatgctgttagtccctttatggctgcgagatggctatccacctcggatcactgaactggagctcgaccctccttagtaagggaaccgagaggccttcttgcaacaagctccgacacagagtccacgtgattgctaccaccatgagtacatggttctcccctctcgacccaggacttctttttgaatatccacggctcgatccagagggtggggcatgatccccctagcatagcgagctacagcgggaactgtagctaggccttagcgtgccttggatactgcctgatagggcgacggcctagtcgtgtcggttctataggtagcacatacaaat

SEQ ID NO: 18340 - DNA, 663 bp, synthetic construct
  source 1..663: mol_type = other DNA
aaggaaggactgggcatgagggcccagtccttcctttccccttccggggggtaaaccggctgtgtttgctagaggcacagaggagcaacatccaacctgcttttgtggggaacggtgcggctccaattcctgcgtcgccaaaggtgttagcgcacccaaacggcgcatctaccaatgctattggtgtggtctgcgagttctagcctactcgtttctcccctactcactccttcacgcacaaaaactgtgttgtgactacaagatttagccctcgcacgggatgtgcgataaccgcaagattgactcaagcgcggaaagcgctgtaaccacatgctgttagtccctttatggctgcgagatggctatccacctcggatcactgaactggagctcgaccctccttagtaagggaaccgagaggccttcctgcaacaagctccgacacagagtccacgtgattgctaccaccatgagtacatggttctcccctctcgacccaggacttctttttgaatatccacggctcgatccagagggtggggcatgatccccctagcatagcgagctacagcgggaactgtagctaggccttagcgtgccttggatactgcctgatagggcgacggcctagtcgtgtcggttctataggtagcacatacaaat

SEQ ID NO: 18341 - DNA, 674 bp, synthetic construct
  source 1..674: mol_type = other DNA
ccgtcgggccttataccccgatttgctgagcttctctaggagagcccttttcccagccagaggtggctggttaaacaatacctattgtaacaaaacatctaagacataacaaccgtacacctggtctccactggccgaaggcaactagcaataaggtaggtgggttcagacgcttaaagtgtgttgtatatattcttttctaacctgtgttttacacagggtggcagatggcgtgccataaccctaatagtgagataccacgcttgtggaccttatgctcacacagccatcctctagtaagtttgtaagacgtctgatgacgtgtgggaacttgttggagataacattttgctgcaaagcatcccattgccagcggatccacatctggtaacagatgcctctggggccaaaagccaaggtttaacagaccctttgggattggttcaaacctgaattgttatggaagacatttagtacctgctgatttggtagtagtgcaaacactagttgtaaggcccacgaaggatgcccagaaggtacccgtaggtaacaagtgacactatggatctgatctggggccaactacctctatctaggtgagttggttaaaaaacgtctagtgggccaaacccaggggggatccctggtttcctttttaaatttgaataatcact

SEQ ID NO: 18342 - DNA, 674 bp, synthetic construct
  source 1..674: mol_type = other DNA
ccgtcgggccttataccccgatttgctgagcttctctaggagagcccttttcccagccagaggtggctggttaaacaatacctattgtaacaaaacatctaagacataacaaccgcacacctggtctccactggccgaaggcaactagcaataaggtaggtgggttcagacgcttaaagtgtgttgtatatattcttttctaacctgtgttttatacagggtggcagatggcgtgccataaccctaatagtgagataccacgcttgtggactttatgctcacacagccatcctctagtaagtttgtaagacgtctgatgacgtgtgggaacttgttggagataacattttgctgcaaagcatcccattgccagcggatccacatctggtaacagatgcctctggggccaaaagccaaggtttaacagaccctttgggattggttcaaacctgaattgttatggaagacatttagtacctgctgatttggtagtagtgcaaacactagttgtaaggcccacgaaggatgcccagaaggtacccgtaggtaacaagtgacactatggatctgatctggggccaactacctctatctaggtgagttggttaaaaaacgtctagtgggccaaacccaggggggatccctggtttccttttttaatttgaataatcact

SEQ ID NO: 18343 - DNA, 478 bp, synthetic construct; identical to SEQ ID NO: 506
  source 1..478: mol_type = other DNA

SEQ ID NO: 18344 - DNA, 661 bp, synthetic construct
  source 1..661: mol_type = other DNA
aaggaaggactgggcatcagggcccagcccttcctttccccttccggggggttaaccggctgtgtttgctagaggcacagaggggcaacatccaacctgcttttgcggggaacggtgcggctccgattcctgcgtcgccaaaggtgttagcgcacccaaacggcgcacctaccaatgttattggtgtggtctgcgagttctagcctactcgtttctcccccgaccattcactcacccacgaaaagtgtgttgtaaccataagatttaacccccgcacgggatgtgcgataaccgtaagactggctcaagcgcggaaagcgctgtaaccacatgctgttagtccctttatggctgcaagatggctacccacctcggatcactgaactggagctcgaccctccttagtaagggaaccgagaggccttcgtgcaacaagctccgacacagagtccacgtgactgctaccaccatgagtacatggttctcccctctcgacccaggacttctttttgaatatccacggctcgatccagagggtggggcatgacccctagcatagcgagctacagcgggaactgtagctaggccttagcgtgccttggatactgcctgatagggcgacggcctagtcgtgtcggttctataggtagcacatacaaat

SEQ ID NO: 18345 - DNA, 673 bp, synthetic construct
  source 1..673: mol_type = other DNA
ccgtcgggccttataccccgatttgctgagcttctctaggagagcccttttcccagccagaggtggctggttaaacaatacctattgtaacaaaacatctaagacataacaaccgcacacctggtctccactggccgaaggcaactagcaataaggtaagtgggttcagacgcttaaagtgtgttgtatatattcttttctaacctgtgttttacacagggtggcagatggcgtgccataaccctaatagtgagataccacgcttgtggaccttatgctcacacagccatcctctagtaagtttgtaagacgtctgatgacgtgtgggaacttgttggagataacattttgctgcaaagcatcccattgccagcggatccacatctggtaacagatgcctctggggccaaaagccaaggtttaacagaccctttgggattggttcaaacctgaattgttatggaagacatttagtacctgctgatttggtagtagtgcaaacactagttgtaaggcccacgaaggatgcccagaaggtacccgtaggtaacaagtgacactatggatctgatctggggccaactacctctatctaggtgagttggttaaaaaacgtctagtgggccaaacccaggggggatccctggtttcttttttaatttgaataatcact

SEQ ID NO: 18346 - DNA, 673 bp, synthetic construct
  source 1..673: mol_type = other DNA
ccgtcgggccttataccccgatttgctgagcttctctaggagagcacttttcccagccagaggtggctggttaaacaatacctattgtaacaaaacatctaagacataacaaccgcacacctggtctccactggccgaaggcaactagcaataaggtaggtgggtttagacgcttaaagtgtgttgtatatattcttttctaacctgtgttttacacagggtggcagatggcgtgccataaccctaatagtgagataccacgcttgtggaccttatgctcacacagccatcctctagtaagtttgtaagacgtctgatgacgtgtgggaacttgttggagataacattttgctgcaaagcatcccattgccagcggatccacatctggtaacagatgcctctggggccaaaagccaaggtttaacagaccctttgggattggttcaaacctgaattgttatggaagacatttagtacctgctgatttggtagtagtgcaaacactagttgtaaggcccacgaaggatgcccagaaggtacccgtaggtaacaagtgacactatggatctgatctggggccaactacctctatctaggtgagttggttaaaaaacgtctagtgggccaaacccaggggggatccctggtttcctttttaatttgaataatcact

SEQ ID NO: 18347 - DNA, 642 bp, synthetic construct
  source 1..642: mol_type = other DNA
cttctctaggagagcccttttcccagccagaggtggctggttaaataatacctattgtaacaaaacatctaagatacaacaaccacacacctggtttccactggctgaaggcaactagcaataaggcaggtgggttcaaacgcttaaagtgtgttgtatatattcttttctaacctgtgttctacacagggtggcagatggcgtgccataactctaatagtgagataccacgcttgtggaccttatgctcacacagccatcctctagtaagtttgtaagacgtctgatgacgtgtgggaacttgttggagataacattttgctgcaaagcatcccattgccagcggatccacatctggtaacagatgcctctggggccaaaagccaaggtttaacagaccctttgggattggttcaaacctgaattgttatggaagacatttagtacctgctgatttggtagtagtgcaaacactagttgtaaggcccacgaaggatgcccagaaggtacccgtaggtaacaagtgacactatggatctgatctggggccaactacctctatctaggtgagttggttaaaaaacatctagtgggccaaacccaggggggatccctggtttcctttttatttgaataatcact

SEQ ID NO: 18348 - DNA, 447 bp, synthetic construct
  source 1..447: mol_type = other DNA
tccacactcatttcccccctccacccctaaggtggttgtatcctcataccctaccctcccttccacaacggacggacaaatggacttggacttttggcaagagcacatggtatgactattggatacaccttgaatggcagtagcgtggcgagctatggaaaaatcgcaactgtcgatagccatgttagtgacgcgcttcggcgtgctcctttggtgattcggcgactggttacaggagagtaggcagcgagctatgggcaaactcctgcagtattactcagggggaatgtgcaattgagacttgacgagcgtctctttgagatgtggcgcatgctcttggcattaccatagtgagcttccaggttgggaaacctggactgggcctatactacctgatagggtcgcggctggccgcctgtaactagtatagtcagttgaaaccccccc

SEQ ID NO: 18349 - DNA, 254 bp, synthetic construct
  source 1..254: mol_type = other DNA
tataagatacacctgcaaaggcggcacaaccccagtgccacgttgtgagttggatagttgtggaaagagtcaaatggctctcctcaagcgtattcaacaaggggctgaaggatgcccagaaggtaccccattgtatgggatctgatctggggcctcggtgcacatgctttacatgtgtttagtcgaggttaaaaaacgtctaggccccccgaaccacggggacgtggttttcctttgaaaaacacgatgataat

SEQ ID NO: 18350 - DNA, 802 bp, synthetic construct
  source 1..802: mol_type = other DNA
cctccagatggtgttttgtgttattggatgctggatggtcacgttggagactgcacgtggcagtcttgaaacgtgtggtttgacgtctatccattatggcagtgggtggagtactgcaaagatgttaccgtgctttacacggtttttgaaccccacaccggctgtttggcgcttgcaggacagcaggtttattttcttatgctctttatttctagccaacagggttctatcctgttgggcggagtgatactcccgttccttcttggacagattgcctccacgatctttgtggatctcaaggtgatcaagtcactggtaaatagagcgaaggttgaggaaacctgaggaatttccatgtggttttgccaggagttgtagcgatgctgtgtgtgtgtgcggatttcccctcatggcaacatgagcctcacaggccaaaagccctgtccgaaaggacccacacagtggagcaatcccagctccctcctacaaagctttgtgagaatgaactcacgtttattcttctttattctctgtttacatcaggccccaaagatgtcctgaaggtaccttgtgtatctgggcatgagcaccatcaactacccggacttgcatttcggtgcagacacatgtggttacccagcccctctgctttggcagaggggcttttgctcgctcagcacgagatctgatcaggagcccttcccagtgtgctttacacctggcggggggttaaaaattgcccaaggcctggcaaaataacctaggggactaggttttccttttattaacaatgtctgtcatt

SEQ ID NO: 18351 - DNA, 662 bp, synthetic construct
  source 1..662: mol_type = other DNA
gccctcatgcccagtccttcctttccccttccggggggtaaaccggctgtgtttgctagaggcacagaggagcaacatccaacctgcttttgtggggaacggtgcggctccgattcctgcgtcgccaaaggtgttagcgcacccaaacggcgcatctaccaatgctattggtgtggtctgcgagttctagcctactcgtttctcccccatccactcactcgcgcacaaaaagtgtgttgtgactacaagatttagccctcgcacgggatgtgcgataaccgcaagattgcacgcctgccgatagacgattcggaaagcgctgtaaccacatgctgttagtccctttatggctgcgagatggctatccacctcggatcactgaactggagctcgaccctccttagtaagggaaccgagaggccttcttgcaacaagctccgacacagagtccacgtgattgctaccaccatgagtacatggttctcccctctcgacccaggacttctttttgaatatccacggctcgatccagagggtggggcatgatccccctagcatagcgagctacagcgggaactgtagctaggccttagcgtgccttggatactgcctgatagggcgacggcctagtcgtgtcggttctataggtagcacatacaaat

SEQ ID NO: 18352 - DNA, 616 bp, synthetic construct
  source 1..616: mol_type = other DNA
cggctggtcaataaaagcctcaaacgtaactaacatctaagattgattcaataaccccatgcctgatccccaccagtcgaagacaactagtaataagacgggtggaacaaggatgcttaaagcatggcgtaaatattcttttctaacccatgattctatggggtggcagatggcgtgccataactctattagtgagataccatgcttgtggaacttatgctcacacagccatcctctagtaagtttgtgagatgtctaatgacgtgtgggaacttattggaagcaacaatttgccgtacggcatcctactgccagcggatccacacctggtaacaggtgcccctggggccaaaagccaaggtttaatagaccctttaggattggttaaaacctgaattgttgtggaagatccttagtacctgctgatttggtagtaatgcaaacactagttgtaaggcccacgaaggatgcccagaaggtacccgtaggtaacaagtgacactatggatctgatctggggccaactacttctatcatggtgagttggttaaaaaacgtctagtgggccaaacccaggggggatccctggtttcctttttattttactacagccaat

SEQ ID NO: 18353 - DNA, 647 bp, synthetic construct
  source 1..647: mol_type = other DNA
ctcatgcccagtccttcctttccccttccggggggtaaaccggctgtgtttgctagaggcacagaggagcaacatccaacctgcttttgtggggaacggtgcggctccaattcccgcgtcgccaaaggtgttagcgcacccaaacggcgcatctaccaatgctattggtgtggtctgcgagttctagcctactcgtttctcccctactcactcattcacgcacaaaaactgtgttgtaactacaagatttagccctcgcacgggatgtgcgataaccgcaagattgactcaagcgcggaaagcgctgtaaccacatgctgttagtccctttatggctgcgagatggctatccacctcggatcactgaactggagctcgaccctccttagtaagggaaccgagaggccttcttgcaacaagctccgacacagagtccacgtgattgctaccaccatgagtacatggttctcccctctcgacccaggacttctttttgaatatccacggctcgatccagagggtggggcatgatccccctagcatagcgagctacagcgggaactgtagctaggccttagcgtgccttggatactgcctgatagggcgacggcctagtcgtgtcggttctataggtagcacatacaaat

SEQ ID NO: 18354 - DNA, 634 bp, synthetic construct
  source 1..634: mol_type = other DNA
tccttcctttccccttccggggggtaaaccggctgtgtttgctagaggcacagaggagcaacatccaacctgcttttgtggggaacggtgcggctccaattcctgcgtcgccaaaggtgttagcgcacccaaacggcgcatctaccaatgctattggtgtggtctgcgagttctagcctactcgtttctcccctactcactcattcacgcacaaaaactgtgttgtaactacaagatttagccctcgcacgggatgtgcgataaccgcaagattgactcaagcgcggaaagcgctgtaaccacatgctgttagtccctttatggctgcgagatggctatccacctcggatcactgaactggagctcgaccctccttagtaagggaaccgagaggccttcttgcaacaagctccgacacagagtccacgtgattgctaccaccatgagtacatggttctcccctctcgacccaggacttctttttgaatatccacggctcgatccagagggtggggcatgacccctagcatagcgagctacagcgggaactgtagctaggccttagcgtgccttggatactgcctgatagggcgacggcctagtcgtgtcggttctataggtagcacatacaaat

SEQ ID NO: 18355 - DNA, 642 bp, synthetic construct
  source 1..642: mol_type = other DNA
ttctctaggagattccttttcccagccagaggtggctggttaaataatacctattgtaacaaaacatgtaagacacaacaaccgcacacctggtctccactggccgaaggcaactagcaataaggcaggtgggttcagacgcttaaagtgtgttgtgcatattcttttctaacctgtgttctacacagggtggcagatggcgtgccataaccctaatagtgagatatccacgcttgtggatcttatgctcacacagccatcctctagtaagtttgtaagacatctgatgacgtgtgggaacttgttggagataacattttgctgcaaagcatcccattgccagcggatccacatctggtaacagatgcctctggggccaaaagccaaggtttaacagaccctttgggattggttcaaacctgaattgttatggaagacatttagtacctgctgatttggtggtagtgcaaacactagttgtaaggcccacgaaggatgcccagaaggtacccgtaggtaacaagtgacactatggatctgatctggggccaactacctctatctaggtgagttggttaaaaaacgtctagtgggccaaacccaggggggatccctggtttcctttttatttgaataatcact

SEQ ID NO: 18356 - DNA, 637 bp, synthetic construct
  source 1..637: mol_type = other DNA
agccctttcctttccccttccggggggttaaccggctgtgtttgctagaggcacagaggggcaacatccaacctgtttttgcggggaacggtgcggctccgattcctgcgccgccaaaggtgttagcgcacccaaacggcgcacctaccaatgttattggtgtggtctgcgagttctagcctactcgtttctcccccgaccattcactcgcccacgaaaagtgtgttgtaaccataagatttaacccccgcacgggacgtgcgataaccgtaagactggctcaagcgcggaaagcgctgtaaccacatgctgttagtccctttatggctgcaagatggctacccacctcggatcactgaactggagctcgaccctccttagtaagggaaccgagaggccttcgtgcaaaaagctccgacacagagtccacgtgactgctaccaccatgagtacatggttctcccctctcgacccaggacttctttttgaatatccacggctcgatccagagggtggggcatgacccctagcatagcgagctacagcgggaactgtagctaggtcttagcgtaccttggatactgcctgatagggcgacggcctagtcgtgtcggttctataggtagcacatacaaat

SEQ ID NO: 18357 - DNA, 534 bp, synthetic construct
  source 1..534: mol_type = other DNA
ttttgagaaaggggacgtctgcgcacgaaacgcgccgtcacttgaggatgacttgtacaaacaccgatccacgcaggtatccacaactgacacaaaaccgtgcaatttgaaaccccacctggtctttccaggtctggaggggtaacactttgtactgtggttgactccacgctcggtccactagcgggtactagtagtggtaccgttgtttcgtagcggagcatagtggccgcgggaactcctccttggtaacaaggacccgcggggccgaaagccacgtcctaacggacccactatgtgtgcaaccccagcacggcaactttaccacgaaaaccactttaaggtgacactgaaactggtactcaaccactggtgacaggctaaggatgcccttcaggtaccccgaggtaacaagcgacactcgggatctgagaaggggactggggcttctttaaaagcgcccagtttaaaaaacttctatgcctgaataggcgaccggaggccggcgccttttctttaactactactcaccat

SEQ ID NO: 18358 - DNA, 650 bp, synthetic construct
  source 1..650: mol_type = other DNA
gggccctgacgcccagcccttcctttccccttccggggggttaaccggctgtgtttgctagaggcacagaggggcaacatccaacctgcttttgcggggaacggtgcggctccgattcctgcgccgccaaaggtgttagcgcacccaaacggcgcacctaccaatgttattggtgtggtctgcgagttctagcctactcgtttctcccccgaccattcactcgcccacgaaaagtgtgttgtaaccataagatttaacccccgcacgggatgtgtgataaccgtaagactggctcaagcgcggaaggcgctgtaaccacatgctgttagtccctttatggctgcaagatggctacccacctcggatcactgaactggagctcgaccctccttagtaagggaaccgagaggccttcgtgcaaaaagctccgacacagagtccacgtgactgctaccaccatgagtacatggttctcccctctcgacccaggacttctttttgaatatccacggctcgatccagagggtggggcatgacccctagcatagcgagctacagcgggaactgtagctaggtcttagcgtaccttggatactgcctgatagggcgacggcctagtcgtgtcggttctataggtagcacatacaaat

SEQ ID NO: 18359 - DNA, 638 bp, synthetic construct
  source 1..638: mol_type = other DNA
tccttttcccagccctgaggcggctggacaataaaagcctcaattgtaacaaacatctaagattattacattaaccccatgcctggtctccattagttgaaggcaacttgcaataaaatgagtggaaacaagacgcttaaagcatggtgtaaattaacttttctaacccacactttgtctggggtggcagatggcgtgccataattctattagtgagataccacgcttgtggaccttatgctcacacagccatcctctagtaagtttgtgagatgtctggtgacgtgtgggaacttatcggaaacaacgttttgctgtgaagcatcctattgccagcggaacaacacctggtaacaggtgcccctggggccaaaagccaaggtttaacagaccctttaggattggttttaaaacctgaaatgttgtggaagatacttagtacctaccgatctggtagtaatgcaaacactagttgtaaggcccacgaaggatgcccagaaggtacccgtaggtaacaagtgacactatggatctgatctggggctaggtacctctatcttggtgacctggttaaaaaacatctagtgggccaaacccgggggggatccccggtttccttttattttatcaatgtcact

SEQ ID NO: 18360 - DNA, 646 bp, synthetic construct
  source 1..646: mol_type = other DNA
tcatgcccagtccttcctttccccttccggggggtaaaccggctgtgtttgctagaggcacagaggagcaacatccaacctgcttttgtggggaacggtgcggctccaattcctgcgtcgccaaaggtgttagcgcacccaaacggcgcatctaccaatgctattggtgtggtctgcgagttctagcctactcgtttctctcctattcactcactcacgcacaaaaagtgtgttgtaactacaagatttagccctcgcacgggacgtgcgataaccgcaagattgactcaagcgcggaaagcgctgtaaccacatgctgttagtccctttgtggctgcgagatggctatccacctcggatcactgaactggagctcgaccctccttagtaagggaaccgagaggccttcttgcaacaagctccgacacagagtccacgtgattgctaccaccatgagtacatggttctcccctctcgacccaggacttctttttgaatatccacggctcgatccagagggtggggcatgatccccctagcatagcgagctacagcgggaactgtagctaggccttagcgtgccttggatactgcctgatagggcgacggcctagtcgtgtcggttctataggtagcacatacaaat

SEQ ID NO: 18361 - DNA, 542 bp, synthetic construct; identical to SEQ ID NO: 582
  source 1..542: mol_type = other DNA

SEQ ID NO: 18362 - DNA, 637 bp, synthetic construct
  source 1..637: mol_type = other DNA
taggagattccttttcccagccagaggtggctggttaaataatacctattgtaacaaaacatgtaagacacaacaaccgcacacctggtctccactggccgaaggcaactagcaataaggcaggtgggttcagacgcttaaagtgtgttgtgcatattcttttctaacctgtgttctacacagggtggcagatggcgtgccataaccctaatagtgagatatccacgcttggtgatcttatgctcacacagccatcctctagtaagtttgtaagacatctgatgacgtgtgggaacttgttggagataacattttgctgcaaagcatcccattgccagcggatccacatctggtaacagatgcctctggggccaaaagccaaggtttaacagaccctttgggattggttcaaacctgaattgttatggaagacatttagtacctgctgatttggtggtagtgcaaacactagttgtaaggcccacgaaggatgcccagaaggtacccgtaggtaacaagtgacactatggatctgatctggggccagctacctctatctaggtgagttggttaaaaaacgtctagtgggccaaacccaggggggatccctggtttcctttttatttgaataatcact

SEQ ID NO: 18363 - DNA, 636 bp, synthetic construct
  source 1..636: mol_type = other DNA
taggagattccttttcccagccagaggtggctggttaaataatacctattgtaacaaaacatgtaagacacaacaaccgcacacctggtctccactggccgaaggcaactagcaataaggcaggtgggttcagacgcttaaagtgtgttgtgcatattcttttctaacctgtgttctacacagggtggcagatggcgtgccataaccctaatagtgagatatccacgcttgtggatcttatgctcacacagccatcctctagtaagtttgtaagacatctgatgacgtgtgggacttgttggagataacattttgctgcaaagcatcccattgccagcggatccacatctggtaacagatgcctctggggccaaaagccaaggtttaacagaccctttgggattggttcaaacctgaattgttatggaagacatttagtacctgctgatttggtggtagtgcaaacactagttgtaaggcccacgaaggatgcccagaaggtacccgtaggtaacaagtgacactatggatctgatctggggccaactacctctatctaggtgagttggttaaaaaacgtctagtgggccaaacccaggggggatccctggtttcctttttatttgaataatcact

SEQ ID NO: 18364 - DNA, 528 bp, synthetic construct; identical to SEQ ID NO: 555
  source 1..528: mol_type = other DNA

SEQ ID NO: 18365 - DNA, 650 bp, synthetic construct
  source 1..650: mol_type = other DNA
gccctcatgcccagtccttcctttccccttccggggggtaaaccggctgtgtttgctagaggcacagaggagcaacatccaacctgctcttgtggggaacggtgcggctccaattcctgcgtcgccaaaggtgttagcgcacccaaacggcgcatctaccaatgctattggtgtggtctgcgagttctagcctactcgtttctcccctatccactcactcacgcacaaaaagtgtgttgtaaccgcaagatttagccctcgcacgagatgtgcgataaccgcaagattgactcaagcgcggaaagcgctgtaaccacatgctgttagtccctttatggctgcgagatggctatccacctcggatcactgaactggagctcgaccctccttagtaagggaaccgagaggccttcttgcaacaagctccgacacagagtccacgtgattgctaccaccatgagtacatggttctcccctctcgacccaggacttctttttgaatatccacggctcgacccagagggtggggcatgatccccctagcatagcgagctacagcgggaactgtagctaggccttagcgtgctttggatactgcctgatagggcgacggcctagtcgtgtcggttctataggtagcacatacaaat

SEQ ID NO: 18366 - DNA, 539 bp, synthetic construct; identical to SEQ ID NO: 577
  source 1..539: mol_type = other DNA

SEQ ID NO: 18367 - DNA, 650 bp, synthetic construct
  source 1..650: mol_type = other DNA
gccctcatgcccagtccttcctttccccttccggggggtaaaccggctgtgtttgctagaggcacagaggagcaacatccaacctgctttcgtggggaacggtgcggctccaattcctgcgtcgccaaaggtgttagcgcacccaaacggcgcatctaccaatgccattggtgtggtctgcgagttctagcctactcgtttttcccctactcactcattcacgcacaaaaagtgtgttgtaactacaagatttagccctcgcacgagatgtgtggtaaccgtaagattgactcaagcgcggaaagcgctgtaaccacatgctgttagtccctttatggctgcgagatggctatccacctcggatcactgaactggagctcgaccctccttagtaagggaaccgagaggccttcttgcaacaagctccgacacagagtccacgtgattgctaccaccatgagtacatggttctcccctctcgacccaggacttctttttgaatatccacggctcgatccagagggtggggcatgatccccctagcatagcgagctacagcgggaactgtagctaggccttagcgtgccttggatactgcctgatagggcgacggcctagtcgtgtcggttctataggtagcacatacaaat

SEQ ID NO: 18368 - DNA, 650 bp, synthetic construct
  source 1..650: mol_type = other DNA
gccctcatgcccagtccttcctttccccttccggggggtaaaccggctgtgtttgctagaggcacagaggagcaacatccaacctgcttttgtggggaacggtgcggctccaattcctgcgtcgccaaaggtgttagcgcacccaaacggcgcatctaccaatgccattggtgtggtctgcgagttctagcctactcgtttttcccctactcactcattcacgcacaaaaagtgtgttgtaactacaagatttagccctcgcacgggatgtgcggtaaccgcaagattgactcaagcgcggaaagcgctgtgaccacatgctgttagtccctttatggctgcgagatggctatccacctcggatcactgaactggagctcgaccctccttagtaagggaaccgagaggccttcttgcaacaagctccgacacagagtccacgtgattgctaccaccatgagtacatggttctcccctctcgacccaggacttctttttgaatatccacggctcgatccagagggtggggcatgatccccctagcatagcgagctacagcgggaactgtagctaggccttagcgtgccttggatactgcctgatagggcgacggcctagtcgtgtcggttctataggtagcacatacaaat

SEQ ID NO: 18369 - DNA, 650 bp, synthetic construct
  source 1..650: mol_type = other DNA
gccctcatgcccagtccttcctttccccttccggggggtaaaccggctgtgtttgctagaggcacagaggagcaacatccaacctgcttttgtggggaacggtgcggctccgattcctgcgtcgccaaaggtgttagcgcacccaaacggcgcatctaccaatgctattggtgtggtctgcgagttctagcctactcgtttctcccccatccactcactcgcgcacaaaaagtgtgttgtgactacaagatttagccctcgcacgggatgtgcgataaccacaagattgactcaagcgcggaaagcgctgtaaccacatgctgttagtccctttatggctgcgagacggctatccacctcggatcactgaactggagctcgaccctctttagtaagggaaccgagaggccttcttgcaacaagctccgacacagagtccacgtgattgctaccaccatgagtacatggttctcccctctcgacccaggacttctttttgaatatccacggctcgatccagagggtggggcatgatccccctagcatagcgagctacagcgggaactgtagctaggccttagcgtgccttggatactgcctgatagggcgacggcctagtcgtgtcggttctataggtagcacatataaat

SEQ ID NO: 18370 - DNA, 650 bp, synthetic construct
  source 1..650: mol_type = other DNA
gccctcatgcccagtccttcctttccccttccggggggtaaaccggctgtgtttgctagaggcacagaggagcaacatccaacctgcttttgtggggaacggtgcggctccgattcctgcgtcgccaaaggcgttagcgcacccaaacggcgcatctaccaatgctattggtgtggtctgcgagttctagcctactcgtttctcccccatccactcactcgcgcacaaaaagtgtgttgtgactacaagatttagccctcgcacgggatgtgcgataaccacaagattgactcaagcgcggaaagcgctgtaaccacatgctgttagtccctttatggctgcgagatggctatccacctcggatcactgaactggagctcgaccctccttagtaagggaaccgagaggccttcttgcaacaagctccgacacagagtccacgtgattgctaccaccatgagtacatggttctcccctctcgacccaggacttctttttgaatatccacggctcgattcagagggtggggcatgatccccctagcatagcgagctacagcgggaactgtagctaggtcttagcgtgccttggatactgcctgatagggcgacggcctagtcgtgtcggttctataggtagcacatacaaat

SEQ ID NO: 18371 - DNA, 650 bp, synthetic construct
  source 1..650: mol_type = other DNA
gccctcatgcccagtccttcctttccccttccggggggtaaaccggctgtgtttgctagaggcacagaggagcaacatccaacctgcttttgtggggaacggtgcggctccaattcctgcgtcgccaaaggtgttagcgcacccaaacggcgcatctaccaatgctattggtgtggtctgcgagttctagcctactcgtttctcccccactcactcattcacgcacaaaaactgtgttgtaactacaagatttagccctcgcacgggatgtgcgacaaccgcaagattgactcaagcgcggaaagcgctgtaaccacatgctgttagtccctttatggctgcgagatggctatccacctcggatcactgaactggagctcgaccctccttagtaagggaaccgagaggccttcttgcaacaagctccgacacagagtccacgtgattgctaccaccatgagtacatggttctcccctctcgacccaggacttctttttgaatatccacggctcgatccagagggtggggcatgatccccctagcatagcgagctacagcgggaactgtagctaggccttagcgtgccttggatactgcctgatagggcgacggcctagtcgtgtcggttctataggtagcacatacaaat

SEQ ID NO: 18372 - DNA, 650 bp, synthetic construct
  source 1..650: mol_type = other DNA
gccctcatgcccagtccttcctttccccttccggggggtaaaccggctgtgtttgctagaggcacagaggagcaacatccaacctgcttttgtggggaacggtgcggctccaattcctgcgtcgccaaaggtgttagcgcacccaaacggcgcatctaccaatgctattggtgtggtctgcgagttctagcctactcgtttctcccttactcactcattcacgcacaaaaactgtgttgtaactacaagatttagccctcgcacgggatgtgcgataaccgcaagattgactcaagcgcggaaagcgctgtaaccacatgctgttagtccctttatggctgcgagatggctatccacctcggatcactgaactggagctcgaccctccttagtaagggaaccgagaggccttcttgcaacaagctccgacacagagtccacgtgattgctaccaccatgagtacatggttctcccctctcgacccaggacttctttttgaatatccacggctcgatccagagggtggggcatgatccccctagcatagcgagctgcagcgggaactgtagctaggccttagcgtgccttggatactgcctgatagggcgacggcctagtcgtgtcggttctataggtagcacatacaaat

SEQ ID NO: 18373 - DNA, 650 bp, synthetic construct
  source 1..650: mol_type = other DNA
gccctcatgcccagtccttcctttccccttccggggggtaaaccggctgtgtttgctagaggcacagaggagcaacatccaacctgcttttgtggggaacggtgcggctccaattcctgcgtcgccaaaggtgttagcgcacccaaacggcgcatctaccaatgctattggtgtggtctgcgagttctagcctactcgtttctcccctactcactcattctcgcacaaaaactgtgttgtaactacaagatttagccctcgcacgggatgtgagataaccgcaagattgactcaagcgcggaaagcgctgtaaccacatgctgttagtccctttaaggctgcgagatggctatccacctcggatcactgaactggagctcgaccctccttagtaagggaaccgagaggccttcttgcaacaagctccgacacagagtccacgtgattgctaccaccatgagtacatggttctcccctctcgacccaggacttctttttgaatatccacggctcgatccagagggtggggcatgatccccctagcatagcgagctacagcgggaactgtagctaggccttagcgtgccttggatactgcctgatagggcgacggcctagtcgtgtcggttctataggtagcacatacaaat

SEQ ID NO: 18374 - DNA, 638 bp, synthetic construct; identical to SEQ ID NO: 72
  source 1..638: mol_type = other DNA

SEQ ID NO: 18375 - DNA, 640 bp, synthetic construct
  source 1..640: mol_type = other DNA
gcccagcccttcctttccccttccggggggttaaccggctgtgtttgctagaggcacagaggggcaacatccaacctgcttttgcggggaacggtgcggctccgattcctgcgccgccaaaggtgttagcgcacccaaacggcgcacctaccaatgttattggtgtggtctgcgagttctagcctactcgtttctcccccgaccattcactcgcccacgaaaagtgtgttgtaaccataagatttaacccccgcacgggatgtgcgataaccgtaagactggctcaagcgcggaaggcgctgtaaccacatgctgttagtccctttatggctgcaagatggctacccacctcggatcactgaactggagctcgaccctccttagtaagggaaccgagaggccttcgtgcaaaaagctccgacacagagtccacgtgactgctaccaccatgagtacatggttctcccctctcgacccaggacttctttttgaatatccacggctcgatccagagggtggggcatgacccctagcatagcgagctacagcgggaactgtagctaggtcttagcgtaccttggatactgcctgatagggcgacggcctagtcgtgtcggttctataggtagcacatacaaat

SEQ ID NO: 18376 - DNA, 625 bp, synthetic construct
  source 1..625: mol_type = other DNA
ttttcccagccagaggtggctggttaaataatacctattgtaacaaaacatctaagatacaacaaccacacacctggtttccactggctgaaggcaactagcaataaggcaggtgggttcaaacgcttaaagtgtgttgtatatattcttttctaacctgtgttttacacagggtggcagatggcgtgccataactctaatagtgagataccacgcttgtggaccttatgctcacacagccatcctctagtaagtttgtaagacgtctgatgacgtgtgggaacttgttggagataacattttgctgcaaagcatcccattgccagcggatccacatctggtaacagatgcctctggggccaaaagccaaggtttaacagaccctttgggattggttcaaacctgaattgttatggaagacatttagtacctgctgatttggtagtagtgcaaacactagttgtaaggcccacgaaggatgcccagaaggtacccgtaggtaacaagtgacactatggatctgatctggggccaactacctctatctaggtgagttggttaaaaaacatctagtgggccaaacccaggggggatccctggtttcctttttatttgaataatcact

SEQ ID NO: 18377 - DNA, 610 bp, synthetic construct
  source 1..610: mol_type = other DNA
ttaaccggctgtgtttgctagaggcacagaggggcaacatccaacctgcttttgtggggaacggtgcggctccgattcccgcgtcgccaaaggtgttagcgcacccaaacggcgcatctaccaatgttattggtgtggtctgcgagttctagcctactcgtttctcccccgaccattcactcgcccacgaaaagtgtgttgtaaccataagatttaacccccgcacgggatgtgcgataaccgtaagactgactcaagcgcggaaggcgctgtaaccacatgctgttagttcctttatggctgcaagatggctaccaacctcggatcactgaactggagctcgaccccccttagtaagggaaccgagaggccttcgtgcaaaaagctccgacacagagtccacgtgactgctaccaccatgagtacatggttctcccctctcgacccaggacttctttttgaatatccacggctcgatacagagggtggggcatgacccctagcatagcgagctacagcgggaactgtagctaggtcttagcgcaccttggatactgcctgatagggcgacggcctagtcgtgtcggttctataggtagcacatataaat

SEQ ID NO: 18378 - DNA, 624 bp, synthetic construct; identical to SEQ ID NO: 737
  source 1..624: mol_type = other DNA

SEQ ID NO: 18379 - DNA, 537 bp, synthetic construct
  source 1..537: mol_type = other DNA
ttttgcggctctgccgccgttcgggttttacctgttttcacagagcaaaacaggacctctagtttcgtgcttaaacgagatcatgctcgaactagaactataacgctggtcactggacccgtgccgcgccttgcggatctttgcgggaatggtggctagtgggctgtggaagtgactctaaccacacgcccctcaagtgtgggaaaacacgaactggtgtagcgacgacgataggccttgggacaccctctccagtgatggagacccaaggggccaaaagccacgccttgtgccctgtcgttcacaaccccagtgcagttcgtgccagtacctgcttttgggaagtgtgctttggacagctgaaaacagtcctagtgggagactaaggatgcccaggaggtacccggaggtaacaagtgacactctggatctgacttggggagagcgggtctgctttacagacgccactctttaaaaaacttctatgtctcgtcaggcaccggaggccgggccttttcctttaaaacaatacacttt

SEQ ID NO: 18380 - DNA, 252 bp, synthetic construct
  source 1..252: mol_type = other DNA
ttcggcgtgctcctttggtgattcggcgactggttacaggagagtaggcagtgagctatgggcaaacctctgcagtattactcagagggaatgtgcaattgagacttgacgagcgtctctttggagatgtggcgcatgctcttggcattaccatagtgagcttccaggttgggaaacctggactgggcctatactacctgatagggtcgcggctggccgcctgtaactagtatagtcagttgaaacccctcc

SEQ ID NO: 18381 - DNA, 642 bp, synthetic construct
  source 1..642: mol_type = other DNA
gcccagtccttcctttccccttccggggggtaaaccggctgtgtttgctagaggcacagaggagcaacatccaacctgcttttgtggggaacggtgcggctccaattcctgcgtcgccaaaggtgttagcgcacccaaacggcgcatctaccaatgctattggtgtggtctgcgagttctagcctactcgtttctcccctactcactcattcacacacaaaaactgtgttgtaactacaagatttagccctcgcacgggatgtgcgataaccgcaagattgactcaagcgcggaaagcgctgtaaccacatgctgttagtccctttatggctgcgagatggctatccacctcggatcactgaactggagctcgaccctccttagtaagggaaccgagaggccttcttgcaacaagctccgacacagagtccacgtgattgctaccaccatgagtacatggttctcccctctcgacccaggacttctttttgaatatccacggctcgatccagagggtggggcatgatccccctagcatagcgagctacagcgggaactgtagctaggccttagcgtgccttggatactgcctgatagggcgacggcctagtcgtgtcggttctataggtagcacatacaaat

SEQ ID NO: 18382 - DNA, 642 bp, synthetic construct
  source 1..642: mol_type = other DNA
gcccagcccttcctttccccttccggggggtaaaccggctgtgtttgctagaggcacagaggagcaacatccaacctgcttttgtggggaacggtgcggctccaattcctgcgtcgccaaaggtgttagcgcacccaaacggcgcatctaccaatgctattggtgtggtctgcgagttctagcctactcgtttctcccctactcactcattcacacacgaaaactgtgttgtaactacaagatttggccctcgcacgggatgtgcgataaccgcaagattgactcaagcgcggaaagcgctgtaaccacatgctgttagtccctttatggctgcgagatggctatccacctcggatcactgaactggagctcgaccctccttagtaagggaaccgagaggccttcctgcaacaagctccgacacagagtccacgtgattgctaccaccatgagtacatggttctcccctctcgacccaggacttctttttgaatatccacggctcgatccagagggtggggcatgatccccctagcatagcgagctacagcgggaactgtagctaggccttagcgtgccttggatactgcctgatagggtgacggcctagtcgtgtcggttctataggtagcacatacaaat

SEQ ID NO: 18383 - DNA, 642 bp, synthetic construct
  source 1..642: mol_type = other DNA
gcccagcccttcctttccccttccggggggtaaaccggctgtgtttgctagaggcacagaggagcaacatccaacctgcttttgtggggaacggtgcggctccaattcctgcgtcgccaaaggtgttagcgcacccaaacggcgcatctaccaatgctattggtgtggtctgcgagttctagcctactcgtttctcccctactcactcattcacacacaaaaactatgttgtaactacaagatttggccctcgcacgggatgtgcgataaccgtaagattgactcaagcgcggaaagcgctgtaaccacatgctgttagtccctttatggctgcgagatggctatccacctcggatcactgaactggagctcgaccctccttagtaagggaaccgagaggccttcctgcaacaagctccgacacagagtccacgtgattgctaccaccatgagtacatggttctcccctctcgacccaggacttctttttgaatatccacggctcgatccagagggtggggcatgatccccctagcatagcgagctacagcgggaactgtagctaggccttagcgtgccttggatactgcctgatagggcgacggcctagtcgtgtcggttctataggtagcacatacaaat

SEQ ID NO: 18384 - DNA, 619 bp, synthetic construct
  source 1..619: mol_type = other DNA
tccggggggttaaccggctgtgtttgctagaggcacagaggggcaacatccaacctgcttttgcggggaacggtgcggctccgattcctgcgccgccaaaggtgttagcgcacccaaacggcgcacctaccaatgttattggtgtggtctgcgagttctagcctactcgtttctcccccgaccattcactcgcccacgaaaagtgtgttgtaaccataagatttaacccccgcacgggatgtgcgataaccgtaagactggctcaagcgcggaaggcgctgtaaccacatgctgttagtccctttatggctgcaagatggctacccacctcggatcactgaactggagctcgaccctccttagtaagggaaccgagaggccttcgtgcaaaaagctccgacacagagtccacgtgactgctaccaccatgagtacatggttctcccctctcgacccaggacttctttttgaatatccacggctcgatccagagggtggggcatgacccctagcatagcgagctacagcgggaactgtagctaggtcttagcgtaccttggatactgcctgatagggcgacggcctagtcgtgtcggttctataggtagcacatacaaat

SEQ ID NO: 18385 - DNA, 627 bp, synthetic construct
  source 1..627: mol_type = other DNA
ccttttcctagccagaggtggctggttaaacaatacctattgtaacaaaacatctaagacacaacaaccgcacacctggtctccactggccgaaggcaactagcaataaggcaggtgggttcagacgcttaaagtgtgttgtgcatattcttttctaacctgtgttctacacagggtggcagatggcgtgccataaccctaatagtgagataccacgcttgtggaccttatgctcacacagccatcctctagtaagtttgtaagacatctgatgacgtgtgggaacttgttggagataacattttgctgcaaagcatcccattgccagcggatccacatctggtaacagatgcctctggggccaaaagccaaggtttaacagaccctttgggattggttcaaacctgaattgttatggaagacatttagtacctgctgatttggtggtagtgcaaacactagttgtaaggcccacgaaggatgcccagaaggtacccgtaggtaacaagtgacactatggatctgatctggggccaactacctctatctaggtgagttggttaaaaaacgtctagtgggccaaacccaggggggatccctggtttcctttttatttgaataatcact

SEQ ID NO: 18386 - DNA, 642 bp, synthetic construct
  source 1..642: mol_type = other DNA
gcccagtccttcctttccccttccggggggtaaaccggctgtgtttgctagaggcacagaggagcaacatccaacctgcttttgtggggaacggtgcggctccaattcctgcgtcgccaaaggtgttagcgcacccaaacggcgcatctaccaatgctattggtgtggtctgcgagttctagcctactcgtttctcccctactcactcattcacacacaaaaactgtgttgtaactacaagatttggccctcgcacgggatgtgcgataaccgtaagattgactcaagcgcggaaagcgctgtaaccacatgctgttagtccctttatggctgcgagatggctatccacctcggatcactgaactggagctcgaccctccttagtaagggaaccgagaggccttcctgcaacaagctccgacacagagtccacgtgattgctaccaccatgagtacatggttctcccctctcgacccaggacttctttttgaatatccacggctcgatccagagggtggggcatgatccccctagcatagcgagctacagcgggaactgtagctaggccttagcgtgccttggatactgcctgatagggcgacggcctagtcgtgtcggttctataggtagcacatacaaat

SEQ ID NO: 18387 - DNA, 642 bp, synthetic construct
  source 1..642: mol_type = other DNA
gcccagtccttcctttccccttccggggggtaaaccggctgtgtttgctagaggcacagaggagcaacatccaacctgcttttgtggggaacggtgcggctccaattcctgcgtcgccaaaggtgttagcgcacccaaacggcgcatctaccaatgctattggtgtggtctgcgagttctagcctactcgtttctcccctactcactcattcacacacaaaaactatgttgtaactacaagatttggccctcgcacgggatgtgcgataaccgtaagattgactcaagcgcggaaagcgctgtaaccacatgctgttagtccctttatggctgcgagatggctatccacctcggatcactgaactggagctcgaccctccttagtaagggaaccgagaggccttcctgcaacaagctccgacacagagtccacgtgattgctaccaccatgagtacatggttctcccctctcgacccaggacttctttttgaatatccacggctcgatccagagggtggggcatgatccccctagcatagcgagctacagcgggaactgtagctaggccttagcgtgccttggatactgcctgatagggcgacggcctagtcgtgtcggttctataggtagcacatacaaat

SEQ ID NO: 18388 - DNA, 637 bp, synthetic construct
  source 1..637: mol_type = other DNA
tccctttcccagccttgaggcggctggtcaataaatgcctcaaatgtaactaacatctaagattaacttagacaaccctatgcctggtctccgctagtcgaaggcgccttgcaataagacgagtggaacaaagacgcttaaagcatagtgaaaatatacatttctaacctgtggcctccacagggtggcagatggcgtgccataactctattagtgagataccacacttgtggaccttatgctcacacagccatcctctagtaagtttgtaagacgtctgatgacgtgtgggaagttattggaagtaacaatttgccgtaaggcatcctagagccagtggattaacacctggtaacaggtgcccctggggccaaaagccaaggtttaacagaccctttaggattggttcaaacctgggttgttatggaagatatttagtacctgctgatttggtagtaatacaaacactagttgtaaggcccacgaaggatgcccagaaggtacccgtaggtaacaagtgacactatggatctgatttggggttgactacctctgtcctggtgagtcaattaaaaaacgtctagtgggccaaacccaggggggatccctggtttccttttattttattacaaccatt

SEQ ID NO: 18389 - DNA, 487 bp, synthetic construct
  source 1..487: mol_type = other DNA
tttgctttgcggctctgccgccgttcgggttttacctgttttcacagagcaaaacaggacgtctagtttcgtgcttaaacgagatcatgctcgagctagaactacaatgctggttgctgaacccgtaccacaccttgtggaacttcgcgggggaagtgactagtgggctgtggaagtgactccgaccacacgccccatgagcgtgggaaaccacaaatcggtgtagcgacgacaacaggccttgggacaccctctccagtgatggagacccaaggggccaaaagccacgccttgtgccctgttgttcacaaccccagtgcgatttgtattagtacctactcatgggaactgtgcttggacagctgaacacaaccctagtgggagactaaggatgcccaggaggtacccggaggtaacaagtgacactctggatctgacctggggagagggggcctgctgtacaggcgcccctctttaaaaagcttct

SEQ ID NO: 18390 - DNA, 631 bp, synthetic construct
  source 1..631: mol_type = other DNA
cctttccccttccggggggtaaaccggctgtgtttgctagaggcacagaggagcaacatccaacctgcttttgtggggaacggtgcggctccaattcctgcgtcgccaaaggtgttagcgcacccaaacggcgcatctaccaatgctattggtgtggtctgcgagttctagcctactcgtttctcccctactcactcattcacgcacaaaaagtgtgttgtaactacaagatttagccctcgcacgggatgtgcgataaccgcaagattgactcaagcgcggaaagcgctgtaaccacatgctgttagtccctttatggctgcgagatggctatccacctcggatcactgaactggagctcgaccctccttagtaagggaaccgagaggccttcttgcaacaagctccgacacagagtccacgtgattgctaccaccatgagtacatggttctcccctctcgacccaggacttctttttgaatatccacggctcgatccagagggtggggcatgatccccctagcatagcgagctacagcgggaactgtagctaggccttagcgtgccttggatactgcctgatagggcgacggcctagtcgtgtcggttctataggtagcacatacaaat

SEQ ID NO: 18391 - DNA, 631 bp, synthetic construct
  source 1..631: mol_type = other DNA
cctttccccttccggggggtaaaccggctgtgtttgctagaggcacagaggagcaacatccaacctgcttttgtggggaacggtgcggctccaattcctgcgtcgccaaaggtgttagcgcacccaaacggcgcatctaccaatgctattggtgtggtctgcgagttctagcctactcgtttctcccctactcactcactcacgcacaaaaagtgtgttgtaactacaagatttagccctcgcacgggatgtgcgataaccgcaagattgactcaagcgcggaaagcgctgtaaccacatgctgttagtccctttatggctgcgagatggctatccacctcggatcactgaactggagctcgaccctccttagtaagggaaccgagaggccttcttgcaacaagctccgacacagagtccacgtgattgctaccaccatgagtacatggttctcccctctcgacccaggacttctttttgaatatccacggctcgatccagagggtggggcatgatccccctagcatagcgagctacagcgggaactgtagctaggccttagcgtgccttggatactgcctgatagggcgacggcctagtcgtgtcggttctataggtagcacatacaaat

SEQ ID NO: 18392 - DNA, 631 bp, synthetic construct
  source 1..631: mol_type = other DNA
cctttccccttccggggggtaaaccggctgtgtttgctagaggcacagaggagcaacatccaacctgcttttgtggggaacggtgcggctccaattcctgcgtcgccaaaggtgttagcgcacccaaacggcgcatctaccaatgctattggtgtggtctgcgagttctagcctactcgtttctcccctactcactcattcacacacaaaaactgtgttgtaactacaagatttggccctcgcacgggatgtgcgataaccgcaagattgactcaagcgcggaaagcgctgtaaccacatgctgttagtccctttatggctgcgagatggctatccacctcggatcactgaactggagctcgaccctccttagtaagggaaccgagaggccttcctgcaacaagctccgacacagagtccacgtgattgctaccaccatgagtacatggttctcccctctcgacccaggacttctttttgaatatccacggctcgatccagagggtggggcatgatccccctagcatagcgagctacagcgggaactgtagctaggccttagcgtgccttggatactgcctgatagggcgacggcctagtcgtgtcggttctataggtagcacatacaaat

SEQ ID NO: 18393 - DNA, 687 bp, synthetic construct
  source 1..687: mol_type = other DNA
agagcttggccgtcgggccttataccccgacttgctgagcttctctgggagagcccctttcccagccctgaggcggctggtcaataaagcctcaatagtaacaaacatctaagattattatactaaccccatgcctggtctccactagttgaaggcaacttgcaataaaatgagtggaaataagacgcttaaagcatggtgtaaattaacctttccaacccacacgctgtgtggggtggcagatggcgtgccataattctattagtgagataccacgcttgtggaccttatgctcacacagccatcctctagtaagtttgtaagacgtctggtgacgtgtgggaacttattggaaacaacattttgctgcaaagcatcctattgccagcggaacaacacctggtaacaggtgcctctggggccaaaagccaaggtttgacagaccctttaggattggtttaaacctggaatgttgcggaagatacttagtacctgccgatctggtagtaatgcagacactagttgtaaggcccacgaaggatgcccagaaggtacccgtaggtaacaagcgacactatggatctgatctggggctaggtacctctatcttggtgacctagtaaaaaacgtctagtgggccagacccgggggggatccccggtttccttttattttatcaatgtcact

SEQ ID NO: 18394 - DNA, 592 bp, synthetic construct; identical to SEQ ID NO: 30
  source 1..592: mol_type = other DNA

SEQ ID NO: 18395 - DNA, 636 bp, synthetic construct; identical to SEQ ID NO: 68
  source 1..636: mol_type = other DNA

SEQ ID NO: 18396 - DNA, 604 bp, synthetic construct
  source 1..604: mol_type = other DNA
ggttaaataatacctattgtaacaaaacatctaagatacaacaaccacacacctggtttccactggctgaaggcaactagcaataaggcaggtgggttcaaacgcttaaagtgtgttgtatatattcttttctaacctgtgttctacacagggtggcagatggcgtgccataactctaatagtgagataccacgcttgtggaccttatgctcacacagccatcctctagtaagtttgtaagacgtctgatgacgtgtgggaacttgttggagataacattttgctgcaaagcatcccattgccagcggatccacatctggtaacagatgcctctggggccaaaagccaaggtttaacagaccctttgggattggttcaaacctgaattgttatggaagacatttagtacctgctgatttggtagtagtgcaaacactagttgtaaggcccacgaaggatgcccagaaggtacccgtaggtaacaagtgacactatggatctgatctggggccaactacctctatctaggtgagttggttaaaaaacatctagtgggccaaacccaggggggatccctggtttcctttttatttgaataatcact

SEQ ID NO: 18397 - DNA, 601 bp, synthetic construct
  source 1..601: mol_type = other DNA
agcctcaactgtaacaaacatctaagattttacattaaccccatgcctggtctccactagttgaaggcaacttgcaataaaatgagtggaaataagacgcttaaagcatggtgtaaactaacttttctaacccacactttgtgtggggtggcaggtggcgtgccataattctattagtgagataccacgcttgtggaccttatgctcacacagccatcctctagtaagtttgtgagatgtctggtgacgtgtgggaacttattggaaataacattatgctgtaaagcatcctattgccagcgggacaacacctggtaacaggtgcctctggggccaaaagccaaggtttaacagaccctttaggattggttttaaaacctgtgatgttatggaagatacttagtacctgccgatctggtagtagtgcaaacactagttgtaaggcccacaaaggatgcccagaaggtacccgtaggtaacaagtgacactatggatctgatctggggccaggtacctctatcttggtgacctggttaaaaaacgtctagtgggccaaacccgggggggatccccggtttcttttaatttaccactatcact

SEQ ID NO: 18398 - DNA, 654 bp, synthetic construct; identical to SEQ ID NO: 79
  source 1..654: mol_type = other DNA

SEQ ID NO: 18399 - DNA, 591 bp, synthetic construct; identical to SEQ ID NO: 28
  source 1..591: mol_type = other DNA

SEQ ID NO: 18400 - DNA, 618 bp, synthetic construct; identical to SEQ ID NO: 58
  source 1..618: mol_type = other DNA

SEQ ID NO: 18401 - DNA, 747 bp, synthetic construct; identical to SEQ ID NO: 1143
  source 1..747: mol_type = other DNA

SEQ ID NO: 18402 - DNA, 636 bp, synthetic construct
  source 1..636: mol_type = other DNA
tccttcctttccccttccggggggtaaaccggctgtgtttgctagaggcacagaggagcaacatccaacctgcttttgtggggaacggtgcggctccaattcctgcgtcgccaaaggtgttagcgcacccaaacggcgcatctaccaatgctattggtgtggtctgcgagttctagcctactcgtttctcccctactcactcattcacgcacaaaaagtgtgttgtaactacaagatttagccctcgcacgggatgtgcgataaccgcaagattgactcaagcgcggaaagcgctgtaaccacatgctgttagtccctttacggctgcgagatggctatccacctcggatcactgaactggagctcgaccctccttagtaagggaaccgagaggccttcttgcaacaagctccgacacagagtccacgtgattgctaccaccatgagtacatggttctcccctctcgacccaggacttctttttgaatatccacggctcgatccagagggtggggcatgatccccctagcatagcgagctacagcgggaactgtagctaggccttagcgtgccttggatactgcctgatagggcgacggcctagtcgtgtcggttctataggtagcacatacaaat

SEQ ID NO: 18403 - DNA, 759 bp, synthetic construct; identical to SEQ ID NO: 1222
  source 1..759: mol_type = other DNA

SEQ ID NO: 18404 - DNA, 612 bp, synthetic construct
  source 1..612: mol_type = other DNA
gacaataaaagcctcaactgtaacaaacacctaagattattatattaaccccatgcctggtctccactggttgaaggcaacttgcaataaaatgagtggaaataagacgcttgaagcatggtgtaaatttacttttctaacccgcactttgtgtggggtggcagatggcgtgccataattctattagtgagataccacgcttgtggaccttatgctcacacagccatcctctagtaagtttgtgaggcgtctggtgacgtgtgggaacttattggaaacaacattttgctgcaaagcatcctatcgccagcggaacaacgcctggtaacaggcgcctctggggccaaaagccaaggtttgacagaccctttaggattggtttagaacctgagatgttgtggaaaatatttagtacctaccgacctggtagtaatgcaaacactagttgtaaggcccacgaaggatgcccagaaggtacccgtaggtaacaagtgacactatggatctgatctggggccaggtacttctatcatagtgagttggttaaaaaacgtctagtgggccaaacccaggggggatccctggtttccttttactttaatagttcacatt

SEQ ID NO: 18405 - DNA, 601 bp, synthetic construct
  source 1..601: mol_type = other DNA
gcctcaattgtaacaaacatctaagattattacattaaccccatgcctggtctccactagttgaaggcaacttgcaataaaatgagtggaaacaagacgcttaaagcatggtgtaaactaactcttctaacccacactttgtgtggggtggcagatggcgtgccataactctattagtgagataccacgcttgtggaccttatgctcacacagccatcctctagtaagtttgtgagacgtctggtgacgtgtgggaacttattggaaacaacattttgctgcaaagcatcctattgccagtggaacaacacctggtaacaggtgcctctggggccaaaagccaaggtttaacagaccctttaggattggtttaaaacctgaaatgttgtggaagatacttagtacctaccgatctggtagtagcgcaaacactagttgtaaggcccacgaaggatgcccagaaggtacccataggtaacaagagacactatggatctgatctggggccaggtacctctatctcggtgacctggttaaaaaacgtctagtgggccaaacccgggggggatccccggtttccttttattttatcaatgccact

SEQ ID NO: 18406 - DNA, 590 bp, synthetic construct
  source 1..590: mol_type = other DNA
taacaaacatctaagattattacattaaccccatgcctggtctccactagttgaaggcaacttgcaataaaatgagtggaaacaagacgcttaaagcatggtgtaaattaattttctaacccacattaagtgtggggtggcagatggcgtgccataactctactagtgagataccatgcttgtggaccttatgctcacacagccatcctctagtaagtttgtgagacgtctggtgacgtgtgggaacttattggaaacaacaccttgctgtaaagcatcctattgccagcggaacaacacctggtaacaggtgcctctggggccaaaagccaaggtttaacagaccctttaggattggttctgaacctgagatgttgcggaagatatttagtacctgccgatctggtagtaatgcaaacactagttgtaaggcccacgaaggatgcccagaaggtacccgtaggtaacaagagacactatggatctgatctggggtcaggtacctctatcttggtgacctggttaaaaaacgtctagtgggccaaacccgggggggatccccggtttccttttactttatcaatgccact

SEQ ID NO: 18407 - DNA, 610 bp, synthetic construct
  source 1..610: mol_type = other DNA
aaccggctgtgtttgctagaggcacagaggagcaacatccaacctgcttttgtggggaacggtgcggctccaattcctgcgtcgccaaaggtgttagcgcacccaaacggcgcatctaccaatgctattggtgtggtctgcgagttctagcctactcgtttctcccctattcattcactcacgcacaaaaagtgtgttgtaactacaagatttagccctcacacgggatgtgtgataaccgcaagactgactcaagcgcggaaagcgctgtaaccgcatgctgttagtccctttatggctgcgagatggctatccacctcggatcactgaactggagctcgaccctccttagtaagggaaccgagaggccttcttgcaacaagctccgacacagagtccacgtgattgctaccaccatgagtacatggttctcccctctcgacccaggacttctttttgaatatccacggctcgatccagagggtggggcatgatccccctagcatagcgagctacagcgggaactgtagctaggccttagcgtgccttggatactgcctgatagggcgacggcctagtcgtgtcggttctataggtagcacatacaaat

SEQ ID NO: 18408 - DNA, 610 bp, synthetic construct
  source 1..610: mol_type = other DNA
aaccggctgtgtttgctagaggcacagaggagcaacatccaacctgcttttgtggggaacggtgcggctccaattcctgcgtcgccaaaggtgttagcgcacccaaacggcgcatctaccaatgctattggtgtggtctgcgagttctagcctactcgtttctcccctattcattcactcacgcacaaaaagtgtgttgtaactacaagatttagccctcgcacgggatgtgcgataaccgcaagactgactcaagcgcggaaagcgctgtaaccgcatgctgttagtccctttatggctgcgagatggctatccacctcggatcactgaactggagctcgaccctccttagtaagggaaccgagaggccttcttgcaacaagctccgacacagagtccacgtgattgctaccaccatgagtacatggttctcccctctcgacccaggacttctttttgaatatccacggctcgatccagagggtggggcatgatccccctagcatagcgagctacagcgggaactgtagctaggccttagcgtgccttggatactgcctgatagggcgacggcctagtcgtgtcggttctataggtagcacatacaaat

SEQ ID NO: 18409 - DNA, 610 bp, synthetic construct
  source 1..610: mol_type = other DNA
aaccggctgtgtttgctagaggcacagaggagcaacatccaacctgcttttgtggggaacggtgcggctccaattcctgcgtcgccaaaggtgttagcgcacccaaacggcgcatctaccaatgctattggtgtggtctgcgagttctagcctactcgtttctcccctattcattcactcacgcacaaaaagtgtgttgtaactacaagatttagccctcgcacgggatgtgtgataaccgcaagactgactcaagcgcggaaagcgctgtaaccgcatgctgttagtccctttatggctgcgagatggctatccacctcggatcactgaactggagctcgaccctccttagtaagggaaccgagaggccttcttgcaacaagctccgacacagagtccacgtgattgctaccaccatgagtacatggttctcccctctcgacccaggacttctttttgaatatccacggctcgatccagagggtggggcatgatccccctagcatagcgagctacagcgggaactgtagctaggccttagcgtgccttggatactgcctgatagggcgacggcctagtcgtgtcggttctataggtagcacatacaaat

SEQ ID NO: 18410 - DNA, 610 bp, synthetic construct
  source 1..610: mol_type = other DNA
aaccggctgtgtttgctagaggcacagaggagcaacacccaacctgctcttgtggggaacggtgcggctccaattcctgcgtcgccaaaggtgttagcgcacccaaacggcgcatctaccaatgctattggtgtggtctgcgagttctagcctactcgtttctcccctattcattcactcacgcacaaaaagtgtgttgtaactacaagatttagccctcgcacgggatgtgcgataaccgcaagactgactcaagcgcggaaagcgctgtaaccgcatgctgttagtccctttatggctgcgagatggctatccacctcggatcactgaactggagctcgaccctccttagtaagggaaccgagaggccttcttgcaacaagctccgacacagagtccacgtgattgctaccaccatgagtacatggttctcccctctcgacccaggacttctttttgaatatccacggctcgatccagagggtggggcatgatccccctagcatagcgagctacagcgggaactgtagctaggccttagcgtgccttggatactgcctgatagggcgacggcctagtcgtgtcggttctataggtagcacatacaact

SEQ ID NO: 18411 - DNA, 621 bp, synthetic construct
  source 1..621: mol_type = other DNA
ggacacaggtggctggttaaacaatacctattgtaacaaaacatctaagacataacaaccgcacacctggtctccactggccgaaggcaactagcaataaggtaggtgggttcagacgcttaaagtgtgttgtatatattcttttctaacctgtgttttacacagggtggcagatggcgtgccataaccctaatagtgagataccacgcttgtggaccttatgctcacacagccatcctctagtaagtttgtaagacgtctgatgacgtgtgggaacttgttggagataacattttgctgcaaagcatcccattgccagcggatccacatctggtaacagatgcctctggggccaaaagccaaggtttaacagaccctttgggattggttcaaacctgaattgttatggaagacatttagtacctgctgatttggtagtagtgcaaacactagttgtaaggcccacgaaggatgcccagaaggtacccgtaggtaacaagtgacactatggatctgatctggggccaactacctctatctaggtgagttggttaaaaaacgtctagtgggccaaacccaggggggatccctggtttccttttttaaatttgaataatcact

SEQ ID NO: 18412 - DNA, 579 bp, synthetic construct
  source 1..579: mol_type = other DNA
aactaacatctatgacaactatcacacaaccttgtacctggtctccactagtcgaaggcaacttgcaataagataagtggaatgaagacgcttaaagtacaatgtaagtaatcttttctaatccacaattttgtggagtggcagatggcgtgccataactctaatagtgagataccatacttgtggacctcatgctcacacagccatcctctagtaagtttataagacgtctggtgacgtgtgggaacttatgggaatcaatgttttgctgcaaggcatctattagccagcggataaacacctggtaacaggtgcctctggggccaaaagccaaggtttgacagaccctaatagattggtttaaacctgaaacattgtggaacatattcagtacctgccgatctggtagtaatgtaaacactagttgtaaggcccacgaaggatgcccagaaggtacccgtaggcaacaagggacactatggatctgatctggggctgagtacctctatcttggtgactcagttaaaaagcgtctagtgggccaaacccaggggggatccctggtttcttttattttaa

SEQ ID NO: 18413 - DNA, 567 bp, synthetic construct
  source 1..567: mol_type = other DNA
gggttcttaaatctgtttctctataagaacactcatttttcacgctctctgtcttctttcttccagggctctccccttgccctaggctctggccgttgcgcccggcggggtcaactccatgattagcatggagctgtaggagtctaaattggggacacagatgtttggaacgtcaccttgcagtgttaacttggctttcatgaatctctttgatcttccataaggggtaggctacgggtgaaacctcttaggctaatacttctatgaagagatgctttggatagggtaacagcggcggatattggtgagttgttaagacaaaaaccattcaacgccggaggactgactctcatccagtggatgcattgagtggattgactgtcagggctgtctctaggcttaattccagacctctctgtgcttagggcaaacatcatttggccttaaatgggattctgtgagaggggatccctccattgacagctggactgttctttggggccttatgtggtgtttgcctctgaggtactcaggggcatttaggtttttcctcattcttaaataata

SEQ ID NO: 18414 - DNA, 511 bp, synthetic construct
  source 1..511: mol_type = other DNA
gttttacctgttttcacagagcaaaacaggacgtctagtttcgtgcttaaacgagatcatgctcgaactagaactacaacgctggtcactgaacccgtaccacaccttgtggaactccgcggggaaagtggctagtgggctgtagaagtgactctgaccacacgccccacgagcgtgggaaatcacaaatcggtgtagcgacgacaacaggccttgggacaccctctccagtgatggagacccaaggggccaaaagccacgccttgtgccctgttgttcacaaccccagtgcgatttgtgttagtacctactcatgggaactgtgcttggacagctgaacacagccctagtgggagactaaggatgcccaggaggtacccggaggtaacaagtgacactctggatctgacttggggagagggggcctgctttacaggcgcccctctttaaaaagcttctatgtctcatcaggcaccggaggccgggccttttccttttaaaacaacatttt

SEQ ID NO: 18415 - DNA, 511 bp, synthetic construct
  source 1..511: mol_type = other DNA
gttttacctgttttcacagagcaaaacaggacgtctagtttcgtgcttaaacgatatcatgctcgaactagaactacaacgctggtcactgaacccgtaccacaccttgtggaactccgcggggaaagtgactagtgggctgtagaagtgactctgaccacacgccccatgagcgtgggaaaccacaaatcggtgtagcgacgacaacaggccttgggacaccctctccagtgatggagacccaaggggccaaaagccacgccttgtgccctgttgttcacaaccccagtgcgatttgtgttagtacctactcacgggaactgtgcttggacagctgaacacagccctggtgggagactaaggatgcccaggaggtacccggaggcaacaagcgacactctggatctgacctggggagagggggcctgctttacaggcgcccctctttaaaaagcttctatgtctcatcaggcaccggaggccgggccttttccttttaaaacaacatttt

SEQ ID NO: 18416 - DNA, 749 bp, synthetic construct; identical to SEQ ID NO: 1190
  source 1..749: mol_type = other DNA

SEQ ID NO: 18417 - DNA, 435 bp, synthetic construct
  source 1..435: mol_type = other DNA
taagtagggaacatattcaattcatattgttcatctcactgaacccgcatgaaggactgcattgcatatcctggacgaggtgacgtggaatatttggacatttatggattggacactataacgctttgtgcctctacggagatgtaaccataatcttaagtagtagtaccccagcacaagaggataaagtggcatacacgacaacgggtgttgctcgcaccttagtaatgtggatgtccacccttggagcgtgctgaaactctgtgggtaaagacacatattagtacaaatgtgggggaactcactgaaagggcatgtcccgtgtactggtgtgccggaaagtgggggtcgctttctggagaacttagtagttcttgttattgggtgatagccttgcggcggatcaacccacagttttaatccgttgttttgcat

SEQ ID NO: 18418 - DNA, 639 bp, synthetic construct
  source 1..639: mol_type = other DNA
agagtccctttcccagccctgaggtggctggttaataatagcctcaaacgtaaccaacatctaagaagattgtataaaccctatgcctggcccccactattcgaaggcaactcgcaataagagagtggaatcagggtgcttaaagcatagagacagttttcatttctaacccacatgattgtggggtggcagatggcgtgccataattctaatagtgagataccacgcttgtggaccttatgctcacacagccaccctctagtaagtttgtgagacgtctggtgacgtgtgggaactcattggaaacaacattttgctgcaaagcatcctactgccagcggaacaacacctggtaacaggtgcctctggggccaaaagccaaggtttaacagaccctttaggattggttctgaacctgagatgttgtggaaaatatttagtacctgctgatctggtagtaatgcaagcactagttgtaaggcccacgaaggatgcccagaaggtacccgtaggtaacaagtgactctatggatctgatctggggccaactacctctatcttggtgagttggttaaaaaacgtctagtgggccaaacccgggggggatccctggtttccttttattttatcatagttaat

SEQ ID NO: 18419 - DNA, 570 bp, synthetic construct; identical to SEQ ID NO: 26
  source 1..570: mol_type = other DNA

SEQ ID NO: 18420 - DNA, 611 bp, synthetic construct
  source 1..611: mol_type = other DNA
ggctggttaaacaatacctattgtaacaaaacatctaagactgtacaaccgcacacctggtctccactggccgaaggcaactagcaataaggtaggtgggttcagacgcttaaagtgtgttgtatatattcttttctaacctgtgttttacacagggtggcagatggcgtgccataaccctaatagtgagataccacgcttgtggaccttatgctcacacagccatcctctagtaagtttgtaagacgtctgatgacgtgtgggaacttgttggagataacattttgctgcaaagcatcccattgccagcggatccacatctggtaacagatgcctctggggccaaaagccaaggtttaacagaccctttgggattggttcaaacctgaattgttatggaagacatttagtacctgctgatttggtagtagtgcaaacactagttgtaaggcccacgaaggatgcccagaaggtacccgtaggtaacaagtgacactatggatctgatctggggccaactacctctatctaggtgagttggttaaaaaacgtctagtgggccaaacccaggggggatccctggtttccttttttaaatttgaataatcact

SEQ ID NO: 18421 - DNA, 605 bp, synthetic construct
  source 1..605: mol_type = other DNA
ttaaacaatacctattgtaacaaaacatctaagacataacaaccgcacacctggtctccactggccgaaggcaactagcaataaggtaggtgggttcagacgcttaaagtgtgttgtatatattcttttctaacctgtgttttacacagggtggcagatggcgtgccataaccctaatagtgagataccacgcttgtggaccttatgctcacacagccatcctctagtaagtttgtaagacgtctgatgacgtgtgggaacttgttggagataacattttgctgcaaagcatcccattgccagcggatccacatctggtaacagatgcctctggggccaaaagccaaggtttaacagaccctttgggattggttcaaacctgaattgttatggaagacatttagtacctgctgatttggtagtagtgcaaacactagttgtaaggcccacgaaggatgcccagaaggtacccgtaggtaacaagtgacactatggatctgatctggggccaactacctctatctaggtgagttggttaaaaaacgtctagtgggccaaacccaggggggatccctggtttccttttttaaatttgaataatcact

SEQ ID NO: 18422 - DNA, 609 bp, synthetic construct
  source 1..609: mol_type = other DNA
ttccctttgttttgcttgtaaatattaattcctgcaggttcagggttctttgatctgtttctctataagaacactcaattttcacgctttctgtcttctttcttccagggctctccccttgccctaggctctggccgttgcgcccggcggggtcaactccatgattagcatggagctgtaggagtctaaattggggacgcagatgtttgggacgtcgccttgcagtgttaacttggctctcatgaacctctttgatcttccacaaggggtaggctacgggtgaaacctcttaggctaatacttctatgaagagatgccttggatagggtaacagcggcggatattggtgagttgttaagacaaaaaccattcaacgccggaggactggctctcatccagtggatgcattgagtggattgattgtcagggctgtctttaggtttaatctcagacctctctgtgcttagggcaaacactatttggccttaaatgggaccctgtgagagggggtccctccattgacagctggactgttctttggggccttatgtggtgtttgcctctgaggtactcaggggcatttaggtttttcctcattcttaaacaata

SEQ ID NO: 18423 - DNA, 473 bp, synthetic construct
  source 1..473: mol_type = other DNA
ggcggcggggggcctctcccgcccgtcgcccgcgcgcgcgcgcgcccctctctccctccccctttgaatttgtaactggtaagtgatgatccttggaaactaggtacttgctacgctagttttggattatcttgtgcccaacattagtcctcggacttctgttgtgtttaaacacagaaatttggatgtctggctatagattcatgggaacaacccctctgaaagacctgctctggcgcgagctaaagcgcaattgtcaccaggtattgcaccaatggtggcgacagggtacagaagagcaagtactcctgactgggcaatgggactgcgttgcatatccctaggtacctattgagatttctctggggcccaccagcgtggagttcctgtatgggaatgcaggactggacttgtgctacctgacagggtcgcggctggccgtctgtactttgtatagtcagttgaaactcacc

SEQ ID NO: 18424 - DNA, 344 bp, synthetic construct
  source 1..344: mol_type = other DNA
catatggtatgattattggatacaccttgaacggcagtagcgtggcgagctatggaaaaatcgcaattgtcgatagccatgttagtgacgcgcttcggcgtgctcctttggtgattcggcgactggttacaggagagtaggcagtgagctatgggcaaacctctgcagtattactcagagggaatgtgcaattgagacttgacgagcgtctcttcgagatgtggcgcatgctcttggcattaccatagtgagcttccaggttgggaaacctggactgggcctatactacctgatagggtcgcggctggccgcctgtaactagtatagtcagttgaaaccccccc

SEQ ID NO: 18425 - DNA, 604 bp, synthetic construct; identical to SEQ ID NO: 40
  source 1..604: mol_type = other DNA

SEQ ID NO: 18426 - DNA, 581 bp, synthetic construct
  source 1..581: mol_type = other DNA
gcaacaacatccaacctgcttttgtggggaacggtgcggctccattcctgcgtcgccaaaggtgttagcgcacccaaacggcgcatctaccaatgctattggtgtggtctgcgagttctagcctactcgtttctcccctgctcactcatttacacacaaaaactgtgttgtaactacaagatttggccctcgcacgggatgtgcgataaccgtaagactgactcaagcgcggaaagcgctgtaaccacatgctgttagtccctttatggctgcgagatggctatccacctcggatcactgaactggagctcgaccctccttagtaagggaaccgagaggccttcctgcaacaagctccgacacagagtccacgtgattgctaccaccatgagtacatggttctcccctctcgacccaggacttctttttgaatatccacggctcgatccagagggtggggcatgatccccctagcatagcgagctacagcgggaactgtagctaggccttagcgtgccttggatactgcctgatagggcgacggcctagtcgtgtcggttctataggtagcacatacaaat

SEQ ID NO: 18427 - DNA, 407 bp, synthetic construct; identical to SEQ ID NO: 445
  source 1..407: mol_type = other DNA

SEQ ID NO: 18428 - DNA, 609 bp, synthetic construct
  source 1..609: mol_type = other DNA
accggctgtgtttgctagaggcacagaggagcaacatccaacctgcttttgtggggaacggtgcggctccaattcctgcgtcgccaaaggtgttagcgcacccaaacggcgcatctaccaatgctattggtgtggtctgcgagttctagcctactcgtttctcccctatccactcactcacgcacaaaaagtgtgctgtaactacaagatttagccctcgcacgagatgtgcgataaccgcaagattgactcaagcgcggaaagcgctgtaaccacatgctgttagtcccttcatggctgcgagatggctatccacctcggatcactgaactggagctcgaccctccttagtaagggaaccgagaggccttcttgcaacaagctccgacacagagtccacgtgattgctaccaccatgagtacatggttctcccctctcgacccaggacttctttttgaatatccacggctcgatccagagggtggggcatgatccccctagcatagcgagctacagcgggaactgtagctaggccttagcgtgccttggatactgcctgatagggcgacggcctagtcgtgtcggttctataggtagcacatacaaat

SEQ ID NO: 18429 - DNA, 607 bp, synthetic construct
  source 1..607: mol_type = other DNA
cggctgtgtttgctagagacacagaggaccaacatccaacctgcttttgtggggaacggtgcggctccaattcctgcgtcgccaaaggtgttagcgcactcaaacggcgcatctaccaatgctattggtgtggtctgcgagttctagcctactcgtttctcccttatccactcactcacgcacaaaaagtgtgctgcaactacaagatttagccctcgcacgagatgtgcgataaccgcaagattgactcaagcgcggaaagcgctgaaaccacatgctgttagtcccttcatggctgtgagatggctatccacctcggatcactgaactggagctcgaccctccttagtaagggaaccgagaggccttcttgcaacaagctccgacacagagtccacgtgattgctaccaccatgagtacatggttctcccctctcgacccaggacttctttttgaatatccacggctcgatccagagggtggggcatgatccccctagcatagcgagctacagcgggaactgtagctaggccttagcgtgccttggatactgcctgatagggcgacggcctagtcgtgtcggttctataggtagcacatacaaat

SEQ ID NO: 18430 - DNA, 499 bp, synthetic construct
  source 1..499: mol_type = other DNA
ctctccccttgccctaggctctggccgttgcgcccggcggggtcaactccatgactagcatggagctgtaggagtctaaattggggacacaaatgtttggaacgtcaccttgcagtgttaacttggctttcatgaatctctttgatcttccacaaggggtaggctacgggtgaaacctcttaggctaatacttctatgaagagatgctttggatagggtaacagcggcggatattggtgagttgttaagacaaaaaccattcaacgccggaggactgactctcatccagtggatgcattgagtggattgactgtcagggctgtctctaggcttaattccagacctctctgtgcttagggcaaacatcatttggccttaaatgggattctgtgagaggggatccctccattgactgctggactgttctttggggccttatgtggtgtttgcctctgaggtactcaggggcatttaggtttttcctcattcttaaataata

SEQ ID NO: 18431 - DNA, 499 bp, synthetic construct
  source 1..499: mol_type = other DNA
ctctccccttgccctaggctctggccgttgcgcccggcggggtcaactccatgactagcatggagctgtaggagtctaaattggggacacaaatgtttggaacgtcaccttgcagtgttaacttggctttcatgaatctctttgatcttccacaaggggtaggctacgggtgaaacctcttaggctaatacttctatgaagagatgctttggatagggtaacagcggcggatattggtgagttgttaagacaaaaaccattcaacgccggaggactgactctcatccagtggatgcattgagtggattgactgtcagggctgtctctaggcttaattccagacctctctgtgcttagggcaaacatcatttggccttaaatgggattctgtgagaggggatccctccattgactgctggactgtactttggggccttatgtggtgtttgcctctgaggtactcaggggcatttaggtttttcctcattcttacataata

SEQ ID NO: 18432 - DNA, 601 bp, synthetic construct
  source 1..601: mol_type = other DNA
agcctcaatcgtaacaaacatctaagattttacatcaaccctatgcctggtctccactagttgaaggcaacttgcaataaaatgagtggaaataagacgcttaaagcatagtgtgaactaacttttctagcccacactttgtgtggggtggcagatggcgtgccataatcctattagtgagataccacgcttgtggaccttatgctcacacagccatcctctagtaagtttgtgagacgtctggtgacgtgtgggaacttattggaaataacattatgctataaagcatcctaatgccagcggaacaacacctggtaacaggtgcctctggggccaaaagccaaggtttaacagaccctttaggattggtttaaaaacctgtaatgttatggaaaatacttagtacctaccgatctggtagtagtgcaaacactagttgtaaggcccacgaaggatgcccagaaggtacccgtaggtaacaagtgacactatggatctgatctggggccaggtacctctatcttggtgacctggttaaaaaacgtctagtgggccaaacccgggggggatccccggtttcttttaatttaccaatgtcact

SEQ ID NO: 18433 - DNA, 608 bp, synthetic construct
  source 1..608: mol_type = other DNA
ccggctgtgtttgctagaggcacagtggagcaacatccaacctgcttttgtggggaacggtgcggctccaattcctgcgtcgccaaaggtgttagcgcacccaaacggcgcgtctaccaatgctattggtgtggtctgcgagttctagcctactcgtttctcccctactcactcattcacgcacaaaaactgtgttgtaactacaaggtttagccctcgcacgggatgtgcgataaccgcaagatcgactcaagcgcggaaagcgctgtaaccacatgctgttagtccctttatggctgcgagatggctacccacctcggatcactgaactggagctcgaccctccttagtaagggaaccgagaggccttcttgcaacaagctccgacacagagtccacgtgattgctaccaccatgagtacatggttctcccctctcgacccaggacttctttttgaatatccacggctcgatccagagggtggggcatgatccccctagcatagcgagctacagcgggaactgtagctaggccttagcgtgccttggatactgcctgatagggcgacggcctagtcgtgtcggttctataggtagcacatacaaat

SEQ ID NO: 18434 - DNA, 343 bp, synthetic construct; identical to SEQ ID NO: 326
  source 1..343: mol_type = other DNA

SEQ ID NO: 18435 - DNA, 583 bp, synthetic construct
  source 1..583: mol_type = other DNA
aaacatctaagacataacaaccgcacacctggtctccactggccgaaggcaactagcaataaggtaggtgggttcagacgcttaaagtgtgttgtatatattcttttctaacctgtgttttacacagggtggcagatggcgtgccataaccctaatagtgagataccacgcttgtggaccttatgctcacacagccatcctctagtaagtttgtaagacgtctgatgatgtgtgggaacttgttggagataacattttgctgcaaagcatcccattgccagcggatccacatctggtaacagatgcctctggggccaaaagccaaggtttaacagaccctttgggattggttcaaacctgaattgttatggaagacatttagtacctgctgatttggtagtagtgcaaacactagttgtaaggcccacgaaggatgcccagaaggtacccgtaggtaacaagtgacactatggatctgatctggggccaactacctctatctaggtgagttggttaaaaaacgtctagtgggccaaacccaggggggatccctggtttccttttttaaatttgaataatcact

SEQ ID NO: 18436 - DNA, 610 bp, synthetic construct; identical to SEQ ID NO: 46
  source 1..610: mol_type = other DNA

SEQ ID NO: 18437 - DNA, 457 bp, synthetic construct; identical to SEQ ID NO: 497
  source 1..457: mol_type = other DNA

SEQ ID NO: 18438 - DNA, 670 bp, synthetic construct
  source 1..670: mol_type = other DNA
atggtgaggggacttgatacctcaccgccgtttgcctaggctataggctaaacttccctttcccctttccctttattgttgtaaatattaattcctgcaggttcaggtctcttggatttgttccactttatggacactcatttcacgctttctgtctgcttttcttccagggctctccccttgccctaggctctggccgttgcgcccggcggggtcaactccatgactagcatggagctgtaggagtctaaattggggacacagatgttgggaacgtcaccttgcagtgttaacttggctttcatgaagctttttgatcttccacaagaggtaggctacgggtgaaacctcttaagctaatacttctatgaagagatgctttggatagggtaacagcggcggatattggtgagttgcttgacaaaaaccattcaacgccggaggactggctctcatccagtggatgcattaagtggattgtctgtcagggctgtctctaggtttaattcctgacctctctgtgcttagggcaaacaaaacttggccttaaatgaggtcctgtgagaggggacctcgccattgaatgctggacatttctttggggccttatgttttgtttgcctctgaggtactcaggggcatttaggtttttcctcatcaataaataatt

SEQ ID NO: 18439 - DNA, 614 bp, synthetic construct; identical to SEQ ID NO: 52
  source 1..614: mol_type = other DNA

SEQ ID NO: 18440 - DNA, 580 bp, synthetic construct
  source 1..580: mol_type = other DNA
agcaacatccaacctgcttttgtggggaacggtgcggctccaattcctgcgtcgccaaaggtgttagcgcacccaaacggcgcatctaccaatgctattggtgtggtctgcgagttctagcctactcgtttctcccttatccactcactcacgcacaaaaagtgtgctgtaactacaagatttagccctcgcacgagacgtgcgataaccgcaagattgactcaagcgcggaaagcgctgtaaccacatgctgttagtcccttcacggctgcgagatggctatccacctcggatcactgaactggagctcgaccctccttagtaagggaaccgagaggccttcttgcaacaagctccgacacagagtccacgtgattgctaccaccatgagtacatggttctcccctctcgacccaggacttctttttgaatatccacggctcgatccagagggtggggcatgatccccctagcatagcgagctacagcgggaactgtagctaggccttagcgtgccttggatactgcctgatagggcgacggcctagtcgtgtcggttctataggtagcacatacaaat

SEQ ID NO: 18441 - DNA, 597 bp, synthetic construct
  source 1..597: mol_type = other DNA
tgctagaggcacagaggagcaacatccaacctgcttttgtggggaacggtgcggctccaattcctgcgtcgccaaaggtgttagcgcacccaaacggcgcatctaccaatgctattggtgtggtctgcgagttctagcctactcgtttctcccttatccactcactcacgcacaaaaagtgtgctgtaactacaagatttagccctcgcacgagacgtgcgataaccgcaagattgactcaagcgcggaaagcgctgtaaccacatgctgttagtcccttcacggctgcgagatggctatccacctcggatcactgaactggagctcgaccctccttagtaagggaaccgagaggccttcttgcaacaagctccgacacagagtccacgtgattgctaccaccatgagtacatggttctcccctctcgacccaggacttctttttgaatatccacggctcgatccagagggtggggcatgatccccctagcatagcgagctacagcgggaactgtagctaggccttagcgtgccttggatactgcctgatagggcgacggcctagtcgtgtcggttctataggtagcacatacaaat

SEQ ID NO: 18442 - DNA, 416 bp, synthetic construct; identical to SEQ ID NO: 455
  source 1..416: mol_type = other DNA

SEQ ID NO: 18443 - DNA, 583 bp, synthetic construct
  source 1..583: mol_type = other DNA
aggagcaacatccaacctgcttctgtggggaacggtgcggctccaattcctgcgtcgccaaaggtgttagcgcacccaaacggcgcatctaccaatgctattggtgtggtctgcgagttctagcctactcgtttctcccttatccactcactcacgcacaaaaagtgtgctgtaactacaagatttagccctcgcacgagatgtgcgataaccgcaagattgactcaagcgcggaaagcgctgtaaccacatgctgttagtcccttcgtggctgcgagatggctatccacctcggatcactgaactggagctcgaccctccttagtaagggaaccgagaggccttctagcaacaagctccgacacagagtccacgtgattgctaccaccatgagtacatggttctcccctctcgacccaggacttctttttgaatatccacggctcgatccagagggtggggcatgatccccctagcatagcgagctacagcgggaactgtagctaggccttagcgtgccttggatactgcctgatagggcgacggcctagtcgtgtcggttctataggtagcacatacaaat

SEQ ID NO: 18444 - DNA, 426 bp, synthetic construct; identical to SEQ ID NO: 466
  source 1..426: mol_type = other DNA

SEQ ID NO: 18445 - DNA, 426 bp, synthetic construct
  source 1..426: mol_type = other DNA
ccccccccctccccctctgaacttgtaactggtaagtgatgatccttggaagctaggtacctgttacgctagttttggattatcttgtgcccaacactagtctttggacttctgttgtgtttaaacacagaaatctgattgcttggttatgaattcactggactaacccttttgaaagacctgctctggcgcgagctaaagcgcaattgtcaccgggtattgcaccaatggtggcgacagggtacagaagagcaagtactcctgactgggcaatgggactgcattgcatatccctaggcacctattgagatttctctggggcccaccagcgtggagttcctgtatgggaatgcaggactggacttgcgctgcctgacagggtcgcggctggccgtctgtactttgtatagtcagttgaaactcacc

SEQ ID NO: 18446 - DNA, 675 bp, synthetic construct
  source 1..675: mol_type = other DNA
ccgtcgggccttataccccgatttgctgagcttctctaggagagcccttttcccagccagaggtggctggttaaacaatacctattgtaacaaaacatctaagacataacaaccgcacacctggtctccactggccgaaggcaactagcaataaggtaggtgggttcagacgcttaaagtgtgttgtatatattcttttctaacctgtgttttaaacagggtggcagatggcgtgccataaccctaatagtgagataccacgcttgtggaccttatgctcacacagccatcctctagtaagtttgtaagacgtctgatgacgtgtgggaacttgttggagataacattttgctgcaaagcatcccattgccagcggatccacatctggtaacagatgcctctggggccaaaagccaaggtttaacagaccctttgggattggttcaaacctgaattgttatggaagacatttagtacctgctgatttggtagtagtgcaaacactagttgtaaggcccacgaaggatgcccagaaggtacccgtaggtaacaagtgacactatggatctgatctggggccaactacctctatctaggtgagttggttaaaaaacgtctagtgggccaaacccaggggggatccctggtttccttttttaaatttgaataatcact

SEQ ID NO: 18447 - DNA, 368 bp, synthetic construct
  source 1..368: mol_type = other DNA
atttgttacgctagttttggattatcttgtgcccaacatttgttttcgaacatatgttgtgtttaaacacagaaatctagtttctttggttatgagtttaatggaatatccttttgaaagacttgccttggcgcgggctagagcgcaattgtcaccaggtattgcaccaatggtggcgacagggtacagaagagcaagtactcctgactgggtaatgggactgcattgcatatccctaggcatctattgagatttctctggagcccaccagcatggagttcctgtatgggaatgcaggactggacttgtgctgcctgacagggtcgcggctggccgtctgtactttgtatagtcagttgaaactcatt

SEQ ID NO: 18448 - DNA, 543 bp, synthetic construct
  source 1..543: mol_type = other DNA
actggccgaaggcagctagcaataaggcaggtgggtttagacgcttaaagtgtgttgtacatattcttttctaacctgtgttctacacagggtggcagatggcgtgccataactctaatagtgagataccacacttgtggaccttatgctcacacagccatcctctagtaagtttgtaagacgtctgatgacgtgtgggaacttgttggaaataacagtttgctgcaaggcatcccactgccagcgggttcacatctggtaacagatgcctctggggccaaaagccaaggtttaatagaccctttgggattggttcaaacctgaactgttatggaagacatttagtacctgctgatttggtagtaatgcaaacactagttgtaaggcccacgaaggatgcccagaaggtacccgtaggtaacaagtgacactatggatctgatctggggccggctacctctatctaggtgagttggttaaaaaacgtctagtgggccaaacccaggggggatccctggtttctttttaatttgagtagtcact

SEQ ID NO: 18449 - DNA, 562 bp, synthetic construct
  source 1..562: mol_type = other DNA
accctgtgcctggtctccactattcgaaggcaacttgcaataagaagagtggaattaagacgcttaaagcatagtgacagttttcttttctaacccacattcgtgtggggtggcagatggcgtgccataactctattagtgagataccacacttgtggaccttatgctcacacagccatcctctagtaagtttatgagacgtctggtgacgtgtgggaacttattggaaacaatattttgctgcaaagcatcctattgccagcggaacaacacctggtaacaggtgcctctggggccaaaagccaaggttttacagaccctttaggattggttctaaacctgaaatgttgtggaaaatatttagtacctgctgatctggtagtaatgtgaacactagttgtaaggcccacgaaggatgcccagaaggtacccgtaggtaacaagtgacactatggatctgatctggggccgactacctctatcttggtgagttggttaaaaaacgtctagtgggccaaacccaggggggatccctggtttcttttattttaacacagccaat

SEQ ID NO: 18450 - DNA, 424 bp, synthetic construct; identical to SEQ ID NO: 465
  source 1..424: mol_type = other DNA

SEQ ID NO: 18451 - DNA, 488 bp, synthetic construct
  source 1..488: mol_type = other DNA
agacaacctatttttctaacccgcaaattattgtggggtggtagatggcgtaccataattctactagtgagataccatgcttgtggatcttatgctcacacagccatcctctagtaagtttgcaaggcgtctggtgacgtgtgggaacttattggaaataacatcttgctgcaaggcatccattagccagcggaataacacctggtaacaggtgcctctggggccaaaagccaaggtttagcagaccctaatggattggttcaaacctgggatgttgtggaagatacttagtacctaccgatctggtagcaatgcaaacactagttgtaaggcccacgaaggatgcccagaaggtacccgtaggtaacaagagacactatggatctgatttggggccaactacctctatcctggtgagttggttaaaaaacgtctagtgggccaaacccaggggggatccctggtttcttttacttatcactgtcatt

SEQ ID NO: 18452 - DNA, 571 bp, synthetic construct
  source 1..571: mol_type = other DNA
caacctgctgttgtggggaacggtgcggctccaattcctgcgtcgccaaaggtgttagcgcactcaaacggcgcatctaccaatgctattggtgtggtctgcgagttctagcctactcgtttctcccttatccactcactcacgcacaaaaagtgtgccgtaactacaagatttagccctcgcacgagatgtgcgataaccgcaagattgactcaagcgcggaaagcgctgtaaccacatgctgttagtcccttcatggctgcgagatggctatccacctcggatcactgaactggagctcgaccctccttagtaagggaaccgagaggccttcttgcaacaagctccgacacagagtccacgtgattgctaccaccatgagtacatggttctcccctctcgacccaggacttctttttgaatatccacggctcgatccagagggtggggcatgatccccctagcatagcgagctacagcgggaactgtagctaggccttagcgtgccttggatactgcctgatagggcgacggcctagtcgtgtcggttctataggtagcacatacaaat

SEQ ID NO: 18453 - DNA, 511 bp, synthetic construct
  source 1..511: mol_type = other DNA
ggttcagacgcttaaagtgtgttgtacatattcttttctaacctatgtttcacatagggtggcagatggcgtgccataactctaatagtgagataccacgcttgtggaccttatgctcacacagccatcctctggtaagtttgtaagacgtctgatgacgtgtgggaacttgttggaaataacagtttgctgcaaagcatcccattgccagcggattaacatctggtaacagatgcctctggggccaaaagccaaggtttaacagaccctttgggattggttcaaacctgaattgttatggaagacacttagtacctgctaacttggtagtaatgcaaacactagttgtaaggcccacgaaggatgcccagaaggtacccgtaggtaacaagagacactatggatctgatctggggccagctacctctatcttggtgagttggttaaaaaacgtctagtgggccaaacccaggggggatccctggtttccttttattttaaaatattcact

SEQ ID NO: 18454 - DNA, 422 bp, synthetic construct
  source 1..422: mol_type = other DNA
ctccctccccctttgaatttgtaactggtaagtgatgatccttggaaactaggtgcttgctacgctagttttggattatcttgtgcccaacattagtcctcggacttctgttgtgtttaaacacagaaatttggatgtctggctatagattcatgggaacaacccctctgaaagacctgctctggcgcgagctaaagcgcaattgtcaccaggtattgcaccaatggtggcgacagggtacagaagagcaagtactcctgactgggcaatgggactgcgttgcatatccctaggtacctattgagatttctctggggcccaccagcgtggagttcctgtatgggaatgcaggactggacttgtgctacctgacagggtcgcggctggccgtctgtactttgtatagtcagttgaaactcacc

SEQ ID NO: 18455 - DNA, 396 bp, synthetic construct; identical to SEQ ID NO: 433
  source 1..396: mol_type = other DNA

SEQ ID NO: 18456 - DNA, 312 bp, synthetic construct
  source 1..312: mol_type = other DNA
ggcagtagcgtggcgagctatggaaaaatcgcaattgtcgatagccatgttagtgacgcgcttcggcgtgctcctttggtgattcggcgactggttacaggagagtaggcagtgagctatgggcaaacctctgcagtattactcagagggaatgtgcaattgagacttgacgagcgtctccttgagatgtggcgcatgctcttggcattaccatagtgagcttccaggttgggaaacctggactgggcctatactacctgatagggtcgcggctggccgcctgtaactagtatagtcagttgaaaccccccc

SEQ ID NO: 18457 - DNA, 542 bp, synthetic construct
  source 1..542: mol_type = other DNA
ggccgaaggcaactagcaataaggtaagtgggttcagacgcttaaagtgtgttgtatatattcttttctaacctgtgttttacacagggtggcagatggcgtgccataaccctaatagtgagataccacgcttgtggaccttatgctcacacagccatcctctagtaagtttgtaagacgtctgatgacgtgtgggaacttgttggagataacattttgctgcaaagcatcccattgccagcggatccacatctggtaacagatgcctctggggccaaaagccaaggtttaacagaccctttgggattggttcaaacctgaattgttatggaagacatttagtacctgctgatttggtagtagtgcaaacactagttgtaaggcccacgaaggatgcccagaaggtacccgtaggtaacaagtgacactatggatctgatctggggccaactacctctatctaggtgagttggttaaaaaacgtctagtgggccaaacccaggggggatccctggtttctttttttaatttgaataatcact

SEQ ID NO: 18458 - DNA, 691 bp, synthetic construct; identical to SEQ ID NO: 828
  source 1..691: mol_type = other DNA

SEQ ID NO: 18459 - DNA, 539 bp, synthetic construct
  source 1..539: mol_type = other DNA
cgaaggcaactagcaataaggtaggtgggttcagacgcttaaagtgtgttgtatatattcttttctaacctgtgttttacacagggtggcagatggcgtgccataaccctaatagtgagataccacgcttgtggaccttatgctcacacagccatcctctagtaagtttgtaagacgtctgatgacgtgtgggaacttgttggagataacattttgctgcaaagcatcccattgccagcggatccacatctggtaacagatgcctctggggccaaaagccaaggtttaacagaccctttgggattggttcaaacctgaattgttatggaagacatttagtacctgctgatttggtagtagtgcaaacactagttgtaaggcccacgaaggatgcccagaaggtacccgtaggtaacaagtgacactatggatctgatctggggccaactacctctatctaggtgagttggttaaaaaacgtctagtgggccaaacccaggggggatccctggtttccttttttaatttgaataatcact

SEQ ID NO: 18460 - DNA, 426 bp, synthetic construct; identical to SEQ ID NO: 467
  source 1..426: mol_type = other DNA

SEQ ID NO: 18461 - DNA, 528 bp, synthetic construct; identical to SEQ ID NO: 19
  source 1..528: mol_type = other DNA

SEQ ID NO: 18462 - DNA, 548 bp, synthetic construct; identical to SEQ ID NO: 588
  source 1..548: mol_type = other DNA

SEQ ID NO: 18463 - DNA, 421 bp, synthetic construct; identical to SEQ ID NO: 461
  source 1..421: mol_type = other DNA

SEQ ID NO: 18464 - DNA, 546 bp, synthetic construct; identical to SEQ ID NO: 23
  source 1..546: mol_type = other DNA

SEQ ID NO: 18465 - DNA, 415 bp, synthetic construct; identical to SEQ ID NO: 452
  source 1..415: mol_type = other DNA

SEQ ID NO: 18466 - DNA, 523 bp, synthetic construct
  source 1..523: mol_type = other DNA
aaggtaggtgggttcagacgcttaaagtgtgttgtatatattcttttctaacctgtgttttacacagggtggcagatggcgtgccataaccctaatagtgagataccacgcttgtggaccttatgctcacacagccatcctctagtaagtttgtaagacgtctgatgacgtgtgggaacttgttggagataacattttgctgcaaagcatcccattgccagcggatccacatctggtaacagatgcctctggggccaaaagccaaggtttaacagaccctttgggattggttcaaacctgaattgttatggaagacatttagtacctgctgatttggtagtagtgcaaacactagttgtaaggcccacgaaggatgcccagaaggtacccgtaggtaacaagtgacactatggatctgatctggggccaactacctctatctaggtgagttggttaaaaaacgtctagtgggccaaacccaggggggatccctggtttccttttttaaatttgaataatcact

SEQ ID NO: 18467 - DNA, 578 bp, synthetic construct
  source 1..578: mol_type = other DNA
caccatccaacctgcttttgtggggaacggtgcggctccaattcctgcgtcgccaaaggtgttagcgcacccaaacggcgcatctaccaatgctattggtgtggtctgcgagttctagcctactcgtctctcccctattcactcactcacgcacaaaaactgtgttgtaactacaagatttagccctcgcacgggatgtgcgataaccgcaagattgactcaagcgcggaaagcgctgtaaccacatgctgttagtccctttatggctgcgagatggctatccacctcggatcactgaactggagctcgaccctccttagtaagggaaccgagaggccttcttgcaacaagctccgacacagagtccacgtgattgctaccaccatgagtacatggttctcccctctcgacccaggacttctttttgaatatccacggctcgatccagagggtggggcatgatccccctagcatagcgagctacagcgggaactgtagctaggccttagcgtgccttggatactgcctgatagggcgacggcctagtcgtgtcggttctataggtagcacatacaaat

SEQ ID NO: 18468 - DNA, 522 bp, synthetic construct
  source 1..522: mol_type = other DNA
aaggtaggtgggttcagacgcttaaagtgtgttgtatatattcttttctaacctgtgttttacacagggtggcagatggcgtgccataaccctaatagtgggataccacgcttgtggaccttatgctcacacagccatcctctagtaagtttgtaagacgtctgatgacgtgtgggaacttgttggagataacattttgctgcaaagcatcccattgccagcggatccacatctggtaacagatgcctctggggccaaaagccaaggtttaacagaccctttgggattggttcaaacctgaattgttatggaagacatttagtacctgctgatttggtagtagtgcaaacactagttgtaaggcccacgaaggatgcccagaaggtacccgtaggtaacaagtgacactatggatctgatctggggccaactacctctatctaggtgagttggttaaaaaacgtctagtgggccaaacccaggggggatccctggtttcctttttaaatttgaataatcact

SEQ ID NO: 18469 - DNA, 522 bp, synthetic construct
  source 1..522: mol_type = other DNA
aaggtaggtgggttcagacgcttaaagtgtgttgtatatattcttttctaacctgtgttttacacagggtggcagatggcgtgccataaccctaatagtgagataccacgcttgtggaccttatgctcacacagccatcctctagtaagtttgtaagacgtctgatgacgtgtgggaacttgttggagataacattttgctgcaaagcatcccattgccagcggatccacatctggtaacagatgcctctggggccaaaagccaaggtttaacagaccctttgggattggttcaaacctgaattgttatggaagacatttagtacctgctgatttggtagtagtgcaaacactagttgtaaggcccacgaaggatgcccagaaggtacccgtaggtaacaagtgacactatggatctgatctggggccaactacctctatctaggtgagttggttaaaaaacgtctagtgggccaaacccaggggggatccctggtttcctttttaaatttgaataatcact

SEQ ID NO: 18470 - DNA, 522 bp, synthetic construct
  source 1..522: mol_type = other DNA
aaggtaagtgggttcagacgcttaaagtgtgttgtatatattcttttctaacctgtgttttacacagggtggcagatggcgtgccataaccctaatagtgagataccacgcttgtggaccttatgctcacacagccatcctctagtaagtttgtaagacgtctgatgacgtgtgggaacttgttggagataacattttgctgcaaagcatcccattgccagcggatccacatctggtaacagatgcctctggggccaaaagccaaggtttaacagaccctttgggattggttcaaacctgaattgttatggaagacatttagtacctgctgatttggtagtagtgcaaacactagttgtaaggcccacgaaggatgcccagaaggtacccgtaggtaacaagtgacactatggatctgatctggggccaactacctctatctaggtgagttggttaaaaaacgtctagtgggccaaacccaggggggatccctggtttcttttttaaatttgaataatcact

SEQ ID NO: 18471 - DNA, 522 bp, synthetic construct
  source 1..522: mol_type = other DNA
aaggtaagtgggttcagacgcttaaagtgtgttgtatatattcttttctaacctgtgttttacacagggtggcagatggcgtgccataaccctaatagtgagataccacgcttgtggaccttatgctcacacagccatcctctagtaagtttgtaagacgtctgatgacgtgtgggaacttgttggagataacattttgctgcaaagcatcccattgccagcggatccacatctggtaacagatgcctctggggccaaaagccaaggtttaacagaccctttgggattggttcaaacctgaattgttatggaagacatttagtacctgctgatttggtagtagtgcaaacactagttgtaaggcccacgaaggatgcccagaaggtacccgtaggtaacaagtgacactatggatctgatctggggccaactacctctatctaggtgagttggttaaaaaacgtctagtgggccaaacccaggggggatccctggtttctttttttaatttgaataatcact

SEQ ID NO: 18472 - DNA, 521 bp, synthetic construct
  source 1..521: mol_type = other DNA
aaggtaggtgggttcagacgcttaaagtgtgttgtatatattcttttctaacctgtgttttacacagggtggcagatggcgtgccataaccctaatagtgagataccacgcttgtggaccttatgctcacacagccatcctctagtaagtttgtaagacgtctgatgacgtgtgggaacttgttggagataacattttgctgcaaagcatcccattgccagcggatccacatctggtaacagatgcctctggggccaaaagccaaggtttaacagaccctttgggattggttcaaacctgaattgttatggaagacatttagtacctgctgatttggtagtagtgcaaacactagttgtaaggcccacgaaggatgcccagaaggtacccgtaggtaacaagtgacactatggatctgatctggggccaactacctctatctaggtgagttggttaaaaaacgtctagtgggccaaacccaggggggatccctggtttcctttttaatttgaataatcact

SEQ ID NO: 18473 - DNA, 407 bp, synthetic construct
  source 1..407: mol_type = other DNA
aacttgtaattggtaagtgatgatccttggaagctaggtacctgttacgctagttttggattatcttgtgcccaacactagtctttggacttctgttgtgtttaaacacagaaatctgattgcttggttatgaattcactggactaacccttttgaaagacctgctctggcgcgagctaaagcgcaattgtcaccgggtattgcaccaatggtggcgacagggtacagaagagcaagtactcctgactgggcaatgggactgcattgcatatccctaggcacctattgagatttctctggggcccaccagcgtggagttcctgtatgggaatgcaggactggacttgcgctgcctgacagggtcgcggctggccgtctgtactttgtatagtcagttgaaactcacc

SEQ ID NO: 18474 - DNA, 644 bp, synthetic construct; identical to SEQ ID NO: 73
  source 1..644: mol_type = other DNA

SEQ ID NO: 18475 - DNA, 538 bp, synthetic construct
  source 1..538: mol_type = other DNA
attcctgcgtcgccaaaggtgttagcgcactcaaacggcgcatctaccaatgctattggtgtggtctgcgagttctagcctactcgtttctcccttatccactcactcacgcacaaaaagtgtgccgtaactacaagatttagccctcgcacgagatgtgcgataaccgcaagattgactcaagcgcggaaagcgctgtaaccacatgctgttagtcccttcatggctgcgagatggctatccacctcggatcactgaactggagctcgaccctccttagtaagggaaccgagaggccttcttgcaacaagctccgacacagagtccacgtgattgctaccaccatgagtacatggttctcccctctcgacccaggacttctttttgaatatccacggctcgatccagagggtggggcatgatccccctagcatagcgagctacagcgggaactgtagctaggccttagcgtgccttggatactgcctgatagggcgacggcctagtcgtgtcggttctataggtagcacatacaaat

SEQ ID NO: 18476 - DNA, 545 bp, synthetic construct
  source 1..545: mol_type = other DNA
ctggttgaaggcaacttgcaataagattagtgggaacaagacgcttaaagcatggtgcaaaataacttttctaactcacattctatgtggggtggcagatggcgtgccataattctatcagtgagataccacgcttgtggaccttatgctcacacagccatcctctagtaagtttgtgagacgtctggtgacgtgtgggaacttattggaaacaacattttgctgtaaagcatccaattgccagcggaacaacacctggtaacaggtgcctctggggccaaaagccaaggtttaacagacccttttggattggttctaaacctgagatgttgtggaagatacttagtacctaccaatctggtagtagtgcaaacactagttgtaaggcccacgaaggatgcccagaaggtacccgtaggtaacaagtgacactatggatctgatctggggctaggtgcctctatcttggtgacctggttaaaaaacgtctagtgggccaaacccaggggggatccctggtttccctttattttatcaatgccact

SEQ ID NO: 18477 - DNA, 420 bp, synthetic construct
  source 1..420: mol_type = other DNA
ccccctccctttgaatttgtaattgataagtgatgatccttggaagctaggtacttgatacgctagttttggattgtcttgtgcccaacattagtctttggacttctgttgtgtttaaacacagaaattttgttatctggctacgaattcattggattaatccctctgaaagacctgctctggcgcgagcgaaagcgcaattgtcaccgggtattgcaccaatggtggcgacagagtacagaagagcaagtactcctgactgggcaatgggactgcattgcatatccctaggtacctattgagatttctctggggcccaccagcgtggagttcctgtatgggaatgcaggactggacttgtgctgcctgacagggtcgcggctggccgtctgtactttgtatagtcagttgaaactcact

SEQ ID NO: 18478 - DNA, 537 bp, synthetic construct; identical to SEQ ID NO: 575
  source 1..537: mol_type = other DNA

SEQ ID NO: 18479 - DNA, 426 bp, synthetic construct; identical to SEQ ID NO: 468
  source 1..426: mol_type = other DNA

SEQ ID NO: 18480 - DNA, 537 bp, synthetic construct
  source 1..537: mol_type = other DNA
aggctacttgcaataagattagtgggaacaagacgcttaaagcatggtgcaaaataacttttctaactcacattctatgtggggtggcagatggcgtgccataattctatcagtgagataccacgcttgtggaccttatgctcacacagccatcctctagtaagtttgtgagacgtctggtgacgtgtgggaacttattggaaacaacattttgctgtaaagcatccaattgccagcggaacaacacctggtaacaggtgcctctggggccaaaagccaaggtttaacagacccttttggattggttctaaacctgagatgttgtggaagatacttagtacctaccaatctggtagtagtgcaaacactagttgtaaggcccacgaaggatgcccagaaggtacccgtaggtaacaagtgacactatggatctgatctggggctaggtgcctctatcttggtgacctggttaaaaaacgtctagtgggccaaacccaggggggatccctggtttccctttattttatcaatgccact

SEQ ID NO: 18481 - DNA, 415 bp, synthetic construct; identical to SEQ ID NO: 453
  source 1..415: mol_type = other DNA

SEQ ID NO: 18482 - DNA, 436 bp, synthetic construct; identical to SEQ ID NO: 9
  source 1..436: mol_type = other DNA

SEQ ID NO: 18483 - DNA, 329 bp, synthetic construct; identical to SEQ ID NO: 314
  source 1..329: mol_type = other DNA

SEQ ID NO: 18484 - DNA, 419 bp, synthetic construct
  source 1..419: mol_type = other DNA
cctctccttttggactcgtaactgataagtggtagtccttggaagctaggtactcgttacgctagttttggattatcttgtgcccaacattggacctcggtcctgtgttgtgtttaaacacagaaatcttgacacttggttatgaattcattgtatcaacccttttgaaagacctgctctggcgcgagcaaaagcgcaattgtcaccaggtattgcaccaatggtggcgacagggtacagaagagcaagtactcctgactgggtaatgggactgcattgcatatccctaggcacctattgagatttctctggggcccaccagcatggagttcctgtatgggaatgcaggactggacttgtgctgcctgacagggtcgcggctggccgtctgtactttgtatagtcagttgaaaagcacc

SEQ ID NO: 18485 - DNA, 393 bp, synthetic construct; identical to SEQ ID NO: 430
  source 1..393: mol_type = other DNA

SEQ ID NO: 18486 - DNA, 416 bp, synthetic construct
  source 1..416: mol_type = other DNA
ctccctttgaatttgtaattgataagtgatgatccttggaagctaggtacttgataacttcgttttggattgtcttgtgcccaacattagtctttggacttctgttgtgtttaaacacagaaattttgttatctggctacgaattcattggattaatccctctgaaagacctgctctggcgcgagcgaaagcgcaattgtcaccgggtattgcaccaatggtggcgacagagtacagaagagcaagtactcctgactgggcaatgggactgcattgcatatccctaggtacctattgagatttctctggggcccaccagcgtggagttcctgtatcggaatgcaggactggacttgtgctgcctgacagggtcgcggctggccgtctgtactttgtatagtcagttgaaactcact

SEQ ID NO: 18487 - DNA, 411 bp, synthetic construct
  source 1..411: mol_type = other DNA
tctggacttgtaactggtaagtgatagtccttggaagctaggtacttgttacgctagttttggattatcttgtgcccaacactagaccttggtcttttgttgtgtttaaacacagaaatcttgttacttggttatgaattcattgtattaacccctctgaaagacctgctctggcgcgagctaaagcgcaattgtcaccaggtattgcaccaatggtggcgacagggtacagaagagcaagtactcctgactgggtaatgggactgcattgcatatccctaggcacctattgagatttctctggggcccaccagcgtggagttcctgtatgggaatgcaggactggacttgtgctgcctgacagggtcgcggctggccgtctgtactttgtatagtcagttgaaactcacc

SEQ ID NO: 18488 - DNA, 508 bp, synthetic construct; identical to SEQ ID NO: 532
  source 1..508: mol_type = other DNA

SEQ ID NO: 18489 - DNA, 433 bp, synthetic construct; identical to SEQ ID NO: 478
  source 1..433: mol_type = other DNA

SEQ ID NO: 18490 - DNA, 416 bp, synthetic construct
  source 1..416: mol_type = other DNA
ctccctttgaatttgtaactgataagtgatgatccttggaagctaggtacttgttacgctagttttggattatcttgtgcccaacattagtctttggacttctgttgtgtttaaacacagaaattttgttatttggttattgattcactggatcaacccttttgaaagacttgctctggcgcgagctaaagcgcaattgtcaccgggtattgcaccaatggtggcgacagagtacagaagagcaagtactcctgactgggcaatgggactgcgttgcatatccctaggcacctattgagatttctctggggcccaccagcgtggagttcctgtatgggaatgcaggactggacttgtgctgcctgacagggtcgcggctggccgtctgtactttgtatagtcagttgaaactcact

SEQ ID NO: 18491 - DNA, 609 bp, synthetic construct
  source 1..609: mol_type = other DNA
gaatcagtccaaagggtcctgcgtaaaacacgcagggccctttgaactgattcggtccagctgaccgacacgctgctggccaggtgctatggccggccctagccggggaggctgccccggcccctcttctacggggattagtaggtttatttctacttttatttctttattttcatggttgtcgtcataccaagagctgctaccgctgcgcccggcggggttaactggtggattagccaccagctgtggccgccaaaagtgacgaaagtgtgactatcagatggatctggtcccactgtgatccctctgtttgtgtaaccccgatcgtctatctagggtaggctacgggtgaaaccctagacctatagatcttgtatcaagattgatggtgtgtgtacgttaacaccacggataagggtgagttaatgaggacgagaacccttcaacgtggaggccatggacgtcaccacatagccgcggggtgtaacaagcagaggtatatagcagtggtgttagaaccatactgtaagcacttccctatgagtttagggctaatcaggggcatgttaggttttaaaggccaataattatatgcgtatgagtgtgaaa

SEQ ID NO: 18492 - DNA, 423 bp, synthetic construct
  source 1..423: mol_type = other DNA
cccccccctccctttgaatttgtaattgataagtgatgatccttggaagctaggtacttgatacgctagttttggattgtcttgtgcccaacattagtctttggacttctgttgtgtttaaacacagaaattttgttatctggctacgaattcattggattaatccctctgaaagacctgctctggcgcgagcgaaagcgcaattgtcaccgggtattgcaccaatggtggcgacagagtacagaagagcaagtactcctgactgggcaatgggactgcattgcatatccctaggtacctattgagatttctctggggcccaccagcgtggagttcctgtatgggaatgcaggactggacttgtgctgcctgacagggtcgcggctggccgtctgtactttgtatagtcagttgaaactcact

SEQ ID NO: 18493 - DNA, 398 bp, synthetic construct; identical to SEQ ID NO: 5
  source 1..398: mol_type = other DNA

SEQ ID NO: 18494 - DNA, 421 bp, synthetic construct; identical to SEQ ID NO: 7
  source 1..421: mol_type = other DNA

SEQ ID NO: 18495 - DNA, 601 bp, synthetic construct
  source 1..601: mol_type = other DNA
tgtttgctagaggcacagaggagcaacatccaacctgcttttgtggggaacggtgcggctccaattcctgcgtcgccaaaggtgttagcgcacccaaacggcgcatctaccaatgctattggtgtggtctgcgagttctagcctactcgtttctcccttatccactcactcacgcacaaaaagtgtgctgtaactgcaagatttagccctcgcacgagatgtgcggtaaccgcaagattgactcaagcgcggaaagcgctgcaaccacacgctgttagtcccttcatggctgcgagatggctatccacctcggatcactgaactggagctcgaccctccttagtaagggaaccgagaggccttcttgcaacaagctccgacacagagtccacgtgaatgctaccaccatgagtacatggttctcccctctcgacccaggacttctttttgaatatccacggctcgatccagagggtggggcatgatccccctagcatagcgagctacagcgggaactgtagctaggccttagcgtgccttggatactgcctgatagggcgacggcctagtcgtgtcggttctataggtagcacatacaaat

SEQ ID NO: 18496 - DNA, 664 bp, synthetic construct; identical to SEQ ID NO: 801
  source 1..664: mol_type = other DNA

SEQ ID NO: 18497 - DNA, 494 bp, synthetic construct; identical to SEQ ID NO: 521
  source 1..494: mol_type = other DNA

SEQ ID NO: 18498 - DNA, 439 bp, synthetic construct; identical to SEQ ID NO: 10
  source 1..439: mol_type = other DNA

SEQ ID NO: 18499 - DNA, 494 bp, synthetic construct
  source 1..494: mol_type = other DNA
tttgaaagaggcctccggagtgtccggaggctctctttcgacccaacccatactggggggtgtgtgggaccgtacctggagtgcacggtatatatgcattcccgcatggcaagggcgtgctaccttgccccttgacgcatggtatgcgtcatcatttgccttggttaagccccatagaaacgaggcgtcacgtgccgaaaatccctttgcgtttcacagaaccatcctaaccatgggtgtagtatgggaatcgtgtatggggatgattaggatctctcgtagagggataggtgtgccattcaaatccagggagtactctggctctgacattgggacatttgatgtaaccggacctggttcagtatccgggttgtcctgtattgttacggtgtatccgtcttggcacactgaaagggtatttttgggtaatcctttcctactgcctgatagggtggcgtgcccggccacgagagattaagggtagcaatttaaac

SEQ ID NO: 18500 - DNA, 507 bp, synthetic construct
  source 1..507: mol_type = other DNA
agacgcttaaagcatggtgtaaatcaacttttctaactcacattttatgtggggtggcagatggcgtgccataactctattagtgagataccacgcttgtggaccttatgctcacacagccatcctctagtaagtttgtgagacgtctggtgacgtgtgggaacttattggaaacaacattttgctgcaaagcatcctatcgccagcggaataacatctggtaacagatgcctctggggccaaaagccaaggtttaacagaccctttaggattggttcaaaacctggaatgttgtggaagatacttagtacctgctgatctggtagtagtgcaaacactagttgtaaggcccacgaaggatgcccagaaggtacccgtaggtaacaagtgacactatggatctgatctggggccaggtacctctatcttggtgacctggttaaaaaacgtctagtgggccaaacccgggggggatccccggtttccttttattttatcaatgccaca

SEQ ID NO: 18501 - DNA, 380 bp, synthetic construct; identical to SEQ ID NO: 387
  source 1..380: mol_type = other DNA

SEQ ID NO: 18502 - DNA, 337 bp, synthetic construct; identical to SEQ ID NO: 321
  source 1..337: mol_type = other DNA

SEQ ID NO: 18503 - DNA, 493 bp, synthetic construct; identical to SEQ ID NO: 519
  source 1..493: mol_type = other DNA

SEQ ID NO: 18504 - DNA, 734 bp, synthetic construct; identical to SEQ ID NO: 941
  source 1..734: mol_type = other DNA

SEQ ID NO: 18505 - DNA, 569 bp, synthetic construct
  source 1..569: mol_type = other DNA
acctgcttttgtggggaacggtgcggctccaattcctgcgtcgccaaaggtgttagcgcacccaaacggcgcatctaccaatgctattggtgtggtctgcgagttctagcctactcgtttctcccctattcactcactcacgcacaaaaagtgtgttgtaactacaagatttagccctcgcacgggatgtgcgataaccgcaagattgactcaagcgcggaaagcgctgtaaccacatgctattagtccctttatggctgcgagatggctatccacctcggatcactgaactggagctcgaccctccttagtaagggaaccgagaggccttcttgcaacaagctccgacacagagtccacgtgattgctaccaccatgagtacatggttctcccctctcgacccaggacttctttttgaatatccacggctcgatccagagggtggggcatgatccccctagcatagcgagctacagcgggaactgtagctaggccttagcgtgccttggatactgcctgatagggcgacggcctagtcgtgtcggttctataggtagcacatacaaat

SEQ ID NO: 18506 - DNA, 494 bp, synthetic construct
  source 1..494: mol_type = other DNA
tctgaaggaggtctccggagtatccggaggttctctttcgacccaacccatactggggggtgtgtgggaccgtacctggagtgcacggtatatatgcattcccgcatggcaagggcgtgctaccttgccccttgacgcatggtatgcgtcatcatttgccttggttaagccccatagaaacgaggcgccacgtgccgaaaatccctttgcgtttcacagaaccatcctaaccatgggtgtagtatgggaatcgtgtatggggatgattaggatctctcgtagagggataggtgtgccattcaaatccagggagtactctggctctgacattgggacatttgatgtaaccggacctggttcagtatccgggttgtcctgtattgttacggtgtatccgtcttggcacactgaaagggtatttttgggtaatcctttcctactgcctgatagggtggcgtgcccggccacgagagattaagggtagcaatttaaac

SEQ ID NO: 18507 - DNA, 488 bp, synthetic construct; identical to SEQ ID NO: 512
  source 1..488: mol_type = other DNA

SEQ ID NO: 18508 - DNA, 493 bp, synthetic construct
  source 1..493: mol_type = other DNA
tttgaaagaggcctccggggaatccggaggttctctttcgacccaacccatactggggggtgtgtggggccgtatttggagtgcacggtatatatgcattcccgcatggcaagggcgtgccaccttgccccttgacgcatggtatgtgtcatcatttgccttggttaaaccccataaaacgaggcgccacgtgccgaaaatccctttgcgtttcacagaaccatcctaaccatgggtgtagtatgggaatcgtgtatgggggtgattaggatctctcgtagagggataggtgtgtcattcaaatccagggagtactctggctctgacattgggacatttgatgtaaccggacctggttcagtatccgggttgtcctgtattgttacggtgtatccgtcttgacacactgaaagggtattcttgggtaatcccttcctactgcctgatagggcggcgtgcccggccacgagagattaagggtagcaatttaaac

SEQ ID NO: 18509 - DNA, 539 bp, synthetic construct; identical to SEQ ID NO: 578
  source 1..539: mol_type = other DNA

SEQ ID NO: 18510 - DNA, 381 bp, synthetic construct
  source 1..381: mol_type = other DNA
tagtaagtttgtaagacgtccgatgaagtgtgggaacttgttggaaatagcagtttgctgcaaagcatcccattgccagcggatcaacatctggtgacagatgcctctggggccaaaagccaaggtttaacagaccccttgggattggttcaaacctgaactgctatggaaaacatttagtacctgccgatttggtagtaatgcagacactagttgtagggcccacgaaggatgcccagaaggtacccgtaggtaacaagtgacactatggatctgatctggggccagctacttctatctaagtgagttggttaaaaaacgtctagtgggccaaacccaggggggatccctggtttccttattttattttatacagtcatt

SEQ ID NO: 18511 - DNA, 331 bp, synthetic construct
  source 1..331: mol_type = other DNA
attggtcttcggacttctgttgtgtttaaacacagaaatttgatttcctgactatgaattcattggatcaatccttttgaaagacctgctctggcgcgagctaaagcgcaattgtcaccaggtactgcaccaacggtggcgacagggtacagaagagcaagtactcctgactgggcaatgggactgcattgcatatccctaggcacctattgagatttctctggggcccaccagcgtggagttcctgtatgggaatgcaggactggacttgtgctgcctgacagggtcgcggctggccgtctgtactttgtatagtcagttgaaactcacc

SEQ ID NO: 18512 - DNA, 332 bp, synthetic construct; identical to SEQ ID NO: 317
  source 1..332: mol_type = other DNA

SEQ ID NO: 18513 - DNA, 331 bp, synthetic construct
  source 1..331: mol_type = other DNA
actagactccggacttctgttgtgtttaaacacagaaatttgaatgtctggctatgaattcattggatcaatccttctgaaagacctgctctggcgcgagctaaagcgcaattgtcaccaggtattgcaccaatggtggcgacagggtacagaagagcaagtactcctgactgggtaatgggactgcattgcatatccctaggcacctattgagatttctctggggcccaccagcgtggagttcctgtatgggaatgcaggactggacttgtgctgcctgacagggtcgcggctggccgtctgtactttgtatagtcagttgaaactcacc

SEQ ID NO: 18514 - DNA, 331 bp, synthetic construct
  source 1..331: mol_type = other DNA
attggtcttcggactcttgttgtgtttaaacacagaaatttgattgtctggctatgaattcaatggattaacccacctgaaagacctgctctggcgcgagctaaagcgcaattgtcaccaggtattgcaccaatggtggcgacagggtacagaagagcaagtactcctgactgggcaatgggactgcattgcatatccctaggcacctattgagatttctctggggcccaccagcgtggagttcctgtatgggaatgcaggactggacttgtgctgcctgacagggtcgcggctggccgtctgtactttgtatagtcagttgaaactcacc

SEQ ID NO: 18515 - DNA, 331 bp, synthetic construct; identical to SEQ ID NO: 315
  source 1..331: mol_type = other DNA

SEQ ID NO: 18516 - DNA, 331 bp, synthetic construct
  source 1..331: mol_type = other DNA
actagactttggactgctgttgtgtttaaacacagaaatttgattgcttggttatgaattcactggattaaccctcttgaaagacctgctctggcgcgagccaaagcgcaattgtcaccaggtattgcaccaatggtggcgacagggtacagaagagcaagtactcctgactgggtaatgggactgcattgcatatccctaggcacctattgagatttctctggggcccaccagcatggagttcctgtatgggaatgcaggactggacttgtgctgcctgacagggtcgcggctggccgtctgtactttgtatagtcagttgaaatgcacc

SEQ ID NO: 18517 - DNA, 331 bp, synthetic construct
  source 1..331: mol_type = other DNA
attagtcctaggacttctgttgtgtttaaacacagaaatttgattacttggttatgaattcattggatcaaccctcttgaaagacctgctctggcgcgagctaaagcgcaattgtcaccgggtattgcaccaatggtggcgacagggtacagaagagcaagtactcctgactgggtaatgggactgcattgcatatccctaggcacctattgagatttctctggggcccaccagcatggagttcctgtatgggaatgcaggactggacttgtgctgcctgacagggtcgcggctggccgtctgtactttgtatagtcagttgaaacgcacc

SEQ ID NO: 18518 - DNA, 331 bp, synthetic construct
  source 1..331: mol_type = other DNA
actagacctcggtctcttgttgtgttcaaacacagaaatcttgctgcttggttatgaattcattggaccaatccctctgaaagacctgctctggcgcgagctaaagcgcaattgtcaccgggtattgcaccaatggtggcgacagggtacagaagagcaagtactcctgactgggcaatgggactgcattgcatatccctaggcacctattgagaattctctggggcccaccagcatggagttcctgtatgggaatgcaggactggacttgtgctgcctgacagggtcgcggctggccgtctgtactttgtatagtcagttgaaactcact

SEQ ID NO: 18519 - DNA, 330 bp, synthetic construct
  source 1..330: mol_type = other DNA
actagacttcggtcttttgttgtgtttaaacacagaaatcttgatacttggttatgaattcattggatcaaccctctgaaagacctgctctggcgcgagcaaaagcgcaattgtcaccaggtattgcaccaatggtggcgacagggtacagaagagcaagtactcctgactgggcaatgggactgcattgcatatccctaggcacctattgagatttctctggggcccaccagcatggagttcctgtatgggaatgcaggactggacttgtgctgcctgacagggtcgcggctggccgtctgtgctttgtatagtcagttgaaactcact

SEQ ID NO: 18520 - DNA, 331 bp, synthetic construct
  source 1..331: mol_type = other DNA
actagaccttggtcttttgttgtgtttaaacacagaaatcttgttatttggttatgaattcatcggatcaatccctctgaaagacctgctctggcgcgagctaaagcgcaactgtcaccgggtattgcaccaatggtggcgacagggtacagaagagcaagtactcctgactgggcaatgggactgcattgcatatccctaggcacctattgagatttctctggggcccaccagcgtggagttcctgtatgggaatgcaggactggacttgtgctgcctgacagggtcgcggctggccgtctgtactttgtatagtcagttgaaactcacc

SEQ ID NO: 18521 - DNA, 331 bp, synthetic construct
  source 1..331: mol_type = other DNA
actagaccttggtctcttgttgtgtttaaacacagaaatcttgctgcttggttatgaattcactggattaatccctctgaaagacctgctctggcgcgagctaaagcgcaattgtcaccgggtattgcaccaatggtggcgacagggtacagaagagcaagtactcctgactgggtaatgggactgcattgcatatccctaggcacctattgagatttctctggggcccaccagcatggagttcctgtatgggaatgcaggactggacttgtgctgcctgacagggtcgcggctggccgtctgtactttgtatagtcagttgaaacttacc

SEQ ID NO: 18522 - DNA, 331 bp, synthetic construct
  source 1..331: mol_type = other DNA
actagaccttggtctcttgttgtgtttaaacacagaaatcttgctatttggttatgaattcattggatcaacccccctgaaagacctgctctggcgcgagcaaaagcgcaaatgtcaccaggtattgcaccaatggtggcgacagggtacagaagagcaagtactcctgactgggaaatgggactgcattgcatatccctaggcacctattgagatttctctggggcccaccagcgtggagttcctgtatgggaatgcaggactggacttgtgctgcctgacagggtcgcggctggccgtctgtactttgtatagtcagttgaaactcacc

SEQ ID NO: 18523 - DNA, 331 bp, synthetic construct
  source 1..331: mol_type = other DNA
attagtctttggacttctgttgtgtttaaacacagaaatttgattgcctggctatgaattcactggattaatccttttgaaagacctgctctggcgcgagctaaagcgcaattgtcaccaggtattgcaccaatggtggcgacagggtacagaagagcaagtactcctgactgggtaatgggactgcattgcatatccctaggcacctattgagatttctctggggcccaccagcgtggagttcctgtatgggaatgcaggactggacttgtgctgcctgacagggtcgcggctggccgtctgtactttgtatagtcagttgaaactcact

SEQ ID NO: 18524 - DNA, 331 bp, synthetic construct
  source 1..331: mol_type = other DNA
actagtcttcggactcttgttgtgttcaaacacagaaatattgttgtctggttatgaattcattgggtcaacccccttgaaagacctgctctggcgcgagctaaagcgcaattgtcaccaggtattgcaccaatggtggcgacagggtacagaagagcaagtactcctgactgggcaatgggactgcattgcatatccctaggcacctattgagatttctctggggcccaccagcgtggagttcctgtatgggaatgcaggactggacttgtgctgcctgacagggtcgcggctggccgtctgtactttgtatagtcagttgaaactcacc

SEQ ID NO: 18525 - DNA, 335 bp, synthetic construct; identical to SEQ ID NO: 320
  source 1..335: mol_type = other DNA

SEQ ID NO: 18526 - DNA, 406 bp, synthetic construct
  source 1..406: mol_type = other DNA
gaccttatgctcacacagccatcctctagtaagtttgtgaggcatctggtgacgtgtgggaacttattggaagcaacattttgctgtaaagcatcctatcgccagcggaacaacgcctggtaacaggcgcctctggggccaaaagccaaggtttaacagaccctttaggattggttttaaacctgagatgttgtggaaaatatttagtacctaccgacctggtagtaatgcaaacactagttgtaaggcccacgaaggatgcccagaaggtacccgtaggtaacaagtgacactatggatctgatctggggccaggtacttctatcttagtgacctggttaaaaaacgtctagtgggccaaacccgggggggatccccggtttccttttattttattaatgccatt

SEQ ID NO: 18527 - DNA, 331 bp, synthetic construct
  source 1..331: mol_type = other DNA
actagtctccggacttctgttgtgtttaaacacagaaatttgactatctggctatgaattcattggaatgacccctttgaaagacctgctctggcgcgagctaaagcgcaattgtcaccgggtattgcaccaatggtggcgacagggtacagaagagcaagtactcctgactgggcaatgggactgcattgcatatccctaggcacctattgagatttctctggggcccaccagcgtggagttcctgtatgggaatgcaggactggacttgtgctgcctgacagggtcgcggctggccgtctgtactttgtatagtcagttgaaactcact

SEQ ID NO: 18528 - DNA, 436 bp, synthetic construct
  source 1..436: mol_type = other DNA
taattctattagtgagataccacgcttgtggaccttatgctcacacagccatcctctagtaagtttgtaagacgtctggtgacgtgtgggaacttattggaaacaacattttgctgcaaagcatcctattgccagcggaacaacacctggtaacaggtgcctctggggccaaaagccaaggtttgacagaccctttaggattggtttaaaacctggaatgttgcggaagatacttagtacctgccgatctggtagtaatgcagacactagttgtaaggcccacgaaggatgcccagaaggtacccgtaggtaacaagcgacactatggatctgatctggggctaggtacctctatcttggtgacctagttaaaaaacgtctagtgggccagacccgggggggatccccggtttccttttattttatcaatgtcact

SEQ ID NO: 18529 - DNA, 331 bp, synthetic construct
  source 1..331: mol_type = other DNA
actagacttcggtctcttgttgtgtttaaacacagaaatcttgctacttggttatgaattcattggatcaacccctctgaaagacctgctctggtgcgagcaaaagcgcaattgtcaccaggtattgcaccaatggtggcgacagggtacagaagagcaagtactcctgactgggtaatgggactgcattgcatatccctaggcacctattgagatttctctggggcccaccagcgtggagttcctgtacgggaatgcaggactggacttgtgctgcctgacagggtcgcggctggccgtctgtactttgtatagtcagttgaaactcacc

SEQ ID NO: 18530 - DNA, 331 bp, synthetic construct
  source 1..331: mol_type = other DNA
actagtctttggacttttgttgtgtttaaacacagaaattttgctatttggctatgaattcattggatcaatccctctgaaagacctgctctggcgcgagctaaagcgcaattgtcaccgggtactgcaccaatggtggcgacagggtacagaagagcaagtactcctgactgggcaatgggactgcattgcatatccctaggcacctattgagatttctctggggcccaccagcatggagttcctgtatgggaatgcaggactggacttgtgctgcctgacagggtcgcggctggccgtctgtactttgtatagtcagttgaaactcacc

SEQ ID NO: 18531 - DNA, 331 bp, synthetic construct
  source 1..331: mol_type = other DNA
actagacttcggtctcttgttgtgtttaaacacagaaatcttgctacttggttatgaattcattggatcaacccctctgaaagacctgctctggcgcgagcaaaagcgcaattgtcaccaggtattgcaccaatggtggcgacagggtacagaagagcaagtactcctgactgggtaatgggactgcattgcatatccctaggcacctattgagatttctctggggcccaccagcgtggagttcctgtacgggaatgcaggactggacttgtgctgcctgacagggtcgcggctggccgtctgtactttgtatagtcagttgaaactcacc

SEQ ID NO: 18532 - DNA, 331 bp, synthetic construct; identical to SEQ ID NO: 316
  source 1..331: mol_type = other DNA

SEQ ID NO: 18533 - DNA, 331 bp, synthetic construct
  source 1..331: mol_type = other DNA
attagtcttcggacttctgttgtgtttaaacacagaaatttgattatttggttatggatttactggattaaccctactgaaagacctgctccggcgcgagctaaagcgcaaatgtcaccaggtattgcaccaatggtggcgacagggtacagaagagcaagtactcctgactgggcaatgggactgcgttgcatatccctaggcacctattgagatttctctggggcccaccagcgtggagttcctgtatgggaatgcaggactggacttgtgctgcctgacagggtcgcggctggccgtctgtactttgtatagtcagttgaaactcacc

SEQ ID NO: 18534 - DNA, 331 bp, synthetic construct
  source 1..331: mol_type = other DNA
attagactccggtcttctgttgtgtttaaacacagaaatcttgctatctggctatgaattcataggattgacccctttgaaagacctgctctggcgcgagcaaaagcgcaattgtcaccaggtattgcaccaatggtggcgacagggtacagaagagcaagtactcctgactgggtaatgggactgcattgcatatccctaggcacctattgagatttctctggggcccaccagcgtggagttcctgtatgggaatgcaggactggacttgtgctgcctgacagggtcgcggctggccgtctgtactttgtatagtcagttgaaactcacc

SEQ ID NO: 18535 - DNA, 331 bp, synthetic construct
  source 1..331: mol_type = other DNA
actagacctcggtctcttgttgtgtttaaacacagaaatcttgccacttggttacgacttcatgggaacaatcctcctgaaagacctgctctggcgcgagcaaaagcgcaattgtcaccaggtattgcaccaatggtggcgacagggtacagaagagcaagtactcctgactgggcaatgggactgcgttgcatatccctaggcacctattgagatttctctggggcccaccagcgtggagttcctgtatgggaatgcaggactggacttgtgctacctgacagggtcgcggctggccgtctgtactttgtatagtcagttgaaactcact

SEQ ID NO: 18536 - DNA, 435 bp, synthetic construct
  source 1..435: mol_type = other DNA
ataaccctaatagtgagataccacgcttgtggaccttatgctcacacagccatcctctagtaagtttgtaagacgtctgatgacgtgtgggaacttgttggagataacattttgctgcaaagcatctcattgccagcggatccacatctggtaacagatgcctctggggccaaaagccaaggtttaacagaccctttgggattggttcaaacctgaattgttatggaagacatttagtacctgctgatttggtagtagtgcaaacactagttgtaaggcccacgaaggatgcccagaaggtacccgtaggtaacaagtgacactatggatctgatctggggccaactacctctatctaggtgagttggttaaaaaacgtctagtgggccaaacccaggggggatccctggtttcctttttatttgaataatcact

SEQ ID NO: 18537 - DNA, 414 bp, synthetic construct
  source 1..414: mol_type = other DNA
tgcttgtggatcttatgctcacacagccatcctctagtaagtttgtaagacgtctggtgacgtgtgggaacttattggaaacaacattttgctgtaaagcatcctattgccagcgggacaacacctggtaacaggtgcctctggggccaaaagccaaggtttaacaaaccctttaggattggttctaaacctgagatgttgcggaagatacttagtacctaccgatctggtagtagtgcaaacactagttgtaaggcccacgaaggatgcccagaaggtacccgtaggtaacaagtgacactatggatctgatctggggccagatacctctatcttggtgatctggttaaaaaacgtctagtgggccaaacccgggggggatccctggtttctttttattttaccaatgccact

SEQ ID NO: 18538 - DNA, 418 bp, synthetic construct
  source 1..418: mol_type = other DNA
accacgcttgtggaccttatgctcacacagccatcctctagtaagtttgtgagacgtctggtgacgtgtgggaacttattggaaacaacattttgctgtaaagcatcctattgccagcggaatgacgcctggtaacaggtgcctctggggccaaaagccaaggtttaacagaccctttaggattggttctaaacctgaaatgttgtggaagataattagtacctgccgatctggtagtagtgcaaacactagttgtaaggcccacgaaggatgcccagaaggtacctgtaggtaacaagtgacactatggatctgatctggggccaagtacctctatcttggtgacttggttaaaaaacgtctagtgggccaaacctgggggggatccccagtttccttttattacatcaatgctact

SEQ ID NO: 18539 - DNA, 441 bp, synthetic construct; identical to SEQ ID NO: 11
  source 1..441: mol_type = other DNA

SEQ ID NO: 18540 - DNA, 636 bp, synthetic construct
  source 1..636: mol_type = other DNA
tccttcctttccccttccggggggtaaaccggctgtgtttgctagaggcacagaggagcaacatccaacctgcttttgtggggaacggtgcggctccaattcctgcgtcgccaaaggtgttagcgcacccaaacggcgcatctaccaatgctattggtgtggtctgcgagttctagcctactcgtttctcccctattcactcactcacgcacaaaaagtgtgttgtaactacaagatttagccctcgcacgggatgtgcgataaccgcaagattgactcaagcgcggaaagcgctgtaaccacatgctgttagtccctttatggctgcgagatggctatccacctcggatcactgaactggagctcgaccctccttagtaagggaaccgagaggccttcttgcaacaagctccgacacagagtccacgtgattgctaccaccatgagtacatggttctcccctctcgacccaggacttctttttgaatatccacggctcgatccagagggtggggcatgatccccctagcatagcgagctacagcgggaactgtagctaggccttagcgtgccttggatactgcctgatagggcgacggcctagtcgtgtcggttctataggtagcacatacaaat

SEQ ID NO: 18541 - DNA, 300 bp, synthetic construct
  source 1..300: mol_type = other DNA
acagaaattttgacacttggttatggattcactggattaacccttttgaaagacctgctctggcgcgagcaaaagcgcaaatgtcaccaggtattgcaccaatggtggcgacagagtgcagaagagcaagtactcctgactgggcaatgggactgcattgcatatccctaggcacctatcgagatttctctggggcccaccagcgtggagttcctgtatgggaatgcaggactggacttgtgctgcctgacagggtcgcggctggccgtctgtactttgtatagtcagttgaaactcact

SEQ ID NO: 18542 - DNA, 648 bp, synthetic construct; identical to SEQ ID NO: 75
  source 1..648: mol_type = other DNA

SEQ ID NO: 18543 - DNA, 433 bp, synthetic construct
  source 1..433: mol_type = other DNA
ctctattagtgagataccacgcttgtggaacttatgctcacacagccatcctctagtaagtttgtgagatgtctggtgacgtgtgggaacttattggaaacaacattttgctgtagagcatcctattgccagcggaacaacacctggtaacaggtgcctctggggccaaaagccaaggtttaacagaccctttaggattggtttaaaacctgaaatgttgtggaagatacttagtacctaccgatctggtagtattgcaggcactagttgtaaggcccacgaaggatgcccagaaggtacccgtaggtaacaagagacactatggatctgatctggggccaggtacctctatcttggtgacctggttaaaaaacatctagtgggccaaacccgggggggatccccggtttctttttattttacaactgctact

SEQ ID NO: 18544 - DNA, 537 bp, synthetic construct; identical to SEQ ID NO: 21
  source 1..537: mol_type = other DNA

SEQ ID NO: 18545 - DNA, 433 bp, synthetic construct
  source 1..433: mol_type = other DNA
ttctactagtgagataccacgcttgtggaccttatgctcacacagccatcctctagtaagtttgtgagacgtctggtgacgtgtgggaacttattggaaacaacattttgctgcaaagcatcctattgccagcggaacaacacctggtaacaggtgcctctggggccaaaagccaaggtctaacaaaccctttaggattggttctaaacctgagatgttgtggaagatacttagtacctgccgatctggtagtagtgcaaacactagttgtaaggcccacgaaggatgcccagaaggtacccataggtaacaagtgacactatggatctgatctggggccaggtacttctatcttagtgacctggttaaaaagcgtctagtgggccaaacccgggggggatccccggtttccttttacttcatcaatgctaca

SEQ ID NO: 18546 - DNA, 432 bp, synthetic construct
  source 1..432: mol_type = other DNA
ctctattagtgagataccacgcttgtggaacttatgctcacacagccatcctctagtaagtttgtgagatgtctaatgacgtgtgggaacttattggaagcaacaatttgccgtacggcatcctattgccagcggatccacacctggtaacaggtgcccctggggccaaaagccaaggtttaacagaccctttaggattggtcaaaacctgaattgttgtggaagatactcagtacctgctgatttggtagtaatgcaaacactagttgtagggcccacgaaggatgcccggaaggtacccgtaggtaacaagtgacactatggatctgatctggggccaactacttctatcatggtgagttggttaaaaaacgtctagtgggccaaacccaggggggatccctggtttccttttatttcactatagccaat

SEQ ID NO: 18547 - DNA, 414 bp, synthetic construct; identical to SEQ ID NO: 451
  source 1..414: mol_type = other DNA

SEQ ID NO: 18548 - DNA, 307 bp, synthetic construct
  source 1..307: mol_type = other DNA
tttaaacacagaaatttggttacttggttatgaattcattggacaaaccctcttgaaagacctgctctggcgcgagctaaagcgcaattgtcaccgggtattgcaccaatggtggcgacagggtacagaagagcaagtactcctgactgggtaatgggactgcattgcatatccctaggcacttatcgagatttctctggggcccaccagcgtggagttcctgtatgggaatgcaggactggacttgtgctgcctgacagggtcgcggctggccgtctgtactttgtatagtcagttgatactcacc

SEQ ID NO: 18549 - DNA, 433 bp, synthetic construct
  source 1..433: mol_type = other DNA
ttctactagtgagataccacgcttgtggaccttatgctcacacagccatcctctagtaagtttgtgagacgtctggtgacgtgtgggaacttattggaaacaacattttgctgcaaagcatcctattgccagcggaacaacacctggtaacaggtgcctctggggccaaaagccaaggtctaacaaaccctttaggattggttctaaacctgagatgttgtggaagatacttagtacctgccgatctggtagtagtgcaaacactagttgtaaggcccacgaaggatgcccagaaggtacccataggtaacaagtgacactatggatctgatctggggccaggtacctctatcttggtgacctggttaaaaagcgtctagtgggccaaacccgggggggatccccggtttccttttattttatcaatgctaca

SEQ ID NO: 18550 - DNA, 432 bp, synthetic construct
  source 1..432: mol_type = other DNA
ccctaatagtgagataccacgcttgtggaccttatgctcacacagccatcctctagtaagtttgtaagacgtctgatgacgtgtgggaacttgttggagataacattttgctgcaaagcatcccattgccagcggatccacatctggtaacagatgcctctggggccaaaagccaaggtttaacagaccctttgggattggttcaaacctgaattgttatggaagacatttagtacctgctgatttggtagtagtgcaaacactagttgtaaggcccacgaaggatgcccagaaggtacccgtaggtaacaagtgacactatggatctgatctggggccaactacctctatctaggtgagttggttaaaaaacgtctagtgggccaaacccaggggggatccctggtttccttttttatttgaataatcact

SEQ ID NO: 18551 - DNA, 465 bp, synthetic construct
  source 1..465: mol_type = other DNA
gacctgaggaatttccatgtggctttgccaggagttgtagcgatgctgtgtgtgtgtgcggatttcccctcatggcaacatgagcctcacaggccaaaagccctgtccgaaaggacccacacagtggagcaaccccagctccctcctacaaagctttgtgagaatgaactcaagtttattctactttattctctatttacatcaggccccaaagatgtcctgaaggtaccttgtgtatctgggcacgagcaccatcagctacccggacttgctcctcggtgcagacacatgtggtgatccagcccctctgcttcggcagaggggctttcgctcgctcagcacgagatctgatcaggagcccctcccagtgtgctttacacctggcgaggggttaaaaattgcccaaggcctggcaaaacaacctaggggactaggttttccttttattaataatgttttgtcatt

SEQ ID NO: 18552 - DNA, 433 bp, synthetic construct
  source 1..433: mol_type = other DNA
ctctaatagtgagataccatgcttgtggaccttatgctcacacagccatcctctagtaagtttgtgagacgtctggtgacgtgtgggaacttattggaaacaacaccttgctgtaaagcatcctattgccagcggaacaacacctggtaacaggtgcctctggggccaaaagccaaggtttaacagaccctttaggattggttttgaacctgagatgttgcggaagatatttagtacctgccgatctggtagtaatgcaaacactagttgtaaggcccacgaaggatgcccagaaggtacccataggtaacaagtgacactatggatctgatctggggctaggtacctctatcttggtgacctggttaaaaaacatctagtgggccaagcccgggggggatccccggtttccttttactttatcaatgccacc

SEQ ID NO: 18553 - DNA, 433 bp, synthetic construct
  source 1..433: mol_type = other DNA
ccctaatagtgagataccacgcttgtggaccttatgctcacacagccatcctctagtaagtttgtaagacgtctgatgacgtgtgggaacttgttggagataacattttgctgcaaagcatcccattgccagcggatccacatctggtaacagatgcctctggggccaaaagccaaggtttaacagaccctttgggattggttcaaacctgaattgttatggaagacatttagtacctgctgatttggtagtagtgcaaacactagttgtaaggcccacgaaggatgcccagaaggtacccgtaggtaacaagtgacactatggatctgatctggggccaactacttctatctaggtgagttggttaaaaaacgtctagtgggccaaacccaggggggatccctggtttcttttttttatttgaataatcact

SEQ ID NO: 18554 - DNA, 431 bp, synthetic construct
  source 1..431: mol_type = other DNA
ctctatcagtgagataccacgcttgtggatcttatgctcacacagccatcctctagtaagtttgtgagacgtctggtgacgtgtgggaacttattggaaacaacgttttgctgcaaagcatcctattgccagcggaataacacctggtaacaggtgcctctggggccaaaagccaaggtttagcaaaccctttaggattggtttaacctgaagcgttgtggaagatatttagtacctgccaatctggtagtagtgcaaacactagttgtaaggcccacgaaggatgcccagaaggtacccgtaggtaacaagcgacactatggatctgatctggggccaggtacttctatcttggtgacctggttaaaaaacgtctagtgggccaaacccgggggggatccccggtttccttttattatatcaatgccact

SEQ ID NO: 18555 - DNA, 431 bp, synthetic construct
  source 1..431: mol_type = other DNA
ccctaatagtgagataccacgcttgtggaccttatgctcacacagccatcctctagtaagtttgtaagacatctgatgatgtgtgggaacttgttggagataacattttgctgcaaagcatcccattgccagcggatccacatctggtaacagatgcctctggggccaaaagccaaggtttaacagaccctttgggattggttcaaacctgaattgttatggaagacatttagtacctgctgatttggtagtagtgcaaacactagttgtaaggcccacaaaggatgcccagaaggtacccgtaggtaacaagtgacactatggatctgatctggggccaactacctctatctaggtgagttggttaaaaaacgtctagtgggccaaacccaggggggatccctggtttcctttttatttgaataaccact

SEQ ID NO: 18556 - DNA, 433 bp, synthetic construct
  source 1..433: mol_type = other DNA
ttctactagtgagataccacgcttgtggaccttatgctcacacagccatcctctagtaagtttgtgagacgtctggtgacgtgtgggaacttattggaaacaacattttgctgcaaagcatcctattgccagcggaacaacacctggtaacaggtgcctctggggccaaaagccaaggtctaacaaaccctttaggattggttctaaacctgagatgttgtggaagatacttagtacctgccgatctggtagtagtgcaaacactagttgtaaggcccacgaaggatgcccagaaggtacccataggtaacaagtgacactatggatctgatctggggacagatacctctatcttggtgacctgtttaaaaagcgtctagtgggccaaacccgggggggatccccggtttccttttattttatcaatgccact

SEQ ID NO: 18557 - DNA, 420 bp, synthetic construct
  source 1..420: mol_type = other DNA
gataccacgcttgtggaccttatgctcacacagccatcctctagtaagtttgtaagacatctgatgatgtgtgggaacttgttggagataacattttgctgcaaagcatcccattgccagcggatccacatctggtaacagatgcctctggggccaaaagccaaggtttaacagactctttgggattggttcaaacctgaattgttatggaagacatttagtacctgctgatttggtagtagtgcaaacactagttgtaaggcccacgaaggatgcccagaaggtacccgtaggtaacaagtgacactatggatctgatctggggccaactacctctatctaggtgagttggttaaaaaacgtctagtgggccaaacccaggggggatccctggtttccttttttatttgaataaccact

SEQ ID NO: 18558 - DNA, 271 bp, synthetic construct
  source 1..271: mol_type = other DNA
gatttatggatttccttttgaagacctgccctggcgcgggctagagcgcaaatgtcaccaggtattgcaccaatggtggcgacagggtacagaagagcaagtactcctgactgggcaatgggactgcattgcatatccctaggcatctattgagatttctctggagcccaccagcatggagttcctgtatgggaatgcaggactggacttgtgctgcctgacagggtcgcggctggccgtctgtactttgtatagtcagttgaaactcatt

SEQ ID NO: 18559 - DNA, 261 bp, synthetic construct
  source 1..261: mol_type = other DNA
ccaaggtttaacagaccctttaggattggtttaaaacctgaaatgttgtggaagatacttagtacctactgatctggtagtagtgcagacactagttgtaaggcccacgaaggatgcccagaaggtacccgtaggtaacaagtgacactatggatctgatctggggccaggtgcctctatcttggtgacctggttaaaaaacgtctagtgggccaaacccgggggggatccccggtttccttttattttaccaatgccaat

SEQ ID NO: 18560 - DNA, 260 bp, synthetic construct
  source 1..260: mol_type = other DNA
ccaaggtttaacagaccctttaggattggtattaacctgaagtgttatggaaaatatttagtacctgctgatttggtagtaatgcaaactctagttgtaaggcccacgaaggatgcccagaaggtacccgtaggtaacaagagacactatggatctgatttggggccaactacctctattaaggtgagttggttaaaaaacgtctagtgggccaagcccaggggggatccctggtttccttttattttactacattcaac

SEQ ID NO: 18561 - DNA, 261 bp, synthetic construct
  source 1..261: mol_type = other DNA
ccaaggtttaacagaccctttaggattggtttaaaacctgaaatgttgtggaaaatacttagtacctaccgatctggtagtagtgcagacactagttgtaaggcccacgaaggatgcccagaaggtacccgtaggtaacaagtgacactatggatctgatctggggccaggtgcctctatcttggtgacctggttaaaaaacgtctagtgggccaaacccgggggggatccccggtttccttttattttaccaatgccact

SEQ ID NO: 18562 - DNA, 404 bp, synthetic construct; identical to SEQ ID NO: 440
  source 1..404: mol_type = other DNA

SEQ ID NO: 18563 - DNA, 425 bp, synthetic construct
  source 1..425: mol_type = other DNA
agtgagataccacgcttgtggaccttatgctcacacagccatcctctagtaagtttgtaagacatctgatgacgtgtgggaacttgttggagataacattttgctgcaaagcatcccattgccagcggatccacatctggtaacagatgcctctggggccaaaagccaaggtttaacagaccctttgggattggttcaaacctgaattgttatggaagacatttagtacctgctgatttggtagtagtgcaaacactagttgtaaggcccacgaaggatgcccagaaggtacccgtaggtaacaagtgacactatggatctgatctggggccaactacctctatctaggtgagttggttaaaaaacgtctagtgggccaaacccaggggggatccctggtttccctttttatttgaataatcact

SEQ ID NO: 18564 - DNA, 251 bp, synthetic construct
  source 1..251: mol_type = other DNA
aagacctgccctggcgcgggctagagcgcaattgtcaccaggtatcgcaccaacggtggcgacagggtacagaagagcaagtactcctgactgggcaatgggactgcattgcatatccctaggcatctattgagatttctctggagcccaccagcatggagttcctgtatgggaatgcaggactggacttgtgctgcctgacagggtcgcggctggccgtctgtactttgtatagtcagttgaaactcatt

SEQ ID NO: 18565 - DNA, 261 bp, synthetic construct
  source 1..261: mol_type = other DNA
ccaaggtttaacagaccctttaggattggtttaaaacctgaaatgttgtggaagatatttagtacctaccgatctggtagtagtgcagacactagttgtaaggcccacgaaggatgcccagaaggtacccgtaggtaacaagtgacactatggatctgatctggggccaggtgcctctatcttggtgacctggttaaaaagcgtctagtgggccaaacccgggggggatccccggtttccttttattttaccaatgccaat

SEQ ID NO: 18566 - DNA, 261 bp, synthetic construct
  source 1..261: mol_type = other DNA
ccaaggtttaacagaccctttaggattggtttaaaacctgaaatgttgtggaaggtatttagtacctaccgatctggtagtagtgcaaacactagttgtaaggcccacgaaggatgcccagaaggtacccgtaggtaacaagcgacactatggatctgatctggggccaggtacctctatcttggtgacctggttaaaaaacgtctagtgggccaaacccgggggggatccccggtttccttttattttaccaatgtcact

SEQ ID NO: 18567 - DNA, 260 bp, synthetic construct
  source 1..260: mol_type = other DNA
ccaaggtttgacagaccctttaggattggttcacacctgaattgttatggaagttactcagtacctaccgatttggtagttaggcaaacactagttgtaaggcccacgaaggatgcccagaaggtacccgtaggtaacaagtgacactatggatctgatctggggtcaactacctctatcatggtgagttgattaaaaaacgtctagtgggccaaacccaggggggatccctggtttccttttattttatcacaacaact

SEQ ID NO: 18568 - DNA, 399 bp, synthetic construct; identical to SEQ ID NO: 435
  source 1..399: mol_type = other DNA

SEQ ID NO: 18569 - DNA, 378 bp, synthetic construct; identical to SEQ ID NO: 381
  source 1..378: mol_type = other DNA

SEQ ID NO: 18570 - DNA, 403 bp, synthetic construct; identical to SEQ ID NO: 439
  source 1..403: mol_type = other DNA

SEQ ID NO: 18571 - DNA, 373 bp, synthetic construct
  source 1..373: mol_type = other DNA
tttgtgagacgtctggtgacgtgtgggaacttattggaaacaacattttgctgcaaagcatcctattgccagcggaacaacacctggtaacaggtgcctctggggccaaaagccaaggtctaacaaaccctttaggattggttctaaacctgagatgttgtggaagatacttagtacctgccgatctggtagtagtgcaaacactagttgtaaggcccacgaaggatgcccagaaggtacccacaggtaacaagtgacactatggatctgatctggggccaggtacctctatcttggtgacctggttaaaaagcgtctagtgggccaaacccgggggggatccccggtttccttttattttatcaatgctaca

SEQ ID NO: 18572 - DNA, 373 bp, synthetic construct
  source 1..373: mol_type = other DNA
tttgtgagacgtctggtgacgtgtgggaacttattggaaacaacattttgctgcaaagcatcctattgccagcggaacaacacctggtaacaggtgcctctggggccaaaagccaaggtctaacaaaccctttaggattggttctaaacctgagatgttgtggaagatacttagtacctgccgatctggtagtagtgcaaacactagttgtaaggcccacgaaggatgcccagaaggtacccataggtaacaagtgacactatggatctgatctggggtcaggtacctctatcttggtgacctggttaaaaagcgtctagtgggccaaacccgggggggatccccggtttccttttattttatcaatgctaca

SEQ ID NO: 18573 - DNA, 372 bp, synthetic construct
  source 1..372: mol_type = other DNA
tttgtgagatgtctaatgacgtgtgggaacttattggaagcaacaatttgccgtacggcatcctattgccagcggatccacacctggtaacaggtgcccctggggccaaaagccaaggtttaacagaccctttaggattggttaaaacctgaattgttgtggaagatactcagtacctgctgatttggtagtaatgcaaacactagttgtaaggcccacgaaggatgcccagaaggtacccataggtaacaagtgacactatggatctgatctggggccaactacttctatcatggtgagttggttaaaaaacgtctagtgggccaaacccaggggggatccctggtttccttttatttcactatagtcaat

SEQ ID NO: 18574 - DNA, 373 bp, synthetic construct
  source 1..373: mol_type = other DNA
tttgtaagacgtctggtgacgtgtgggaacttattggaagcaacattttgctgcaaagcatcctactgccagcggaacaacacctggtaacaggtgcctctggggccaaaagccaaggtttaacaaaccctttaggattggtattaacctgaagtgttgtggaaaatatttagtacctgctgatttggtagtaatgcaaacactagttgtaaggcccacgaaggatgcccagaaggtacccgtaggtaacaagagacactatggatctgatttggggccaactacctctattaaggtgagttggttaaaaaacgtctagtgggccaaacccaggggggatccctggtttcctttttattttactacattcaat

SEQ ID NO: 18575 - DNA, 372 bp, synthetic construct
  source 1..372: mol_type = other DNA
tttgtgagatgtctaatgacgtgtgggaacttattggaagcaacaatttgccgtacggcatcctattgccagcggatccacacctggtaacaggtgcccctggggccaaaagccaaggtttaacagaccctttaggattggttaaaacctgaattgttgtggaagatactcagtacctgctgatttggtagtaatgcaaacactagttgtaaggcccacgaaggatgcccagaaggtacccgtaggtaacaagtgacactatggatctgatctggggccaactacttctattatggtgagttggttaaaaaacgtctagtgggccaaacccaggggggatccctggtttccttttatttcactatagccaat

SEQ ID NO: 18576 - DNA, 372 bp, synthetic construct
  source 1..372: mol_type = other DNA
tttgtgagatgtctaatgacgtgtgggaacttattggaagcaacaatttgccgtacggcatcctattgccagcggatccacacctggtaacaggtgcccctggggccaaaagccaaggtttaacagaccctttaggattggttaaaacctgaattgttgtggaagatactcagtacctgctgatttggtagtaatgcaaacactagttgtaaggcccacgaaggatgcccagaaggtacccgtaggtaacaagtgacactatggatctgatctggggtcaactacttctatcatggtgagttggttaaaaaacgtctagtgggccaaacccaggggggatccctggtttccttttatttcactatagtcaat

SEQ ID NO: 18577 - DNA, 373 bp, synthetic construct; identical to SEQ ID NO: 3
  source 1..373: mol_type = other DNA

SEQ ID NO: 18578 - DNA, 371 bp, synthetic construct
  source 1..371: mol_type = other DNA
tttgtaagacgtctgatgacgtgtgggaacttgttggagataacattttgctgcaaagcatcccattgccagcggatccacatctggtaacagatgcctctggggccaaaagccaaggtttaacagaccctttgggattggttcaaacctgaattgttatggaagacatttagtacctgctgatttggtagtagtgcaaacactagttgtaaggcccacgaaggatgcccagaaggtacccgtaggtaacaagtgacactatggatctgatctggggccaactacttctatctaggtgagttggttaaaaaacgtctagtgggccaaacccaggggggatccctggtttcttttttatttgaataatcact

SEQ ID NO: 18579 - DNA, 373 bp, synthetic construct
  source 1..373: mol_type = other DNA
tttgtgaggcgtctggtgacgtgtgggaacttattggaaacaacgttttgctgcaaagcatcctactgccagcggaaaaacacctggtaacaggtgcctctggggccaaaagccaaggtttaacagaccctttaggattggttctaaacctgagatgttgtggaagatatttagtacctgctaatctggtagttatgcaaacactagttgtaaggcccacgaaggatgcccagaaggtacctgtaggtaacaagtgacactatggatctgatttggggccaggtacctctatcttggtgacctggttaaaaaacgtctagtgggccaaacccgggggggatccccggtttcctcttatcctattaatgccact

SEQ ID NO: 18580 - DNA, 373 bp, synthetic construct
  source 1..373: mol_type = other DNA
tttgcgagacgtctggtgacgtgtgggaacttattggaaacaacattttgctgtaaagcatcctattgccagcggaacaacacctggtaacaggtgcctctggggccaaaagccaaggtttaacaaaccctttaggattggttctaaacctgagatgttgtggaagatacttagtacctactgatctggtagtagtgcaaacactagttgtaaggcccacgaaggatgcccagaaggtacccataggtaacaagtgacactatggatctgatctggggccaggtacctctatcttggtgacctggttaaaaaacgtctagtgggccaaacccgggggggatccccggtttccttttattttatcaataccact

SEQ ID NO: 18581 - DNA, 373 bp, synthetic construct
  source 1..373: mol_type = other DNA
tttgtgagacgtctagtgacgtgtgggaacttattggaaacaacattttgctgtaaagcatcctattgccagcggagtaacacctggtaacaggtgcccctggggccaaaagccaaggtttaacaaaccctttaggattggttctaaacctgagatgttgtggaagatacttagtacctaccgatctggtagtagtgcaaacactagttgtaaggcccacgaaggatgcccagaaggtacccgtaggtaacaagagacactatggatctgatctggggccaggcacctctatttcggtggcctggttaaaaaacgtctagtgggccaaacccgggggggatccccggtttcctttaattttatcaatgccact

SEQ ID NO: 18582 - DNA, 373 bp, synthetic construct
  source 1..373: mol_type = other DNA
tttgtgagacgtctagtgacgcgtgggaacttattggaaacaacattttgctgtaaagcatcctattgccagcggagtaacacctggtaacaggtgcccctggggccaaaagccaaggtttaacaaaccctttaggattggttctaaacctgagatgttgtggaagatacttagtacctaccgatctggtagtagtgcaaacactagttgtaaggcccacgaaggatgcccagaaggtacccgtaggtaacaagtgacactatggatctgatctggggccaggcacctctatcttggtggcctggttaaaaaacgtctagtgggccaaacccgggggggatccctggtttcctttaattttatcaatgccact

SEQ ID NO: 18583 - DNA, 373 bp, synthetic construct
  source 1..373: mol_type = other DNA
tttgtgagacgtctagtgacgtgtgggaacttattggaaacaacattttgctgtaaagcatcctattgccagcggagtaacacctggtaacaggtgcccctggggccaaaagccaaggtttaacaaaccctttaggattggttctaaacctgagatgttgtggaagatacttagtacctaccgatctggtagtagtgcaaacactagttgtaaggcccacgaaggatgcccaaaaggtacccgtaggtaacaagtgacactatggatctgatttggggccaggtacctctatcttggtgacctggttaaaaaacgtctagtgggccaaacccgggggggatccccggtttcctttaatttcatcaatgccatt

SEQ ID NO: 18584 - DNA, 319 bp, synthetic construct; identical to SEQ ID NO: 304
  source 1..319: mol_type = other DNA

SEQ ID NO: 18585 - DNA, 372 bp, synthetic construct
  source 1..372: mol_type = other DNA
tttgtgagacgtctggtgacgtgtgggaacttattggaaacaacatcttgctgtaaagcatcctattgccagcggaataacacctggtaacaggtgcctctggggccaaaagccaaggtttgacagaccctctaggattggttcaaaacctgagatgttgtggaaaatactcagtacctactgatctggtagtagtgcagacactagttgtaaggcccacgaaggatgcccagaaggtacccgtaggtaacaagtgacactatggatctgatctggggccaggtacctctatctaggtgacctggttaaaaaacgtctagtgggccaaacccgggggggaccccggtttccttttactttatcaatgccatt

SEQ ID NO: 18586 - DNA, 371 bp, synthetic construct
  source 1..371: mol_type = other DNA
tttgtaagacatctgatgatgtgtgggaacttgttggagataacattttgctgcaaagcatcccattgccagcggatccacatctggtaacagatgcctctggggccaaaagccaaggtttaacagaccctttgggattggttcaaacctgaattgttatggaagacatttagtacctgctgatttggtagtaatgcaaacactagttgtaaggcccacgaaggatgcccagaaggtacccgtaggtaacaagtgacactatggatctgatctggggccaactacctctatctaggtgagttggttaaaaaacgtctagtgggccaaacccaggggggatccctggtttcctttttatttgaataaccact

SEQ ID NO: 18587 - DNA, 373 bp, synthetic construct
  source 1..373: mol_type = other DNA
tttgtaagacgtctgatgacgtgtgggaacttgttggagataacattttgctgcaaagcatcccattgccagcggatccacatctggtaacagatgcctctggggccaaaagccaaggtttaacagaccctttgggattggttcaaacctgaattgttatggaagacatttagtacctgctgatttggtagtagtgcaaacactagttgtaaggcccacgaaggatgcccagaaggtacccgtaggtaacaagtgacactatggatctgatctggggccaactacttctatctaggtgagttggttaaaaaacgtctagtgggccaaacccaggggggatccctggtttcttttttttatttgaataatcact

SEQ ID NO: 18588 - DNA, 375 bp, synthetic construct
  source 1..375: mol_type = other DNA
tttgtaagacgtctgatgacgtgtgggaacttgttggagataacattttgctgcaaagcatcccattgccagcggatccacatctggtaacagatgcctctggggccaaaagccaaggtttaacagaccctttgggattggttcaaacctgaattgttatggaagacatttagtacctgctgatttggtagtagtgcaaacactagttgtaaggcccacgaaggatgcccagaaggtacccgtaggtaacaagtgacactatggatctgatctggggccaactacctctatctaggtgagttggttaaaaaacgtctagtgggccaaacccaggggggatccctggtttcctttttttttatttgaataatcact

SEQ ID NO: 18589 - DNA, 371 bp, synthetic construct
  source 1..371: mol_type = other DNA
tttgtaagacgtctgatgacgtgtgggaacttgttggaaataacagtttgctgcaaggcatcccactgccagcgggttcacatctggtaacagatgcctctggggccaaaagccaaggtttaatagaccctttgggattggttcaaacctgaactgttatggaagacatttagtacctgctgatttggtagtaatgcaaacactagttgtaaggcccacgaaggatgcccagaaggtacccgtaggtaacaagtgacactatggatctgatctggggccggctacctctatctaggtgagttggttaaaaaacgtctagtgggccaaacccaggggggatccctggtttctttttaatttgagtagtcact

SEQ ID NO: 18590 - DNA, 372 bp, synthetic construct
  source 1..372: mol_type = other DNA
tttgtaagacgtctgatgacgtgtgggaacttgttggagataacattttgctgcaaagcatcccattgccagcggatccacatctggtaacagatgcctctggggccaaaagccaaggtttaacagaccctttgggattggttcaaacctgaattgttatggaagacatttagtacctgctgatttggtagtagtgcaaacactagttgtaaggcccacgaaggatgcccagaaggtacccgtaggtaacaagtgacactatggatctgatctggggccaactacctctatctaggtgagttggttaaaaaacgtctagtgggccaaacccaggggggatccctggtttccttttttatttgaataatcact

SEQ ID NO: 18591 - DNA, 373 bp, synthetic construct
  source 1..373: mol_type = other DNA
tttgtaagacgtctgatgacgtgtgggaacttgttggaaataacagtttgctgcaaagcatcccactgccagtggaatcacatctggtaacagatgcctctggggccaaaagccaaggtttaacagaccctttgggattggttcaaacctgaactgttatggaaaacacttagtacctgctgatttggtagtaatgcaaacactagttgtaaggcccacgaaggatgcccagaaggtacccgtaggtaacaagtgacactatggatctgatctggggccagctacctctatctaggtgagttggttaaaaaacgtctagtgggccaaacccaggggggatccctggtttcctttttaaatttgagtaatcact

SEQ ID NO: 18592 - DNA, 392 bp, synthetic construct; identical to SEQ ID NO: 428
  source 1..392: mol_type = other DNA

SEQ ID NO: 18593 - DNA, 371 bp, synthetic construct
  source 1..371: mol_type = other DNA
tttgtaagacgtttgatgacgtgtgggaacttgttggagataacattttgctgcaaagcatcccattgccagcggatccacatctggtaacagatgcctctggggccaaaagccaaggtttaacagaccctttgggattggttcaaacctgaattgttatggaagacatttagtacctgctgatttgatagtagtgcaaacactagttgtaaggcccacgaaggatgcccagaaggtacccgtaggtaacaagtgacactacggatctgatctggggccaactacctctatctaggtgagttggttaaaaaacgtctagtgggccaaacccaggggggatccctggtttcctttttatttgaataatcact

SEQ ID NO: 18594 - DNA, 370 bp, synthetic construct
  source 1..370: mol_type = other DNA
tttgtaagacatctgatgatgtgtgggaacttgttggagataacattttgctgcaaagcatcccattgccagcggatccacatctggtaacagatgcctctggggccaaaagccaaggtttaacagaccctttgggattggttcaaacctgaattgttatggaagacatttagtacctgctaatttggtagtagtgcaaacactagttgtaaggcccacgaaggatgcccagaaggtacccgtaggtaacaagtgacactatggatctgatctggggccaactacctctatctaggtgagttggttaaaaaacgtctagtgggccaaacccaggggggatccctggtttccttttatttgaataaccact

SEQ ID NO: 18595 - DNA, 370 bp, synthetic construct
  source 1..370: mol_type = other DNA
tttgtaagacgtctgatgacgtgtgggaacttgttggagataacattttgctgcaaagcatcccattgctagcggatctacatctggtaacagatgcctctggggccaaaagccaaggtttaacagaccctttgggattggttcaaacctgaattgttattgaagacatttagtacctgctgatttggtagtagtgcaaacactagttgtaaggcccacgaaggatgcccagaaggtacccgtaggtaacaagtgacactatggatctgatctggggccaactacttctatctaagtgagttggttaaaaaacgtctagtgggccaaacccaggggggatccctggtttctttttatttgaataatcact

SEQ ID NO: 18596 - DNA, 456 bp, synthetic construct
  source 1..456: mol_type = other DNA
gggtggcagatggcgtgccataattctattagtgagataccacgcttgtggaccttatgctcacacagccatcctctagtaagtttgtgagacgtctggtgacgtgtgggaacttattggaaacaatatcttgctgtaaagcattcaactgccagcggaacaacacctggtaacaggtgcctctggggccaaaagccaaggtttaacagacccttttggattggttctaaacctgagatgttgtggaagatacttagtacctactgatctggtagtagtgcaaacactagttgtaaggcccacgaaggatgcccagaaggtacccgtaggtaacaagtgacactatggatctgatctggggctaggtgcctctatcttggtgacctggttaaaaaacgtctagtgggccaaacccaggggggatccctggtttccctttattttatcgatgccact

SEQ ID NO: 18597 - DNA, 406 bp, synthetic construct
  source 1..406: mol_type = other DNA
agatatcgctcgagctagaactacaatgctggtcgctgaacccgcaccacaccttgtggaactttgcggggaaagtggctagtgggctgtagaagtgactctgaccacacgccccatgagcgtgggaaaccacaaatcggtgtagcgacgacaacaggccttgggacaccctctccagtgatggaaacccaaggggccaaaagccacgccttgtgccctgttgttcacaaccccagtgcgatttgtgttagtacctactcgtgggaactgtgtttggacagctgaacacagccctagtgggagactaaggatgcccaggaggtacccggaggtaacaagtgacactctggatctgacctggggagagggggcctgctgtacaggcgcccctctttaaaaaacttct

SEQ ID NO: 18598 - DNA, 335 bp, synthetic construct
  source 1..335: mol_type = other DNA
acaacattttgctgcaaagcatcctactgccagcggaataacacctggtaacaggtgcccctggggccaaaagccaaggtttaacagaccctttaggattggttttaaaaacctgaaatgttgtggaaaatacttagtacctactgatctggtagtaatgcaaacactagttgtagggcccacgaaggatgcccagaaggtacccgtaggtaacaagtgacactatggatctgatctggggccaagtacctctatcttggtgacttggttaaaaaacgtctagtgggccaaacccgggggggaccccggtttccttttattttaccaatgtcact

SEQ ID NO: 18599 - DNA, 320 bp, synthetic construct
  source 1..320: mol_type = other DNA
caaagcatcctactgccagcggaaaaacacctggtaacaggtgcctctggggccaaaagccaaggtttaacagaccctttaggattggttctaaacctgagatgttgtggaagatattcagtacctgctgatctggtagttatgcaaacactagttgtaaggcccacgaaggatgcccagaaggtacctgtaggtaacaagtgacactatggatctgatttggggccagatacctctatcctggtgatctggttaaaaaacgtctagtgggccaaacccgggggggatccccggtttcctcttatcttattaatgccact

SEQ ID NO: 18600 - DNA, 509 bp, synthetic construct; identical to SEQ ID NO: 15
  source 1..509: mol_type = other DNA

SEQ ID NO: 18601 - DNA, 302 bp, synthetic construct
  source 1..302: mol_type = other DNA
cagcggatccacatctggtaacagatgcctctggggccaaaagccaaggtttaacagaccctttgggattggttcaaacctgaattgttatggaagacatttagtacctgctgatttggtagtagtgcaaacactagttgtaaggcccacgaaggatgcccagaaggtacccgtaggtaacaagtgacactatggatctgatctggggccaactacttctatctaggtgagttggttaaaaaacgtctagtgggccaaacccaggggggatccctggtttcctttttatttgaataatcact

SEQ ID NO: 18602 - DNA, 433 bp, synthetic construct; identical to SEQ ID NO: 479
  source 1..433: mol_type = other DNA

SEQ ID NO: 18603 - DNA, 267 bp, synthetic construct
  source 1..267: mol_type = other DNA
aatccatgcatataatcaaagaattcttctaatctagcagctttttccctagcagtggggggaggaggagactggaaaacaacgggttctataagagagacatcagagaaaaaatcggatgtatcggggtcagtcttcttccattcttcaaaagtactctgaattatccatgcaaattttgctgcacgtgcacgtccacgtacagtatcaacaacatccatcttccaagctccccatattaataccttagaaaagggagatcaaatc

SEQ ID NO: 18604 - DNA, 456 bp, synthetic construct
  source 1..456: mol_type = other DNA
ctcgtttctcccttactcactcattcacgcacaaaaagtgtgttgtaactacaagatttagccctcgcacgggatgtgcgataaccgcaagattgactcaagcgcggaaagcgctgtaaccatatgctgttagtccctttatggctgcgagatggctatccacctcggatcactgaactggagctcgaccctccttagtaagggaaccgagaggccttcttgcaacaagctccgacacagagtccacgtgattgctaccaccatgagtacatggttctcccctctcgacccaggacttctttttgaatatccacggctcgatccagagggtggggcatgatccccctagcatagcgagctacagcgggaactgtagctaggccttagcgtgccttggatactgcctgatagggcgacggcctagtcgtgtcggttctataggtagcacatacaaat

SEQ ID NO: 18605 - DNA, 377 bp, synthetic construct
  source 1..377: mol_type = other DNA
taagtttgtgagacgtctggtgacgtgtgggaacttgttggaaacagtattttgctgcaaagcatcctattgccagcggaacaacacctggtaacaggtgcccctggggccaaaagccaaggtttaacagaccctttaggattggttttaaacctgaaatattgtggaagatacttagtacctactaatctggtagtagtgcaaacactagttgtaaggcccacgaaggatgcccagaaggtacccgtaggtaacaagtgacactatggatctgatctggggccaggtacctctatcttggtgacctggttaaaaaacgtctagtgggccaaacccgggggggatcctcggtttccttttattttgtcaataccatt

SEQ ID NO: 18606 - DNA, 575 bp, synthetic construct; identical to SEQ ID NO: 625
  source 1..575: mol_type = other DNA

SEQ ID NO: 18607 - DNA, 387 bp, synthetic construct
  source 1..387: mol_type = other DNA
ccatcctctagtaagtttgtaagacgtctgatgacgtgtgggaagttattggaagtaacaatttgccgtaaggcatcctagagccagtggattaacacctggtaacaggtgcccctggggccaaaagccaaggtttaacagaccctttaggattggttcaaacctgggttgttatggaagatatttagtacctgctgatttggtagtaatacaaacactagttgtaaggcccacgaaggatgcccagaaggtacccgtaggtaacaagtgacactatggatctgatttggggttgactacctctgtcctggtgagtcaattaaaaaacgtctagtgggccaaacccaggggggatccctggtttccttttattttattacaaccatt

SEQ ID NO: 18608 - DNA, 315 bp, synthetic construct; identical to SEQ ID NO: 300
  source 1..315: mol_type = other DNA

SEQ ID NO: 18609 - DNA, 506 bp, synthetic construct; identical to SEQ ID NO: 531
  source 1..506: mol_type = other DNA

SEQ ID NO: 18610 - DNA, 509 bp, synthetic construct; identical to SEQ ID NO: 533
  source 1..509: mol_type = other DNA

SEQ ID NO: 18611 - DNA, 281 bp, synthetic construct
  source 1..281: mol_type = other DNA
tatataagatcctttccgccgatatagacctcgacagtctagtgtaggaggattggtgatattaatttgccccagaagagtgaccgtgacacatagaaaccatgagtacatgtgtatccgtggaggatcgcccgggactggattccatatcccattgccatcccaacaaacggagggtatacccactatgtgcgcgtttgcagtgggagtctgcaaatttagtcatactgcctgatagggtgtgggcctgcactctggggtattcaggctgttcatataat

SEQ ID NO: 18612 - DNA, 387 bp, synthetic construct; identical to SEQ ID NO: 418
  source 1..387: mol_type = other DNA

SEQ ID NO: 18613 - DNA, 627 bp, synthetic construct; identical to SEQ ID NO: 750
  source 1..627: mol_type = other DNA

SEQ ID NO: 18614 - DNA, 576 bp, synthetic construct
  source 1..576: mol_type = other DNA
gcaggttcagggttcttaaatctgtttctctataagaacactcatttttcacgctctctgtcttctttcttccagggctctccccttgccctaggctctggccgttgcgcccggcggggtcaactccatgattagcatggagctgtaggagtctaaattggggacacagatgtttggaacgtcaccttgcagtgttaacttggctttcatgaatctctttgatcttccataaggggtaggctacgggtgaaacctcttaggctaatacttctatgaagagatgctttggatagggtaacagcggcggatattggtgagttgttaagacaaaaaccattcaacgccggaggactgactctcatccagtggatgcattgagtggattgactgtcagggctgtctctaggcttaattccagacctctctgtgcttagggcaaacatcatttggccttaaatgggattctgtgagaggggatccctccattgacagctggactgttctttggggccttatgtggtgtttgcctctgaggtactcaggggcatttaggtttttcctcattcttaaataata

SEQ ID NO: 18615 - DNA, 372 bp, synthetic construct; identical to SEQ ID NO: 356
  source 1..372: mol_type = other DNA

SEQ ID NO: 18616 - DNA, 466 bp, synthetic construct; identical to SEQ ID NO: 502
  source 1..466: mol_type = other DNA

SEQ ID NO: 18617 - DNA, 362 bp, synthetic construct
  source 1..362: mol_type = other DNA
ttggatcataggctagctcatttggtatgactattggatacaccttgaacggcagtagcgtggcgagctatggaaaaatcgcaattgtcgatagccatgttagtgacgcgcttcggcgtgctcctttggtgattcggcgactggttacaggagagtaggcagtgagctatgggcaaacctctacagtattacttagagggaatgtgcaattgagacttgacgagcgtctcttcgagatgtggcgcatgctcttggcattaccatagtgagcttccaggttgggaaacctggactgggcctatactacctgatagggtcgcggctggccgcctgtaactagtatagtcagttgaaaccccccc

SEQ ID NO: 18618 - DNA, 540 bp, synthetic construct
  source 1..540: mol_type = other DNA
cttggacagattgcctccacgacctttgtggatctcaaggtgatcaagtcactggtgaatagagcgaaggttgaggagacctgaggaatttccatgtggctttgccaggagttgtagcgatgctgtgtgtgtgtgcggatttcctctcatggcaacatgagcctcacaggccaaaagccctgtccgaaaggacccacacagtggagcaaccccagctccctcctgcaaagttttgtgtgaatgaactcacgtttattcttctttattctctatttacatcaggccccaaagatgtcctgaaggtaccttgtgtatctgggcacgagcaccatcgactacccggacttgcgcttcggtgcagatgcatgtggtgacccagcccctctgtttcggcagaggggcttttgctcgctcagcacgagatctgatcaggagcccctcccagtgtgctttacgcctggcgagaggttaaaaattgcccaaggcctggcaaaataacctaggggactaggttttcctttattaacaatgtttgtcatt

SEQ ID NO: 18619 - DNA, 519 bp, synthetic construct; identical to SEQ ID NO: 17
  source 1..519: mol_type = other DNA

SEQ ID NO: 18620 - DNA, 1000 bp, synthetic construct; identical to SEQ ID NO: 1482
  source 1..1000: mol_type = other DNA

SEQ ID NO: 18621 - DNA, 306 bp, synthetic construct; identical to SEQ ID NO: 1339
  source 1..306: mol_type = other DNA

SEQ ID NO: 18622 - DNA, 441 bp, synthetic construct
  source 1..441: mol_type = other DNA
ctcatttcccccctccacccttaaggtggttgtatccccataccttaccctcccctccaaacaggatggacaaatggacttggacttgcggcaaggacatatggtatgatcattggatacaccttgaatggcagtagcgtggcgagctatggaaaaatcgcaattgtcgatagccatgttagtgacgcgcttcggcgtgctcctttggtgattcggcgactggttacaggagagtaggcagtgagctatgggcaaacctctgcagtattactcagagggaatgtgcaattgaggcttgacgagcgtctcgtagagatgtggcgcatgctcttggcattaccatagtgagcttccaggttgggaaacctggactgggcctatactacctgatagggtcgcggctggccgcctgtaactagtatagtcagttgaaaccccccc

SEQ ID NO: 18623 - DNA, 712 bp, synthetic construct
  source 1..712: mol_type = other DNA
ttccggagtccctcttggaagtccatggtgaggggacttgatacctcaccgccgtttgcctaggctataggctaaattttccctttcccttttccctttcctattccctttgttttgcttgtaaatattaattcctgcaggttcagggttcttaaatctgtttctctataagaacactcatttttcacgctttctgtcttctttcttccagggctctccccttgccctaggctctggccgttgcgcccggcggggtcaactccatgattagcatggagctgtaggagtctaaattggggacacagatgtttggaacgtcaccttgcagtgttaacttggctttcatgaatctctttgatcttccacaaggggtaggctacgggtgaaacctcttaggctaatacttctatgaagagatgccttggatagggtaacagcggcggatattggtgagttgttaagacaaaaaccattcaacgccggaggactgactctcatccagtggatgcattgagtggattgactgtcagggctgtctttaggcttaattccagacctctctgtgcttagggcaaacatcatttggccttaaatgggattctgtgagaggggatccctccattgacagctggactgttctttggggccttatgtggtgtttgcctctgaggtactcaggggcatttaggtttttcctcattcttaaataata

SEQ ID NO: 18624 - DNA, 405 bp, synthetic construct; identical to SEQ ID NO: 441
  source 1..405: mol_type = other DNA

SEQ ID NO: 18625 - DNA, 1000 bp, synthetic construct; identical to SEQ ID NO: 145
  source 1..1000: mol_type = other DNA

SEQ ID NO: 18626 - DNA, 899 bp, synthetic construct; identical to SEQ ID NO: 1291
  source 1..899: mol_type = other DNA

SEQ ID NO: 18627 - DNA, 338 bp, synthetic construct; identical to SEQ ID NO: 323
  source 1..338: mol_type = other DNA

SEQ ID NO: 18628 - DNA, 386 bp, synthetic construct; identical to SEQ ID NO: 412
  source 1..386: mol_type = other DNA

SEQ ID NO: 18629 - DNA, 331 bp, synthetic construct
  source 1..331: mol_type = other DNA
tttttggatacacttaaatggcagtagcgtggcgagctatggaaaaatcgcaattgtcgatagccatgttagtgacgcgcttcggcgtgctcctttggtgattcggcgactggttacaggagagtaggcagtgagctatgggcaaacccctgcagtgttactcagggggaatgtgcaattgagacttgacgagcgtctctcagagacgtggcgcatgctcttggcattaccatagtgagcttccaggttgggaaacctggactgggcctacactacctgatagggtcgcggctggccgcctgtaactagtatagtcagttgaaaccccccc

SEQ ID NO: 18630 - DNA, 286 bp, synthetic construct
  source 1..286: mol_type = other DNA
acttggttatgaattcattggattaacccctctgaaagacctgctctggcgcgagctaaagcgcaattgtcaccaggtattgcaccaatggtggcgacagggtacagaagagcaagtactcctgactgggtaatgggactgcattgcatatccctaggcacctattgagatttctctggggcccaccagcgtggagttcctgtatgggaatgcaggactggacttgtgctgcctgacagggtcgcggctggccgtctgtactttgtatagtcagttgaaactcacc

SEQ ID NO: 18631 - DNA, 329 bp, synthetic construct
  source 1..329: mol_type = other DNA
ggtcttcggacttttgttgtgtttaaacacagaaatttggttggtctggctatgaatccaatggattaaccctcctgaaagacctgctctggcgcgagctaaagcgcaattgtcaccaggtattgcaccaatggtggcgacagggtacagaagagcaagtactcctgactgggcaatgggactgcattgcatatccctaggcacctattgagatttctctggggcccaccagcgtggagttcctgtatgggaatgcaggactggacttgtgctgcctgacagggtcgcggctggccgtctgtactttgtatagtcagttgaaactcacc

SEQ ID NO: 18632 - DNA, 317 bp, synthetic construct
  source 1..317: mol_type = other DNA
ttctgttgtgtttaaacacagaaatcttgttacttggttatgaattcattggattaacccctctgaaagacctgctctggcgcgagctaaagcgcaattgtcaccaggtattgcaccaatggtggcgacagggtacagaagagcaagtactcctgactgggtaatgggactgcattgcatatccctaggcacctattgagatttctctggggcccaccagcgtggagttcctgtatgggaatgcaggactggacttgtgctgcctgacagggtcgcggctggccgtctgtactttgtatagtcagttgaaactcacc

SEQ ID NO: 18633 - DNA, 325 bp, synthetic construct
  source 1..325: mol_type = other DNA
ctttggtctcttgttgtgtttaaacacagaaatcttgttatctggttatgaattcactggatcaacccctttgaaagacttgctctggcgcgagctaaagcgcaattgtcaccgggtattgcaccaatggtggcgacagggtacagaagagcaagtactcctgactgggcaatgggactgcgttgcatatccctaggcacctattgagatttctctggggcccaccagcgtggagttcctgtatgggaatgcaggactggacttgtgctgcctgacagggtcgcggctggccgtctgtactttgtatagtcagttgaaactcacc

SEQ ID NO: 18634 - DNA, 357 bp, synthetic construct
  source 1..357: mol_type = other DNA
tagttttggattatcttgtgcccaacactagacttcggtctcttgttgtgtttaaacacagaaatcttgctatttggttatgaattcattggaacaatccctctgaaagacttgctctggcgcgagctaaagcgcaattgtcaccgggtattgcaccaatggtggcgacagggtacagaagagcaagtactcctgactgggcaatgggactgcattgcatatccctaggcacctattgagatttctctggggcccaccagcgtggagttcctgtatgggaatgcaggactggacttgtgctacctgacagggtcgcggctggccgtctgtactttgtatagtcagttgaaattcacc

SEQ ID NO: 18635 - DNA, 419 bp, synthetic construct; identical to SEQ ID NO: 458
  source 1..419: mol_type = other DNA

SEQ ID NO: 18636 - DNA, 333 bp, synthetic construct
  source 1..333: mol_type = other DNA
acactagaccttggtcttttgttgtgtttaaacacagaaatcttgttacttggttatgaattcattggattaacccctctgaaagacctgctctggcgcgagctaaagcgcaattgtcaccaggtattgcaccaatggtggcgacagggtacagaagagcaagtactcctgactgggtaatgggactgcattgcatatccctaggcacctattgagatttctctggggcccaccagcgtggagttcctgtatgggaatgcaggactggacttgtgctgcctgacagggtcgcggctggccgtctgtactttgtatagtcagttgaaactcacc

SEQ ID NO: 18637 - DNA, 409 bp, synthetic construct
  source 1..409: mol_type = other DNA
gttgtatcccctaccccatcctcccctccaaacaggacggacaatcggacctgacatctggcgagaagaattggaatggtatttggacacacttgaatggcagtagcgtggcgagctatggaaaaatcgcaattgtcgatagccatgttagtgacgcgcttcggcgtgctcctttggtgattcggcgactggttacaggagagtagacagtgagctatgggcaaacccctacagtgttacttagggggaatgtgcaattgagacttgacgagcgtctcgtagagatgtggcgcatgctcttggcattaccatagtgagcttccaggttgggaaacctggactgggtctatactacctgatagggtcgcggctggccgcctgtaactagtatagtcagttgaaacccccc

SEQ ID NO: 18638 - DNA, 343 bp, synthetic construct; identical to SEQ ID NO: 327
  source 1..343: mol_type = other DNA

SEQ ID NO: 18639 - DNA, 333 bp, synthetic construct
  source 1..333: mol_type = other DNA
acactagacctcggtctcttgttgtgtttaaacacagaaatcttgccacttggttacgacttcatgggaacaatcctcctgaaagacctgctctggcgcgagcaaaagcgcaattgtcaccaggtattgcaccaatggtggcgacagggtacagaagagcaagtactcctgactgggcaatgggactgcgttgcatatccctaggcacctattgagatttctctggggcccaccagcgtggagttcctgtatgggaatgcaggactggacttgtgctgcctgacagggtcgcggctggccgtctgtactttgtatagtcagttgaaattcact

SEQ ID NO: 18640 - DNA, 286 bp, synthetic construct
  source 1..286: mol_type = other DNA
gctcggttatgaattcaatggatcaatcctcttgaaagacctgctctggcgcgagcaaaagcgcaattgtcaccaggtattgcaccaatggtggcgacagggtacagaagagcaagtactcctgactgggcaatgggactgcgttgcatatccctaggcacctatcgagatttctctggggcccaccagcgtggagttcctgtatgggaatgcaggactggacttgtgctgcctgacagggtcgcggctggccgtctgtactttgtatagtcagttgaaatttacc

SEQ ID NO: 18641 - DNA, 330 bp, synthetic construct
  source 1..330: mol_type = other DNA
ttagtccccggacttctgttgtgtttaaacacagaaatttggttgtctggctatgaattcattggaacaacccctttgaaagacctgctctggcgcgagctaaagcgcaattgtcaccgggtattgcaccaatggtggcgacagggtacagaagagcaagtactcctgactgggtaatgggactgcattgcatatccctaggcacctattgagatttctctggggcccaccagcgtggagttcctgtatgggaatgcaggactggacttgtgctgcctgacagggtcgcggctggccgtctgtactttgtatagtcagttgaaactcacc

SEQ ID NO: 18642 - DNA, 343 bp, synthetic construct; identical to SEQ ID NO: 328
  source 1..343: mol_type = other DNA

SEQ ID NO: 18643 - DNA, 333 bp, synthetic construct
  source 1..333: mol_type = other DNA
acactagaccttggtcttttgttgtgtttaaacacagaaatcttgttacttggttatgaattcattggattaacccctctgaaagacctgctctggcgcgagctaaagcgcaattgtcaccaggtattgcaccaatggtggcgacagggtacagaagagcaagtactcctgactgggtaatgggactgcattgcatatccctaggcacctattgagatttctctggggcccaccagcgtggagttcctgtatgggaatgcaggactggacttgtgctgcctgacagggtcgcggctggccgtctgtactttgtatagtcagttgaaattcact

SEQ ID NO: 18644 - DNA, 335 bp, synthetic construct
  source 1..335: mol_type = other DNA
aacactagaccttggtcttttgttgtgtttaaacacagaaatttgattatctgactatgaattcaatggattaaccctttttgaaagacctgctctggcgcgagctaaagcgcaattgtcaccaggtattgcaccaatggtggcgacagggtacagaagagcaagtactcctgactgggcaatgggactgcattgcatatccctaggcacctattgagatttctctggggcccaccagcgtggagttcctgtatgggaatgcaggactggacttgtgctgcctgacagggtcgcggctggccgtctgtactttgtatagtcagttgaaactcacc

SEQ ID NO: 18645 - DNA, 315 bp, synthetic construct
  source 1..315: mol_type = other DNA
ctgttgtgtttaaacacagaaatcttgttacttggttatgaattcattggattaacccctctgaaagacctgctctggcgcgagctaaagcgcaattgtcaccaggtattgcaccaatggtggcgacagggtacagaagagcaagtactcctgactgggtaatgggactgcattgcatatccctaggcacctattgagatttctctggggcccaccagcgtggagttcctgtatgggaatgcaggactggacttgtgctgcctgacagggtcgcggctggccgtctgtactttgtatagtcagttgaaactcacc

SEQ ID NO: 18646 - DNA, 332 bp, synthetic construct
  source 1..332: mol_type = other DNA
tgctggtcttcggacttttgttgtgtttaaacacagaaattttgtcgctcgattatgaattcactggatcaatccctctgaaagacctgctctggcgcgagctaaagcgcaattgtcaccaggtattgcaccaatggtggcgacagggtacagaagagcaagtactcctgactgggcaatgggactgcattgcacatccctaggcacctatcgagatttctctggggcccaccagcatggagttcctgtatgggaatgcaggactggacttgtgctgcctgacagggtcgcggctggccgtctgtactttgtatagtcagttgaaactcacc

SEQ ID NO: 18647 - DNA, 529 bp, synthetic construct; identical to SEQ ID NO: 558
  source 1..529: mol_type = other DNA

SEQ ID NO: 18648 - DNA, 387 bp, synthetic construct; identical to SEQ ID NO: 419
  source 1..387: mol_type = other DNA

SEQ ID NO: 18649 - DNA, 333 bp, synthetic construct
  source 1..333: mol_type = other DNA
acattagtccttggactcctgttgtgtttaaacacagaaatttgactgcttggttatgaattcattggataaaccctcttgaaagacctgctctggcgcgagctaaagcgcaattgtcaccaggtattgcaccaatggtggcgacagggtacagaagagcaagtactcctgactgggtaatgggactgcattgcatatccctaggcacctattgagatttctctggggcccaccagcgtggagttcctgtatgggaatgcaggactggacttgtgctgcctgacagggccgcggctggccgtctgtactttgtatagtcagttgaaactcact

SEQ ID NO: 18650 - DNA, 324 bp, synthetic construct
  source 1..324: mol_type = other DNA
ctcggacttttgttgtgtttaaacacagaaatttgattgcttggttatgaattcattggatcaaccctcttgaaagacctgctctggcgcgagctaaagcgcaattgtcaccaggtattgcaccaatggtggcgacagagtacagaagagcaagtactcctgactgggcaatgggactgcattgcatatccctaggcacctattgagatttctctggggcccaccagcatggagttcctgtatgggaatgcaggactggacttgtgctgcctgacagggtcgcggctggccgtctgtactttgtatagtcagttgaaacgcacc

SEQ ID NO: 18651 - DNA, 321 bp, synthetic construct
  source 1..321: mol_type = other DNA
ggtctcctgttgtgtttaaacacagaaatcttgttactcggttatgaattcactggatcaatccttctgaaagacctgctctggcgcgagcaaaagcgcaattgtcaccaggtactgcaccaatggtggcgacagggtacagaagagcaagtactcctgactgggcaatgggactgcattgcatatccctaggcacctattgagatttctctggggcccaccagcgtggagttcctgtatgggaatgcaggactggacttgtgctgcctgacagggtcgcggctggccgtctgtactttgtatagtcagttgaaactcacc

SEQ ID NO: 18652 - DNA, 317 bp, synthetic construct
  source 1..317: mol_type = other DNA
ttctgttgtgtttaaacacagaaatctgactacttggttatgaattcattggataaacccttttgaaagacctgctctggcgcgagctaaagcgcaattgtcaccgggtattgcaccaacggtggcgacagggtacagaagagcaagtactcctgactgggcaatgggactgcattgcatatccctaggcacctattgagattcctctggggcccaccagcatggagttcctgtatgggaatgcaggactggacttgtgctgcctgacagggtcgcggctggccgtctgtactttgtatagtcagttgaaatgcacc

SEQ ID NO: 18653 - DNA, 683 bp, synthetic construct
  source 1..683: mol_type = other DNA
tgaggggacttgatacctcaccgccgtttgcctaggctataggctaaattttcccttcccctctcccctttcctatcctctttgtttggtgagtagatattaattcctgcaggttcagggttcttaaatctgtttctctataagaacactcattttcacgctttctgtcttctctattccagggctctccccttgccctaggctctggccgttgcgcccggcggggtcaactccatgattagcatggagctgtaggagtctaaattggggacacagatgtttggaacgtcaccttgcagtgttaacttggctttcatgaatctctttgatcttccacaaggggtaggctacgggtgaaacctcttaggctaatacttctatgaagagatgctttggatagggtaacagcggcggatattggtgagttgttaagacaaaaaccattcaacgccggaggactgactctcatccagtggatgcattgagtggattgactgtcagggctgtctctaggcttaattccagacctctctgtgcttagggcaaacatcatttggtcttaaatgggattctgtgagaggggatccctccattgacagctggactgtcctttggggccttatgtggtgtttgcctctgaggtactcaggggcatttaggtttttcctcattcttaaataata

SEQ ID NO: 18654 - DNA, 682 bp, synthetic construct
  source 1..682: mol_type = other DNA
gaggggacttgatacctcaccgccgtttgcctaggctataggctaaatttccctttccctgtccttcccctatttccctttgttttgtttgtaaatattaattcctgcaggttcagggttcttcaatctgtttctctataagaacactcaattttcacgctttctgtcttctttcttccagggctctccccttgccctaggctctggccgttgcgcccggcggggtcaactccatgattagcatggagctgtaggagtctaaattggggacgcagatgtttgggacgtcgccttgcagtgttaacttggctctcatgaacctctttgatcttccacaaggggtaggctacgggtgaaacctcttaggctaatacttctatgaagagatgccttggatagggtaacagcggcggatattggtgagttgttaagacaaaaaccattcaacgccggaggactggctctcatccagtggatgcattgagtgaattgattgtcagggctgtctctaggtttaatctcagaactctctgtgcttagggcaaacactacttggccttaaatgggatcctgtgagagggggtccctccattaacagctggactgttctttgggcccttatgtggtgtttgcttctgaggtactcaggggcatttaggtttttcctcatttttaaataaca

SEQ ID NO: 18655 - DNA, 285 bp, synthetic construct
  source 1..285: mol_type = other DNA
tttggttatagattcagtggactaacccttttgaaagacctgctctggcgcgagctaaagcgcaattgtcaccgggtattgcaccaatggtggcgacagggtacagaagagcaagtactcctgactgggtaatgggactgcattgcatatccctaggcacctattgagatttctctggggcccaccagcgtggagttcctgtatgggaatgcaggactggacttgtgctgcctgacagggtcgcggctggccgtctgtactttgtatagtcagttgaaattcact

SEQ ID NO: 18656 - DNA, 391 bp, synthetic construct
  source 1..391: mol_type = other DNA
cagccatcctctggtaagtttgtaagacgtctggtgacgtgtgggaacttattggaaacaacattttgctgtaaagcatcctattgccagcggaataacacctggtaacaggtgcctctggggccaaaagccaaggtttaacaaaccctttaggattggttctaaacctgagatgttgcggaagatacttagtacctaccgatctggtagtagtgcaaacactagttgtaaggcccacgaaggatgcccagaaggtacccgtaggtaacaagtgacactatggatctgatctggggccaggtacctctatcttggtgatctggttaaaaaacgtctagtgggccaaacccgggggggatccccggtttccttttattttaccaatgccact

SEQ ID NO: 18657 - DNA, 498 bp, synthetic construct
  source 1..498: mol_type = other DNA
ctctccccttgccctaggctctggccgttgcgcccggcgggtcaactccatgattagcatggagctgtaggagtctaaattggggacgcagatgtgtgggacgtcaccttgcagtgtaaacttggctctcatgaacctctttgatcttccacaaggggtaggctacgggtgaaacctcttaggctaatacttctatgaagagatgctttggatagggcaacagcggcggatattggtgagttgttaagacaaaaaccattcaacgccggaggactggctctcatccagtggatgcattgagtggattgattgtcagggctgtctctaggtttaatctcagacctctctgtgcttagggcaaacaccatttggccttaaatgggatcctgtgagagggggtccctccattgacagctggactgttctttggggccttatgtggtgtttgcctctgaggtactcaggggcatttaggtttttcctcattcttaaacaata

SEQ ID NO: 18658 - DNA, 367 bp, synthetic construct; identical to SEQ ID NO: 1
  source 1..367: mol_type = other DNA

SEQ ID NO: 18659 - DNA, 367 bp, synthetic construct
  source 1..367: mol_type = other DNA
tgaggtgtctgatgaggtgtgggaacttattggaagtgattacttgctgcaaagcatcctattgccagcggatcaacacctggtgacaggtgcccctggggccaaaagccaaggtttaacagaccctctaggattggtttaaacctgagtagtcatggaaaatacttagtacctgccaatttggtaacagtgcaaacactagttgtaaggcccacgaaggatgcccagaaggtacccgaaggtaacaagtgacactatggatctgatttggggccatctacttctatcttggtgaggtggttaaaaaacgtctagtgggccaaacccaggggggatccctggtttcctttatcataccactatcatt

SEQ ID NO: 18660 - DNA, 368 bp, synthetic construct; identical to SEQ ID NO: 2
  source 1..368: mol_type = other DNA

SEQ ID NO: 18661 - DNA, 430 bp, synthetic construct
  source 1..430: mol_type = other DNA
cctccacccttaaggtggttgtatccccataccctaccctcccttccacacaggacggataaatggacttggacttatggcaagaacatacggtatgatttttggatacaccttgaatggcagtagcgtggcgagctatggaaaaatcgcaattgtcgatagccatgttagtgacgcgcttcggcgtgctcctttggtgattcggcgactggttacaggagagtaggcagtgagctatgggcaaacctctgcagtattactcagagggaatgtgcaattgagacttgacgagcgtctctttgagatgtggcgcatgctcttggcattaccatagtgagcttccaggttgggaaacctggactgggcctatactacctgatagggtcgcggctggccgcctgtaactagtatagtcagttgaaaccccccc

SEQ ID NO: 18662 - DNA, 369 bp, synthetic construct
  source 1..369: mol_type = other DNA
tgagacgtctggtgacgtgtgggaacttattggaaacaacattttgctgcaaagcatcctactgccagcggaacaacacctggtaacaggtgcctctggggccaaaagccaaggtttaacagaccctttaggattggttctaaacctgaaatgttgtggaaggtacttagtacctaccgatctggtagtagtgcaaacactagttgtaaggcccacgaaggatgcccagaaggtacccgtaggtaacaagtgacactatggatctgatctggggtcaggtacttctatcttggtgacctgattaaaaaacgtctagtgggccaagcccaggggggatccctggtttccttttgttttaccaatgctgct

SEQ ID NO: 18663 - DNA, 370 bp, synthetic construct
  source 1..370: mol_type = other DNA
taagacgtctggtgacgtgtgggaacttattggaaacaacattttgctgtaaagcatcctattgccagcggaacaacacctggtaacaggtgcctctggggccaaaagccaaggtttaacagaccctttaggattggtttgaaaacctggaatgttgtggaagatacttagtacctaccaatctggtagtagtgcaaacactagttgtaaggcccacgaaggatgcccagaaggtacccgaaggtaacaagtgacactatggatctgatctggggccaggtacctctatcttggtgacctggttaaaaaacgtctagtgggccaaacccaggggggatccctggtttccttttgttttattaatgccact

SEQ ID NO: 18664 - DNA, 370 bp, synthetic construct
  source 1..370: mol_type = other DNA
taagacgtctggtgacgtgtgggaacttattggaaacaacattttgctgtaaagcatcctattgccagcggaacaacacctggtaacaggtgcctctggggccaaaagccaaggtttaacagaccctttaggattggtttgaaaacctggaatgttgtggaagatacttagtacctaccaatctggtagtattgcaaacactagttgtaaggcccacgaaggatgcccagaaggtacccgaaggtaacaagtgacactatggatctgatctggggccaggtacctctatcttggtgacctggttaaaaaacgtctagtgggccaaacccaggggggatccctggtttccttttgttttatcaatgccacc

SEQ ID NO: 18665 - DNA, 330 bp, synthetic construct
  source 1..330: mol_type = other DNA
actggatacaccttgaatggcagtagcgtggcgagctatggaaaaatcgcaattgtcgatagccatgttagtgacgcgcttcggcgtgctcctttggtgattcggcgactggttacaggagagtaggcagtgagctatgggcaaacctctacagtattacttagagggaatgtgcaattgagacttgacgagcgtccctccgggatgtggcgcatgctcttggcattaccatagtgagcttctaggttgggaaacctggactgggcctatactacctgatagggtcgcggctggccgcctgtaactagtatagtcagttgaaaccccccc

SEQ ID NO: 18666 - DNA, 520 bp, synthetic construct
  source 1..520: mol_type = other DNA
aaggcaggtgggttcagacgcttaaagtgtgttgtgcatgttcttttctaacctgtgttctacacagggtggcagatggcgtgccataaccctaatagtgagataccacgcttgtggaccttatgctcacacagccatcctctagtaagtttgtaagacgtctgatgacgtgtgggaacttgttggagataacattttgctgcaaagcatcccattgccagcggatccacatctggtaacagatgcctctggggccaaaagccaaggtttaatagaccctttgggattggttcaaacctgaattgttatggaagacatttagtacctgctgatttggtagtagtgcagacactagttgtaaggcccacgaaggatgcccagaaggtacccgtaggtaacaagtgacactatggatctgatctggggccgactacctctatctaggtgagttggttaaaaaacgtctagtgggccaaacccaggggggatccctggtttcccttttatttgaataatcact

SEQ ID NO: 18667 - DNA, 550 bp, synthetic construct; identical to SEQ ID NO: 591
  source 1..550: mol_type = other DNA

SEQ ID NO: 18668 - DNA, 520 bp, synthetic construct
  source 1..520: mol_type = other DNA
aaggcaggtgggttcagacgcttaaagtgtgttgtgcatgttcttttctaacctgtgttctacacagggtggcagatggcgtgccataaccctaatagtgagataccacgcttgtggaccttatgctcacacagccatcctctagtaagtttgtaagacgtctgatgacgtgtgggaacttgttggagataacattttgctgcaaagcatcccattgccagcggatccacatctggtaacagatgcctctggggccaaaagccaaggtttaacagaccctttgggattggttcaaacctgaattgttatggaagacatttagtacctgctgatttggtagtagtgcagacactagttgtaaggcccacgaaggatgcccagaaggtacccgtaggtaacaagtgacactatggatctgatctggggccgactacctctatctaggtgagttggttaaaaaacgtctagtgggccaaacccaggggggatccctggtttcccttttatttgaataatcact

SEQ ID NO: 18669 - DNA, 312 bp, synthetic construct
  source 1..312: mol_type = other DNA
ggcagtagcgtggcgagctatggaaaaatcgcaattgtcgatagccatgttagtgacgcgcttcggcgtgctcctttggtgattcggcgactggttacaggagagtaggcagtgagctatgggcaaacctctgcagtattactcagggggaatgtgcaattgagacttgacgagcgtctctttgagatgtggcgcatgctcttggcattaccatagtgagcttccaggttgggaaacctggactgggcctatactacctgatagggtcgcggctggccgcctgtaactagtatagtcagttgaaaccccccc

SEQ ID NO: 18670 - DNA, 520 bp, synthetic construct; identical to SEQ ID NO: 545
  source 1..520: mol_type = other DNA

SEQ ID NO: 18671 - DNA, 444 bp, synthetic construct
  source 1..444: mol_type = other DNA
acacttgtttcccccctccacccttaaggtggttgtatccccataccttaccctcccttccaaagcggatggacaaatggacttggacttatggcaagaacatatggtatgacttttggatacaccttgaatggcagtagcgtggcgagctatggaaaaatcgcaattgtcgatagccatgttagtgacgcgcttcggcgtgctcctttggtgattcggcgactggttacaggagagtaggcagtgagctatgggcaaacctctgcagtattactcagagggaatgtgcaattgagacttgacgagcgtctcgtagagatgtggcgcatgctcttggcattaccatagtgagcttccaggttgggaaacctggactgggcctatactacctgatagggtcgcggctggccgcctgtaactagtatagtcagttgaaaccccccc

SEQ ID NO: 18672 - DNA, 745 bp, synthetic construct
  source 1..745: mol_type = other DNA
ttaaaacagcctgtgggttgcacccactcacagggcccacgtggcgctagcactctgattctacggaatctttgtgcgcctgttttacaacccccccaatttgcaacttagaagcaatacacaacactgatcaacagcaggcatggcgcaccagccatgtcttgatcaagcacttctgtttccccggactgagtatcaatagactgctcacgcggttgaaggagaaagcgtccgttatccgactaactacttcgagaaacctagtagcaccattgaagctgcggagtgtttcgctcggcacttcccccgtgtagatcaggccgatgagtcactgcaatccccacgggcgaccgtggcagtggctgcgctggcggcctgcctatggggcaacccataggacgctctaatgtggacatggtgcgaagagtctattgagctagttagtagtcctccggcccctgaatgcggctaatcctaactgcggagcacatgccctcaacccagagggtagtgtgtcgtaacgggcaactctgcagcggaaccgactactttgggtgtccgtgtttccttttattcttacattggctgcttatggtgacaatcacagaattgttaccatatagctattggattggccatccggtgtgcaatagagctattatatacctatttgttggctttgtaccactaaccttaaaatctataaccaccctcaactttatattaactctcaatacagtcaaac

SEQ ID NO: 18673 - DNA, 915 bp, synthetic construct; identical to SEQ ID NO: 1296
  source 1..915: mol_type = other DNA

SEQ ID NO: 18674 - DNA, 743 bp, synthetic construct
  source 1..743: mol_type = other DNA
gctcttccgatctgggttgttcccacccacagggcccactgggcgccagcactctgattccacggaatctttgtgcgcctgttttacaacccttcccaatttgtaacgtagaagcaatacacactactgatcaatagtaggcatggcgcgccagtcatgtcatgatcaagcacttctgttcccccggactgagtatcaatagactgctcacgcggttgaaggagaaaacgttcgttacccggctaactacttcgagaaacctagtagcaccatggaagctgcggagtgtttcgctcagcactttccccgtgtagatcaggtcgatgagtcactgcaatccccacgggcgaccgtggcagtggctgcgttggcggcctgcctatggggcaacccataggacgctctaatgtggacatggtgcgaagagtctattgagctagttagtagtcctccggcccctgaatgcggctaatcctaactgcggagcacatgccttcaacccaggaggtggtgtgtcgtaacgggtaactctgcagcggaaccgactactttgggtgtccgtgtttccttttatccttatattggctgcttatggtgacaatcacggaattgttgccatatagctattggattggccatccggtgtctaacagagctattgtatacctatttgttggatttactcccctatcatacaaatctctgaacactttgtgctttatactgaacttaaacacacgaaa

SEQ ID NO: 18675 - DNA, 746 bp, synthetic construct; identical to SEQ ID NO: 1116
  source 1..746: mol_type = other DNA

SEQ ID NO: 18676 - DNA, 742 bp, synthetic construct
  source 1..742: mol_type = other DNA
ttaaaacagcctgtgggttgtacccacccacagggcccactgggcgctagcactctggtgccacggtacctttgtgcgcctgttttatcaccctacccctcatgaaacttagaagcaatacataaccgaccaacagtaggtgtggcgcaccagccgcatcttggtcaagcacttctgtttccccggattgagtatcaataggctgttcacacggctgaaggagaaaacttccgttacccggccaactacttcgagaaacctagtaccactatcgacgttgcaaggcgtttcactcagcacttcccccgtgtagatcaggccgatgagtcaccgcattccccacgggcgaccgtggcggtggctgcgttggcggcctgcctatgggtcagcccataggacgccttaatactgacatggtgcgaagagtctattgagctagttggtagtcctccggcccctgaatgcggctaatcctaactgcggagcacatactcacaagccagtgagcggtgtgtcgtaacgggtaactctgcagcggaaccgactactttgggagtccgtgtttccttttatctttatattggctgcttatggtgacaatcagagaattgttaccatatagctattggattggccatccggtgtctaatagagctattatatatctgtttgttgggttcaccccgttgtcgtataaatccttaaatactttgttctttatcctgaacttaaatacaagaaa

SEQ ID NO: 18677 - DNA, 732 bp, synthetic construct
  source 1..732: mol_type = other DNA
ctgtgggttgtccccactcacagggcccactgggcgccagcactctggtactacggtacctttgtgcgcctgttttatcaccccaccccatctgaaacgtagaagcaatgcacaaccgaccaatagtgggtgtggcgcaccagccacatcttggtcaagcacttctgttcccccgggtttagtatcaataagctgctcacgcggctgaaggagaaaacacccgttatccggccgactacttcgagaaacctagtaccgctatgaacgttgcaaggcgtttcgctcagcacttcccccgtgtagatcaggctgatgagtcaccgcatccctcacgggcgaccgtggcggtggctgcgctggcggcctgcctatgggcttgcccataggacgccttaatactgacatggtgcgaagagtctattgagctagttggtagtcctccggcccctgaatgcggctaatcctaactgcggagcacatactcacaaaccagtgagcggtgtgtcgtaacgggcaactctgcagcggaaccgactactttgggtgtccgtgtttccttttattcttatactggctgcttatggtgacaattaaagaattgttaccatatagctattggattggccatccggtgtctaacagagatatcatatacttgtttgtgggattcacctcgttgtcatacaaatcccttaacactttgtgctttatcttgaatttaaactcaaaaag

SEQ ID NO: 18678 - DNA, 745 bp, synthetic construct
  source 1..745: mol_type = other DNA
gtgctcttccgatctgtgggttgcacccacccacagggcccactgggcgctagcactctggtaccatggtacctttgtgcgcctgttttatcaccctaccccacacgaaacttagaagtaacacgtaaccgaccaatagtaggtgtggcgcaccagccacatcttggtcaagcacttctgtttccccgggttgagtatcaataagctgttcacacggctgaaggagaaaacgcccgttacccggccaactacttcgagaaacctagtaccaccatgaacgttgcaaggcgtttcgctcagcacttcccccgtgtagatcaggccgatgagtcaccgcattccccacgggtgaccgtggcggtggctgcgttggcggcctgcctatgggttagcccataggacgccttaatactgacatggtgcgaagagtctattgagctagttggtagtcctccggcccctgaatgcggataatcctaactgcggagcacatactcacaaaccagtgagctgtgtgtcgtaacgggcaactctgcagcggaaccgactactttgggagaccgtgtttccttttatctttatattggctgcttatggtgacaatcagagaattgttaccatatagctattggattggccatccggtgtctaatagagctattatatacctgtttgttggattcactccgctaacatatagatccctaaatactttgtgctatattttgagcttaaacacacgaag

SEQ ID NO: 18679 - DNA, 740 bp, synthetic construct
  source 1..740: mol_type = other DNA
ctcttccgatctgttgttcccacccacagggcctactgggcgccagcactctgattccacggaatctttgtgcgcctgttttacaaccctccccaatttgtaacgtagaagtgatacacactactgatcaatagtaggcatggcgcgccagtcatgttatgatcaagcacttctgttcccccggactgagtatcaatagactgctcacgcggttgaaggagaaaacgttcgttacccggctaactacttcgagaaacctagtagcaccatggaagctgcagagtgtttcgctcagcacttcccccgtgtagatcaggtcgatgagtcactgcaatccccacgggtgaccgtggcagtggctgcgttggcggcctgcctatggggcaacccataggacgctctaatgtggacatggtgcgaagagtctattgagctagttagtagtcctccggcccctgaatgcggctaatcctaactgcggagcacatgccttcaacccaggaggtggtgtgtcgtaacgggtaactctgcagcggaaccgactactttgggtgtccgtgtttccttttatccttatattggctgcttatggtgacaatcacggaattgttgccatatagctattggattggccatccggtgtctaatagagctattgtatacctatttgttggatttactcccctatcgtataaatctctaaatactttgtgctttatattgagcttaaacacacgaaa

SEQ ID NO: 18680 - DNA, 738 bp, synthetic construct
  source 1..738: mol_type = other DNA
tccctgtgggttgttcccacccacagggcccactgggcgccagcactctgattccacggaatctttgtgtgcctgttttacaacccttccccaatttgtaacgtagaagtaatacacactactgatcaatagcaggcatggcgcgccagtcatgtctcgatcaagcacttctgttcccccggactgagtatcaatagactgctcacgcggttgaaggagaaaacgttcgttacccggctaactacttcgagaaacctagtagcaccatagaagctgcagagtgtttcgctcagcacttcccccgtgtagatcaggctgatgagtcactgcaatccccacgggcgaccgtggcagtggctgcgctggcggcctgcctatggggcaacccataggacgctctaatgtggacatggtgcgaagagtctattgagctagttagtagtcctccggcccctgaatgcggctaatcctaactgcggagcacatgccttcaacccaggaggtggtgtgtcgtaacgggcaactctgcagcggaaccgactactttgggtgtccgtgtttctctttattcctatattggctgcttatggtgacaatcacggaattgttgccatatagctattggattggccatccggtgtctaatagagccattgtgtacctatttgttggatttactccgctatcatataaatctctgaacactttgtgctttatattgaacttaaacacacgaaa

SEQ ID NO: 18681 - DNA, 746 bp, synthetic construct; identical to SEQ ID NO: 1117
  source 1..746: mol_type = other DNA

SEQ ID NO: 18682 - DNA, 735 bp, synthetic construct
  source 1..735: mol_type = other DNA
ctcttcctgttgcacccacccacagggcccactgggcgctagcactctggtaccacggtacccttgtgcgcctgttttatcaccccaccccaacttgaaacttagaagcaatgcacaaccgaccaatagtaggtgtggcgcaccagccgcatctcggtcaagcacttctgtttccccgggttgagtatcaataagctgtccacacggctgaaggagaaaacgcccgttatccggccaactacttcgagaaacctagtaccactatgaacgttgcaaggcgtttcgctcagcacttcccccgtgtagatcaggtcgatgagtcaccgcatcccccacgggcgaccgtggcggtggctgcgttggcggcctgcctatgggttaacccataggacgccttaataccgacatggtgcgaagagtctattgagctagttggtagtcctccggcccctgaatgcggctaatcctaactgcggagcacacactcacaacccagtgagcggtgtgtcgtaacgggcaactctgcagcggaaccgactactttgggtgtccgtgtttccttttactcttatattggctgcttatggtgacaatcatagaattgttaccatatagctattggattggccatccgatttctaacagagctattatttacctgtttgttggattcactccgttgacatacaaatccctaaacactttgtgctttattttgaacttgaacgcacgaaa

SEQ ID NO: 18683 - DNA, 737 bp, synthetic construct
  source 1..737: mol_type = other DNA
cagcctgtgggttgcacccacccacagggcctactgggcgttagcactctggtaccacggtacccttgtgcgcctgttttatcaccctaacccaacttgaaacttagaagcaatacacaatcgaccaatagtaggtgtggcacaccagccgcatcttggtcaagcacttctgtttccccgggttgagtatcaataagctgtccacacggctgaaggagaaaacgcccgttatccggccaactacttcgagaaacttagtaccactatgaacgttgcaaggcgtttcgctcagcacttcccccgtgtagatcaggtcgatgagtcaccgcattccccacgggcgaccgtggcggtggctgcgttggcggcctgcctatgggttaacccataggacgccttaatactgacatggtgtgaagagtctattgagctagttggtagtcctccggcccctgaatgcggctaatcctaactgcggagcacatactcacaacccagtgagcggtgtgtcgtaatgggtaactctgcagcggaaccgactactttgggtgtccgtgtttccttttattcttacattggctgcttatggtgacaatcatagaattgttaccatatagctattggattggccatccgatttctaacagagctatcatctacctgtttgttggatttactccgttgacatacaaatccctaaacactttgtgctttatcttgaacttgaacgcacgaaa

SEQ ID NO: 18684 - DNA, 735 bp, synthetic construct
  source 1..735: mol_type = other DNA
cctgtgggttgttcccacccacagggcccactgggcgccagcactctgattccacggaatctttgtgcgcctgttttatagcccttcccaatttgtaacgtagaagtaacgcacaccactgatcaatagtaggcatggcgcgccagtcatgtcatgatcaagcacttctgttcccccggactgagtatcaatagactgcttacgcggttgaaggagaaaacgttcgttacccgactaactacttcgagaaacctagtagcaccatggaagctgcagagtgtttcgctcagcacttcccccgtgtagatcaggtcgatgagtcactgcaatccccacgggcgaccgtggcagtggctgcgttggcggcctgcctatggggcaacccataggacgctctaatgtggacatggtgcgaagagtctattgagctagttagtagtcctccggcccctgaatgcggctaatcctaactgcggagcacatgccttcaacccaggaggtggtgtgtcgtaacgggtaactctgcagcggaaccgactactttgggtgtccgtgtttccttttatccttatattggctgcttatggtgacaatcacggaattgttgccatatagctattggattggccatccggtgtctaatagagctattgtatacctatttgttggatttactcccctatcatacaaatctctgaacactttgtgctttatactgaacttaaacacacgaaa

SEQ ID NO: 18685 - DNA, 733 bp, synthetic construct
  source 1..733: mol_type = other DNA
cctgtgggttgcacccacccacagggcccactgggcgctagcactctggtgccacggtacctttgtgcgcctgttttattgccctaccccacacgaaacttagaagtaatacataaccgaccaacagtaggtgtggcacaccagccatatcttggtcaagcacttctgtttccccgggttgagtatcaataagctgttcacacggctgaaggagaaaacacccgttatccgaccaactacttcgagaaacctagtaccgccatgaacgttgcaaggtgtttcgctcagcacttcccccgtgtagatcaggccgatgagtcaccgcattccccacgggtgaccgtggcggtggctgcgttggcggcctgcctatgggctagcccataggacgccttaatactgacatggtgcgaagagtctattgagctagttggtagtcctccggcccctgaatgcggctaatcctaactgcggagcacatactcacaaaccagtgagcggtgtgtcgtaacgggtaactctgcagcggaaccgactactttgggtgtccgtgtttccttttatctttatattggctgcttatggtgacaatcagagaattgttgccatatagctattggattggccatccggtgtctaacagagctattatatacctgtttgttggattcactccgttgacctataaatccctaaacaccttgtgttacattttgaatttaaacacacgaag

SEQ ID NO: 18686 - DNA, 731 bp, synthetic construct
  source 1..731: mol_type = other DNA
tgtgggttgtccccactcacagggcccactgggcgtcagcactctggtactgcggtacctttgtgcgcctgttttatcaccccaccccatctgaaacgtagaagcaatgcacaaccgaccaatagtgggtgtggcgcaccagccacatcttggtcaagcactcctgttcccccgggtttagtatcaataagctgctcacgcggctgaaggagaaaacacccgttatccggccgactacttcgagaaacctagtaccgctatgaacgttgcaaggcgtttcgctcagcacttcccccgtgtagatcaggctgatgagtcaccgcatccctcacgggcgaccgtggcggtggctgcgctggcggcctgcctatgggcttgcccataggacgccttaatactgacatggtgcgaagagtctattgagctagttggtagtcctccggcccctgaatgcggctaatcctaactgcggagcacatactcacaaaccagtgagcggtgtgtcgtaacgggcaactctgcagcggaaccgactactttgggtgtccgtgtttccttttattcttatactggctgcttatggtgacaattaaagaattgttaccatatagctattggattggccatccggtgtctaacagagatatcatatacttgtttgttggattcacctcgttgtcatacaaatcccttaacactttgtgctttatcttgaatttaaactcaaaaag

SEQ ID NO: 18687 - DNA, 727 bp, synthetic construct
  source 1..727: mol_type = other DNA
ggttgtacccacccacagggcccactgggcgttagcactctggtaccacggtacctttgtgcgcctgttttatcaccctacccctcatgaaacttagaagtaatacataaccgaccaatagtaggtgtggcgcgccagccgcatcttggtcaagcacttctgtttccccggattgagtatcaataagctgttcacacggctgaaggagaaaacatccgttacccggccaactacttcgagaaacctagtaccactatcaaagttgcaaggcgtttcgctcagcacttcccccgtgtagatcaggccgatgagtcaccgcattccccacgggcgaccgtggcggtggctgcgttggcggcctgcctatgggtcagcccataggacgccttaatactgacatggtgcgaagagtctattgagctagttggtagtcctccggcccctgaatgcggctaatcctaactgcggagcacatactcacaagccagtgagcgatgtgtcgtaacgggtaactctgcagcggaaccgactactttgggagtccgtgtttccttttatctttatattggctgcttatggtgacaatcagagaattgttaccatatagcttttggattggccatccggtgtctaatagagctattatatatctgtttgttgggttcaccccgttgtcgtataaatccttaagcactttgttctttatcctgaacttaaatacaagaaa

SEQ ID NO: 18688 - DNA, 747 bp, synthetic construct
  source 1..747: mol_type = other DNA
gttagtggatgagcaagggttgttcccacccacagggcccactgggcgccagcactctgatttcacggaatctttgtgcgcctgttttacaacccttccccatcttgtaacgtagaagtaacatacactactgatcaatagcaggcatggcgcaccagtcatgtctcgatcaagcacttctgttcccccggactgagtatcaatagactgctcacgcggttgaaggagaaaacgttcgttacccggctaactacttcgagaaacctagtagcaccatagaagctgcagagtgtttcgctcagcacttcccccgtgtagatcaggctgatgagtcactgcaatccccacgggtgaccgtggcagtggctgcgttggcggcctgcctatggggtaacccataggacgctctaatgtggacatggtgcgaagagtctattgagctagttagtagtcctccggcccctgaatgcggctaatcctaactgcggagcacatgccttcaacccagaaggtggtgtgtcgtaatgggcaactctgcagcggaaccgactactttgggtgtccgtgtttctttttattcctatattggctgcttatggtgacaatcacggaattgttgccatatagctattggattggccatccggtgtctaatagagctattgtgtacctatttgttggatttactccgctatcacataaatctctgaacactttgtgctttatattgaacttaaacacccgaaa

SEQ ID NO: 18689 - DNA, 742 bp, synthetic construct
  source 1..742: mol_type = other DNA
gctcttccgatctggttgttcccacccacagggcctactgggcgccagcactctgattccacggaatctttgtgcgcctgttttacaaccctccccaatttgtaacgtagaagcaatacacactactgatcaatagtaggcatggcgcgccagtcatgtcatgatcaagcacttctgttcccccggactgagtatcaatagactgctcacgcggtcgaaggagaaaacgttcgttacccggctaactacttcgagaaacctagtagcaccatggaagctgcggagtgtttcgctcagcacttcccccgtgtagatcaggtcgatgagtcactgcaatccccacgggcgaccgtggcagtggctgcgttggcggcctgcctatggggtaacccataggacgctctaatgtggacatggtgcgaagagtctattgagctagttagtagtcctccggcccctgaatgcggctaatcctaactgcggagcacatgccttcaacccaggaggtggtgtgtcgtaacgggtaactctgcagcggaaccgactactttgggtgtccgtgtttccttttatccttatattggctgcttatggtgacaatcacggaattgttgccatatagctattggattggccatccggtgtctaacagagctattgtatacctatttgttggatttactcccctatcatacaaatctctgaacactttgtgctttatactgaacttaaacacacgaaa

SEQ ID NO: 18690 - DNA, 734 bp, synthetic construct
  source 1..734: mol_type = other DNA
ctgtgggttgttcccacccacagggcccactgggcgccagcactctgattccacggaatctttgtgcgcctgttttacaacccttcccaatctgtaacgtagaagtaatgcacactattgatcaatagtaagcatggcgcaccagtcatgtcatgatcaagcacttctgttcccccggactgagtatcaatagactgctcacgcggttgaaggagaaaacgttcgttacccggctaactacttcgagaaacctagtagcaccatggaaactgcagagtgtttcgctcagcacctcccccgtgtagatcaggtcgatgagtcactgcaatccccacgggcgaccgtggcagtggctgcgttggcggcctgcctatggggtaacccataggacactctaatgtggacatggtgcgaagagtctattgagctagttagtagtcctccggcccctgaatgcggctaatcctaactgcggagcacatgccttcaacccaggaggtggtgtgtcgtaacgggtaactctgcagcggaaccgactactttgggtgtccgtgtttccttttatcattatattggctgcttatggtgacaatcacggaattgttaccatatagctattggattggccatccggtgtctaatagagctattgtgtacctatttgttggattcactcccctatcgtataaatctctgaacactttgtgctttatattgaacttaaacacacgaaa

SEQ ID NO: 18691 - DNA, 742 bp, synthetic construct
  source 1..742: mol_type = other DNA
ttaaaacagcctgtgggttgtacccactcacagggcccactgggcgccagcactctggtactgcggtacctttgtgcgcctgttttatcaccccaccccatctgaaacgtagaagcaatgcacaactgaccaatagtgggtgtggcgcaccagccacatcttggtcaagcacttctgtttccccgggtttagtatcaataagctgctcacgcggctgaaggagaaaacacccgttatccggccaactacttcgagaagcctagtaccgctatgaacgtagcaaggcgtttcgctcagcacttcccccgtgtagatcaggctgatgagtcaccgcatccctcacgggcgaccgtggcggtggctgcgttggcggcctgcctatgggcttgcccataggacgccttaatactgacatggtgcgaagagtctattgagctagttggtagtcctccggcccctgaatgcggctaatcctaactgcggagcacatactcacaaaccagtgagcggtgtgtcgtaacgggtaactctgcagcggaaccgactactttgggtgtccgtgtttccttttattcttatactggctgcttatggtgacaattaaagaattgttaccatatagctattggattggccatccggtgtctaatagaggcattatatacttgttcgttggatttacctcgttgtcatacaaatcccttaacactttgtgctttatcttgagcttgaattcaaaaag

SEQ ID NO: 18692 - DNA, 730 bp, synthetic construct
  source 1..730: mol_type = other DNA
gtgggttgcacccacccacagggcccactgggcgctagcactctggtgccacggcacctttgtgcgcctgttttatcaccctaccccacacgaaacttagaagtaatacacaaccgaccaatagtaggtgtggcgcaccagccacatcttggtcaagcacttctgtttccccgggtttagtatcaataagctgtttacacggctgaaggagaaaacacccgttacccggccaactacttcgagaaacctagtaccgccatggacgttgcaaggtgtttcgctcagcacttcccccgtgtagatcaggctgatgagtcaccgcatcccccacgggtaaccgtggcggtggctgcgttggcggcctgcctatgggttaacccataggacgccttaatactgacatggtgcgaagagtctattgagctagttggtagtcctccggcccctgaatgcggctaatcctaactgcggagcacatactcacaaaccagtgagcggtgtgtcgtaacgggtaactctgcagcggaaccgactactttgggtgtccgtgtttccttttatctttatattggctgcttatggtgacaatcagagaattgttaccatatagctattggattggccatccggtgtctaatagagctattatatatctgtttattggattcactccgttgacctataaatccctaaacaccttgtgctatattttgaatttaaacacacgaaa

SEQ ID NO: 18693 - DNA, 727 bp, synthetic construct
  source 1..727: mol_type = other DNA
ggttgtacccacccacagggcccactgggcgccagcactctggtactgcggtacctttgtgcgcctgttttatcaccccaccccatctgaaacgtagaagcaatgcacaaccgaccaatagtgggtgtggcgcaccagccacatcttggtcaagcacttctgttcccccgggtttagtatcaataagctgctcacgcggctgaaggagaaaacacccgttatccggccgactacttcgagaaacctagtaccgctatgaatgttgcaaggcgtttcgctcagcacttcccccgtgtagatcaggctgatgagtcaccgcattccccacgggcgaccgtggcggtggctgcgctggcggcctgcctatgggcttgcccataggacgccttaatactgacatggtgcgaagagtctattgagctagttggtagtcctccggcccctgaatgcggctaatcctaactgcggagcacatactcacaaaccagtgagcggtgtgtcgtaacgggcaactctgcagcggaaccgactactttgggtgtccgtgtttccttttattcttatactggctgcttatggtgacaatcaaagaattgttaccatatagctattggattggccatccggtgtctaacagagatatcatatacttgtttgttggattcacctcgttgtcatacagatctcttaacactttgtgctttatcttgaatttaaattcaaaaag

SEQ ID NO: 18694 - DNA, 745 bp, synthetic construct
  source 1..745: mol_type = other DNA
ttaaaacagcctgtgggttgcacccacccacagggcccactgggcgctagcactctggtactgaggtacctttgtgcgcctgtttttactccccttcccccgaagtaacttagaagctgtaaatcaacgatcaatagcaggtgtggcacaccagtcataccttgatcaagcacttctgtttccccggactgagtatcaataggctgctcgcgcggctgaaggagaaaacgttcgttacccgaccaactacttcgagaagcttagtaccaccatgaacgaggcagggtgtttcgctcagcacaaccccagtgtagatcaggctgatgagtcactgcaacccccatgggcgaccatggcagtggctgcgttggcggcctgcccatggagaaatccatgggacgctctaattctgacatggtgtgaagagcctattgagctagctggtagtcctccggcccctgaatgcggctaatcctaactgcggagcacatgctcacaaaccagtgggtggtgtgtcgtaacgggcaactctgcagcggaaccgactactttgggtgtccgtgtttccttttattcctatattggctgcttatggtgacaatcaaaaagttgttaccatatagctattggattggccatccggtgtgcaacagggcaattgtttacctatttattggttttgtaccattatcactgaagtctgtgatcactctcaaattcattttgaccctcaacacaatcaaac

SEQ ID NO: 18695 - DNA, 747 bp, synthetic construct
  source 1..747: mol_type = other DNA
ttaaaacagcctgtgggttgcacccactcacaggacccacgtggtgctagcactctggttctacggaacctttgtgcgcctgttttacgccccctccccaatttgtaacttagaagcaatttacaacactgatcaatagcaggcatggcgcgccagctatgtcttgatcaagcacttctgtttccccggaccgagtatcaatagactgttcacacggttgaaggagaaagcgtccgttatccggctaactacttcgagaaacccagtagcgccattgaagctgcagagtgtttcgctccacacttcccccgtgtagatcaggtcgatgagtcactgcaatcctcacgggcgaccgtggcagtggctgcgctggcggcctgcctatggggcgacccataggacgctctaatgtggacatggtgcgaagagtctattgagctagttagtagtcctccggcccctgaatgcggctaatcctaactgcggagcacatgccttcaatccagagggtagtgtgtcgtaatgggcaactctgcagcggaaccgactactttgggtgtccgtgtttccttttattctcacattggctgcttatggtgacaattacagaattgttaccatatagctattggattggccatccggtgtgcaatagagctattatatacctatttgttggctttataccactaaccttaaaatctgcaaccactctcgagtatatattaaccctcaatacaatcaaac

SEQ ID NO: 18696 - DNA, 745 bp, synthetic construct
  source 1..745: mol_type = other DNA
ttaaaacagcctgtgggttgcacccacccacagggcccactgggcgctagcactctggtactgaggtacctttgtgcgcctgtttttactccccttcccccgaagtaacttagaagctgtaaatcaacgatcaatagcaggtgtggcacaccagtcataccttgatcaagcacttctgtttccccggactgagtatcaataggctgctcgcgcggctgaaggagaaaacgttcgttacccgaccaactacttcgagaagcttagtaccaccatgaacgaggcagggtgtttcgctcagcacaaccccagtgtagatcaggctgatgagtcactgcaacccccatgggcgaccatggcagtggctgcgttggcggcctgcccatggagaaatccatgggacgctctaattctgacatggtgtgaagagcctattgagctagctggtagtcctccggcccctgaatgcggctaatcctaactgcggagcacatgctcacaaaccagtgggtggtgtgtcgtaacgggcaactctgcagcggaaccgactactttgggtgtccgtgtttccttttattcctatattggctgcttatggtgacaatcaaagagttgttaccatatagctattggattggccatccggtgtgcaacagggcaattgtttacctatttattggttttgtaccattatcactgaagtctgtgatcactctcaaattcattttgaccctcaacacaatcaaac

SEQ ID NO: 18697 - DNA, 745 bp, synthetic construct
  source 1..745: mol_type = other DNA
ttaaaacagcctgtgggttgcacccacccacagggcccattgggcgctagcactctggtactgaggtacctttgtgcgcctgtttttactccccttcccccgaagtaacttagaagctgtaaatcaacgatcaatagcaggtgtggcacaccagtcataccttgatcaagcacttctgtttccccggactgagtatcaataggctgctcgcgcggctgaaggagaaaacgttcgttacccgaccaactacttcgagaagcttagtaccaccatgaacgaggcagggtgtttcgctcagcacaaccctagtgtagatcaggctgatgagtcactgcaacccccatgggcgaccatggcagtggctgcgttggcggcctgcccatggagaaatccatgggacgctctaattctgacatggtgtgaagagcctattgagctagctggtagtcctccggcccctgaatgcggctaatcctaactgcggagcacatgctcacgaaccagtgggtggtgtgtcgtaacgggcaactctgcagcggaaccgactactttgggtgtccgtgtttccttttattcttatattggctgcttatggtgacaatcaaagagttgttaccatatagctattggattggccatccggtgtgcaacagggcaattgtttacctatttattggttttgtaccattaccactgaagtctgtgatcactctcaaattcattttgaccctcaacacaatcaaac

SEQ ID NO: 18698 - DNA, 763 bp, synthetic construct
  source 1..763: mol_type = other DNA
tgtacaaaaaagcaggctttaaaacagcctgtgggttgtccccacccatagggcccactgggcgctagcacactgattctgcgggatctttgtgcgcctgttttataacccttcccctaagcagtaacttagaagctttgtacaatcatggccaatagtgggcgtggcgcgccagtcacgtcttggtcaagcacttctgtatccccggactgagtatcaatagactgctcacgcggttgaaggagaaaacgttcgttacccggctaattacttcgagaaacctagtagcaccatgaaagttgcggagtgtttcgctcagcacttcccccgtgtagatcaggtcgatgagtcactgtaaaccccacgggcgaccgtgacagtggctgcgttggcggcctgcccatggggtaacccatgggacgctctaatacagacatggtgcgaagagtctattgagctaattagcagtcctccggcccctgaatgcggctaatcctaactgcggagcgcgcaccctcaacccagggggcggcgtgtcgtaatgggtaactctgcagcggaaccgactactttgggtgtccgtgtttccttttattctttattggctgcttatggtgacaattgaaaagttgttaccatatagctattggattggccatccggtgtctaacagagctattgtttacctattcattggattcgtccctcttaatctcaaggccattcaaactcttgattacatattgctccttaactgtaagaa

SEQ ID NO: 18699 - DNA, 775 bp, synthetic construct; identical to SEQ ID NO: 1236
  source 1..775: mol_type = other DNA

SEQ ID NO: 18700 - DNA, 761 bp, synthetic construct
  source 1..761: mol_type = other DNA
tacaaaaaagcaggctttaaaacagcctgtgggttgtccccacccacagggcccactgggcgctagcacactggttctgcgggacctttgtgcgcctgttttataacccttcccctaagcagtaacttagaagctttgtacaatcatggccaatagtgggcgtggcgcgccagtcacgtcttggtcaagcacttctgtatccccggactgagtatcaatagactgctcacgcggttgaaggagaaaacgttcgttacccggctaactacttcgagaaacctagtagcaccatgaaagttgcggagtgtttcgctcagcacttcccccgtgtagatcaggtcgatgagtcactgtaaaccccacgggcgaccgtgacagtggctgcgttggcggcctgcccatggggtaacccatgggacgctctaatacagacatggtgtgaagagtctattgagctagttagcagtcctccggcccctgaatgcggctaatcctaactgcggagcgcgcaccctcaacccagggggcggcgtgtcgtaatgggtaactctgcagcggaaccgactactttgggtgtccgtgtttccttttattctttattggctgcttatggtgacaattgaaaagttgttaccatatagctattggattggccatccggtgtctaacagagctattgtttacctattcattggattcgtccctcttaatctcaaggccattcaaactcttgattacatattgctccttaactgtaagaa

SEQ ID NO: 18701 - DNA, 762 bp, synthetic construct
  source 1..762: mol_type = other DNA
tacaaaaaagcaggctttaaaacagcctgtgggttgttcccacccacagggcccactgggcgctagcacactgattctgcgggatctttgtgcgcctgttttataacccctccccctaagcagtaacttagaagctccacactatcacgaccaatagcaggcgtggtgcaccagtcacgtcttggtcaagcacttctgtttccccggactgagtatcaatagactgctcacgcggttgaaggagaaaacgttcgttatccggctaactacttcgagaaacctagtagcaccgtgaaagttgcggagtgtttcgctcagcacttcccccgtgtagatcaggtcgatgagtcactgtgaaccccacgggtgaccgtgacagtggctgcgttggcggcctgcccatggggtaacccatgggacgctctaatacagacacggtgtgaagagtctattgagctagttagtagtcctccggcccctgaatgcggctaatcctaactgcggagcgcgtaccctcaatccagggggcagcgcgtcgtaatgggtaactctgcagcggaaccgactactttgggtgtccgtgtttccttttattccttattggctgcttatggtgacaattgaaaagttgttaccatatagctattggattggccatccggtaaccaacagagccattgtttacctgtttgttggatacgtccctctcaatctcaaggccattcaaactcttgattatatactacttctcaactgtgagaa

SEQ ID NO: 18702 - DNA, 698 bp, synthetic construct
  source 1..698: mol_type = other DNA
taaaacagcctgtgggttgcacccactcacagggcccactgggcgccagcactctggtattgcggtacctttgtgcgcctgttttatcaccccaccccatctgaaacgtagaagtaatgcacaaccgaccaatagtgggtgtggcgcaccagccacatcttggtcaagcacttctgttcccccgggtttagtatcaataagctgctcacgcggctgaaggagaaaacacccgttatccggccgactacttcgagaaacctagtaccgctatgaacgttgcaaggcgtttcgctcagcacttcccccgtgtagatcaggctgatgagtcaccgcatccctcacgggcgaccgtggcggtggctgcgctggcggcctgcctatgggcttgcccataggacgccttaatactgacatggtgcgaagagtctattgagctagttggtagtcctccggcccctgaatgcggctaatcctaactgcggagcacatactcacaaaccagtgagcggtgtgtcgtaacgggcaactctgcagcggaaccgactactttgggtgtccgtgtttccttttattcttatactggctgcttatggtgacaattaaagaattgttgccatatagctattggattggccatccggtgtctaacagagatattatatacttgtttgttggattcataacttaaactcaaaaag

SEQ ID NO: 18703 - DNA, 760 bp, synthetic construct
  source 1..760: mol_type = other DNA
tacaaaaaagcaggctttaaaacagcctgtgggttgttcccacccacagggcccactgggcgctagtacactgattctgcgggatctttgtacgcctgttttataaccctcccctaagcagtaacttagaagcttcacgctatcacgaccaatagtaggcgtggtgcaccagtcacgtcttggtcaagcacttctgtttccccggactgagtatcaatagactgcttgcgcggttgaaggagaaaacgttcgttatccggctaactacttcgagaaacctagtagcaccgtgaaagttgcagagtgtttcgctcagcacttcccccgtgtagatcaggtcgatgagtcactgtgaaccccacgggtgaccgtgacagtggctgcgttggcggcctgcccatggggtaacccatgggacgctctaatacagacacggtgtgaagagtctattgagctagttagtagtcctccggcccctgaatgcggctaatcctaactgcggagcgcgtaccctcaatccagggggcagcgcgtcgtaatgggtaactctgcagcggaaccgactactttgggtgtccgtgtttccttttattccttattggctgcttatggtgacaattgaaaagttgttaccatatagctattggattggccatccggtaaccaacagagctattgtttacctgtttattggatacgtccctctcaatttcaaggctattcaaactcttgattatatactacttctcaactgcaagaa

SEQ ID NO: 18704 - DNA, 742 bp, synthetic construct
  source 1..742: mol_type = other DNA
taaaacaagcctgtgggttgcacccactcacagggcctactgggcgcaagcactttggtacctcggtacctttgtgcgcctgttttataccccccccctagtgaaacttagaagcagcaaaccacgatcaatagcaggcataacgctccagttatgtcttgatcaagcacttctgtttccccggactgagtatcaatagactgctcgcgcggttgaaggagaaaacgttcgttatccggctaactacttcggaaaacctagtaacaccatgaaagttgcggagagcttcgttcagcactcccccagtgtagatcaggtcgatgagtcaccgcattccccacgggcgaccgtggcggtggctgcgttggcggcctgcccatggggtaacccatggggcgctctaatacggacatggtgtgaagagtctactgagctagttggtagtcctccggcccctgaatgcggctaatcccaactgcggagcacacgcccacaagccagcgggtagtgtgtcgtaacgggtaactctgcagcggaaccgactactttgggtgtccgtgtttccttttatctttatattggctgcttatggtgacaattaaagaattgttaccatatagctattggattggccatccggtgtgcaacagagcaattatttacctatttattggttttgtaccattaaccttgaattctgtgaccacccttaattatatcttgacccttaacacagctaaac

SEQ ID NO: 18705 - DNA, 742 bp, synthetic construct
  source 1..742: mol_type = other DNA
ttaaaacagcctgtgggttgcacccactcacagggcctactgggcgcaagcactctggtatcttggtacctttgtgcgcctgttttatacccctcccccattgtaacttagaagcagcaaaccacgatcaatagcaggcataacgctccagttatgtctcgatcaagcacttctgtctccccggactgagtatcaatagactgctcgcgcggttgaaggagaaaacgttcgttatccggctagctacttcggaaaacctagtaacaccatgaaagttgcggagagcttcgttcagcactcccccagtgtagatcaggtcgatgagtcaccgcattccccacgggtgaccgtggcggtggctgcgttggcggcctgcccatggggtaacccatggggcgctctaatacagacatggtgtgaagagtctactgagctagttagtagtcctccggcccctgaatgcggctaatcccaactgcggagcacacgcccacaagccagcgggtagtgtgtcgtaacgggtaactctgcagcggaaccgactactttgggtgtccgtgtttccttttatctttatattggctgcttatggtgacaattaaagaattgttaccatatagctattggattggccatccggtgtgcaacagagcaattatttacttgtttattggttttgtgccattaactttgaattctgtgaccacccttaattatattttgacccttaactcagctaaac

SEQ ID NO: 18706 - DNA, 758 bp, synthetic construct
  source 1..758: mol_type = other DNA
aaaaaagcaggctttaaaacagcctgtgggttgtccccacccacagggcccactgggcgctagcacactgattctgcgggatctttgtgcgcctgttttataaccctccccctaagcagtaacttagaagctttgcacaatcacgaccagtagtgggcgtggcgcgccagccacgtcttggtcaagcacttctgtatccccggactgagtatcaatagactgctcacgcggtcgaaggagaaaacgttcgttacccggctaactacttcgagaaacctagtagcaccatgaaagttgcggagtgtttcgctcagcacttcccccgtgtagatcaggccgatgagtcactgtaaaccccacaggcgactgtgacagtggctgcgttggcggcctgcccatggggtaacccatgggacgctctaatacagacatggtgtgaagagtctattgagctagttagtagtcctccggcccctgaatgcggctaatcctaactgcggagcgcgcaccctcaacccagggggcggcgcgtcgtaatgggtaactctgcagcggaaccgactactttgggtgtccgtgtttccttttactccttattggctgcttatggtgacaattgaaaagttgttaccatatagctattggattggccatccggtgtctaacagagctattgtttacctattcattggatacgtccctcttagtctcaaaaccattcaaactcttgactatatattgctccttaactgtgagaa

SEQ ID NO: 18707 - DNA, 747 bp, synthetic construct
  source 1..747: mol_type = other DNA
tttaaaacagcctgtgggttgtacccactcacagggcccactgggcgctagcactctgattccgcggaatctttgtgcgcctgttttataacccctcccccgatttgtaatttagaagtaatgcacatcactgatcaacagcaagcgtggcgcgccagccatgttcagatcaaatacttctgttttcccggactgagtatcaatagactgctcacgcggttgaaggagaaaacgttcgttacccggccaactacttcgagaaacctagtagcaccatcgaaactgcagggtgtttcgctcagcactttccccgtgtagatcaggtcgatgagtcactgcaatccccacgggcgaccgtggcagtggctgcgttggcggcctgcctatgggcttacccataggacgctctaatgtggacatggtgtcaagagtctattgagctagttggtagtcctccggcccctgaatgcggctaatcctaactgtggagcgcataccctcaatccagggggtggtgcgtcgtaacgggcaactccgcagcggaaccgactactttgggtgtccgtgtttccttttattctcatgttggctgcttatggtgacaattgagagattgttgccatatagctattggattggccatccagtgtctaacagagcagttgtatactcgtttgttggattcgtcccactgtcatatacatccattaacaccttatactatattataaaactgaacacaagaaa

SEQ ID NO: 18708 - DNA, 747 bp, synthetic construct
  source 1..747: mol_type = other DNA
tttaaaacagcctgtgggttgtacccactcacagggcccactgggcgctagcactctgattccgcggaatctttgtgcgcctgttttataacccctcccccgatttgtaatttagaagtaatgcacatcactgatcaacagcaagcgtggcgcgccagccatgttcagatcaaatacttctgttttcccggactgagtatcaatagactgctcacgcggttgaaggagaaaacgttcgttacccggccaactacttcgagaaacctagtagcaccatcgaaactgcagggtgtttcgctcagcactttccccgtgtagatcaggtcgatgagtcactgcaatccccacgggcgaccgtggcagtggctgcgttggcggcctgcctatgggcttacccataggacgctctaatgtggacatggtgtcaagagtctattgagctagttggtagtcctccggcccctgaatgcggctaatcctaactgtggagcgcataccctcaatccagggggtggtgcgtcgtaacgggcaactccgcagcggaaccgactactttgggtgtccgtgtttccttttattctcatattggctgcttatggtgacaattgaaagattgttaccatatagctattggattggccatccagtgactaacagagcagttgtatacttatttgttggattcgttccactgtcttatacatccatcaacaccttatactatattataaaattgaacacaagaaa

SEQ ID NO: 18709 - DNA, 747 bp, synthetic construct
  source 1..747: mol_type = other DNA
tttaaaacagcctgtgggttgcacccactcacagggcccaccgggcgctagcactctggttctgtggaacctttgtgcgcctgttttataacccctccctcaattcgtaatttagaagtaatgcacatcattgatcaacagcaagcgtggcgcgccagccatgttcagatcaaatacttctgtttccccggactgagtatcaatagactgctcacgcggttgaaggagaaaacgttcgttacccggctaactacttcgagaaacctagtaacaccatcgaaactacagagtgtttcgctcagcactttccccgtgtagatcaggtcgatgagtcactgcaatccccacgggcgaccgtggcagtggctgcgttggcggcctgcctatgggcttgcccataggacgctctaatgtggacatggtgtgaagagtctattgagctagttagtagtcctccggcccctgaatgcggctaatcctaactgtggagcgcatgccctcaatccagggggtggtgcgtcgtaacgggcaactctgcagcggaaccgactactttgggtgtccgtgtttccttttattcttatattggctgcttatggtgacaattaagagattgttaccatatagctattggattggccatccggtgtctaacagagcaatcgtatacttgtttgttggattcattccgctatcacatacatccgttaacactttatactatattataagattgaatactagaaa

SEQ ID NO: 18710 - DNA, 747 bp, synthetic construct
  source 1..747: mol_type = other DNA
tttaaaacaggctgtgggttgcacccactcacagggcccaccgggcgctagcactctggttctgtggaacctttgtgcgcctgttttataacccctccctcaattcgtaatttagaagtaatgcacatcattgatcaacagcaagcgtggcgcgccagccatgttcagatcaaatacttctgtttccccggactgagtatcaatagactgctcacgcggttgaaggagaaaacgttcgttacccggctaactacttcgagaaacctagtaacaccatcgaaactacagagtgtttcgctcagcactttccccgtgtagatcaggtcgatgagtcactgcaatccccacgggcgaccgtggcagtggctgcgttggcggcctgcctatgggcttgcccataggacgctctaatgtggacatggtgtgaagagtctattgagctagttagtagtcctccggcccctgaatgcggctaatcctaactgtggagcgcatgccctcaatccagggggtggtgcgtcgtaacgggcaactctgcagcggaaccgactactttgggtgtccgtgtttccttttattcttatattggctgcttatggtgacaattaagagattgttaccatatagctattggattggccatccggtgtctaacagagcaatcgtatacttgtttgttggattcattccgctatcacatacatccgttaacactttatactatattataagattgaatactagaaa

SEQ ID NO: 18711 - DNA, 746 bp, synthetic construct; identical to SEQ ID NO: 1118
  source 1..746: mol_type = other DNA

SEQ ID NO: 18712 - DNA, 746 bp, synthetic construct
  source 1..746: mol_type = other DNA
tttaaaacagcctgtgggttgtacccacctacagggcccactgggcgctagcactctgattccacggaatccttgtgcgcctgttttatatcccctccccaagttgtaacttagaagcattgcactacaatgatcagtagcaggcgtggcgctccagccatgtctcgatcaagcacttctgtttccccggaccgagtatcaatagactgctaacgcggttgaaggagaaaacgttcgttatccggctaactacttcgagaaacctagtagcaccatcgaagctgcggggcgtttcgctcagcacttcccccgtgtagatcaggtcgatgagtcactgcaatcctcacgggcgaccgtggcagtggctgcgttggcggcctgcctatggggcaacccataggacgcttcaaagtggacatggtgtgaagagtctattgagctagttagtagtcctccggcccctgaatgcggctaatcctaactgcggagcacataccttcaatccaggaggtagtgtgtcgtaacgggcaactctgcagcggaaccgactactttgggtgtccgtgtttccttttattctcttattggctgcttatggtgacaattgaagaattgttaccatatagctattggattggccatccagtgtctaacagagcaattgtgtacttatttgttggttttgttcctttgtctcacacgtcccttagtactttgtattacattataaaactgaattcggagag

SEQ ID NO: 18713 - DNA, 747 bp, synthetic construct
  source 1..747: mol_type = other DNA
ttaaaacagcctgtgggttgcacccactcacagggcccacgtggcgctagcactctgattccacggaacctttgtgcgcctgttttacgccccctccccaatttgcaacttagaagcaatacacaacactgatcaacagcaggcatggcacaccagctatgtcttgatcaagcacttctgtttccccggaccgagtatcaatagactgttcacgcggttgaaggagaaagcgtccgttatccggctaactacttcgagaaacctagtagcaccattgaagctgcagagtgtttcgctcggcacttcccccgtgtagatcaggtcgatgagtcactgcaatccccacgggcgaccgtggcagtggctgcgctggcggcctgcctatggggcaacccataggacgctctaatgtggacatggtgcgaagagtctattgagctagttagtagtcctccggcccctgaatgcggctaatcctaactgcggagcacatgccttcaatccagagggtggtgtgtcgtaatgggcaactctgcagcggaaccgactactttgggtgtccgtgtttccttttattcttacattggctgcttatggtgacaattgcagaattgttaccatatagctattggattggccatccggtgtgcaatagagctattatatacctatttgttggctttgtaccactaaccttaaaatctataaccaccctcgactttatattaaccctcaatacaatcaaac

SEQ ID NO: 18714 - DNA, 745 bp, synthetic construct
  source 1..745: mol_type = other DNA
ttctcttacagcctgtgggttgcacccacccacagggcccactgggcgctagcactctggtaccacggtacccttgtgcgcctgttttatcaccccaacccaacctgaaacttagaagtaatgcacaatcgaccaatagtaggtgcggcgcaccagccgcatcctggtcaagcacttctgtttccccgggttgagtatcaataagctgtccacacggctgaaagagaaaacacccgttatccggccaactacttcgagaaacctagtaccactatgaacgttgcaaggcgtttcgctcagcacttcccccgtgtagatcaggtcgatgagtcaccgcattccccacgggcgaccgtggcggtggctgcgttggcggcctgcctatggattaacccataggacgccttaatactgacatggtgcgaagagtctattgagctagttggtagtcctccggcccctgaatgcggctaatcctaactgcggagcacatactcacaacccagtgagcggtgtgtcgtaatgggtaactctgcagcggaaccgactactttgggtgtccgtgtttccttttattcttatattggctgcttatggtgacaatcatagaattgttaccatatagctattggattggccatccgatctctaacagagctattatttacctgtttgttggatttactccgttgacatacaaatccctaaacactttgtgctttattttgaacttgaacgcacgaaa

SEQ ID NO: 18715 - DNA, 742 bp, synthetic construct
  source 1..742: mol_type = other DNA
ttaaaacagcctgtgggttgcacccactcacagggcccactgggcgcgagcactctggtgcctcggtacctttgtgcgcctgttttatatcccccccccagtgaaacttagaagcagcaaaccacgatcaatagcaggcataacgctccagttatgtcttgatcaagcacttctgtttccccggaccgagtatcaatagactgctcgcgcggttgaaggagaaagcgttcgttatccggctagctacttcgggaaacctagtaacaccatgaaagttgcggagagcttcgttcagcactcccccagtgtagatcaggtcgatgagtcaccgcattccccacgggcgaccgtggcggtggctgcgttcgcggcctgcccatggggtaacccatggggcgctctaatacggacatggtgtgaagagtctactgagctagttagtagtcctccggcccctgaatgcggctaatcccaactgcggagcacacgcccacaagccagcgggtagtgtgtcgtaacgggcaactctgcagcggaaccgactactttgggtgtccgtgtttccttttatctttatattggctgcttatggtgacaattgaagaattgttaccatatagctattggattggccatccggtgtgcaacagagcaattgtttacctatttattggttttgtaccattaaccttgaagtctgtgaccacccttaattatatcttgacccttaacacagctaaac

SEQ ID NO: 18716 - DNA, 743 bp, synthetic construct
  source 1..743: mol_type = other DNA
ttaaaacagcctgtgggttgcacccactcacagggcccactgggcgcgagcactctggtacctcggtacctttgtgcgcctgttttataaccccctccccaatgaaacttagaagcagtaaaccacgatcaatagcaggcataacgctccagttatgtcttgatcaagcacttctgtttccccggactgagtatcaatagactgctcgcgcggttgaaagagaaaacgttcgttatccggctaactacttcgggaaacctagtaacgccatgaaagttgcggagagcttcgttcagcactcccccagtgtagatcaggtcgatgagtcaccgcattccccacgggcgaccgtggcggtggctgcgttggcggcctgcccatggggtaacccatggggcgctctaatacggacatggtgtgaagagtctactgagctagttagtagtcctccggcccctgaatgcggctaatcccaactgcggagcacacgcccacgagccagcgggtagtgtgtcgtaatgggtaactctgcagcggaaccgactactttgggtgtccgtgtttccttttatcttttcattggctgcttatggtgacaattaaagagttgttaccgtatagctattggattggccatccggtgtgcaacagagcaattgtttacctatttattggttttgtaccattaaccttgagtactgtgaccaccctcaattatattttgacccttaacgcagccaaac

SEQ ID NO: 18717 - DNA, 732 bp, synthetic construct
  source 1..732: mol_type = other DNA
ctgtgggttgtacccactcacagggcctactgggcgccagcactctggtactgtggtacctttgtgcgcctgttttatcaccccaccccatctgaaacgtagaagcaacgcgcaactgaccaatagtgggtgtggcgcaccagccacatcttggtcaagcacttctgtttccccgggtttagtatcaataagctgctcgcgcggctgaaggagaaaacacccgttatccggccaactacttcgagaaacctagtaccgctatgaacgttgcaaggcgtttcgctcagcacttcccccgtgtagatcaggccgatgagtcaccgcatccctcacgggcgaccgtggcggtggctgcgttggcggcctgcctatgggcttgcccataggacgccttaatactgacatggtgcgaagagtctattgagctagttggtagtcctccggcccctgaatgcggctaatcctaactgcggagcacatactcacaaaccagtgagcggtgtgtcgtaacgggcaactctgcagcggaaccgactactttgggtgtccgtgtttccttttactcttatactggctgcttatggtgacaattaaagaattgttaccatatagctattggattggccatccggtgactaacagaggcattatatacttgttcgttggattcacctcgttgtcatacaaatcccttaacactttgtgctttatcttgagtttgaattctaaaag

SEQ ID NO: 18718 - DNA, 748 bp, synthetic construct
  source 1..748: mol_type = other DNA
tttaaaaacaagctgtgggttgtacccactcacagggcccactgggcgctagcactctgattctccggaatctttgtgcgcctgttttataacccctcccccaattcgtaatttagaagtaatgcacaccattgatcaacagcaagcgtggcgcgccagccatgtttagatcaagcacttctgtttccccggactgagtatcaatagactgctcacgcggttgaaggagaaaacgttcgttacccggctaactacttcgagaaacctagtagcaccatcgaaactgcagagtgtttcgctcagcactttccccgtgtagatcaggtcgatgagtcactgcaatccccacgggcgaccgtggcagtggctgcgttggcggcctgcctatgggcttacccataggacgctctaatgtggacatggtgtgaagagtctattgagctagttagtagtcctccggcccctgaatgcggctaatcctaactgcggagcgcataccctcaacccagggggtggtgcgtcgtaacgggcaactctgcagcggaaccgactactttgggtgcccgtgtttccttttattcttatattggctgcttatggtgacaattgagagattgttaccatatagctattggattggccatccagtgtctaacagagcaattgtatacttatttgttggattcgttccactatcatatacatccactaacaccttatactatattataagattgaacacaaggaa

SEQ ID NO: 18719 - DNA, 750 bp, synthetic construct
  source 1..750: mol_type = other DNA
ggctttaaaacagcctgtgggttgttcccacccacagggcccactgggcgctagcacactgattttgcgggatctttgtgcgcctgttttataacccctccccctaagcagtaacttagaagctccacactatcacgaccaatagcaggcgtggtgcaccagtcacgtcttggtcaagcacttctgtttccccggactgagtatcaatagactgctcacgcggttgaaggagaaaacgttcgttatccggctaactacttcgagaaacttagtagcaccgtgaaagttgcggagtgtttcgctcagcacttcccccgtgtagatcaggtcgatgagtcactgtgaaccccacgggtgaccgtgacagtggctgcgttggcggcctgcccatggggtaacccatgggacgctctaatacagacacggtgtgaagagtctattgagctagttagtagtcctccggcccctgaatgcggctaatcctaactgcggagcgcgcaccctcaatccagggggcagcgcgtcgtaatgggtaactctgcagcggaaccgactactttgggtgtccgtgtttccttttattccttattggctgcttatggtgacaattgaaaagttgttaccatatagctattggattggccatccggtaaccaacagagctattgtttacctgtttgttggatacgtccctctcaatctcaaggccattcaaactcttgattatatactacttctcaactgcaagaa

SEQ ID NO: 18720 - DNA, 730 bp, synthetic construct
  source 1..730: mol_type = other DNA
gttgtacccactcacagggcccactgggtgctagcactctgattctgcggaacctttgtgcgcctgttttaaaacccccccctcaattcgtgatttagaagtaatgcacaccattgatcaacagcaagcgtggcgcaccagccatgttcagatcaaacacttctgtttccccgggctgagtatcaatagactgctcgcgcggttgaaggagaaaacgctcgttacccggctaactacttcgagaaacctagtagcaccattgaaactacagagtgtttcgctcagcactttccccgtgtagatcaggtcgatgagtcactgcaatccccacgggcgaccgtggcagtggctgcgttggcggcctgcctatgggcttgcccataggacgctctaaagtggacatggtgtgaagagtctattgagctagttagtagtcctccggcccctgaatgcggctaatcctaactgcggagcgcatgccctcaatccagggggtggtgcgtcgtaacgggcaactctgcagcggaaccgactactttgggtgaccgtgtttccttttattcttatattggctgcttatggtgacaattgagagattgttaccatatagctattggattggccatccagtgtctaacagagcaatcgtatacttatttgttggattcatcccactatcatacatatccattaacaccttatactatattataagattgaacacaagaaa

SEQ ID NO: 18721 - DNA, 744 bp, synthetic construct
  source 1..744: mol_type = other DNA
ttaaaacagcctgtgggttgcacccacccacagggcctactgggcgctagcactctggcactgaggtacctttgtgcgcctgttttgacttcccttccccgaagtaacttagaagctgtaaatcaacgatcaatagtaggtgtgacacaccagtcatatcttgatcaagcacttctgtttccccggactgagtatcaataggctgctcgcgcggctgaaggagaaaacgttcgttacccgaccaactacttcgagaagcttagtaccaccatgaacgaggcagagtgtttcgttcagcacaaccccagtgtagatcaggctgatgagccactgcaacccccatgggcgaccatggcagtggctgcgttggcggcctgcccatggagaaatccatgggacgctctaattctgacatggtgtgaagagcctattgagctagctggtagtcctccggcccctgaatgcggctaatcctaactgcggagcacatgctcacaaaccagtgggtggtgtgtcgtaacgggcaactctgcagcggaaccgactactttgggtgtccgtgtttccttttattcttatattggctgcttatggtgacaatcaaagaattgttaccatatagctattggattggccatccggtgtgcaacagagcaattgtttacctatttattggttttgtaccattatcactgaagtctgtgatcactctcaaattcattttgaccctcaacacaaccaaat

SEQ ID NO: 18722 - DNA, 745 bp, synthetic construct
  source 1..745: mol_type = other DNA
ttaaaacagcctgtgggttgttcccactcacagggcccactgggcgctagcacactgattctgcgggatctttgtgcgcctgttttataacccttcccctaagcagcaacttagaagctttgtacaatcacgaccaatagtgggcgtgacgcgccagtcacgtcttggtcaagcacttctgtatccccggactgagtaccaatagactgctcacgcggttgaaggggaaaacgttcgttacccggctaactacttcgagaaacctagtagtaccatgaaagttgcggagtgtttcgctcagcacttcccccgtgtagatcaggtcgatgagtcactgtaaaccccacgggcgaccgtgacagtggctgcgttggcggcctgcccatggggtaacccatgggacgctctaatacagacatggtgcgaagagtctattgagctagttaacagtcctccggcccctgaatgcggctaatcctaactgcggagcgcgcaccctcaacccagggggcggcgtgtcgtaatgggtaactctgcagcgggaccgactactttgggtgtccgtgtttccttttattctttattggctgcttatggtgacaattgaaaagttgttaccatatagctattggattggccatccggtgtctaacagagctattgtctacctattcattggatacgtccctcttaatctcaaggccattcaaactcttgattatatattgctccttaactgtaggaa

SEQ ID NO: 18723 - DNA, 748 bp, synthetic construct
  source 1..748: mol_type = other DNA
tttaaaacaagcctgtgggttgtacccactcacagggcccactgggcgctagcactctgattccgcggaatctttgtgcgcctgttttataacccctcccccgatttgtaatttagaagtaatgcacaccactgatcaacagcaagcgtggcgcgccagccacgttcagatcaaatacttctgttttcccggactgagtatcaatagactgctcacgcggttgaaggagaaaacgttcgttacccggctaactacttcgagaaacctagtagcaccatcgaaactgcagagtgtttcgctcagcactttccccgtgtagatcaggtcgatgagtcactgcaatccccacgggcgaccgtggcagtggctgcgttggcggcctgcctatgggcttgcccataggacgctctaatgtggacatggtgtgaagagtctattgagctagttggtagtcctccggcccctgaatgcggctaatcctaactgcggagcgcataccctcaatccagggggtggtgcgtcgtaacgggcaactctgcagcggaaccgactactttgggtgtccgtgtttccctttattcttgtattggctgcttatggtgacaattgagagattgttgccatatagctattggattggccatccagtatctaacagagcaattgtatacttgtttgttggattcgttccactgtcatatacatccactaacaccttatactatattataaaattgaacacaagaaa

SEQ ID NO: 18724 - DNA, 748 bp, synthetic construct
  source 1..748: mol_type = other DNA
ttcaaacagcctgtgggttgcacccactcacagggcccacgtggcgctagcactctggttctacggaacctttgtgcgcctgttttacgccccttccccaatttgcaacttagaagcaatacacaacactgatcaacagcgggcatggcgcaccagctatgtcttgatcaagcacttctgtttccccggaccgactatcaatagactgctcacgcggttgaaggagaaagcgtccgttatccggctaactacttcgaaaaacctagtaacaccattgaagctgcagagtgtttcgctcggcacttcccccgtgtagatcaggtcgatgagtcactgcaatccccacgggtgaccgtggcagtggctgcgttggcggcctgcctatggggcaacccataggacgctctaatgcggacatggtgcgaagagtctattgagctagttagtagtcctccggcccctgaatgcggctaatcctaactgcggagcacatgccttcaacccagagggtagtgtgtcgtaatgggcaactctgcagcggaaccgactactttgggtgtccgtgtttccttttattcttatattggctgcttatggtgacaattacagaattgttaccatatagctattggattggccatccggtgtgcaatagagctattatatacctttttttttggctttgtaccactaaccttaaaatctataatcaccctcgactttatattaaccctcaacacagtcaagc

SEQ ID NO: 18725 - DNA, 748 bp, synthetic construct
  source 1..748: mol_type = other DNA
tttaaaaccagcctgtgggttgcacccactcacagggcccactgggcgctagcactctgattctgcggaatctttgtgcgcctgttttataacccctcccccgattcgtaacttagaagtaatacacactattgatcaacagcaagcgtggcgcgccagccatgtttagatcaagcacttctgtttccccggactgagtatcaatagactgctcacgcggttgaaggagaaaacgttcgttacccggctaactacttcgagaaacctagtagcaccatcgaaactgcagagtgtttcgttcagcactttccccgtgtagatcaggtcgatgagtcactgcaacccccacgggcgaccgtggcagtggctgcgttggcggcctgcctatgggcttgcccataggacgctctaatgtggacatggtgtgaagagtctattgagctagttagtagtcctccggcccctgaatgcggctaatcctaactgcggagcgcataccctcaatccagggggtggtgcgtcgtaacgggtaactctgcagcggaaccgactactttgggtgcccgtgtttccttttattcctatattggctgcttatggtgacaattgagagattgttaccatatagctattggattggccatccagtgtctaacagagcaattgtatacttatttgttggattcgttccactatcatatacatccattaataccttacactacattataagattgaactcaaggaa

SEQ ID NO: 18726 - DNA, 747 bp, synthetic construct
  source 1..747: mol_type = other DNA
ttcaaacagcctgtgggttgcacccactcacagggcccacgtggcgctagcactctggttctacggaacctttgtgcgcctgttttacgccccttccccaatttgcaacttagaagcaatacacaacactgatcaacagcaggcatggcgcaccagctatgtcttgatcaagcacttctgtttccccggaccgagtatcaatagactgttcacgcggttgaaggagaaagcgtccgttatccggctaactacttcgagaaacctagtaacaccattgaagctgcagagtgtttcgctcggcacttcccccgtgtagatcaggtcgatgagtcactgcaatccccacgggtgaccgtggcagtggctgcgctggcggcctgcctatggggcaacccataggacgctctaatgcggacatggtgcgaagagtctattgagctagttagtggtcctccggcccctgaatgcggctaatcctaactgcggagcacatgccttcaatccagagggtagtgtgtcgtaatgggcaactctgcagcggaaccgactactttgggtgtccgtgtttccttttattcttatattggctgcttatggtgacaattacagaattgttaccatatagctattggattggccatccggtgtgcaatagagctattatatacctatttgttggctttgtaccactaaccttaaaatctataaccaccctcgactttatattaaccctcaacacagtcaagc

SEQ ID NO: 18727 - DNA, 743 bp, synthetic construct
  source 1..743: mol_type = other DNA
ttaaaacagctgtgggttgcacccacccacagggcccactgggcgctagcactctggtactgaggtacctttgtgcgcctgtttttactccccttccccccgaagtaacttagaagctgtaaatcagatcaatagcaggtgtggcacaccagtcataccttgatcaagcacttctgtttccccggactgagtatcaataggctgctcgcgcggctgaaggagaaaacgttcgttacccgaccaactacttcgagaagcttagtaccaccatgaacgaggcagggtgtttcgctcagcacaaccccagtgtagatcaggctgatgagtcactgcaacccccatgggcgaccatggcagtggctgcgttggcggcctgcccatggagaaatccatgggacgctctaattctgacatggtgtgaagagcctattgagctagctggtagtcctccggcccctgaatgcggctaatcctaactgcggagcacatgctcacaaaccagtgggtggtgtgtcgtaacgggcaactctgcagcggaaccgactactttgggtgtccgtgtttccttttattcctatattggctgcttatggtgacaatcaaaaagttgttaccatatagctattggattggccatccggtgtgcaacagggcaattgtttacctatttattggttttgtaccattatcactgaagtctgtgatcactctcaaattcattttgaccctcaacacaatcaaac

SEQ ID NO: 18728 - DNA, 743 bp, synthetic construct
  source 1..743: mol_type = other DNA
ttaaaacagctgtgggttgcacccacccaccgggccactgggccgctagcactctggtactgaggtacctttgtgcgcctgtttttactccccttccccccgaagtaacttagaagctgtaaatcagatcaatagcaggtgtggcacaccagtcatacctcgatcaagcacttctgtttccccggactgagtatcaataggctgctcgcgcggctgaaggagaaaacgttcgttacccgaccaactacttcgagaagcttagtaccaccatgaacgaggcagggtgtttcgctcagcacaaccccagtgtagatcaggctgatgagtcactgcaacccccatgggcgaccatggcagtggctgcgttggcggcctgcccatggagaaatccatgggacgctctaattctgacatggtgtgaagagcctattgagctagctggtagtcctccggcccctgaatgcggctaatcccaactgcggagcacatgctcacaaaccagtgggtggtgtgtcgtaacgggcaactctgcagcggaaccgactactttgggtgtccgtgtttccttttattcttatattggctgcttatggtgacaatcaaagagttgttaccatatagctattggattggccatccggtgtgcaacagggcaattgtttacctatttattggttttgtaccattatcactgaagtctgtgatcactctcaaattcattttgaccctcaacataatcagac

SEQ ID NO: 18729 - DNA, 745 bp, synthetic construct
  source 1..745: mol_type = other DNA
ttaaaacagcctgtgggttgttcccacccacagggcccactgggcgctagcacactgattctgcgggatctttgtgcgcctgttttataacccctcccctaagcagtaacttagaagcctcacactatcacgaccaatagtaggcgtggcgcaccagtcacgtcttggtcaagcacttctgtttccccggactgagtatcaatagactgctcacgcggttgaaggagaaaacgttcgtcatccggctaactacttcgagaaacctagtaacaccgtgaaagttgccgagtgtttcgctcagcacttcccccgtgtagatcaggtcgatgagtcactgtgaaccccacgggtgaccgtgacagtggctgcgttggcggcctgcccatggggcaacccatgggacgctctaatacagacacggtgtgaagagtctattgagctagttggtagtcctccggcccctgaatgcggctaatcctaactgcggagcgcgtaccctcaatccagggggcagcgcgtcgtaatgggtaactctgcagcggaaccgactactttgggtgtccgtgtttccttttattccttattggctgcttatggtgacaattgaaaagttgttaccatatagctattggattggccatccggtaaccaacagagctattgtttacctgtttattggatacgtccctctcaatctcaaggccattcaaactcttgattatatactacttctcaactgtaagag

SEQ ID NO: 18730 - DNA, 734 bp, synthetic construct
  source 1..734: mol_type = other DNA
cctgtgggttgcacccacccacagggcccactgggcgctagcactctggtaccacggtacccttgtgcgcctgttttatcgccctaccccaacatgaaacttagaagcaatacacaatcgaccaatagtaggtgtggcgcaccagccacatctaggtcaagcacttctgtttccccgggttgagtatcaataagctgtccacacggctgaaggagaaaacgcccgttatccggccaactacttcgagaaacctagtatcactatgaacgttgcaaggcgtttcgctcagcacttcccccgtgtagatcaggtcgatgagtcaccgcattccccacgggcgaccgtggcggtggctgcgttggcggcctgcctatgggttaacccataggacgccttaatactgacatggtgcgaagagtctattgagctagttggtagtcctccggcccctgaatgcggctaatcctaactgcggagcacatactcacaacccagtgagcggtgtgtcgtaacgggcaactctgcagcggaaccgactactttgggtgtccgtgtttccttttattcttatattggctgcttatggtgacaatcatagaattgttaccatatagctattggattggccatccgacttctaacagagctattatttacttgtttgttggattcactccgttgacatataaatccctaaacactttgtgctttattttgaacttgaacgcacgaaa

SEQ ID NO: 18731 - DNA, 747 bp, synthetic construct
  source 1..747: mol_type = other DNA
tttaaaacagcctgtgggttgtacccactcacagggcctactgggcgctagcactctgattctgcggaatctttgtgcgcctgttttataacccctcccccaattcgtaatttagaagtaatgcacaccactgatcaacagcaagcgtggcgcgccagccatgttcagatcaaatacttctgttttcccggactgagtatcaatagactgctcacgcggttgaaggagaaaacgttcgttacccggctaactacttcgagaaacctagtagcaccatcgaaactgcagagtgtttcgttcagcacttcccccgtgtagatcaggtcgatgagtcactgcaatccccacgggcgaccgtggcagtggctgcgttggcggcctgcctatgggcttgcccataggacgctctaatgtggacatggtgcgaagagtctattgagctagttagtagtcctccggcccctgaatgcggctaatcctaactgcggagcgcataccctcaatccagggggtggtgcgtcgtaacgggcaactctgcagcggaaccgactactttgggtgtccgtgtttccttttattcttatattggctgcttatggtgacaattgagggattgttaccatatagctattggattggccatccagtatctaacagagcaattgtatacttatttgttggatttgttccactatcatatacatccactaacaccttatactatattataaaattgaacacaagaaa

SEQ ID NO: 18732 - DNA, 748 bp, synthetic construct
  source 1..748: mol_type = other DNA
tttaaaacagcctgtgggttgcacccactcacagggcccacgtggcgctagcactctggttctacggaacctttgtgcgcctgttttacgccccctccccaacttgcaacttagaagcaacacacaacactgatcaacagcaggcatggcgcaccagctatgtcttgatcaagcacttctgtttccccgggccgagtatcaacagactgttcacacggttgaaggagaaagcgcccgttatccggctaactacttcgagaagcctagtagcaccattgaagctgcagagtgtttcgctcagcactttccccgtgtagatcaggtcgatgagtcactgcaatccccacgggcgaccgtggcagtggctgcgctggcggcctgcctatggggcaacccataggacgctctaatgtggacatggtgcgaagagtctattgagctagttagtagtcctccggcccctgaatgcggctaatcctaactgtggagcacatgccttcaatccagagggtagtgtgtcgtaatgggcaactctgcagcggaaccgactactttgggtgtccgtgtttccttttattcctacattggctgcttatggtgacaattacagaattgttaccatatagctattggattggccatccggtgtgcaatagagctattatatacctgtttgttggctttgtaccactaacctcaaaatctataatcaccctcgattttatattaacccttaatacaatcaaac

SEQ ID NO: 18733 - DNA, 746 bp, synthetic construct
  source 1..746: mol_type = other DNA
ttaaaacagcctgtgggttgttcccacccacagggcccactgggcgctagcacactgattctgcgggatctttgtgcgcctgttttataacccttcccctaagcagcaacttagaagctttgtacaatcacgaccaatagtgggcgtggcgcgccagtcacgtcttggtcaagcacttctgtatccccggactgagtatcaatagactgctcacgcggttgaaggagaaaacgttcgttacccggctaactacttcgagaaacctagtagcaccatgaaagttgcggagtgtttcgctcagcacttcccccgtgtagatcaggtcgatgagtcactgtaaaccccacgggcgaccgtgacagtggctgcgttggcggcctgcccatggggtaacccatgggacgctctaatacagacatggtgcgaagagtctattgagctagttagcagtcctccggcccctgaatgcggctaatcctaactgcggagcgcgcaccctcaacccagggggcggcgtgtcgtaatgggtaactctgcagcggaaccgactactttgggtgtccgtgtttccttttattctttattggctgcttatggtgacaattgaaaagttgttaccatatagctattggattggccatccggtgtctaacagagctattgtttacctatttattggatacgtccctcttaatctcaaagccattcaaactcttgattatatattgctccttaacctgtaggaa

SEQ ID NO: 18734 - DNA, 748 bp, synthetic construct
  source 1..748: mol_type = other DNA
tttcaaacgcctgtgggttgcacccactcacagggcccacgtggcgctagcactttggttttacggaacctttgtgcgcctgtttttacgccccttccccaatttgcaacttagaagcaatgcacaacactgatcaacaggcggcatggcgcaccagctatgtcttgatcaagcacttctgtttccccggaccgactatcaatagactgctcacgcggttgaaggagaaagcgtccgttatccggctaactacttcgaaaaacctagtaacaccattgaagctgcagagtgtttcgctcggcacttcccccgtgtagatcaggtcgatgagtcactgcaatccccacgggtgaccgtggcagtggctgcgttggcggcctgcctatggggcaacccataggacgctctaatgcggacatggtgcgaagagtctattgagctagttagtagtcctccggcccctgaatgcggctaatcctaactgcggagcacatgcctcaacccagagggtagtgtgtcgtaatgggcaactctgcagcggaaccgactactttgggtgtccgtgtttccttttattcttatattggctgcttatggtgacaattacagaattgttaccatatagctattggattggccatccggtgtgcaatagagctattatatacctacttttttggctttgtaccactaaccttaaaatctataatcaccctcgactttatattaaccctcaacacagtcaagc

SEQ ID NO: 18735 - DNA, 748 bp, synthetic construct
  source 1..748: mol_type = other DNA
ttaaaacagcctgtgggttgcacccacccacagggcccactgggcgctagcacactgattctacggaacctttgtgcgcctgttttataaccctttcccctaaaactgtaacttagaagaatattgcactactgatcaatagcaggcatggcacgccagtcatgtatagatcaagcacttctgtctccccggactgagtatcactagactgctagcgcggttgaaggagaaaacgtccgttacccggctaactacttcgagaaacttagtagcaccattgaagctgcggagtgtttcgttcagcactcccccagtgtagatcaggtcgatgagtcactgcactccccacgggcgaccgtggcagtgactgcgttggcggcctgcctatggggcaacccataggacgctctaaagtggacatggtgtgaagagtctattgagctagttagtagtcctccggcccctgaatgcggctaatcccaactgcggagcacatgccctcaatccagagggtggtgtgtcgtaacgggcaactctgcagcggaaccgactactttgggtgtccgtgtttccttttattcttatattggctgcttatggtgacaattgagagattgttaccatatagctattggattggccatccagtgacaaacagagctttgatatacttgtttgtgggttttgttccactcaccagtcgtacagttcatactctaaagtacattctgattctgaacaatagaaa

SEQ ID NO: 18736 - DNA, 747 bp, synthetic construct
  source 1..747: mol_type = other DNA
tttaaaacagcctgtgggttgctcccacccacagggcccactgggcgctagcacactgattttacggaatctttgtgcgcctgttttatatcccctcccccaaacagtaatttagaagtttaatgcatttatggccagtagcgggcatgacgcaccagtcatgtcttggtcaagcacttctgttttcccggactgagtatcaataaactgctcacgcggttgaaggagaaaacgttcgttacccggctaactacttcgagaaacccagtaacaccatgaaagttgcggagtgtttcgctcagcacttcccccgtgtagatcaggtcgatgagtcactgtaaaccccacgggcgaccgtgacagtggctgcgttggcggcctgcccatgggacaacccatgggacgctctaatacagacatggtgtgaagagtctattgagctagttagtagtcctccggcccctgaatgcggctaatcctaactgcggagcacacaccctcaatccagggggcagtgtgtcgtaacgggcaactctgcagcggaaccgactactttgggtgtccgtgtttccttttattcttattgtggctgcttatggtgacaattaaagaattgttaccatatagctattggattggccatccggtgtctaacagagcaattgtgtatttatttgctggatttgttccattatcatacacatcttttaatactttatactttattataaaattgaacacaagaaa

SEQ ID NO: 18737 - DNA, 747 bp, synthetic construct
  source 1..747: mol_type = other DNA
tttaaaacagcctgtgggttgtacccactcacagggcccactgggcgctagcactctgattctgcggaatctttgtgcgcctgttttataacccctcccccaattcgtaatttagaagtaatgcacaccattgatcaacagcaagcgtggcgcgccagccatgtttagatcaagcacttctgttttcccggactgagtatcaatagactgctcacgcggttgaaggagaaaacgttcgttacccggctaactacttcgagaaacctagtagcaccatcgaaactgcagagtgtttcgctcagcactttccccgtgtagatcaggtcgatgagtcactgcaatccccacgggcgaccgtggcagtggctgcgttggcggcctgcctatgggcttacccataggacgctctaatgtggacatggtgtgaagagtctattgagctagttagtagtcctccggcccctgaatgcggctaatcctaactgcggagcgcataccctcaacccagggggcggtgcgtcgtaacgggcaactctgcagcggaaccgactactttgggtgtccgtgtttccttttattcttatattggctgcttatggtgacaattgagagattgttaccatatagctattggattggccatccagtgtctaacagagcaattgtatacttatttgttggattcgttccactatcatatatatccactaacaccttatactatattataggattgaacacaagaaa

SEQ ID NO: 18738 - DNA, 747 bp, synthetic construct
  source 1..747: mol_type = other DNA
ttaaaacagcctgtgggttgtacccagccacagggcccactgggcgctagcacactgattctatggaatctttgtgcgcctgttttataaccccttccccaagactgtaacttagaagaatatcacactaccgatcaatagcaggcatggcgcgccagtcatgtcgagatcaagcacttctgtctccccggattgagtatcaatagactgctagcgcggttgaaggagaaaacgtccgttacccggctaactacttcgagaaacttagtagcaccattgaagctgcggagtgtttcgctcagcactcccccagtgtagatcaggtcgatgagtcactgcactccccacgggcgaccgtggcagtgactgcgttggcggcctgcctatggggcaacccataggacgctctaaagtggaaatggtgtgaagagtctattgagctagttagtagtcctccggcccctgaatgcggctaatcctaactgcggagcacatgccctcaatccagggggtggtgtgtcgtaacgggcaactctgcagcggaaccgactactttgggtgtccgtgtttccttttattcttatattggctgcttatggtgacaattgagagattgttaccatatagctattggattggccatccagtgacaaacagagcttcgatatacttgttcgtgggtttcgttccactcaccagtcgtacagttcatactctaaagtacattctgattctgaacaatagaaa

SEQ ID NO: 18739 - DNA, 747 bp, synthetic construct
  source 1..747: mol_type = other DNA
ttaaaacagcctgtgggttgcacccactcacaggacccacgtggtgctagcactctggttctacggaacccttgtgcgcctgttttacgccccctccccaatttgcaacttagaagcaattcacaacactgatcaatagcaggcatggcgcaccagctatgtcttgatcaagcacttctgtttccccggaccgagtatcaatagactgttcacgcggttgaaggagaaagcgtccgttatccggctaactacttcgagaaacccagtagcgccattgaaactgcagagtgtttcgctccacacttcccccgtgtagatcaggtcgatgagtcactgcaatccccacgggcgaccgtggcagtggctgcgctggcggcctgcctatggggcaacccataggacgctctaatgtggacatggtgcgaagagtctattgagctagttagtagtcctccggcccctgaatgcggctaatcctaactgcggagcacatgccttcaatccagagggtagtgtgtcgtaatgggcaactctgcagcggaaccgactactttgggtgtccgtgtttccttttattctcacattggctgcttatggtgacaattacagaattgttaccatatagctattggattggccatccggtgtgcaatagagctattatatacctatttgttggttttgtaccactaaccttaaaatctgcaaccactctcgactatatattaaccctcaatacaatcaaac

SEQ ID NO: 18740 - DNA, 747 bp, synthetic construct
  source 1..747: mol_type = other DNA
ttaaaacagcctgtgggttgcacccacccacagggcccactgggcgctagcacactgattctacggaatctttgtgcgcctgttttagtacccctcccccaaaacccgtaacttagaagaatagcacgctatcgatcaatagcaggcatggcgcaccagtcatgtttagatcaagcacttctgtctccccggattgagtatcaatagactgctaacgcggttgaaggagaaaacgtccgttacccggctaactacttcgagaaacctagtaacaccattgaaactgcagagcgtttcgctcagcactaccccagtgtagatcaggtcgatgagtcactgcgctccccacgggcgaccgtggcagtggctgcgttggcggcctgcctatggggtgacccataggacgctctaaagtggacatggtgtgaagagtctattgagctagttagtagtcctccggcccctgaatgcggataatcctaactgcggagcgcatgccctcaatccagggggtggtgcgtcgtaacgggcaactctgcagcggaaccgactactttgggtgtccgtgtttcctttattttcatactggctgcttatggtgacaattgaaagattgttaccatatagctattggattggccatccagtgaccaacagagctttgatttacctgtttgcgggttttgttccactcaccaattgtacagttcatactctgaagtacattttaatcctgaataatagaaa

SEQ ID NO: 18741 - DNA, 744 bp, synthetic construct
  source 1..744: mol_type = other DNA
aaacagctctagggttgttcccaccctaggggcccacgtggcggctagcactctggtatcacggtacctttgtgcgcctgttttataccccctcccctatgtaacttagaagctattaaataaagttcaatagaagggggtacaaaccagtgccaccacgaacaaacacttctgtttccccggtgaagctacatagactgttcccacggtcgaaagtagcagatccgttatccgctttggtacttcgagaaacctagtatcatcttggaatcttcgatgcgttgcgctcagcactcaaccccagagtgtagcttaggtcgatgagtctggacgatcctcactggcgacagtggtccaggctgcgttggcggcctacctgtggtgaaagccacaggacgctagttgtgaacaaggtgtgaagagtctattgagctaccaaagagtcctccggcccctgaatgcggctaatcccaaccacggagcaagtgctcacaatccagtgagtggcttgtcgtaacgcgcaagtctgtggcggaaccgactactttgggtgtccgtgtttccttttatttttatcatggctgcttatggtgacaatctaagattgttatcatatagctattggattggccatccggtgaccagtagagacattatatacttatttgttggctttgttaaattagacacaactacacttaaatctcttctcttcatcacacaattgaatattagaaaaagaaa

SEQ ID NO: 18742 - DNA, 745 bp, synthetic construct
  source 1..745: mol_type = other DNA
ttaaaacagcctgtgggttgttcccacccacagggcccactgggcgctagcacactgattctgcgggatctttgtgcgcctgttttataaccccttccctaagcagcaacttagaagcttcacactatcacgaccagtagtgggcgtggcgcgccagtcacgtcttggtcaagcacttctgtttccccggactgagtatcaatagactgctcacgcggttgaaggagaaaacgttcgttatccggctaactacttcgagaaacttagtagcaccgtgaaagttgcggagtgtttcgctcagcacttcccccgtgtagatcaggtcgatgagtcactgtaaaccccacgggcgaccgtgacagtggctgcgttggcggcctgcccatggagtaacccatgggacgctctaatacagacacggtgtgaagagtctattgagctagttagtagtcctccggcccctgaatgcggctaatcctaactgcggagcgcgcaccctcaacccagggggcagcgcgtcgtaatgggtaactctgcagcggaaccgactactttgggtgtccgtgtttccttttactccttattggctgcttatggtgacaattgaaaagttgttaccatatagctattggattggccatccggtgaccaacagggctattgtttacctgtttattggatacgtccctcttattcttgcggccattcaaactcttgattatatattgctccttaactgtaagaa

SEQ ID NO: 18743 - DNA, 747 bp, synthetic construct
  source 1..747: mol_type = other DNA
ttaaaacagcctgtgggttgcacccacccacagggcccactgggcgctagcacactgattctacggaatctttgtgcgcctgttttagtgtccctcccccaaactcgtaacttagaagaatagcaccctatcgatcaatagtaggcatggcgcaccagccatgtctggatcaagcacttctgtctccccggattgagtatcaatagactgctaacgcggttgaaggagaaaacgtccgttatccggctaactacttcgagaaacctagtaacaccattgaaactgcagagcgtttcgctcagcactaccccagtgtagatcaggtcgatgagtcactgcactccccacgggcgaccgtggcagtggctgcgttggcggcctgcctatggggtaacccataggacgctctaaagtggacatggtgcgaagagtctattgagctagttagtagtcctccggcccctgaatgcggataatcctaactgcggagcgcatgccctcaatccagggggtggtgcgtcgtaacgggcaactctgcagcggaaccgactactttgggtgtccgtgtttccttttatttttatactggctgcttatggtgacaattgaaagattgttaccatatagctattggattggccatccagtgaccaacagagctttgatttacctgtttgtgggttttgttccactcaccaattgtacagttcatactttgaagtttattttaatcctgaataatagaaa

SEQ ID NO: 18744 - DNA, 747 bp, synthetic construct
  source 1..747: mol_type = other DNA
ttaaaacagcctgtgggttgtacccactcacagggcccactgggcgccagcacactgattctatggaatctttgtgcgcctgttttataaccccttccccaaaactgcaacttagaagaatagcactctatcgatcaatagcaggcatggcgcgccagtcatgtctaggtcaagcacttctgtctccccggaccgagtatcaatagactgctagcgcggttgaaggagaaaacgtccgttacccggctaactacttcgagaaacttagtagtaccattgaagctgcagagtgtttcgctcagcactcccccagtgtagatcaggtcgatgagtcactgcaatccccacgggcgaccgtggcagtggctgcgttggcggcctgcctatggggcaacccataggacgctctaaagtggacatggtgcgaagggtctattgagctagttagtagtcctccggcccctgaatgcggctaatcctaactgcggagcgcataccctcaatccagggggtggtgtgtcgtaatgggcaactctgcagcggaaccgactactttgggtgtccgtgtttccttttattcttatattggctgcttatggtgacaattgagagattgttaccatatagctattggattggccatccggtgaccaacagagctttgatatacttatttgtaggttttgttccactcacaaatcgtacggtccatactctgaagtacattttgattctgaacaatagaaa

SEQ ID NO: 18745 - DNA, 746 bp, synthetic construct; identical to SEQ ID NO: 1120
  source 1..746: mol_type = other DNA

SEQ ID NO: 18746 - DNA, 746 bp, synthetic construct
  source 1..746: mol_type = other DNA
ttaaaacagcctgtgggttgcacccacccacagggcccactgggcgccagcacactgattctatggaatctttgtgcgcctgttttataaccccttcccaaaactgtaacttagaagaaaagcactttatcgatcaatagcaggcatggtgcaccaatcatgtccagatcaagcacttctgtctccccggatcgagtatcaatagactgctaacgcggttgaaggagaaaacgtccgttacccggctaactacttcgagaaacttagtaacaccattgaagctgcagagtgtttcgctcagcactcccccagtgtagatcaggtcgatgagtcactgcactccccacgggtgaccgtggcagtggctgcgttggcggcctgcctatggggcaacccataggacgctctaaagtggacatggtgcgaagagtctattgagctagttagtagtcctccggcccctgaatgcggctaatcctaactgcggagcgcatgccctcaacccagggggtggtgcgtcgtaacgggcaactctgcagcggaaccgactactttgggtgtccgtgtttccttttattcctatattggctgcttatggtgacaattgagagattgttaccatatagctattggattggccatccagtgactaacagagctttgatatacttgtttgtgggtttcgttccactcaccaatcgcacagttcaaactctaaagtatattttgattctgaacaatagaaa

SEQ ID NO: 18747 - DNA, 731 bp, synthetic construct
  source 1..731: mol_type = other DNA
tggttgttcccacccacagggcccactgggcgccagcactctgattccatggaatctttgtgcgcctgttttacaacccttccccaatttgtaacgtagaagtaatacacactactgatcaatagcaggcatggcgcgccagtcatgtctcgatcaagcacttctgttcccccggactgagtatcaatagactgctcacgcggttgaaggagaaaacgttcgttacccggctaactacttcgagaaacctagtagcaccatagaagctgcagagtgtttcgctcagcacttcccccgtgtagatcaggctgatgagtcactgcaatccccacgggcgaccgtggcagtggctgcgctggcggcctgcctatggggcaacccataggacgctctaatgtggacatggtgcgaagagtctattgagctagttagtagtcctccggcccctgaatgcggctaatcctaactgcggagcacatgccttcaatccaggaggtggtgtgtcgtaacgggcaactctgcagcggaaccgactactttgggtgtccgtgtttctttttattcctatattggctgcttatggtgacaattacggaattgttgccatatagctattggattggccatccggtgtctaatagagctattgtgtacctatttgttggatttactccgctatcatataaatctctgaacactttgtgctttatattgaacttaaacacacgaaa

SEQ ID NO: 18748 - DNA, 745 bp, synthetic construct
  source 1..745: mol_type = other DNA
ttaaaacagcctgtgggttgttcccacccacagggcccactgggcgctagcacactgattctgcgggatctttgtgcgcctgttttataacccttcccctaagcagcaacttagaagctttgtacaatcacgaccaatagtgggcgtggcgcgccagtcacgtcttggtcaagcacttctgtatccccggactgagtatcaatagactgctcacgcggttgaaggagaaaacgttcgttacccggctaactacttcgagaaacctagtagcaccgtgaaagttgcggagtgtttcgctcagcacttcccccgtgtagatcaggtcgatgagtcactgtaaaccccacgggcgaccgtgacagtggctgcgttggcggcctgcccatggggcaacccatgggacgctctaatacagacatggtgcgaagagtctattgagctagttagtagccctccggcccctgaatgcggctaatcctaactgcggagcgcgcaccctcaacccagggggcggcgtgtcgtaatgggtaactctgcagcggaaccgactactttgggtgtccgtgtttccctttattctttattggctgcttatggtgacaattgaaaagttgttaccatatagctattggattggccatccggtgtctaacagagctattgtttacctattcattggatacatccctcttaatctcaaagccattcaaactcttgattatatattgcttctcaactgtaagaa

SEQ ID NO: 18749 - DNA, 746 bp, synthetic construct
  source 1..746: mol_type = other DNA
ttaaaacagcctgtgggttgcacccacccacagggcccactgggcgccagcacactgattctatggaatctttgtgcgcctgttttataaccccttcccaaaactgtaacttagaagaaaagcactttatcgatcaatagcaggcatggtgcaccaatcatgtccagatcaagcacttctgtctccccggatcgagtatcaatagactgctaacgcggttgaaggagaaaacgtccgttacccggctaactacttcgagaaacttagtaacaccattgaagctgcagagtgtttcgctcagcactcccccagtgtagatcaggtcgatgagtcactgcactccccacgggtgaccgtggcagtggctgcgttggcggcctgcttatggggcaacccataggacgctctaaagtggacatggtgcgaagagtctattgagctagttagtagtcctccggcccctgaatgcggctaatcctaactgcggagcgcatgccctcaacccagggggtggtgcgtcgtaacgggcaactctgcagcggaaccgactactttgggtgtccgtgtttccttttattcctatattggctgcttatggtgacaattgagagattgttaccatatagctattggattggccatccagtgaccaacagagctttgatatacttgtttgtgggtttcgttccactcaccaatcgcacagttcaaactctaaagtatattttgattctgaacaatagaaa

SEQ ID NO: 18750 - DNA, 747 bp, synthetic construct
  source 1..747: mol_type = other DNA
ttaaaaccccctctgggttgttcccacccacagggcccactgggcgctagcacactgattctgcgggatctttgtgcgcctgttttataaccctttccctaagcagcaacttagaagctttgtacaatcacgaccaatagtgggcgtgacgcgccagtcacgtcttggtcaagcacttctgtatccccggactgagtaccaatagactgcccacgcggttgaaggggaaaacgttcgttacccggctaactacttcgagaaacctagtagtaccatgaaagttgcggagtgtttcgctcagcacttcccccgtgtagatcaggtcgatgagtcactgtaaaccccacgggcgaccgtgacagtggctgcgttggcggcctgcccatggggtaacccatgggacgctctaatacagacatggtgcgaagagtctattgagctagttagcagtcctccggcccctgaatgcggctaatcctaactgcggagcgcgcaccctcaacccagggggcggcgtgtcgtaatgggtaactctgcagcggaaccgactactttgggtgtccgtgtttccttttttattctttattggctgcttatggtgacaattgaaaagttgttaccatatagctattggattggccatccggtgtctaacagagctattgtttacctatttattggatacgtccctcttaatctcaaggccattcaaactcttgattatatattgctccttaactgtaggaa

SEQ ID NO: 18751 - DNA, 746 bp, synthetic construct
  source 1..746: mol_type = other DNA
ttaaaacagcctgtgggttgtacccacctacagggcccactgggcgccagcacactgattctatggaatctttgtgcgcctgttttataacccttccccaaaactgtaacttagaagaatagcactccatcgatcaatagcaggcatggcgcgccagtcatgtcttgatcaagcacttctgtctccccggatcgagtatcaatagactgctagcgcggttgaaggagaaaacgtccgttacccggctaactacttcgagaaacttagtagcaccattgaagctgcggagtgtttcgctcagcactcccccagtgtagatcaggtcgatgagtcactgcactccccacgggcgaccgtggcagtggctgcgttggcggcctgcctatggggcaacccataggacgctctaaagtggacatggtgcgaagagtctattgagctagttagtagtcctccggcccctgaatgcggctaatcctaactgcggagcacatgcctccaatccagggggtggtgtgtcgtaacgggcaactctgcagcggaaccgactactttgggtgtccgtgtttccttttattcttatattggctgcttatggtgacaattgagagattgttaccatatagctattggattggccacccagtaacgaacagagctctgatatatttgtttgtgggttttgttccactcaccaattgtgcagtccatactctaaagtacattttgattctgaacaatagaaa

SEQ ID NO: 18752 - DNA, 746 bp, synthetic construct
  source 1..746: mol_type = other DNA
ttaaaacagcctgtgggttgtacccacccacagggcccactgggcgccagcacactgattctatggaatctttgtgcgcctgttttataacccttcccccaaactgtaacttagaagaatggcactctatcgatcaatagcaggcatggcgcgccagtcatgtcttgatcaagcacctctgtctccccggatcgagtatcaatagactgctagcgcggttgaaggagaaaacgtccgttacccggctaactacttcgagaaacttagtagcaccattaaagctgcggagtgtttcgctcagcactcccccagtgtagatcaggtcgatgagtcactgcactccccacgggcgaccgtggcagtggctgcgttggcggcctgcctatggggcaacccataggacgctctaaagtggacatggtgcgaagagtctattgagctagttagtagtcctccggcccctgaatgcggctaatcctaactgcggagcacatgccttcaatccagggggtggtgtgtcgtaacgggcaactctgcagcggaaccgactactttgggtgtccgtgtttccttttattcttatattggctgcttatggtgacaattgagagattgttaccatatagctattggattggccatccagtaacgaacagagctctgatatatttgttcgtgggtttcgttccactcaccacttgtgcagtccatactctaaagtacatcttgattctgaacaatagaaa

SEQ ID NO: 18753 - DNA, 745 bp, synthetic construct
  source 1..745: mol_type = other DNA
ttaaaacagcctgtgggttgcacccacccacagggcccactgggcgccagcacactgattctatggaatctttgtgcgcctgttttataaccccttcccaaactgtaacttagaagaatagcactctgtcgatcaatagcaggcatggtgcaccaatcatgcctagatcaagcacttctgtctccccggatcgagtatcaatagactgctagcgcggttgaaggagaaaacgtccgttacccggctaactacttcgagaaacttagtaacaccattgaagctgcagagtgtttcgctcagcactcccccagtgtagatcaggtcgatgagtcactgcactccccacgggcgaccgtggcagtggctgcgttggcggcctgcctatggggcaacccataggacgctctaaagtggacatggtgcgaagagtctattgagctagttagtagtcctccggcccctgaatgcggctaatcctaactgcggagcgcatgccctcaatccagggggtggtgcgtcgtaacgggcaactctgcagcggaaccgactactttgggtgtccgtgtttccttttattcttatattggctgcttatggtgacaactgagagattgttaccatatagctattggattggccatccagtgaccaacagagctttgatatacttgtttgtgggtttcgttccactcaccaatcgtacagtccaaactctaaaatatattttgattctgaacaatagaaa

SEQ ID NO: 18754 - DNA, 770 bp, synthetic construct; identical to SEQ ID NO: 1231
  source 1..770: mol_type = other DNA

SEQ ID NO: 18755 - DNA, 746 bp, synthetic construct
  source 1..746: mol_type = other DNA
ttaaaacagcctgtgggttgcacccactcacaggacccacgcggtgctagcactctggttctacggaacccttgtgcgcctgttttacgccccaccccaacttgtaacttagaagcaattcacaacactgatcaatagtaggcgtggcgcaccagctatgtcttgatcaagcacttctgtttccccggaccgagtatcaatagactgttcacgcggttgaaggagaaagcgtccgttatccggctaactacttcgagaaacccagtaacgccattgaaactgcagagtgtttcgctccacacttcccccgtgtagatcaggtcgatgagtcactgcaatccccacgggcgaccgtggcagtggctgcgctggcggcctgcctatggggcaacccataggacgctctaatgtggacatggtgtgaagagtctattgagctagttagtagtcctccggcccctgaatgcggctaatcctaactgcggagcacatgctctcaatccagagggtagtgtgtcgtaatgggcaactctgcagcggaaccgactactttgggtgtccgtgtttccttttattcttacattggctgcttatggtgacaatcactgaattgttaccatatagctattggactggccatccggtgtgcaacagagctattatatacctatttgttggctttgtaccactaaccttaaaatcaacaaccactctcaactatatattaacccttaatacaatcaaac

SEQ ID NO: 18756 - DNA, 747 bp, synthetic construct; identical to SEQ ID NO: 1144
  source 1..747: mol_type = other DNA

SEQ ID NO: 18757 - DNA, 746 bp, synthetic construct
  source 1..746: mol_type = other DNA
ttaaaacagcctgtgggttgtccccacccacagggcccactgggcgctagcacactgattctgcgggatctttgtgcgcctgttttataacccttccccctaagcagtaacttagaagctttgtacaaccatggccaatagtgggcgtggcgcaccagtcacgtcttggtcaagcatttctgtatccccggactgagtatcaatagactgctcacgtggttgaaggagaaaacgttcgttacccggctaactacttcgagaaacctagtagcaccatgaaagttgcggagtgtttcgctcagcacttcccccgtgtagatcaggtcgatgagtcactgtaaaccccacgggcgaccgtgacagtggctgcgttggcggcctgcccatggggtaacccatgggacgctctaatacggacatggtgcgaagagtctattgagctagttagcagtcctccggcccctgaatgcggctaatcctaactgcggagcgcgcaccctcaacccagggggcagcgtgtcgtaatgggtaactctgcagcggaaccgactactttgggtgtccgtgtttccttttattctttattggctgcttatggtgacaattgaaaagttgttaccatatagctattggattggccatccggcgtctaacagagctattgtttacctattcattggattcgtccctcttaatctcaaggccattcaaactcttgactacatattgctccttaactgtaagaa

SEQ ID NO: 18758 - DNA, 747 bp, synthetic construct
  source 1..747: mol_type = other DNA
ttaaaacagcctgtgggttgcacccactcacaggacccacgtggtgctggcactctggttctacggaacccttgtgcgcctgttttacgtccccaccccaacttgtaacttagaagcaattcacaacactgatcaatagtaggcgtggcgcaccagctatgtcttgatcaagcacttctgtttccccggaccgagtatcaatagactgttcacgcggttgaaggagaaagcgtccgttatccggctaactacttcgagaaacccagtaacgccattgaaactgcagagtgtttcgctccacacttcccccgtgtagatcaggtcgatgagtcactgcaatccccacgggcgaccgtggcagtggctgcgctggcggcctgcctatggggcaacccataggacgctctaatgtggacatggtgtgaagagtctattgagctagttagtagtcctccggcccctgaatgcggctaatcctaactgcggagcacatgccttcaatccagagggtagtgtgtcgtaatgggcaactctgcagcggaaccgactactttgggtgtccgtgtttccttttattcttacattggctgcttatggtgacaatcactgaattgttaccatatagctattggattggccatccggtgtgcaacagagctattatatacctatttgttggctttgtaccactaaccttaaaatcaacaaccactctcaactatatattaacccttaatacaatcaaac

SEQ ID NO: 18759 - DNA, 744 bp, synthetic construct
  source 1..744: mol_type = other DNA
ttaaaacagcctgtgggttgcacccacccacagggcccactgggcgccagcactctggtactgaggtacctttgtgcgcctgtttttacttcccctccccgaagtaacttagaagctgtaaatcaacgatcaatagtaggtgtgacacaccagtcacactttggtcaagcacttctgtttccccggactgagtatcaataggctgctcgcgcggctgaaggagaaaacgttcgttacccgaccaactacttcgagaagcttagtaccaccatgaacgaggcagagtgtttcgttcagcacaaccccagtgtagatcaggctgatgagtcactgcaacccccatgggcgaccatggcagtggctgcgttggcggcctgcccatggagaaatccatgggacgctctaattctgacatggtgcgaagagcctattgagctagttggtagtcctccggcccctgaatgcggctaatcctaactgcggagcacatgctcacaaaccagtgggtggtgtgtcgtaacgggcaactctgcagcggaaccgactactttgggtgtccgtgtttccttttattcttatattggctgcttatggtgacaatcaaagaattgttaccatatagctattggattggccatccagtgtgcaacagagcaattgtttatctattcattggtttcgtacctttatcactgaagtctgtgatcactcttaaattcattttgaccctcaatacaattaaac

SEQ ID NO: 18760 - DNA, 761 bp, synthetic construct
  source 1..761: mol_type = other DNA
tacaaaaaagcaggctttaaaacagcctgtgggttgttcccacccacagggcccactgggcgctagcacactgatcctgcgggatctttgtgcgcctgttttacaacccttcccctaagcagtaacttagaagcttcacactatcatgaccaatagtaggcgtggtgcaccagtcacgtcttggtcaagcacttctgtttccccggactgagtatcaatagactgctcacgcggttgaaggagaaaacgttcgttatccggctaactacttcgagaaacctagtagcatcgtgaaagttgcggagtgtttcgctcagcacttcccccgtgtagatcaggtcgatgagtcactgtgaaccccacgggtgaccgtgacagtggctgcgttggcggcctgcccatggggtaacccatgggacgctctaaaacagacacggtgtgaagagtctattgagctagttagtagtcctccggcccctgaatgcggctaatcctaactgcggagcgcgtaccctcactccagggggcagcgcgtcgtaatgggtaactctgcagcggaaccgactactttgggtgtccgtgtttctttttattctttattggctgcttatggtgacaattgaaaggttgttaccatatagctattggattggccatccggtaaccaacagagctattgtttacctgtttattggatacgtccctctcaatctcaaggccattcaaactcttgattatatattacttctcaactgtaagaa

SEQ ID NO: 18761 - DNA, 724 bp, synthetic construct
  source 1..724: mol_type = other DNA
tgtacccactcacagggcccaccgggcgccagcactctggtactgcggtacctttgtgcgcctgttttatcaccccaccccatctgaaacgtagaagcaatgcacaaccgaccaatagtgggtgtggcgcaccagccacatcttggtcaagcacctctgtttccccgggtttagtatcaataagctgctcacgcggctgaaggagaaaacacccgttacccggccgactacttcaagaaacctagtaccgctatgaacgttgcaaggcgtttcgctcagcacttcccccgtgtagatcaggctgatgagtcaccgcatccctcacgggcgaccgtggcggtggctgcgttggcggcctgcctatgggcttgcccataggacgccttaatactgacatggtgcgaagagtctattgagctagttggtagtcctccggcccctgaatgcggctaatcctaactgcggagcacatactcacaaaccagtgagcggtgtgtcgtaacgggcaactctgcagcggaaccgactactttgggtgtccgtgtttccttttattcttatactggctgcttatggtgacaattaaagaattgttaccatatagctattggattggccatccggtgtctaacagagatattatatacttgtttgttggattcacctcgttgtcatacaaatcccttaacactttgtgctttatcttgagtttgaattcaaaaag

SEQ ID NO: 18762 - DNA, 747 bp, synthetic construct
  source 1..747: mol_type = other DNA
ttaaaacagcctgtgggttgcacccactcacaggacccacgcggtgctagcactctggttctacggaacccttgtgcgcctgttttacgcccccaccccaacttgtaacttagaagcaattcacaacactgatcaatagtaggcgtggcgcaccagctatgtcttgatcaagcacttctgtttccccggaccgagtatcaatagactgttcacgcggttgaaggagaaagcgtccgttatccggctaactacttcgagaaacccagtaacgccattgaaactgcagagtgtttcgctccacacttcccccgtgtagatcaggtcgatgagtcactgcaatccccacgggcgaccgtggcagtggctgcgctggcggcctgcctatggggcaacccataggacgctctaatgtggacatggtgtgaagagtctattgagctagttagtagtcctccggcccctgaatgcggctaatcctaactgcggagcacatgctctcaatccagagggtagtgtgtcgtaatgggcaactctgcagcggaaccgactactttgggtgtccgtgtttccttttattcttacattggctgcttatggtgacaatcactgaattgttaccatatagctattggattggccatccggtgtgcaacagagctattatatacctatttgttggctttgtaccactaaccttaaaatctacaaccactctcaactatatattaacccttaatacaatcaaac

SEQ ID NO: 18763 - DNA, 748 bp, synthetic construct
  source 1..748: mol_type = other DNA
gtgctcttccgatctgtgggttgttcccacccacagggcccactgggcgccagcactctgattccacggaatctttgtgcgcctgttttacaaccctttcccaatctgtaacgtagaagcaatatacactactgatcaatagcaggcatggcgcgccagtcatgtctcgatcaagcacttctgtttccccggactgagtatcaatagactgctcacgcggttgaaggagaaaacgttcgttatccggctaactacttcgagaaacctagtagcaccatagaagctgcagagtgtttcgctcagcacttcccccgtgtagatcaggctgatgagtcactgcaatccccacgggcgaccgtggcagtggctgcgctggcggcctgcctatggggcaacccataggacgctctaatgtggacatggtgcgaagagtctattgagctagttagtagtcctccggcccctgaatgcggctaatcctaactgcggagcacatgccttcaacccaggaggtggtgtgtcgtaacgggcaactctgcagcggaaccgactactttgggtgtccgtgtttctctttattcttatattggctgcttatggtaacaattacggaattgttaccatatagctattggattggccatccggtgtctaatagagctattgtgtacctatttgttggatttactccgctatcatataaatctctgaacactttgtgctttatattgaacttaaacacacgaaa

SEQ ID NO: 18764 - DNA, 724 bp, synthetic construct
  source 1..724: mol_type = other DNA
tgcacccacccacagggcccactgggcgctagcactctggtgtcacggcacctttgtgcgcctgttttatcgccccaccccatacgaaacttagaagtaatacataaccgaccaatagtaggtgtggcgcaccagccacatcttggtcaagcacttctgtttccccgggttgagtatcaataagctgttcacacggctgaaggagaaaatacccgttatccggccaactacttcgagaaacctagtaccgccatgaacgttgcaaggtgtttcgctcagcacttcccccgtgtagatcaggccgatgagtcaccgcattccccacgggtgaccgtggcggtggctgcgttggcggcctgcctatgggttaacccataggacgccttaatactgacatggtgcgaagagtctattgagctagttggtagtcctccggcccctgaatgcggctaatcctaactgcggagcacatactcacaaaccagtgagcggtgtgtcgtaacgggtaactctgcagcggaaccgactactttgggtgtccgtgtttccttttatctttatattggctgcttatggtgacaatcagagaattgttaccatatagctattggattggccatccggtgtctaatagagctattatatacctgtttgttggattcactccgttgacccataaatccctaaacaccttgtgctatattttgaatttaaacacacgaaa

SEQ ID NO: 18765 - DNA, 742 bp, synthetic construct
  source 1..742: mol_type = other DNA
ttaaaacagcctgtgggttgcacccactcacagggcccactgggcgcaagcactctggtacctcggtacctttgtgcgcctgttttataacccccccccagtgaaacttagaagtagcaaaccacgatcaatagcaggcataacgctccagttatgtcttgatcaagcacttctgtttccccggactgagtatcaatagactgctcgcgcggttgaaggagaaaacgttcgttatccggctaactacttcgggaaacctagtagcatcatgaaagttgcggagagcttcgttcagcactcccccagtgtagatcaggtcgatgagtcaccgcgttccccacgggcgaccgtggcggtggctgcgttggcggcctgcccatggggtaacccatggggcgctctaatacggacatggtgcgaagagtctactgagctagttagtagtcctccggcccctgaatgcggctaatcccaactgcggagcacacgcccacaagccagcgggtagtgtgtcgtaacgggcaactctgcagcggaaccgactactttgggtgtccgtgtttctttttatctttatattggctgcttatggtgacaattaaagagttgttaccagatagaaattaccctggccatccggtgtgcaacagagcaattgtttacctatttattggttttgtaccattaaccttgaagtctgtgaccacccttaattatatcttgaccctcaacacagctaaac

SEQ ID NO: 18766 - DNA, 749 bp, synthetic construct; identical to SEQ ID NO: 1191
  source 1..749: mol_type = other DNA

SEQ ID NO: 18767 - DNA, 749 bp, synthetic construct
  source 1..749: mol_type = other DNA
tttaaaacagctctagggttgttcccgccctagaggcccacgtggcggctagcactctggtatcacggtacctttgtgcgcctgttttataccccctccccccatgtaacttagaagctattaaacaaagttcaatagaagggggtacaaaccagtaccaccacgaacaagcacttctgtttccccggtgaagctacatggactgttcccacggttgaaagtggcagatccgttatccgctttggtacttcgagaaacctagtatcatcttggaatcttcgacgcgttgcgctcagcactcaaccccagagtgtagcttaggtcgatgagtctggacgatccccactggcgacagtggtccaggctgcgttggcggcctacctgtggcgaaagccacaggacgctagttgtgaacaaggtgtgaagagtctattgagctaccaaagagtcctccggcccctgaatgcggctaatcccaaccacggagcaagtgctcacaaaccagtgagtggcttgtcgtaacgcgcaagtctgtggcggaaccgactactttgggtgtccgtgtttccttttatttttatcatggctgcttatggtgacaatctaagattgttatcatatagctattggattggccatccggtgactaacagagatatcatatatctatttgttggttttgttaagctagacacaactgcattcaattctcttctcttcatcacacaattgaataatagaaagagaaa

SEQ ID NO: 18768 - DNA, 748 bp, synthetic construct
  source 1..748: mol_type = other DNA
tttaaaacaaagctgtgggttgtacccactcacagggcccactgggcgctagcactctggttctgcggaacctttgtgcgcctgttttataacccctccctcaattcgtaatttagaagtaatacacaccattgatcaacagcaagcgtggcgcgccagccatgtttagatcaagcacttctgttttcccggactgagtatcaatagactgctcacgcggttgaaggagaaaacgttcgttacccggctaactacttcgagaaacctagtagcaccatcgaaactgcagagtgtttcgctcagcactttccccgtgtagatcaggtcgatgagtcactgcaatccccacgggcgaccgtggcagtggctgcgttggcggcctgcctatgggcttacccataggacgctctaatgtggacatggtgtgaagagtctattgagctagttagtagtcctccggcccctgaatgcggctaatcctaactgcggagcgcataccctcaacccagggggtggtgcgtcgtaacgggcaactctgcagcggaaccgactactttgggtgcccgtgtttccttttattcttatattggctgcttatggtgacaattgagagattgttaccatatagctattggattggccatccagtgtctaacagagcaattatatacttgtttgttggattcgttccactatcatatatatccactaacaccttgtactatattataagattgaacacaaggaa

SEQ ID NO: 18769 - DNA, 742 bp, synthetic construct
  source 1..742: mol_type = other DNA
ttaaaacagcctgtgggttgcacccactcacagggcctactgggcgcgagcactctggtacctcggtacctttgtgcgcctgttttacaccccctccccagtgaaacttagaagcaacaaaccacgatcaatagcaggcataacgctccagttatgtcttgatcaagcacttctgtttccccggactgagtatcaatagactgctcgcgcggttgaaggagaaaacgttcgttatccggctagctacttcggaaaacctagtaacaccatgaaagttgcggagagcttcgttcagcactcccccagtgtagatcaggtcgatgagtcaccgcattccccacgggcgaccgtggcggtggctgcgttggcggcctgcccatggggtaacccatggggcgctctaatacggacatggtgcgaagagtctactgagctagttagtagtcctccggcccctgaatgcggctaatcccaactgcggagcacacgcccacaagccagcgggtagtgtgtcgtaacgggtaactctgcagcggaaccgactactttgggtgtccgtgtttccttttatctttatattggctgcttatggtgacaattaaagaattgttaccatatagctattggattggccatccggtgtgcaacagagcaattgtttacttatttattggttttgtaccattaaccttgaagtctgcgaccaccctcaattatatcttaacccttaacacagctaaac

SEQ ID NO: 18770 - DNA, 748 bp, synthetic construct
  source 1..748: mol_type = other DNA
ttaaaacagctctgggggtgttcccaccctagaggcccacgtggcggctagcactctggtatcacggtacctttgtgcgcctgttttatatccctttccccatgcaacttagaagttattaaacaaagttcaatagaagggggtacgaaccagtgccaccacgaacaagcacttctgtttccccggtgaagctgcatagactgtccccacggttgaaagcggcagatccgttatccgctttggtacttcgagaaacccagtaccaccttggaatcttcgatgcgttgcgctcagcactcaaccccagagtgtagcttaggttgatgagtctggacgatcctcactggcgacagtggtccaggctgcgttggcggcctacctgtggtgaaaaccacaggacgctagatgtgaacaaggtgtgaagagtctattgagctaccaaagagtcctccggcccctgaatgcggctaatcctaaccacggagcaagtacccacaaaccagtgggcagcttgtcgtaacgcgcaagtctgtggtggaaccgactactttgggtgtccgtgtttcctttttattttatcatggctgcttatggtgacaatctaagattgttatcatatagctattggattggccatccggtagactaacagagatattatatacctatttgttggttttattagattgaatactatcgcattcaaaactcttctttatatcatacaattgaatagcagaaagagaaa

SEQ ID NO: 18771 - DNA, 747 bp, synthetic construct
  source 1..747: mol_type = other DNA
ttaaaacagctctgggggtgttcccaccctagaggcccacgtggcggctagcactctggtatcacggtacctttgtgcgcctgttttatatccctttccccatgcaacttagaagtttttaaacaaagttcaatagaagggggtacaaaccagtgccaccacgaacaagcacttctgtttccccggtgaagctgcatagactgtccccacggttgaaagcggcagatccgttatccgctttggtacttcgagaaacctagtatcaccttggaatcttcgatgcgttgcgctcagcactcaaccccagagtgtagcttaggttgatgagtctggacgatcctcactggcgacagtggtccaggctgcgttggcggcctacctgtggtgaaaaccacaggacgctagatgtgaacaaggtgtgaagagtctattgagctaccaaagagtcctccggcccctgaatgcggctaatcctaaccacggagcaagtacccacaaaccagtgggcagcttgtcgtaacgcgcaagtctgtggcggaaccgactactttgggtgtccgtgtttcctttttattttatcatggctgcttatggtgacaatctaagattgttatcatatagctattggattggccatccggtgactaacagagatattatatacctatttgttggttttattagattaaatactatcacattcaaaactcttctttatatcatacaattgaacagtagaaagagaaa

SEQ ID NO: 18772 - DNA, 747 bp, synthetic construct
  source 1..747: mol_type = other DNA
ttaaaacagctctggggttgttcccaccctagaggcccacgtggcggctagcactctggtatcacggtacctttgtgcgcctgttttatatccctttccccatgcaacttagaagtttttaaacaaagttcaatagaagggggtacaaaccagtgccaccacgaacaaacacttctgtttccccggtgaagctgcatagactgtccccacggttgaaagcggcagatccgttatccgctttggtacttcgagaaacctagtatcaccttggaatcttcgatgcgttgcgctcagcactcaaccccagagtgtagcttaggttgatgagtctggacgatcctcactggcgacagtggtccaggctgcgttggcggcctacctgtggtgaaaaccacaggacgctagatgtgaacaaggtgtgaagagtctattgagctaccaaagagtcctccggcccctgaatgcggctaatcctaaccacggagcaagtacccacaaaccagtgggcagcttgtcgtaacgcgcaagtctgtggcggaaccgactactttgggtgtccgtgtttcctttttattttatcatggctgcttatggtgacaatctaagattgttatcatatagctattggattggccatccggtgactaacagagatattatatacctatttgttggttttattagattaaatactatcacattcaaaactcttctttatatcatacaattgaacagtagaaagagaaa

SEQ ID NO: 18773 - DNA, 747 bp, synthetic construct
  source 1..747: mol_type = other DNA
ttaaaacagctctggggttgttcccaccctggaggcccacgtggcggctagcactctggtattacggtacctttgtgcgcctgttttatatccctttccccatgcaacttagaagcttttaaacaaagttcaatagaagggggtacaaaccagtgccaccacgaacaagcacttctgtttccccggtgaagctgcatagactgtccccacggttgaaagcggcagatccgttatccgctttggtacttcgagaaacctagtatcaccttggaatcttcgatgcgttgcgctcagcactcaaccccagagtgtagcttaggttgatgagtctggacgatcctcactggcgacagtggtccaggctgcgttggcggcctacctgtggtgaaaaccacaggacgctagatgtgaacaaggtgtgaagagtctattgagctaccaaagagtcctccggcccctgaatgcggctaatcctaaccacggagcaagtacccacaaaccagtgggcagcttgtcgtaacgcgcaagtctgtggcggaaccgactactttgggtgtccgtgtttcctttttattttatcatggctgcttatggtgacaatctaagattgttatcatatagctattggattggccatccggtgactaacagagatattatatacctatttgttggttttattagattgaatactatcacattcaaaacccttctttatatcatacaattgaacagtagaaagggaaa

SEQ ID NO: 18774 - DNA, 742 bp, synthetic construct
  source 1..742: mol_type = other DNA
acagcctgtgggttgcacccacccacaggacccacgtggtgctagcactctggttctacggaacccttgtgcgcctgttttacgccccctccccaattcgcaacttagaagcaattcgcaacaccgatcaatagcaggcatggcgcaccagctatgtcttgatcaagcacttctgtttccccggaccgagtatcaataaactgttcacgcggttgaaggagaaagcgtccgttatccggctaactacttcgagaaacccagtaacgctattgaaactgcagagtgtttcgctccacacttcccccgtgtagatcaggtcgatgagtcactgcaatccccacgggcgaccgtggcagtggctgcgctggcggcctgcctatggggcaacccataggacgctctaatgtggacatggtgtgaagagtctattgagctagttagtagtcctccggcccctgaatgcggctaatcctaactgcggagcacatgccctcaatccagagggtagtgtgtcgtaatgggcaactctgcagcggaaccgactactttgggtgtccgtgtttccttttattctcacattggctgcttatggtgacaatcactgaattgttaccatatagctattggattggccatccggtgtgcaatagagctatcatatacctatttgttggctttgtaccactgaccttaaaatctgtaaccactctcgactatatattgaccctcaatacaatcaaac

SEQ ID NO: 18775 - DNA, 745 bp, synthetic construct
  source 1..745: mol_type = other DNA
ttaaaacagcctgtgggttgttcccactcacagggcccactgggcgctagcacactgattctgcggaatctttgtgcgcctgttttataatccctcccccaagcagcaacttagaagctccatactaccacgtccaatagtaggcgtggcgcaccagtcacgtcttggacaagcacttctgtttccccggactgagtatcaatagactgctcacgcggttgaaggagaaaacgtccgttatccggctaactacttcgagaaacttagtaacaccgtgaaagttgcggagtgtttcgttcagcacttcccccgtgtagatcaggccgatgagtcactgtgaaccccacgggcgaccgtgacagtggctgcgttggcggcctgcccatggggtaacccatgggacgctctaatacagacacggtgcgaagagtctattgagctagttggtagtcctccggcccctgaatgcggctaatcctaactgcggagcgcgcaccctcaatccagggggcagcgcgtcgtaatgggtaactctgcagcggaaccgactactttgggtgtccgtgtttcctgttattccttattggctgcttatggtgacaattgaaaagttgttaccatatagctattggattggccatccggtaaccaacagagctattgtttacctgttcattgggtacgttcctctcaatctcaaggtcattcaaactcttgattatatactacttctcaactgcaagaa

SEQ ID NO: 18776 - DNA, 746 bp, synthetic construct
  source 1..746: mol_type = other DNA
ttaaaacagctgtgggttgcacccactcacaggacccacgtggtgctagcactctggttctacggaacccttgtgcgcctgttttacgccccctccccaatttgtaacttagaagcaatttacaacactgatcaatagcaggcatggcgcgccagctatgtcttgatcaagcacttctgtttccccggaccgagtatcaatagactgttcacacggttgaaggagaaagcgtccgttacccggctaactacttcgagaaacccagtagcgccattgaagctgcagagtgtttcgctccacacttcccccgtgtagatcaggtcgatgagtcactgcaatcctcacgggcgaccgtggcagtggctgcgctggcggcctgcctatggggcgacccataggacgctctaatgtggacatggtgcgaagagtctattgagctagttagtagtcctccggcccctgaatgcggctaatcctaactgcggagcacatgccttcaatccagagggtagtgtgtcgtaatgggcaactctgcagcggaaccgactactttgggtgtccgtgtttccttttattctcacattggctgcttatggtgacaattacagaattgttaccatatagctattggattggccatccggtgtgcaatagagctattatatacctatttgttggctttataccactaaccttaaaatctgtaaccactctcgagtatatattaaccctcaatacaatcaaac

SEQ ID NO: 18777 - DNA, 746 bp, synthetic construct
  source 1..746: mol_type = other DNA
ttaaaacagctgtgggttgcacccactcacaggacccacgtggtgctagcactctggttctacggaacctttgtgcgcctgttttacgccccctccccaatttgcaacttagaagcaatttacaacactgatcaatagcaggcatggcgcaccagctatgtcttgatcaagcacttctgtttccccggaccgagtatcaatagactgttcacacggttgaaggagaaagcgtccgttatccggctaactacttcgagaaatccagtagcgccattgaagctgcagagtgtttcgctccacacttcccccgtgtagatcaggtcgatgagtcactgcaatcctcacgggcgaccgtggcagtggctgcgctggcggcctgcctatggggcaacccataggacgctctaatgtggacatggtgcgaagagtctattgagctagttagtagtcctccggcccctgaatgcggctaatcctaactgcggagcacatgccttcaatccagagggtagtgtgtcgtaatgggcaactctgcagcggaaccgactactttgggtgtccgtgtttccttttattcttacattggctgcttatggtgacaattacagaattgttaccatatagctattggattggccatccggtgtgcaatagagctattatatacctatttgttggctttataccactaaccttaaaatctgcaaccactctcgagtatatattaaccctcaatacaatcaaac

SEQ ID NO: 18778 - DNA, 746 bp, synthetic construct
  source 1..746: mol_type = other DNA
ttaaaacagctgtgggttgcacccactcacaggacccacgtggtgctagcactctggttctacggaacctttgtgcgcctgttttacgccccctccccaatttgtaacttagaagcaatttacaacactgatcaatagcaggcatggcgcaccagctatgtcttgatcaagcacttctgtttccccggaccgagtatcaatagactgttcacacggttgaaggagaaagcgtccgttatccggctaactacttcgagaaacccagtagcgccattgaagctgcagagtgtttcgctccacacttcccccgtgtagatcaggtcgatgagccactgcaatcctcacgggcgaccgtggcagtgactgcgctggcggcctgcctatggggcgacccataggacgctctaatgtggacatggtgcgaagagtctattgagctagttagtagtcctccggcccctgaatgcggctaatcctaactgcggagcacatgccttcaatccagagggtagtgtgtcgtaatgggcaactctgcagcggaaccgactactttgggtgtccgtgtttccttttattctcacactggctgcttatggtgacaattgcagaattgttaccatatagctattggattggccatccggtgtgcaatagagctattatatacctgtttgttggctttataccactagccttaaaatctgtaaccactctcgagtatatattaaccctcaatacaatcaaac

SEQ ID NO: 18779 - DNA, 746 bp, synthetic construct
  source 1..746: mol_type = other DNA
ttaaaacagctgtgggttgcacccactcacaggacccacgtggtgctagcactctggttccacggaacctttgtgcgcctgttttatgccccctccccaatttgtaacttagaagcaatttacaacactgatcaatagcaggcatagcgcaccagctatgtcttgatcaagcacttctgtttccccggaccgagtatcaatagactgttcacacggttaaaggagaaagcgtccgttatccggctaactacttcgagaaacccagtagcaccattgaagctgcagagtgtttcgctccacacttcccccgtgtagatcaggtcgatgagtcactgcaatccccacgggcgaccgtggcagtggctgcgctggcggcctgcctatggggcaacccataggacgctctaatgtggacatggtgcgaagagtctattgagctagttagtagtcctccggcccctgaatgcggctaatcctaactgcggagcacatgccttcaatccagagggtagtgtgtcgtaatgggcaactctgcagcggaaccgactactttgggtgtccgtgtttccttttattctcacattggctgcttatggtgacaattacagaattgttaccatatagctattggattggccatccggtgtgcaatagagctatcatatacctatttgttggctttgtaccactaaccttaaaatccgtaaccactctcgagtatatattaaccctcaatacaatcaaac

SEQ ID NO: 18780 - DNA, 746 bp, synthetic construct
  source 1..746: mol_type = other DNA
ttaaaacagctgtgggttgcacccactcacaggacccacgtggtgctagcactctggttctacggaacctttgtgcgcctgttttacgccccctccccaatttgtaacttagaagcaatttacaacactgatcaatagcaggcatggcgcaccagctatgtcttgatcaagcacttctgtttccccggaccgagtatcaatagactgttcacacggttgaaggagaaagcgtccgttatccggctaactacttcgagaaacccagtagcgccattgaagctgcagagtgtttcgctccacacttcccccgtgtagatcaggtcgatgagtcactgcaatcctcacgggcgaccgtggcagtggctgcgctggcggcctgcctatggggcgacccataggacgctctaatgtggacatggtgcgaagagtctattgagctagttagtagtcctccggcccctgaatgcggctaatcctaactgcggagcacatgccttcaatccagagggtagtgtgtcgtaatgggcaactctgcagcggaaccgactactttgggtgtccgtgtttccttttattctcacattggctgcttatggtgacaattacagaattgttaccatatagctattggattggccatccggtgtgcaatagagctattatatacctatttgttggctttataccactaaccttaaaatctgtaaccactctcgagtatatattaaccctcaatacaatcaaac

SEQ ID NO: 18781 - DNA, 746 bp, synthetic construct
  source 1..746: mol_type = other DNA
ttaaaacagctgtgggttgcacccactcacaggacccacgtggtgctagcactctggttctacggaacctttgtgcgcctgttttacgccccctccccaatttgtaacttagaagcaatttacaacactgatcaatagcaggcatggcgcgccagctatgtcttgatcaagcacttctgtttccccggaccgagtatcaatagactgttcacacggttgaaggagaaagcgtccgttatccggctaactacttcgagaaacccagtagcgccattgaagccgcagagtgtttcgctccacacttcccccgtgtagatcaggtcgatgagtcactgcaatcctcacgggcgaccgtggcagtggctgcgctggcggcctgcctatggggcgacccataggacgctctaatgtggacatggtgcgaagagtccattgagctagttagtagtcctccggcccctgaatgcggctaatcctaactgcggagcacatgccttcaatccagagggtagtgtgtcgtaatgggcaactctgcagcggaaccgactactttgggtgtccgtgtttccttttattctcacattggctgcttatggtgacaattgcagaattgttaccatatagctattggattggccatccggtgtgcaatagagctattatatacctatttgttggctttataccactaatcttaaaatctgtaaccactctcgagtatatattaaccctcaatacgatcaaac

SEQ ID NO: 18782 - DNA, 746 bp, synthetic construct
  source 1..746: mol_type = other DNA
ttaaaacagctgtgggttgcacccactcacaggacccacgtggtgctagcactctggttctacggaacctttgtgcgcctgttttacgccccctccccaatttgtaacttagaagcaatttacaacactgatcaacagcaggcatggcgcaccagctatgtcttgatcaagcacttctgtttccccggaccgagtatcaatagactgttcacacggttgaaggagaaagcgtccgttatccggctaactacttcgagaaacccagtagcgccattgaagctgcagagtgtttcgctccacacttcccccgtgtagatcaggtcgatgagtcactgcaatcctcacgggcgaccgtggcagtggctgcgctggcggcctgcctatggggcgacccataggacgctctaatgtggacatggtgcgaagagtctattgagctagttagtagtcctccggcccctgaatgcggctaatcctaactgcggagcacatgccttcaatccagagggtagtgtgtcgtaatgggcaactctgcagcggaaccgactactttgggtgtccgtgtttccttttattctcacactggctgcttatggtgacaattacagaattgttaccatatagctattggattggccatccggtgtgcaatagagctattatatacctgtttgttggctttataccactaaccttaaaatctgtaaccactctcgagtatatattaaccctcaatacaatcaaac

SEQ ID NO: 18783 - DNA, 744 bp, synthetic construct
  source 1..744: mol_type = other DNA
ttaaaacagctgtgggttgcacccacccacagggcccactgggcgccagcactctggtactaaggtacctttgtgcgcctgtttttacctcccttcccccgaagtaacttagaagctttgaaccaacgatcaacagtaggtgtgacataccagtcatatctcgatcaagcacttctgtttccccggactgagtatcaataggctgctcgcgcggctgaaagagaaaacgttcgttacccggccagctacttcgagaagcttagtaccaccatgaacgaggcagagcgtttcgttcggcacaaccccagtgtagatcaggctgatgagtcactgcaatccccatgggcgaccatggcagtggctgcgctggcggcctgcccatggagaaatccatgggacgctctaattttgacatggtgcgaagagcctattgagctagctggtagtcctccggcccctgaatgcggctaatcctaactgcggagcgcacacccacaaaccagtgggcagtgtgtcgtaacgggcaactctgcagcggaaccgactactttgggtgtccgtgtttccttttattcttatattggctgcttatggtgacaatcgaagagttgttaccatatagctattggattggccatccggtgtgcaacagagcaattgtctacctgtttactggttttgtaccactgacactaaagtctgtgatcacccttaaatttatcttgaccctcaacacagtcaagc

SEQ ID NO: 18784 - DNA, 742 bp, synthetic construct
  source 1..742: mol_type = other DNA
aaacagcctgtgggttgttcccacccacggggcccactgggcgctagcacactgattctgcgggatctttgtgcgcctgttttataacccttcccctaagcagcaacttagaagctttgcacaatcacgaccaatagtgggcgtggcgcgccagtcacgtcttggtcaagcacttctgtatccccggactgagtatcaatagactgctcacgcggttgaaggagaaaacgttcgttacccggctaactacttcgagaaacctagtagcaccatgaaagttgcggagtgtttcgctcagcacttcccccgtgtagatcaggtcgatgagtcactgtaaaccccacgggcgaccgtgacagtggctgcgttggcggcctgcccatggggtaacccatgggacgctctaatacagacatggtgcgaagagtctattgagctagttagtagtcctccggcccctgaatgcggctaatcctaactgcggagcgcgcaccctcaatccagggggcggcgcgtcgtaatgggtaactctgcagcggaaccgactactttgggtgtccgtgtttccttttattctttattggctgcttatggtgacaattgagaagttgttaccatatagctattggattggccatccggtgtctaacagagctattgtctacctatttattggatacgtccctcttaatctcaaggtcattcaaactcttgattatatattgttccttaactgtaagaa

SEQ ID NO: 18785 - DNA, 731 bp, synthetic construct
  source 1..731: mol_type = other DNA
ttcaaacagcctgtgggttgcacccactcacagggcccacgtggcgctagcactctggttctacggaacctttgtgcgcctgttttacgccccttccccaatttgcaacttagaagcaatacacaacactgatcaacaggcggcatggcgcaccagctatgtcttgatcaagcacttctgtttccccggaccgagtatcaatagactgctcacgcggttgaaggagaaagcgtccgttatccggctaactacttcgaaaaacctagtaacaccattgaagctgcagagtgtttcgctcggcacttcccccgtgtagatcaggtcgatgagtcactgcaatccccacgggtgaccgtggcagtggctgcgttggcggcctgcctatggggcaacccataggacgctctaatgcggacatggtgcgaagagtctattgagctagttagtagtcctccggcccctgaatgcggctaatcctaactgcggagcacatgccttcaacccagagggtagtgtgtcgtaatgggcaactctgcagcggaaccgactactttgggtgtccgtgtttccttttattcttatattggctgcttatggtgacaattacagaattgttaccatatagctattggattggccatccggtgtgcaatagagctattatatacctatttttcttttggctttgtatcactaaccttaaaatctataatcaccctcgactttatagc

SEQ ID NO: 18786 - DNA, 744 bp, synthetic construct
  source 1..744: mol_type = other DNA
aaacagcctgtgggttgcacccacccacaggacccacgcggtgctagcactctggttctacgggacctttgtgcgcctgttttacgtcccctccccaatttgtaacttagaagcaatttgcaacactgatcagtagcaggcatagcgcaccagctatgtcttgatcaagcacttctgtttccccggaccgagtatcaatagactgttcacgcggttgaaggagaaagcgtccgttatccggctaactacttcgagaaacccagtagcgccattgaaactgcagagtgtttcgctccacacttcccccgtgtagatcaggtcgatgagtcactgcaatccccacgggcgaccgtggcagtggctgcgctggcggcctgcctatggggcaacccataggacgctctaatgtggacatggtgtgaagagtctattgagctagttagtagtcctccggcccctgaatgcggctaatcctaactgcggagcacatgccttcaatccagagggtagtgtgtcgtaatgggcaactctgcagcggaaccgactactttgggtgtccgtgtttccttttattctcacattggctgcttatggtgacaattacggaattgttaccatatagctattggattggccatccggtgtgcaatagagctattatatacctatttgttggctttgtaccactgaccttaaaatctataaccactctcgagtgtatattaacccttaatacaatcaaac

SEQ ID NO: 18787 - DNA, 738 bp, synthetic construct
  source 1..738: mol_type = other DNA
cctgtgggttgcacccacccacaggacccacgcggtgctagcactctggtcccacgggacctttgtgcgcctgttttacgtcccctccccaattcgtaacttagaagcaatttgcaacactgatcagtagcaggcatggcgcaccagctatgtcttgatcaagcacttctgtttccccggaccgagtatcaatagactgttcacacggttgaaggagaaagcgtccgttatccggctaactacttcgagaaacctagtagcgccattgaaactgcagagtgtttcgctccacacttcccccgtgtagatcaggttgatgagtcactgcaatccccacgggcgaccgtggcagtggctgcgctggcggcctgcctatggggcaacccataggacgctctaatgtggacatggtgcgaagagtctattgagctagttagtagtcctccggcccctgaatgcggctaatcctaactgtggagcacatgccttcaatccagagggtagtgtgtcgtaatgggcaactctgcagcggaaccgactactttgggtgtccgtgtttccttttattcttacattggctgcttatggtgacaattacagaattgttaccatatagctattggattggccatccggtgtgtaatagagctattatatacctatttgttggctttgtaccactgaccttaaaatctgtaaccactctcgagtgtatattaacccttaatacaatcaaac

SEQ ID NO: 18788 - DNA, 742 bp, synthetic construct
  source 1..742: mol_type = other DNA
ttaaaacagctgtgggttgcacccacccacggggcctactgggcgctagcactctggcactaaggtacctttgtgcgcctgtttttacttcctttccccgaagtaacttagaagttgtgtaccaacgatcaatagcaggtgtgacacaccagtcatatcttgatcaagtacttctgtttccccggaccgagtatcaataggctgctcgcgcggctgaaggagaaaacgttcgttacccgaccaactacttcgagaagcttagtaccaccatgaacgaggcagagtgtttcgttcagcacaaccccagtgtagatcaggctgatgagtcactgcaacccccatgggcgaccatggcagtggctgcgttggcggcctgcccatggagaaatccatgggacgctctaattctgacatggtgtgaagagcctattgagctagttggtagtcctccggcccctgaatgcggctaatcctaactgcggagcacatgctcacaaaccagtgggtggtgtgtcgtaatgggcaactctgcagcggaaccgactactttgggtgtccgtgtttccttttattcttatgttggctgcttatggtgacaatcaaagaattgttaccatatagctattggattggccatccggtgtgaacagagcaattgtttacctatttattggtttcgtaccactatcactgaactctgtggtcactctcaaattcattttgaccctcaactcaatcaaac

SEQ ID NO: 18789 - DNA, 742 bp, synthetic construct
  source 1..742: mol_type = other DNA
ttaaaacagctgtgggttgcacccacccacagggcctactgggcgctagcactctggcactgaggtacctttgtgcgcctgttttatttcccttccccgaagtaacttagaagctgtgaactaacgatcaatagtgggtgtgacgcaccagtcacatcttgatcaagcacttctgtttccccggactgagtatcaataggctgctcgcgcggctgaaggagaaaacgttcgttacccgaccaactacttcgagaagcttagtaccaccatgaacgaggcagagtgtttcgttcagcacaaccccagtgtagatcaggctgatgagtcactgcaacccccatgggcgaccatggcagtggctgcgttggcggcctgcccatggaaaaatccatgggacgctctaattctgacatggtgtgaagagcctattgagctagctggtagtcctccggcccctgaatgcggctaatcccaactgtggagcacatgctcacaaaccagtgggtggtgtgtcgtaacgggcaactctgcagcggaaccgactactttgggtgtccgtgtttccttttattcttatgttggctgcttatggtgacaatcaaagaattgttaccatatagctattggattggccatccggtgtgcaacagagcaatcgtctacctatttgttggttttgtaccattatcactgaaggctgtgatcactctcaaattcattttgaccctcaactcaatcaaac

SEQ ID NO: 18790 - DNA, 742 bp, synthetic construct
  source 1..742: mol_type = other DNA
ttaaaacagctgtgggttgcacccacccacagggcctactgggcgctagcactctggcactgaggtacctttgtgcgcctgttttatttcccttccccgaagtaacttagaagctgtgaactaacgatcaatagtgggtgtgacgcaccagtcacatcttgatcaagcacttctgtttccccggactgagtatcaataggctgctcgcgcggctgaaggagaaaacgttcgttacccggccaactacttcgagaagcttagtaccaccatgaacgaggcagagtgtttcgttcagcacaaccccagtgtagatcaggctgatgagtcactgcaacccccatgggcgaccatggcagtggctgcgttggcggcctgcccatggaaaaatccatgggacgctctaattctgacatggtgtgaagagcctattgagctagctggtagtcctccggcccctgaatgcggctaatcccaactgcggagcacatgctcacaaaccagtgggtggtgtgtcgtaacgggtaactctgcagcggaaccgactactttgggtgtccgtgtttccttttattcttatgttggctgcttatggtgacaatcaaagaattgttaccatatagctattggattggccatccggtgtgcaacagagcaatcgtctacctatttgttggttttgtaccattatcactgaaggctgtgatcactctcaaattcattttgaccctcaactcaatcaaac

SEQ ID NO: 18791 - DNA, 742 bp, synthetic construct
  source 1..742: mol_type = other DNA
ttaaaacagctgtgggttgcacccacccacagggcctactgggcgctagcactctggcactgaggtacctttgtgcgcctgttttatttcccttccccgaagtaacttagaagctgtgaactaacgatcaatagtgggtgtgacgcaccagtcacatcttgatcaagcacttctgtttccccggactgagtatcaataggctgctcgcgcggctgaaggagaaaacgttcgttacccgaccaactacttcgagaagcttagtaccaccatgaacgaggcagagtgtttcgttcagcacaaccccagtgtagatcaggctgatgagtcactgcaacccccatgggcgaccatggcagtggctgcgttggcggcctgcccatggaaaaatccatgggacgctctaattctgacatggtgtgaagagcctattgagctagctggtagtcctccggcccctgaatgcggctaatcctaactgcggagcacatgctcacaaaccagtgggtggtgtgtcgtaacgggcaactctgcagcggaaccgactactttgggtgtccgtgtttccttttattcttatgttggctgcttatggtgacaatcaaagaattgttaccatatagctattggattggccatccggtgtgcaacagagcaatcgtctacctatttgttggttttgtaccattatcactgaaggctgtgatcactctcaaattcatcttgaccctcaactcaatcaaac

SEQ ID NO: 18792 - DNA, 742 bp, synthetic construct
  source 1..742: mol_type = other DNA
ttaaaacagctgtgggttgcacccacccacagggcctactgggcgctagcactctggcactgaggtacctttgtgcgcctgttttatttcccttccccgaagtaacttagaagctgtgaactaacgatcaatagtgggtgtgacgcaccagtcacatcttgatcaagcacttctgtttccccggactgagtatcaataggctgctcgcgcggctgaaggagaaaacgttcgttacccggccaactacttcgagaagcttagtaccaccatgaacgaggcagagtgtttcgttcagcacaaccccagtgtagatcaggctgatgagtcactgcaacccccatgggcgaccatggcagtggctgcgttggcggcctgcccatggaaaaatccatgggacgctctaattctgacatggtgtgaagagcctattgagctagctggtagtcctccggcccctgaatgcggctaatcccaactgcggagcacatgctcacaaaccagtgggtggtgtgtcgtaacgggcaactctgcagcggaaccgactactttgggtgtccgtgtttccttttattcttatgttggctgcttatggtgacaatcaaagaattgttaccatatagctattggattggccatccggtgtgcaacagagcaatcgtctacctatttgttggttttgtaccattatcactgaaggctgtgatcactctcaaattcattttgaccctcaactcaatcaaac

SEQ ID NO: 18793 - DNA, 742 bp, synthetic construct
  source 1..742: mol_type = other DNA
ttaaaacagctgtgggttgcacccacccacagggcctactgggcgctagcactctggcactgaggtacctttgtgcgcctgttttatttcccttccccgaagtaacttagaagctgtgaactaacgatcaatagtgggtgtgacgcaccagtcacatcttgatcaagcacttctgtttccccggactgagtatcaataggctgctcgcgcggctgaaggagaaaacgttcgttacccgaccaactacttcgagaagcttagtaccaccatgaacgaggcagagtgtttcgttcagcacaaccccagtgtagatcaggctgatgagtcactgcaacccccatgggcgaccatggcagtggctgcgttggcggcctgcccatggaaaaatccatgggacgctctaattctgacatggtgtgaagagcctattgagctagctggtagtcctccggcccctgaatgcggctaatcccaactgcggagcacatgctcacaaaccagtgggtggtgtgtcgtaacgggcaactctgcagcggaaccgactactttgggtgtccgtgtttccttttattcttatgttggctgcttatggtgacaatcaaagaattgttaccatatagctattggattggccatccggtgtgcaacagagcaatcgtctacctatttgttggttttgtaccattatcactgaaggctgtgatcactctcaaattcattttgaccctcaactcaatcaaac

SEQ ID NO: 18794 - DNA, 742 bp, synthetic construct
  source 1..742: mol_type = other DNA
ttaaaacagctgtgggttgcacccacccacagggcctactgggcgctagcactctggcactgaggtacctttgtgcgcctgttttatttcccttccccgaagtaacttagaagctgtgaactaacggtcaatagtgggtgtgacgcaccagtcacatcttgatcaagcacttctgtttccccggactgagtatcaataggctgctcgcgcggctgaaggagaaaacgttcgttacccgaccaactacttcgagaagcttagtaccaccatgaacgaggcagagtgtttcgttcagcacaaccccagtgtagatcaggctgatgagtcactgcaacccccatgggcgaccatggcagtggctgcgttggcggcctgcccatggaaaaatccatgggacgctctaattctgacatggtgtgaagagcctattgagctagctggtagtcctccggcccctgaatgcggctaatcccaactgcggagcacatgctcacaaaccagtgggtggtgtgtcgtaacgggcaactctgcagcggaaccgactactttgggtgtccgtgtttccttttattcttatgttggctgcttatggtgacaatcaaagaattgttaccatatagctattggattggccatccggtgtgcaacagagcaatcgtctacctatttgttggttttgtaccattatcactgaaggctgtgatcactctcaaattcattttgaccctcaactcaatcaaac

SEQ ID NO: 18795 - DNA, 738 bp, synthetic construct
  source 1..738: mol_type = other DNA
cctgtgggttgcacccactcacaggacccacgcggtgctagcactctggttctacggaacccttgtgcgcctgttttacgtccccaccccaacttgtaacttagaagcaattcacaacactgatcaatagtaggcgtggcgcaccagctatgtcttgatcaagcatttctgtttccccggaccgagtatcaatagactgttcacgcggttgaaggagaaagcgtccgttatccggctaactacttcgagaaacccagtaacgccattgaaactgcagagtgtttcgctccacacttcccccgtgtagatcaggtcgatgagtcactgcaatccccacgggcgaccgtggcagtggctgcgctggcggcctgcctatggggcaacccataggacgctctaatgtggacatggtgtgaagagtctattgagctagttagtagtcctccggcccctgaatgcggctaatcctaactgcggagcacatgctctcaatccagagggtagtgtgtcgtaatgggcaactctgcagcggaaccgactactttgggtgtccgtgtttccttttattcttacactggctgcttatggtgacaatcactgaattgttaccatatagctattggattggccatccggtgtgcaacagagctattatatacctatttgttggctttgtaccactaaccttaaaatctacaaccactctcaactatatattaacccttaatacaatcaaac

SEQ ID NO: 18796 - DNA, 737 bp, synthetic construct
  source 1..737: mol_type = other DNA
ctgtgggttgtacccgcccacaggacccacgtggtgctagcactctggttctacggaacccttgtgcgcctgttttacgccccctccccaatttgcaacttagaagcaattcgcaacaccgatcaatagcaggcatggcgcaccagctatgtcttgatcaagcacttctgtttccccggaccgagtatcaataaactgttcacgcggttgaaggagaaagcgtccgttatccggctaactacttcgagaaacccagtaacaccattgaaactgcagagtgtttcgctccacacttcccccgtgtagatcaggtcgatgagtcactgcaatccccacgggcgaccgtggcagtggctgcgctggcggcctgcctatggggcaacccataggacgctctaatgtggacatggtgtgaagagtctattgagctagttagtagtcctccggcccctgaatgcggctaatcctaactgcggagcacatgccctcaatccagagggtagtgtgtcgtaatgggcaactctgcagcggaaccgactactttgggtgtccgtgtttccttttattctcacattggctgcttatggtgacaatcactgaattgttaccatatagctattggattggccttccggtgtgcaatagagctatcatatacctatttgttggctttgtaccactgaccttaaaatctgtaaccactctcgactatatattgaccctcaatacaatcaaac

SEQ ID NO: 18797 - DNA, 745 bp, synthetic construct
  source 1..745: mol_type = other DNA
ttaaaacagcctgtgggttgcacccacccacagggcctactgggcgctagcactctggcactaaggtacctttgtgcgcctgtttttacttcccttccccaaagtaacttagaagttatgtaccaacgatcaacagcaggtgtgacgcaccagtcatatcttgatcaagcacttctgtttccccggaccgagtatcaataggctgctcgcgcggctgaaggagaaaacgttcgttacccgaccaactacttcgagaagcttagtaccaccatgaacgaggcagagtgtttcgttcagcacaaccccagtgtagatcaggctgatgagtcactgcaacccccatgggcgaccatggcagtggctgcgttggcggcctgcccatgaagaaattcatgggacgctctaattctgacatggtgtgaagagcctattgagctagttggtagtcctccggcccctgaatgcggctaatcctaactgcggagcacatgcccacaaaccagtgggtggtgtgtcgtaacgggcaactctgcagcggaaccgactactttgggtgtccgtgtttcctttttattcttatgttggctgcttatggtgacaatcagagaattgttgccatatagctattggattggccatccggtgtgtaacagagcaattgtttacctatttattggtttcgtaccactatcattaaagtctgtgaccactctcaagttcattttgaccctcaactcaatcaaac

SEQ ID NO: 18798 - DNA, 741 bp, synthetic construct
  source 1..741: mol_type = other DNA
ttaaaacagcttgggttgcacccacccacagggcctactgggcgctagcactctggcactgaggtacctttgtgcgcctgttttatttcccttccccgaagtaacttagaagctgtgaactaacgatcaatagtgggtgtgacgcaccagtcacatcttgatcaagcacttctgtttccccggactgagtatcaataggctgctcgcgcggctgaaggagaaaacgttcgttacccgaccaactacttcgagaagcttagtaccaccatgaacgaggcagagtgtttcgttcagcacaaccccagtgtagatcaggctgatgagtcactgcaacccccatgggcgaccatggcagtggctgcgttggcggcctgcccatggaaaaatccatgggacgctctaattctgacatggtgtgaagagcctattgagctagctggtaatcctccggcccctgaatgcggctaatcccaactgcggagcacatgctcacaaaccagtgggtggtgtgtcgtaacgggcaactctgcagcggaaccgactactttgggtgtccgtgtttccttttattcttatgttggctgcttatggtgacaatcaaagaattgttaccatatagctattggattggccatccggtgtgcaacagagcaatcgtctacctatttgttggttttgtaccattatcactgaaggctgtgatcactctcaaattcattttgaccctcaactcaatcaaac

SEQ ID NO: 18799 - DNA, 747 bp, synthetic construct
  source 1..747: mol_type = other DNA
ttaaaacagcctgtgggttgcacccactcacaggacccacgtggtgctagcactctggttctacggaacccttgtgcgcctgttttacgcccccaccccaacttgtaacttagaagcaattcacaacactgatcaatagtaggcgtggcgcaccagctatgtcttgatcaagcacttctgtttccccggaccgagtatcaatagactgttcacgcggttgaaggagaaagcgtccgttatccggctaactacttcgagaaacccagtaacgccattgaaactgcagagtgtttcgctccacacttcccccgtgtagatcaggtcgatgagtcactgcaatccccacgggcgaccgtggcagtggctgcgctggcggcctgcctatggggcaacccataggacgctctaatgtggacatggtgtgaagagtctattgagctagttagtagtcctccggcccctgaatgcggctaatcctaactgcggagcacatgctctcaatccagagggtagtgtgtcgtaatgggcaactctgcagcggaaccgactactttgggtgtccgtgtttccttttattcttacattggctgcttatggtgacaatcactgaattgttaccatatagctattggattggccatccggtgtgcaacagagctattatatacctatttgttggctttgtaccactaaccttaaaatctacaaccactctcaactatatattaacccttaatacaatcaaac

SEQ ID NO: 18800 - DNA, 739 bp, synthetic construct
  source 1..739: mol_type = other DNA
gcctgtgggttgcacccacccacaggacccacgcggtgctagcactctggttctacgggacctttgtgcgcctgttttacgtcccctccccaatttgtaacttagaagcaatttgcgacactgatcagtagcaggcatagcgcaccagctatgtcttgatcaagcacttctgtttccccggaccgagtatcaatagactgttcacacggttgaaggagaaagcgtccgttatccggctaactacttcgagaaacccagtagcgccattgaaactgcagagtgtttcgctccacacttcccccgtgtagatcaggtcgatgagtcactgcaatccccacgggcgaccgtggcagtggctgcgctggcggcctgcctatggggcaacccataggacgctctaatgtggacatggtgtgaagagtctattgagctagttagtagtcctccggcccctgaatgcggctaatcctaactgcggagcacatgccttcaatccagagggtagtgtgtcgtaatgggcaactctgcagcggaaccgactactttgggtgtccgtgtttccttttattctcacattggctgcttatggtgacaattacggaattgttaccatatagctattggattggccatccggtgtacaatagagctattatatacctatttgttggctttgtaccactgaccttaaaatctatagccactctcgagtgtatattaacccttaatacaatcaaac

SEQ ID NO: 18801 - DNA, 738 bp, synthetic construct
  source 1..738: mol_type = other DNA
cctgtgggttgcacccacccacaggacccacgcggtgctagcactctggttctacgggacctttgtgcgcctgttttatgtcccctccccaatttgtaacttagaagcaatttgcaacactgatcagtagtaggcatagcgcaccagctatgtcttgatcaagcacttctgtttccccggaccgagtatcaatagactgttcacacggttgaaggagaaagcgtccgttatccggctaactacttcgagaaacccagtagcgccattgaaactgcagagtgtttcgctccacacttcccccgtgtagatcaggtcgatgagtcactgcaatccccacgggcgaccgtggcagtggctgcgctggcggcctgcctatggggcaacccataggacgctctaatgtggacatggtgtgaagagtctattgagctagttagtagtcctccggcccctgaatgcggctaatcctaactgcggagcacatgccttcaatccagagggtagtgtgtcgtaatgggcaactctgcagcggaaccgactactttgggtgtccgtgtttccttttattctcacattggctgcttatggtgacaattacggaattgttaccatatagctattggattggccatccggtgtgcaatagagctattatatacctatttgttggctttgtaccactgaccttaaaatctataaccactctcgagtgtatattaacccttaatacaatcaaac

SEQ ID NO: 18802 - DNA, 747 bp, synthetic construct
  source 1..747: mol_type = other DNA
ttaaaacagcctgtgggttgcacccactcacaggacccacgcggtgctagcactctggttctccgggacctttgtgcgcctgttttacgtcccctccccaatttgtaacttagaagcaatttgcaacactgatcagtagcaggcatagcgcaccagctatgtcttgatcaagcacttctgtttccccggaccgagtatcaatagactgttcacacggttgaaggagaaagcgtccgttatccggctaactacttcgagaaacccagtagcgccattgaaactgcagagtgtttcgctccacacttcccccgtgtagatcaggtcgatgagtcactgcaatccccacgggcgaccgtggcagtggctgcgctggcggcctgcctatggggcaacccataggacgctctaatgtggacatggtgtgaagagtctattgagctagttagtagtcctccggcccctgaatgcggctaatcctaactgcggagcacatgccttcaatccagggggtagtgtgtcgtaatgggcaactctgcagcggaaccgactactttgggtgtccgtgtttcctcttattctcacattggctgcttatggtgacaattacggaattgttaccatatagctattggattggccatccggtgtgcaatagagctattatatatctatttgttggctttgtaccactgaccttaaaatctataaccactcttgagtgtatattaacccttaatacaatcaaac

SEQ ID NO: 18803 - DNA, 737 bp, synthetic construct
  source 1..737: mol_type = other DNA
gcctgtgggttgtccccacccacagggcccactgggcgctagcacactgattctgcggaatctttgtgcgcctgttttataatccctcccccaagcagcaacttagaagctccatactaccacgtccaatagtaggcgtggcgcaccagtcacgtcttggacaagcacttctgtttccccggactgagtatcaatagactgctcacgcggttgaaggagaaaacgtccgttatccggctaactacttcgagaaacttagtaacaccgtgaaagttgcggagtgtttcgttcagcacttcccccgtgtagatcaggccgatgagtcactgtgaaccccacgggcgaccgtgacagtggctgcgttggcggcctgcccatggggtaacccatgggacgctctaatacagacacggtgcgaagagtctattgagctagttggtagtcctccggcccctgaatgcggctaatcctaactgcggagcgcgcaccctcaatccagggggcagcgcgtcgtaatgggtaactctgcagcggaaccgactactttgggtgtccgtgtttcctgttattccttattggctgcttatggtgacaattgaaaagttgttaccatatagctattggattggccatccggtaaccaacagagctattgtttacctgttcattgggtacgttcctctcaatctcaaggtcattcaaactcttgattatatactacttctcaactgcaagaa

SEQ ID NO: 18804 - DNA, 741 bp, synthetic construct
  source 1..741: mol_type = other DNA
gtgctcttccgatctgttgtacccacccacagggcccactgggcgctagcactctggtaccacggtacctttgtgcgcctgttttatcacccttcccctcatgaaacttagaagtaatacataaccgaccaatagtaggtgtggcgcgccagccgcatcttggtcaagcacttctgtttccccggattgagtatcaataagctgttcacacggctgaaggagaaaacatccgttacccggccaactacttcgagaaacctagtaccactatcaaagttgcaaggcgtttcgctcagcacttcccccgtgtagatcaggccgatgagtcaccgcattccccacgggcgaccgtggcggtggctgcgttggcggcctgcctatgggtcagcccataggacgccttaatactgacatggtgcgaagagtctattgagctagttggtagtcctccggcccctgaatgcggctaatcctaactgcggagcacatactcacaagccagtgagcggtgtgtcgtaacgggtaactctgcagcggaaccgactactttgggagtccgtgtttccttttatctttatgttggctgcttatggtgacaatcagagaattgttaccatatagctattggattggccatccggtgtctaatagagctattgtatatctgtttgttgggttcaccccgttgtcgtataaatccttaaatactttgttctttatcctgaacttaaatacaagaaa

SEQ ID NO: 18805 - DNA, 744 bp, synthetic construct
  source 1..744: mol_type = other DNA
ttaaaacagcctgtgggttgttcccacccacagggcccactgggcgctagcacactgattctgcgggatctttgtgcgcctgttttataaccctcccctaagcagtaacttagaagcttcacacaatcacgaccaatagtaggcgtggcgcgccagtcacgtcttggtcaagcacttctgttcccccggactgagtatcaatagactgctcacgcggttgaaggagaaaacgttcgttatccggctaactacttcgagaaacctagtagcaccgtgaaagttgcggagcgtttcgctcagcacttcccccgtgtagatcaggtcgatgagtcactgtaaaccccacgggcgaccgtgacagtggctgcgttggcggcctgcccatggggtaacccatgggacgctctaatacagacatggtgtgaagagtctattgagctagttagtagtcctccggcccctgaatgcggctaatcctaactgcggagcacgcaccctcaacccagggggcggcgtgtcgtaatgggtaactctgcagcggaaccgactactttgggtgtccgtgtttccttttattccttactggctgcttatggtgacaattgaaaagttgttaccatatagctattggattggccatccggtgtctaacagagctatagtttacctatttattggatacgtccctcttaatctcaaggccattcaaactcttaattatatattgctccttaactgtaagaa

SEQ ID NO: 18806 - DNA, 737 bp, synthetic construct
  source 1..737: mol_type = other DNA
ctgtgggttgcacccacccacaggacccacgtggtgctagcactctggttctacggaacccttgtgcgcctgttttacgccccctccccaattcgcaacttagaagcaattcgcaacaccgatcaatagcaggcatggcgcaccagctatgtcttgatcaagcacttctgtttccccggaccgagtatcaataaactgttcacgcggttgaaggagaaagcgtccgttatccggctaactacttcgagaaacccagtaacgctattgaaactgcagagtgtttcgctccacacttcccccgtgtagatcaggtcgatgagtcactgcaatccccacgggcgaccgtggcagtggctgcgctggcggcctgcctatggggcaacccataggacgctctaatgtggacatggtgtgaagagtctattgagctagttagtagtcctccggcccctgaatgcggctaatcctaactgcggagcacatgccctcaatccagagggtagtgtgtcgtaatgggcaactctgcagcggaaccgactactttgggtgtccgtgtttccttttattctcacattggctgcttatggtgacaatcactgaattgttaccatatagctattggattggccatccggtgtgcaatagagctatcatatacctatttgttggctttgtaccactgaccttaaaatctgtaaccactctcgactatatattgaccctcaatacaatcaaac

SEQ ID NO: 18807 - DNA, 738 bp, synthetic construct
  source 1..738: mol_type = other DNA
cctgtgggttgcacccacccacaggacccacgcggtgctagcactctggttctacgggacctttgtgcgcctgttttacgtcccctccccaattcgtaacttagaagcaatttgcaacattgatcagtagcaggcatggcgcaccagctatgtcttgatcaagcacttctgtttccccggaccgagtatcaatagactgttcacacggttgaaggagaaagcgtccgttatccggctaactacttcgagaaacccagtagcgccattgaaactgcagagtgtttcgctccgcacttcccccgtgtagatcaggtcgatgagtcactgcaatccccacgggcgaccgtggcagtggctgcgctggcggcctgcctatggggcaacccataggacgctctaatgtggacatggtgcgaagagtctattgagctagttagtagtcctccggcccctgaatgcggctaatcctaactgcggagcacatgccttcaatccagagggtagtgtgtcgtaatgggtaactctgcagcggaaccgactactttgggtgtccgtgtttccttttattcttatattggctgcttatggtgacaattacagaattgttaccatatagctactggattggccatccggtgtgtaatagagctatcatatacctatttgttggctttgtaccactgacattaaaatctgtaaccactctcgagtgtatattaactcttaatacgatcaaac

SEQ ID NO: 18808 - DNA, 734 bp, synthetic construct
  source 1..734: mol_type = other DNA
tgggttgcacccacccacaggacccacgcggtgctagcactctggttctacgggacctttgtgcgcctgttttacgtcccctccccaatttgtaacttagaagcaatttgcaacactgatcagtagcaggcatagcgcaccagctatgtcttgatcaagcacttctgtttccccggaccgagtatcaatagactgttcacacggttgaaggagaaagcgtccgttatccggctaactacttcgagaaacccagtagcgccattgaaactgcagagtgtttcgctccacacttcccccgtgtagatcaggtcgatgagtcactgcaatccccacgggcgaccgtggcagtggctgcgctggcggcctgcctatggggcaacccataggacgctctaatgtggacatggtgtgaagagtctattgagctagttggtagtcctccggcccctgaatgcggctaatcctaactgcggagcacatgccttcaatccagagggtagtgtgtcgtaatgggcaactctgcagcggaaccgactactttgggtgtccgtgtttccttttattctcacattggctgcttatggtgacaattacggaattgttaccatatagctattggattggccatccggtgtgcaatagagctattatatacctatttgttggctttgtaccactgaccttaaaatctacaaccactctcgagtgtatattaacccttaatacaatcaaac

SEQ ID NO: 18809 - DNA, 740 bp, synthetic construct
  source 1..740: mol_type = other DNA
agcctgtgggttgcacccacccacaggacccacgcggtgctagcactctggttctacgggacctttgtgcgcctgttttacgtcccctccccaatttgtaacttagaagcaatttgcaacactgatcagtagcaggcatagcgcaccagctatgtcttgatcaagcacttctgtttccccggaccgagtatcaatagactgttcatacggttgaaggagaaagcgtccgttatccggctaactacttcgagaaacccagtagcgccattgaaactgcagagtgtttcgctccacacttcccccgtgtagatcaggtcgatgagtcactgcaatccccacgggcgaccgtggcagtggctgcgctggcggcctgcctatggggcaacccataggacgctctaatgtggacatggtgtgaagagtctattgagctagttagtagtcctccggcccctgaatgcggctaatcctaactgcggagcacatgccttcaatccagagggtagtgtgtcgtaatgggcaactctgcagcggaaccgactactttgggtgtccgtgtttccttttattctcacattggctgctaatggtgacaattacggaattgttaccatatagctattggattggccatccggtgtgcaatagagctattatatacctatttgttggctttgtaccactgaccttaaaatctataaccactctcgagtgtatattaacccttaatacaatcaaac

SEQ ID NO: 18810 - DNA, 730 bp, synthetic construct
  source 1..730: mol_type = other DNA
gttgtacccactcacagggcccactgggtgctagcactctgattctgcggaacctttgtgcgcctgttttaaaacccccccctcaattcgtgatttagaagtaatgcacaccattgatcaacagcaagcgtggcgcaccagccatgttcagatcaaacacttctgtttccccgggctgagtatcaatagactgctcgcgcggttgaaggagaaaacgctcgttacccggctaactacttcgagaaacctagtagcaccattgaaactacagagtgtttcgctcagcactttccccgtgtagatcgggtcgatgagtcactgcaatccccacgggcgaccgtggcagtggctgcgttggcggcctgcctatgggcttgcccataggacgctctaaagtggacatggtgtgaagagtctattgagctagttagtagtcctccggcccctgaatgcggctaatcctaactgcggagcgcatgccctcaatccagggggtggtgcgtcgtaacgggcaactctgcagcggaaccgactactttgggtgaccgtgtttccttttattcttatattggctgcttatggtgacaattgagagattgttaccatatagctattggattggccatccagtgtctaacagagcaatcgtatacttatttgttggattcatcccactatcatacatatccattaacaccttatactatattataagattgaacacaagaaa

SEQ ID NO: 18811 - DNA, 744 bp, synthetic construct
  source 1..744: mol_type = other DNA
ttaaaacacaccttgggttgttcccacccacagggcccactgggcgctagcacactggttctgcgggacctttgtgcgcctgttttataacccttccctaagcggtaacttagaagctttgtacaatcatggccaatagtgggcgtgacgcgccagtcacgtcttggtcaagcacttctgtatccccggactgagtatcaatagactgctcacgcggttgaaggagaaaacgttcgttacccggctaactacttcgagaaacctagtagcaccatgaaagttgcggagtgtttcgctcagcactttccccgtgtagatcaggtcgatgagtcactgtaaaccccacgggcgaccgtgacagtggctgcgttggcgacctgcccatggggtaacccatgggacgctctaatacagacatggtgcgaagagtctattgagctagttagcagtcctccggcccctgaatgcggctaatcctaactgcggagcgcgcaccctcaacccagggggcggcgcgtcgtaatgggtaactctgcagcggaaccgactactttgggtgtccgtgtttccttttattctttattggctgcttatggtgacaattgaaaggttgttaccatatagctattggattggccatccggtgtctaacagagctattgtttacctattcattggcttcgtccctcttaatctcaaggctattcaaactctcgattacatattgttccttaactgtaagaa

SEQ ID NO: 18812 - DNA, 737 bp, synthetic construct
  source 1..737: mol_type = other DNA
ctgtgggttgcacccacccacaggacccacgcggtgctagcactctggttctacgggacctttgtgcgcctgttttacgtcccctccccaatttgtaacttagaagcaatttgcaacactgatcagtagcaggcatagcgcaccagctatgtcttgatcaagcacttctgtttccccggaccgagtatcaatagactgttcacacggttgaaggagaaagcgtccgttatccggctaactacttcgagaaacccagtagcgccattgaaactgcagagtgtttcgctccacacttcccccgtgtagatcaggtcgatgagtcactgcaatccccacgggcgaccgtggcagtggctgcgctggcggcctgcctatggggcaacccataggacgctctaatgtggacatggtgtgaagagtctattgagctagttagtagtcctccggcccctgaatgcggctaatcctaactgcggagcacatgccttcaatccagagggtagtgtgtcgtaatgggcaactctgcagcggaaccgactactttgggtgtccgtgtttccttttattctcacattggctgcttatggtgacaattacggaattgttaccatatagctattggattggccatccggtgtgcaatagagctattatatacctatttgttggctttgtaccactgaccttaaaatctataaccactctcgagtgtatattaacccttaatacaatcaaac

SEQ ID NO: 18813 - DNA, 737 bp, synthetic construct
  source 1..737: mol_type = other DNA
gcctgtgggttgttcccacccacagggcccactgggcgctagcacactgattctgcgggatctttgtgcgcctgttttataacccttcccctaggcagcaacttagaagctttgcacaatcacgaccaatagtgggcgtggcgcgccagccacgtcttggtcaagcactcctgtatccccggactgagtatcaatagactgctcacgcggttgaaggagaaaacgttcgttacccggctaactacttcgagaaacctagtagcaccatgaaagttgcagagtgtttcgctcagcacttcccccgtgtagatcaggtcgatgagtcactgtaaaccccacgggcgaccgtgacagtgactgcgttggcggcctgcccatggggtaacccatgggacgctctaatacagacatggtgcgaagagtctattgagctagttagcagtcctccggcccctgaatgcggctaatcctaactgcggagcgcgcaccctcaacccagggggcggcgcgtcgtaatgggtaactctgcagcggaaccgactactttgggtgtccgtgtttctttttactctttattggctgcttatggtgacaattgaaaagttgttaccatatagctattggattggccatccggtgtctaacagagctattgtttacctatttattggatacgtccctcttaacctcaaggtcattcaaactcttgattatatattgctccttaactgtaagaa

SEQ ID NO: 18814 - DNA, 733 bp, synthetic construct
  source 1..733: mol_type = other DNA
ctgtgggttgcacccacccacagggcccactgggcgctagcactctggtaccacggtacccttgtgcgcctgttttatcaccccaccccaacttgaaacttagaagcaatgcacaaccgaccaatagtaggtgtggcgcaccagccgcatctcggtcaagcacttctgtttccccgggttgagtatcaataagctgtccacacggctgaaggagaaaacgcccgttatccggccaactacttcgagaaacctagtaccactatgaacgttgcaaggcgtttcgctcagcacttcccccgtgtagatcaggtcgatgagtcaccgcatcccccacgggcgaccgtggcggtggctgcgttggcggcctgcctatgggttaacccataggacgccttaataccgacatggtgcgaagagtctattgagctagttggtagtcctccggcccctgaatgcggctaatcctaactgcggagcacacactcacaacccagtgagcggtgtgtcgtaacgggcaactctgcagcggaaccgactactttgggtgtccgtgtttccttttactcttatattggctgcttatggtgacaatcatagaattgttaccatatagctattggattggccatccgatttctaacagagctattatttacctgtttgttggattcactccgttgacatacaaatccctaaacactttgtgctttattttgaacttgaacgcacgaaa

SEQ ID NO: 18815 - DNA, 742 bp, synthetic construct
  source 1..742: mol_type = other DNA
ttaaaacagcctgtgggttgcacccactcacagggcccactgggcgcaagcactctggtacttcggtacctttgtgcgcctgttttacaacccccccccagtgaaacttagaagcagcaaaccacgatcaatagcaggcataacgctccagttatgtcttgatcaagcacttctgtttccccggaccgagtatcaatagactgctcgcgcggttgaaggagaaaacgttcgtcatccggctaactacttcgggaaacctagtaacaccatgaaagttgcggagagcttcgttcagcactcccccagtgtagatcaggtcgatgagtcaccgcattccccacgggcgaccgtggcggtggctgcgttggcggcctgcccatggggcaacccatggggcgctctaatacggacatggtgcgaagagtctactgagctagttagtagtcctccggcccctgaatgcggctaatcctaactgcggagcacacgcccacaaaccagcgggtagtgtgtcgtaacgggcaactccgcagcggaaccgactactttgggtgtccgtgtttccttttatctctatattggctgcttatggtgacaattaaagagttgttaccatatagctattggattggccatccggtgtgcaacagagcaattgtttacctatttattggttttgtaccattaaccttgaagtctgtgactacccttaattatatcttgaccctcaacacagctaaac

SEQ ID NO: 18816 - DNA, 744 bp, synthetic construct
  source 1..744: mol_type = other DNA
ttaaaacaagctgtgggttgttcccacccacagggcccactgggcgctagcacactggttctgcgggacctttgtgcgcctgttttataacccttccctaagcggtaacttagaagctttgtacaatcatggccaatagtgggcgtgacgcgccagtcacgtcttggtcaagcacttctgtatccccggactgagtatcaatagactgctcacgcggttgaaggagaaaacgttcgttacccggctaactacttcgagaaacctagtagcaccatgaaagttgcggagtgtttcgctcagcactttccccgtgtagatcaggtcgatgagtcactgtaaaccccacgggcgaccgtgacagtggctgcgttggcgacctgcccatggggtaacccatgggacgctctaatacagacatggtgcgaagagtctattgagctagttagcagtcctccggcccctgaatgcggctaatcctaactgcggagcgcgcaccctcaacccagggggcggcgcgtcgtaatgggtaactctgcagcggaaccgactactttgggtgtccgtgtttccttttattctttattggctgcttatggtgacaattgaaaggttgttaccatatagctattggattggccatccggtgtctaacagagctattgtttacctattcattggcttcgtccctcttaatctcaaggctattcaaactctcgattacatattgttccttaactgtaagaa

SEQ ID NO: 18817 - DNA, 736 bp, synthetic construct
  source 1..736: mol_type = other DNA
cctgtgggttgttcccattcacagggcccactgggcgctagcacactgattttgcgggatctttgtgcgcctgttttataacccctcccctaagcagtaacttagaagcttcatactatcacgaccaatagtaggcgtggcgcgccagccacgtcctggtcaagcacttctgtttccccggaccgagtatcaatagactgctcacgcggttgaaggagaaaacgttcgtcatccggctaactacttcgagaaacctagtagcaccgtgaaagttgcggagtgtttcgctcagcacttcccccgtgtagatcaggtcgatgagtcactgtgaaccccacgggcgaccgtgacagtggctgcgttggcggcctgcccatggggtaacccatgggacgctctaatacagacacggtgtgaagagtctattgagctagttagtagtcctccggcccctgaatgcggctaatcctaactgcggagcgcgcaccctcaatccagggggcggcgcgtcgtaatgggtaactctgcagcggaaccgactactttgggtgtccgtgtttccttttattccttattggctgcttatggtgacaattgaaaagttgttaccatatagctattggattggccatccggtaactaacagagctattgtttacctgtttgttggatacgtccctctcaatttcaaggtcattaaaacccttgattatatattacttctcaactgtgagaa

SEQ ID NO: 18818 - DNA, 758 bp, synthetic construct
  source 1..758: mol_type = other DNA
tacacactagactctaaaacagcctgtgggttgttcccacccacagggcccactgggcgccagcactctgattccacggaatctttgtgcgcctgttttacaacccttccccaatttgtaacgtagaagtaacacacactactgatcaatagcaggcatggcgcgccagtcatgtctcgatcaagcacttctgtttccccggactgagtatcaatagactgctcacgcggttgaaggagaaaacgttcgttacccggctaactacttcgagaaacctagtagcgccatggaagctgcagagtgtttcgctcagcacttcccccgtgtagatcaggctgatgagtcactgcaatccccacgggtgaccgtggcagtggctgcgctggcggcctgcctatggggcaacccataggacgctctaatgtggacatggtgcgaagagtctattgagctagttagtagtcctccggcccctgaatgcggctaatcctaactgcggagcacatgccttcaacccaggaggtggtgtgtcgtaacgggcaactctgcagcggaaccgactactttgggtgtccgtgtttctttttattcctatattggctgcttatggtgacaatcacggaattgttgccatatagctattggattggccacccagtgtctaatagagctattgtgtacctatttgttggatttactccgctatcatataaatctctgaacactttgtgctttatattgaatttaaacacacgaaa

SEQ ID NO: 18819 - DNA, 726 bp, synthetic construct
  source 1..726: mol_type = other DNA
gtacccaccctcagggcccactgggcgctagcactctgattctgcggaatccttgtgcgcctgttttataaccctcccccgattcgcaacttagaagcaatgagcctcactgatcaaaagtaggcgtggcgcaccagccacgtcttgatcaagcactcctgtttccccgggctgagtatcaatagactgcttgcgcggttgaaggagaaaacgctcgttatccggctaactacttcgagaaacctagtagcaccattgaaattgcagagtgtttcgctcagcacttcccccgtgtagatcgggtcgatgagtcactgcaatccccacgggcgaccgtggcagtggctgcgttggcggcctgcctatggggcaacccataggacgctctaaaatggacatggtgtgaagagtctattgagctagttagtagtcctccggcccctgaatgcggctaatcctaactgcggagcgcatgcccccaagccagagggtggtgcgtcgtaacgggtaactctgcagcggaaccgactactttgggtgtccgtgtttccttttattcttattatggctgcttatggtgacaattaaagaattgttgccatatagctattggatcggccatccggtgtctaacagagctattgtctatttatttgttggatttgttccattgacatatacatcgcttaatacattatatttcattgtgaggttgaacgcaagaaa

SEQ ID NO: 18820 - DNA, 747 bp, synthetic construct
  source 1..747: mol_type = other DNA
ttaaaacagcctgtgggttgtacccactcacaggacccacgcggtgctagcactctggttccacggaacctttgtgcgcctgttttacgtcccttccccaatttgtaacttagaagcaatttacagcactgatcaatagcaggcatggcacgccagctatgtcttgatcaagcacctctgtttccccggaccgagtatcaatagactgttcacacggtcgaaggagaaagcgttcgctatccggctaactacttcgagaaacccagtagcgccattgaaactgcagagtgtttcgctccacgcttcccccgcgtagatcaggtcgatgagtcactgcaatccccacgggcgaccgtggcagtggctgcgttggcggcctgcctatggggtaacccataggacgctctaatgtggacatggtgcgaagagtctattgagctagttagtagtcctccggcccctgaatgcggctaatcctaactgcggagcacatgccttcaatccagagggtagcgtgtcgtaatgggcaactctgcagcggaaccgactactttgggtgtccgtgtttccttttattctcacattggctgcttatggtgacaattacagaattgttaccatatagctattggattggccatccggtgtgcaataaagctattatatatctatttgttggttttgtaccactaaccttaagatctgtagttactctcgagtatatattgacccttaatacaattaaac

SEQ ID NO: 18821 - DNA, 741 bp, synthetic construct
  source 1..741: mol_type = other DNA
ttaaaacagctgtgggttgcacccactcacagggcccactgggcgcaagcactctggtacctcggtacctttgtgcgcctgttttataacccccccccagtgaaacttagaagcagcaaaccacgatcaatagcaggcataacgctccagttatgtcttgatcaagcacttctgtttccccggactgagtatcaatagactgctcgcgcggttgaaggagaaaacgttcgttatccggctaactacttcgggaaacctagtagcatcatgaaagttgcggagagcttcgttcagcactcccccagtgtagatcaggtcgatgagtcaccgcattccccacgggcgaccgtggcggtggctgcgttggcggcctgcccatggggtaacccatggggcgctctaatacggacatggtgcgaagagtctactgagctagttagtagtcctccggcccctgaatgcggctaatcccaactgcggagcacacgcccacaagccagcgggtagtgtgtcgtaacgggcaactctgcagcggaaccgactactttgggtgtccgtgtttctttttatctttatattggctgcttatggtgacaattaaagagttgttaccatatagctattggattggccatccggtgtgcaacagagcaattgtttacctatttattggttttgtaccattaaccttgaaatctgtgaccacccttgattatatcttgaccctcaacacagctaaac

SEQ ID NO: 18822 - DNA, 741 bp, synthetic construct
  source 1..741: mol_type = other DNA
ttaaaacagctgtgggttgcacccactcacagggcccactgggcgcaagcactctggtacctcggtacctttgtgcgcctgttttataacccccccccagtgaaacttagaagcagcaaaccacgatcaatagcaggcataacgctccagttatgtcttgatcaagcacttctgtttccccggactgagtatcaatagactgctcgcgcggttgaaggagaaaacgttcgttatccggctaactacttcgggaaacctagtagcatcatgaaagttgcggagagcttcgttcagcactcccccagtgtagatcaggtcgatgagtcaccgcattccccacgggcgaccgtggcggtggctgcgttggcggcctgcccatggggtaacccatggggcgctctaatacggacatggtgcgaagagtctactgagctagttagtagtcctccggcccctgaatgcggctaatcccaactgcggagcacacgcccacaagccagcgggtagtgtgtcgtaacgggcaactctgcagcggaaccgactactttgggtgtccgtgtttctttttatctttatattggctgcttatggtgacaattaaagagttgttaccatatagctattggattggccatccggtgtgcaacagagcaattgtttacctatttattggttttgtaccattaaccttgaaatctgtgaccacccttaattatatcttgaccctcaacacagctaaac

SEQ ID NO: 18823 - DNA, 741 bp, synthetic construct
  source 1..741: mol_type = other DNA
ttaaaacagctgtgggttgcacccactcacagggcccactgggcgcaagcactctggtacctcggtacctttgtgcgcctgttttataacccccccccagtgaaacttagaagcagcaaaccacgatcaatagcaggcataacgctccagttatgtcttgatcaagcacttctgtttccccggactgagtatcaatagactgctcgcgcggttgaaggagaaaacgttcgttatccggctaactacttcgggaaacctagtagcatcatgaaagttgcggagcgcttcgttcagcactcccccagtgtagatcaggtcgatgagtcaccgcattccccacgggcgaccgtggcggtggctgcgttggcggcctgcccatggggtaacccatggggcgctctaatacggacatggtgtgaagagtctactgagctagttagtagtcctccggcccctgaatgcggctaatcccaactgcggagcacacgcccacaagccagcgggtagtgtgtcgtaacgggcaactctgcagcggaaccgactactttgggtgtccgtgtttccttttatctttatattggctgcttatggtgacaattgaggagttgttaccatatagctattggattggccatccggtgtgcaacagagcaattgtttacctatttattggttttgtaccattaaccttgaagtctgtgaccacccttaattatatcttgaccctcaacacagctaaac

SEQ ID NO: 18824 - DNA, 741 bp, synthetic construct
  source 1..741: mol_type = other DNA
ttaaaacagctgtgggttgcacccactcacagggcccactgggcgcaagcactctggtacctcggtacctttgtgcgcctgttttataacccccccccagtgaaacttagaagcagcaaaccacgatcaatagcaggcataacgctccagttatgtcttgatcaagcacttctgtttccccggactgagtatcaatagactgctcgcgcggttgaaggagaaaacgttcgttatccggctaactacttcgggaaacctagtagcatcatgaaagttgcggagagcttcgttcagcactcccccagtgtagatcaggtcgatgagtcaccgcattccccacgggcgaccgtggcggtggctgcgttggcggcctgcccatggggtaacccatggggcgctctaatacggacatggtgcgaagagtctactgagctagttagtagtcctccggcccctgaatgcggctaatcccaactgcggagcacacgcccacaagccagcgggtagtgtgtcgtaacgggcaactctgcagcggaaccgactactttgggtgtccgtgtttccttttatctttatattggctgcttatggtgacaattgaagagttgttaccatatagctattggattggccatccggtgtgcaacagagcaattgtttacctatttattggttttgtaccattaaccttgaagtctgtgaccacccttaattatatctcgaccctcaacacagctaaac

SEQ ID NO: 18825 - DNA, 741 bp, synthetic construct
  source 1..741: mol_type = other DNA
ttaaaacagctgtgggttgcacccactcacagggcccactgggcgcaagcactctggtacctcggtacctttgtgcgcctgttttataacccccccccagtgaaacttagaagcagcaaaccacgatcaatagcaggcgtaacgctccagttatgtcttgatcaagcacttctgtttccccggactgagtatcaatagactgctcgcgcggttgaaggagaaaacgttcgttatccggctaactacttcgggaaacctagtagcatcatgaaagttgcggagagcttcgttcagcactcccccagtgtagatcaggtcgatgagtcaccgcattccccacgggcgaccgtggcggtggttgcgttggcggcctgcccatggggtaacccatggggcgctctaatacagacatggtgcgaagagtctactgagctagttagtagtcctccggcccctgaatgcggctaatcccaactgcggagcacacgcccacaagccagcgggtagtgtgtcgtaacgggcaactctgcagcggaaccgactactttgggtgtccgtgtttccttttatctttatattggctgcttatggtgacaattgaagagttgttaccatatagctattggattggccatccggtgtgtaacagagcaattgtttacctatttattggttttgtaccattaaccttgaagtctgtgaccacccttaattatatcttgaccctcaacacagctaaac

SEQ ID NO: 18826 - DNA, 741 bp, synthetic construct
  source 1..741: mol_type = other DNA
ttaaaacagctgtgggttgcacccactcacagggcccactgggcgcaagcactctggtacctcggtacctttgtgcgcctgttttataacccccccccagtgaaacttagaagcagcaaaccacgatcaatagcaggcataacgctccagttatgtcttgatcaagcacttctgtttccccggactgagtatcaatagactgctcgcgcggttgaaggagaaaacgttcgttatccggctaactacttcgggaaacctagtagcatcatgaaagttgcggagagcttcgttcagcactcccccagtgtagatcaggtcgatgagtcaccgcattccccacgggcgaccgtggcggtggctgcgttggcggcctgcccatggggtaacccatggggcgctctaatacggacatggtgtgaagagtctactgagctagttagtagtcctccggcccctgaatgcggctaatcccaactgcggagcacacgcccacaagccagcgggtagtgtgtcgtaacgggcaactctgcagcggaaccgactactttgggtgtccgtgtttccttttatctttatattggctgcttatggtgacaattgaggagttgttaccatatagctattggattggccatccggtgtgcaacagagcaattgtttacctatttattggttttgtaccattaaccttgaagtctgtgaccacccttaattatatcttgaccctcaacacagctaaac

SEQ ID NO: 18827 - DNA, 741 bp, synthetic construct
  source 1..741: mol_type = other DNA
ttaaaacagcctgtgggttgcacccactcacagggcccactgggcgctagcactctggtatcttggtacctttgtgcgcctgttttatacccccccccagtgaaacttagaagcagcaaacctcgatcaatagcaggcataacgctccagttatgtcttgatcaagcacttctgtttccccggactgagtatcaatagactgctcgcgcggttgaaggagaaaacgttcgttatccggctaactacttcggaaaacctagtaacaccatggaagttgcggagagctccgttcagcactcccccagtgtagatcaggtcgatgagtcaccgcattccccacgggcgaccgtggcggtggctgcgttggcggcctgcccatggggtaacccatggggcgctctaatacagacatggtgtgaagagtctactgagctagttagtagtcctccggcccctgaatgcggctaatcccaactgcggagcacacgcccacaagccagcgggtagtgtgtcgtaacgggtaactctgcagcggaaccgactactttgggtgtccgtgtttccttttatctttacattggctgcttatggtgacaattaaagaattgttaccatatagctattggattggccatccggtgtgcaacagagcaattatttacctatttattggttttgtaccatcaactttgaattctgtgaccacccttaattatatcctgacccttaacacagctaaac

SEQ ID NO: 18828 - DNA, 746 bp, synthetic construct
  source 1..746: mol_type = other DNA
ttttaaaaaccagcctgtgggttgcacccactcacagggcctactgggcgcaagcactctggtatctcggtacctttgtgcgcctgttttatacccccccctcagtgaaacttagaagcagcaaaccacgatcaatagcaggcataacgctccagttatgtcttgatcaagcacttctgtttccccggactgagtatcaatagactgctcgcgcggttgaaggagaaaacgttcgttatccggctagctacttcggaaaacctagtaacaccatgaaagttgcggagagcttcgttcagcactcccccagtgtagatcaggtcgatgagtcaccgcattccccacgggcgaccgtggcggtggctgcgttggcggcctgcccatggggtaacccatggggcgctctaatacggacatggtgtgaagagtctactgagctagttagtagtcctccggcccctgaatgcggctaatcctaactgcggagcacacgcccacaaaccagcgggtagtgtgtcgtaacgggtaactctgcagcggaaccgactactttgggtgtccgtgtttccttttatctttatattggctgcttatggtgacaattaaagaattgttaccatatagctattggattggccatccggtgtgcaacagagcaattatttacctatttattggttttgtaccattaaccttgaattctgtgaccacccttaattatatcttgactcttaacgcagctaaac

SEQ ID NO: 18829 - DNA, 746 bp, synthetic construct; identical to SEQ ID NO: 1122
  source 1..746: mol_type = other DNA

SEQ ID NO: 18830 - DNA, 747 bp, synthetic construct
  source 1..747: mol_type = other DNA
ttaaaacagcctgtgggttgtacccactcacaggacccacgcggtgctagcactctggttccacggagcctttgtgcgcctgttttacgtcccctccccaatttgtaacttagaagcaatttacagcactgatcaatagcaggcatggcgcaccagctatgtcttgatcaagcacctctgtttccccggaccgagtatcaatagactgttcacacggtcgaaggagaaagcgttcgttatccggctaactacttcgagaaacccagtagcgccattgaaactgcagagtgtttcgctccacacttcccccgtgtagatcaggtcgatgagtcactgcaatccccacgggcgaccgtggcagtggctgcgttggcggcctgcctatggggtaacccataggacgctctaatgtggacatggtgcgaagagtctattgagctagttagtagtcctccggcccctgaatgcggctaatcctaactgcggagcacatgccttcaatccagagggtagtgtgtcgtaatgggcaactctgcagcggaaccgactactttgggtgtccgtgtttccttttattctcacattggctgcttatggtgacaattacagaattgttaccatatagctattggattggccatccggtgtgcaatagagctattatatacctatttgttggctttgtaccactaaccttaaaatctgtaatcactctcgagtatatattgacccttaatacaattaaac

SEQ ID NO: 18831 - DNA, 733 bp, synthetic construct
  source 1..733: mol_type = other DNA
gggttgcacccacccacaggacccacgcggtgctagcactctggtcccacgggacctttgtgcgcctgttttacgtcccctccccaattcgtaacttagaagcaatttgcaacactgatcagtagcaggcatggcgcaccagctatgtcttgatcaagcacttctgtttccccggaccgagtatcaatagactgttcacacggttgaaggagaaagcgtccgttatccggctaactacttcgagaaacctagtagcgccattgaaactgcagagtgtttcgctccacacttcccccgtgtagatcaggttgatgagtcactgcaatccccacgggcgaccgtggcagtggctgcgctggcggcctgcctatggggcaacccataggacgctctaatgtggacatggtgcgaagagtctattgagctagttagtagtcctccggcccctgaatgcggctaatcctaactgtggagcacatgccttcaatccagagggtagtgtgtcgtaatgggcaactctgcagcggaaccgactactttgggtgtccgtgtttccttttattcttacattggctgcttatggtgacaattacagaattgttaccatatagctattggattggccatccggtgtgtaatagagctattatatacctatttgttggctttgtaccactgaccttaaaatctgtaaccactctcgagtgtatattaacccttaatacaatcaaac

SEQ ID NO: 18832 - DNA, 735 bp, synthetic construct
  source 1..735: mol_type = other DNA
ctgtgggttgttcccacccacagggcccactgggcgccagcactctgattccacggaatctttgtgcgcctgttttacaacccttccccaacttgtaacgtagaagtaatacacactactgatcaatagcaggcatggcgcgccagtcatgtctcgatcaagcacttctgttcccccggactgagtatcaatagactgctcacgcggttgaaggagaaaacgttcgttacccggctaactacttcgagaaacctagtagcaccatagaagctgcagagtgtttcgctcagcacttcccccgtgtagatcaggctgatgagtcactgcaatccccacgggtgaccgtggcagtggctgcgttggcggcctgcctatggggcaacccataggacgctctaatgtggacatggtgcgaagagtctattgagctagttagtagtcctccggcccctgaatgcggctaatcctaactgcggagcacatgccttcaacccagaaggtagtgtgtcgtaacgggcaactctgcagcggaaccgactactttgggtgtccgtgtttctttttattcctatattggctgcttatggtgacaatcacggaattgttgccatatagctattggattggccatccggtgtctaatagagctattgtgtacctatttgttggatttactccgctatcacataaatctctgaacactttgtgctttatattgaacttaaacacccgaaa

SEQ ID NO: 18833 - DNA, 748 bp, synthetic construct
  source 1..748: mol_type = other DNA
ttaaaacagcctgtgggttgcacccactcacagggcccacgtggcgctagcactctggttctacggaacctttgtgcgcctgttttacgccccctccccaatttgcaacttagaagcaatacacaacactgatcaacagcaggcatggcgcaccagctatgtcttgatcaagcacttctgtttccccgggccgagtatcaatagactgttcacacggttgaaggagaaagcgcccgttatccggctaactacttcgagaagcctagtagcaccattgaagctgcagagtgtttcgctcagcacttccccccgtgtagatcaggtcgatgagtcactgcaatccccacgggcgaccgtggcagtggctgcgctggcggcctgcctatggggcaacccataggacgctctaatgtggacatggtgcgaagagtctattgagctagttagtagtcctccggcccctgaatgcggctaatcctaactgtggagcacatgccttcaatccagagggtagtgtgtcgtaatgggcaactctgcagcggaaccgactactttgggtgtccgtgtttccttttattcttacattggctgcttatggtgacaattacagaattgttaccatatagctattggattggccatccggtgtgcaatagagctattatatacctgtttgttggctttgtaccactaaccttaaaatctataatcaccctcgattttatattaacccttaatacaatcaaac

SEQ ID NO: 18834 - DNA, 748 bp, synthetic construct
  source 1..748: mol_type = other DNA
ttaaaacagcctgtgggttgttcccacccacagggcccactgggcgctagcactctgatttcacgaaatctttgtgcgcctgttttatatcccttcccccagtctgaaacatagaagcaatgcgcatcactgatcaatagcaggcgtaacgcgccagttacgtcatgatcaagcacatctgtctccccggaccgagtatcaatagactgcttgcgcggttgaaggagaaacagttcgttacccggctaactacttcgagaagcccagtagcaccatggaagctgtagggtgtttcgctcagcacttcccccgtgtagatcaggtcgatgagtcactgcaacccccacaggcgactgtggcagtggctgcgttggcggcctgcctatggggagacccataggacgctctaatgtggacatggtgtgaagagcctattgagctagttagtagtcctccggcccctgaatgcggctaatcctaactgcggagcacacgccctcaacccagagggtagtgtgtcgtaacgggcaactctgcagcggaaccgactactttgggtgtccgtgtttcttattattcttatattggctgcttatggtgacaattacagaattgttaccatatagctattggattggccatccggtgtgcaatagagctgttatatacctgtttgttggttttgtgccactgactttaaaatctatagttactcttaatttcatattggctctcaacacaattaaac

SEQ ID NO: 18835 - DNA, 748 bp, synthetic construct
  source 1..748: mol_type = other DNA
ttaaaacagcctgtgggttgttcccacccacagggcccactgggcgctagcactctgatttcacgaaatctttgtgcgcctgttttatatcccttcccccagtctgaaacatagaagcaatgcgcatcactgatcaatagcaggcgtaacgcgccagttacgtcatgatcaagcacatctgtctccccggaccgagtatcaatagactgcttgcgcggttgaaggagaaacagttcgttacccggctaactacttcgagaagcccagtagcaccatggaagctgcagggtgtttcgctcagcacttcccccgtgtagatcaggtcgatgagtcactgcaacccccacaggcgactgtggcagtggctgcgttggcggcctgcctatggggagacccataggacgctctaatgtggacatggtgtgaagagcctattgagctagttagtagtcctccggcccctgaatgcggctaatcctaactgcggagcacacgccctcaacccagagggtagtgtgtcgtaacgggcaactctgcagcggaaccgactactttgggtgtccgtgtttcttattattcttatattggcagcttatggtgacaattacagaattgttaccatatagctattggattggccatccggtgtgcaatagagctgttatatacctgtttgttggttttgtgccactaactttaaaatctatagtcactcttaatttcatattggctctcaacacaattaaac

SEQ ID NO: 18836 - DNA, 748 bp, synthetic construct
  source 1..748: mol_type = other DNA
ttaaaacagcctgtgggttgttcccacccacagggcccactgggcgctagcactctgatttcacggaatctttgtgcgcctgttttacatcccttcccctagtctgaaacatagaagcaatgcgcatcactgatcaatagtaggcgtaacgcgccagttacgtcatgatcaagcacatctgtctccccggaccgagtatcaatagactgcttgcgcggttgaaggagaaacagttcgttacccggctaactacttcgagaagcccagtagcaccatggaagctgcagggtgtttcgctcagcacttcccccgtgtagatcaggtcgatgagtcactgcaacccccacaggcgactgtggcagtggctgcgttggcggcctgcctatggggagacccataggacgctctaatgtggacatggtgtgaagagcctattgagctagttagtagtcctccggcccctgaatgcggctaatcctaactgcggagcacacgccctcaacccagagggtagtgtgtcgtaacgggcaactctgcagcggaaccgactactttgggtgtccgtgtttcttattattcttatattggctgcttatggtgacaattacagaattgttaccatatagctattggattggccatccggtgtgcaacagagctgttatatacctgtttgttggttttgtgccactaacttcaaaatctatagttactcttaatttcatattggctctcaacataattaaac

SEQ ID NO: 18837 - DNA, 748 bp, synthetic construct
  source 1..748: mol_type = other DNA
ttaaaacagcctgtgggttgttcccacccacagggcccactgggcgctagcaccctgatttcacggaatctttgtgcgcctgttttatatcccttcccccagtctgaaacatagaagcaatgcgcatcactgatcaatagcaggcgtaacgcgccagttacgtcatgatcaagcacatctgtctccccggaccgagtatcaatagactgcttgcgcggttgaaggagaaagagttcgttacccggctaactacttcgagaagcccagtagcaccatggaagctgcagggtgtttcgctcggcacttcccccgtgtagatcaggtcgatgagtcactgcaacccccacaggcgactgtggcagtggctgcgttggcggcctgcctatggggagacccataggacgctctaatgtgaacatggtgtgaagagcctattgagctagttagtagtcctccggcccctgaatgcggctaatcctaactgcggagcacacgccctcaacccagggggtagtgtgtcgtaacgggcaactctgcagcggaaccgactactttgggtgtccgtgtttcttattattcttatattggctgcttatggtgacaattacagaattgttaccatatagctattggattggccatccggtgtgcaatagagctgttatatacctgtttgttggttttgtgccactaactttaaaatctatagttactcttgatttcatattagctctcaacacaattaaac

SEQ ID NO: 18838 - DNA, 740 bp, synthetic construct
  source 1..740: mol_type = other DNA
ttaaaacagctgtgggttgcacccactcacagggcccactgggcgcaagcactctggtacctcggtacctttgtgcgcctgttttataaccccccccagtgaaacttagaagcagcaaaccacgatcaatagcaggcgtaacgctccagttatgtcttgatcaagcacttctgtttccccggactgagtatcaatagactgctcgcgcggttgaaggagaaaacgttcgttatccggctaactacttcgggaaacctagtagcatcatgaaagttgcggagagcttcgttcagcactcccccagtgtagatcaggtcgatgagtcaccgcattccccacgggcgaccgtggcggtggctgcgttggcggcctgcccatggggtaacccatggggcgctctaatacagacatggtgcgaagagtctactgagctagttagtagtcctccggcccctgaatgcggctaatcccaactgcggagcacacgcccacaagccagcgggtagtgtgtcgtaacgggcaactctgcagcggaaccgactactttgggtgtccgtgtttccttttatctttatattggctgcttatggtgacaattgaagagttgttaccatatagttattggattggccatccggtgtgtaacagagcaattgtttacctatttattggttttgtaccattaaccttgaagtctgtgaccacccttaattatatcttgaccctcaacacagctaaac

SEQ ID NO: 18839 - DNA, 740 bp, synthetic construct
  source 1..740: mol_type = other DNA
ttaaaacagctgtgggttgcacccactcacagggcccactgggcgcaagcactctggtacctcggtacctttgtgcgcctgttttataaccccccccagtgaaacttagaagcagcaaaccacgatcaatagcaggcataacgctccagttatgtcttgatcaagcacttctgttttcccggactgagtatcaatagactgctcgcgcggttgaaggagaaaacgttcgttatccggctaactacttcgggaaacctagtagcatcatgaaagttgcggagagcttcgttcagcactcccccagtgtagatcaggtcgatgagtcaccgcattccccacgggcgaccgtggcggtggctgcgttggcggcctgcctatggggtaacccatggggcgctctaatacggacatggtgcgaagagtctactgagctagttagtagtcctccggcccctgaatgcggctaatcccaactgcggagcacacgcccacaagccagcgggtagtgtgtcgtaacgggcaactctgcagcggaaccgactactttgggtgtccgtgtttccttttatctttatattggctgcttatggtgacaattgaagagttgttaccatatagctattggattggccatccggtgtgcaacagagcaattgtttacctatttattggttttgtaccattaaccttgaagtctgtgaccacccttaattatatcttgaccctcaacacagctaaac

SEQ ID NO: 18840 - DNA, 740 bp, synthetic construct
  source 1..740: mol_type = other DNA
ttaaaacagctgtgggttgcacccactcacagggcccactgggcgcaagcactctggtacctcggtacctttgtgtgcctgttttataaccccccccagtgaaacttagaagcagcaaaccacgatcaatagcaggcataacgctccagttatgtcttgatcaagcacttctgtttccccggactgagtatcaatagactgctcgcgcggttgaaggagaaaacgttcgttatccggctaactacttcgggaaacctagtagcatcatgaaagttgcggagagcttcgttcagcactcccccagtgtagatcaggtcgatgagtcaccgcgttccccacgggcgaccgtggcggtggctgcgttggcggcctgcccatggggtaacccatggggcgctctaatacggacatggtgcgaagagtctactgagctagttagtagtcctccggcccctgaatgcggctaatcccaactgcggagcacacgcccacaagccagcgggtagtgtgtcgtaacgggcaactctgcagcggaaccgactactttgggtgtccgtgtttccttttatctttatattggctgcttatggtgacaattgaagagttgttaccatatagctattggattggccatccggtgtgcaacagagcaattgtttacctatttattggttttgtaccattaaccttgaagtctgtgaccacccttaattatatcttgaccctcaacacagctaaac

SEQ ID NO: 18841 - DNA, 736 bp, synthetic construct
  source 1..736: mol_type = other DNA
tccgatcggttgttcccacccacagggcctactgggcgccagcactctgattccacggaacctttgtgcgcctgttttacaaccctccccaatttgtaacgtagaagtgatacacactactgatcaatagtaggcatggcacgccagtcatgttatgatcaagcacatctgttcccccggactgagtatcaatagactgctcacgcggttgaaggagaaaacgttcgttacccggctaactacttcgagaaacctagtagcaccatggaagctgcggagtgtttcgctcagcacttcccccgtgtagatcaggtcgatgagtcactgcaatccccacgggtgaccgtggcagtggctgcgttggcggcctgcctatggggcaacccataggacgctctaatgtggacatggtgcgaagagtctattgagctagttagtagtcctccggcccctgaatgcggctaatcctaactgcggagcacatgccttcaacccaggaggtggtgtgtcgtaacgggtaactctgcagcggaaccgactactttgggtgtccgtgtttccttttatccttatattggctgcttatggtgacaattacggaattgttgccatatagctattggattggccatccggtgtctaatagagccattgtatacctatttgttggatttactcccctatcgtataaatctctaaacactttgtgcttcatattgaacttaaacacacgaaa

SEQ ID NO: 18842 - DNA, 736 bp, synthetic construct
  source 1..736: mol_type = other DNA
tccgatgggttgttcccacccacagggcctactgggcgccagcactctgattccacggaatctttgtgcgcctgttttacaaccctccccaatttgcaacgtagaagtgatacacactaccgatcaatagtaggcatggcgcgccagtcatgttatgatcaagcacttctgttcccccggactgagtatcaatagactgctcacgcggttgaaggagaaaacgttcgttacccggctaactacttcgagaaacctagtagcaccatggaagctgcggagtgtttcgctcagcacttcccccgtgtagatcaggtcgatgagtcactgcaatccccacgggtgaccgtggcagtggctgcgttggcggcctgcctatggggcaacccataggacgctctaatgtggacatggtgcgaagagtctattgagctagttagtagtcctccggcccctgaatgcggctaatcctaactgcggagcacatgccttcaacccaggaggtggtgtgtcgtaacgggtaactctgcagcggaaccgactactttgggtgtccgtgtttccttttatccttatattggctgcttatggtgacaatcacggagttgttgccatatagctattggattggccatccggtgtctaatagagctattgtatacctatttgttggatttactcccctatcgtatagatccctaaacactttgtgctttatattgaacttaaacacacgaaa

SEQ ID NO: 18843 - DNA, 748 bp, synthetic construct
  source 1..748: mol_type = other DNA
ttaaaacagcctgtgggttgtacccaccctcagggcccactgggcgctagcactctgattctgcggaatctttgtgcgcctgttttataaccctccccccgattcgtaatttagaagcaatgagcctcactgatcaacagtgggcgtggcgcaccagccacgtcttgatcaagcacttctgtttccccgggctgagtatcaatagactgcttgcgcggttgaaggagaaaacgcccgttatccggctaactacttcgagaaacctagtaacgccatcgaaattgcagagtgtttcgctcagcacttcccccgtgtagatcaggtcgatgagtcactgcaatccccacgggcgaccgtggcagtggctgcgttggcggcctgcctatggggcaacccataggacgctctaaaatggacatggtgtgaagagtctattgagctagttagtagtcctccggcccctgaatgcggctaatcctaactgcggagcgcatgcccccaaaccagagggtggtgcgtcgtaatgggtaactctgcagcggaaccgactactttgggtgtccgtgtttcattttactctcttattggctgcttatggtgacaattgaggaattgttaccatatagctattggattggccatccggtgtgcaacagagctattatttatctatttgttggtttcgtaccattaaatttaaaatctgtaaccactctacgctatatactgatcctcaatatagcaaagc

SEQ ID NO: 18844 - DNA, 747 bp, synthetic construct
  source 1..747: mol_type = other DNA
ttaaaacagcctgtgggttgcacccactcacagggcccacgtggcgctagcactctgattctacggaatctttgtgcgcctgttttacaacccctcccaatttgcaacttagaagcaatacacaacactgatcaacagcaggcatggcgcaccagccatgtcttgatcaagcacttctgttttccccggactgagtatcaatagactgctcacgcggttgaaggagaaagcgtccgttatccggctaactacttcgagaaacctagtagcaccattgaagctgcggagtgtttcgctcggcacttcccccgtgtagatcaggtcgatgagtcactgcaatccccacgggcgaccgtggcagtggctgcgctggcggcctgcctatggggcaacccataggacgctctaatgtggacatggtgcgaagagtctattgagctagttagtagtcctccggcccctgaatgcggctaatcctaactgcggagcacatgccctcaacccagagggtagtgtgtcgtaacgggcaactctgcagcggaaccgactactttgggtgtccgtgtttccttttatttttacattggctgcttatggtgacaatcacagaattgttaccatatagctattggattggccatccggtgtgcaatagagctattatatacctatttgttggctttgtaccactaaccttaaaatctataaccaccctcaactttatattaactctcaatacagtcaaac

SEQ ID NO: 18845 - DNA, 747 bp, synthetic construct
  source 1..747: mol_type = other DNA
ttaaaacagcctgtgggttgcacccactcacaggacccacgtggtgctagcactctggttctacggaacctttgtgcgcctgttttacgccccctccccaatttgcaacttagaagcaattcacaacactgatcaatagcaggcatggcgcaccagctatgtcttgatcaagcacttctgtttccccggaccgagtatcaatagactgttcacgcggttgaaggagaaagcgtccgttatccggctaactacttcgagaaacccagtagcgccattgaaactgcagagtgtttcgctccacacttcccccgtgtagatcaggtcgatgagtcactgcaatccccacgggcgaccgtggcagtggctgcgctggcggcctgcctatggggcaacccataggacgctctaatgtggacatggtgcgaagagtctattgagctagttagtagtcctccggcccctgaatgcggctaatcctaactgcggagcacatgccttcaatccagagggtagtgtgtcgtaatgggcaactctgcagcggaaccgactactttgggtgtccgtgtttccttctattctcacattggctgcttatggtgacaattacagaattgttaccatatagctattggattggccatccggtgtgcaatagagctattatatacctatttgttggctttgtaccactaaccttaaaatctgtaaccactctcgactatatattaaccctcaatacaatcaaac

SEQ ID NO: 18846 - DNA, 747 bp, synthetic construct
  source 1..747: mol_type = other DNA
ttaaaacagcctgtgggttgcacccactcacaggacccacgtggtgctagcactctggttctacggaacctttgtgcgcctgttttacgccccctccccaatttgcaacttagaagcaattcacaacactgatcaatagcaggcatggcgcaccagctatgtcttgatcaagcacttctgtttccccggaccgagtatcaatagactgttcacgcggttgaaggagaaagcgtccgttatccggctaactacttcgaaaaacccagtagcgccattgaaactgcagagtgtttcgctccacacttcccccgtgtagatcaggtcgatgagtcactgcaatccccacgggcgaccgtggcagtggctgcgctggcggcctgcctatggggcaacccataggacgctctaatgtggacatggtgcgaagagtctattgagctagttagtagtcctccggcccctgaatgcggctaatcctaactgcggagcacatgccttcaatccagagggtagtgtgtcgtaatgggcaactctgcagcggaaccgactactttgggtgtccgtgtttccttttattctcacattggctgcttatggtgacaattacagaattgttaccatatagctattggattggccatccggtgtgcaatagagctattatatacctatttgttggctttgtaccactaaccttaaaatctgtaaccactctcgactatatattaaccctcaatacaatcaaac

SEQ ID NO: 18847 - DNA, 747 bp, synthetic construct
  source 1..747: mol_type = other DNA
ttaaaacagcctgtgggttgtacccactcacagggcccacgtggtgctagcactctggttctatggaacccttgtgcgcctgttttacgccccctccccaatttgcaacttagaagcaattcacaacactgatcaatagcaggcatggcgtaccagctatgtcttgatcaagcacttctgtttccccggaccgagtatcaatagactgctcacgcggttgaaggagaaagcgtccgttatccggctaactacttcgagaaacccagtagcaccattgaaactgcagagtgtttcgctcggcacttcccccgtgtagatcaggtcgatgagtcactgcaatccccacgggcgaccgtggcagtggctgcgctggcggcctgcctatggggcaacccataggacgcttcaatgtggacatggtgcgaagagtcaattgagctagttagtagtcctccggcccctgaatgcggctaatcctaactgcggagcacatgccttcaatccagagggtagtgtgtcgtaatgggcaactctgcagcggaaccgactactttgggtgtccgtgtttccttttattctcacattggctgcttatggtgacaattacagaattgttaccatatagctattggattggccatccggtgtgcaatagagctattatatacctatttgttggctttgtaccactaaccttaagatctataaccaccctcggctttatattaaccctcaatacaatcaaac

SEQ ID NO: 18848 - DNA, 747 bp, synthetic construct
  source 1..747: mol_type = other DNA
ttaaaacagcctgtgggttgcacccactcacagggcccacgtggcgctagcactctgattctacggaatctttgtgcgcctgttttacaacccccccccaatttgcaacttagaagcaatacacaacactgatcaacagcaggcatggcgcaccagccatgtcttgatcaagcacttctgtttccccggactgagtatcaatagactgctcacgcggttgaaggagaaagcgtccgttatccggctaactacttcgagaaacctagtagcaccattgaagctgcggagtgtttcgctcggcacttcccccgtgtagatcaggccgatgagtcactgcaatccccacgggcgaccgtggcagtggctgcgctggcggcctgcctatggggcaacccataggacgctctaatgtggacatggtgcgaagagtctattgagctagttagtagtcctccggcccctgaatgcggctaatcctaactgcggagcacatgccctcaacccagagggtagtgtgtcgtaacgggcaactctgcagcggaaccgactactttgggtgtccgtgtttccttttattcttacattggctgcttatggtgacaatcacagaattgttaccatatagctattggattggccatccggtgtgcaatagagctattatacacctatttgttggctttgtaccactaaccttaaaatctataaccaccctcaactttatattaactctcaatacagtcaaac

SEQ ID NO: 18849 - DNA, 747 bp, synthetic construct
  source 1..747: mol_type = other DNA
ttaaaacagcctgtgggttgttcccacccacagggcccactgggcgctagcactctgattttacgaaatccttgtgtgcctgttttatatccctgccctaattcgtaacatagaagtaatgcgcaccactgatcaatagcaggcgtaacgcgccagttacgtctcgatcaagcacatctgtctccccggaccgagtatcaatagactgcttacgcggttgaaggagaaagcgttcgttatccggctaactacttcgagaagcccagtagcaccatggaagctgcagggtgtttcgctcagcacttcccccgtgtagatcaggtcgatgagccactgcaacccccacaggtgactgtggcagtggctgcgttggcggcctgcctatggggagacccataggacgctctaatgtggacatggtgcgaagagcctattgagctagttagtagtcctccggcccctgaatgcggctaatcctaactgcggagcacatgccttcaacccagagggtagtgtgtcgtaacgggcaactctgcagcggaaccgactactttgggtgtccgtgtttctttttattctcatattggctgcttatggtgacaattacagaattgttaccatatagctattggattggccatccggtgtgcaatagagctgttatatacctgtttgttggttttgtaccactaactttaaaatctatagctacccttaattttatactgaccctcaacacagttaaac

SEQ ID NO: 18850 - DNA, 747 bp, synthetic construct
  source 1..747: mol_type = other DNA
ttaaaacagcctgtgggttgcacccactcacagggcccacgtggcgctagcactctggttctacggaacctttgtgcgcctgttttacgccccctccccaatttgcaacttagaagcaatacgcaacactgatcaacagcaggcatggcgcaccagctatgtcttgatcaagcacttctgtttccccgggccgactatcaatagactgttcacacggttgaaggagaaagcgcccgttatccggctaactacttcgagaagcctagtagcaccatcgaagctgcagagtgtttcgctcagcacttcccccgtgtagatcaggtcgatgagtcactgcaatccccacgggcgaccgtggcagtggctgcgctggcggcctgcctatggggcaacccataggacgctctaatgtggacatggtgcgaagagtctattgagctagttagtagtcctccggcccctgaatgcggctaatcctaactgtggagcacatgccttcaatccagagggtagtgtgtcgtaatgggcaactctgcagcggaaccgactactttgggtgtccgtgtttccttttattcttacattggctgcttatggtgacaattacagaattgttaccatatagctattggattggccatccggtgtgcaatagagctattatatacctgtttgttggctttgtaccactaaccttaaaatctgtaatcaccctcgattttatattaacccttaatacaatcaaac

SEQ ID NO: 18851 - DNA, 747 bp, synthetic construct
  source 1..747: mol_type = other DNA
ttaaaacagcctgtgggttgcacccactcacaggacccacgtggtgctagcactctggttctacggaacccttgtgcgcctgttttacgccccctccccaatttgcaacttagaagcaattcacaacactgatcaatagcaggcatggcgcaccagccatgtcttgatcaagcacttctgtttccccggaccaagtatcaatagactgttcacgcggttgaaggagaaagcgtccgttatccggctaactacttcgagaaacccagtagcgccattgaaactgcagagtgtttcgctccacacttcccccgtgtagatcaggtcgatgagtcactgcaatccccacgggcgaccgtggcagtggctgcgctggcggcctgcctatggggcaacccataggacgctctaatgtggacatggtgcgaagagtctattgagctagttagtagtcctccggcccctgaatgcggctaatcctaactgcggagcacatgccttcaatccagagggtagtgtgtcgtaatgggcaactctgcagcggaaccgactactttgggtgtccgtgtttccttttattctcacattggctgcttatggtgacaattacagaattgttaccatatagctattggattggccatccggtgtgcaatagagctattatatacctatttgttggctttgtaccactaaccttaaaatctgtaaccactctcgactatatattaacccttaatacaatcaaac

SEQ ID NO: 18852 - DNA, 748 bp, synthetic construct
  source 1..748: mol_type = other DNA
ttaaaacagcctgtgggttgttcccacccacagggcccactgggcgctagcactctgatttcacgaaatctttgtgcgcctgttttatatcccttcccccagtctgaaacatagaagcaatgcgcatcactgatcaatagcaggcgtaacgcgccagttacgtcatgatcaagcacatctgtctccccggaccgagtatcaatagactgcttgcgcggttgaaggagaaacagttcgttacccggctaactacttcgagaagcccagtagcactatggaagctgcagggtgtttcgctcagcacttcccccgtgtagatcaggtcgatgagtcactgcaacccccacaggcgactgtggcagtggctgcgttggcggcctgcctatggggagacccataggacgctctaatgtggacatggtgtgaagagcctattgagctagttagtagtcctccggcccctgaatgcggctaatcctaactgcggagcacacgccctcaacccagagggtagtgtgtcgtaacgggcaactctgcagcggaaccgactactttgggtgtccgtgtttcttattattcttatattggctgcttatggtgacaattacagaattgttaccatatagctattggattggccatccggtgtgtaatagagctgttatatacctgtttgttggttttgtgccactgactttaaaatctatagttactcttaatttcatattggctctcaacacaattaaac

SEQ ID NO: 18853 - DNA, 747 bp, synthetic construct
  source 1..747: mol_type = other DNA
ttaaaacagcctgtgggttgttcccacccacagggcccactgggcgctagcactctgattttacgaaatccttgtgtgcctgttttatatcccttccccaacctgaaacatagaagtaatgcgcaccactgatcaatagcaggcgtaacgcgccagttacgtcacgatcaagcacatctgtctccccggaccgagtatcaatagactgcttacgcggttgaaggagaaagcgttcgttatccggctaactacttcgagaagcccagtagcaccatggaagctgcagggtgtttcgctcagcacttcccccgtgtagatcaggtcgatgagtcactgcaatccccacaggtgactgtggcagtggctgcgttggcggcctgcctatggggagacccataggacgctctaatgtggacatggtgcgaagagcctattgagctagttagtagtcctccggcccctgaatgcggctaatcctaactgcggagcacatgccttcaacccagatggtagtgtgtcgtaacgggtaactctgcagcggaaccgactactttgggtgtccgtgtttctttttattcttatattggctgcttatggtgacaattacagaattgttaccatatagctattggattggccatccggtgtgcaatagagctgttatatacctgtttgttggttttgtaccactgactttaaaatctataaccacccttaattttatattgaccctcaacacagtcaaac

SEQ ID NO: 18854 - DNA, 747 bp, synthetic construct; identical to SEQ ID NO: 1145
  source 1..747: mol_type = other DNA

SEQ ID NO: 18855 - DNA, 747 bp, synthetic construct
  source 1..747: mol_type = other DNA
ttaaaacagcctgtgggttgcacccactcacaggacccacgtggtgctagcactctggttctacggaacctttgtgcgcctgttttacgccccctccccaatttgcaatttagaagcgattcacaacacagatcaatagcaggcatggcgcaccagctatgtctcgatcaagcacttctgtttccccggaccgactatcaatagactgctcacgtggttgaaggagaaaacgtccgttatccggctaactacttcgagaaacctagtagcgccattgaaactgcagagtgtttcgctccacacttcccccgtgtagatcaggtcgatgagtcactgcaatccccacgggcgaccgtggcagtggctgcgctggcggcctgcctatggggcaacccataggacgctctaatgtggacatggtgcgaagagtctattgagctagttagtagtcctccggcccctgaatgcggctaatcctaactgcggagcacatgccttcaacccagagggtagtgtgtcgtaatgggcaactctgcagcggaaccgactactttgggtgtccgtgtttccttttattctcacattggctgcttatggtgacaattacagaattgttaccatatagctattggattggccatccggtgtgcaatagagctattatatacctatttgttggctttgtaccactaactttaaaatctgtaaccactctcgactatatattaaccctcaatacaaataaac

SEQ ID NO: 18856 - DNA, 747 bp, synthetic construct
  source 1..747: mol_type = other DNA
ttaaaacagcctgtgggttgcacccactcacaggacccacgtggtgctagcactctggttctacggaacctttgtgcgcctgttttacgccccctccccaatttgcaatttagaagcgattcacaacacagatcaatagcaggcatggcgcaccagctatgtctcgatcaagcacttctgtttccccggaccgactatcaatagactgctcacgtggttgaaggagaaaacgtccgttatccggctaactacttcgagaaacctagtagcgccattgaaactgcagagtgtttcgctccacacttcccccgtgtagatcaggtcgatgagtcactgcaatccccgcgggcgaccgtggcagtggctgcgctggcggcctgcctatggggcaacccataggacgctctaatgtggacatggtgcgaagagtctattgagctagttagtagtcctccggcccctgaatgcggctaatcctaactgcggagcacatgccttcaacccagagggtagtgtgtcgtaatgggcaactctgcagcggaaccgactactttgggtgtccgtgtttccttttattctcacattggctgcttatggtgataattacagaattgttaccatatagctattggattggccatccggtgtgcaatagagctattatatacctatttgttggctttgtaccactaactttaaaatctgtaaccactctcgactatatattaaccctcaatacaaataaac

SEQ ID NO: 18857 - DNA, 746 bp, synthetic construct
  source 1..746: mol_type = other DNA
ttaaaacagcctgtgggttgttcccacccacagggcccactggggcgctagcacactgattctgcgggatctttgtgcgcctgttttataacccttcccctaagtggcaacttagaagctttgtacaatcatgaccaatagtgggcgtggcgcgccagtcacgtcttggtcaagcacttctgtatccccggactgagtatcaatagactgctcacgcggttgaaggagaaaacgttcgttacccggctaactacttcgagaaacctagtagcaccatgaaagttgcggagtgtttcgctcagcacttcccccgtgtagatcaggtcgatgagtcactgtaaaccccacgggcgaccgtgacagtggctgcgttggcggcctgcccatggggtaacccatgggacgctctaatacagacatggtgcgaagagtctattgagctagttagcagtcctccggcccctgaatgcggctaatcctaactgcggagcgcgcaccctcaacccagggggcggcgtgtcgtaatgggtaactctgcagcggaaccgactactttgggtgtccgtgtttccttttactctttattggctgcttatggtgacaattgaaaagttgttaccatatagctattggattggccatccggtgtctaacagagctattgtttatctatttgttgcatacgtccctcttaatctcaaggtcattcaaactcttgattatatattgctccttaactgtaggaa

SEQ ID NO: 18858 - DNA, 747 bp, synthetic construct
  source 1..747: mol_type = other DNA
ttaaaacagcctgtgggttgcacccactcacaggacccacgtggtgctagcactctggttctacggaacctttgtgcgcctgttttacgccccctccccaatttgtaacttagaagcaatttacaacactgatcaatagcaggcatggcgcaccagctatgtcttgatcaagcacttctgtttccccggaccgagtatcaatagactgttcacacggttgaaggagaaagcgtccgttatccggctaactacttcgagaaacccagtagcgccattgaagctgcagagtgtttcgctccacacttcccccgtgtagatcaggtcgatgagtcactgcaatcctcacgggcgaccgtggcagtggctgcgctggcggcctgcctatggggcgacccataggacgctctaatgtggacatggtgcgaagagtctattgagctagttagtagtcctccggcccctgaatgcggccaatcctaactgcggagcacatgccttcaatccagagggtagtgtgtcgtaatgggcaactctgcagcggaaccgactactttgggtgtccgtgtttccttttattctcacactggctgcttatggtgacaattatagaattgttaccatatagctattggattggccatccggtgtgcaatagagctattatatacctgtttgttggctttataccactaaccttaaaatctgtaaccactctcgagtatatattaaccctcaatacaatcaaac

SEQ ID NO: 18859 - DNA, 747 bp, synthetic construct
  source 1..747: mol_type = other DNA
ttaaaacagcctgtgggttgcacccactcacaggacccacgtggtgctagcactctggttctacggaacccttgtgcgcctgttttacgccccctccccaatttgtaacttagaagcaatttacaacactgatcaatagcaggcatggcgcgccagctatgtcttgatcaagcacttctgtttccccggaccgagtatcaatagactgttcacacggttgaaggagaaagcgtccgttacccggctaactacttcgagaaacccagtagcgccattgaagctgcagagtgtttcgctccacacttcccccgtgtagatcaggtcgatgagtcactgcaatcctcacgggcgaccgtggcagtggctgcgctggcggcctgcctatggggcgacccataggacgctctaatgtggacatggtgcgaagagtctattgagctagttagtagtcctccggcccctgaatgcggctaatcctaactgcggagcacatgccttcaatccagagggtagtgtgtcgtaatgggcaactctgcagcggaaccgactactttgggtgtccgtgtttccttttattctcacattggctgcttatggtgacaattacagaattgttaccatatagctattggattggccatccggtgtgcaatagagctattatatacctatttgttggctttataccactaaccttaaaatctgtaaccactctcgagtatatattaaccctcaatacaatcaaac

SEQ ID NO: 18860 - DNA, 747 bp, synthetic construct
  source 1..747: mol_type = other DNA
ttaaaacagcctgtgggttgcacccactcacaggacccacgtggtgctagcactctggttctacggaacctttgtgcgcctgttttacgccccctccccaatttgtaacttagaagcaatttacaacactgatcaatagcaggcatggcgcaccagctatgtcttgatcaagcacttctgtttccccggaccgagtatcaatagactgttcacacggttgaaggagaaagcgtccgttatccggctaactacttcgagaaacccagtagcgccattgaagctgcagagtgtttcgctccacacttcccccgtgtagatcaggtcgatgagtcactgcaatcctcacgggcgaccgtggcagtggctgcgctggcggcctgcctatggggcgacccataggacgctctaatgtggacatggtgcgaagagtctattgagctagttagtagtcctccggcccctgaatgcggctaatcctaactgcggagcacatgccttcaatccagagggtagtgtgtcgtaatgggcaactctgcagcggaaccgactactttgggtgtccgtgtttccttttattctcacattggctgcttatggtgacaattacagaattgttaccatatagctattggattggccatccggtgtgcaatagagctattatatacctatttgttggctttataccactaactttaaaatctgtaaccactctcgagtatatattaaccctcaatacaatcaaac

SEQ ID NO: 18861 - DNA, 747 bp, synthetic construct
  source 1..747: mol_type = other DNA
ttaaaacagcctgtgggttgcacccactcacaggacccacgtggtgctagcactctggttctacggaacctttgtgcgcctgttttacgccccctccccaattcgtaacttagaagcaatttacaacactgatcaatagcaggcatggcgcaccagctatgtcttgatcaagcacttctgtttccccggaccgagtatcaatagactgttcacacggttgaaggagaaagcgtccgttatccggctaactacttcgagaaacccagtagcgccattgaagctgcagagtgtttcgctccacacttcccccgtgtagatcaggtcgatgagtcactgcaatcctcacgggcgaccgtggcagtggctgcgctggcggcctgcctatggggcgacccgtaggacgctctaatgtggacatggtgcgaagagtctattgagctagttagtagtcctccggcccctgaatgcggctaatcctaactgcggagcacatgccttcaatccagagggtagtgtgtcgtaatgggcaactctgcagcggaaccgactactttgggtgtccgtgtttccttttattctcacactggctgcttatggtgacaattacagaattgttaccatatagctattggattggccatccggtgtgcaatagagctattatatacctgtttgttggctttataccactaaccttaaaatctgtaaccactctcgagtatatattaaccctcaatacaatcaaac

SEQ ID NO: 18862 - DNA, 747 bp, synthetic construct
  source 1..747: mol_type = other DNA
ttaaaacagcctgtgggttgcacccactcacaggacccacgtggtgctagcactctggttctacggaacctttgtgcgcctgttttacgccccctccccaatttgtaacttagaagcaatttacaacactgatcaatagcaggcatggcgcaccagctatgtcttgatcaagcacttctgtttccccggaccgagtatcaatagactgttcacacggttgaaggagaaagcgtccgttatccggctaactacttcgagaaacccagtagcaccattgaagctgcagagtgtttcgctccacacttcccccgtgtagatcaggtcgatgagtcactgcaatcctcacgggcgaccgtggcagtggctgcgctggcggcctgcctatggggcgacccataggacgctctaatgtggacatggtgcgaagagtctattgagctagttagtagtcctccggcccctgaatgcggctaatcctaactgcggagcacatgccttcaatccagagggtagtgtgtcgtaatgggtaactctgcagcggaaccgactactttgggtgtccgtgtttccttttattctcacattggctgcttatggtgacaattacagaattgttaccatatagctattggattggccatccagtgtgcaatagagctattatatacctatttgttggctttataccactaaccttaaaatctgtaaccactctcgagtatatattaaccctcaatacaatcaaac

SEQ ID NO: 18863 - DNA, 747 bp, synthetic construct
  source 1..747: mol_type = other DNA
ttaaaacagcctgtgggttgcacccactcacaggacccacgtggtgctagcactctggttctacggaacctttgtgcgcctgttttacgccccctccccaatttgtaacttagaagcaatttacaacactgatcaatagcaggcatggcgcaccagctatgtcttgatcaagcacttctgtttccccggaccgagtatcaatagactgttcacacggttgaaggagaaagcgtccgttatccggctaactacttcgagaaacccagtagcgccattgaagctgcagagtgtttcgctccacacttcccccgtgtagatcaggtcgatgagtcactgcaatcctcacgggcgaccgtggcagtggctgcgctggcggcctgcctatggggcgacccataggacgctctaatgtggacatggtgcgaagagtctattgagctagttagtagtcctccggcccctgaatgcggctaatcctaactgcggagcacatgccttcaatccagagggtagtgtgtcgtaatgggcaactctgcagcggaaccgactactttgggtgtccgtgtttccttttattctcacactggctgcttatggtgacaattacagaattgttaccatatagctattggattggccatccggtgtgcaatagagctattatatacctgtttgttggctttataccactaaccttaaaatctgtaaccactctcgagtatatattaaccctcaatacaatcaaac

SEQ ID NO: 18864 - DNA, 747 bp, synthetic construct
  source 1..747: mol_type = other DNA
ttaaaacagcctgtgggttgcacccactcacaggacccacgtggtgctagcactctggttctacggaacccttgtgcgcctgttttacgccccctccccaatttgtaacttagaagcaatttacaacactgatcaatagcaggcatggcgcgccagctatgtcttgatcaagcacttctgtttccccggaccaagtatcaatacactgttcacacggttgaaggacaaagcgtccgttatccggctaactacttcgagaaacccagtaacgccattgaagctgcagagtgtttcgctccacacttcccccgtgtagatcaggtcgatgagtcactgcaatcctcacgggcgaccgtggcagtggctgcgctggcggcctgcctatggggcgacccataggacgctctaatgtggacatggtgcgaagagtctattgagctagttagtagtcctccggcccctgaatgcggctaatcctaactgcggagcacatgccttcaatccagagggtagtgtgtcgtaatgggcaactctgcagcgaaaccgactactttgggtgtccgtgtttccttttattctcacattggctgcttatggtgacaattacagaattgttaccatatagctattggattggccatccggtgtgcaatacatctattatatacctatttgttggctttataccactaaccttaaaatctgtaaccactctcgagtatatattaaccctcaatacaatcaaac

SEQ ID NO: 18865 - DNA, 747 bp, synthetic construct
  source 1..747: mol_type = other DNA
ttaaaacagcctgtgggttgcacccactcacaggacccacgtggtgctagcactctggttccacggaacctttgtgcgcctgttttacgccccctccccaatttgtaacttagaagcaatgtacaacactgatcaatagcaggcatggcgcaccagctatgtcttgatcaagcacttctgtttccccggaccgagtatcaatagactgttcacacggttaaaggagaaagcgtccgttatccggctaactacttcgagaaacccagtagcgccattgaagctgcagagtgtttcgctccacacttcccccgtgtagatcaggtcgatgagtcactgcaatccccacgggcgaccgtggcagtggctgcgctggcggcctgcctatggggcaacccataggacgctctaatgtggacatggtgcgaagagtctattgagctagttagtagtcctccggcccctgaatgcggctaatcctaactgcggagcacatgccttcaatccagagggtagtgtgtcgtgatgggcaactctgcagcggaaccgactactttgggtgtccgtgtttccttttattctcacattggctgcttatggtgacaattacagaattgttaccatatagctattggattggccatccggtgtgcaatagagctattatatacctatttgttggctttgtaccactaaccttaaaatccgtaaccactctcgagtatatattaaccctcaatacaatcaaac

SEQ ID NO: 18866 - DNA, 747 bp, synthetic construct
  source 1..747: mol_type = other DNA
ttaaaacagcctgtgggttgcacccactcacaggacccacgtggtgctagcactctggttctacggaacctttgtgcgcctgttttacgccccctccccaatttgtaacttagaagcaatttacaacactgatcaatagcaggcatggcgcaccagctatgtcttgatcaagcacttctgtttccccggaccgagtatcaatagactgttcacacggttgaaggagaaagcgtccgttatccggctagctacttcgagaaacccagtagcgccattgaagctgcagagtgtttcgctccacacttcccccgtgtagatcaggtcgatgagtcactgcaatcctcacgggcgaccgtggcagtggctgcgctggcggcctgcctatggggcgacccataggacgctctaatgtggacatggtgcgaagagtctattgagctagttagtagtcctccggcccctgaatgcggctaatcctaactgcggagcacatgccttcaatccagagggtagtgtgtcgtaatgggcaactctgcagcggaaccgactactttgggtgtccgtgtttccttttattctcacactggctgcttatggtgacaattacagaattgttaccatatagctattggattggccatccggtgtgcaatagagctattatatacctgtttgttggctttataccactaaccttaaaatctgtaaccactctcgagtatatattaaccctcaatacaatcaaac

SEQ ID NO: 18867 - DNA, 747 bp, synthetic construct
  source 1..747: mol_type = other DNA
ttaaaacagcctgtgggttgcacccactcacaggacccacgtggtgctagcactctggttctacggaacccttgtgcgcctgttttacgccccctccccaatttgtaacttagaagcaatttacaacactgatcaatagcaggcatggcgcgccagctatgtcttgatcaagcacttctgtttccccggaccgagtatcaatagactgttcacacggttgaaggagaaagcgtccgttacccggctaactacttcgagaaacctagtagcgccattgaagctgcagagtgtttcgctccacacttcccccgtgtagatcaggtcgatgagtcactgcaatcctcacgggcgaccgtggcagtggctgcgctggcggcctgcctatggggcgacccataggacgctctaatgtggacatggtgcgaaaagtctattgagctagttagtagtcctccggcccctgaatgcggctaatcctaactgcggagcacatgccttcaatccagagggtagtgtgtcgtaatgggcaactctgcagcggaaccgactactttgggtgtccgtgtttccttttattctcacattggctgcttatggtgacaattacagaattgttaccatatagctattggattggccatccggtgtgcaatagagctattatatacctatttgttggctttataccactaaccttaaaatctgtaaccactctcgagtatatattaaccctcaatacaatcaaac

SEQ ID NO: 18868 - DNA, 747 bp, synthetic construct
  source 1..747: mol_type = other DNA
ttaaaacagcctgtgggttgtacccactcacaggacccacgcggtgctagcactctggttccgcggaacctttgtgcgcctgttttacgtcccctccctaatttgtaacttagaagcaatttacagcactgatcaatagcaggcatggcgcaccagctatgtcttgatcaagcacctctgtttccccggaccgagtatcaatagactgttcacacggtcgaaggagaaagcgttcgttatccggctaactacttcgagaaacccagtagcgccattgaaactgcagagtgtttcgctccacacttcccccgtgtagatcaggtcgatgagtcactgcaatccccacgggcgaccgtggcagtggctgcgttggcggcctgcctatggggtaacccataggacgctctaatgtggacatggtgcgaagagtctattgagctagttagtagtcctccggcccctgaatgcggctaatcctaactgcggagcacatgccttcaatccagagggtagtgtgtcgtaatgggcaactctgcagcggaaccgactactttgggtgtccgtgtttccttttattctcacattggctgcttatggtgacaattacagaattgttaccatatagctattggattggccatccggtgtgcaatagagctattatatacctatttgttggctttgtaccactaaccttaaaatctgtaatcactctcgagtatatattgacccttaatacaattaaac

SEQ ID NO: 18869 - DNA, 747 bp, synthetic construct
  source 1..747: mol_type = other DNA
ttaaaacagcctgtgggttgtacccactcacaggacccacgcggtgctagcactctggttccacggaacctttgtgcgcctgttttacgtcccctccccaatttgtaacctagaagcaatttacagcactgatcaatagcaggcatggcgcaccagctatgtcttgatcaagcacctctgtttccccggaccgagtatcaatagactgttcacacggtcgaaggagaaagcgttcgttatccggctaactacttcgagaaacccagtagcgccattgaaactgcagagtgtttcgctccacacttcccccgtgtagatcaggtcgatgagtcactgcaatccccacgggcgaccgtggcagtggctgcgttggcggcctgcctatggggtaacccataggacgctctaatgtggacatggtgcgaagagtctattgagctagttagtaatcctccggcccctgaatgcggctaatcctaactgcggagcacatgccttcaatccagagggtagtgtgtcgtaatgggcaactctgcatcggaaccgactactttgggtgtccgtgtttccttttattctcacattggctgcttatggtgacaattaccgaattgctaccatatagctattggattggccatccggtgtgcaatacagctattatatacctatttgttggctttgtaccactaaccttaaaatctgtgatcactctcgagtatatattgacccttaatacaattaaac

SEQ ID NO: 18870 - DNA, 747 bp, synthetic construct
  source 1..747: mol_type = other DNA
ttaaaacagcctgtgggttgtacccactcacaggacccacgcggtgctagcactctggttccacggaacctttgtgcgcctgttttacgtcccttccccaatttgtaacttagaagcaatttacagcactgatcaatagcaggcatggcacaccagctatgtcttgatcaagtacctctgtttccccggaccgagtatcaatagactgttcacacggtcgaaggagaaagcgttcgttatccggctaactacttcgagaaacccagtagcgccattgaaactgcagagtgtttcgctccacacttcccccgtgtagatcaggtcgatgagtcactgcaatccccacgggcgaccgtggcagtggctgcgttggcggcctgcctatggggtaacccataggacgctctaatgtggacatggtgcgaagagtctattgagctagttagtagtcctccggcccctgaatgcggctaatcctaactgcggagcacatgccttcaatccagagggtagtgtgtcgtaatgggcaactctgcagcggaaccgactactttgggtgtccgtgtttccttttattctcacattggctgcttatggtgacaattacagaattgttaccatatagctattggattggccatccggtgtgcaatagagctattatatacctatttgttggctttgtaccactaaccttaagatctgtaatcactctcgagtatatattgacccttaatacaattaaac

SEQ ID NO: 18871 - DNA, 747 bp, synthetic construct
  source 1..747: mol_type = other DNA
ttaaaacagcctgtgggttgtacccactcacaggacccacgcggtgctagtactctggttccacggaacctttgtgcgcctgttttacgtcccctccccaatttgtaacttagaagcaatttacagcactgatcaatagcaggcatggcgcaccagctatgtcttgatcaagcacctctgtttccccggaccgagtatcaatagactgttcacacggtcgaaggagaaagcgttcgttatccggctaactacttcgagaaacccagtagcgccattgaaactgcagagtgtttcgctccacacttcccccgtgtagatcaggtcgatgagtcactgcaatccccacgggcgaccgtggcagtggctgcgttggcggcctgcctatggggtaacccataggacgctctaatgtggacatggtgcgaagagtctattgagctagttagtagtcctccggcccctgaatgcggctaatcctaactgcggagcacatgccttcaatccagagggtagtgtgtcgtaatgggcaactctgcagcggaaccgactactttgggtgtccgtgtttccttttattctcacattggctgcttatggtgacaattacagaattgttaccatatagctattggattggccacccggtgtgcaatagagctattatatacctatttgttggctttgtaccactaaccttaaaatctgtaatcactctcgagtatatattgacccttaatactattaaac

SEQ ID NO: 18872 - DNA, 747 bp, synthetic construct
  source 1..747: mol_type = other DNA
ttaaaacagcctgtgggttgtacccactcacaggacccacgcggtgctagcactctggttccacggaacctttgtgcgcctgttttacgtcccctccccaatttgtaacttagaagcaattcacagcactgatcaatagcaggcatggcgcaccagctatgtcttgatcaagcacctctgtttccccggaccgagtatcaatagactgttcacacggtcgaaggagaaagcgttcgttatccggctaactacttcgagaaacccagtagcgccattgaaactgcagagtgtttcgctccacacttcccccgtgtagatcaggtcgatgagtcactgcaatccccacgggcgaccgtggcagtggctgcgttggcggcctgcctatggggtaacccataggacgctctaatgtggacatggtgcgaagagtctattgagctagttagtagtcctccggcccctgaatgcggctaatcctaactgcggagcacatgccttcaatccagagggtaatgtgtcgtaatgggcaactctgcagcggaaccgactactttgggtgtccgtgtttccttttattctcacattggctgcttatggtgacaattacagaattgttaccatatagctattggattggccatccggtgtgcaatagagctattatatacctatttgttggctttgtaccactaaccttaaaatctgtaatcactctcgagtatatattgacccttaatacaattaaac

SEQ ID NO: 18873 - DNA, 747 bp, synthetic construct
  source 1..747: mol_type = other DNA
ttaaaacagcctgtgggttgtacccactcacaggacccacgcggtgctagcactctggttccacggaacctttgtgcgcctgttttacgtcccctccccaatttgtaacttagaagcaatttacagcactgatcaatagcaggcatggcgcaccagctatgtcttgatcaagcacctctgtttccccggaccgagtatcaatagactgttcacacggtcgaaggagaaagcgttcgttatccggctaactacttcgagaaacccagtagcgccattgaaactgcagagtgtttcgctccacacttcccccgtgtagatcaggtcgatgagtcactgcaatccccacgggcgaccgtggcagtggctgcgttggcggcctgcctatggggtaacccataggacgctctaatgtggacatggtgcgaagagtctattgagctagttagtagtcctccggcccctgaatgcggctaatcctaactgcggagcacatgccttcaatccagagggtagtgtgtcgtaatgggcaactctgcagcggaaccgactactttgggtgtccgtgtttccttttattctcacattggctgcttatggtgacaattacagaattgttaccatatagctattggattggccacccggtgtgcaatagagctattatatacctatttgttggctttgtaccactaaccttaaaatctgtaatcactctcgagtatatattgacccttaatactattaaac

SEQ ID NO: 18874 - DNA, 747 bp, synthetic construct
  source 1..747: mol_type = other DNA
ttaaaacagcctgtgggttgtacccactcacaggacccacgcggtgctagcactctggttccgcggaacctttgtgcgcctgttttacgtcccctccctaatttgtaacttagaagcaatttacagcactgatcaatagcaggcatggcgcaccagccatgtcttgatcaagcacctctgtttccccggactgagtatcaatagactgttcacacggtcgaaggagaaagcgttcgttatccggctaactacttcgagaaacccagtagcgccattgaaactgcagagtgtttcgctccacacttcccccgtgtagatcaggtcgatgagtcactgcaatccccacgggcgaccgtggcagtggctgcgttggcggcctgcctatggggtaacccataggacgctctaatgtggacatggtgcgaagagtctattgagctagttagtagtcctccggcccctgaatgcggctaatcctaactgcggagcacatgccttcaatccagagggtagtgtgtcgtaatgggcaactctgcagcggaaccgactactttgggtgtccgtgtttccttttattctcacattggctgcttatggtgacaattacagaattgttaccatatagctattggattggccgtccggtgtgcaatagagctattatatacctatttgttggctttgtaccactaaccttaaaatctgtaatcactctcgagtatatattgacccttaatacaattaaac

SEQ ID NO: 18875 - DNA, 747 bp, synthetic construct
  source 1..747: mol_type = other DNA
ttaaaacagcctgtgggttgtacccactcacaggacccacgcggtgctagcactctggttccacggaacctttgtgcgcctgttttacgtcccctccccaatttgtaacttagaagcaatttacagcactgatcaatagcaggcatggcgcaccagctatgtcttgatcaagcatctctgtttccccggaccgagtatcaatagactgttcacacggtcgaaggagaaagcgttcgttatccggctaactacttcgagaaacccagtagcgccattgaaactgcagagtgtttcgctccacacttcccccgtgtagatcaggtcgatgagtcactgcaatccccacgggcgaccgtggcagtggctgcgttggcggcctgcctatggggtaacccataggacgctctaatgtggacatggtgcgaagagtctattgagctagttagtagtcctccggcccctgaatgcggctaatcctaactgcggagcacatgccttcaatccagagggtagtgtgtcgtaatgggcaactctgcagcggaaccgactactttgggtgtccgtgtttccttttattctcacattggctgcttatggtgacaattacagaattgttaccatatagctattggattggccatccggtgtgcactagagctattatatacctatttgttggctttgtaccactaaccttaaaatctgtaatcactctcgagtatatattgacccttaatacaattaaac

SEQ ID NO: 18876 - DNA, 747 bp, synthetic construct
  source 1..747: mol_type = other DNA
ttaaaacagcctgtgggttgcacccacccacaggacccacgcggtgctagcactctggttctacggtacctttgtgcgcctgttttacgtcccctccccgatttgtaacttagaagcaatttgcaacactgatcagtagcaggcatagcgcaccagctatgtcttgatcaagcacttctgtttccccggaccgagtatcaatagactgttcacacggttgaaggagaaagcgtccgttatccggctaactacttcgagaaacccagtagcgccattgaaactgcagagtgtttcgctccacacttcccccgtgtagatcaggtcgatgagtcactgcaatccccacgggcgaccgtggcagtggctgcgctggcggcctgcctatggggcaacccataggacgctctaatgtggacatggtgtgaagagtctattgagctagttagtagtcctccggcccctgaatgcggctaatcctaactgcggagcacatgccttcaatccagagggtagtgtgtcgtaatgggcaactctgcagcggaaccgactactttgggtgtccgtgtttccttttattctcacattggctgcttatggtgacaattacggaattgttaccatatagctattggattggccatccggtgtgcaatagagctattatatacctatttgttggctttgtaccactgaccttaaaatctataaccactctcgagtgtatattaacccttaatacaatcaaac

SEQ ID NO: 18877 - DNA, 747 bp, synthetic construct
  source 1..747: mol_type = other DNA
tttaaaacagcctgtgggttgcacccactcacagggcccactgggcgctagcactccgattctgcggaatctttgtgcgcctgttttataaccctccccccgaaacttgcaacttagaagttatgtacgttactgatcaacagcaggcgtggcacaccagccatgtcttgatcaagcacttctgtaccccggactgagtatcaatagactgctcacgtggtcgaaggagaaaacgttcgttatccggctaactacttcgagaaacctagtagcaccactgaaactgcggagtgtttcgctcagcacttcccccgtgtagatcaggtcgatgagtcactgcttaccccacgggtgaccgtggcagtggctgcgttggcggcctgcctatggggcaacccgtaggacgctctaaagtggacatggtgcgaagagtctattgagctagttagtagtcctccggcccctgaatgcggctaatcctaactgcggagcgcatgccttcaaaccagagggtggtgcgtcgtaacgggtaactctgcagcggaaccgactactttgggtgtccgtgtttctcttattctcataatggctgcttatggtgacaattgaggaattgttaccatatagctattggattggccatccggtgtgcaacagagctattatctacttgtttgttggatacattccattaacacctaaatccttcaatacattgcactatatcttgacactgaacgcaagaaa

SEQ ID NO: 18878 - DNA, 747 bp, synthetic construct
  source 1..747: mol_type = other DNA
tttaaaacagcctgtgggttgtacccacccacagggcccactgggcgctagcactccgattctgcggaatctttgtgcgcctgttttataaccctcccccgaaacttgcaacttagaagttatgtacgttactgatcaacagcaggcgtggcacaccagccatgtcttgatcaagcacttctgtacccccggactgagtatcaatagactgcttacgtggtcgaaggagaaaacgttcgttatccggctaactacttcgagaaacctagtagcaccactgaaactgcggagtgtttcgctcagcacttcccccgtgtagatcaggtcgatgagtcactgcttaccccacgggtgaccgtggcagtggctgcgttggcggcctgcctatggggcaacccataggacgctctaaagtggacatggtgcgaagagtctattgagctagttggtagtcctccggcccctgaatgcggctaatcctaactgcggagcgcatgccctcaagccagagggtggtgcgtcgtaacgggtaactctgcagcggaaccgactactttgggtgtccgtgtttcttttattctcataatggctgcttatggtgacaattgaggaattgttaccatatagctattggattggccatccggtgtgcaacagagctattatctacttgtttgttggatacattccactaacacctaaatcctttaatacactgcactatattctgacgctgaacgcaagaaa

SEQ ID NO: 18879 - DNA, 747 bp, synthetic construct
  source 1..747: mol_type = other DNA
tttaaaacagcctgtgggttgtacccactcacagggcccactgggcgctagcactccgattctgcggaatctttgtgcgcctgttttataaccctcccccgagatctgcaacttagaagttatgtacgttactgatcaacagcaggcgtggcacaccagccatgtcttgatcaagcacttctgtacccccggactgagtatcaatagactgcttgcgtggtcgaaggagaaaacgttcgttatccggccaactacttcgagaaacctagtagcaccactgaaactgcggagtgtttcgctcagcacttcccccgtgtagatcaggtcgatgagtcactgcttaccccacgggtgaccgtggcagtggctgcgttggcggcctgcctatggggcaacccataggacgctctaaagtggacatggtgcgaagagtctattgagctagttggtagtcctccggcccctgaatgcggctaatcctaactgcggagcgcatgccctcaaaccagagggtggtgcgtcgtaacgggtaactctgcagcggaaccgactactttgggtgtccgtgtttcttttattctcataatggctgcttatggtgacaattaaggaattgttaccatatagctattggattggccatccggtgtgcaacagagctattatctacttgtttgttggatacatcccactaacacctaaatcctttaatacactgcactatattctgacgctgaacgcaagaaa

SEQ ID NO: 18880 - DNA, 747 bp, synthetic construct
  source 1..747: mol_type = other DNA
tttaaaacagcctgtgggttgtacccacccacagggcccactgggcgctagcactccgattctgcggaatctttgtgcgcctgttttataaccctcccccgaaacttgcaacttagaagttatgtacgttactgatcaacagcaggcgtggcacaccagccatgtcttgatcaagcacttctgtacccccggactgagtatcaatagactgcttgcgtggtcgaaggagaaaacgttcgttatccggccaactacttcgagaaacctagtagcaccactgaaactgcggagtgtttcgctcagcacttcccccgtgtagatcaggtcgatgagtcactgcttaccccacgggtgaccgtggcagtggctgcgttggcggcctgcctatggggcaacccataggacgctctaaagtggacatggtgcgaagagtctattgagctagttagtagtcctccggcccctgaatgcggctaatcctaactgcggagcgcatgccctcaaaccagagggtggtgcgtcgtaacgggtaactctgcagcggaaccgactactttgggtgtccgtgtttcttttattctcataatggctgcttatggtgacaattaaggaattgttaccatatagctattggattggccatccggtgtgcaacagagctattatctacttgtttgttggatacatcctactaacacctaaatcctttaatacactgcactatattctgacgctgaacgcaagaaa

SEQ ID NO: 18881 - DNA, 747 bp, synthetic construct
  source 1..747: mol_type = other DNA
tttaaaacagcctgtgggttgtacccacccacagggcccactgggcgctagcactccgattctgcggaatctttgtgcgcctgttttataaccctcccccgaaacttgcaacttagaagttatgtacgttactgatcaacagcaggcgtggcacaccagccatgtcttgatcaagcacttctgtacccccggactgagtatcaatagactgctcacgtggtcgaaggagaaaacgttcgttatccggctaactacttcgagaaacttagtagcaccattgaaactgcggagtgtttcgctcagcacttcccccgtgtagatcaggtcgatgagtcactgcttaccccacgggtgaccgtggcagtggctgcgttggcggcctgcctatggggcaacccataggacgctctaaagtggacatggtgcgaagggtctattgagctagttagtagtcctccggcccctgaatgcggctaatcctaactgcagagcgcatgccctcaaaccagagggtggtgcgtcgtaacgggtaactctgcagcggaaccgactactttgggtgtccgtgtttcttttattctcataatggctgcttatggtgacaattgaggaattgttaccatatagctattggattggccatccggtgtgcaacagagctattatctacttgtttgttggatacattccattaacacttaaatccttcaacacattgcactacattctaacgctgaacacaagaag

SEQ ID NO: 18882 - DNA, 747 bp, synthetic construct
  source 1..747: mol_type = other DNA
tttaaaacagcctgtgggttgtacccacccacagggcccactgggcgctagcactccgattctgcggaatctttgtgcgcctgttttataaccctcccccgaaacttgcaacttagaagttatgtacgttactgatcaacagcaggcgtggcacaccagccatgtcttgatcaagcacttctgtacccccggactgagtatcaatagactgctcacgtggtcgaaggagaaaacgttcgttatccggctaactacctcgagaaacctagtagcaccactgaaactgcggagtgtttcgctcagcacttcccccgtgtagatcaggtcgatgagtcactgcttaccccacgggtgaccgtggcagtggctgcgttggcggcctgcctatggggcaacccataggacgctctaaagtggacatggtgcgaagagtctattgagctagttagtagtcctccggcccctgaatgcggctaatcctaactgcggagcgcatgccttcaaaccagagggtggtgcgtcgtaacgggtaactctgcagcggaaccgactactttgggtgtccgtgtttctcttattctcataatggctgcttatggtgacaattgaggaattgttaccatatagctattggattggccatccggtgtgcaacagagctattatttacttgtttgttggatacattccattaacacctaaatccttcaatacattgcactatatcttgacactgaacgcaagaaa

SEQ ID NO: 18883 - DNA, 747 bp, synthetic construct
  source 1..747: mol_type = other DNA
tttaaaacagcctgtgggttgtacccacccacagggcccactgggcgctagcactccgattctgcggaatctttgtgcgcctgttttataaccctcccccgaaacttgcaacttagaagttatgtacgttactgatcaacagcaggcgtggcacaccagccatgtcttgatcaagcacttctgtacccccggactgagtatcaatagactgctcacgtggtcgaaggagaaaacgttcgttatccggctagctacttcgagaaacttagtagcaccactgaaactgcggagtgtttcgctcagcacttcccccgtgtagatcaggtcgatgagtcactgcttaccccacgggtgaccgtggcagtggctgcgttggcggcctgcctatggggcaacccataggacgctctaaagtggacatggtgcgaagagtctattgagctagctagtagtcctccggcccctgaatgcggctaatcctaactgcggagcgcatgccctcaaaccagagggtggtgcgtcgtaacgggtaactctgcagcggaaccgactactttgggtgtccgtgtttcttttattctcataatggctgcttatggtgacaattgaggaattgttaccatatagctattggattggccatccggtgtgcaacagagctattatctacttgtttgttggatacattccattaacacttaaatccttcaatacattgcactacattctaacgctgaacacaagaag

SEQ ID NO: 18884 - DNA, 747 bp, synthetic construct
  source 1..747: mol_type = other DNA
tttaaaacagcctgtgggttgtacccacccacagggcccactgggcgctagcactccgattctgcggaatctttgtgcgcctgttttataaccctccccccgaaactcgcaacttagaagttatgtacgtcactgatcaacagcaggcgtggcacaccagccatgtcttgatcaagcacttctgtaccccggactgagtatcaatagactgctcacgtggtcgaaggagaaaacgttcgttatccggctaactacttcgagaaacctagtagcaccactgaaactgcggagtgtttcgctcagcacttcccccgtgtagatcaggtcgatgagtcactgcttaccccacgggtgaccgtggcagtggctgcgttggcggcctgcctatggggcaacccataggacgctctaaagtggacatggtgcgaagagtctattgagctagttagtagtcctccggcccctgaatgcggctaatcctaactgcggagcgcatgccttcaaaccagagggtggtgcgtcgtaacgggtaactctgcagcggaaccgactactttgggtgtccgtgtttctcttattctcataatggctgcttatggtgacaattgaggaattgttaccatatagctattggattggccatccggtgtgcaacagagctattatctacttgtttgttggatacattccattaacacctaaatccttcaatacattgcactatatcttgacactgaacgcaagaaa

SEQ ID NO: 18885 - DNA, 747 bp, synthetic construct
  source 1..747: mol_type = other DNA
tttaaaacagcctgtgggttgtacccacccacagggcccactgggcgctagcactccgattctgcggaatctttgtgcgcctgttttataaccctcccccgaaacttgcaacttagaagttatgtacgttactgatcaacagcaggcgtggcacaccagccatgtcttgatcaagcacttctgtacccccggactgagtatcaatagactgctcacgtggtcgaaggagaaaacgttcgttacccgactaactacttcgagaaacctagtagcaccaccgaagctgcggagtgtttcgctcagcacttcccccgtgtagatcaggtcgatgagtcactgcttaccccacgggtgaccgtggcagtggctgcgttggcggcctgcctatggggcaacccataggacgctctaaagtggacatggtgcgaagagtctattgagctagttagtagtcctccggcccctgaatgcggctaatcctaactgcggagcgcatgccctcaaaccagggggttgtgcgtcgtaacgggcaactctgcagcggaaccgactactttgggtgtccgtgtttcttttattctcatgatggctgcttatggtgacaattgaggaattgttaccatatagctattggattggccatccggtgtgcaacagagctattatctacctgtttgttggatacattccattaacacttacatccttcaatacattgcactatattctaacgctgaacgtaagaaa

SEQ ID NO: 18886 - DNA, 747 bp, synthetic construct
  source 1..747: mol_type = other DNA
tttaaaacagcctgtgggttgtacccacccacagggcccactgggcgctagcactccgattctgcggaatctttgtgcgcctgttttataaccctcccccgaaacttgcaacttagaagttatgtacgttactgatcaacagcaggcgtggcacaccagccatgtcttggtcaagcacttctgtacccccggactgagtatcaatagactgctcacgcggtcgaaggagaaaacgttcgttatccggctaactacttcgagaaacttagtagcaccactgaaactgcggagtgtttcgctcagcacttcccccgtgtagatcaggtcgatgagtcactgcttaccccacgggtgaccgtggcagtggctgcgttggcggcctgcctatggggcaacccataggacgctctaaagtggacatggtgcgaagagtctattgagctagttagtagtcctccggcccctgaatgcggctaatcctaactgcggagcgcatgccctcaaaccagagggtggtgcgtcgtaacgggtaactctgcagcggaaccgactactttgggtgtccgtgtttcctttattctcataatggctgcttatggtgaccattgaggaattgccaccatatagctattggattggccatccggtgtgcaacagagctatcatctacttgtttgttggatacattccattaacacttaaatccttcaatacattgcactacattctaacgctgaacacaagaag

SEQ ID NO: 18887 - DNA, 747 bp, synthetic construct
  source 1..747: mol_type = other DNA
tttaaaacagcctgtgggttgtacccacccacagggcccactgggcgctagcactccgattctgcggaatctttgtgcgcctgttttataaccctcccccgaaacttgcaacttagaagttatgtacgttactgatcaacagcaggcgtggcacaccagccatgtcttgatcaagcacttctgtacccccggactgagtatcaatagactgctcacgtggtcgaaggagaaaacgttcgttatccggctaactacttcgagaaacctagtagcaccactgaaactgcggagtgtttcgctcagcacttcccccgtgtagatcaggtcgatgagtcactgcttaccccacgggtgaccgtggcagtggctgcgttggcggcctgcctatggggcaacccataggacgctctaaagtggacatggtgcgaagagtctattgagctagttagtagtcctccggcccctgaatgcggctaatcctaactgcggagcgcatgccttcaaaccagagggtggtgcgtcgtaacgggtaactctgcagcggaaccgactactttgggtgtccgtgtttctcttattctcataatggctgcttatggtgacaattgaggaattgttaccatatagctattggattggccatccggtgtgcaacagagctattatttacttgtttgttggatacattccattaacacctaaatccttcaatacattgcactatatcttgacactgaacgcaagaaa

SEQ ID NO: 18888 - DNA, 747 bp, synthetic construct
  source 1..747: mol_type = other DNA
tttaaaacagcctgtgggttgtacccacccacagggcccactgggcgctagcactccgattctgcggaatctttgtgcgcctgttttataaccctcccccgaaacttgcaacttagaagttatgtacgttactgatcaacagcaggcgtggcacaccagccatgtcttgatcaagcacttctgtaaccccggactgagtatcaatagactgctcacgtggtcgaaagagaaaacgttcgttatccggctaactacttcgagaaacctagtagcaccactgaaactgcggagtgtttcgctcagcacttcccccgtgtagatcaggtcgatgagtcactgcttaccccacgggtgaccgtggcagtggctgcgttggcggcctgcctatggggcaacccataggacgctctaaagtggacatggtgtgaagagtctattgagctagttagtagtcctccggcccctgaatgcggctaatcctaactgcggagcgcatgcccccaaaccagagggtggtgcgtcgtaacgggtaactctgcagcggaaccgactactttgggtgtccgtgtttcttttattctcataatggctgcttatggtgacaattgaggaattgttaccatatagctattggattggccatccggtgtgcaacagagctattatctacttgtttgttggatacattccattgacacctaaatccttcaatacattgcactatattctaacgttgaacgcaagaaa

SEQ ID NO: 18889 - DNA, 747 bp, synthetic construct
  source 1..747: mol_type = other DNA
tttaaaacagcctgtgggttgtacccacccacagggcccactgggcgctagcactccgattctgcggaatctttgtgcgcctgttttataaccctcccccgaaacttgcaacttagaagttatgtacgttactgatcaacagcaggcgtggcacaccagccatgtcttgatcaagcacttctgtacccccggactgagtatcaatagactgcttacgtggtcgaaggagaaaacgttcgttatccggctaactacttcgagaaacctagtagcaccactgaaactgcggagtgtttcgctcagcacttcccccgtgtagatcaggtcgatgagtcactgcttaccccacgggtgaccgtggcagtggctgcgttggcggcctgcctatggggcaacccataggacgctctaaagtggacatggtgcgaagagtctattgagctagttggtagtcctccggcccctgaatgcggctaatcctaactgcggagcgcatgccctcaaaccagagggtggtgcgtcgtaacgggtaactctgcagcggaaccgactactttgggtgtccgtgtttcttttattctcataatggctgcttatggtgacaattaaggaattgttaccatatagctattggattggccatccggtgtgcaacagagctattatctacttgtttgttggatacattccactaacacctaaatcctttaatacactgcactatattctgacgctgaacgcaagaaa

SEQ ID NO: 18890 - DNA, 747 bp, synthetic construct
  source 1..747: mol_type = other DNA
tttaaaacagcctgtgggttgtacccacccacagggcccactgggcgctagcactccgattctgcggaatctttgtgcgcctgttttataaccctcccccgaaacttgcaacttagaagttatgtacgttactgatcaacagcaggcgtggcacaccagccatgtcttgatcaagcacttctgtacccccggactgagtatcaatagactgtttacgtggtcgaaggagaaaacgttcgttatccggccaactacttcgagaaacctagtagcaccactgaaactgcggagtgtttcgctcagcacttcccccgtgtagatcaggtcgatgagtcactgcttaccccacgggtgaccgtggcagtggctgcgttggcggcctgcctatggggcaacccataggacgctctaaagtggacatggtgcgaagagtctattgagctagttggtagtcctccggcccctgaatgcggctaatcctaactgcggagcgcatgccctcaaaccagagggtagtgcgtcgtaacgggtaactctgcagcggaaccgactactttgggtgtccgtgtttcttttattctcataatggctgcttatggtgacaattgaggaattgttaccatatagctattggattggccatccggtgtgcaacagagctattatctacttgtttgttggatacattccactaacacctaaatcctttaatacactgcactatattctgacgctgaacgcaagaaa

SEQ ID NO: 18891 - DNA, 747 bp, synthetic construct
  source 1..747: mol_type = other DNA
tttaaaacagcctgtgggttgtacccacccacagggcccactgggcgctagcactccgattctgcggaatctttgtgcgcctgttttataaccctcccccgaaacttgcaacttagaagttatgtacgttactgatcaacagcaggcgtggcacaccagccatgtcttgatcaagcacttctgtaaccccggactgagtatcaatagactgctcacgtggtcgaaggagaaaacgttcgttatccggctaactacttcgagaagcctagtagcaccactgaaactgcggagtgtttcgctcagcacttcccccgtgtagatcaggtcgatgagtcactgcttaccccacgggcgaccgtggcagtggctgcgttggcggcctgcctatggggcaacccataggacgctctaaagtggacatggtgcgaagagtctattgagctagttagtagtcctccggcccctgaatgcggctaatcctaactgcggagcgcatgctctcaaaccagagggtggtgcgtcgtaacgggtaactctgcagcggaaccgactactttgggtgtccgtgtttctcttattttcataatggctgcttatggtgacaattgaggaattgttaccatatagctattggattggccatccggtgtgcaacagagctattatctacttgtttgttggatacattccattaacacctaagtccttcaatacattgcactatattctaacgctgaacacgagaag

SEQ ID NO: 18892 - DNA, 747 bp, synthetic construct
  source 1..747: mol_type = other DNA
ttaaaacagcctgtgggttgcacccactcacaggacccacgcggtgctagcactctggttccacgggacctttgtgcgcctgttttatgtcccctccccaatttgtaacttagaagcaatttgcaacactgatcagtagcaggcatagcgcaccagctatgtcttgatcaagcacttctgtttccccggaccgagtatcaatagactgtacacacggttgaaggagaaagcgttcgttatccggctaactacttcgagaaacccagtagcaccattgaaactacagagtgtttcgctccacacttcccccgtgtagatcaggtcgatgagtcactgcaatccccacgggcgaccgtggcagtggctgcgctggcggcctgcctatggggcaacccataggacgctctaatgtggacatggtgtgaagagtctattgagctagttagtagtcctccggcccctgaatgcggctaatcctaactgcggagcacatgccttcaatccagagggtagtgtgtcgtaatgggcaactctgcagcggaaccgactactttgggtgtccgtgtttccttttactctcacattggctgcttatggtgacaattacagaattgttaccatatagctattggattggccatccggtgcgcaatagagctataatatacctatttgttggctttgtaccactaaccttaaaatctttaaccactctcgagtgtatattaacccttaatacagtcaaac

SEQ ID NO: 18893 - DNA, 749 bp, synthetic construct
  source 1..749: mol_type = other DNA
ttaaaacagcctgtgggttgttcccacccacagggcccactgggcgctagcacactggcttcacggagcctttgtgcgcctgttttacgccccttaccccttaaattggtaacttagaagttttgcatacctgcgaccaacagcgggcatgacgcaccagtcatgtcttggtcaagcacttctgtttccccggactgagtatcaatagactgctcacgcggttgaaggagaaaacgttcgttacccggctggctacttcgagaaacccagtaacaccatgaaagttgcagagtgtttcgctcagcactacccccgtgtagatcaggtcgatgagccactgcgaaccccacgggcgaccgtggtagtggctgcgttggcggcctgcccatggggtgacccatgggacgctctaatacagacatggtgtgaagagtctattgagctggtcagtagtcctccggcccctgaatgcggctaatcctaactgcggagcacatgccctcaatccagggggtggtgtgtcgtaacgggtaactctgcagcggaaccgactactttgggtgtccgtgtttccttttattcttatcatggctgcttatggtgacaattgaaggattgttaccatatagctattggattggccatccggtgtctaacagagctattgtctatctatttgttgggtacgtccttcttgactataaggtccttcagactcttaagtacatcttgtaccttaatcaacagag

SEQ ID NO: 18894 - DNA, 749 bp, synthetic construct
  source 1..749: mol_type = other DNA
ttaaaacagcctgtgggttgttcccacccacagggcccattgggcgctagcacactggctttgcggagcctttgtgcgcctgttttatgccccttaccccttgaattggtaacttagaagttttgcatacctgcgaccaatagcgggcatgacgcaccagtcatgtcttggtcaagcacttctgttcccccggactgagtatcaatagactgctcacgcggtcgaaggagaaaacgttcgttatccggctggctacttcgagaaacccagtaacaccatgaaagttgcagagtgtttcgctcagcactacccccgtgtagatcaggtcgatgagtcactgcgaaccccacgggcgaccgtggcagtggctgcgctggcggcctgcccatggggtaacccatgggacgctctaatacagacatggtgtgaagagtctattgagctagtcagtagtcctccggcccctgaatgcggctaatcctaactgcggagcacatgccctcaatccagggggtggtgtgtcgtaacgggtaactctgcagcggaaccgactactttgggtgtccgtgtttccttttattcttatcatggctgcttatggtgacaattgaaggattgttgccatatagctattggattggccatccggtgtctaacagagctattgtttatctatttgttgggtacgtccttcttgactacaagacccttcagactcttaagtacatcttgtaccttaatcaaaagag

SEQ ID NO: 18895 - DNA, 749 bp, synthetic construct
  source 1..749: mol_type = other DNA
ttaaaacagcctgtgggttgtccccacccacagggcccactgggcgctagcacactggctttacggagcctttgtgcgcctgttttatgccccttcccccttaaattggtaacttagaagttttgcacacctgcgaccaatagcgggcatgacgcgccagtcatgtcttggtcaagcacttctgttcccccggactgagtatcaatagactgctcacgcggtcgaaggagaaaacgttcgtcacccggctggctacttcgagaaacccagtagcatcatgaaagttgcagagtgtttcgctcagcactacccccgtgtagatcaggtcgatgagtcactgcgaaccccacgggtgaccgtggcagtggctgcgttggcggcctgcccatggggtaacccatgggacgctctaatacagacatggtgtgaagagtctattgagctagccagtggtcctccggcccctgaatgcggctaatcctaactgcggagcacatgccctcaatccagggggtggtgtgtcgtaacgggtaactctgcagcggaaccgactactttgggtgtccgtgtttctttttattcttatcatggctgcttatggtgacaattgaaggattgttaccatatagctattggattggccatccggtgtctaacagagctattgtttttctatttgttggatacgtccctcttgattataaggcccttcagactcttaagtatatcttgtgccttaatcaaaagag

SEQ ID NO: 18896 - DNA, 749 bp, synthetic construct
  source 1..749: mol_type = other DNA
ttaaaacagcctgtgggttgtccccacccacagggcccattgggcgctagcacactggctttgcggagcctttgtgcgcctgttttatgccccttaccccttgaattggtaacttagaagttttgcatacctgcgaccaatagcgggcatgacgcaccagtcatgtcttggtcaagcacttctgttcccccggactgagtatcaatagactgctcacgcggtcgaaggagaaaacgttcgttatccggctggctacttcgagaaacccagtaacaccatgaaagttgcagagtgtttcgctcagcactacccccgtgtagatcaggtcgatgagtcactgcgaaccccacgggcgaccgtggcagtggctgcgctggcggcctgcccatggggtaacccatgggacgctctaatacagacatggtgtgaagagtctattgagctagtcagtagtcctccggcccctgaatgcggctaatcctaactgcggagcacatgccctcaatccagggggtggtgtgtcgtaacgggtaactctgcagcggaaccgactactttgggtgtccgtgtttccttttattcttatcatggctgcttatggtgacaattgaaggattgttgccatatagctattggattggccatccggtgtctaacagagctattgtttatctatttgttgggtacgtccttcttgactacaagacccttcagactcttaagtacatcttgtaccttaatcaaaagag

SEQ ID NO: 18897 - DNA, 749 bp, synthetic construct
  source 1..749: mol_type = other DNA
ttaaaacagcctgtgggttgttcccacccacagggcccactgggcgctagcacactggctctacggggcctttgtgcgcctgttttatgcccctttccccctaaattggtaacttagaagttttgcacacctgcgaccaatagcaggcatgacgcgccagtcatgtcttggtcaagcacttctgttcccccggactgagtatcaatagactgctcacgcggtcgaaggagaaaacgttcgtcatccggctggttacttcgagaaacccagtagcatcatgaaagttgcagagtgtttcgctcagcactacccccgtgtagatcaggtcgatgagtcactgcgaaccccacgggtgaccgtggcagtggctgcgttggcggcctgcccatggggtaacccatgggacgctctaatacagacatggtgtgaagagtctattgagctagccagtagtcctccggcccctgaatgcggctaatcctaactgcggagcacataccctcaatccagggggtggtgtgtcgtaacgggtaactctgcagcggaaccgactactttgggtgtccgtgtttctttttattcttattatggctgcttatggtgacaattgaaggattgttaccatatagctgttggattggccatccggtgtctaacagagctattgtttatctatttgttggatacgtccctcttgattacaaggcccttcagactctcaagtgcatcttgtaccttaatcaaaagag

SEQ ID NO: 18898 - DNA, 749 bp, synthetic construct
  source 1..749: mol_type = other DNA
ttaaaacagcctgtgggttgttcccacccacagggcccactgggcgctagcacactggctttacggggcctttgtgcgcctgttttatgccccttcccccctaaattggtaacttagaagtttagcacacctgcgaccaatagcaggcatgacgcgccagtcatgtcttggtcaagcacttctgttcccccggactgagtatcaatagactgctcacgcggtcgaaggagaaaacgttcgtcatccggctggttacttcgagaaacccagtagcatcatgaaagttgcagagtgtttcgctcagcactacccccgtgtagatcaggtcgatgagtcactgcgaaccccacgggtgaccgtggcagtggctgcgttggcggcctgcccatggggtaacccatgggacgctctaatacagacatggtgtgaagagtctattgagctagccagtagtcctccggcccctgaatgcggctaatcctaactgcggagcacataccctcaatccagggggtggtgtgtcgtaacgggtaactctgcagcggaaccgactactttgggtgtccgtgtttctttttattcttattatggctgcttatggtgacaattgaaggattgttaccatatagctgttggattggccatccggtgtctaacagagctattgtttatctatttgttggatacgtccctcttgattacaaggccctacagactctcaagtacatcttgtaccttaatcaaaagag

SEQ ID NO: 18899 - DNA, 749 bp, synthetic construct
  source 1..749: mol_type = other DNA
ttaaaacagcctgtgggttgtccccacccacagggcccactgggcgctagcacactggctttacggagcctttgtgcgcctgttttatgccccttaccccttaaatttgtaacttagaagtcctgcatacctacgaccaatagcgggcatgacgcaccagtcgtgtcttggtcaagcacttctgttcccccggactgagtatcaatagactgctcacgcggtcgaaggagaaaacgttcgttatccggctggctacttcgagaaacccagtaacaccatgaaagttgcagagtgtttcgctcagcactacccccgtgtagatcaggtcgatgagtcactgcgaaccccacgggcgaccgtggcagtggctgcgttggcggcctgcccatggggagacccatgggacgctctaatacagacatggtgtgaagagtctattgagctagtcagtagtcctccggcccctgaatgcggctaatcctaactgcggagcacatgccctcaatccagggggtggtgtgtcgtaacgggtaactctgcagcggaaccgactactttgggtgtccgtgtttctttttattcttatcatggctgcttatggtgacaattaaaggattgttaccatatagctattggattggccatccggtgtctaacagagctattgtttatctatttgttgggtacatccttcttgactataaggcccttcagactcttaagtacatcttgtaccttaatcaaaagag

SEQ ID NO: 18900 - DNA, 747 bp, synthetic construct
  source 1..747: mol_type = other DNA
tttaaaacagcctgtgggttgtacccacccacagggcccactgggcgctagcactctgattctgcggaatctttgtgcgcctgttttataaccctcccccgaaacttgtaacttagaagttatgcacgttactgatcaacagcaggcgtggcacaccagccatgtcttgatcaagcacttctgtacccccggactgagtatcaatagactgctcacgtggtcgaaggagaaaacgttcgttatccggctaactacttcgagaaacctagtagcaccactgaaactgcggagtgtttcgctcagcacttcccccgtgtagatcaggccgatgagtcactgcacaccccacgggtgaccgtggcagtgactgcgttggcggcctgcctatggggcaacccataggacgctctaaagtggacatggtgcgaagagtctattgagctagttagtagtcctccggcccctgaatgcggctaatcctaactgcggagcgcatgccctcaaaccagagggtggtgcgtcgtaacgggaaactctgcagcggaaccgactactttgggtgtccgtgtttcttttattcttataaaggctgcttatggtgacaattgaggaattgttaccatatagctattggattggccatccggtgtgcaacagagctattatctacttgtttgttggatacactccattaacacctaaatccttcaacacattgcactacattctaacgttgaacacaagaaa

SEQ ID NO: 18901 - DNA, 747 bp, synthetic construct
  source 1..747: mol_type = other DNA
tttaaaacagcctgtgggttgtacccacccacagggcccactgggcgctagcactccgattctgcggaatctttgtgcgcctgttttataaccctcccccgaaacttgcaatttagaagttatgtacattactggtcaacagcaggcgtggcacaccagccatgtcttgatcaagcacttctgtacccccggactgagtatcaatagactgctcacgtggtcgaaggagaaaacgttcgttatccggctaactacttcgagaaacttagtaacaccactgaaactgcggagtgtttcgctcagcacttcccccgtgtagatcaggtcgatgagtcactgcttaccccacgggtgaccgtggcagtggctgcgttggcggcctgcctatggggcaacccataggacgctctaaagtggacatggtgcgaagagtctattgagctagttagtagtcctccggcccctgaatgcggctaatcctaactgcggagcgcatgccctcaaaccagagggtggtgcgtcgtaacgggtaactctgcagcggaaccgactactttgggtgtccgtgtttcttttattctcataatggctgcttatggtgacaattgaggaattgttaccatatagctattggattggccatccggtgtgcaacagagctattatctacttgtttgttggatacattccattaacacttaaatcctttaatacattgcactacattctaacgctgaacacaagaag

SEQ ID NO: 18902 - DNA, 747 bp, synthetic construct
  source 1..747: mol_type = other DNA
ttaaaacagcctgtgggttgttcccactcacagggcccactgggcgctagcacactgattctgcgggatctttgtgcgcctgttttataaccctttccctaagcagcaatttaaaagctttgtacaaacacgaccaatagtgggcgtgacgcgccagtcacgtcttggtcaagcacttctgtatccccggactgagtaccaatagactgctcacgcggttgaaggggaaaacgttcgttacccggctaactacttcgagaaacctagtagtaccatgaaagttgcggagtgtttcgctcagcacttcccccgtgtagatcaggtcgatgagtcactgtaaaccccacgggcgaccgtgacagtggctgcgttggcggcctgcccatggggtaacccatgggacgctctaatacagacatggtgcgaagagtctattgagctagttagcagtcctccggcccctgaatgcggctaatcctaactgcggagcgcgcaccctcaacccagggggcggcgtgtcgtaatgggtaactctgcagcggaaccgactactttgggtgtccgtgtttccttttttattctttattggctgcttatggtgacaattgaaaagttgttaccatatagctattggattggccatccggtgtctaacagagctattgtttacctatttattggattcgtccctcttaatctcaaggccattcaaactcttgattatatattgctccttaactgtaggaa

SEQ ID NO: 18903 - DNA, 747 bp, synthetic construct
  source 1..747: mol_type = other DNA
ttaaaacagcctgtgggttgttcccacccacagggcccactgggcgctagcacactgattctgcgggatctttgtgcgcctgttttataaccctttccctaagcagcaacttagaagctttgtacaatcacgaccaatagtgggcgtgacgcgccagtcacgtcttggtcaagcacttctgtatccccggactgagtaccaatagactgctcacgcggttgaaggggaaaacgttcgttacccggctaactacttcgagaaacctagtagtaccatgaaagttgcggagtgtttcgctcagcacttcccccgtgtagatcaggtcgatgagtcactgtaaaccccacgggcgaccgtgacagtggctgcgttggcggcctgcccatggggtaacccatgggacgctctaatacagacatggtgcgaagagtctattgagctagttagcagtcctccggcccctgaatgcggctaatcctaactgcggagcgcgcaccctcaacccagggggcggcgtgtcgtaatgggtaactctgcagcggaaccgactactttgggtgtccgtgtttccttttttattctttattggctgcttatggtgacaattgaaaagttgttaccatatagctattggattggccatccggtgtctaacagagctattgtttacctatttattggattcgtccctcttaatctcaaggccattcaaactcttgattatatattgctccttaactgtaggaa

SEQ ID NO: 18904 - DNA, 742 bp, synthetic construct
  source 1..742: mol_type = other DNA
ttaaaacagcctgtgggttgcacccacccacagggcccactgggcgcgagcactctggtacctcggtacctttgtgcgcctgttttataccccctccccaatgaaacttagaagcagtaaaccacgatcaatagcaggcataacgctccagttatgtcttgatcaagcacttctgtttccccggactgagtatcaatagactgctcgcgcggttgaaggagaaaacgttcgttatccggctaactacttcgggaaacctagtaacgccatgaaagttgcggagagcttcgttcagcactcccccagtgtagatcaggtcgatgagtcaccgcattccccacgggcgaccgtggcggtggctgcgttggcggcctgcccatggggtaacccatggggcgctctaatacggacatggtgtgaagagtctactgagctagttagtagtcctccggcccctgaatgcggctaatcctaactgcggagcacacgcccacgagccagcgggtagtgtgtcgtaatgggtaactctgcagcggaaccgactactttgggtgtccgtgtttccttttatcttttcattggctgcttatggtgacaattaaagaattgttaccatatagctattggattggccatccggtgtgcaacagagcaattgtttacctatttattggttttgtaccattaaccttgagtactgtgaccaccctcaattatattttgacccttaacgcagccaaac

SEQ ID NO: 18905 - DNA, 749 bp, synthetic construct
  source 1..749: mol_type = other DNA
tgtgctcttccgatctgtgggttgttcccacccacagggcccactgggcgccagcactctgattccacggaatctttgtgcgcctgttttacaacccttccccaacttgtaacgtagaagtaatacacactactgatcaatagcaggcatggcgcgccagtcatgtctcgatcaagcacttctgttcccccggactgagtatcaatagactgctcacgcggttgaaggagaaaacgttcgttacccggctaactacttcgagaaacctagtagcaccatagaagctgcagagtgtttcgctcagcacttcccccgtgtagatcaggctgatgagtcactgcaatccccacgggcgaccgtggcagtggctgcgttggcggcctgcctatggggcaacccataggacgctctaatgtggacatggtgcgaagagtctattgagctagttagtagtcctccggcccctgaatgcggctaatcctaactgcggagcacatgccttcaacccagaaggtggtgtgtcgtaacgggcaactctgcagcggaaccgactactttgggtgtccgtgtttctttttattcctatattggctgcttatggtgacaatcacggaattgttgccatatagctattggattggccatccggtgtctaatagagctattgtgtacctatttgtcggatttactccgttatcacataaatctctgaacactttgtgctttatattgaacttaaacacacgaaa

SEQ ID NO: 18906 - DNA, 744 bp, synthetic construct
  source 1..744: mol_type = other DNA
cagtgggccctgtgggtgggtacaacccacagggcccactgggcgctagcactctgattccacggaatctttgtgcgcctgttttatatcccctccccaagttgtaacttagaagtattacactacaatgatcagtagcaggcgtggcgcaccagccatgtctcgatcaagcacttctgtttccccggaccgagtatcaatagactgctaacgcggttgaaggagaaaacgttcgttatccggctaactacttcgagaaacctagtagcgccatcgaagctgcggggcgtttcgctcagcacttcccccgtgtagatcaggtcgatgagtcactgcaatcctcacgggcgaccgtggcagtggctgcgttggcggcctgcctatggggcaacccataggacgcttcaaagtggacatggtgtgaagagtctattgagctagttagtagtcctccggcccctgaatgcggctaatcctaactgcggagcacataccttcaatccagaaggtagtgtgtcgtaacgggcaactctgcagcggaaccgactactttgggtgtccgtgtttccttttattctcttattggctgcttatggtgacaattgaagaattgttgccatatagctattggattggccatccagtgtctaacagagcaattgtgtacttatttgttggttttgtccctttgtcttacacgtctcttagcactttgtattacattataaagttgaactcggagag

SEQ ID NO: 18907 - DNA, 746 bp, synthetic construct
  source 1..746: mol_type = other DNA
tttaaaacagcctgtgggttgtacccacccacagggcccactgggcgccagcactctgattctacggaatctttgtgcgcctgttttacaacccccccgaaatttgcaacttagaagttatgcacattactgatcaatagcaggcgtgacacgccagtcatgtcttgatcaagcacttctgtatccccggactgagtatcaatagactgctcacgtggtcgaaggagaaaacgttcgttatccggctaactacttcgagaaacctagtagcaccagtgaaactgcggagtgtttcgctcagcacttcccccgtgtagatcaggtcgatgagtcactgcttaccccacgggtgaccgtggcagtggctgcgttggcggcctgcctatggggcaacccataggacgctctaaagtggacatggtgtgaagagtctattgagctagttagtagtcctccggcccctgaatgcggctaatcctaactgcggagcgcatgccttcaagccagagggtggtgcgtcgtaacgggcaactctgcagcggaaccgactactttgggtgtccgtgtttctttttattctcataatggctgcttatggtgacaattaaagaattgttaccatatagctattggattggccatccggtgtgcaacagagctattgtctacttatttgttggatacattccattaacacttaaatcccttaacacattgcaatacattctaacactgaacgcaagaaa

SEQ ID NO: 18908 - DNA, 747 bp, synthetic construct
  source 1..747: mol_type = other DNA
ttaaaacagcctgtgggttgtacccacccacagggcccactgggcgctagcactctgattctgcggaacctttgtgcgcctgttttataacccttccccgatttgtaacttagaagctatgaacttcaccgatcaatagtaggcgtggcgcaccagctacgtcttgatcaagcacttctgtttccccgggctgagtatcaatagactgcttgcgtggtcgaaggagaaaacgctcgttacccgactaactacttcgagaaacccagtaacaccaccgaaaccgcggagtgtttcgctcagcacttcccccgtgtagatcaggtcgatgagtcactgcaatccccacgggcgaccgtggcagtggctgcgttggcggcctgcctatggggcaacccataggacgctctaaggtggacatggtgtgaagagtctattgagctagttagtagtcctccggcccctgaatgcggctaatcctaactgcggagcgcatgcccccaaaccagagggtggtgcgtcgtaatgggcaactctgcagcggaaccgactactttgggtgtccgtgtttccttttattctcttaatggctgcttatggtgacaattaaggaattgttaccatatagctattggattggccatccggtgtgtagtagagctattatttatttatttgttggttttgtaccattgaattcaagatctgtaaccactctacactatatactgatcctcaatacggctaagc

SEQ ID NO: 18909 - DNA, 747 bp, synthetic construct
  source 1..747: mol_type = other DNA
ttaaaacagcctgtgggttgcacccactcacaggacccacgtggtgctagcactctggttctacggaacctttgtgcgcctgttttacgccccctccccaatttgcaacttagaagcaattcacaacactgatcaatagcaggcatggcgcaccagctatgtcttgatcaagcacttctgtttccccggaccgagtatcaatagactgttcacgcggttgaaggagaaagcgtccgttatccggctaactacttcgagaaacccagtagcgccattgaaactgcagagtgtttcgctccacacttcccccgtgtagatcaggtcgatgagtcactgcaatccccacgggcgaccgtggcagtggctgcgctggcggcctgcctatggggcaacccataggacgctctaatgtggacatggtgcgaagagtctattgagctagttagtagtcctccggcccctgaatgcggctaatcctaactgcggagcacatgccttcaatccagagggtagtgtgtcgtaatgggcaactctgcagcggaaccgactactttgggtgtccgtgtttccttttattctcacattggctgcttatggtgacaattacagaattgttaccatatagctattggattggccatccggtgtgcaatagagctattatatacctatttgttggctttgtaccactaaccttaaaatctgtaaccactctcgactatatattaaccctcaatacaatcaaac

SEQ ID NO: 18910 - DNA, 747 bp, synthetic construct
  source 1..747: mol_type = other DNA
ttaaaacagcctgtgggttgcacccactcacaggacccacgtggtgctagcactctggttctacggaacctttgtgcgcctgttttacgccccctccccaatttgcaacttagaagcaattcacaacactgatcaatagcaggcatggcgcaccagctatgtcttgatcaagcacttctgtttccccggaccgagtatcaatagactgttcacgcggttgaaggagaaagcgtccgttatccggctaactacttcgagaaacccagtagcgccattgaaactgcagagtgtttcgctccacacttcccccgtgtagatcaggtcgatgagtcactgcaatccccacgggcgaccgtggcagtggctgcgctggcggcctgcctatggggcaacccataggacgctctaatgtggacatggtgcgaagagtctattgagctagttagtagtcctccggcccctgaatgcggctaatcctaactgcggagcacatgccttcaacccagagggtagtgtgtcgtaatgggcaactctgcagcggaaccgactactttgggtgtccgtgtttccttttattctcacattggctgcttatggtgacaattacagaattgttaccatatagctattggattggccatccggtgtgcaatagagctattatatacctatttgttggctttgtaccactaaccttaaaatctgtaaccactctcgactatatattaaccctcaatacaatcaaac

SEQ ID NO: 18911 - DNA, 747 bp, synthetic construct
  source 1..747: mol_type = other DNA
ttaaaacagcctgtgggttgcacccactcacaggacccacgtggtgctagcactctggttttacggaacctttgtgcgcctgttttacgccccctccccaatttgtaacatagaagcaattcacaacactgatcaatagcaggcatggcgcaccagctatgtcttgatcaagcacttctgtttccccggaccgagtatcaatagactgttcacgcggttgaaggagaaagcgtccgttatccggctaactacttcgagaaacccagtagcgccattgaaactgcagagtgtttcgctccacacttcccccgtgtagatcaggtcgatgagccactgcaaccctcacgggcgaccgtggcagtggctgcgctggcggcctgcctatggggcaacccataggacgctctaatgtggacatggtgcgaagagtctattgagctagttagtaatcctccggcccctgaatgcggctaatcctaactgcggagcacatgccttcaatccagagggtagtgtgtcgtaatgggcaactctgcagcggaaccgactactttgggtgtccgtgtttccttttattctcacattggctgcttatggtgacaattacagaattgttaccatatagctattggattggccatccggtgtgcaatagagctattgtatacctatttgttggctttgtaccactaaccttaaaatctgtaatcactctcgactatatattaaccctcaatacaatcaaac

SEQ ID NO: 18912 - DNA, 747 bp, synthetic construct
  source 1..747: mol_type = other DNA
ttaaaacagcctgtgggttgcacccactcacaggacccacgtggtgctagcactctggttctacggaacctttgtgcgcctgttttacgccccctccccaatttgtaatttagaagcgattcacaacacagatcaatagcaggcatggcgcaccagctatgtctcgatcaagcacttctgtttccccggaccgagtatcaatagactgctcacgtggttgaaggagaaaacgtccgttatccggctaactacttcgagaaacctagtagcgccattgaaactgcagagtgtttcgctccacacttcccccgtgtagatcaggtcgatgagtcactgcaatccccacgggcgaccgtggcagtggctgcgctggcggcctgcctatggggcaacccataggacgctctaatgtggacatggtgcgaagagtctattgagctagttagtagtcctccggcccctgaatgcggctaatcctaactgcggagcacatgccttcaacccagagggtagtgtgtcgtaatgggcaactctgcagcggaaccgactactttgggtgtccgtgtttccttttattctcacattggctgcttatggtgacaattacagaattgttaccatatagctattggattggccatccggtgtgcaatagagctattatatacctatttgttggctttgtaccactaaccttaaaatctgtaaccactctcgactatatattaaccctcaatacaaataaac

SEQ ID NO: 18913 - DNA, 747 bp, synthetic construct
  source 1..747: mol_type = other DNA
ttaaaacagcctgtgggttgcacccactcacagggcccacgtggtgctagcactctggttctacggaacctttgtgcgcctgttttacgccccctccccaatttgcaatttagaagcgattcacaacacagatcaatagcaggcatggcgcaccagctatgtctcgatcaagcacttctgtttccccggaccgagtatcaatagactgctcacgtggttgaaggagaaaacgtccgttatccggctaactacttcgagaaacctagtagcgccattgaaactgcagagtgtttcgctccacacttcccccgtgtagatcaggtcgatgagtcactgcaatccccacgggcgaccgtggcagtggctgcgctggcggcctgcctatggggcaacccataggacgctctaatgtggacatggtgcgaagagtctattgagctagttagtagtcctccggcccctgaatgcggctaatcctaactgcggagcacatgccttcaacccagagggtagtgtgtcgtaatgggcaactctgcagcggaaccgactactttgggtgtccgtgtttccttttattctcacattggctgcttatggtgacaattacagaattgttaccgtatagctattggattggccatccggtgtgcaatagagctattatatacctatttgttggctttgtaccactaaccttaaaatctgtaaccactctcgactatatattaaccctcaatacaaataaac

SEQ ID NO: 18914 - DNA, 747 bp, synthetic construct
  source 1..747: mol_type = other DNA
ttaaaacagctctggggttgcacccacccacaggacccacgcggtgctagcactctggttccacgggacctttgtgcgcctgttttatgtcccctccccaattcgtaacctagaagcaatttgcaacactgatcaatagcaggcatggcgcaccagctatgtcttgatcaagcacttctgtttccccggaccgagtatcaatagactgttcacacggttgaaggagaaagcgtccgttatccggctaactacttcgagaaacccagtagcgccattgaaactgcagagtgtttcgctccacacttcccccgtgtagatcaggtcgatgagtcactgcgacccccacgggcgaccgtggcagtggctgcgctggcggcctgcctatggggcaacccataggacgctctaatgtggacatggtgtgaagagtctattgagctagttagtagtcctccggcccctgaatgcggctaatcccaactgcggagcacatgccttcgatccagagggtagtgtgtcgtaatgggcaactctgcagcggaaccgactactttgggtgtccgtgtttccttttattcttacattggctgcttatggtgacaatcacagaattgttaccatatagctattggattggccatccggtgtgtaatagagctattatatatctatttgttggctttgtaccactgactttaaaatctgtaactactcttgagtgtatattaacccttaatacaatcaaac

SEQ ID NO: 18915 - DNA, 747 bp, synthetic construct
  source 1..747: mol_type = other DNA
ttaaaacagctctggggttgcacccacccacaggacccacgcggtgctagcactctggttccacgggacctttgtgcgcctgttttatgtcccctccccaattcgtaacctagaagcaatttgcaacactgatcaatagcaggcatggcgcaccagctatgtcttgatcaagcacttctgtttccccggaccgagtatcaatagactgttcacacggttgaaggagaaagcgtccgttatccggctaactacttcgagaaacccagtagcgccattgaaactgcagagtgtttcgctccacacttcccccgtgtagatcaggtcgatgagtcactgcgacccccacgggcgaccgtggcagtggctgcgctggcggcctgcctatggggcaacccataggacgctctaatgtggacatggtgtgaagagtctattgagctagttagtagtcctccggcccctgaatgcggctaatcccaactgcggagcacatgccttcgatccagagggtagtgtgtcgtaatgggcaactctgcagcggaaccgactactttgggtgtccgtgtttccttttattcttacattggctgcttatggtgacaatcacagaattgttaccatatagctattggattggccatccggtgtgtaatagagctattatatatctatttgttggcttcgtaccactgactttaaaatctgtaactactctcgagtgtatattaacccttaatacaatcaaac

SEQ ID NO: 18916 - DNA, 747 bp, synthetic construct
  source 1..747: mol_type = other DNA
ttaaaacagctctggggttgcacccacccacaggacccacgcggtgctagcactctggttccacgggacctttgtgcgcctgttttatgtcccctccccaattcgtaacctagaagcaatttgcaacactgatcaatagcaggcatggcgcaccagctatgtcttgatcaagcacttctgtttccccggactgagtatcaatagactgttcacacggttgaaggagaaagcgtccgttatccggctaactacttcgagaaacccagtagcgccattgaaactgcagagtgtttcgctccacacttcccccgtgtagatcaggtcgatgagtcactgcgacccccacgggcgaccgtggcagtggctgcgctggcggcctgcctatggggcaacccataggacgctctaatgtggacatggtgtgaagagtctattgagctagttagtagtcctccggcccctgaatgcggctaatcccaactgcggagcacatgccttcgatccagagggtagtgtgtcgtaatgggcaactctgcagcggaaccgactactttgggtgtccgtgtttccttttattcttacattggctgcttatggtgacaatcacagaattgttaccatatagctattggattggccatccggtgtgtaacagagctattatatatctatttgttggctttgtaccactgactttaaaatctgtgactactcttgagtgtatattaacccttaatacaatcaaac

SEQ ID NO: 18917 - DNA, 746 bp, synthetic construct
  source 1..746: mol_type = other DNA
ttaaaacagctgtgggttgtacccactcacagggcccacgtggcgctagcactctggttctgcggaacctttgtgcgcctgttttacgcccgccccccaatttgcaacttagaagcaatacacaacactgatcaacagcaggcatggcgcaccagctatgtcttgatcaagcacttctgtttccccgggccgagtatcaatagactgttcacgcggttgaaggagaaagcgcccgttatccggctaactacttcgagaaacctagtagcaccattgaagctgcagagtgtttcgctcggcacttcccccgtgtagatcaggtcgatgagtcactgcaatccccacgggcgaccgtggcagtggctgcgctggcggcctgcctatggggcaacccataggacgctctaatgtggacatggtgcgaagagtctattgagctagttagtagtcctccggcccctgaatgcggctaatcctaactgtggagcacatgccttcaatccagagggtagtgtgtcgtaatgggcaactctgcagcggaaccgactactttgggtgtccgtgtttccttttatctttacattggctgcttatggtgacgattatagaattgttaccatatagctattggattggccatccggtgtgcaatagagctattatatacctgtttgttggctttgtaccactaaccttaaaatctataaccaccctcgattttatattaaccctcaatacaatcaaac

SEQ ID NO: 18918 - DNA, 746 bp, synthetic construct
  source 1..746: mol_type = other DNA
ttaaaacagctgtgggttgtacccactcacagggcccacgtggcgctagcactctggttctgcggaacctttgtgcgcctgttttacgcccgccccccaatttgcaacttagaagcaatacacaacactgatcaacagcaggcatggcgcaccagctatgtcttgatcaagcacttctgtttccccgggccgagtatcaatagactgttcacgcggttgaaggagaaagcgcccgttatccggctaactacttcgagaaacctagtagcaccattgaagctgcagagtgtttcgctcggcacttcccccgtgtagatcaggtcgatgagtcactgcaatccccacgggcgaccgtggcagtggctgcgctggcggcctgcctatggggcaacccataggacgctctaatgtggacatggtgcgaagagtctattgagctagttagtagtcctccggcccctgaatgcggctaatcctaactgtggagcacatgccttcaatccagagggtagtgtgtcgtaatgggcaactctgcagcggaaccgactactttgggtgtccgtgtttccttttatctttacattggctgcttatggtgacgattatagaattgttaccatatagctattggattggccatccggtgtgcaatagagctattatatacctgtttgctggctttgtaccactaaccttaaaatctataaccaccctcgattttatattaaccctcaatacaaccaaac

SEQ ID NO: 18919 - DNA, 746 bp, synthetic construct
  source 1..746: mol_type = other DNA
ttaaaacagcctgtgggttgcacccactcacagggcccacgtggcgctagcactctggttctgcggaacctttgtgcgcctgttttacgcccccccccaatttgcaacttagaagcaatacacaacactgatcaatagcaggcatggcgcaccagctatgtcttgatcaagcacttctgtttccccgggccgagtatcaatagactgttcacgcggttgaaggagaaagcgcccgttatccggctaactacttcgagaaacctagtagcaccattgaagctgcagagtgtttcgctcggcacttcccccgtgtagatcaggtcgatgagtcactgcaatccccacgggcgaccgtggcagtggctgcgctggcggcctgcctatggggcaacccataggacgctctaatgtggacatggtgcgaagagtctattgagctagttagtagtcctccggcccctgaatgcggctaatcctaactgtggagcacatgccttcaatccagagggtagtgtgtcgtaatgggcaactctgcagcggaaccgactactttgggtgtccgtgtttccttttatctttacattgactgcttatggtgacaattatagaattgttaccatatagctattggattggtcatccggtgtgcaatagagctattatatacctgtttgttggctttgtaccactaaccttaaaatctataaccaccctcgattttatattaaccctcaatacaatcaaac

SEQ ID NO: 18920 - DNA, 746 bp, synthetic construct
  source 1..746: mol_type = other DNA
ttaaaacagcctgtgggttgcacccactcacagggcccacgtggcgctagcactctggttctacggaacctttgtgcgcctgttttacgcccccccccaatttgcaacttagaagcaatatacaacactgatcaacagcaggcatggcgcaccagctatgtcttgatcaagcacttctgtttccccgggccgagtatcaatagactgttcacgcggttgaaggagaaagcgcccgtcatccggctaactacttcgagaaacctagtagcaccattgaagctgcagagtgtttcgctcggcacttcccccgtgtagatcaggtcgatgagtcactgcaatccccacgggcgaccgtggcagtggctgcgctggcggcctgcctatggggcaacccataggacgctctaatgcggacatggtgcgaagagtctattgagctagttagtagtcctccggcccctgaatgcggctaatcctaactgtggagcacatgccttcaatccagagggtagtgtgtcgtaatgggcaactctgcagcggaaccgactactttgggtgtccgtgtttccttttatccttacattggctgcttatggtgacaattacagaattgttaccatatagctattggattggccatccggtgtgcaatagagctattatatacctgtttgttggctttgtaccattaaccttaaaatctataaccaccctcgatttcatattaacccttaatacaatcaaac

SEQ ID NO: 18921 - DNA, 746 bp, synthetic construct
  source 1..746: mol_type = other DNA
ttaaaacagcctgtgggttgcacccactcacagggcccacgtggcgctagcactctgattctacggaatctttgtgcgcctgttttacaaccccccccaatttgcaacttagaagcaatacacaacactgatcaacagcaggcatggcgcaccagccatgtcttgatcaagcacttctgtttccccggactgagtatcaatagactgctcacgcggttgaaggagaaagcgtccgttatccggctaactacttcgagaaacctagtagcaccattgaagctgcggagtgtttcgctcggcacttcccccgtgtagatcaggccgatgagtcactgcaatccccacgggcgaccgtggcagtggctgcgctggcggcctgcctatggggcaacccataggacgctctaatgtggacatggtgcgaagagtctattgagctagttagtagtcctccggcccctgaatgcggctaatcctaactgcggagcacatgccctcaacccagagggtagtgtgtcgtaacgggcaactctgcagcggaaccgactactttgggtgtccgtgtttccttttattcttacattggctgcttatggtgacaatcacagaattgttaccatatagctattggattggccatccggtgtgcaatagagctattatatacctatttgttggctttgtaccactaaccttaaaatctataaccaccctcaactttatattaactctcaatacagtcaaac

SEQ ID NO: 18922 - DNA, 746 bp, synthetic construct
  source 1..746: mol_type = other DNA
ttaaaacagcctgtgggttgcacccactcacagggcccacgtggcgctagcactctgattctacggaatctttgtgcgcctgttttacaaccccccccaatttgcaacttagaagcaatacacaacactgatcaacagcaggcatggcgcaccagccatgtcttgatcaagcacttctgtttccccggactgagtatcaatagactgctcacgcggttgaaggagaaagcgtccgttatccggctaactacttcgagaaacctagtagcaccattgaagctgcggagtgtttcgctcggcacttcccccgtgtagatcaggtcgatgagtcactgcaatccccacgggcgaccgtggcagtggctgcgctggcggcctgcctatggggcaacccataggacgctccaatgtggacatggtgcgaagagtctattgagctagttagtagtcctccggcccctgaatgcggctaatcctaactgcggagcacatgccctcaacccagagggtagtgtgtcgtaacgggcaactctgcagcggaaccgactactttgggtgtccgtgtttccttttattcttacactggctgcttatggtgacaaccacagaattgttaccatatagctattggattggccatccggtgtgcaatagagctattatatacctatttgttggctttgtaccactaaccttaaaatctataaccaccctcaactttatattaactctcaatacagtcaaac

SEQ ID NO: 18923 - DNA, 746 bp, synthetic construct
  source 1..746: mol_type = other DNA
taaaacagccggggggtggcacccactcacagggcccacgtggcgctagcactctgattctacggaatctttgtgcgcctgttttacaacccccccccaatttgcaacttagaagcaatacacaacactgatcaacagcaggcatggcgcaccagccatgtcttgatcaagcacttctgtttccccggactgagtatcaatagactgctcacgcggttgaaggagaaagcgtccgttatccggctaactacttcgagaaacctagtagcaccattgaagctgcggagtgtttcgctcggcacttcccccgtgtagatcaggccgatgagtcactgcaatccccacgggcgaccgtggcagtggctgcgctggcggcctgcctatggggcaacccataggacgctctaatgtggacatggtgcgaagagtctattgagctagttagtagtcctccggcccctgaatgcggctaatcctaactgcggagcacatgccctcaaccaagagggtagtgtgtcgtaacgggcaactctgcagcggaaccgactactttgggtgtccgtgtttccttttattcttacattggctgcttatggtgacaatcacagaattgttaccatatagctattggattggccatccggtgtgcaatagagctattatacacctatttggtggctttgtaccactaaccttaaaatctataaccaccctcaactttatattaactctcaatacagtcaaac

SEQ ID NO: 18924 - DNA, 746 bp, synthetic construct
  source 1..746: mol_type = other DNA
taaaacagctggggggtggtacccactcacagggcccacgtggcgctagcactctggttctacggaacctttgtgcgcctgttttacgccccttccccaatttgcaacttagaagcaatacacaacactgatcaacagcaggcatggcgcaccagctatgtcttgatcaagcacttctgtttccccggaccgagtatcaatagactgttcacgcggttgaaggagaaagcgtccgttatccggctaactacttcgagaaacctagtaacaccattgaagctgcagagtgtttcgctcggcacttcccccgtgtagatcaggtcgatgagtcactgcaatccccacgggtgaccgtggcagtggctgcgctggcggcctgcctatggggcaacccataggacgctctaatgcggacatggtgcgaagagtctattgagctagttagtggtcctccggcccctgaatgcggctaatcctaactgcggagcacatgccttcaatccagagggtagtgtgtcgtaatgggcaactctgcagcggaaccgactactttgggtgtccgtgtttccttttattcttatattggctgcttatggtgacaattacagaattgttaccatatagctattggattggccatccggtgtgcaatagagctattatatacctatttggtggctttgtaccactaaccttaaaatctataaccaccctcgactttatattaaccctcaacacagtcaagc

SEQ ID NO: 18925 - DNA, 747 bp, synthetic construct
  source 1..747: mol_type = other DNA
ttaaaacagcctgtgggttgcacccactcacaggacccacgtggtgctagcactctggttccacggaacctttgtgcgcctgttttacgccccctccccaatttgtaacttagaagcaatgtacaacactgatcaatagcaggcatggcgcaccagctatgtcttgatcaagcacttctgtttccccggaccgagtatcaatagactgttcacacggttaaaggagaaagcgtccgttatccggctaactacttcgagaaacccagtagcgccattgaagctgcagagtgtttcgctccacacttcccccgtgtagatcaggtcgatgagtcactgcaatccccacgggcgaccgtggcaatggctgcgctggcggcctgcctatggggcaacccataggacgctctaatgtggacatggtgcgaagagtctattgagctagttagtagtcctccggcccctgaatgcggctaatcctaactgcggagcacatgccttcaatccagagggtagtgtgtcgtaatgggcaactctgcagcggaaccgactactttgggtgtccgtgtttccttttattctcacattggctgcttatggtgacaattacagaattgttaccatatagctattggattggccatccggtgtgcaatagagctattatatacctatttgttggctttgtaccactaaccttaaaatccgtaaccactctcgagtatatattaaccctcaatacaatcaaac

SEQ ID NO: 18926 - DNA, 745 bp, synthetic construct
  source 1..745: mol_type = other DNA
ttaaaacagcctgtgggttgttcccacccacagggcccactgggcgctagcacactgattctacgggacctttgtgcgcctgttttataaccccttccctaagcagcaacttagaagttttgtacaatcacgaccagtagtaggcgtggcgcgccagtcacgtcttggtcaagcacttctgtatccccggactgagtatcaatagactgctcacgcggttgaaggagaaaacgttcgttacccggctaactacttcgagaaacccagtagcaccgtgaaagttgcggagtgtttcgctcagcacttcccccgtgtagatcaggtcgatgagtcactgtaaaccccacgggcaaccgtgacagtggctgcgttggcggcctgcccatggggtaacccatgggacgctctaatacagacacggtgtgaagagtctattgagctagttagtagtcctccggcccctgaatgcggctaatcctaactgcggagcgcgcaccctcaatccagggggcggcgtgtcgtaatgggtaactctgcagcggaaccgactactttgggtgtccgtgtttccttttattccttattggctgcttatggtgacaattgaaaagttgttaccatatagctattggattggccatccggtgtctaatagagctattgtttacctatttattggatacgtccctcttaatctcaaagccattcaaactcttgattatatattgctccttaactgtaagaa

SEQ ID NO: 18927 - DNA, 745 bp, synthetic construct
  source 1..745: mol_type = other DNA
ttaaaacagcctgtgggttgttcccacccacagggcccactgggcgctagcacactgattctgcgggatctttgtgcgcctgttttataacccttcccccaagcagcaacttagaagctttgtacaatcacgaccaatagtgggcgtgacgcgccagtcacgtcttggtcaagcacttctgtatccccggactgagtaccaatagactgctcacgcggttgaaagggaaaacgttcgttacccggctaactacttcgagaaacctagtagcaccatgaaagttgcggagtgtttcgctcagcacttcccccgtgtagatcaggtcgatgagtcactgtaaaccccacgggcgaccgtgacagtggctgcgttggcggcctgcccatggggtaacccatgggacgctctaatacagacatggtgcgaagagtctattgagctagttagcagtcctccggcccctgaatgcggctaatcctaactgcggagcgcgcaccctcaatccagggggcggcgtgtcgtaatgggtaactctgcagcggaaccgactactttgggtgtccgtgtttctttttattctttattggctgcttatggtgacaattgaaaagttgttgccatatagctattggattggccatccggtgtctaacagagccattgtttacctatttattggatacgtccctcttcatctcaaggccattcaaactcttgattatatactgctccttaactgtaggaa

SEQ ID NO: 18928 - DNA, 745 bp, synthetic construct
  source 1..745: mol_type = other DNA
ttaaaacagcctgtgggttgttcccacccacagggcccactgggcgctagcacactgattctgcgggatctttgtgcgcctgttttataacccttcccctaagcagcaacttagaagctttgtacaatcacgaccaatagtgggcgtgacgcgccagtcacgtcttggtcaagcacttctgtatccccggactgagtaccaatagactgctcacgcggttgaaggggaaaacgttcgttacccggctaactacttcgagaaacctagtagtaccatgaaagttgcggagtgtttcgctcagcacttcccccgtgtagatcaggtcgatgagccactgtaaaccccacgggcgaccgtgacagtggctgcgttggcggcctgcccgtggggtaacccatgggacgctctagtacagacatggtgcgaagagtctattgagctagttagcagtcctccggcccctgaatgcggctaatcctaactgcggagcgcgcaccctcaacccagggggcggcgtgtcgtaatgggtaactctgcagcggaaccgactactttgggtgtccgtgtttccttttattctttattggctgcttatggtgacaattgaaaagttgttaccatatagctattggattggccatccggtgtctaacagagctattgtatacctatttgttggatacgtccctcttaatctcaaggccattcaaactcttgattatatattgctccttaactgtaggaa

SEQ ID NO: 18929 - DNA, 746 bp, synthetic construct
  source 1..746: mol_type = other DNA
ttaaaacagcctgtgggttgttcccacccacagggcccactgggcgctagcacactgattctgcgggatctttgtgcgcctgttttataaccccttcccctaagcagtaacttagaagctccacactatcacgaccaatagcaggcgtggtgcaccaatcacgtctcggtcaagcacttctgtttccccggactgagtatcaatagactgctcacgcggtcgaaagagaaaacgttcgttatccggctaactacttcgagaaacctagtagcaccgtgaaagttgcggagtgtttcgctcagcacttcccccgtgtagatcaggtcgatgagtcactgtgaaccccacgggtgaccgtgacagtggctgcgttggcggcctgcccatggggtaacccatgggacgctctaatacagacacggtgtgaagagtctattgagctagttagtagtcctccggcccctgaatgcggctaatcctaactgcggagcgcgtaccctcaatccagggggcagcgcgtcgtaatgggtaactctgcagcggaaccgactactttgggtgtccgtgtttccttttattccttattggctgcttatggtgacaattgaaaagttgttaccatatagctattggattggccatccggtaactgacagagctattgtttacctgtttgttggatacgtccctctcaatctcaaggccattcaaactcttgattatatactacttctcaactgcaagaa

SEQ ID NO: 18930 - DNA, 746 bp, synthetic construct
  source 1..746: mol_type = other DNA
ttaaaacagcctgtgggttgttcccacccacagggcccactgggcgctagcacactgattctgcgggatctttgtgcgcctgttttataaccctcccccctaagcagtaacttagaagctttgcacaatcacgaccagtagtgggcgtggcgcgccagccacgtctcggtcaagcacttctgtatccccggactgagtatcaatagactgctcacgcggtcgaaggagaaaacgtccgttacccggctaactacttcgagaaacttagtagcaccatgaaagttgcggagtgtttcgctcagcacttcccccgtgtagatcaggtcgatgagtcactgtaaaccccacgggcgaccgtgacagtggctgcgttggcggcctgcccatggggtaacccatgggacgctccaatacagacatggtgtgaagagtctattgagctagttagtagtcctccggcccctgaatgcggctaatcctaactgcggagcgcgcatcctcaacccagggggcggcgtgtcgtaatgggtaactctgcagcggaaccgactactttgggtgtccgtgtttccttttactccttattggctgcttatggtgacaattgaaaagttgttaccatatagctattggattggccatccggtgtctaacagagctattgtttacctattcattggatacgtccctcttagtctcaaagccattcaaactcttgactatatattgctccttaactgtaagaa

SEQ ID NO: 18931 - DNA, 745 bp, synthetic construct
  source 1..745: mol_type = other DNA
ttaaaacagcctgtgggttgttcccacctacagggcccactgggcgctagcacactgattctgcgggatctttgtgcgcctgttttataaccccttccctaagcagcaacttagaagcttcacactatcacgaccagtagtgggcgtggcgcgccagtcacgtcttggtcaagcacttctgtttccccggactgagtatcaatagactgctcacgcggttgaaggagaaaacgttcgttatccggctaactacttcgagaaacctagtagcaccgtgaaagttgcggagtgtttcgctcagcacttcccccgtgtagatcaggtcgatgagtcactgtaaaccccacgggcgaccgtgacagtggctgcgttggcggcctgcccatggggtaacccatgggacgctctaatacagacacggtgtgaagagtctattgagctagttagtagtcctccggcccctgaatgcggctaatcctaactgcggagcgcgcaccctcaacccagggggcagcgcgtcgtaatgggtaactctgcagcggaaccgactactttgggtgtccgtgtttccttttatcccttattggctgcttatggtgacaattgaaaagttgttaccatatagctattggattggccatccggtgaccaacagagctattgtttacctgtttattggatacgtccctcttaatctcaaggccattcaaactcttgattatatattactccttaactgtaagaa

SEQ ID NO: 18932 - DNA, 745 bp, synthetic construct
  source 1..745: mol_type = other DNA
ttaaaacagcctgtgggttgttcccacccacagggcccactgggcgctagcacactgattctgcggaatctttgtgcgcctgttttataaccctttccctaagtagcaacttagaagctttgcacaatcacgaccaatagtgggcgtggcgcgccagtcacgtcttggtcaagcacttctgtttccccggaccgagtatcaatagactgctcacgcggttgaaggagaaaacgttcgttacccggctaactacttcgagaaacctagtagcaccgtgaaagttgcggagtgtttcgctcagcacttcccccgtgtagatcaggtcgatgagtcactgtaaaccccacgggcgaccgtgacagtggctgcgttggcggcctgcccatggggtaacccatgggacgctctaatacagacatggtgtgaagagtctattgagctagttagcagtcctccggcccctgaatgcggctaatcctaactgcggagcgcgcaccctcaacccagggggcggcgtgtcgtaatgggtaactctgcagcggaaccgactactttgggtgtccgtgtttccttttattctttattggctgcttatggtgacaattgaaaagttgttaccatatagctattggattggccatccggtgtctaacagagctattgtttacctatttattggatacgtccctcttaatctcaaggccattcaaactcttgattatatattgctcctcaactgtaagaa

SEQ ID NO: 18933 - DNA, 745 bp, synthetic construct
  source 1..745: mol_type = other DNA
ttgaaacagcctgtgggttgttcccacccacagggcccactgggcgctagcacactgattctgcggaatctttgtgcgcctgttttatgacccttcccctaagcagcaacttagaagctttgtacaatcacgaccaatagtgggcgtggcgcgccagccacgtcttggtcaagcacttctgtttccccggactgagtatcaatagactgctcacgcggtcgaaggagaaaacgttcgttacccggctaactacttcgagaaacctagtagcaccatgaaagttgcggagtgtttcgctcagcacttcccccgtgtagatcaggccgatgagtcactgtaaaccccacgggcgaccgtgacagtggctgcgttggcggcctgcccatggggtaacccatgggacgctctaatacagacatggtgtgaagagtctattgagctagttagtagtcctccggcccctgaatgcggctaatcctaactgcggagcgcgcaccctcaacccagggggcggcgtgtcgtaatgggcaactctgcagcggaaccgactactttgggtgtccgtgtttccttttactctttattggctgcttatggtgacaattgaaaagttgttaccatatagctattggattggccatccggtgtctaacagagctattgtttacctattcattggatacgtccctcttagtctcaaagtcattcaaactcttgactatatattgctccttaactgtaagaa

SEQ ID NO: 18934 - DNA, 747 bp, synthetic construct
  source 1..747: mol_type = other DNA
ttaaaacagcctgtgggttgtacccactcacaggacccacgcggtgctagcactctggttccacggaacctttgtgcgcctgttttacgtcccctccccaatttgtaacttagaagcaatttacagcactgatcaatagcaggcatggcgcaccagctatgtcttgatcaagcacctctgtttccccggaccgagtatcaatagactgttcacacggtcgaaggagaaagcgttcgttatccggctaactacttcgagaaacccagtagcgccattgaaactgcagagtgtttcgctccacacttcccccgtgtagatcaggtcgatgagtcactgcaatccccacgggcgaccgtggcagtggctgcgttggcggcctgcctatggggtaacccataggacgctctaatgtggacatggtgcgaagagtctattgagctagttagtagtcctccggcccctgaatgcggctaatcctaactgcggagcacatgccttcaatccagagggtagtgtgtcgtaatgggcaactctgcagcggaaccgactactttgggtgtccgtgtttccttttattctcacattggctgcttatggtgacaattacagaattgttaccatatagctattggattggccatccggtgtgcaatagagctattatatacctatttgttggctttgtaccactaaccttaaaatctgtaatcactctcgagtatatattgacccttaatacaattaaac

SEQ ID NO: 18935 - DNA, 746 bp, synthetic construct
  source 1..746: mol_type = other DNA
ttaaaacagcctgtgggttgtacccactcacagggcccactgggcgctagcactctgattctgcggaatctttgtgcgcctgttttacaccccctcccccaattcgtaatttagaagtaatgcacaccattgatcaacagcaagcgtggcgcgccagccatgtttagatcaagtacttctgttttcccggactgagtatcaatagactgctcacgcggttgaaggagaaaacgttcgttacccggctaactacttcgagaaacctagtagcaccatcgaaactgcagagtgtttcgttcagcacttaccccgtgtagatcaggtcgatgagtcactgcaatccccacgggcgaccgtggcagtggctgcgctggcggcctgcctatgggcttgcccataggacgctctaatgtggacatggtgtgaagagtctattgagctagttagtagtcctccggcccctgaatgcggctaatcctaactgcggagcgcataccctcaatccagggggtggtgcgtcgtaacgggcaactctgcagcggaaccgactactttgggtgtccgtgtttccttttattcttatattggctgcttatggtgacaattgagagattgttaccatatagctattggattggccatccagtgtctaacagagcaattgtatacttatttgttgggttcgttccactatcatatacatccactaacaccttatactatattataagattgaacacaagaaa

SEQ ID NO: 18936 - DNA, 746 bp, synthetic construct
  source 1..746: mol_type = other DNA
ttaaaacagcctgtgggttgtacccactcacagggcccactgggcgctagcactctgattctgcggaatctttgtgcgcctgttttataacccctcccccaattcgtaatttagaagtgatgcacaccattgatcaacagcaagcgtggcgcaccagccatgtttagatcaagtacttctgtttccccggactgagtatcaataaactgctcacgcggttgaaggagaaaacgttcgttacccggctaactacttcgagaaacttagtagcaccatcgaaactgcagagcgtttcgctcagcactttccccgtgtagatcaggtcgatgagtcactgcaatccccacgggcgaccgtggcagtggctgcgttggcggcctgcctatgggcttgcccataggacgctctaatgtggacatggtgtgaagagtctattgagctagttagtagtcctccggcccctgaatgcggctaatcctaactgcggagcgcataccctcaatccagggggtggtgcgtcgtaacgggcaactctgcagcggaaccgactactttgggtgtccgtgtttccttttattcctatattggctgcttatggtgacaattgagagattgttaccatatagctattggattggccatccagtgtctaacagagcaattgtatacttatttgttggattcgttccactatcatatacatccactaacaccttatactatattataagattgaacacaagaaa

SEQ ID NO: 18937 - DNA, 746 bp, synthetic construct
  source 1..746: mol_type = other DNA
tttaaaacagcctgtgggttgtacccacccacagggcccactgggcgctagcactccgattctgcggaatctttgtgcgcctgttttataaccctcccccgaaacttgcaacttagaagttatgtacgttactgatcaacagcaggcgtggcacaccagccatgtcttgatcaagcacttctgtacccccggactgagtatcaatagactgctcacgtggtcgaaggagaaaacgttcgttatccggctaactacttcgagaaacctagtagcaccactgaaactgcggagtgtttcgctcagcacttcccccgtgtagatcaggtcgatgagtcactgcttaccccacgggtgaccgtggcagtggctgcgttggcggcctgcctatggggcaacccataggacgctctaaagtggacatggtgcgaagagtctattgagctagttagtagtcctccggcccctgaatgcggctaatcctaactgcggagcgcatgccttcaaaccagagggtggtgcgtcgtacgggtaactctgcagcggaaccgactactttgggtgtccgtgtttctcttattctcataatggctgcttatggtgacaattgaggaattgttaccatatagctattggattggccatccggtgtgcaacagagctattatttacttgtttgttggatacattccattaacacctaaatccttcaatacattgcactatatcttgacactgaacgcaagaaa

SEQ ID NO: 18938 - DNA, 747 bp, synthetic construct
  source 1..747: mol_type = other DNA
tttaaaacagcctgtgggttgtacccacccacagggcccactgggcgctagcactccgattctgcggaatctttgtgcgcctgttttataaccctcccccgaaacttgcaacttagaagttatgtacgttactgatcaacagcaggcgtggcacaccagccatgtcttgatcaagcacttctgtacccccggactgagtatcaatagactgctcacgtggtcgaaggagaaaacgttcgttatccggctaactactttgagaaacctagtagcaccactgaaactgcggagtgtttcgctcagcacttcccccgtgtagatcaggtcgatgagtcactgcttaccccacgggtgaccgtggcagtggctgcgttggcggcctgcctatggggcaacccataggacgctctaaagtggacatggtgcgaagagtctattgagctagttagtagtcctccggcccctgaatgcggctaatcctaactgcggagcgcatgccttcaaaccagagggtggtgcgtcgtaacgggtaactctgcagcggaaccgactactttgggtgtccgtgtttctcttattctcataatggctgcttatggtgacaattgaggaattgttaccatatagctattggattggccatccggtgtgcaacagagctattatttacttgtttgttggatacattccattaacacctaaatccttcaatacattgcactatatcttgacactgaacgcaagaaa

SEQ ID NO: 18939 - DNA, 747 bp, synthetic construct
  source 1..747: mol_type = other DNA
tttaaaacagcctgtgggttgtacccacccacagggcccactgggcgctagcactccgattctgcggaatctttgtgcgcctgttttataaccctcccccgaaacttgcaacttagaagttatgtacgttactgatcaacagcaggcgtggcacaccagccatgtcttgatcaagcacttctgtacccccggactgagtatcaatagactgctcacgtggtcgaaggagaaaacgttcgttacccgactaactacttcgagaaacctagtagcaccaccgaagctgcggagtgtttcgctcagcacttcccccgtgtagatcaggtcgatgagccactgcttaccccacgggtgaccgtggcagtggctgcgttggcggcctgcctatggggcaacccataggacgctctaaagtggacatggtgcgaagagtctattgagctagttagtagtcctccggcccctgaatgcggctaatcctaactgcggagcgcatgccctcaaaccagggggttgtgcgtcgtaacgggcaactctgcagcggaaccgactactttgggtgtccgtgtttcttttattctcatgatggctgcttatggtgacaattgaggaattgttaccatatagctattggattggccatccggtgtgcagcagagctattatctacctgtttgttggatacattccattaacacttacatccttcaatacactgcactatattctaacgctgaacgcaagaaa

SEQ ID NO: 18940 - DNA, 745 bp, synthetic construct
  source 1..745: mol_type = other DNA
ttaaaacagcctgtgggttgttcccacccacagggcccactgggcgctagcacactgattctgcgggatctttgtgcgcctgttttataacccctcccctaaacagtaacttagaagcttcacactatcacgaccaatagtaggcgtggcgcaccagtcacgtcttggtcaagcacttctgtttccccggactgagtatcaatagactgctcacgcggttgaaggagaaaacgttcgttatccggctaactacttcgagaaacctagtagcactgtgaaagttgcggagtgtttcgctcagcacttcccccgtgtagatcaggtcgatgagtcactgtgaaccccacgggtaaccgtgacagtggctgcgttggcggcctgcccatggggtaacccatgggacgctctaatacagacacggtgtgaagagtctattgagctagttagtagtcctccggcccctgaatgcggctaatcctaactgcggagcgcgtaccctcaatccagggggcagcgcgtcgtaatgggcaactctgcagcggaaccgactactttgggtgtccgtgtttccttttattccttattggctgcttatggtgacaattgaaaagttgttaccatatagctattggattggccatccggtaaccaacagagctattgtttacctgtttattggatacgtccctctcaatctcaaggccattcaaactcttgattatatactacttctcaactgtaagaa

SEQ ID NO: 18941 - DNA, 748 bp, synthetic construct
  source 1..748: mol_type = other DNA
ttaaaacagcctgtgggttgttcccacccacagggcccactgggcgctagcacactggctttacggggcctttgtgcgcctgttttatgccccttccccctaaattggtaacttagaagttttgcacacctacgaccaatagcaggcatgacgcgccagtcatgtcttggtcaagcacttctgttcccccggactgagtatcaatagactgctcacgcggtcgaaggagaaaacgttcgtcatccggctggttacttcgagaaacccagtagcatcatgaaagttgcagagtgtttcgctcagcactacccccgtgtagatcaggtcgatgagtcactgcgaaccccacgggtgaccgtggcagtggctgcgttggcggcctgcccatggggtaacccatgggacgctctaatacagacatggtgtgaagagtctattgagctagccagtagtcctccggcccctgaatgcggctaatcctaactgcggagcacataccctcaatccagggggtggtgtgtcgtaacgggtaactctgcagcggaaccgactactttgggtgtccgtgtttctttttattcttattatggctgcttatggtgacaattgaaggattgttaccatatagctgttggattggccatccggtgtctaacagagctattgtttatctatttgttggatacgtccctcttgattacaaggcccttcagactctcaagtacgtcttgtaccttaatcaaaagag

SEQ ID NO: 18942 - DNA, 748 bp, synthetic construct
  source 1..748: mol_type = other DNA
ttaaaacagcctgtgggttgttcccacccacagggcccactgggcgctagcacactggctttacggggcctttgtgcgcctgttttatgccccttccccctaaattggtaacttagaagttttgcacacctgcgaccaatagcaggcatgacgcgccagtcatgtcttggtcaagcacttctgttcccccggactgagtatcaatagactgctcacgcggtcgaaggagaaaacgttcgtcatccggctggttacttcgagaaacccagtagcatcatgaaagttgcagagtgtttcgctcagcactacccccgtgtagatcaggtcgatgagtcactgcgaaccccacgggtgaccgtggcagtggctgcgttggcggcctgcccatggggtaacccatgggacgctctaatacagacatggtgtgaagagtctattgagctagccagtagtcctccggcccctgaatgcggctaatcctaactgcggagcacataccctcaatccagggggtggtgtgtcgtaacgggtaactctgcagcggaaccgactactttgggtgtccgtgtttctttttattcttattatggctgcttatggtgacaattggaggattgttaccatatagctgttggattggccatccggtgtctaacagagctattgtttatctatttgttggatacgtccttcttgattacaaggcccttcagactctcaagtacatcttgtaccttaatcaaaagag

SEQ ID NO: 18943 - DNA, 747 bp, synthetic construct
  source 1..747: mol_type = other DNA
ttaaaacagcctgtgggttgtacccacccacagggcccactgggcgctagcactccgattctgcggaatccttgtgcgcctgttttataaccctcccccgaaacttgcaacttagaagttatgcacattactgatcaacagcaggcgtggcgcaccagccatgtcttgatcaagcacttctgtatccccggaccgagtatcaatagactgctcacgtggtcgaaggagaaaacgttcgttatccggctaactacttcgagaaacttagtaacaccattgaaactgcggggtgtttcgctcagcacttcccccgtgtagatcaggtcgatgagtcactgcttaccccacgggcgaccgtggcagtggctgcgttggcggcctgcctatggggcaacccataggacgctctaaagtggacatggtgcgaagagtctattgagctagttagtagtcctccggcccctgaatgcggctaatcctaactgcggagcgcatgtcctcaaaccagaggatggtgcgtcgtaacgggcaactctgcagcggaaccgactactttgggtgtccgtgtttctttttattcttataatggctgcttatggtgacaattgaggaattgttaccatatagctattggattggccatccggtgtgcaacagagctattatctacttgtttgttgggtacattccattgacacttaaatccttcaatacattgcactatattctaacactgaacgcaagaaa

SEQ ID NO: 18944 - DNA, 735 bp, synthetic construct
  source 1..735: mol_type = other DNA
ctgtgggttgttcccacccacagggcccactgggcgctagcacactgattttgcggaatctttgtgcgcctgttttataacccctcccctaagtagtaacttagaagcttcacactatcacgaccagtagtaggcgtggcgcaccagctacgtcttggtcaagcacttctgtttccccggactgagtatcaatagactgctcacgcggttgaaggagaaagcgttcgttatccggccaactacttcgagaaacctagtagcaccgtgaaagttgcggagtgtttcgctcagcacttcccccgtgtagatcaggtcgatgagtcactgtgaaccccacgggcgaccgtgacagtggctgcgttggcggcctgcccatggggcaacccatgggacgctctaatacagacacggtgtgaagagtctattgagctagttggtagtcctccggcccctgaatgcggctaatcctaactgcggagcgcgcaccctcaatccagggggcagcgcgtcgtaatgggtaactctgcagcggaaccgactactttgggtgtccgtgtttccttttattctttattggctgcttatggtgacaattgaagagttgttaccatatagctattggattggccatccggtaaccaacagagccattgtttacctgtttattggatacgtctctctcaatctcaagaccattaaaactcttgattatatactacttcttaactgtaagaa

SEQ ID NO: 18945 - DNA, 746 bp, synthetic construct
  source 1..746: mol_type = other DNA
ttaaaacagcctgtgggttgtacccacccacagggcccactgggcgctagcactccgattctgcggaatctttgtgcgcctgttttataaccctcccccgaaacttgcaacttagaagttatgtacgttactgatcaacagcaggcgtggcacaccagccatgtcttgatcaagcacttctgtacccccggactgagtatcaatagactgctcacgtggtcgaaggagaaaacgttcgttatccggctaactacttcgagaaacctagtagcaccactgaaactgcggagtgtttcgctcagcacttcccccgtgtagatcaggtcgatgagtcactgcttaccccacgggtgaccgtggcggtggctgcgttggcggcctgcctatggggcaacccataggacgctctaaggtggacatggtgcgaagagtctatcgagctagttagtagtcctccggcccctgaatgcggctaatcctaactgcggagcgcatgccctcaaaccagagggtggtgcgtcgtaacgggtaactctgcagcggaaccgactactttgggtgtccgtgtttcttttattctcataatggctgcttatggtgacaattgaggaattgttaccatatagctattggattggccatccggtgtgcaacagagcaattatctacttgtttgttggatacattccattaacacttaaatccttcaatacattgcactatattctaacgctgaacacaagaaa

SEQ ID NO: 18946 - DNA, 746 bp, synthetic construct
  source 1..746: mol_type = other DNA
ttaaaacagcctgtgggttgtacccacccacagggcccactgggcgctagcactccgattctgcggaatctttgtgcgcctgttttataaccctcccccgaaacttgcaacttagaagttatgtacgttactgatcaacagcaagcgtggcacaccagccatgtcctgatcaagcacttctgtaaccccggactgagtatcaatagactgctcacgtggtcgaaagagaaaacgttcgttatccggctaactacttcgagaaacctagtagcaccactgaaactgcggagtgtttcgctcagcacttcccccgtgtagatcaggtcgatgagtcactgcttaccccacgggtgaccgtggcagtggctgcgttggcggcctgcctatggggcaacccataggacgctctaaagtggacatggtgtgaagagtctattgagctagttagtagtcctccggcccctgaatgcggctaatcctaactgcggagcgcatgcccccaaaccagagggtggtgcgtcgtaacgggtaactctgcagcggaaccgactactttgggtgtccgtgtttcttttattctcataatggctgcttatggtgacaattgaggaattgttaccgtatagctattggattggccatccggtgtgcaacagagctattatctacttgtttgttggatacattccattgacacctaaatccttcaatacattgcactatattctaacgttgaacgcaagaaa

SEQ ID NO: 18947 - DNA, 746 bp, synthetic construct
  source 1..746: mol_type = other DNA
ttaaaacagcctgtgggttgtacccacccacagggcccactgggcgctagcactccgattctgcggaatctttgtgcgcctgttttataaccctcccccgaaacttgcaacttagaagttgtgtacgttactgatcaacagccggcgtggcacaccagccatgtcttgatcaagcacttctgtggccccggactgagtatcaatagactgctcacgtggtcgaaggagaaaacgttcgttatccggctaactacttcgagaaacctagtagcaccactgaaactgcggggtgtttcgctcagcacttcccccgtgtagatcaggtcgatgagtcactgcttaccccacgggtgaccgtggcagtggctgcgttggcggcctgcctatggggcaacccataggacgctctaaagtggacatggtgcgaagagtctattgagctagttagtagtcctccggcccctgaatgcggctaatcctaactgcggagcgcatgccctcaaaccagagggtggtgcgtcgtaacgggtaactctgcagcggaaccgactactttgggtgtccgtgtttcttttattctcataatggctgcttatggtgacaattgaggaattgttaccatatagctattggattggccatccggtgtgcaacagagctattatctacttgtttgttggatacattccattaacgcctaagtcttttaatacattacattacattctaacgctgaacacaagaaa

SEQ ID NO: 18948 - DNA, 746 bp, synthetic construct
  source 1..746: mol_type = other DNA
ttaaaacagcctgtgggttgtacccacccacagggcccactgggcgctagcactccgattctgcggaatctttgtgcgcctgttttataaccctcccccgaaaattacaacttagaagttatgtacattactggtcaacagcaggcgtggcacgccagccatgtcttgatcaagcacttctgtacccccggactgagtatcaatagactgctcacgtggtcgaaggagaaaacgttcgttatccggctaactacttcgagaaacttagtagcaccactgaaactgcggagtgtttcgctcagcacttcccccgtgtagatcaggtcgatgagtcactgcttaccccacgggtgaccgtggcagtggctgcgttggcggcctgcctatggggcaacccataggacgctctaaagtggacatggtgcgaagagtctattgagctagttagtagtcctccggcccctgaatgcggctaatcctaactgcggagcgcatgccctcaaaccagagggtggtgcgtcgtaacgggtaactctgcagcggaaccgactactttgggtgtccgtgtttcttttattctcataatggctgcttatggtgacaattgaggaattgttaccatatagctattggattggccatccggtgtgcaacagagctattatctacttgtttgttggatacattccattaacacttaaatccttcaatacattgcactacattctaacgctgaatacaagaag

SEQ ID NO: 18949 - DNA, 746 bp, synthetic construct
  source 1..746: mol_type = other DNA
ttaaaacagcctgtgggttgttcccacccacagggcccactgggcgctagcacactgattctgcgggatctttgtgcgcctgttttataacccttccccctaagcagcaacttagaagctttgtacaatcacgaccaatagtgggcgtggcgcgccagtcacgttttggtcaagcacttctgtatccccggaccgagtatcaatagactgcttacgcggttgaaggagaaaacgttcgttacccggctaactacttcgagaaacctagtagcaccatgaaagttgcggagtgtttcgctcagcacttcccccgtgtagatcaggtcgatgagtcactgtaaaccccacgggcgaccgtgacagtggctgcgttggcggcctgcccatggggtaacccatgggacgctctaatacagacatggtgcgaagagtctattgagctagttagcagtcctccggcccctgaatgcggctaatcctaactgcggagcacgcaccctcaagccagggggcggcgtgtcgtaatgggtaactctgcagcggaaccgactactttgggtgtccgtgtttccttttattctttattggctgcttatggtgacaattgaaaagttgttaccatatagctattggattggccatccggtgtccaacagagctattgtttacctatttattggatacgtccctcttaatctcaaggccattcaaactcttgattatatactgctccttaactgtaagag

SEQ ID NO: 18950 - DNA, 746 bp, synthetic construct
  source 1..746: mol_type = other DNA
ttgaaacaagctgtgggttgttcccacccacagggcccactgggcgctagcacactgattctgcgggatctttgtgcgcctgttttataacccttcccctaagcagcaacttagaagcttagcacaaccacgaccagtagtgggcgtggcgcgccagccacgtcttggtcaagcacttctgtatccccggactgagtatcaatagactgcttacgcggttgaaggagaaaacgttcgttacccggctaactacttcgagaaacctagtagcaccatgaaagttgcggagtgtttcgctcagcacttcccccgtgtagatcaggtcgatgagtcactgtaaaccccacgggcgaccgtgacagtggctgcgttggcggcctgcccatggggtaacccatgggatgctctaatacagacatggtgtgaagagtctattgagctagttagtagtcctccggcccctgaatgcggctaatcctaactgcggagcgcgcaccctcaacccagggggcggtgcgtcgtaacgggtaactcctgcagcggaaccgactactttgggtgtccgtgtttccttttattccttattggctgcttatggtgacaattgagaagttgttaccatatagctattggattggccatccggtgtctaacagagccattgtttacctatttattggatacgtccctcttaatctcaaagccattcaaactcttgactatatactgcttctcaactgtaagaa

SEQ ID NO: 18951 - DNA, 734 bp, synthetic construct
  source 1..734: mol_type = other DNA
tgtgggttgttcccacccacagggcctactgggcgccagcactctggttccatggaacctttgtgcgcctgttttacaacccttccccaatttgtaacgtagaagtaatacacattactgatcaatagcaggcatggcgcgccagtcatgtctcgatcaagcacttctgttcccccggactgagtatcaatagactgctcacgcggttgaaggagaaaacgttcgttaaccggctaactacttcgagaaacctagtagcaccatagaagctgcagagcgtttcgctcagcactccccccgtgtagatcaggctgatgagtcactgcaacccccacgggcgaccgtagcagtggctgcgctggcggcctgcctatggggcaacccataggacgctctaatgtggacgtggtgcgaagagtctattgagctagttagtagtcctccggcccctgaatgcggctaatcctaactgcggagcacatgccttcaacccaggaggtagtgtgtcgtaatgggcaactccgcagcggaaccgactactttgggtgtccgtgtttccttttattcctatattggctgcttatggtgacaatcacgggattgttgccatatagctattggattggccatccggtgtctaatagagctattgtgtacctatttgttggatttatcccgctatcatataaatctctgaacactttgtgctttatattaaacttaaacacacgaaa

SEQ ID NO: 18952 - DNA, 750 bp, synthetic construct; identical to SEQ ID NO: 1202
  source 1..750: mol_type = other DNA

SEQ ID NO: 18953 - DNA, 746 bp, synthetic construct
  source 1..746: mol_type = other DNA
ttaaaacagcctgtgggttgtacccacccacagggcccactgggcgctagcactccgattctgcggaatctttgtgcgcctgttttataaccctcccccgaaacttgtaacttagaagttatgtacgttactgatcagtagcaggcgtggcacaccagccatgtcttgatcaagcacttctgtaaccccggaccgagtatcaatagactgctcacgtggtcgaaagagaaaacgttcgttatccggctaactacttcgagaaacctagtagcaccactgaaactgcggagtgtttcgctcagcacttcccccgtgtagatcaggtcgatgagtcactgcttacctcacgggcgaccgtggcagtggctgcgttggcggcctgcctatggggcaacccataggacgctctaaagtggacatggtgtgaagagtctattgagctagttagtagtcctccggcccctgaatgcggctaatcctaactgcggagcgcacgcccccaaaccagagggtggtgcgtcgtaacgggtaactctgcagcggaaccgactactttgggtgtccgtgtttcttttattctcataatggctgcttatggtgacaattgaggaattgttaccatatagctattggattggccatccggtgtgcaacagagctattatctacttgtttgttggatacattccattgacacctaaatccttcaatacactgcactatattctaacattgaacgcaagaaa

SEQ ID NO: 18954 - DNA, 746 bp, synthetic construct
  source 1..746: mol_type = other DNA
ttaaaccagcctgtgggttgtacccacccacagggcccactgggcgctagcactccgattctgcggaatctttgtgcgcctgttttataaccctcccccgaaacttgtaacttagaagttatgtacgttactgatcagtagcaggcgtggcacaccagccatgtcttgatcaagcacttctgtaaccccggactgagtatcaatagactgctcacgtggtcgaaagagaaaacgttcgttatccggctaactacttcgagaaacctagtagcaccactgaaactgcagagtgtttcgctcagcacttcccccgtgtagatcaggtcgatgagtcactgcttacctcacgggtgaccgtggcagtggctgcgttggcggcctgcctatggggcaacccataggacgctctaaagtggacatggtgtgaagagtctattgagctagttagtagtcctccggcccctgaatgcggctaatcctaactgcggagcgcacgcccccaaaccagagggtggtgcgtcgtaacgggtaactctgcagcggaaccgactactttgggtgtccgtgtttcttttattctcataatggctgcttatggtgacaattgaggaattgttaccatatagctattggattggccatccggtgtgcagcagagctattatctacttgtttgttggatacattccattgacacctaaatccttcaatacattgcactatattctaacattgaacacaagaaa

SEQ ID NO: 18955 - DNA, 746 bp, synthetic construct
  source 1..746: mol_type = other DNA
ttaaaacagcctgtgggttgtacccacccacagggcccactgggcgctagcactccgattctgcggaatctttgtgcgcctgttttataaccctcccccgaaacttgcaacttagaagttgtgtacgttactgatcaacagcaggcgtggcacaccagccatgtcttgatcaagcacttctgtgtccccggactgagtatcaatagaccgctcacgtggtcgaaggagaaaacgttcgttatccggctaactacttcgagaaacctagtagcaccactgaaactgcggagtgtttcgctcagcacttcccccgtgtagatcaggtcgatgagtcactgcttaccccacgggtgaccgtggcagtggctgcgttggcggcctgcctatggggcaacccataggacgctctaaagtggacatggtgcgaagagtctattgagctagttagtagtcctccggcccctgaatgcggctaatcctaactgcggagcgcatgccctcaaaccagagggtggtgcgtcgtaacgggtaactctgcagcggaaccgactactttgggtgtccgtgtttcttttattctcataatggctgcttatggtgacaattgaggaattgttaccatatagctattggattggccatccggtgtgcaacagagctattatctacttgtttgttggatacattccattaacacctaagtccttcaatacattgcactacattctaacgctgaacacaagaaa

SEQ ID NO: 18956 - DNA, 746 bp, synthetic construct
  source 1..746: mol_type = other DNA
ttaaaacaacctgtgggttgtacccaccccccaggcccactgggcgctagcactccgattctgcggaatctttgtgcgcctgttttataaccctcccccgaaacttgtaacttagaagttatgtacgttactgatcagtagcaggcgtggcacaccagccatgtcttgatcaagcacttctgtaaccccggactgagtatcaatagactgctcacgtggtcgaaagagaaaacgttcgttatccggctaactacttcgagaaacttagtagcaccactgaaactgcggagtgtttcgctcagcacttcccccgtgtagatcaggccgatgagtcactgcttacctcacgggtgaccgtggcagtggctgcgttggcggcctgcctatggggcaacccataggacgctctaaagtggacatggtgtgaagagtctattgagctagttagtagtcctccggcccctgaatgcggctaatcctaactgcggagcgcacgcccccaaaccagagggtggtgcgtcgtaacgggtaactctgcagcggaaccgactaccttgggtgtccgtgtttcttttattctcataatggctgcttatggtgacaattgaggaattgttaccatatagctattggattggccatccggtgtgcaacagagctattatctacttgtttgttggatacattccattgacacctaaatccttcaatacattgcactatattctaacattgaacgcaagaaa

SEQ ID NO: 18957 - DNA, 746 bp, synthetic construct
  source 1..746: mol_type = other DNA
ttaaaacagcctgtgggttgtacccacccacagggcccactgggcgctagcactccgattctgcggaatctttgtgcgcctgttttataaccctcccccgaaacttgtaacttagaagttatgtacgttactgatcagcagcaggcgtggcacaccagccatgtcttgatcaagcacttctgtacccccggactgagtatcaatagactgctcacgtggtcgaaggagaaaacgttcgttatccggctaactacttcgagaaacttagtagccccactgaaactgcggagtgtttcgctcagcacttcccccgtgtagatcaggtcgatgagtcactgcttaccccacgggtgaccgtggcagtggctgcgttggcggcctgcctatggggctacccataggacgctctaaagtggacatggtgcgaagagtctattgagctagttagtagtcctccggcccctgaatgcggctaatcctaactgcggagcgcatgcccccaaaccagagggtggtgcgtcgtaacgggcaactctgcagcggaaccgactactttgggtgtccgtgtttcttttattcttataatggctgcttatggtgacaattgagggattgttaccatatagctattggattggccatccggtgtgcaacagagctattatctacttgtttgttggatacattccattaacacctaaatccctcaacacattgcactatatcctaacgctgaacgcaagaaa

SEQ ID NO: 18958 - DNA, 746 bp, synthetic construct
  source 1..746: mol_type = other DNA
ttaaaacagcctgtgggttgtacccacccacagggcccactgggcgctagcactccgattctgcggaatccttgtgcgcctgttttataacccttccccgaaacttgtaacttagaagttatacacgttactgatcaacagcaggcgtggcacaccagccatgtcttgatcaagcacttctgtaaccccggactgagtatcaatagactgctcacgtggtcgaaagagaaaacgttcgttatccggctaactacttcgagaaacctagtagcaccactgaaactgcggagtgtttcgctcagcacttcccccgtgtagatcaggtcgatgagtcactgcttaccccacgggtgaccgtggcagtggctgcgttggcggcctgcctatggggcaacccataggacgctctaaagtggacatggtgtgaagagtctattgagctagttagtagtcctccggcccctgaatgcggctaatcctaactgcagagcgcatgcccccaaaccagagggtggtgcgtcgtaacgggtaactctgcagcggaaccgactactttgggtgtccgtgtttcttttattctcataatggctgcttatggtgacaattgaggaattgttaccatatagctattggattggccatccggtgtgcaacagagctattatctacttgtttgttggatacattccattgacacccaaatccttcaaaacattgcattatattctaacgttgaacgcaagaaa

SEQ ID NO: 18959 - DNA, 746 bp, synthetic construct
  source 1..746: mol_type = other DNA
ttaaaacagcctgtgggttgtacccacccacagggcccactgggcgctagcactccgattctgcggaatctttgtgcgcctgttttataaccctcccccgaaactcgtaacttagaagttatgtacgttactgatcagtagcaggcgtggcacaccagccatgtcttgatcaagcacttctgtaaccccggactgagtatcaatagactgctcacgtggtcgaaagagaaaacgttcgttatccggctaactacttcgagaaacctagtagcaccactgaaactgcggagtgtttcgctcagcacttcccccgtgtagatcaggtcgatgagtcactgcttaccccacgggtgaccgtggcagtggctgcgttggcggcctgcctatggggcaacccataggacgctctaaagtggacatggtgtgaagagtctattgagctagttagtagtcctccggcccctgaatgcggctaatcctaactgcggagcgcacgcccccaaaccagagggtggtgcgtcgtaacgggtaactctgcagcggaaccgactactttgggtgtccgtgtttcttttattctcataatggctgcttatggtgacaattgaggaattgttaccatatagctattggattggccatccggtgtgcaacagagctattatctacttgtttgttggatacattccattgacacctaaatccttcaatacattgcactatattctaacattgaacgcaagaaa

SEQ ID NO: 18960 - DNA, 746 bp, synthetic construct
  source 1..746: mol_type = other DNA
ttaaaacagcctgtgggttgtacccactcacagggcccactgggcgctagcactccgattctgcggaatctttgtgcgcctgttttatgaccctcccccgaaacttgcaacttagaagttatgtacgttactgatcaacagcaggcgtggcacaccagccatgtcttggtcaagcacttctgtaaccccggaccgagtatcaatagactgctcacgtggtcgaaagagaaaacgttcgttatccggctaactacttcgagaaacctagtagcaccactgaaactgcggagtgtttcgctcagcacttcccccgtgtagatcaggtcgatgagtcactgcttaccccacgggtgaccgtggcagtggctgcgttggcggcctgcctatggggcaacccataggacgctctaaagtggacatggtgtgaagagtctattgagctagttagtagtcctccggcccctgaatgcggctaatcctaactgcggagcgcatgcccccaaaccagggggtggtgcgtcgtaacgggtaactctgcagcggaaccgactactttgggtgtccgtgtttcttttattctcataatggctgcttatggtgacaattgaggaattgttaccatatagctattggattggccatccggtgtgcaacagagctattatctacctgttcgttggatacattccattgacacctaaatccttcaattcattgcactatattctgacgttgaacgcaagaaa

SEQ ID NO: 18961 - DNA, 746 bp, synthetic construct
  source 1..746: mol_type = other DNA
ttaaaacagctctggggttgcacccactcacaggacccacgcggtgccagcactctggttccacgggacctttgtgcgcctgttttatgtcccctccccaatttgtaatttagaagcaatttgcaacactgatcagtagcaggcatagcgcaccagctatgtcttgatcaagcacttctgtttccccggaccgagtatcaatagactgtacacacggttgaaggagaaagcgtccgttatccggctaactacttcgagaaacccagtagcaccattgaaactacagagtgtttcgctccacacttcccccgtgtagatcaggtcgatgagtcactgcaatccccacgggcgaccgtggcagtggctgcgctggcggcctgcctatggggcaacccataggacgctctaatgtggacatggtgcgaagagtctattgagctagttagtagtcctccggcccctgaatgcggctaatcctaactgcggagcacatgccttcaatccagagggtagtgtgtcgtaatgggcaactctgcagcggaaccgactactttgggtgtccgtgtttcctttattctcacattggctgcttatggtgacaattacagaattgttaccatatagctattggattggccatccggtgtgcaatagagctattatatacctgtttgttggctttgtaccactaaccttaaaatctttaaccactctcgagtgtatattaacccttaatacagtcaaac

SEQ ID NO: 18962 - DNA, 745 bp, synthetic construct
  source 1..745: mol_type = other DNA
ttaaaacagcctgtgggttgcacccacccacagggcccattgggcgctagcactctggtactgaggtacctttgtgcgcctgtttttactccccttcccccgaagtaacttagaagctgtaaatcaacgatcaatagcaggtgtggcacaccagtcataccttgatcaagcacttctgtttccccggactgagtatcaataggctgctcgcgcggctgaaggagaaaacgttcgttacccgaccaactacttcgagaagcttagtaccaccatgaacgaggcagggtgtttcgctcagcacaaccctagtgtagatcaggctgatgagtcactgcaacccccatgggcgaccatggcagtggctgcgttggcggcctgcccatggagaaatccatgggacgctctaattctgacatggtgtgaagagcctattgagctagctggtagtcctccggcccctgaatgcggctaatcctaactgcggagcacatgctcacgaaccagtgggtggtgtgtcgtaacgggcaactctgcagcggaaccgactactttgggtgtccgtgtttccttttattcttatattggctgcttatggtgacaatcaaagagttgttaccatatagctattggattggccatccggtgtgcaacagggcaattgtttacctatttattggttttgtaccattatcactgaagtctgtgatcactctcaaattcattttgaccctcaacacaatcaaac

SEQ ID NO: 18963 - DNA, 745 bp, synthetic construct
  source 1..745: mol_type = other DNA
ttaaaacagcctgtgggttgttcccacccacagggcccactgggcgctagcacactgattctgcgggatctttgtgcgcctgttttataaccccttccctaagcagtaacttagaagctttatacactcacgaccaatagtaggcgtggcgcgccagtcacgtcttggtcaagcacttctgttcccccggactgagtaccaatagactgctcacgcggttgaaggggaaaacgttcgttatccggctaactacttcgagaaacctagtagcaccgtgaaagttgcggagtgtttcgctcagcacttcccccgtgtagatcaggtcgatgagtcactgtaaaccccacgggcgaccgtgacagtggctgcgttggcggcctgcccatggggtaacccatgggacgctctaatacagacatggtgtgaagagtctattgagctagttagtagtcctccggcccctgaatgcggctaatcctaactgcggagcacgcaccctcaacccagggggtggcgtgtcgtaatgggtaactctgcagcggaaccgactactttgggtgtccgtgtttccttttattccttactggctgcttatggtgacaattgaaaagttgttaccatatagctattggattggccatccggtgtctaacagagctattgtttacctatttattggatacgtccctcttaatctcaaggccattcaaactcttaattatatattgctccttaactgtaagaa

SEQ ID NO: 18964 - DNA, 745 bp, synthetic construct
  source 1..745: mol_type = other DNA
ttaaaacagcctgtgggttgcacccacccacagggcccactgggcgctagcactctggtactgaggtacctttgtgcgcctgtttttactccccttcccccgaagtaacttagaagctgtaaattaacgatcaatagcaggtgtggcacaccagtcataccttgatcaagcacttctgtttccccggactgagtatcaataggctgctcgcgcggctgaaggagaaaacgttcgttacccgaccaactacttcgagaagcttagtaccaccatgaacgaggcagggtgtttcgctcagcacaaccccagtgtagatcaggctgatgagtcactgcaacccccatgggcgaccatggcagtggctgcgttggcggcctgcccatggagaaatccatgggacgctctaattctgacatggtgtgaagagcctattgagctagctggtagtcctccggcccctgaatgcggctaatcctaactgcggagcacatgctcacaaaccagtgggtggtgtgtcgtaacgggcaactctgcagcggaaccgactactttgggtgtccgtgtttccttttattcctatattggctgcttatggtgacaatcaaagagttgttaccatatagctattggattggccatccggtgtgcaacagggcaattgtttacctatttattggttttgtaccattatcactgaagtctgtgatcactctcaaattcattttggccctcaacacaatcaaac

SEQ ID NO: 18965 - DNA, 745 bp, synthetic construct
  source 1..745: mol_type = other DNA
ttaaaacagcctgtgggttgcacccacccacagggcccattgggcgctagcactctggtactgaggtacctttgtgcgcctgtttttactccccttcccccgaagtaacttagaagctgtaaatcaacgatcaatagcaggtgtggcacaccagtcataccttgatcaagcacttctgtttccccggactgagtatcaataggctgctcgcgcggctgaaggagaaaacgttcgttacccgaccaactacttcgagaagcttagtaccaccatgaacgaggcagggtgtttcgctcagcacaaccccagtgtagatcaggctgatgagtcactgcaacccccatgggcgaccatggcagtggctgcgttggcggcctgcccatggagaaatccatgggacgctctaattctgacatggtgtgaagagcctattgagctagctggtagtcctccggcccctgaatgcggctaatcctaactgcggagcacatgctcacgaaccagtgggtggtgtgtcgtaacgggcaactctgcagcggaaccgactactttgggtgtccgtgtttccttttattcttatattggctgcttatggtgacaatcaaagagttgttaccatatagctattggattggccatccggtgtgcaacagggcaattgtttacctatttattggttttgtaccattatcactgaagtctgtgatcactctcaaattcattttgaccctcaacacaatcaaac

SEQ ID NO: 18966 - DNA, 746 bp, synthetic construct
  source 1..746: mol_type = other DNA
taaaacagctggggggtggtacccactcacagggcccacgtggcgctagcactctggttctacggaacctttgtgcgcctgttttacgccccttccccaatttgcaacttagaagcaatacacaacactgatcaacagcaggcatggcgcaccagctatgtcttgatcaagcacttctgtttccccggaccgagtatcaataaactgttcacgcggttgaaggagaaagcgtccgttatccggctaactacttcgagaaacctagtaacaccattgaagctgcagagtgtttcgctcggcacttcccccgtgtagatcaggtcgatgagtcactgcaatccccacgggtgaccgtggcagtggctgcgctggcggcctgcctatggggcaacccataggacgctctaatgtggacatggtgtgaagagtctattgagctagttagtggtcctccggcccctgaatgcggctaatcctaactgcggagcacatgccttcaatccagagggtagtgtgtcgtaatgggcaactctgcagcggaaccgactactttgggtgtccgtgtttccttttattcttatattggctgcttatggtgacaattacagaattgttaccatatagctattggattggccatccggtgtgcaacagagctattatatacctatttgttggctttgtaccactaaccttaaaatctataaccaccctcgactttatattaaccctcaatacagtcaaac

SEQ ID NO: 18967 - DNA, 745 bp, synthetic construct
  source 1..745: mol_type = other DNA
ttaaaacagcctgtgggttgttcccacccacagggcccactgggcgctagcacactgattctgcgggatctttgtgcgcctgttttataaccccttccctaagcagtaacttagaagctttgcacaatcacgaccagtagtgggcgtggcgcgccagtcacgtcttggtcaagcacttctgtatccccggactgagtatcaatagactgctcacgcggttgaaggagaaaacgttcgttatccggctaactacttcgagaaacctagtagcaccgtgaaagttgcggagtgtttcgctcagcacttcccccgtgtagatcaggtcgatgagtcactgtaaaccccacgggcgaccgtgacagtggctgcgttggcggcctgcccatggggtaacccatgggacgctctaatacagacatggtgtgaagagtctattgagctagttagtagtcctccggcccctgaatgcggctaatcctaactgcggagcacgcaccctcaacccagggggcggcgtgtcgtaatgggtaactctgcagcggaaccgactactttgggtgtccgtgtttccttttattccttattggctgcttatggtgacaattgaaaagttgttaccatatagctattggattggccatccggtgtctaacagagctattgtttacctatttattggatacgtccctcttaatctcaaggtcattcagactcttgattatatattgctccttaactgtaagaa

SEQ ID NO: 18968 - DNA, 745 bp, synthetic construct; identical to SEQ ID NO: 1088
  source 1..745: mol_type = other DNA

SEQ ID NO: 18969 - DNA, 745 bp, synthetic construct
  source 1..745: mol_type = other DNA
ttaaaacagcctgtgggttgttcccacccacagggcccactgggcgctagcacactgattctgcggaatctttgtgcgcctgttttatgacccttttcccaagtagcaacttagaagctctacacaatcacgaccaatagtgggcgtggcgcgccagccacgtcttggccaagcacttctgtatccccggactgagtatcaatagactgctcacgcggttgaaggagaaaacgttcgttatccggctaactacttcgagaaacctagtagcaccatgaaagttgcggagtgtttcgctcagcacttcccccgtgtagatcaggtcgatgagtcactgtaaaccccacgggcgaccgtgacagtggctgcgttggcggcctgcccatggggtaacccatgggacgctctaatacagacatggtgtgaagagtctattgagctagttagtagtcctccggcccctgaatgcggctaatcctaactgcggagcacgcaccctcaacccagggggcggcgtgtcgtaatgggtaactctgcagcggaaccgactactttgggtgtccgtgtttccttttatttcttactggctgcttatggtgacaattgaaaagttgttaccatatagctattggattggccatccggtgtctaacagagctgttgtttacctatttattggatacgtccctcttaatctcaaggccattcaaactcttgattatatattgctccttaactgtaagaa

SEQ ID NO: 18970 - DNA, 745 bp, synthetic construct
  source 1..745: mol_type = other DNA
ttaaaacagcctgtgggttgttcccacccacagggcccactgggcgctagcacactgattctgcgggatctttgtgcgcctgttttataaccctttccctaagcagcaacttagaagctttgtacaatcacgaccagtagtgggcgtggcgcgccagtcacgtcttggtcaagcacttctgtatccccggactgagtatcaatagactgctcacgcggttgaaggagaaaacgttcgttatccggctaactacttcgagaaacctagtagcaccatgaaagttgcggagtgtttcgctcagcacttcccccgtgtagatcaggtcgatgagccactgtaaaccccacgggcgaccgtgacagtggctgcgttggcggcctgcccatggggtaacccatgggacgctctaatacagacatggtgtgaagagtctattgagctagttagtagtcctccggcccctgaatgcggctaatcctaactgcggagcacgcaccctcaacccagggggcggcgtgtcgtaatgggtaactctgcagcggaaccgactactttgggtgtccgtgtttccttttattccttattggctgcttatggtgacaattgaaaagttgttaccatatagctattggattggccatccagtgtctaacagagctattgtttacttatttattggatacgtccctctcaatctcaaggtcattcaaacccttgattatatattgctccttaattgtaagaa

SEQ ID NO: 18971 - DNA, 746 bp, synthetic construct
  source 1..746: mol_type = other DNA
ttgaaacagcctgtgggttgttcccacccacagggcccactgggcgctagcacactgattctgcgggatctttgtgcgcctgttttataacccttccccctaagcagcaacttagaagctttgtacaatcacgaccaatagtgggcgtggcgcgccagtcacgttttggtcaagcacttctgtatccccggaccgagtatcaatagactgctcacgcggttgaaggagaaaacgttcgttacccggctaactacttcgagaaacctagtagcaccatgaaagttgcggagtgtttcgctcagcacttcccccgtgtagatcaggtcgatgagtcactgtaaaccccacgggcgaccgtgacagtggctgcgttggcggcctgcccatggggtaacccatgggacgctctaatacagacatggtgcgaagagtctattgagctagttagcagtcctccggcccctgaatgcggctaatcctaactgcggagcacgcaccctcaagccagggggcggcgtgtcgtaatgggtaactctgcagcggaaccgactactttgggtgtccgtgtttccttttattctttattggctgcttatggtgacaattgaaaagttgttaccatatagctattggattggccatccggtgtccaacagagctattgtttacctatttattggatacgtccctcttaatctcaaggccattcaaactcttgattatatactgctccttaactgtaagag

SEQ ID NO: 18972 - DNA, 744 bp, synthetic construct
  source 1..744: mol_type = other DNA
ttaaaacagcctgtgggttgttcccacccacagggcccactgggcgctagcacactgattctgcgggacctttgtgcgcctgttttataacccttccctaagcagtaacttagaagctttgtacaatcatggccaatagtgggcgtggcgcgccagtcacgtcttggtcaagcacttctgtatccccggactgagtatcaatagactgctcacgcggttgaaggagaaaacgttcgttacccggctaactacttcgagaaacctagtagcaccatgaaagttgcggagtgtttcgctcagcacttcccccgtgtagatcaggtcgatgagtcactgtaaaccccacgggcgaccgtgacagtggctgcgttggcggcctgcccatggggtaacccatgggacgctctaatacggacatggtgcgaagagtctattgagctagttagcagtcctccggcccctggatgcggctaatcctaactgcggagcgcgcaccctcaacccagggggcggcgcgtcgtaatgggtaactctgcagcggaaccgactactttgggtgtccgtgtttccttttattctttattggctgcttatggtgacaattgaaaagttgttaccatatagctattggattagccatccggtgtctaacagagctattgtttacctattcattggattcgtccctcttaatctcaaggccattcaaactctcgattacatattgctccttaactgtaagaa

SEQ ID NO: 18973 - DNA, 745 bp, synthetic construct
  source 1..745: mol_type = other DNA
ttaaaacagcctgtgggttgttcccacccacagggcccactgggcgctagcacactgattctgcggaatctttgtgcgcctgttttatgacccttttcccaagtagcaacttagaagctctacacaatcacgaccaatagtgggcgtggcgcgccagccacgtcttggccaagcacttctgtatccccggactgagtatcaatagactgctcacgcggttgaaggagaaaacgttcgttatccggctaactacttcgaggaacctagtagcaccatgaaagttgcggagtgtttcgctcagcacttcccccgtgtagatcaggtcgatgagtcactgtaaaccccacgggcgaccgtgacagtggctgcgttggcggcctgcccatggggtaacccatgggacgctctaatacagacatggtgtgaagagtctattgagctagttagtagtcctccggcccctgaatgcggctaatcctaactgcggagcacgcaccctcaacccagggggcggcgtgtcgtaatgggtaactctgcagcggaaccgactactttgggtgtccgtgtttccttttatttcttactggctgcttatggtgacaattgaaaagttgttaccatatagctattggattggccatccggtgtctaacagagctgttgtttacctatttattggatacgtccctcttaatctcaaggccattcaaactcttgattatatattgctccttaactgtaagaa

SEQ ID NO: 18974 - DNA, 745 bp, synthetic construct
  source 1..745: mol_type = other DNA
ttgaaacagcctgtgggttgttcccacccacagggcccactgggcgctagcacactgattctgcgggatctttgtgcgcctgttttataacccttcccctaagcagcaacttagaagctttgtacaatcacgaccaatagtgggcgtggcgcgccagtcacgtcttggtcaagcacttctgtatccccggactgagtatcaatagactgctcacgcggttgaaggagaaaacgttcgttacccggctaactacttcgagaaacctagtagcaccatgaaagttgcggagtgtttcgctcagcacttcccccgtgtagatcaggtcgatgagtcactgtaaaccccacgggcgaccgtgacagtggctgcgttggcggcctgcccatggggtaacccatgggacgctctaatacagacatggtgcgaagagtctattgagctagttagcagtcctccggcccctgaatgcggctaatcctaactgcggagcgcgcaccctcaacccagggggcggcgtgtcgtaatgggtaactctgcagcggaaccgactactttgggtgtccgtgtttccttttattctttattggctgcttatggtgacaattgaaaagttgttaccatatagctattggattggccatccggtgtctaacagagctattgtttacctatttattggatacgtccctcttaatctcaaggccattcaaactcttgattatatattgctccttaactgtaggaa

SEQ ID NO: 18975 - DNA, 746 bp, synthetic construct
  source 1..746: mol_type = other DNA
tttaaaacagcctgtgggttgtacccacccacagggcccactgggcgctagcacactggttctgcgggacctttgtgcgcctgttttataacccttcccctaagcagtaacttagaagttttgtacagtcatggccaatagtgggcgtgacgcgccagtcacgtcttggtcaagcacttctgtatccccggactgagtatcaatagactgctcacgcggttgaaggagaaaacgttcgttacccggctaactacttcgagaaacctagtagcaccatgaaagttgcggagtgtttcgctcagcacttcccccgtgtagatcaggtcgatgagtcactgtaaaccccacgggcgaccgtgacagtggctgcgttggcggcctgcccatggggtaacccatgggacgctctaatacagacatggtgcgaagagtctattgagctagttagcagtcctccggcccctgaatgcggctaatcctaactgcggagcgcgcaccttcaacccagggggcggcgcgtcgtaatgggtaactctgcagcggaaccgactactttgggtgtccgtgtttccttttatcctttattggctgcttatggtgacaattgaaaagttgttaccatatagctattggattggccatccggtgtctaacagagctattgtttacctattcattggcttcgtccctctaaatctcaaagccatccaaactctcgattacatattgctcctcaactgtaagaa

SEQ ID NO: 18976 - DNA, 746 bp, synthetic construct
  source 1..746: mol_type = other DNA
ttaaaacagcctgtgggttgttcccacccacagggcccactgggcgctagcacactgattctgcgggatctttgtgcgcctgttttataacccctccccctaagcagtaacttagaagctccacactatcacgaccaatagcaggcgtggtgcaccagtcacgtcttggtcaagcacttctgtttccccggactgagtatcaatagactgctcacgcggttgaaggagaaaacgttcgttatccggctaactacttcgagaaacctagtagcaccgtgaaagttgcggagtgtttcgctcagcacttcccccgtgtagatcaggtcgatgagtcactgtgaaccccacgggtgaccgtgacagtggctgcgttggcggcctgcccatggggcaacccatgggacgctctaatacagacacggtgtgaagagtctattgagctagttagtagtcctccggcccctgaatgcggctaatcctaactgtggagcgcgtaccctcaatccagagggcagcgcgtcgtaacgggtaactctgcagcggaaccgactactttgggtgtccgtgtttccttttattctttattggctgcttatggtgacaattaaagagttgttaccatatagctattggattggccatccggtaaccaacagagctattgtttacttgtttgttggatacgtccctctcaatctcaagaccattcaaactcttgattatatactacttctcaattgtaagaa

SEQ ID NO: 18977 - DNA, 745 bp, synthetic construct
  source 1..745: mol_type = other DNA
ttaaaacagcctgtgggttgttcccactcacagggcccactgggcgctagcacactgattctgcgggatctttgtgcgcctgttttataacccttcccctaagcagcaacttagaagctttgtacaatcacgaccaatagtgggcgtgacgcgccagtcacgtcttggtcaagcacttctgtatccccggactgagtaccaatagactgctcacgcggttgaaggggaaaacgttcgttacccggctaactacttcgagaaacctagtagtaccatgaaagttgcggagtgtttcgctcagcacttcccccgtgtagatcaggtcgatgagtcactgtaaaccccacgggcgaccgtgacagtggctgcgttggcggcctgcccatggggtaacccatgggacgctctaatacagacatggtgcgaagagtctattgagctagttaacagtcctccggcccctgaatgcggctaatcctaactgcggagcgcgcaccctcaacccagggggcggcgcgtcgtaatgggtaactctgcagcggaaccgactactttgggtgtccgtgtttccttttattctttattggctgcttatggtgacaattgaaaagttgttaccatatagctattggattggccatccggtgtctaacagagctattgtttatctattcattggattcgtccctcttaatctcaaggccattcaaactctcgattacatattgctccttaattgtaagaa

SEQ ID NO: 18978 - DNA, 746 bp, synthetic construct
  source 1..746: mol_type = other DNA
ttaaaacagcctgtgggttgttcccacccacagggcccactgggcgctagcacactgattctgcgggatctttgtgcgcctgttttataaccctcccccctaagcagcaacttagaagctttgtacaatcacgaccagtagtgggcgtggcgcgccagtcacgtcttggtcaagcacttctgtatccccggactgagtatcaatagactgcttacgcggtcgaaggagaaaacgttcgttacccggctaactacttcgagaaacctagtagcaccatgaaagttgcggagtgtttcgctcagcacttcccccgtgtagatcaggtcgatgagtcactgtaaaccccacgggcgaccgtgacagtggctgcgttggcggcctgcccatggggtaacccatgggacgctctaatacagacatggtgtgaagagtctattgagctagttagtagtcctccggcccctgaatgcggctaatcctaactgcggagcgcgcaccctcaacccagggggcggcgcgtcgtaatgggtaactctgcagcggaaccgactactttgggtgtccgtgtttccttttattccttattggctgcttatggtgacaattgaaaagttgttaccatatagctactggattggccatccggtgtccaacagagctattgtttacctatttattggatacgtccctcttaatctcaaagccattcaaactcttgactatatattgctcctcaactgtaagaa

SEQ ID NO: 18979 - DNA, 729 bp, synthetic construct
  source 1..729: mol_type = other DNA
tgcacccacccacaggacccacgcggtgctagcactctggttctacgggacctttgtgcgcctgttttatgtcccctccccaatttgtaacttagaagcaatttgcaacactgatcagtagtaggcatagcgcaccagctatgtcttgatcaagcacttctgtttccccggaccgagtatcaataaactgttcacacggttgaaggagaaagcgtccgttatccggctaactacttcgagaaacccagtagcgccattgaaactgcagagtgtttcgctccacacttcccccgtgtagatcaggtcgatgagtcactgcaatccccacgggcgaccgtggcagtggctgcgctggcggcctgcctatggggcaacccataggacgctctaatgtggacatggtgtgaagagtctattgagctagttagtagtcctccggcccctgaatgcggctaatcctaactgcggagcacatgccttcaatccagagggtagtgtgtcgtaatgggcaactctgcagcggaaccgactactttgggtgtccgtgtttccttttattctcacattggctgcttatggtgacaattacggaattgttaccatatagctattggattggccatccggtgtgcaatagagctattatatacctatttgttggctttgtaccactgaccttaaaatctataaccactctcgagtgtatattaacccttaatacaatcaaac

SEQ ID NO: 18980 - DNA, 746 bp, synthetic construct
  source 1..746: mol_type = other DNA
tttaaaacagcctgtgggttgtacccacccacagggcccaccgggcgctagtacactgattctgcgggatctttgtacgcctgttttacaacccttcccctaagcagtaacttagaagcttcacgctatcacgaccaatagtaggcgtggtgcaccagtcacgtcttggtcaagcacttctgtttccccggactgagtatcaatagactgcttgcgcggttgaaggagaaaacgttcgtcatccggctaactacttcgagaaacctagtagcaccgtgaaagttgcagagtgtttcgctcagcacttcccccgtgtagatcaggtcgatgagtcactgtgaaccccacgggtgaccgtgacagtggctgcgttggcggcctgcccatggggtaacccatgggacgctctaatacagacacggtgtgaagagtctattgagctagttagtagtcctccggcccctgaatgcggctaatcctaactgcggagcgcgtaccctcaatccagggggcagcgcgtcgtaatgggtaactctgcagcggaaccgactactttgggtgtccgtgtttccttttattccttattggctgcttatggtgacaattgaaaagttgttaccatatagctattggattggccatccggtaaccaacagagctattgtttacctgtttattggatacgtccctctcaatcttaaggctattcaaactcttgattatatattacttctcaactgcaagaa

SEQ ID NO: 18981 - DNA, 746 bp, synthetic construct
  source 1..746: mol_type = other DNA
tttaaaacagcctgtgggttgtacccacccacagggcccactgggcgctagcacactggttccgcgggacctttgtgcgcctgttttataacccttcccctaagcagtaacttagaagctttgtacaatcatggccaatagtgggcgtggcgcgccagtcacgtcttggtcaagcacttctgtatccccggactgagtatcaatagactgctcacgcggttgaaggagaaaacgttcgttacccggttaactacttcgagaaacctagtagcaccatgaaagttgcggagtgtttcgctcagcacttcccccgtgtagatcaggtcgatgagtcactgtaaaccccacgggcgaccgtgacagtggctgcgttggcggcctgcccatggggtaacccatgggacgctctaatacagacatggtgcgaagagtctattgagctagttagcagtcctccggcccctgaatgcggctaatcctaactgcggagcgcgcaccctcaacccagggggcggcgcgtcgtaatgggtaactctgcagcggaaccgactactttgggtgtccgtgtttccttttattctttattggctgcttatggtgacaattgaaaagttgttaccatatagctattggattggccatccggtgtctaacagagctattgtttacctattcattggcttcgtccctcttaatctcaaagccattcaaactctcgattgcatattgctcctcaactgtaagaa

SEQ ID NO: 18982 - DNA, 746 bp, synthetic construct
  source 1..746: mol_type = other DNA
tttaaaacagcctgtgggttgtacccacccacagggcccactgggcgctagcacactggttctgcgggacctttgtgcgcctgttttataacccttcccttgagcagtaacttagaagctttgtacaatcacggccaatagtgggcgtggcgcgccagtcacgtcttggtcaagcacttctgtatccccggactgagtatcaatagactgctcacgcggttgaaggagaaaacgttcgttacccggctaactacttcgagaaacctagtagcaccatgaaagttgcggagtgtttcgctcagcacttcccccgtgtagatcaggtcgatgagtcactgtgaaccccacgggtgaccgtgacagtggctgcgttggcggcctgcccatggggtaacccatgggacgctctaatacagacatggtgcgaagagtctattgagctagttagtagtcctccggcccctgaatgcggctaatcctaactgcggagcgcgcaccctcaacccagggggcggcgcgtcgtaatgggtaactctgcagcggaaccgactactttgggtgtccgtgtttccttttattctttattggctgcttatggtgacaattgaaaagttgttaccatatagctattggattggccatccggtgtctaatagagctattgtttacctattcattggattcatccctcttaatctcaaggccattcaaactctccattacatattgctccttaattgtgagaa

SEQ ID NO: 18983 - DNA, 746 bp, synthetic construct
  source 1..746: mol_type = other DNA
tttaaaacagcctgtgggttgtacccacccacagggcccactgggcgctagcacactggttctgcgggacccttgtgcgcctgttttataaccctttccctaagcagtaacttagaagctttgcacaatcatggccaatagtgggcgtggcgcgccagtcacgtcttggtcaagcacttctgtatccccggactgagtatcaatagactgctcacgcggttgaaggagaaaacgttcgttacccggctaactacttcgagaaacctagtagtaccatgaaagttgcggagtgtttcgctcagcacttcccccgtgtagatcaggtcgatgagtcactgtaaaccccacgggcgaccgtgacagtggctgcgttggcggcctgcccatggggtaacccatgggacgctctaatacagacatggtgcgaagagtctattgagctagttagcagtcctccggcccctgaatgcggctaatcctaactgcggagcgcgcaccctcaacccagggggcggcgcgtcgtaatgggtaactctgcagcggaaccgactactttgggtgtccgtgtttccttttattctttattggctgcttatggtgacaattgaaaagttgttaccatatagctattggattggccatccggtgtctaacagagctattgcttatctattcattggattcgtccctcccaatctcaaggccattcaaactctcgattacatattgctccttaactgtaagaa

SEQ ID NO: 18984 - DNA, 745 bp, synthetic construct
  source 1..745: mol_type = other DNA
ttaaaacagcctgtgggttgtccccacccacagggcccactgggcgctagcacactggttctgcgggacctttgtgcgcctgttttataacccttcccctaagcagtaacttagaagctttgtacaatcatggccaatagagggcgtggcgcgccagtcacgtcttggtcaagcacttctgtatccccggactgagtaccaatagactgctcacgcggttgaaggggaaaacgttcgttacccggctaactacttcaagaaacctagtagcaccatgaaagttgcggagtgtttcgctcagcacttcccccgtgtagatcaggtcgatgagtcactgtaaaccccacgggcgaccgtgacagtggctgcgttggcggcctgcccatggggtagcccatgggacgctctaatacagacatggtgcgaagagtctattgagctagttagcagtcctccggcccctgaatgcggctaatcctaactgtggagcgcgcaccctcaacccagggggcggcgcgtcgtaatgggtaactccgcagcggaaccgactactttgggtgtccgtgtttccttttattctttattggctgcttatggtgacaattgaaaagttgttaccatatagctattggattggccatccggtgtttaacagagctattgtttatctgttcattggattcgtccctcttaatctcaaggccattcaaaatctcgattacatattgctccttaactgtaagaa

SEQ ID NO: 18985 - DNA, 745 bp, synthetic construct
  source 1..745: mol_type = other DNA
ttaaaacagcctgtgggttgttcccactcacagggcccactgggcgctagcacactgattctgcgggatctttgtgcgcctgttttataaccctttccctaagcagcaacttagaagctttgtacaatcacgaccaatagtgggcgtgacgcgccagtcacgtcttggtcaagcacttctgtatccccggactgagtaccaatagactgctcacgcggttgaaggggaaaacgttcgttacccggctaactacttcgagaaacctagtagtaccatgaaagttgcggagtgtttcgctcagcacttcccccgtgtagatcaggtcgatgagtcactgtaaaccccacgggcgaccgtgacagtggctgcgttggcggcctgcccatggggtaacccatgggacgctctaatacagacatggtgcgaagagtctattgagctagttagcagtcctccggcccctgaatgcggctaatcctaactgcggagcgcgcaccctcaacccagggggcggcgtgtcgtaatgggtaactctgcagcggaaccgactactttgggtgtccgtgtttccttttattctttattggctgcttatggtgacaattgagaagttgttaccatatagctattggattggccatccggtgtctaacagagctattgtttacctatttattggatacgtccctcttaatctcaaggtcattcaaactcttgattatatattgctccttaactgtagaaa

SEQ ID NO: 18986 - DNA, 745 bp, synthetic construct; identical to SEQ ID NO: 1089
  source 1..745: mol_type = other DNA

SEQ ID NO: 18987 - DNA, 745 bp, synthetic construct
  source 1..745: mol_type = other DNA
ttaaaacagcctgtgggttgttcccacccacagggcccactgggcgctagcacactgattctgcgggatctttgtgcgcctgttttataacccctcccctaagcagcaacttagaagcttcacactatcatgaccaatagtaggcgtggcgcaccagtcacgtcttggtcaagcacttctgtttccccggactgagtatcaatagactgctcacgcggttgaaggagaaaacgttcgttatccggctaactacttcgagaaacctagtaacaccgtgaaagttgcggagtgtttcgctcagcacttcccccgtgtagatcaggtcgatgagtcactgtgaaccccacgggtgaccgtgacagtggctgcgttggcggcctgcccatggggtaacccatgggacgctctaatacagacacggtgtgaagagtctattgagctagttagtagtcctccggcccctgaatgcggctaatcctaactgcggagcgcgtaccctcagtccagggggcagcgcgtcgtaatgggtaactctgcagcggaaccgactactttgggtgtccgtgtttccttttattccttattggctgcttatggtgacaattgaaaagttgttaccatatagctattggattggccatccgacaaccaacagagctattgtttacttgtttattggatacgtccctctcaatctcaaggccattcaaactcttgattatatactacttctcaactggaagaa

SEQ ID NO: 18988 - DNA, 745 bp, synthetic construct
  source 1..745: mol_type = other DNA
ttaaaacagcctgtgggttgttcccacccacagggcccactgggcgctagcacactgattctgcgggatctttgtgcgcctgttttataacccctcccctaagcagtaacttaaaagctttacactatcacgaccaatagtaggcgtgacgcaccagtcacgtcttggtcaagcacttctgtttccccggactgagtatcaatagactgctcacgcggttgaaggagaaaacgttcgttatccggctaactacttcgagaaacctagtagcaccgtgaaagttgcggagtgtttcgctcagcacttcccccgtgtagatcaggtcgatgagtcactgtgaaccccacgggtgaccgtgacagtggctgcggtggcggcctgcccatggggtaacccatgggacgctctaatacagacacggtgtgaagagtctattgagctagttggtagtcctccggcccctgaatgcggctaatcctaactgcggagcgcgcaccctcaatccagggggcagcgcgtcgtaatgggtaactctgcagcggaaccgactactttgggtgtccgtgtttccttttattccttattggctgcttatggtgacaattgaaaagttgttaccatatagctattggattggccatccgataaccaacagagctattgtttacctgtttgttggatacgtccccctcaatctcaaggccattcaaactcttaattatatactacttctcaactgtaggaa

SEQ ID NO: 18989 - DNA, 745 bp, synthetic construct
  source 1..745: mol_type = other DNA
ttaaaacagcctgtgggttgttcccacccacagggcccactgggcgctagcacactgattctgcgggatctttgtgcgcctgttttataacccctcccctaaacagtaacttagaagcttcacactatcacgaccaatagtaggcgtgacgcaccagtcacgtcttggtcaagcacttctgtttccccggactgagtatcaatagactgctcacgcggttgaaggagaaaacgttcgttatccggctaactacttcgagaaacctagtagcaccgtgaaagttgcggagtgtttcgctcagcacttcccccgtgtagatcaggtcgatgagtcactgtgaaccccacgggtgaccgtgacagtggctgcggtggcggcctgcccatggggtaacccatgggacgctctaatacagacacggtgtgaagagtctattgagctagttggtagtcctccggcccctgaatgcggctaatcctaactgcggagcgcgcaccctcaatccagggggcagcgcgtcgtaatgggtaactctgcagcggaaccgactactttgggtgtccgtgtttccttttattccttattggctgcttatggtgacaattgaaaagttgttaccatatagctattggattggccatccgataaccaacagagctattgtttacctgtttgttggatacgtccccctcaatctcaaggccattcaaactcttaattatatactacttctcaactgtaggaa

SEQ ID NO: 18990 - DNA, 745 bp, synthetic construct
  source 1..745: mol_type = other DNA
ttaaaacagcctgtgggttgttcccacccacagggcccactgggcgctagcacactgattctgcgggatctttgtgcgcctgttttataacccttcccctaagcagcaacttaaaagctttgtacaatcacgaccaacagtgggcgtgacgcgccagtcacgtcttggtcaagcacttctgtatccccggactgagtaccaatagactgctcacgcggttgaaggggaaaacgttcgttacccggttaactacttcaagaaacctagtagcaccatgaaagttgcggagtgtttcgttcagcactccccccgtgtagatcaggtcgatgagccactgtaaaccccacgggcgaccgtgacagtggctgcgttggcggcctgcccatggggtaacccatgggacgctctaatacagacatggtgcgaagagtctattgagctagttagcagtcctccggcccctgaatgcggctaatcctaactgcggagcgcgcaccttcaacccagggggcggcgtgtcgtaatgggtaactctgcagcggaaccgactactttgggtgtccgtgtttccttttattctttactggctgcttatggtgacaattgaaaagttgttaccatatagctattggattggccatccggtgtctaacagagctattgtttacctatttgttggatacgtccctcttaatctcaaggccattcaaactcttgattatatactgctccttaactgtaggaa

SEQ ID NO: 18991 - DNA, 745 bp, synthetic construct
  source 1..745: mol_type = other DNA
ttaaaacagcctgtgggttgttcccacccacagggcccattgggcgctagcacactgattttgcggaatctttgtgcgcctgttttataacccttcccccaagcagcaacttagaagtattgcacaatcgcgaccagtagtgggcgtgacgcgccagtcacgtcttggtcaagcacttctgtatccccggactgagtatcaatagactgcccacgcggttgaaggagaaaacgttcgttatccggctaactacttcgggaagcctagtagcaccttgaaagttgcggagtgtttcgctcagtacttcccccgtgtagatcaggccgatgagccactgtaaaccccacgggcgaccgtgacagtggctgcgctggcggcctgcccatgggggaacccatgggacgctctaatactgacatggtgtgaagagtctactgagctagttagtagtcctccggcccctgaatgcggctaatcctaactgcggagcacacaccctcaacccagggggcagtgtgtcgtaatgggtaactctgcagcggaaccgactactttgggtgaccgtgtttccttttattccttattggctgcttatggtgacaattgaaaagttgttgccatatagctattggattggccatccggtatctaatagagctattgtttacttatttattggatacgtccctcttaatttcgaggctatccaaactcttgattatatattgctccttaattataagaa

SEQ ID NO: 18992 - DNA, 745 bp, synthetic construct
  source 1..745: mol_type = other DNA
ttaaaacagcctgtgggttgttcccacccacagggcctattgggcgctagcacactggttttgcggaatctttgtgcgcctgttttataacccttcccccaagcagcaacttagaagtattgcacaatcgcggccagtagtgggcgtgacgcgccagtcacgtcttggtcaagcacttctgtatccccggactgagtatcaatagactgctcacgcggttgaaggagaaaacgttcgttatccggctaactacttcgggaaacctagtagcaccttgaaagttgcagagtgtttcgctcagcacttcccccgtgtagatcaggccgatgagccactgtaaaccccacgggcgaccgtgacagtggctgcgctggcggcctgcccatgggggaacccatgggacgctctaatacagacatggtgtgaagagtctactgagctagttagtagtcctccggcccctgaatgcggctaatcctaactgcggagcacacaccctcaacccagggggcagtgtgtcgtaatgggtaactctgcagcggaaccgactactttgggtgaccgtgtttccttttattccttattggctgcttatggtgacaattgaaaagttgttaccatatagctattggattggccatccggtatctaacagagctattgtttacttatttattggatacgtccctcttaatttcaaggctattcaaactcttgattatatattgctccttaattataagaa

SEQ ID NO: 18993 - DNA, 745 bp, synthetic construct
  source 1..745: mol_type = other DNA
ttaaaacagcctgtgggttgttcccacccacagggcccattgggcgctagcacactgattttgcggaatctttgtgcgcctgttttatagcccttcccccaagcagcaacttagaagtattgcacaatcgcggccagtagcgggcgtgacgcgccagtcacgtcttggtcaagcacttctgtatccccggactgagtatcaatagactgctcacgcggttgaaggagaaaacgttcgttatccggctaactacttcgggaaacctagtagcaccttgaaagttgcagagtgtttcgctcagcactcccctcgtgtagatcaggccgatgagccactgtaaaccccacgggcgaccgtgacagtggctgcgctggcggcctgcccatggggaaacccatgggacgctctaatactgacatggtgtgaagagtctactgagctagttagtagtcctccggcccctgaatgcggctaatcctaactgcggagcacacaccctcaacccagggggcagtgtgtcgtaatgggtaactctgcagcggaaccgactactttgggtgaccgtgtttccttttattccttattggctgcttatggtgacaattgaaaagttgttaccatatagctattggattggccatccggtgtctaacagagctattgtttacttatttattggatacgttccccttaatttcaaggctatccaaactcttgattatatattgctccttaattataagaa

SEQ ID NO: 18994 - DNA, 745 bp, synthetic construct
  source 1..745: mol_type = other DNA
ttaaaacagcctgtgggttgttcccacccacagggcccattgggcgctagcacactgattttgcggaatctttgtgcgcctgttttataacccttcccccaagcagcaacttagaagcattgcacaatcgcggccagtagcgggcgtgacgcgccagtcacgtcttggtcaagcacttctgtatccccggactgagtatcaatagactgctcacgcggttgaaggagaaaacgttcgttacccggctaactacttcgggaaacctagtagcaccttgaaagttgcagagtgtttcgctcagcacttcccccgtgtagatcaggccgatgagccactgtaaaccccacgggcgaccgtgacagtggctgcgctggcggcctgcccatggggaaacccatgggacgctctaatactgacatggtgtgaagagtctactgagctagttagtagtcctccggcccctgaatgcggctaatcctaactgcggagcacacaccctcaacccagggggcagtgtgtcgtaatgggtaactctgcagcggaaccgactactttgggtgaccgtgtttccttttattccttattggctgcttatggtgacaattgaaaagttgttaccatatagctattggattggccatccggtgtctaacagagctattgtttacttatttattgggtacgttccccttaatttcaaggctatccaaactcttgattatatattgctccttaattataagaa

SEQ ID NO: 18995 - DNA, 745 bp, synthetic construct
  source 1..745: mol_type = other DNA
ttaaaacagcctgtgggttgttcccacccacagggcccattgggcgttagcacactgattttgcggaatctttgtgcgcctgttttataacccttcccccaagcagcaacttagaagtattgcacaatcgcggccagtagcgggcgtgacgcgccagtcacgtcttggtcaagcacttctgtatccccggactgagtatcaatagactgctcacgcggttgaaggagaaaacgttcgttacccggctaactacttcgggaaacctagtagcaccttgaaagttgcagagtgtttcgctcagcacttcccccgtgtagatcaggccgatgagccactgtaaaccccacgggcgaccgtgacagtggctgcgctggcggcctgcccatgggggaacccatgggacgctctaatacagacatggtgtgaagagtctactgagctagttagtagtcctccggcccctgaatgcggctaatcctaactgcggagcacacaccctcaacccagggggcagtgtgtcgtaatgggtaactctgcagcggaaccgactactttgggtgaccgtgtttccttttattccttattggctgtttatggtgacaattgaaaagttgttaccatatagctattggattggccatccggtatctaacagagctattgtttacttatttgttggatacgtccctcttaatttcaaggctatccaaactcttgattatatattgctccttaattataagaa

SEQ ID NO: 18996 - DNA, 745 bp, synthetic construct; identical to SEQ ID NO: 1090
  source 1..745: mol_type = other DNA

SEQ ID NO: 18997 - DNA, 746 bp, synthetic construct
  source 1..746: mol_type = other DNA
tttaaaacagcctgtgggttgtacccacccacagggcccactgggcgctagcacactggttctgcgggacctttgtgcgcctgttttatagcccttcccctaagcagtaacttagaagctttgtacaattatggccaatagtgggcgtggcgcgccagtcacgtcttggtcaagcacttctgtttccccggactgagtatcaatagactgctcacgcggttgaaggagaaaacgttcgtcacccggctaactacttcgagaaacctagtagcatcatgaaagttgcggagtgtttcgctcagcacttcccccgtgtagatcaggtcgatgagtcactgtaaaccccacgggcgaccgtgacagtggctgcgttggcggcctgcccatggggtaacccatgggacgctctaatacagacatggtgcgaagagtctattgagctagttagcagtcctccggcccctgaatgcggctaatcctaactgcggagcgcgcaccttcaacccagggggcggcgcgtcgtaatgggtaactctgcagcggaaccgactactttgggtgtccgtgtttccttttattctctattggctgcttatggtgacaattgaaaagttgttaccatatagctattggattggccatccggtgtctaacagagctattgtttacctattcattggctttgtccctcttaatctcaaggtcatccaaactctcgattacatattgctcctcaactgtaagaa

SEQ ID NO: 18998 - DNA, 746 bp, synthetic construct
  source 1..746: mol_type = other DNA
tttaaaacagcctgtgggttgtacccacccacagggcccactgggcgctagcacactggttccgcgggacctttgtgcgcctgttttataacccttcccctaagctgtaacttagaagctttgtacaatcatggccaatagtgggcgtggcgcgccagtcacgtcttggtcaagcacttctgtatccccggactgagtatcaatagactgctcacgcggttgaaggagaaaacgttcgtcacccggctaactacttcgagaaacctagtagcatcatgaaggttgcggagtgtttcgctcagcacttcccccgtgtagatcaggtcgatgagtcactgtaaaccccacgggcgaccgtgacagtggctgcgttggcggcctgcccatggggtaacccatgggacgctctaatacagacatggtgcgaagagtctattgagctagttagcagtcctccggcccctgaatgcggctaatcctaactgcggagcgcgcaccttcaatccagggggcggcgcgtcgtaatgggtaactctgcagcggaaccgactactttgggtgtccgtgtttccttttattctctattggctgcttatggtgacaattgaaaagttgttaccatatagctattggattggccatccggtgtctaacagagctattgtttacttattcattggctttgtccctcttaatctcaaggtcatccaaactctcgattacatattgctcctcaactgtaagaa

SEQ ID NO: 18999 - DNA, 734 bp, synthetic construct
  source 1..734: mol_type = other DNA
gcctgtgggttgcacccacccacagggcccactgggcgccagcactctggtactgcggtacctttgtgcgcctgttttatcaccccaccccatccggaacgtagaagcaatgcacaactgaccaatagtgggtgtggcgcaccagccacatcttggtcgagcactcctgtttccccgggtttagtatcaataagctgctcacgcggctgaaggagaaaacacccgttatccggccaactacttcgagaaacctagtaccgctatgaacgttgcaaggcgtttcgctcagcacttcccccgtgtagatcaggccgatgagtcaccgcattcctcacgggcgaccgtggcggtggctgcgttggcggcctgcctatgggcttgcccataggacgccttaatactgacatggtgcgaagagtctattgagctagttggtagtcctccggcccctgaatgcggctaatcctaactgcggagcacatactcacaaaccagtgagcggtgtgtcgtaacgggcaactctgcagcggaaccgactactttgggtgtccgtgtttccttttattcttatactggctgcttatggtgacaattaaagaattgttaccatatagctattggattggccatccggtgtctaacagagctattatatacttgtttgttggattcatctcgttatcacacaaatccctcaacactttgtgctttatcttgaatttgaactcaaaaag

SEQ ID NO: 19000 - DNA, 744 bp, synthetic construct
  source 1..744: mol_type = other DNA
ttaaaacagcctgtgggttgtacccacccacagggcccaccgggcgccagcactctggtactgaggtacctttgtgcgcctgtttttactccccttccccgaagtaacttagaagctgtgaatcaacgatcaacagtaggtgtgacacaccagtcacatctcgatcaagcacttctgtttccccggactgagtatcaataggctgcttgcgcggctgaaggagaaaacgttcgttacccggccaactacttcgagaagcttagtaccaccatgaacgatgcagagtgtttcgttcagcacaaccccagtgtagatcaggctgatgagtcactgcaatccccatgggcgaccatggcagtggctgcgttggcggcctgcccatggagaaatccatgggacgctctaattctgacatggtgcgaagagcctattgagctagctggtaatcctccggcccctgaatgcggctaatcccaactgcggagcacacgctcacaagccagtgggtagtgtgtcgtaacgggcaactctgcagcggaaccgactactttgggtgtccgtgtttccttttattcttatactggctgcttatggtgacaatcaaagaattgttaccatatagctattggattggccatccggtgtgcaacagagcaattgtttatctatttgttggttttgtaccattgacactgaagtctgtgattacccttaactttattttgactctcaacacaattaaac

SEQ ID NO: 19001 - DNA, 744 bp, synthetic construct
  source 1..744: mol_type = other DNA
ttaaaacagcctgtgggttgtgcccacccacagggcccaccgggcgccagcactctggtactgaggtacctttgtgcgcctgtttttacttcccttccccgaagtaacttagaagctgtgaatcaacgatcaacagtaggtgtgacacaccagtcacatctcgatcaagcacttctgtttccccggactgagtatcaataggctgcttgcgcggctgaaggagaaaacgttcgttacccggccaactacttcgagaagcttagtaccaccatgaacgatgcagagtgtttcgttcagcacaaccccagtgtagatcaggctgatgagtcactgcaatccccatgggcgaccatggcagtggctgcgttggcggcctgcccatggagaaatccatgggacgctctaattctgacatggtgcgaagagcctattgagctagctggtaatcctccggcccctgaatgcggctaatcccaactgcggagcacacgctcacaagccagtgggtagtgtgtcgtaacgggcaactctgcagcggaaccgactactttgggtgtccgtgtttccttttattcttatactggctgcttatggtgacaatcaaagaattgttaccatatagctattggattggccatccggtgtgcaacagagcaattgtttatctatttgttggttttgtaccattgacactgaagtctgtgattacccttaactttattttgactctcaacacaattaaac

SEQ ID NO: 19002 - DNA, 744 bp, synthetic construct
  source 1..744: mol_type = other DNA
ttaaaacagcctgtgggttgcacccacccacagggcctactgggcgctagcactctggcactgaggtacctttgtgcgcctgtttttacttcccttccccgaagtaacttagaagctgtaaaccaacgatcaatagcaggtgtgacacaccagtcatatcttgatcaagcacttctgtttccccggactgagtatcaataggctgctcgcgcggctgaaggagaaaacgttcgttacccgaccaactacttcgagaagcttagtaccaccatgaacgaggcagagtgtttcgctcagcacaaccccagtgtagatcaggctgatgagccactgcaacccccatgggcgaccatggcagtggctgcgttggcggcctgcccatggagaaatccatgggacgctctaatcctgacatggtgtgaagagcctattgagctagctggtagtcctccggcccctgaatgcggctaatcctaactgcggagcacatgctcacaaaccagtgggtggtgtgtcgtaacgggcaactctgcagcggaaccgactactttgggtgtccgtgtttccttttattcttatattggctgcttatggtgacaatcaaagaattgttaccatatagctattggattggccatccggtgtgcaacagagcaattgtttacctatttattggttttgtaccactatcactgaagtctgtgatcactctcgaattcattttgaccctcaatacaatcaaac

SEQ ID NO: 19003 - DNA, 744 bp, synthetic construct
  source 1..744: mol_type = other DNA
ttaaaacagcctgtgggttgtacccacccacagggcccactgggcgtcagcactctggtactgaggtacctttgtgcgcctgttttacttcccttccccaaaagtaacttagaagctttgaaccaacgatcaacagtaagtgtgacaaaccagtcacatctcgatcaagcacttctgtttccccggactgagtatcaataggctgcttacgcggctgaaagagaaaacgttcgttacccggccaactacttcgagaagcttagtaccaccatgaacgaggcagagcgtttcgctcggcactaccccagtgtagatcaggctgatgagtcactgcaatccccatgggcgaccatggcggtggctgcgctggcggcctgcccatggagagatccatgggacgctctaattttgacatggtgcgaagagcctattgagctagttggtagtcctccggcccctgaatgcggctaatcctaactgcggagcgcacacccacataccagtgggcagtgtgtcgtaacgggcaactctgcagcggaaccgactactttgggtgtccgtgtttccttttattcttatgttggctgcttatggtgacaatcgaagagttgttaccatatagctattggattggccatccggtgtgcaacagagcaattgtctaccagtttattggttttgtaccactgacattaaagtctgtaattacccttaattttgtcttgacccttaacacagtcaagc

SEQ ID NO: 19004 - DNA, 744 bp, synthetic construct
  source 1..744: mol_type = other DNA
ttaaaacagcctgtgggttgcacccactcacagggcccactgggcgtcagcactctggtactgaggtacctttgtgcgcctgttttacctccctttccccgaagtaacttagaagctttgaaccaacgatcaacagtaggtgtggcataccagtcacatcccgatcaagcacttctgtttccccggactgagtatcaataggctgctcgcgcggctgaaggagaaaacgttcgttacccggccaactacttcgagaagcttagtaccaccatgaatgaggcagagcgtttcgctcggcactaccccagtgtagatcaggctgatgagtcactgcaatccccatgggcgaccatggcagtgactgcgctggcggcctgcccatggagaaatccatgggacgctctaattttgacatggtgcgaagagcctattgagctagttggtagtcctccggcccctgaatgcggctaatcctaactgcggagcacacacccacaaaccagtgggcagtgtgtcgtaacgggcaactctgcagcggaaccgactactttgggtgtccgtgtttccttttattcttatgctggctgcttatggtgacaatcgaagagttgttaccatatagctattggattggccatccggtgtgcaacagagcaattgtctacctgtttgttggttttgtaccactgacattaaagtctgtaatcactctcaattttatcttgaccctcaacacagtcaagc

SEQ ID NO: 19005 - DNA, 744 bp, synthetic construct
  source 1..744: mol_type = other DNA
ttaaaacagcctgtgggttgtacccacccacagggcccactgggcgtcagcactctggtactgaggtacctttgtgcgcctgttttacttcccttccccaaaagtaacttagaagctttgaaccagcgatcaacagtaggtgtgacataccagtcacatctcgatcaagcacttctgtttccccggactgagtatcaataggctgcttacgcggctgaaagagaaaacgttcgttacccggccaactacttcgagaagcttagtaccaccatgaacgaggcagagcgtttcgctcggcactaccccagtgtagatcaggctgatgagtcactgcaatccccatgggcgaccatggcagtggctgcgctggcggcctgcccatggagagatccatgggacgctctaattttgacatggtgcgaagagcctattgagctagttggcagtcctccggcccctgaatgcggctaatcctaactgcggagcgcacacccacataccagtgggcagtgtgtcgtaacgggcaactctgcagcggaaccgactactttgggtgtccgtgtttccttttattctcatgttggctgcttatggtgacaatcgaagagttgttaccatatagctattggattggccatccggtgtgcaacagagcaattgtctaccagtttattggttttgtaccactgacattaaagtctgtaattacccttaattttatcttgacccttaacacagtcaagc

SEQ ID NO: 19006 - DNA, 745 bp, synthetic construct
  source 1..745: mol_type = other DNA
ttgaaacagcctgtgggttgttcccacccacagggcccactgggcgctagcacactgattctgcgggatctttgtgcgcctgttttataacccctcccctaagcagtaacttagaagcttcacactatcacgaccaatagtaggcgtggcgcaccagtcacgtcttggtcaagcacttctgtctccccggactgagtatcaatagactgctcacgcggttgaaggagaaaacgttcgttatccggctaactacttcgagaaacctagtagcaccgtgaaagttgcggagtgtttcgctcaacacttcccccgtgtagatcaggtcgatgagtcactgtgaaccccacgggtgaccgtgacagtggctgcgttggcggcctgcccatggggtaacccatgggacgctctaatacagacacggtgtgaagagtctattgagctagttagtagtcctccggcccctgaatgcggctaatcctaactgtggagcgcgcaccctcaatccagggggcagcgcgtcgtaatgggtaactctgcagcggaaccgactactttgggtgtccgtgtttccttttattccttattggctgcttatggtgacaattgaaaagttgttaccatatagctactggattggccatccggtgaccaacagagctattgtttacttgtttattggatacgtccctctcaatctcaaagccattcaaactcttgattacatattacttctcaactgtaagaa

SEQ ID NO: 19007 - DNA, 745 bp, synthetic construct
  source 1..745: mol_type = other DNA
ttgaaacagcctgtgggttgttcccacccacagggcccactgggcgctagcacactgattctgcgggatctttgtgcgcctgttttataaccctccccctaagcagcaacttagaagctttgtacaatcacgaccaatagtgggcgtggcgcgccagtcacgtcttggtcaagcacttctgtatccccggactgagtatcaatagactgctcacgcggttgaaggagaaaacgttcgttacccggctaactacttcgagaaacctagtagcaccatgaaagttgcggagtgtttcgctcagcacttcccccgtgtagatcaggtcgatgagtcactgtaaaccccacgggcgaccgtgacagtggctgcgttggcggcctgcccatggggtaacccatgggacgctctaatacagacatggtgcgaagagtctattgagctagttagcagtcctccggcccctgaatgcggctaatcctaactgcggagcgcgcaccctcaacccagggggcggcgtgtcgtaatgggtaactctgcagcggaaccgactactttgggtgtccgtgtttccttttattccttattggctgcttatggtgacaattgaaaagttgttaccatatagctattggattggccatccggtgtctaacagagctattgtttacctatttattggatacgtcccccttaacctcaaggccattcaaactcctgattatatattgctccttaactgtaagaa

SEQ ID NO: 19008 - DNA, 744 bp, synthetic construct
  source 1..744: mol_type = other DNA
ttaaaacagcctgtgggttgcacccacccatagggcccactgggcgctagcactctggcactgaggtacctttgtgcgcctgtttttatttcccttccccgaagtaacttagaagctgtaaatcaacgatcaatagtaggtgtgacacaccagtcataccttgatcaagcacttctgtttccccggactgagtatcaataggctgctcgcgcggctgaaggagaaaccgttcgttacccgaccaactacttcgagaagcttagtaccaccatgaacgaggcagagtgtttcgttcagcacaaccccagtgtagatcaggctgatgagtcactgcaacccccatgggcgaccatggcagtggctgcgttggcggcctgcccatggagaaatccatgggacgctctaattctgacatggtgtgaagagcctattgagctagttggtagtcctccggcccctgaatgcggctaatcctaactgcggagcacatgctcacaaaccagtgggtggtgtgtcgtaacgggcaactctgcagcggaaccgactactttgggtgtccgtgtttccttttattcttatattggctgcttatggtgacaatcaaagaattgttaccatatagctattggatcggccatccggtgtgcaacagagcaattgtttacctatttattggctttgtaccattatcactgaagtccgtgatcactctcaaattcattttgactctcaacacaatcaaac

SEQ ID NO: 19009 - DNA, 744 bp, synthetic construct
  source 1..744: mol_type = other DNA
ttaaaacagcctgtgggttgtacccacccacagggcccactgggcgtcagcactctggtactgaggtacctttgtgcgcctgttttacttcccttccccaaaagtaacttagaagctttgaaccaacgatcaacagtaagtgtgacataccagtcacatctcgatcaagcacttctgtttccccggactgagtatcaataggctgcttacgcggctgaaagagaaaacgttcgttacccggccaactacttcgagaagcttagtaccaccatgaacgaggcagagcgtttcgctcggcactaccccagtgtagatcaggctgatgagtcactgcaatccccatgggcgaccatggcagtggctgcgctggcggcctgcccatggagagatccatgggacgctctaattttgacatggtgcgaagagcctattgagctagctggtagtcctccggcccctgaatgcggctaatcctaactgcggagcgcacacccacataccagtgggcagtgtgtcgtaacgggcaactctgcagcggaaccgactactttgggtgtccgtgtttccttttattcttatgttggctgcttatggtgacaatcgaagagttgttaccatatagctattggattggccatccggtgtgcaacagagcaattgtctaccagtttattggttttgcaccactgacattaaagtctgtaattacccttaattttatcttgacccttaacacagtcaagc

SEQ ID NO: 19010 - DNA, 745 bp, synthetic construct
  source 1..745: mol_type = other DNA
ttgaaacagcctgtgggttgttcccacccacagggcccactgggcgctagcacactgattctgcgggatctttgtgcgcctgttttataacccctcccctaagcagtaacttagaagcttcacactatcacgaccaacagtgggcgtggcgcaccagtcacgtcttggtcaagcacttctgtttccccggactgagtatcaatagactgctcacgcggttgaaggagaaaacgttcgttatccggctaactacttcgagaaacctattagcaccgtgaaagttgcggagagtttcgctcagcacttcccccgtgtagatcaggtcgatgagtcactgtgaaccccacgggtgaccgtgacagtggctgcgttggcggcctgcccatggggtaacccatgggacgctctaatacagacacggtgtgaagagtctattgagctagttagtagtcctccggcccctgaatgcggctaatcctaactgcggagcgcgtaccctcaatccagggggcagcgcgtcgtaatgggtaactctgcagcggaaccgactactttgggtgtccgtgtttccttttattccttattggctgcttatggtgacaattgaaaagttgttaccatatagctattggattggccatccggtaaccaacagagctattgtttacctgtttattggatacgtccccctcaatctcaaggccattcaaactcttgattacatattacttctcaactgtaagaa

SEQ ID NO: 19011 - DNA, 744 bp, synthetic construct
  source 1..744: mol_type = other DNA
ttaaaacagcctgtgggttgtacccacccacagggcctactgggcgctagcactctggcactgaggtacctttgtgcgcctgttttgacttcccttccccgaagtaacttagaagctgtaaatcaacgatcaatagtaggtgtgacacaccagtcatatcttgatcaagcacttctgtttccccggactgagtatcaataggctgctcgcgcggctgaaggagaaaacgttcgttacccgaccaactacttcgagaagcttagtaccaccatgaacgaggcagagtgtttcgttcagcacaaccccagtgtagatcaggctgatgagccactgcaacccccatgggcgaccatggcagtggctgcgttggcggcctgcccatggagaaatccatgggacgctctaattctgacatggtgtgaagagcctattgagctagctggtagtcctccggcccctgaatgcggctaatcctaactgcggagcacatgctcacaaaccagtgggtggtgtgtcgtaacgggcaactctgcagcggaaccgactactttgggtgtccgtgtttccttttattcttatattggctgcttatggtgacaatcaaagaattgttaccatatagctattggattggccatccggtgtgcaacagagcaattgtttacccatttattggttttgtaccattatcactgaagtctgtgatcactctcaaattcattttgaccctcaacacaaccaaat

SEQ ID NO: 19012 - DNA, 745 bp, synthetic construct
  source 1..745: mol_type = other DNA
ttaaaacagcctgtgggttgttcccatccacagggcccactgggcgctagcacactgattctgcgggatctttgtgcgcctgttttataacccttcccctaagcaacaacttagaagctttgtacaatcacgaccaatagtgggcgtgacgcgccagtcacgtcttggtcaagcacttctgtatccccggactgagtaccaataggctgctcacgcggttgaaggggaaaacgttcgttacccggctaactacttcgagaaacctagtagcaccatgaaagttgcggagtgtttcgctcagcacttcccccgtgtagatcaggtcgatgagtcactgtaaaccccacgggcgaccgtgacagtggctgcgttggcggcctgcccatggggtaacccatgggacgctctaatacagacatggtgcgaagagtctattgagctagtcagtagtcctccggcccctgaatgcggctaatcctaactgcagagcgcgcaccctcaatccagggggcggcgtgtcgtaatgggtaactctgcagcggaaccgactactttgggtgtccgtgtttccttttattctttattggctgcttatggtgacaattgagaagttgttaccatatagctattggattggccatccggtgtctaacagagctattgtttacctatttattgggtacgtccctcttaatctcaaggccattcaaactcttgattacatattgctccttaactgtaggaa

SEQ ID NO: 19013 - DNA, 745 bp, synthetic construct
  source 1..745: mol_type = other DNA
ttgaaacagcctgtgggttgttcccacccacagggcccactgggcgctagcacactgattctgcgggatctttgtgcgcctgttttataacccctcccctaagcagtaacttagaagcttcacactattacgaccaatagtaggcgtggcgcaccagtcacgtcttggtcaagcacttctgtttccccggactgagtatcaatagactgctcacgcggtcgaaggagaaaacgttcgttatccggctaactacttcgagaaacctagtagcaccgtgaaagttgcggagtgtttcgctcagcacttcccccgtgtagatcaggtcgatgagtcactgtgaaccccacgggtgaccgtgacagtggctgcgttggcggcctgcccatggggtaacccatgggacgctctaatacagacacggtgtgaagagtctattgagctagttagtagtcctccggcccctgaatgcggctaatcttaactgcggagcgcgtaccctcaatccagggggcagcgcgtcgtaatgggtaactctgcagcggaaccgactactttgggtgtccgtgtttccttttattccttattggctgcttatggtgacaattgaaaagttgttaccatatagctattggattggccatccggtaaccaacagagctattgtttacctgtttattggatacgtccctctcaatctcaaggccattcaaactcttgattatatactacttctcaactgtaagaa

SEQ ID NO: 19014 - DNA, 745 bp, synthetic construct
  source 1..745: mol_type = other DNA
ttaaaacagcctgtgggttgttcccacccacagggcccactgggcgctagcacaccgattctgcgggatctttgtgcgcctgttttataacccctcccctaagcagcaacttagaagctttgcacaatcacgaccagtagtgggcgtggcgcaccagccacgtcttggtcaagcacttctgtatccccggactgagtaccaatagactgctcacgcggttgaaggagaaaatgttcgttacccggctaactacttcgagaaacctagtaacaccatgaaagttgcggagtgtttcgctcagcacttcccccgtgtagatcaggtcgatgagtcactgtaaaccccacgggcgaccgtgacagtggctgcgttggcggcctgcccatggggtaacccatgggacgctctaatacagacatggtgtgaagagtctattgagctagttagtagtcctccggcccctgaatgcggctaatcctaactgcggagcgcgcaccctcaacccagggggcagcgcgtcgtaatgggtaactctgcagcggaaccgactactttgggtgtccgtgtttccttttattccttattggctgcttatggtgacaattgaaaagttgttaccatatagctattggattggccatccggtgtctaatagagccattgtttacctgtttattggatacgttcctcttaatctcaaagccattcaaactcttgactatatactgctccttaactgtaagaa

SEQ ID NO: 19015 - DNA, 745 bp, synthetic construct
  source 1..745: mol_type = other DNA
ttaaaacagcctgtgggttgttcccacccacagggcccactgggcgctagcacactgattctacgggatccttgtgcgcctgttttataatccttcccccaagtagcaacttagaagctttgtacaatcacgaccagtagtgggcgtggcgcgccagtcacgtcttggtcaagcacttctgtatccccggactgagtatcaatagactgctcacgcggttgaaggagaaaacgttcgttacccggctaactacttcgagaaacccagtagcaccgtgaaagttgcggagtgtttcgctcagcacttcccccgtgtagatcaggtcgatgagtcactgtaaaccccacgggcgaccgtgacagtggctgcgttggcggcctgcccatggggtaacccatgggacgctctaatacagacacggtgtgaagagtctattgagctagttagtagtcctccggcccctgaatgcggctaatcctaactgcggagcgcgcaccctcaacccagggggcggcgtgtcgtaatgggtaactctgcagcggaaccgactactttgggtgtccgtgtttccttttattccttattggctgcttatggtgacaattgaaaagttgttaccatatagctattggattggccatccggtgtctaatagagctattgtttacttatttattggatacgtccctcttaatctcaaagtcattcaaactcttgattatatattgctccttaactgtaagaa

SEQ ID NO: 19016 - DNA, 744 bp, synthetic construct
  source 1..744: mol_type = other DNA
ttaaaacagcctgtgggttgcacccacccacagggcccactgggcgctagcactctggcactaaggtacctttgtgcgcctgtttttacttcccttccccaaagtaacttagaagttgtgcaccagcgatcaatagcaggtgtgacacaccagtcatatcttgatcaagtacttctgtttccccggaccgagtatcaataggctgctcgcgcggctgaaggagaaaacgttcgttacccgaccaactacttcgagaagcttagtaccaccatgaacgaggcagagtgtttcgttcagcacaaccccagtgtagatcaggctgatgagtcactgcaacccccatgggcgaccatggcagtggctgcgttggcggcctgcccatggagaaatccatgggacgctctaattctgacatggtgtgaagagcctattgagctagctggtagtcctccggcccctgaatgcggctaatcctaactgcggagcacatgctcacaaaccagtgggtggtgtgtcgtaatgggcaactctgcagcggaaccgactactttgggtgtccgtgtttccttttactcttatgttggctgcttatggtgacaatcaaagaattgttaccatatagctattggattggccatccggtgtgtaacagagcaattgtttacctatttattggttttgtaccactatcactgaagtctgtgaccactctcaaattcattttgaccctcaactcaatcaaac

SEQ ID NO: 19017 - DNA, 744 bp, synthetic construct
  source 1..744: mol_type = other DNA
ttaaaacagcctgtgggttgtacccacccacagggcccactgggcgtcagcactccggtactgaggtacctttgtgcgcctgttttacttcccttccccaaaagtaacttagaagctttgaaccagcgatcaacagtaggtgtgacataccagtcacatctcgatcaagcacttctgtttccccggactgagtatcaataggctgcttacgcggctgaaagagaaaacgttcgttacccggccaactacttcgagaagcttagtaccaccatgaacgaggcagagcgtttcgctcggcactaccccagtgtagatcaggctgatgagtcactgcaatccccatgggcgaccatggcagtggctgcgctggcggcctgcccatggagagatccatgggacgctctaattttgacatggtgcgaagagcctattgagctagttggtagtcctccggcccctgaatgcggctaatcctaactgcggagcgcacacccacataccagtgggcagtgtgtcgtaacgggcaactctgcagcggaaccgactactttgggtgtccgtgtttccttttattctcatgttggctgcttatggtgacaatcgaagagttgttaccatatagctattggattggccatccggtgtgcaacagagcaattgtctaccagtttattggttttgtaccactgacattaaagtctgtaattacccttaatattatcttgacccttaacacagtcaagc

SEQ ID NO: 19018 - DNA, 745 bp, synthetic construct
  source 1..745: mol_type = other DNA
ttaaaacagcctgtgggttgttcccactcacagggcccactgggcgctagcacactgattctgcgggatctttgtgcgcctgttttataacccttcccctaagcagcaacttagaagctttgtacaatcacgaccaatagtgggcgtgacgcgccagtcacgtcttggtcaagcacttctgtatccccggactgagtatcaatagactgctcacgcggttgaaggagaaaacgttcgttacccggctaactacttcgagaaacctagtagcaccatgaaagttgcggagtgtttcgctcagcacttcccccgtgtagatcaggccgatgagtcactgtaaaccccacgggcgaccgtgacagtggctgcgttggcggcctgcccatggggtaacccatgggacgctctaatacagacatggtgcgaagagtctattgagctagttagcagtcctccggcccctgaatgcggctaatcctaactgcggagcgcgcaccctcaacccagggggcggcgcgtcgtaatgggtaactctgcagcggaaccgactactttgggtgtccgtgtttccttttattctttattggctgcttatggtgacaattgaaaagttgttaccatatagctattggattggccacccggtgtctaacagagctattgtttatctattcattggattcgtccctcttaatctcaaggccattcaaactctcgattacatattgctccttaattgtaagaa

SEQ ID NO: 19019 - DNA, 745 bp, synthetic construct
  source 1..745: mol_type = other DNA
ttaaaacagcctgtgggttgttcccacccacagggcccactgggcgctagcacactgattctgcgggatctttgtgcgcctgttttataacccttcccctaagcagcaacttagaagctttgtacaatcacgaccaatagtgggcgtggcgcgccagtcacgtcttggtcaagcacttctgtatccccggactgagtatcaatagactgctcacgcggttgaaggagaaaacgttcgttacccggctaactacttcgagaaacctagtagcaccatgaaagttgcggagtgtttcgctcagcacttcccccgtgtagatcaggccgatgagtcactgtaaaccccacgggcgaccgtgacagtggctgcgttggcggcctgcccatggggtaacccatgggacgctctaatacagacatggtgcgaagagtctattgagctagttagcagtcctccggcccctgaatgcggctaatcctaactgcggagcgcgcaccctcaacccagggggcggcgcgtcgtaatgggtaactctgcagcggaaccgactactttgggtgtccgtgtttccttttattctttattggctgcttatggtgacaattgaaaagttgttaccatatagctattggattggccatccggtgtctaacagagctattgtttatctattcattggattcgtccctcttaatcttaaggccattcaaactctcgattacatattgctccttaattgtaagaa

SEQ ID NO: 19020 - DNA, 745 bp, synthetic construct
  source 1..745: mol_type = other DNA
ttaaaacagcctgtgggttgttcccactcacagggcccactgggcgctagcacactgattctgcgggatctttgtgcgcctgttttataacccttcccctaagcagcaacttagaagctttgtacaatcacgaccaatagtgggcgtgacgcgccagtcacgtcttggtcaaggccttctgtatccccggactgagtatcaatagactgctcacgcggttgaaggagaaaacgttcgttacccggctaactacttcgagaaacctagtagcaccatgaaagttgcggagtgtttcgctcagcacttcccccgtgtagatcaggccgatgagtcactgtaaaccccacgggcgaccgtgacagtggctgcgttggcggcctgcccatggggtaacccatgggacgctttaatacagacatggtgcgaagagtctattgagctagttagcagtcctccggcccctgaatgcggctaatcctaactgcggagcgcgcaccctcaacccagggggcggcgcgtcgtaatgggtaactctgcagcggaaccgactactttgggtgtccgtgtttccttttattctttattggctgcttatggtgacaattgaaaagttgttaccatatagctattggattggccatccggtgtctaacagagctattgtttatctattcattggattcgtccctcttaatctcaagaccattcaaactctcgattacatattgctccttaattgtaagaa

SEQ ID NO: 19021 - DNA, 746 bp, synthetic construct
  source 1..746: mol_type = other DNA
ttaaaacagcctgtgggttgttcccacccacagggcctactgggcgctagcacactgatcctgcgggatctttgtgcgcctgttttataaccccttccctaagtagcaacttagaagcttcgcactatcacgaccgatagtgggcgtggcgcaccagtcacgtcttggtcaagcactcctgtttccccggactgagtatcaatagactgctcacgcggttgaaggagaaaacgttcgttatccggctaactacttcgagaaacctagtagcaccgtgaaagttgcggagtgtttcgctcagcacttcccccgtgtagatcaggtcgatgagtcactgtaaaccccacgggcgaccgtgacagtggctgcgctggcggcctgcccatggggtaacccatgggacgctctaatacagacacggtgtgaagagtctattgagctagttagtagtcctccggcccctgaatgcggctaatcttaactgcggagcgcgtaccctcaacccagggggcggcgcgtcgtaatgggtaactctgcagcggaaccgactactttgggtgtccgtgtttccttttattcctatactggctgcttatggtgacaattgaaaagttgttaccatatagctattggattggccatccggtgaccaacagagctatcatttatctgttcgttggatacgttcctcttgacctcaaggctattcaaactcttgattatatattacttcttaaccataagaa

SEQ ID NO: 19022 - DNA, 746 bp, synthetic construct
  source 1..746: mol_type = other DNA
ttaaaacagcctgtgggttgttcccacccacagggcccattgggcgctagcacactgactttgcggagtctttgtgcgcctgttttataacccttcccccaagtagcaacttagaagtattgcacaaccgcggccagtagtgggtgtgacgcgccagtcacatcttggtcaagcacttctgtatccccggactgagtatcaatagactgctcgcgcggttgaaggagaaaacgttcgttatccggctaactacttcgggaaacctagtagcaccttggaagttgcagagtgtttcgctcagcactttccccgtgtagatcaggtcgatgagccactgtaaaccccacgggcgaccgtgacagtggctgcgttggcggcctgcccatggggtaacccatgggacgctctaatacagacatggtgtgaagagtctactgagctagttagtagtcctccggcccctgaatgcggctaatcctaactgcggagcacacaccctcaatccagggggcggtgtgtcgtaatgggtaactctgcagcggaaccgactactttgggtgtccgtgtttccttttattcctatactggctgcttatggtgacaattgaaaagttgttaccatatagctattggattggccatccggtgtctaacagagctattgtctacttgtttattggatacgtccctcttaatctcaaggtcattcgaactcttgattatatattgctccttaattataggaa

SEQ ID NO: 19023 - DNA, 744 bp, synthetic construct
  source 1..744: mol_type = other DNA
ttaaaacagcctgtgggttgtacccacccacaggggctactgggcgctagcactctggtactaaggtacctttgtgcgcctgtttttatttcccttccccaaagtaacttagaagttgtgcaccaacgatcaatagcaggtatggcacaccagtcatatcttgatcaagtacttctgtttccccggaccgagtatcaataggctgctcgcgcggctgaaggagaaaacgttcgttacccggccaactacttcgagaagcctagtaccaccatgaacgaggcagagtgtttcgctcagcacaaccccagtgtagatcaggctgatgagtcactgcaacccccatgggtgaccatggcagtggctgcgttggcggcctgcccatggagaaatccatgggacgctctaattctgacatggtgtgaagagcctattgacctagatggtagtcctccggcccctgaatgcggctaatcctaactgcggagcacatgctcacaaaccagtgggtggtgtgtcgtaatgggcaactctgcagcggaaccgactactttgggtgtccgtgtttccttttattcctatgttggctgcttatggtgacaatcaaagaattgttaccatatagctattggattggccatccagtgtgcaacagagcaattgtctacctatttgttggtttcgtgccactatcactgaaatctgtgaccactctcaaattcattttgaccctcaactcaaccaaac

SEQ ID NO: 19024 - DNA, 746 bp, synthetic construct
  source 1..746: mol_type = other DNA
tttaaaacagcctgtgggttgtacccacccacagggcccactgggcgctagcacactgattctgcgggatctttgtgcgcctgttttataaccctttccctaagcagcaacttagaagctttgtacaatcacgaccaatagtgggcgtgacgcgccagtcacgtcttggtcaagcacttctgtatccccggactgagtaccaatagactgctcacgcggttgaaggggaaaacgttcgttacccggctaactacttcgagaaacctagtagtaccatgaaagttgcggagtgtttcgctcagcacttccctcgtgtagatcaggtcgatgagtcactgtaaaccccacgggcgaccgtgacagtggctgcgttggcggcctgcccatggggtaacccatgggacgctctaatacagacatggtgcaaagagtctattgagctagttagcagtcctccggcccctgaatgcggctaatcctaactgcggagcgcgcaccctcaacccagggggcggcgtgtcgtaatgggtaactctgcagcggaaccgactactttgggtgtccgtgtttccttttattccttattggctgcttatggtgacaattgaaaagttgttaccatatagctattggattggccatccggtgtctaacagagctattgtttacctatttattggatacgtccctcttaatctcaaggttattcaaaccctcaattatatattgctccttaactgtaggaa

SEQ ID NO: 19025 - DNA, 745 bp, synthetic construct
  source 1..745: mol_type = other DNA
ttaaaacagcctgtgggttgttcccacccacagggcccactgggcgctagcacactgattctgcgggatctttgtgcgcctgttttataaccccgcccgtaagcaggaacttaaaagcttcccactatgacgaccaatagtgggcgtggcgcaccagtcacgtcttggtcaagctcttctgtttccccggactgagtatcaatagactgctcacgcggttgaaggagaaaacgttcgttatccggctaactacttcaagaaacctattagcaccgggaaagttgcggagagtttcgctcaccacttcccccgtgtagatcaggtcgatgagtcactgtaaaccccacgggtgaccgtgacagtggctgcgttggcggcctgcccatggggtaacccatgggacgctctaatacagacacggtgtgaagagtctattgagctagttagtagtcctccggcccctgaatgcggctaatcctaactgcggagcgcgtaccctcaatccagggggcagcgcgtcgtaatgggtaactctgcagcggaaccgactactttgggtgtccgtgtttccttttattccttattggctgcttatggtgacaattgaaaagttgttaccatatagctattggattggccatccggtaaccaacagagctattgtttacctgtttattggatacgtccctctcaatctcaaggccattcaaactcttgattacatattacttctcaactgtaagaa

SEQ ID NO: 19026 - DNA, 744 bp, synthetic construct
  source 1..744: mol_type = other DNA
ttaaaacagcctgtgggttgcacccacccacagggcctactgggcgctagcactctggcactaaggtacctttgtgcgcctgtttttattcccctcccccaaagtaccttagaagttgtgcaccagcgatcaatagcaggtatgacacaccagtcgtatcttgatcaagcacttctgtttccccggaccgagtatcaataggctgctcgcgcggctgaaggagaaaacgttcgttacccgaccaactacttcgagaagcttagtaccaccatgaacgaggcagagtgtttcgttcagcacaaccccagtgtagatcaggctgatgagtcactgcaatccccatgggcgaccatggcagtggctgcgttggcggcctgcccatggagaaatccatgggacgctctaattctgacatggtgtgaagagcctattgagctagctggtagtcctccggcccctgaatgcggctaatcctaactgcggagcacatgctcacaaaccagtgggtggtgtgtcgtaatgggcaactctgcagcggaaccgactactttgggtgtccgtgtttccttttatccttatgttggctgcttatggtgacaatcaaagaattgttaccatatagctattggattggccatccagtgtgcaacagagcaattgtttacctatttgttggtttcgtactgctatcactaaagtctgtgaccactcttaaatttatcttgaccctcaactcaaccaaac

SEQ ID NO: 19027 - DNA, 745 bp, synthetic construct
  source 1..745: mol_type = other DNA
ttgaaacagcctgtgggttgtccccacccacagggcccactgggcgctagcacactggttctgcgggacctttgtgcgcctgttttataacccttcccctaagcagtaacttagaagctttgtacaatcatggccaatagtgggcgtggcgcgccagtcacgtcttggtcaagcacttctgtatccccggactgagtatcaatagactgctcacgcggttgaaggagaaaacgttcgttacccggctaactacttcgagaaacctagtagcaccatgaaagttgcggagtgtttcgctcagcacttcccccgtgtagatcaggtcgatgagtcactgtaaaccccacgggcgaccgtgacagtggctgcgttggcggcctgcccatggggtaacccatgggacgctctaatacagacatggtgcgaagagtctattgagctagttagcagtcctccggcccctgaatgcggctaatcctaactgcggagcgcgcaccctcaacccagggggcggcgtgtcgtaatgggtaactctgcagcggaaccgactactttgggtgtccgggtttccttttattctttattggctgcttatggtgacaattgaaaagttgttaccatatagctattggattggccatccggtgtctaacagagccattgtttacctattcattggattcgtccctcttaatctcaaggccattcaaactcttgattacatattgctccttaactgtaagaa

SEQ ID NO: 19028 - DNA, 740 bp, synthetic construct
  source 1..740: mol_type = other DNA
acagcctgtgggttgttcccacccacagggcccactgggcgccagcactctgattccacggaacctttgtgcgcctgttttataaccctttcccaatttgtaacgtagaagtaatacacactactgatcaatagcaggcatggcgcgccagtcatgtcttgatcaagcacttctgtttccccggactgagtatcaatagactgctcacgcggttgaaggagaaaatgttcgttacccggctaactacttcgagaaacctagtagcaccatagaaactgcagagtgtttcgctcagcacttcccccgtgtagatcaggctgatgagtcactgcaatccccacgggcgaccgtggcagtggctgcgctggcggcctgcctatggggcaacccataggacgctctaatgtggacatggtgcgaagagtctattgagctagttagtagtcctccggcccctgaatgcggctaatcctaactgcggagcacatgccttcaacccaggaggtggtgtgtcgtaacgggcaactctgcagcggaaccgactactttgggtgtccgtgtttctctttattcctatattggctgcttatggtgacaattacggaattgttgccatatagctattggattggccatccggtgtctaatagagctattgtgtacttatttgttggattcaccccactatcatataaatctttgaacactttgtgctttatattgaacttaaacacacgaaa

SEQ ID NO: 19029 - DNA, 744 bp, synthetic construct
  source 1..744: mol_type = other DNA
ttgaaacagcctgtgggttgcacccaccctcagggcccactgggcgccagcactctggtactgaggtacctttgtgcgcctgttttatttcccttcccctaaagtaacttagaagctttgaaccaatgatcagcagtaggtgtgacataccagtcacatctcgatcaagcacttctgtttccccggactgagtatcaataggctgcttacgcggctgaaggagaaaacgttcgttacccggccaactacttcgaaaagcctagtaccaccatgaacgaggcagagcgtttcgctcggcactaccccagtgtagatcaggctgatgagtcactgcaatccccatgggcgaccatggcagtggctgcgctggcggcctgcccatggagaaatccatgggacgctctaattttgacatggtgcgaagagcctattgagctagttggtaatcctccggcccctgaatgcggctaatcctaactgcggagcgcacacccacaaaccagtgggcagtgcgtcgtaacgggcaactctgcagcggaaccgactactttgggtgtccgtgtttccttttatttctatgttggctgcttatggtgacaaacgaagagttgttaccatatagctattggattggccatccggtgtgcaacagagcaattgtctatcagtttgttggttttgtaccactgacattaaagtctgtgatcactcttgaatttgtcttgaccctcaacacagtcaagc

SEQ ID NO: 19030 - DNA, 743 bp, synthetic construct
  source 1..743: mol_type = other DNA
ttaaaacagcctgtgggttgcacccactcacagggcccactgggcgctagtacactggtatctcggtacctttgtacgcctgttttataccccctccctgatttgcaacttagaagcaacgcaaaccagatcaatagtaggtgtgacataccagtcgcatcttgatcaagcacttctgtatccccggaccgagtatcaatagactgtgcacacggttgaaggagaaaacgtccgttacccggctaactacttcgagaaacctagtaacgccattgaagttgcagagtgtttcgctcagcactccccccgtgtagatcaggtcgatgagtcaccgcattccccacgggcgaccgtggcggtggctgcgttggcggcctgcctatggggtaacccataggacgctctaatacggacatggcgtgaagagtctattgagctagttagtagtcctccggcccctgaatgcggttaatcctaactgcggagcacatacccttaatccaaagggcagtgtgtcgtaacgggcaactctgcagcggaaccgactactttgggtgtccgtgtttctttttattcttgtattggctgcttatggtgacaattaaagaattgttaccatatagctattggattggccatccagtgtcaaacagagctattgtatatctctttgttggatttacacctctcactcttgaaacgttacacaccctcaattacattatactgctgaacacgaagcg

SEQ ID NO: 19031 - DNA, 743 bp, synthetic construct
  source 1..743: mol_type = other DNA
ttaaaacagcctgtgggttgcacccactcacagggcccactgggcgctagtacactggtatctcggtacctttgtacgcctgttttataccccctccctgatttgcaacttagaagcaacgcaaaccagatcaatagtaggtgtgacataccagtcgcatcttgatcaagcacttctgtatccccggaccgagtatcaatagactgtgcacacggttgaaggagaaaacgtccgttacccggctaactacttcgagaaacctagtaacgccattgaagttgcagagtgtttcgctcagcactccccccgtgtagatcaggtcgatgagtcaccgcattccccacgggcgaccgtggcggtggctgcgttggcggcctgcctatggggtaacccataggacgctctaatacggacatggcgtgaagagtctattgagctagttagtagtcctccggcccctgaatgcggttaatcctaactgcggagcacacacccttaatccaaagggcagtgtgtcgtaacgggcaactctgcagcggaaccgactactttgggtgtccgtgtttctttttattcttgtattggctgcttatggtgacaattaaagaattgttaccatatagctattggattggccatccagtgtcaaacagagctattgtatatctctttgttggattcacacctctcactcttgaaacgttacacaccctcaattacattatactgctgaacacgaagcg

SEQ ID NO: 19032 - DNA, 743 bp, synthetic construct
  source 1..743: mol_type = other DNA
ttaaaacagcctgtgggttgtacccacccacagggcccactgggcgtcagcactctggtactgaggtacctttgtgcgcctgttttacttcccttccccaaagtaacttagaagctttgaaccaacgatcaacagtgggtgtgacataccagtcacatctcgatcaagcacttctgtttccccggactgagtatcaataggctgcttacgcggctgaaagagaaaacgttcgttacccggccaactacttcgagaagcttagtaccaccatgaacgaggcagagcgtttcgctcggcactaccccagtgtagatcaggctgatgagtcactgcaatccccatgggcgaccatggcagtggctgcgctggcggcctgcccatggagagatccatgggacgctctaattttgacatggtgtgaagagcctattgagctagttggtagtcctccggcccctgaatgcggctaatcctaactgcggagcgcacacccacataccagtgggcagtgtgtcgtaacgggtaactctgcagcggaaccgactactttgggtgtccgtgtttccttttatttttatgttggctgcttatggtgacaatcgaagagttgttaccatatagctattggattggccatccggtgtgcaacagagcaattgtctaccagtttattggttttgtaccactgacattaaagtctataattacccttaattttatcttgacccttaatacagtcaagc

SEQ ID NO: 19033 - DNA, 743 bp, synthetic construct
  source 1..743: mol_type = other DNA
taaaacagccgggggtttttacccacccacagggcccactgggcgctagcactctggcactgaggtacctttgtgcgcctgtttttacttcccttccccgaagtaacttagaagctgtaaatcaacgatcaatagtaggtgtgacacaccagtcgtaccttgatcaagcacttctgtttccccggactgagtatcaataggctgctcgcgcggctgaaggagaaaacgttcgttacccgaccaactacttcgagaagcttagtaccaccatgaatgaggcagagtgtttcgttcagcacaaccccagtgtagatcaggctgatgagtcactgcaacccccatgggcgaccatggcagtggctgcgttggcggcctgcccatggagaaatccatgggacgctctaattctgacatggtgtgaagagcctattgagctagctggtagtcctccggcccctgaatgcggctaatcctaactgcggagcacatgctcacaaaccagtgggtggtgtgtcgtaatgggcaactctgcagcggaaccgactactttgggtgtccgtgtttccttttattcttatattggctgcttatggtgacaatcaaagaattggtaccatatagctattggattggccatccggtgtgcaacagagcaattgtttacctatttattggttttgtaccattatcactgaaggctgtgatcactctcaaattcattttgattctcaacacaatcaagc

SEQ ID NO: 19034 - DNA, 743 bp, synthetic construct
  source 1..743: mol_type = other DNA
taaaacagctgggggtttgtacccacccacagggcccactgggcgctagcactctggcactgaggtacctttgtgcgcctgtttttacttcccttccccgaagtaacttagaagctgtaaatcaacgatcaatagtaggtgtgacacaccagtcataccttgatcaagcacttctgtttccccggactgagtatcaataggctgctcgcgcggctgaaggagaaaacgttcgttacccgaccaactacttcgagaagcttagtaccactatgaatgaggcagagtgtttcgttcagcacaaccccagtgtagatcaggctgatgagtcactgcaacccccatgggcgaccatggcagtggctgcgttggcggcctgcccatggagaaatccatgggacgctctaattctgacatggtgtgaagagcctattgagctagctggtagtcctccggcccctgaatgcggctaatcctaactgcggagcacatgctcacaaaccagtgggtggtgtgtcgtaatgggcaactctgcagcggaaccgactactttgggtgtccgtgtttccttttattcttatattggctgcttatggtgacaatcaaagaattggtaccatatagctattggattggccatccggtgtgcaacagagcaattgtttacctatttattggttttgtaccattatcactgaaggctgtgatcactctcaaattcattttgattctcaacacaatcaagc

SEQ ID NO: 19035 - DNA, 743 bp, synthetic construct
  source 1..743: mol_type = other DNA
ttaaaacagcctgtgggttgcacccactcacagggcccactgggcgctagtacactggtatctcggtacctttgtacgcctgttttataccccctccctgatttgcaacttagaagcaacgcaaaccagatcaatagtaggtgtgacataccagtcgcatcttgatcaagcacttctgtatccccggaccgagtatcaatagactgtgcacacggttgaaggagaaaacgtccgttacccggctaactacttcgagaaacctagtaacgccattgaagttgcagagtgtttcgctcagcactccccccgtgtagatcaggtcgatgagtcaccgcattccccacgggcgaccgtggcggtggctgcgttggcggcctgcctatggggtaacccataggacgctctaatacggacatggcgtgaagagtctattgagctagttagtagtcctccggcccctgaatgcggctaatcctaactgcggagcacatacccttaatcctaagggcagtgtgtcgtaacgggcaactctgcagcggaaccgactactttgggtgtccgtgtttctttttattcttgtattggctgcttatggtgacaattaaagaattgttaccatatagctattggattggccatccagtgtcaaacagagctattgtatatctctttgttggattcacacctctcactcttgaaacgttacacaccctcaattacattatactgctgaacacgaagcg

SEQ ID NO: 19036 - DNA, 743 bp, synthetic construct
  source 1..743: mol_type = other DNA
ttaaaacagcctgtgggttgcacccactcacagggcccactgggcgctagtacactggtatctcggtacccttgtacgcctgttttataccccctccctgatttgcaacttagaagcaacgcaaaccagatcaatagtaggtgtgacataccagtcgcatcttgatcaagcacttctgtatccccggaccgagtatcaatagactgtgcacacggttgaaggagaaaacgtccgttacccggctaactacttcgagaaacctagcaacgccattgaagttgcagagtgtttcgctcagcactccccccgtgtagatcaggtcgatgagtcaccgcattccccacgggcgaccgtggcggtggctgcgttggcggcctgcctatggggtaacccataggacgctctaatacggacatggcgtgaagagtctattgagctagttagtagtcctccggcccctgaatgcggctaatcctaactgcggagcacatacccttaatccaaagggcagtgtgtcgtaacgggcaactctgcagcggaaccgactactttgggtgtccgtgtttctttttattcttgtattggctgcttatggtgacaattaaagaattgttaccatatagctattggattggccatccagtgtcaaacagagctatcgtatatctctttgttggattcacacctctcactcttgaaacgttacacaccctcaattacattatactgctgaacacgaagcg

SEQ ID NO: 19037 - DNA, 744 bp, synthetic construct
  source 1..744: mol_type = other DNA
ttaaaacagcctgtgggttgttcccacccacagggcccactgggcgctagcacactgattccgcggaatctttgtgcgcctgttttataaccctcccccaagcagaaacttagaagttccacactatcacgaccaatagcaggcgtggcgcaccagtcacgtcttggtcaagcacttctgtttccccggactgagtatcaatagactgctcacgcggttgaaggagaaaacgttcgttatccggctaactacttcgagaaacctagtagcaccgtgaaagttgcggagtgtttcgctcagcacttcccccgtgtagatcaggtcgatgagtcactgtgaaccccacgggtgaccgtgacagtggctgcgttggcggcctgcccatggggcaacccatgggacgctctaatacagacacggtgtgaagagtctattgagctagttagtagtcctccggcccctgaatgcggctaatcctaactgtggagcgcgtaccctcaatccagagggcagcgcgtcgtaacgggtaactctgcagcggaaccgactactttgggtgtccgtgtttccttttattctttattggctgcttatggtgacaattaaagagttgttaccatatagctattggattggccatccggtaaccaacagagctattgtttacttgtttgttggatacgtccctctcaatctcaagaccattcaaactcttgattatatactacttctcaattgtaagaa

SEQ ID NO: 19038 - DNA, 745 bp, synthetic construct
  source 1..745: mol_type = other DNA
ttaaaacagcctgtgggttgttcccacccacagggcccactgggcgccagcacactgattctgcgggatctttgtgcgcctgttttataacccctcccttaagcagtaacttagaagcttcgcactatcacgaccagtagtaggcgtggcgtaccagtcacgtcttggtcaagcacttctgtttccccggactgagtatcaatagactgctcacgcggttgaaggagaaaacgttcgttatccggctaactacttcgagaaacctagtagcaccgtgaaagttgcggagtgtttcgctcagcacttcccccgtgtagatcaggtcgatgagtcactgtgaaccccacgggcgaccgtgacagtggctgcgttggcggcctgcccatggggtaacccatgggacgctctaatacagacgcggtgtgaagagtctattgagctggttagtagtcctccggcccctgaatgcggctaatcctaactgcggagcgcgcactctcaatccagggggcagcgcgtcgtaatgggtaactctgcagcggaaccgactactttgggtgtccgtgtttccttttattccttattggctgcttatggtgacaattgaaaagttgttaccatatagctattggattggccatccggtaaccaacagagctattgtttacctgtttattggatacgtccctctcaatctcaaggccattcaaactcttaattatatactacttctcaactgtaagaa

SEQ ID NO: 19039 - DNA, 745 bp, synthetic construct
  source 1..745: mol_type = other DNA
ttaaaacagcctgtgggttgttcccacccacagggcccactgggcgctagcacactgattctgcgggatctttgtgcgcctgttttacaacccctcccctaagcagtaacttagaagcctcacactatcacgaccagtagtgggcgtggcacaccagtcacgtcttggtcaagcacttctgtttccccggactgagtatcaatagactgctcacgcggttgaaggagaaagcgttcgttatccggctaactacttcgagaaacttagtagcaccgtgaaagttgcggagagtttcgctcagcacttcccccgtgtagatcaggtcgatgagtcactgtaaaccccacgggcgaccgtgacagtggctgcgttggcggcctgcccatggggtaacccatgggacgctctaatacagacacggtgtgaagagtctattgagctagttagtagtcctccggcccctgaatgcggctaatcctaactgcggagcgcgcaccctcaatccagggggcggcgcgtcgtaatgggtaactctgcagcggaaccgactactttgggtgtccgtgtttccttttgttccttattggctgcttatggtgacaattgaaaagttgttaccatatagctattggattggccatccggtgaccaacagaactattgtttacctgtttattggatacgtccctcttaatctcaaggtcattcaaactcttgattatatattactccttaattgtaagaa

SEQ ID NO: 19040 - DNA, 745 bp, synthetic construct
  source 1..745: mol_type = other DNA
ttaaaacagcctgtgggttgttcccacccacagggcccactgggcgctagcacactgattctgcgggatctttgtgcgcctgttttataacccctcccccaagcagtgacttagaagcctcacactatcacgaccagtagtgggcgtggcacaccagtcacgtcttggtcaagcacttctgtttccccggactgagtatcaatagactgctcacgcggttgaaggagaaaacgttcgttatccggctaactacttcgagaaacttagtagcaccgtgaaagttgcggagagtttcgctcagcacttcccccgtgtagatcaggtcgatgagtcactgtaaaccccacgggcgaccgtgacagtggctgcgttggcggcctgcccatggggtaactcatgggacgctctaatacagacacggtgtgaagagtctattgagctagttagtagtcctccggcccctgaatgcggctaatcttaactgcggagcgcgcaccctcaatccagggggcggcgcgtcgtaatgggtaactctgcagcggaaccgactactttgggtgtccgtgtttccttttgttccttattggctgcttatggtgacaattgaaaagttgttaccatatagctattggattggccatccggtgaccaacagagctattgtttacctgtttattggatacgtccctcttaatctcaaggccattcaaactcttgattatatattactccttaattgtaagaa

SEQ ID NO: 19041 - DNA, 745 bp, synthetic construct
  source 1..745: mol_type = other DNA
ttaaaacagcctgtgggttgttcccacccacagggcccactgggcgctagcacactgattctacgggatctttgtgcgcctgttttataaccctccccctaagcagcaacttagaagctttgtacaatcatgaccagtagtgggcgtggcgcgccagccacgtcttggtcaagcacttctgtgtccccggactgagtatcaatagactgctcacgcggttgaaggagaaaacgttcgttacccggctaactacttcgagaaacctagtagcaccatgaaagttgcggagtgtttcgctcagcacttcccccgtgtagatcaggccgatgagtcactgtaaaccccacgggcgaccgtgacagtggctgcgttggcggcctgcccatggggtaacccatgggacgctctaatacagacatggtgcgaagagtctattgagctagttagtagtcctccggcccctgaatgcggctaatcctaactgcggagcgcgcaccctcaacccagggggcagcgtgtcgtaatgggcaactctgcagcggaaccgactactttgggtgtccgtgtttccttttattccttattggctgcttatggtgacaattgaaaagttgttaccatatagctattggattggccacccggtgtctaacagagctattgtttacttgtttattggatacgtccctcttaattttaaagccattcaaactcttgattatatattgctccttaactgtaagaa

SEQ ID NO: 19042 - DNA, 745 bp, synthetic construct
  source 1..745: mol_type = other DNA
ttaaaacagcctgtgggttgttcccacccacagggcccactgggcgctagcacactgattctgcgggatctttgtgcgcctgttttataacccttcccctaagcagcaacttagaagccttgtacaatcacgaccaatagtgggcgtgacgcgccagtcacgtcttggtcaagcacttctgtatccccggactgagtaccaatagactgctcacgcggttgaaggggaaaacgttcgttacccggctaactacttcgagaaacctagtagtaccatgaaagttgcggagtgtttcgctcagcacttcccccgtgtagatcaggtcgatgagtcactgtaaaccccacgggcgaccgtgacagtggctgcgttggcggcctgcccatggggtaacccatgggacgctctaatacagacatggtgcgaagagtctattgagctagttagcagtcctccggcccctgaatgcggctaatcctaactgcggagcgcgcaccctcaacccagggggcggcgtgtcgtaatgggtaactctgcagcggaaccgactactttgggtgcccgtgtttccttttattctttattggctgcttatggtgacaattgaaaagttgttaccatatagctattggattggccatccggtgtctaacagagctattgtttacctatttattggatacatccctcttaatctcaaggccattcaaactcttgattatatattgctccttaactgtaggaa

SEQ ID NO: 19043 - DNA, 745 bp, synthetic construct
  source 1..745: mol_type = other DNA
ttaaaacagcctgtgggttgttcccacccacagggcccattgggcgctagcacactgattttgcggaatctttgtgcgcctgttttataacccttcccccaagcagcaacctagaagtattgcacaatcgcggccagtagtgggcgtgacgcgccagtcacgtcttggtcaagcacttctgtatccccggactgagtatcaatagactgctcacgcggttgaaggagaaaacgttcgttatccggctaactacttcgggaaacctagtaacaccttgaaagttgcagagtgtttcgctcagcacttcccccgtgtagatcaggtcgatgagccactgtaaaccccacgggcgaccgtgacagtggctgcgctggcggcctgcccatggggaaacccatgggacgctctaatacagacatggtgtgaagagtctactgagctagttagtagtcctccggcccctgaatgcggctaatcctaactgcggagcacacaccctcaacccagggggcagtgtgtcgtaatgggtaactctgcagcggaaccgactactttgggtgaccgtgtttccttttattcctcattggctgcttatggtgacaattgaaaagttgttaccatatagctattggattggccacccggtgtctaacagagctattgtttacctatttattggatacgtccctcttaatttcaaggctatccaaactcttgattatatattgctccttaattataagaa

SEQ ID NO: 19044 - DNA, 744 bp, synthetic construct
  source 1..744: mol_type = other DNA
ttaaaacagcctgtgggttgtccccacccacagggcccactgggcgctagcacactggttctgcgggacctttgtgcgcctgttttgcaacccttccctaagcagtaacttagaagctttgcacaatcatggccaatagtgggcgtggcgcgccagtcacgtcttggtcaagcacttctgtatccccggactgagtatcaatagactgctcacgcggttgaaggagaaaacgttcgttacccggctaactacttcgagaaacctagtagcaccatgaaagttgcggagtgtttcgctcagcacttcccccgtgtagatcaggtcgatgagtcactgtaaaccccacgggcgaccgtgacagtggctgcgttggcggcctgcccatggggtaacccatgggacgctctaatacagacatggtgcgaagagtctattgagctagttagcagtcctccggcccctgaatgcggctaatcctaactgcagagcgcgcaccctcaacccagggggcggcgcgtcgtaatgggcaactctgcagcggaaccgactactttgggtgtccgtgtttccttttattctttattggctgcttatggtgacaattgagaagttgttgccatatagctattggattggccatccggtgtctaacagagctattgtttacctattcattggattcgtccctctcaatctcaaggtcattcaaactctcaattgcatattgctccttaactataagaa

SEQ ID NO: 19045 - DNA, 744 bp, synthetic construct
  source 1..744: mol_type = other DNA
ttaaaacagcctgtgggttgttcccacccacagggcccactgggcgctagcacactgattctgcgggatctttgtgcgcctgttttataaccctcccctaagcagtaacttagaagcttcacactaccacgaccaatagtaggcgtggtgcaccaaccgcgtcttggtcaagcacttctgtttccccggactgagtatcaatagactgctcacgcggttgaaggagaaaacgttcgttatccggctaactacttcgagaaacctagtagcaccgtgaaagttgcagatcgtttcgctcagcacttcccccgtgtagatcaggccgatgagtcactgtgaaccccacgggcgaccgtgacagtggctgcgttggcggcctgcccatggggtaacccatgggacgctctaatacagacacggtgtgaagagtctattgagctagttagtagtcctccggcccctgaatgcggctaatcctaactgcggagcgcgtgccctcaatccagggggtagcgcgtcgtaatgggtaactctgcagcggaaccgactactttgggtgtccgtgtttccttttatcctttattggctgcttatggtgacaattgaaaagttgttaccatatagctattggattggccatccggtaaccaacagagctattgtttacctgtttattggatacgtccctctcaatctcaaggctattcaaacccttgattacatactacttctcaactgtaagaa

SEQ ID NO: 19046 - DNA, 746 bp, synthetic construct
  source 1..746: mol_type = other DNA
tttaaaacagcctgtgggttgtacccactcacagggcccactgggcgccagcactttgattccgcggaatctttgtgtgcctgttttatcacccttcccccaaacttgcaacttagaagcagcactccaccgaccaatagcgggcgtggcgcaccagccatgtctaggtcaagcacttctgtttccccggactgagtatcaataggctgctcacgcggctgaaggagaaaacgttcgtcatccggctaactacttcgagaaacctagtagcaccggtgaagctgcagagtgtttcgctcagcacttcccccgtgtagatcaggtcgatgagtcactgcactccccacgggcgaccgtggcagtggctgcgctggcggcctgcctatgggtcaacccataggacgctctaatgtggacacggtgcgaagagtctattgagctagttagtagtcctccggcccctgaatgcggctaatcccaactgcggagcacatgccctcgaaccagggggtggtgtgtcgtaacgggtaactctgcagcggaaccgactactttgggtgaccgtgtttccttttattcttattatggctgcttatggtgacaattgaagaattgttaccatatagctattggattggccatccggtgtctaacagagctatcatatacctatttgttggattcgttccattgtcatacacatcactcaatacattacattttattgtgagattaaatacaagaaa

SEQ ID NO: 19047 - DNA, 743 bp, synthetic construct
  source 1..743: mol_type = other DNA
ttaaaacagcctgtgggttgcacccacccacagggcctactgggcgctagcactctggtactaaggtacctttgtgcgcctgttttattccccttccctaaagtaacttagaagttgtgtaccaacgatcaatagtaggtatgacacgccagtcatatcttgatcaagcacttctgtttccccggactgagtatcaataggctgctcgcgtggctgaaggagaaaacgttcgttacccggccaactacttcgagaagcttagtaccaccatgaacgatgcagagtgtttcgttcagcacaaccccagtgtagatcaggctgatgagtcactgcaacccccatgggcgaccatggcagtggctgcgttggcggcctgcccatggagaaatccatgggacgctctaattctaacatggtgtgaagagcctattgagctagctggtagtcctccggcccctgaatgcggctaatcctaactgcggagcacatgctcacaaaccagtgggtggtgtgtcgtaatgggcaactctgcagcggaaccgactactttgggtgtccgtgtttccttttattcttatgttggctgcttatggtgacaattatagaattgttaccatatagctattggattggccatccggtgtgcaacagagcaattgtttacctatttgttggtttcgtaccactatcactgaagtctgtgaccactctcaaattcattttgacccttaactcaatcaaac

SEQ ID NO: 19048 - DNA, 743 bp, synthetic construct
  source 1..743: mol_type = other DNA
ttaaaacaggtacgtgcttgcacccacccacagggcctactgggcgctagcactctggtactaaggtacctttgtgcgcctgttttattccccttccccaaagtaacttagaagttgtgtaccaacgatcaatagtaggtatgacacgccagtcatatcttgatcaagcacttctgtttccccggactgagtatcaataggctgctcgcgcggctgaaggagaaaacgttcgttacccggccaactacttcgagaagcttagtaccaccatgaacgatgcagagtgtttcgttcagcacaaccccagtgtagatcaggctgatgagtcactgcaacccccatgggcgaccatggcagtggctgcgttggcggcctgcccatggagaaatccatgggacgctctaattctgacatggtgtgaagagcctattgagctagctggtagtcctccggcccctgaatgcggctaatcctaactgcggagcacatgctcacaaaccagtgggtggtgtgtcgtaatgggcaactctgcagcggaaccgactactttgggtgtccgtgtttccttttattcttatgttggctgcttatggtgacaattaaagaattgttaccatatagttattggattggccatccggtgtgcaacagagcaattgtttacctatttgttggtttcgtaccactatcactgaagtctgtgaccactctcaaattcattttgaccctcaactcaatcaaac

SEQ ID NO: 19049 - DNA, 750 bp, synthetic construct; identical to SEQ ID NO: 1203
  source 1..750: mol_type = other DNA

SEQ ID NO: 19050 - DNA, 745 bp, synthetic construct
  source 1..745: mol_type = other DNA
ttaaaacagcctgtgggttgtacccacccacagggcccaccgggcgctagcactctgattccacggaatctttgtgcgcctgttttataacccccccccacctcgcaacttagaagcaacgcgcatcactgatcaacagcaggcatggcgcgccagccatgtcttgatcaagcacttctgtttccccggactgagtatcaatagactgcctacgcggttgaaggagaaaacgttcgttacccggctaactacttcgagaaacttagtaacaccatcgaagctgcagggtgtttcgctcagcacttcccccgtgtagatcaggccgatgagtcaccgcaatccccacgggcgaccgtggcggtggctgcgttggcggcctgcctatggggcaacccataggacgccctaaagtggacatggtgcgaagagtctattgagctagttagtaatcctccggcccctgaatgcggctaatcctaactgcggagcacataccctcaagccagagggtggtgtgtcgtaacgggtaactctgcagcggaaccgactactttgggtgtccgtgtttccttttattcttactgtggctgcttatggtgacaattcaagagttgttaccatatagctattggattggccatccggtgtctaacagagctattgtgtacttatttgttgggtacgttccattatcttacacatcccttgacacgttacattttattgtgaagctaaatacaagaag

SEQ ID NO: 19051 - DNA, 745 bp, synthetic construct
  source 1..745: mol_type = other DNA
ttaaaacagcctgtgggttgtacccacccacagggcccaccgggcgctagcactctgattccacggaatctttgtgcgcctgttttataacccccccccacctcgcaacttagaagcaacgcgcatcactgatcaacagcaggcatggcgcgccagccatgtcttgatcaagcacttctgtttccccggactgagtatcaatagactgcttacgcggttgaaggagaaaacgttcgttacccggctaactacttcgagaaacttagtaacaccatcgaagctgcagggtgtttcgctcagcacttcccccgtgtagatcaggccgatgagtcaccgcaatccccacgggcgaccgtggcggtggctgcgttggcggcctgcctatggggcaacccataggacgccctaaagtggacatggtgcgaagagtctattgagctagttagtaatcctccggcccctgaatgcggctaatcctaactgcggagcacataccctcaagccagagggtggtgtgtcgtaacgggtaactctgcagcggaaccgactactttgggtgtccgtgtttccttttattcttactgtggctgcttatggtgacaattcaagagttgttaccatatagctattggattggccatccggtgtctaacagagctattgtgtacttatttgttgggtacgttccattatcttacacatcccttgacacattacattttattgtgaagctaaatacaagaag

SEQ ID NO: 19052 - DNA, 744 bp, synthetic construct
  source 1..744: mol_type = other DNA
tttaaaacagcctgtgggttgcacccactcacagggcctactgggcgcaagcactctggtacctcggtacctttgtgcgcctgttttacaccccctcccccagtgaaacttagaagcaacaaaccacgatcaatagcaggcataacgctccagttatgtcttgatcaagcacttctgtttccccggaccgagtatcaatagactgctcacgcggttgaaggagaaaacgttcgttatccggctagctacttcgggaaacctagtaacaccatgaaagttgcggagagcttcgttcagcactcccccagtgtagatcaggtcgatgagtcaccgcattccccacgggcgaccgtggcggtggctgcgttggcggcctgcccatggggtaacccatggggcgctctaatacggacatggtgtgaagagtctactgagctagttagtagtcctccggcccctgaatgcggctaatcccaactgcggagcacacgcccacaagccagcgggtagtgtgtcgtaacgggtaactctgcagcggaaccgactactttgggtgtccgtgtttccttttatctttatattggctgcttatggtgacaattaaagaattgttaccatatagctattggattggccatctggtgtgcaacagagcaattgtttacctatttattggtttcgtaccgttaaccttgaaatctgtgaccacccttaattatatcttgacccttaacgcagctaaac

SEQ ID NO: 19053 - DNA, 742 bp, synthetic construct
  source 1..742: mol_type = other DNA
aaacagcctgtgggttgttcccacccacagggcccactgggcgctagcacactgattctgcgggatctttgtgcgcctgttttataaccccttccctaagcagcaacttagaagcttcacactatcacgaccagtagtgggcgtggcgcaccagtcacgtcttggtcaagcacttctgtttccccggactgagtatcaatagactgctcacgcggttaaaggagaaaacgttcgttatccggctaactacttcgagaaacctagtagcaccgtgaaagttgcggagcgtttcgctcagcacttcccccgtgtagatcaggtcgatgagtcactgtaaaccccacgggcgaccgtgacagtggctgcgttggcggcctgcccatggggcaacccatgggacgctctaatacagacacggtgtgaagagtctattgagctagttagtagtcctccggcccctgaatgcggctaatcctaactgcggagcgcgcaccctcaacccagggggcggcgcgtcgtaatgggtaactctgcagcggaaccgactactttgggtgtccgtgtttccttttattccttattggctgcttatggtgacaattgaaaagttgttaccatatagctattggattggccatccggtgaccaacagagctattgtctacctgtttattggatacgtccctcttaatctcaaggtcattcaaactcttgattatatattactccttaactgtgagaa

SEQ ID NO: 19054 - DNA, 748 bp, synthetic construct
  source 1..748: mol_type = other DNA
ttaaaacagcctgtgggttgtacccacccacagggcccactgggcgctagcacactgatttcacggaatccttgtgcgcctgttttacaccccctccccccaactcagtaacttagaagttgtaaacacacgtggccaacagcgggcgtagcgcaccagctatgtcttggtcaagcacttctgtttccccggacagagtatcaataagctgcttgcgcggctgaaggagaaaatgttcgttacccggtcaactacttcgagaaacctagtagcatcatgaatgttgcgaggcgtttcgctcagcacttcccccgtgtagatcaggtcgatgagtcactgcactccccacgggcgaccgtggcagtggctgcgttggcggcctgcccatggggtgacccatgggacgcttcaatacggacatggtgtgaagagtctattgagctagttgataatcctccggcccctgaatgcggctaatcctaactgcggagcacataccctcaacccagggggcggtgtgtcgtaacgggcaactctgcagcggaaccgactactttgggtgtccgtgtttccttttatacttatactggctgcttatggtgacaattgaagaattgttaccatatagctattggattggccatccggtgactaacagagctattatatatttatttgttggatttgttccattaacatacacatctttcagcactttacacctcattttacaatacaatacaagaaa

SEQ ID NO: 19055 - DNA, 744 bp, synthetic construct
  source 1..744: mol_type = other DNA
ttaaaacagcctgtgggttgttcccacccacagggcctactgggcgctagcacactgatcctgcgggatctttgtgcgcctgttttataacccctccctaagtagcaacttagaagcttcacactatcacgaccgatagtgggcgtggcacaccagtcacgtcttggtcaagcactcctgtttccccggactgagtatcaatagactgctcacgcggttgaaggagaaaacgttcgttatccggctaactacttcgagaaacctagtagcaccgtgaaagttgcggagtgtttcgctcagcacttcccccgtgtagatcaggtcgatgagtcactgtaaaccccacgggcgaccgtgacagtggctgcgctggcggcctgcccatggggtaacccatgggacgctctaatacagacacggtgtgaagagtctattgagctagttagtagtcctccggcccctgaatgcggctaatcctaactgcggagcgcgtaccctcaacccagggggtagcgcgtcgtaatgggtaactctgcagcggaaccgactactttgggtgtccgtgtttccttttattccttactggctgcttatggtgacaattgaaaagttgttaccatatagctattggattggccatccggtgaccaacagagctatcatttacctgtttgttggatacgttcctcttgacctcaaggttattcaaactcttgattatatattactccttaactataagaa

SEQ ID NO: 19056 - DNA, 743 bp, synthetic construct
  source 1..743: mol_type = other DNA
ttaaaacagcctgtgggttgtacccacccacggggcccacagggcgctagcactctggtaccacggtacctttgtgcgcctgttttaccaccccacccctacctgaaacgtagaagcaataaccagccgaccaatagtgggtgtggcacaccagccacatcttggtcaagcacttctgtttccccgggttgagtatcaatatgctgttcacacggctgaaggagaaaacgcccgttacccggccaactacttcgagaagcctagtaccgccatgaacattgcaaggcgtttcgctcagcacttcccccgtgtagatcaggccgatgagtcaccgcattccccacgggcgaccgtggcggcggctgcgttgtcggcctgcctgtgggttgacccacaggacgccttaatatagacatggtgcgaagagcctattgagctggttggtattcctccggcccctgaatgcggctaatcctaactgcggagcacatactcacaagccagtgggtggtgtgtcgtaatgggcaactctgcagcggaaccgactactttgggtgtccgtgtttccttttatccttatactggctgcttatggtgacaatcagagaattgttaccatatagctattggattggccatccggtgtgcaacagagctattgtgtatttatttgttggatttgtcccactatcgtatacatccctcaacactttgtattttattctgaaattaaacgcaagaaa

SEQ ID NO: 19057 - DNA, 736 bp, synthetic construct
  source 1..736: mol_type = other DNA
cctgtgggttgcacccacccacagggcccactgggcgctagcactctggcactaaggtacctttgtgcgcctgttttttacttcccttccccaaagtaacttagaagttatgtaccaatgatcaacagcaggtgtgacacaccagtcatatcttgatcaagcacttctgtttccccggactgagtatcaataggctgctcgcgcggctgaaggagaaaatgttcgttacccgaccaactacttcgagaagcttagtaccaccatgaacgaggcagagtgtttcgctcagcacaaccccagtgtagatcaggctgatgagtcactgcaacccccatgggcgaccatggcagtggctgcgttggcggcctgcccatggagaagtccatgggacgctctaattctgacatggtgtgaagagcctattgagctagctggtagtcctccggcccctgaatgcggctaatcctaactgcggagcacatgcccacaaaccagtgggtggtgtgtcgtaacgggcaactctgcagcggaaccgactactttgggtgtccgtgtttccttttatacttatgttggctgcttatggtgacaatcagagaattgttaccatatagctattggattggccatccggtgtgtaacagagcaattgtttacctattcattggttttgtaccactatcattgaaatctgtgaccactctcgaattcatcttgatcctcaactcaatcaaac

SEQ ID NO: 19058 - DNA, 742 bp, synthetic construct
  source 1..742: mol_type = other DNA
ttaaaacagcctgtgggttgcacccactcacagggcctactgggcgcaagcactctggtaccttggtacctttgtgcgcctgtttttacacccccccccagtgaaacttagaagcagcaaaccacgatcaatagcaggcataacactccagttatgtcttgatcaagcacttctgtttccccggactgagtatcaatagactgctcgcgcggttgaaggagaaaacgttcgttatccggctagctacttcggaaaacctagtaacaccatgaaagttgcggagagcttcgctcagcactcccccagtgtagatcaggtcgatgagtcaccgcattccccacgggcgaccgtggcggtggctgcgttggcggcctgcccatggggtaacccatggggcgctctaatacggacatggtgtgaagagtctactgagctagttagtagtcctccggcccctgaatgcggctaatcccaactgcggagcacacgcccacaagccagcgggtagtgtgtcgtaacgggtaactctgcagcggaaccgactactttgggtgtccgtgtttccttttatctttatattggctgcttatggtgacaattaaagaattgttaccatatagctattggattggccatccggtgtgcaacagagcaattgtttacctatttattggttttgtaccattaaccttgaattctgtgaccacccttaactatatcttgacccttaacgcagctaaac

SEQ ID NO: 19059 - DNA, 743 bp, synthetic construct
  source 1..743: mol_type = other DNA
ttaaaacagcctgtgggttgcacccactcacagggcctactgggcgcaagcactctggtacctcggtacctttgtgcgcctgttttacaccccctcccccagtgaaacttagaagcaacaaaccacgatcaatagcaggcataacgctccagttatgtcttgatcaagcacttctgtttccccggaccgagtatcaatagactgctcacgcggttgaaggagaaaacgttcgttatccggctagctacttcgggaaacctagtaacaccatgaaagttgcggagagcttcgttcagcactcccccagtgtagatcaggtcgatgagtcaccgcattccccacgggcgaccgtggcggtggctgcgttggcggcctgcccatggggtaacccatggggcgctctaatacggacatggtgtgaagagtctactgagctagttagtagtcctccggcccctgaatgcggctaatcccaactgcggagcacacgcccacaagccagcgggtagtgtgtcgtaacgggtaactctgcagcggaaccgactactttgggtgtccgtgtttccttttatctttatattggctgcttatggtgacaattaaagaattgttaccatatagctattggattggccatccggtgtgcaacagagcaattgtttacctatttattggtttcgtaccgttaaccttgaaatctgtgaccacccttaattatatcttgacccttaacacagctaaac

SEQ ID NO: 19060 - DNA, 743 bp, synthetic construct
  source 1..743: mol_type = other DNA
ttaaaacaagcctgtgggttgcacccactcacagggcccactgggcgcaagcactctggtatcttggtacctttgtgcgcctgttttataccccctccccagtgaaacttagaagcagcaaaccacgatcaatagcaggcataacgatccagttatgtcttgatcaagcacttctgtttccccggactgagtatcaatagactgctcgcgcggttgaaggagaaaacgttcgttatccggctagctacttcggaaaacctagtaacaccatgaaagttgcggagagcttcgttcagcacttccccagtgtagatcaggtcgatgagtcaccgcattccccacgggcgaccgtggcggtggctgcgttggcggcctgcccatggggtaacccatggggcgctctaatacagacatggtgtgaagagtctactgagctagttagtagtcctccggcccctgaatgcggctaatcccaactgcggagcacacgcccacaagccagcgggtagtgtgtcgtaacgggtaactctgcagcggaaccgactactttgggtgtccgtgtttccttttatctttacattggctgcttatggtgacaattaaagaattgttaccatatagctattggattggccatccggtgtgcaacagagcaattatttacttatttattggttttgtaccattgactttgaattctgtgaccacccttaattatatcttgacccttaacacagctaaac

SEQ ID NO: 19061 - DNA, 742 bp, synthetic construct
  source 1..742: mol_type = other DNA
ttaaaacagcctgtgggttgtacccactcacagggcccactgggcgcaagcactctggtacctcggtacctttgtgcgcctgttttataccccctccccagtgaaacttagaagcagtaaaccacgatcaatagcaggcataacgctccagttatgtcttgatcaagcacttctgtttccccggactgagtatcaatagactgctcacgcggttgaaggagaaaacgttcgttatccggctaactacttcggaaaacctagtaacaccatgaaagttgcggagagcttcgttcagcacttccccagtgtagatcaggtcgatgagtcaccgcgttccccacgggcgaccgtggcggtggctgcgttggcggcctgcccatggggtaacccatggggcgctctaatacggacatggtgcgaagagtctactgagctagttagtagtcctccggcccctgaatgcggctaatcccaactgcggagcacacgcccacaagccagcgggtagtgtgtcgtaacgggcaactctgcagcggaaccgactactttgggtgtccgtgtttccttttatctttatattggctgcttatggtgacaattaaagagttgttaccatatagctattggattggccatccggtgtgtaacagagcaattgtttacctatttattggttttgtaccattaaccttgaagtctgtgaccactcttaattatatcttgaccctcaacacagcaagac

SEQ ID NO: 19062 - DNA, 742 bp, synthetic construct
  source 1..742: mol_type = other DNA
ttaaaacagcctgtgggttgcacccactcacagggcctactgggcgcaagcactctggtatcttggtacctttgtgcgcctgttttatacccctcccctattgtaacttagaagcagcaaaccacgatcaatagcaggcataacgctccagttatgtctcgatcaagcacttctgtttccccggactgagtatcaatagactgctcgcgcggttgaaggagaaaacgttcgttatccggctagctacttcggaaaacctagtaacaccatgaaagttgcggagagcttcgttcagcactcccccagtgtagatcaggtcgatgagtcaccgcattccccacgggcgaccgtggcggtggctgcgttggcggcctgcccatggggtaacccatggggcgctctaatacagacatggtgtgaagagtctactgagctagttagtagtcctccggcccctgaatgcggctaatcccaactgcggagcacacgcccacaagccagcgggtagtgtgtcgtaacgggtaactctgcagcggaaccgactactttgggtgtccgtgtttccttttatctctacattggctgcttatggtgacaattaaagaattgttaccatatagctattggattggccatccggtgtgcaacagagcaatcatttacctatttattggttttgtaccattaactttgaattctgtgaccacccttaattatattttgacccttaacacagctaaac

SEQ ID NO: 19063 - DNA, 743 bp, synthetic construct
  source 1..743: mol_type = other DNA
ttaaaacagcctgtgggttgcacccactcacagggcctactgggcgcaagcactctggtacctcggtacctttgtgcgcctgttttgcaccccctcccccagtgaaacttagaagcaacaaaccacgatcaatagcaggcataacgctccagttatgtcttgatcaagcacttctgtttccccggaccgagtatcaatagactgctcacgcggttgaaggagaaaacgttcgttatccggctagctacttcgggaaacctagtaacaccatgaaagttgcggagagcttcgttcagcactcccccagtgtagatcaggtcgatgagtcaccgcattccccacgggcgaccgtggcggtggctgcgttggcggcctgcccatggggtaacccatggggcgctctaatacggacatggtgtgaagagtctactgagctagttagtagtcctccggcccctgaatgcggctaatcccaactgcggagcacacgcccacaagccagcgggtagtgtgtcgtaacgggtaactctgcagcggaaccgactactttgggtgtccgtgtttccttttatctttatattggctgcttatggtgacaattaaagaattgttaccatatagctattggattggccatccggtgtgcaacagagcaattgtttacctatttattggtttcgtaccgttaaccttgaaatctgtgaccacccttaattatatcttgacccttaacacagctaaac

SEQ ID NO: 19064 - DNA, 745 bp, synthetic construct
  source 1..745: mol_type = other DNA
ttaaaacagcctgtgggttgttcccacccacagggcccactgggcgctagcacactgattctgcgggatctttgtgcgcctgttttataacccttcccctaagcagcaacttagaagctttgtacaatcacgaccagtagtgggcgtggcgcgccagccacgtcttggtcaagcacttctgtatccccggactgagtatcaatagactgcttacgcggtcgaaggagaaaacgttcgttacccggctaactacttcgagaaacctagtagcaccatgaaagttgcggagtgtttcgctcagcacttcccccgtgtagatcaggtcgatgagccactgtaaaccccacgggtgaccgtgacagtggctgcgttggcggcctgcccatggggtaacccatgggacgctctaatacagacatggtgtgaagagtctattgagctagttagtagtcctccggcccctgaatgcggctaatcctaactgcggagcgcgcaccctcaacccagggggcggcgcgtcgtaatgggtaactctgcagcggaaccgactactttgggtgtccgtgtttccttttactcctcattggctgcttatggtgacaattgaaaagttgttaccatatagctattggattggccatccggtgtctaatagagctattgtttacctatttattggatacgtccctcttaatctcaaagccattcaagctcttgactatatactacttcttaactgtaagaa

SEQ ID NO: 19065 - DNA, 743 bp, synthetic construct
  source 1..743: mol_type = other DNA
ttaaaacagcctgtgggttgcacccactcacagggcctactgggcgcaagcactctggtatcttggtacctttgtgcgcctgttttatacccctccccctattgtaatttagaagcagcaaaccacgatcaatagcaggcataacgctccagttatgtctcgatcaagcacttctgtttccccggactgagtatcaatagactgctcgcgcggttgaaggagaaaacgttcgttatccggctagctacttcggaaaacctagtaacaccatgaaagttgcggagagcttcgttcagcactcccccagtgtagatcaggtcgatgagtcaccgcattccccacgggcgaccgtggcggtggctgcgctggcggcctgcccatggggtaacccatggggcgctctaatacagacatggtgtgaagagtctactgagctagttagtagtcctccggcccctgaatgcggctaatcccaactgcggagcacacgcccacaagccagcgggtagtgtgtcgtaacgggtaactctgcagcggaaccgactactttgggtgtccgtgtttccttttatctttatattggctgcttatggtgacaattaaagaattgttaccatatagctattggattggccatccggtgtgcaacagagcgatcatttacctatttattggttttgtaccattaactttgaattctgtgaccactcttaattacatcttgacccttaacacagctaaac

SEQ ID NO: 19066 - DNA, 742 bp, synthetic construct
  source 1..742: mol_type = other DNA
ttaaaacagcctgtgggttgcacccactcacagggcccactgggcgcaagcactctggtatcttggtacctttgtgcgcctgttttatacccctcccctattgtaatttagaagcggcaaaccacgatcaatagcaggcataacgctccagttatgtctcgatcaagcacttctgtttccccggactgagtatcaatagactgctcgcgcggttgaaggagaaaacgttcgttatccggctagctacttcggaaaacctagtaacaccatgaaagttgcggagagcttcgttcagcactcccccagtgtagatcaggtcgatgagtcaccgcattccccacgggcgaccgtggcggtggctgcgttggcggcctgcccatggggcaacccatggggcgctctaatacagacatggtgtgaagagtctactgagctagttagtagtcctccggcccctgaatgcggctaatcccaactgcggagcacacgcccacaagccagcgggtagtgtgtcgtaacgggtaactctgcagcggaaccgactactttgggtgtccgtgtttccttttatctttatattggctgcttatggtgacaattaaagaattgttaccatatagctattggattggccatccggtgtgtaacagagcaatcatttacctatttattggttttgtaccattaactttgaattctgtgaccacccttaattatatcttgactcttaacacagctaaac

SEQ ID NO: 19067 - DNA, 743 bp, synthetic construct
  source 1..743: mol_type = other DNA
ttaaaacagcctgtgggttgcacccactcacagggcccactgggcgcaagcactctggtacctcggtacctttgtgcgcctgttttataccccccctcccagtgaaacttagaagcagcaaaccacgatcaatagcaggcataacgctccagttatgtcttgatcaagcacttctgtttccccggactgagtatcaatagactgctcgcgcggttgaaggagaaaacgttcgttatccggctagctacttcggaaaacctagtaacaccatgaaagttgcggagagcttcgttcagcactcccccagtgtagatcaggtcgatgagtcaccgcattccccacgggcgaccgtggcggtggctgcgttggcggcctgcccatggggtaacccatggggcgctctaatacggacatggtgtgaagagtctactgagctagttagtagtcctccggcccctgaatgcggctaatcccaactgcggagcacacgcccacaagccagcgggtagtgtgtcgtaacgggtaactctgcagcggaaccgactactttgggtgtccgtgtttccttttatctttatattggctgcttatggtgacaattaaagaattgttaccatatagctattggattggccatccggtgtgcaacagagcaattacttacctatttattggtcttgtaccattaaccttgaattctgtgaccacccttaattatatcctgacccttaacgcaactaaac

SEQ ID NO: 19068 - DNA, 747 bp, synthetic construct
  source 1..747: mol_type = other DNA
tttaaaacagcctgtgggttgtacccacccacagggcccactgggtgctagcactctggtaccacggtacctttgtgcgcctgttttatctccccaaacccccgtaacgctacactagaagatagacaatacgaccgatagccagtggggcaacccagcctcactttggtcaagcacctctgttttcccgggcttagtaccaataggctgctcgcgcggctgaaggggaacgcgctcgttatccggctaactacttcgagaaacctagtaccaccatggaagttgcagagtgtttcgctcagcacaaccccagtgtagatcaggccgatgagtcaccgtgcaccccacgggcgaccgtgacggtggctgcgttggcggcctgcccatggtgtacaccatgggacgctctaatacagacatggtgcgaagagtctattgagctagttagtagtcctccggcccctgaatgcggctaatcctaactgcggagcacgcgctctcaacccagagagtagcgtgtcgtaacgggcaactccgcagcggaaccgactactttgggtgtccgtgtttctctttattcttacatcggctgcttatggtgacaattgagagattgttaccatatagctattggattggccatccggtgtgtaatagagctatcatatattcttttgttggtttcgtgccactagattatattgcaattattactttaaggtacatcttgcttctgaacacagcaaa

SEQ ID NO: 19069 - DNA, 747 bp, synthetic construct
  source 1..747: mol_type = other DNA
tttaaaacagcctgtgggttgtacccacccacagggcccactgggcgctagcactctggtactgcggtacctttgtgcgcctgttttatctccccagacccccgcaacgtcacattagaagatagacaatacgaccaatagtcagtggggcaacccagcctcactttggtcaagtacctctgtttccccgggcttagtaccaataggctgcttgcgcggctgaaggggaacgcgcccgttatccggctaactacttcgagaaacctagtaccaccatggaagttgccgagtgtttcgctcagcacaaccccagtgtagatcaggtcgatgagtcaccgtacaccccacgggcgaccgtgacggtggctgcgttggcggcctgcccatggtgcacaccatgggacgctctaatacagacatggtgcgaagagtctattgagctagttagtagtcctccggcccctgaatgcggctaatcctaactgtggagcatgcgctctcaacccagagagtagcgtgtcgtaacgggcaactctgcagcggaaccgactactttgggtgtccgtgtttctctttattcttacattggctgcttatggtgacaattgagagattgttaccatatagctattggattggccatccggtgtgcaacagagctatcatatattcttttgttggctttgtaccactagattatactgcaattattgctttaaggtacatcttgcttttgaacacagcaaa

SEQ ID NO: 19070 - DNA, 747 bp, synthetic construct
  source 1..747: mol_type = other DNA
tttaaaacagcctgtgggttgtacccacccacagggcccactgggcgctagcactctggcaccacggtacctttgtgcgcctgttttatctccccagacccccgcaacgttacattagaagatagacaatgcgaccaatagccagtggggcaatccagcctcactttggtcaagtacctctgtttccccgggcttagtaccaataggctgcttgcgcggctgaaggggaacgcgcccgttacccggctaactacttcgagaaacctagtaccaccatggaagttgacgagtgtttcgctcaacacaaccccagtgtagatcaggtcgatgagtcaccgtacaccccacgggcgaccgtgacggtggctgcgttggcggcctgcccatggtgcacaccatgggacgctctaatacagacatggtgcgaagagtctattgagctagttagtagtcctccggcccctgaatgcggctaatcctaactgtggagcatgcgctctcaacccagagagtagcgtgtcgtaacgggcaactctgcagcggaaccgactactttgggtgtccgtgtttccttttattcttatattggctgcttatggtgacaattgagagattgttgccatatagctattggattggccatccagtgtgtaatagagctattgtgtattcttttgttggctttgtgccattagattatactgcagttgctactttaagatacatcttgtttctgaacacagcaaa

SEQ ID NO: 19071 - DNA, 741 bp, synthetic construct
  source 1..741: mol_type = other DNA
agcctgtgggttgcacccactcacaggacccacgcggtgctagcactctggttccacgggacctttgtgcgcctgttttatgtcccctcccccaatttgtaacttagaagcaatttgcaacactgatcagtagcaggcatagcgcaccagctatgtcttgatcaagcacttctgtttccccggaccgagtatcaatagactgtttacacggttgaaggagaaagcgtccgttatccggctaactacttcgagaaacccagtagcaccattgaaactacagagtgtttcgctccacacttcccccgtgtagatcaggtcgatgagtcactgcaatccccacgggcgaccgtggcagtggctgcgctggcggcctgcctatggggcaacccataggacgctctaatgtggacatggtgtgaagagtctattgagctagttagtagtcctccggcccctgaatgcggctaatcccaactgcggagcacatgccttcaacccagagggtagtgtgtcgtaatgggcaactctgcagcggaaccgactactttgggtgtccgtgtttccttttattctcacattggctgcttatggtgacaattacagaattgttaccatatagctattggattggccatccggtgtgcaatagagctattatatacctatttgttggctttgtaccactgaccttaaaatctttaaccactcttgagtgtatattaacccttaatacaatcaaac

SEQ ID NO: 19072 - DNA, 743 bp, synthetic construct
  source 1..743: mol_type = other DNA
ttaaaacagcctgtgggttgttcccacccacagggcccactgggcgctagcacactgattctgcgggatctttgtgcgcctgttttataacccttccctaaacagcaacttagaagttttgcacactcacgaccagtagtgggcgtggcgcaccagtcacgtcttggtcaagcacttctgtatccccggactgagtatcaatagactgctcacgcggttgaaggagaaaacgttcgttatccggctaactacttcgagaaacctagtagcaccatgaaagttgcggagtgtttcgctcagcacttcccccgtgtagatcaggtcgatgagtcactgtaaaccccacgggcgaccgtgacagtggctgcgttggcggcctgcccatggggtaacccatgggacgctctaatacagacatggtgtgaagagtctattgagctagttagtagtcctccggcccctgaatgcggctaatcctaactgcggagcacgcaccctcaacccagggggcggcgtgtcgtaatgggtaactctgcagcggaaccgactactttgggtgtccgtgtttctttttattttcattggctgcttatggtgacaattgaaaagttgttaccatatagctattggattggccatccggtatctaacagagctattgtttacctattcattggatacgtccctcttaatctcaaggccattcaaactcttgattatatattgctccttaattgcaagaa

SEQ ID NO: 19073 - DNA, 743 bp, synthetic construct
  source 1..743: mol_type = other DNA
ttaaaacagcctgtgggttgttcccacccacagggcccactgggcgctagcacactgattctgcgggatctttgtgcgcctgttttataacccttccctaaacagcaacttagaagttttgcacactcacgaccagtagtgggcgtggcgcgccagtcacgtcttggtcaagcacttctgtatccccggactgagtatcaatagactgctcacgcggttgaaggagaaaacgttcgttatccggctaactacttcgagaaacctagtagcaccatgaaagttgcggagtgtttcgctcagcacttcccccgtgtagatcaggtcgatgagtcactgtaaaccccacgggcgaccgtgacagtggctgcgttggcggcctgcccatggggtaacccatgggacgctctaatacagacatggtgtgaagagtctattgagctagttagtagtcctccggcccctgaatgcggctaatcctaactgcggagcacgcaccctcaacccagggggcggcgtgtcgtaatgggtaactctgcagcggaaccgactactttgggtgtccgtgtttctttttattttcattggctgcttatggtgacaattgaaaagttgttaccatatagctattggattggccatccggtatctaacagagctattgtttacctattcattggatacgtccctcttaacctcaaggccattcaaactcttgattatatattgctccttaattgcaagaa

SEQ ID NO: 19074 - DNA, 743 bp, synthetic construct
  source 1..743: mol_type = other DNA
ttaaaacagcctgtgggttgcacccactcacagggcctactgggcgcaagcactctggtacctcggtacctttgtgcgcctgttttacaccccctcccccagtgaaacttagaagcaacaaaccacgatcgatagcaggcataacgctccagttatgtcttgatcaagcacttctgtttccccggaccgagtatcaatagactgctcacgcggttgaaggagaaaacgttcgttatccggctagctacttcgggaaacctagtaacaccatgaaagttgcggagagcttcgttcagcactcccccagtgtagatcaggtcgatgagtcaccgcattccccacgggcgaccgtggcggtggctgcgttggcggcctgcccatggggtaacccatggggcgctctaatacggacatggtgtgaagagtctactgagctagttagtagtcctccggcccctgaatgcggctaatcccaactgcggagcacacgcccacaagccagcgggtagtgtgtcgtaacgggtaactctgcagcggaaccgactactttgggtgtccgtgtttccttttatctttatattggctgcttatggtgacaattaaagaattgttaccatatagctattggattggccatccggtgtgcaacagagcaattgtttacctatttattggtttcgtaccgttaaccttgaaatctgtgaccacccttaattatatcttgacccttaacacagctaaac

SEQ ID NO: 19075 - DNA, 743 bp, synthetic construct
  source 1..743: mol_type = other DNA
ttaaaacagcccttgggttgcacccacccacagggcccactgggcgcaagcactctggtactttggtacctttgtgcgcctgttttatacccctcccccaaacgaaatttagaagcagcaaaccacgatcaatagcaggcatagcgctccagttatgtcttgatcaagcacttctgtttccccggactgagtatcaatagactgctcacgcggttgaaggagaaaacgttcgttacccggccaactacttcggaaaacctagtaacaccatgaaagttgcggagagcttcgttcagcactcccccagtgtagatcaggtcgatgagtcaccgcattccccacgggcgaccgtggcggtggctgcgttggcggcctgcccatggggtaacccatggggcgctctaatacggacatggtgtgaagagtctactgagctagttggtagtcctccggcccctgaatgcggctaatcccaactgcagagcacacgcccacaagccagcgggtagtgtgtcgtaatgggtaactctgcagcggaaccgactactttgggtgtccgtgtttccttttatttttatattggctgcttatggtgacaatcagagaattgttgccatatagctattggattggccatccggtgtgcaacagagcaattatttacctattcgttggttttgtgccattaactttgacttctgtaaccacccttaattatatcttgacccttaacacagttaaac

SEQ ID NO: 19076 - DNA, 743 bp, synthetic construct
  source 1..743: mol_type = other DNA
ttaaaacagcctgtgggttgcacccacccacagggcccactgggcgcaagcactctggtactttggtacctttgtgcgcctgttttatacccctcccccaaatgaaatttagaagcagcaaaccacgatcaatagcaggcatagcgctccagttatgtcttgatcaagcacttctgtttccccggactgagtatcaatagactgctcacgcggttgaaggagaaaacgttcgttacccggccaactacttcggaaaacctagtaacaccatgaaagttgcggagagcttcgttcagcactcccccagtgtagatcaggtcgatgagtcaccgcattccccacgggcgaccgtggcggtggctgcgttggcggcctgcccatggggtaacccatggggcgctctaatacggacatggtgtgaagagtctactgagctagttggtagtcctccggcccctgaatgcggctaatcccaactgcagagcacacgcccacaagccagcgggtagtgtgtcgtaatgggtaactctgcagcggaaccgactactttgggtgtccgtgtttccttttatttttatattggctgcttatggtgacaatcagagaattgttgccatatagctattggattggccatccggtgtgcaacagagcaattatttacctattcgttggttttgtgccattaactttgacttctgtaaccacccttaattatatcttgacccttaacacagttaaac

SEQ ID NO: 19077 - DNA, 743 bp, synthetic construct
  source 1..743: mol_type = other DNA
ttaaaacagcctgtgggttgcacccacccacagggcccactgggcgttagcactctggtaccgcggtacccttgtgcgcctgttttatcaccctaccccaacttgaaacttagaagcaatacacaatcgaccaatagcaggtgtggcgcaccagccacatctaggtcaagcacttctgtttccccgggttgagtatcaataagctgtccacacggctgaaggagaaaacgcccgttatccggccaattacttcgagaaacctagtatcactatgaacgttgcgaggcgtttcgctcagcacttcccccgtgtagatcaggtcgatgagtcaccgcattccccacgggcgaccgtggcggtggctgcgttggcggcctgcctatgggttaacccataggacgccttaatactgacatggtgtgaagagtctattgagctagttggtagtcctccggcccctgaatgcggctaatcctaactgcggagcacatgctcacaacccagtgagtggtgtgtcgtaacgggcaactctgcagcggaaccgactactttgggtgtccgtgtttccttttattcttacattggctgcttatggtgacaatcacagaattgttaccatatagctattggattggccatccgacttctaacagagctattatttacctgtttgttggattcactccgttgacatataaatccctaaacactttgtgctttattttgaacttgaacgcacgaaa

SEQ ID NO: 19078 - DNA, 731 bp, synthetic construct
  source 1..731: mol_type = other DNA
gggttgttcccacccacagggcctactgggcgccagcactctgattccacggaatctttgtgcgcctgttttacaaccctttcccaatttgtaacgtagaagtaacacacactactgatcaatagcaggcatggcgcgccagtcatgtctcgatcaagcacttctgttcccccggactgagtatcaatagactgctcacgcggttgaaggagaaaacgttcgttacccggctaactacttcgagaaacctagtagcaccatagaagctgcagagtgtttcgctcagcacttcccccgtgtagatcaggctgatgagtcactgcaatccccacgggcgaccgtggcagtggctgcgctggcggcctgcctatggggcaacccataggacgctctaatgtggacatggtgcgaagagtctattgagctagttagtagtcctccggcccctgaatgcggctaatcctaactgcggagcacatgccttcaacccaggaggtggtgtgtcgtaacgggcaactctgcagcggaaccgactactttgggtgtccgtgtttccttttattcctatattggctgcttatggtgacaatcacggaattgttgccatatagctattggattggccatccggtgtctaatagagctattgtgtacctatttgttggatttactccgctatcatataaatctctgaacactttgtgctttatattaaacttaaacacacgaaa

SEQ ID NO: 19079 - DNA, 743 bp, synthetic construct
  source 1..743: mol_type = other DNA
ttaaaacagcctgtgggttgcacccactcacagggcctactgggcgcaagcactctggtatcttggtacctttgtgcgcctgttttatacctccccccccagtgaaacttagaagcagcgaaccacgatcaatagcaggcataacgctccagttatgtcttgatcaagcacttctgtttccccggactgagtatcaatagactgctcgcgcggttgaaggagaaaacgttcgttatccggctaactacttcggaaaacctagtaacaccatgaaagttgcggagagcttcgttcagcactcccccagtgtagatcaggtcgatgagtcaccgcattccccacgggcgaccgtggcggtggctgcgttggcggcctgcccatggggtaacccatggggcgctctaatacagacatggtgtgaagagtctactgagctagttagtagtcctccggcccctgaatgcggctaatcccaactgcggagcacacgcccacaagccagcgggtagtgtgtcgtaacgggtaactctgcagcggaaccgactactttgggtgtccgtgtttccttttacctttatattggctgcttatggtgacaattaaagaattgttaccatatagctattggattggccatccggtgtgcaacagagcaattatttacctatttattggttttgtaccattaactttgaattctgtgaccacccttaactatattctgacccttaacacagctaaac

SEQ ID NO: 19080 - DNA, 747 bp, synthetic construct
  source 1..747: mol_type = other DNA
tttaaaacagcctgtgggttgtacccacccacagggcccactgggcgctagcacactggtattacggtacccttgtgcgcctgttttatcctccctggcccccgtaataatgtattagaagtcttgcaacgtgaccaatagctagtaaagcaacccagctttacttgggtcaagtacttctgttaccccggacctagtaccaataggctgctcgcgcggctgaaggggaaaacgttcgttatccggctaactacttcgggaaacccagtaccatcatgaatgttgcggagtgtttcgctcagcactaccccagtgtagatcaggccgatgagtcaccgtacaccccacgggcgaccgtgacggtggctgcgttggcggcctgcccatggcacctgccatgggacgctctaatacggacatggtgtgaagagtctactgagctagttagtagtcctccggcccctgaatgcggctaatcctaactgcggagcacgcgcccccgatccagagggtagcgtgtcgtaatgggcaactctgcagcggaaccgactactttgggtgtccgtgtttccttttattcttacactggctgcttatggtgacaattgagagattgttgccatatagctattggattggccatccggtgagcaatagagcgattatctattcttttgttggatttgtgccattagattacactgccatcatcacactgaagtacattttattgttaaacacaacaaa

SEQ ID NO: 19081 - DNA, 743 bp, synthetic construct
  source 1..743: mol_type = other DNA
tttaaaacagcctgtgggttgcacccacccacagggcccactgggcgctagcactctggtactgcggtacctttgtgcgcctgttttatcaccccaccccatctggaacgtagaagcaatgcacaactgaccaatagtgggtgtggcgcaccagccacatcttggtcaagcacttctgtttccccgggtttagtatcaataagctgctcacgcggctgaaggagaaaacacccgttatccggccgactacttcgagaaacctagtaccgctatgaacgttgcaaggcgtttcgttcagcacttcccccgtgtagatcaggccgatgagtcaccgcattcctcacgggcgaccgtggcggtggctgcgttggcggcctgcctatgggcttgcccataggacgccttaatactgacatggtgcgaagagtctattgagctagttggtagtcctccggcccctgaatgcggctaatcctaactgcggagcacatactcacaaaccagtgagcggtgtgtcgtaacgggcaactctgcagcggaaccgactactttgggtgtccgtgtttccttttattcttatactggctgcttatggtgacaattaaagaattgttaccatatagctattggattggccatccggtgtctaacagagctattatatacttgtttgttggattcatctcgttatcacacaaatcccttaacactttgtgttttatcttgaatttgaactcaaaaag

SEQ ID NO: 19082 - DNA, 742 bp, synthetic construct
  source 1..742: mol_type = other DNA
ttaaaacagcctgtgggttgcacccactcacagggcccactgggcgcaagcactctggtacttcggtacctttgtgcgcctgttttataacccccccccagtgaaacttagaagcagcaaaccacgatcaatagcaggcataacgctccagttatgtcttgatcaagcacttctgtttccccggaccgagtatcaatagactgctcgcgcggttgaaggagaaaacgttcgttatccggctaactacttcgggaaacctagtaacaccatgaaagttgcggagagcttcgctcagcacttccccagtgtagatcaggtcgatgagtcaccgcattccccacgggcgaccgtggcggtggctgcgttggcggcctgcccatggggcaacccatggggcgctctaatacggacatggtgcgaagagtctactgagctagttagtagtcctccggcccctgaatgcggctaatcccaactgcggagcacacgcccacaaaccagcgggtagtgtgtcgtaacgggcaactctgcagcggaaccgactactttgggtgtccgtgtttccttttatctttatattggctgcttatggtgacaattgaagagttgttaccatatagctattggattggccatccggtgtgcaacagagcaattgtttacttatttattggttttgtgccattaaccttgaagtctgtgattacccttaattatatcttgaccctcaacacagctaaac

SEQ ID NO: 19083 - DNA, 721 bp, synthetic construct
  source 1..721: mol_type = other DNA
cccactcacagggcctactgggcgcaagcactctggtacctcggtacctttgtgcgcctgttttacaccccctcccccagtgaaacttagaagcaccaaaccacgatcaatagcaggcataacgctccagttatgtcttgatcaagcacttctgtttccccggaccgagtatcaatagactgcttgcgcggttgaaggagaaaacgttcgtcatccggctagctacttcgggaaacctagtaacaccatgaaagttgcggagagcttcgttcagcacttccccagtgtagatcaggtcgatgagtcaccgcattccccacgggcgaccgtggcggtggctgcgttggcggcctgcccatggggtaacccatggggcgctctaatacggacatggtgtgaagagtctactgagctagttagtagtcctccggcccctgaatgcggctaatcccaactgcggagcacacgcccacaagccagcgggtagtgtgtcgtaacgggtaactctgcagcggaaccgactactttgggtgtccgcgtttccttttatctttatattggctgcttatggtgacagttaaagaattgttaccatatagctattggattggccatccggtgtgcaacagagcaattgtctacctatttattggttttgtaccattaaccttgaagtctgtgaccacccttaattatatcttgacccttaacacagctaaac

SEQ ID NO: 19084 - DNA, 742 bp, synthetic construct
  source 1..742: mol_type = other DNA
ttgaaacagcctgtgggttgcacccactcacagggcccactgggcgcaagcactctggtacctcggtacctttgtgcgcctgttttatgtcccccccccagtgcaacttagaagcagcaaaccacgatcaatagcaggcataacgctccagttatgtcttgatcaagcacttctgtttccccggaccgagtatcaatagactgctcgcgcggttgaaggagaaaacgttcgttatccggctagctacttcgggaaacctagtaacaccatgaaggttgcggagagcttcgttcagcactcccccagtgtagatcaggtcgatgagtcaccgcattccccacgggcgaccgtggcggtggctgcgttggcggcctgcccatggggtaacccatggggcgctctaatacggacatggtgcgaagagtctactgagctagttagtagtcctccggcccctgaatgcggctaatcccaactgcggagcacacgcccacaaaccagcgggtagtgtgtcgtaacgggcaactctgcagcggaaccgactactttgggtgtccgtgtttccttttatctttatattggctgcttatggtgacaatcatagaattgttaccatatagctattggattggccatccggtgtgcaacagagcaattgtttacctgtttattggttttgtaccattaaccttgaagtctgtgaccacccttgattatattttgaccctcaacacagctaaac

SEQ ID NO: 19085 - DNA, 742 bp, synthetic construct
  source 1..742: mol_type = other DNA
ttaaaacagcctgtgggttgcacccactcacagggcctactgggcgcaagcactctggtacctcggtacctttgtgcgcctgttttatacccctcccccagtgaaacttagaagcagtaaaccacgatcaatagcaggcataacgctccagttatgtcttgatcaagcacttctgtttccccggactgagtatcaatagactgctcgcgcggttgaaggagaaaacgttcgttatccggctagctacttcggaaaacctagtaacaccatgaaagttgcggagagcttcgttcagcactcccccagtgtagatcaggtcgatgagtcaccgcattccccacgggcgaccgtggcggtggctgcgttggcggcctgcccatggggtgacccatggggcgctctaatacggacatggtgtgaagagtctactgagctagttagtagtcctccggcccctgaatgcggctaatcctaactgcggagcacacgcccacaagccagcgggtagtgtgtcgtaacgggtaactctgcagcggaaccgactactttgggtgtccgtgtttccttttatctttatattggctgcttatggtgacaattaaagaattgttaccatatagctattggattggccatccggtgtgcaacagagcaattatttacctatttattggttttgtaccattaaccttgagttctgtgaccacccttaattatatcttgacccttaacacagctaaac

SEQ ID NO: 19086 - DNA, 742 bp, synthetic construct
  source 1..742: mol_type = other DNA
ttaaaacagcctgtgggttgcacccactcacagggcctactgggcgcaagcactctggtacctcggtacctttgtgcgcctgttttatacccctcccccagtgaaacttagaagcagtaaaccacgatcaatagcaggcataacgctccagttatgtcttgatcaagcacttctgtttccccggactgagtatcaatagactgctcgcgcggttgaaggagaaaacgttcgttatccggctagctacttcggaaaacctagtaacaccatgaaagttgcggagagcttcgttcagcactcccccagtgtagatcaggtcgatgagtcaccgcattccccacgggcgaccgtggcggtggctgcgttggcggcctgcccatggggtgacccatggggcgctctaatacggacatggtgtgaagagtctactgagctagttagtagtcctccggcccctgaatgcggctaatcctaactgcggagcacacgcccacaagccagcgggtagtgtgtcgtaacgggtaactctgcagcggaaccgactactttgggtgtccgtgtttccttttatctttatattggctgcttatggtgacaattaaagaattgttaccatatagctattggattggccgtccggtgtgcaacagagcaattatttacctatttattggttttataccattaaccttgagttctgtgaccacccttaattatatcttgacccttaacacagctaaac

SEQ ID NO: 19087 - DNA, 742 bp, synthetic construct
  source 1..742: mol_type = other DNA
ttaaaacagcctgtgggttgcacccactcacagggcctactgggcgcgagcactctggtacctcggtacctttgtgcgcctgttttacaccccctccccagtgaaacttagaagcaacacaccacgatcaatagcaggcataacgctccagttatgtcttgatcaagcacttctgtttccccggactgagtatcaatagactgctcgcgcggtcgaaggagaaaacgttcgttatccggctagctacttcggaaaacctagtaacaccatgaaagttgcggagagcttcgttcagcactcccccagtgtagatcaggtcgatgagtcaccgcattccccacgggcgaccgtggcggtggctgcgttggcggcctgcccatggggtaacccatggggcgctctaatacggacatggtgtgaagagtctactgagctagttagtagtcctccggcccctgaatgcggctaatcccaactgcggagcacacgcccacaagccagcgggtggtgtgtcgtaacgggtaactctgcagcggaaccgactactttgggtgtccgtgtttccttttatctttatattggctgcttatggtgacaattaaagaattgttaccatatagctattggattggccatccggtgtgcaacagagcaattatttacctatttattggttttgtaccattaaccttgaagtctgtgaccaccctcaattatatcttaacccttaacacagctaaaa

SEQ ID NO: 19088 - DNA, 742 bp, synthetic construct
  source 1..742: mol_type = other DNA
ttaaaacagcctgtgggttgcacccactcacagggcccactgggcgcaagcactctggtacttcggtacctttgtgcgcctgttttacaacccccccccagtgaaacttaaaagcagcaaactacgatcaatagcaggcataacgctccagttatgtcttgatcaagcacttctgtttccccggaccgagtatcaataaactgctcgcgcggttgaaggaaaaaacgttcgttatccggctaactacttcgggaaacctagtaacaccatgaaagttgcggaaagcttcgttcagcactcccccagtgtaaatcaggtcgatgagccaccgcattccccacgggcgaccgtggcggtggctgcgttggcggcctgcccatggggcaacccatggggcgctctaatacggacatggtgcgaaaagtctactgagctagttagtagtcctccggcccctgaatgcggctaatcctaactgcggagcacacgcccacaaaccagcgggtagtgtgtcgtaacgggcaactccgcagcggaaccgactactttgggtgtccgtgtttccttttatctttatattggctgcttatggtgacaattaaagagttgttaccatatagctattggattggccatccggtgtgcaacaaagcaattgtttacctatttattggttttgtgccattaaccttgaagtctgtgactacccttaattatatcttgaccctcaacacagctaaac

SEQ ID NO: 19089 - DNA, 742 bp, synthetic construct
  source 1..742: mol_type = other DNA
ttaaaacagcctgtgggttgcacccactcccagggcatactgggcgcaagcactctggtatctcggtaccgttgtgcgcctgttttacaccccctcaccagtgaaagttagaagcagcaaaccacgatcaatagcaggcataacgctccagttatgtcttgatcaagcacttctgtttccccggactgagtatcaatagactgctcgcgcggttgaaggagaaaacgttcgttatccgactagctacttcggaaaacctagtaacaccatgaaagttgcggagagcttcgttcagcactcccccagtgtagatcaggtcgatgagtcaccgcattccccacgggcgaccgtggcggtggctgcgttggcggcctgcccatggggtaacccatggggcgctctaatacggacatggtgtgaagagtctactgagctagttagtagtcctccggcccctgaatgcggctaatcccaactgcggagcacacgcccacaagccagcgggtagtgtgtcgtaacgggtaactctgcagcggaaccgactactttgggtgtccgtgtttccttttatctttatattggctgcttatggtgacaattaaagaattgttaccatatagctattggattggccatccggtgtgcaacagagcaattgtttacctatttattggttttgtaccattaaccttgaattctgtgaccacccttaattatatcttgacccttaacacagctaaac

SEQ ID NO: 19090 - DNA, 742 bp, synthetic construct
  source 1..742: mol_type = other DNA
ttaaaacagcctgtgggttgcacccactcacagggcccactgggcgcaagcactctggtacctcggtacctttgtgcgcctgttttataacccccccccagtgaaacttagaagcagcaaaccacgatcaatagcaggcataacgctccagttatgtcttgatcaagcacttctgtttccccggactgagtatcaatagactgctcgcgcggttgaaggagaaaacgttcgttatccggctaactacttcgggaaacctagtagcatcatgaaagttgcggagagcttcgttcagcactcccccagtgtagatcaggtcgatgagtcaccgcattccccacgggcgaccgtggcggtggctgcgttggcggcctgcctatggggtaacccatggggcgctctaatacggacatggtgcgaagagtctactgagctagttagtagtcctccggcccctgaatgcggctaatcccaactgcggagcacacgcccacaagccagcgggtagtgtgtcgtaacgggcaactctgcagcggaaccgactactttgggtgtccgtgtttccttttatctttgtattggctgcttatggtgacaattgaagagttgttaccatatagctattggattggccatccggtgtgcaacagagcaattgtttacctatttattggttttgtaccattaaccttgaagtctgtgaccacccttaattatatcttgaccctcaacacagctaaac

SEQ ID NO: 19091 - DNA, 742 bp, synthetic construct
  source 1..742: mol_type = other DNA
taaaaacagcctgtgggttgcacccactcacagggcctactgggcgcaagcactctggtacctcggtacctttgtgcgcctgttttataccccccccctagtgaaacttagaagcagcaaaccacgatcaatagcaggcataacgctccagttatgtcttgatcaagcacttctgtttccccggactgagtatcaatagactgctcgcgcggttgaaggagaaaacgttcgttatccggctaactacttcggaaaacctagtaacaccatgaaagttgcggagagcttcgttcagcactcccccagtgtagatcaggtcgatgagtcaccgcattccccacgggcgaccgtggcggtggctgcgttggcggcctgcccatggggtaacccatggggcgctctaatacggacatggtgtgaagagtctactgagctagttggtagtcctccggcccctgaatgcggctaatcccaactgcggagcacacgcccacaagccagcgggtagtgtgtcgtaacgggtaactctgcagcggaaccgactactttgggtgtccgtgtttccttttatctttatattggctgcttatggtgacaattaaagaattgttaccatatagctattggattggccatccggtgtgcaacagagcaattatttacctatttattggttttgtaccattaaccttgaattctgtgaccacccttaattatatcttgacccttaacacagctaaac

SEQ ID NO: 19092 - DNA, 742 bp, synthetic construct
  source 1..742: mol_type = other DNA
ttaaaacgcctgtgggttgcacccactcacagggcctactgggcgcaagcactctggtacctcggtacctttgtgcgcctgttttgcaccccctcccccagtgaaacttagaagcaacaaaccacgatcaatagcaggcataacgctccagttatgtcttgatcaagcacttctgtttccccggaccgagtatcaatagactgctcacgcggttgaaggagaaaacgttcgttatccggctagctacttcgggaaacctagtaacaccatgaaagttgcggagagcttcgttcagcactcccccagtgtagatcaggtcgatgagtcaccgcattccccacgggcgaccgtggcggtggctgcgttggcggcctgcccatggggtaacccatggggcgctctaatacggacatggtgtgaagagtctactgagctagttagtagtcctccggcccctgaatgcggctaatcccaactgcggagcacacgcccacaagccagcgggtagtgtgtcgtaacgggtaactctgcagcggaaccgactactttgggtgtccgtgtttccttttatctttatattggctgcttatggtgacaattaaagaattgttaccatatagctattggattggccatccggtgtgcaacagagcaattgtttacctatttattggtttcgtaccgttaaccttgaaatctgtgaccacccttaattatatcttgacccttaacacagctaaac

SEQ ID NO: 19093 - DNA, 742 bp, synthetic construct
  source 1..742: mol_type = other DNA
ttaaaacagcctgtgggttgcacccactcacagggcccattgggcgcaagcactctggtatcttggtacctttgtgcgcctgttttatacccctcccctattgtaacttagaagcagtaaaccacgatcaatagcaggcataacgctccagttatgtctcgatcaagcacttctgtttccccggactgagtatcaatagactgctcgcgcggttgaaggagaaaacgttcgttatccggctagctacttcggaaaacctagtaacaccatgaaagttgcggagagcttcgttcagcactcccccagtgtagatcaggtcgatgagtcaccgcattccccacgggcgaccgtggcggtggctgcgttggcggcctgcccatggggtaacccatggggcgctctaatacagacatggtgtgaagagtctactgagctagttagtagtcctccggcccctgaatgcggctaatcccaactgcggagcacacgcccacaagccagcgggtagtgtgtcgtaacgggtaactctgcagcggaaccgactactttgggtgtccgtgtttccttttatttttatattggctgcttatggtgacaattaaagaattgttaccatatagctattggattggccatccggtgtgcaacagagcaatcatttacctatttattggttttgtaccattaactttgaattctgtgaccacccttaattatatcttgacccttaacatagctaaac

SEQ ID NO: 19094 - DNA, 742 bp, synthetic construct
  source 1..742: mol_type = other DNA
ttaaaacagcctgtgggttgcacccactcacagggcccactgggcgcaagcactctggtacctcggtacctttgtgcgcctgttttatacccccctcccaatgaaacttagaagcaacaaaccacgatcaatagcaggcgtaacactccagttatgtctcgatcaagcacttctgtttccccggactgagtatcaatagactgctcacgcggttgaaggagaaaacgttcgttatccggctaactacttcgggaaacccagtaacaccatgaaagttgcggagagcttcgttcagcacttccccagtgtagatcaggtcgatgagtcaccgcattccccacgggcgaccgtggcggtggctgcgttggcggcctgcccatggggtaacccatggggcgctctaatacggacatggtgcgaagagtctactgagctagttagtagtcctccggcccctgaatgcggctaatcctaactgcggagcacacgcccacaagccagcgggtagtgtgtcgtaacgggtaactctgcagcggaaccgactactttgggtgtccgtgtttccttttatctttatattggctgcttatggtgacaattaaagaattgttaccatatagctattggattggccatccggtgtgtaacagagcgattgtttatttattcattggttttgtaccattaaccttgaagtctgtgaccactcttaattatatcttgaccctcaatacagcaaaat

SEQ ID NO: 19095 - DNA, 742 bp, synthetic construct
  source 1..742: mol_type = other DNA
ttaaaacagcctgtgggttgcacccactcacagggcccactgggcgcaagcactctggcacctcggtacctttgtgcgcctgttttacaccccctccccagtgaaacttagaagcagcaaaccacgatcaatagcaggcataacgctccagttatgtcttgatcaagcacttctgtttccccggaccgagtatcaatagactgctcgcgcggttgaaggagaaaacgttcgttatccggctaactacttcgggaaacctagtaacaccatgaaagttgcagagagcttcgttcagcacttccccagtgtagatcaggtcgatgagtcaccgcattccccacgggcgaccgtggcggtggctgcgttggcggcctgcccatggggtaacccatggggcgctctaatacggacatggtgcgaagagtctactgagctagttagtagtcctccggcccctgaatgcggctaatcccaactgcggagcacacgcccacaatccagcgggtagtgtgtcgtaacgggcaactctgcagcggaaccgactactttgggtgtccgtgtttccttttatctttatattggctgcttatggtgacaattaaagagttgttaccatatagctattggattggccatctggtgtgcaacagagcgattgtttacctatttattggttttgtaccattaaccttgaagtctgtgaccactcttaattatatcttgaccctcaacacagttaaac

SEQ ID NO: 19096 - DNA, 742 bp, synthetic construct
  source 1..742: mol_type = other DNA
ttaaaacagcctgtgggttgcacccactcacagggcctactgggcgcaagcactctggtatcttggtacctttgtgcgcctgttttatacccctcccctattgtaacttagaagcagcaaaccacgatcaatagcaggcataacgctccagttatgtctcgatcaagcacttctgtttccccggactgagtatcaatagactgctcgcgcggttgaaggagaaaacgttcgttatccggctagctacttcggaaaacctagtaacaccatgaaagttgcggagagcttcgttcagcactcccccagtgtagatcaggtcgatgagtcaccgcattccccacgggcgaccgtggcggtggctgcgttggcggcctgcccatggggtaacccatggggcgctctaatacagacatggtgtgaagagtctactgagctagttagtagtcctccggcccctgaatgcggctaatcccaactgcggagcacacgcccacaagccagcgggtagtgtgtcgtaacgggcaactctgcagcggaaccgactactttgggtgtccgtgtttccttttatctctatattggctgcttatggtgacaattaaagaattgttaccatatagctattggattggccatccggtgtgcaacagagcaatcatttacctattcattggttttgtaccattaaccttcaattctgtgaccacctttaattatattttgacccttaacacagctaaac

SEQ ID NO: 19097 - DNA, 742 bp, synthetic construct
  source 1..742: mol_type = other DNA
ttaaaacagcctgtgggttgtacccacccacagggcctactgggcgcaagcactctggtacttcggtacctttgtgcgcctgttttataccccctccccagtgaaacttagaagcagcaaaccacgatcaatagcaggcatagcgctccagttatgtcttgatcaagcacttctgtttccccggactgagtatcaatagactgctcgcgcggttgaaggagaaaacgttcgttacccggccaactactttggaaaacctagtaacaccatgaaagttgcggagagcttcgttcagcactcccccagtgtagatcaggtcgatgagtcaccgcattccccacgggcgaccgtggcggtggctgcgttggcggcctgcccatggggtaacccatggggcgctctaatacagacatggtgtgaagagtctactgagctagttggtagtcctccggcccctgaatgcggctaatcccaactgcggagcacgcgcccacaagccagcgggtagtgtgtcgtaatgggtaactctgcagcggaaccgactactttgggtgtccgtgtttccttttatctttatattggctgcttatggtgacaattagagagttgttaccatatagctattggattggccatccggtgtgcaacagagcaattatttacctatttattggttttgtaccattaactttgacttctgtgaccacccttaattatatcttggcccttaacacagctaaac

SEQ ID NO: 19098 - DNA, 746 bp, synthetic construct
  source 1..746: mol_type = other DNA
tttaaaacagcctgtgggttgtacccacccacagggcccactgggcgctagcactctggtactacggtacccttgtgcgcctgttttatcttcccaaaccccgtaacgctacactagaagttagacactgtgaccaatagtcagtggggcaacccagccccacttcggtcaagtacctctgtttccccgggtctagtaccaataggctgcttacgcggctgaaggggagcgcgcccgttatccggctaactacttcgagaaacctagtaccaccatggaagttgcagagtgtttcgctcagcacaaccccagtgtagatcaggtcgatgagtcaccgtacaccccacgggcgaccgtgacggtggctgcgttggcggcctgcccatggtgcacaccatgggacgctctaatacagacatggtgcgaagagtctattgagctagttagtagtcctccggcccctgaatgcggctaatcctaactgcggagcatgtgctctcaacccagagggtagcatgtcgtaacgggcaactctgcagcggaaccgactactttgggtgtccgtgtttccttttattcttatattggctgcttatggtgacaattgaaagattgttaccatatagctattggattggccatccggtgtgcaatagagctattgtatattcttttgttggctttgtgccattagattatacggcaactggtactttaagatacattcagcttttgaacacagcaaa

SEQ ID NO: 19099 - DNA, 741 bp, synthetic construct
  source 1..741: mol_type = other DNA
ttaaaacagcctgtgggttgcacccactcacagggcccactgggcgcaagcactctggtacctcggtacctttgtgcgcctgttttatacccccccccaatgaaacttagaagcagcaaaccacgatcaatagcaggcatgacgctccagttatgtcttgatcaagcacttctgtttccccggactgagcatcaatagactgctcgcgcggttgaaggagaaaacgttcgttatccggctaaccacttcggaaaacctagtagcactatgaaagttgcggagagcttcgttcagcactcccccagtgtagatcaggtcgatgagtcaccgcattccccacgggcgaccgtggcggtggctgcgttggcggcctgcccatggggtaacccatggggcgctctaatacggacatggtgtgaagagtctactgagctggttagtagtcctccggcccctgaatgcggctaatcccaactgtggagcacacgcccacaagccagcgggtagtgtgtcgtaatgggtaactctgcagcggaaccgactactttgggtgtccgtgtttccttttatcctcttattggctgcttatggtgacaattaaagaattgttaccatatagctattggattggccatccggtgtgcaacagagcaatcgtttacctatttattggttttgtaccattaaccttgaattctgtgaccactctcaattatatcttgacccttaacacagccaaac

SEQ ID NO: 19100 - DNA, 742 bp, synthetic construct
  source 1..742: mol_type = other DNA
ttaaaacagcctgtgggttgcacccactcacagggcctactgggcgctagcactctggtaccccggtacctttgtgcgcctgttttataccccccccttagtgaaacttagaagcagtaaaccacgatcaatagcaggcatagcactccagctatgtcttgatcaagcacttctgtttccccggactgagtatcaatagactgctcgcgcggttgaaggagaaaacgttcgttacccggccaactacttcgggaaacctagtagcaccatgaaagttgcggagagcttcgttcagcactcccccagtgtagatcaggtcgatgagtcaccgcattccccacgggcgaccgtggcggtggctgcgttggcggcctgcccatggggtaacccatggggcgctctaatacggacatggtgtgaagagtctactgagctagttggtagtcctccggcccctgaatgcggctaatcccaactgcggagcacacgcccacaagccagcgggtagtgtgtcgtaacgggtaactctgcagcggaaccgactactttgggtgtccgtgtttccttttatctttgtattggctgcttatggtgacaattaaggaattgttaccatatagctattggactggccatccggtgtgcaacagagcaattatttacctatttattggttttgtacccttaaccttgaattctgtgaccacccttaattatatcttgacccttaacacagctaaac

SEQ ID NO: 19101 - DNA, 742 bp, synthetic construct
  source 1..742: mol_type = other DNA
ttaaaacagcctgtgggttgcacccactcacagggcctactgggcgcaagcactctggtatcttggtacctttgtgcgcctgttttatacccctcccctattgtaacttagaagcagcaaaccacgatcaatagcaggcataacaatccagttatgtctcgatcaagcacttctgtttccccggactgagtatcaatagactgctcgcgcggttgaaggagaaaacgttcgttatccggctagctacttcggaaaacctagtaacaccatgaaagttgcggagagcttcgttcagcactcccccagtgtagatcaggtcgatgagtcaccgcactccccacgggcgaccgtggcggtggctgcgttggcggcctgcccatggggtgacccatggggcgctctaatacagacatggtgcgaagagtctactgagctagttagtagtcctccggcccctgaatgcggctaatcccaactgcggagcacacgcccacaaaccagcgggtagtgtgtcgtaacgggcaactctgcagcggaaccgactactttgggtgtccgtgtttccttttatctttatattggctgcttatggtgacaattaaagaattgttaccatatagctattggattggccatccggtgtgtaacagagcgatcatttacctgtttattggttttgtaccattaactttgaattctgtgaccacccttaattacatcttgactcttaacacagctaaac

SEQ ID NO: 19102 - DNA, 742 bp, synthetic construct
  source 1..742: mol_type = other DNA
ttaaaacagcctgtgggttgcacccactcacagggcctactgggcgcgagcactctggtatcttggtacctttgtgcgcctgttttatacccccctcccaacgaaacttagaagcagcaaaccacgatcaatagtaggcataacgctccagttatgtcttgatcaagcacttctgtttccccggactgagtatcaatagactgctcgcgcggttgaaggagaaaacgttcgttatccggctagctacttcggaaaacctagtaacatcatgaaagttgcagagagcttcgttcagcactcccccagtgtagatcaggtcgatgagtcaccgcattccccacgggcgaccgtggcggtggctgcgttggcggcctgcccatggggtaacccatggggcgctctaatacagacatggtgtgaagagtctactgagctagctagtagtcctccggcccctgaatgcggctaatcccaactgcggagcacacgcccacaagccagcgggtagtgtgtcgtaacgggtaactctgcagcggaaccgactactttgggtgtccgtgtttccttttatctttatattggctgcttatggtgacaattaaagaattgttaccatatagctattggattggccatccggtgtgcaacagagcaattatttacctatttattggttttgtaccattgactttgaattctgtgaccacccttaattatattttgacccttaacacagctaaac

SEQ ID NO: 19103 - DNA, 742 bp, synthetic construct
  source 1..742: mol_type = other DNA
ttaaaacagcctgtgggttgcacccactcacagggcccactgggcgcaagcactctggtacttcggtacctttgtgcgcctgttttacaacccccccccagtgaaacttagaagcagcaaaccacgatcaatagcaggcataacgctccagttatgtcttgatcaagcacttctgtttccccggaccgagtatcaatagactgctcgcgcggttgaaggagaaaacgttcgtcatccggctaactacttcgggaaacctagtaacaccatgaaagttgcggagagcttcgttcagcactcccccagtgtagatcaggtcgatgagtcaccgcattccccacgggcgaccgtggcggtggctgcgttggcggcctgcccatggggcaacccatggggcgctctaatacggacatggtgcgaagagtctactgagctagttagtagtcctccggcccctgaatgcggcaaatcctaactgcggagcacacgcccacaaaccagcgggtagtgtgtcgtaacgggcaactctgcagcggaaccgactactttgggtgtccgtgtttccttttatctttatattggctgcttatggtgacaattaaagagttgttaccatatagctattggattggccatccggtgtgcaacagagcaattgtttacctatttattggttttgtgccattaaccttgaagtctgtgattacccttaattatatcttgaccctcaacacagttaaac

SEQ ID NO: 19104 - DNA, 742 bp, synthetic construct
  source 1..742: mol_type = other DNA
ttaaaacagcctgtgggttgcacccactcacagggcccattgggcgcaagcactctggtatcttggtacctttgtgcgcctgttttatacccctcccctattgtaacttagaagcagtaaaccacgatcaatagcaggcataacgctccagttatgtctcgatcaagcacttctgtttccccggactgagtatcaatagactgctcgcgcggttgaaggagaaaacgttcgttatccggctagctacttcggaaaacctagtaacaccatgaaagttgcggagagcttcgttcagcactcccccagtgtagatcaggtcgatgagtcaccgcattccccacgggcgaccgtggcggtggctgcgttggcggcctgcccatggggcaacccatggggcgctctaatacggacatggtgcgaagagtctactgagctagttagtagtcctccggcccctgaatgcggctaatcctaactgcggagcacacgcccacaaaccagcgggtagtgtgtcgtaacgggcaactctgcagcggaaccgactactttgggtgtccgtgtttccttttatctttatattggctgcttatggtgacaattaaagaattgttaccatatagctattggattggccatccggtgtgcaacagagcaattgtttacctatttattggttttgtgccattaaccttgaagtctgtgactacccttaattatatcttgaccctcaacacagctaaat

SEQ ID NO: 19105 - DNA, 734 bp, synthetic construct
  source 1..734: mol_type = other DNA
ctgtgggttgtacccacccacagggcccactgggcgctagcactctggcactaaggtacctttgtgcgcctgtttttacttcccttccccaaagtaacttagaagttgtgtaccaacgatcaacagcaggtgtgacacaccagtcatatcttgatcaagcacttctgtttccccggaccgagtatcaataggctgctcgcgcggctgaaggagaaaacgttcgttacccgaccaactacttcgagaagcttagtaccaccatgaacgaggcagagtgtttcgctcagcacaaccccagtgtagatcaggctgatgagtcactgcaatccccatgggcgaccatggcagtggctgcgttggcggcctgcccatggagaaatccatgggacgctctaattctgacatggtgtgaagagcctattgagctagctggtagtcctccggcccctgaatgcggctaatcctaactgcggagcacatgcccacaaaccagtgggtggtgtgtcgtaacgggcaactctgcagcggaaccgactactttgggtgtccgtgtttccttttatacttatgttggctgcttatggtgacaatcagagaattgttaccatatagctattggattggccacccggtgtgtaacagagcaattgtttacctattcattggttttgtaccactatcattgaagtctgtgaccactctcgaattcaccttgaccctcaactcaatcaaac

SEQ ID NO: 19106 - DNA, 746 bp, synthetic construct
  source 1..746: mol_type = other DNA
ttaaaacagcctgcgggttgcacccactcacagggcccactgggcgccagcactctggtaccacggtacctttgtgcgcctgttttatctccccaagcccccgtaacgctacattagaagatgaacaatgcgaccgacagccagtggggcaacccagccccactatggtcaagcacctctgttttcccgggcttagtaccaataggctgcttgcgcggctgaaggggaacgcgcccgttatccggctaactacttcgagaaacctagtaccaccatggaagttgcagagtgtttcgctcagcacaaccccagtgtagatcaggtcgatgagtcaccgtacaccccacgggcgaccgtgacggtggctgcgttggcggcctgcccatggtgcacaccatgggacgctctaatacagacatggtgcgaagagtctattgagctagttagtagtcctccggcccctgaatgcggctaatcctaactgcggagcatgtgctctcaacccagagagtagcgtgtcgtaacgggcaactctgcagcggaaccgactactttgggtgtccgtgtttccttttattcttatattggctgcttatggtgacaattgagaaattgttaccatatagctattggattggccatccggtgtgtaatagagccattgtatattcttttattggctttgtgccattagattatactgcttttgctactttaaggtacatcttgcttctgaacacagcaaa

SEQ ID NO: 19107 - DNA, 741 bp, synthetic construct
  source 1..741: mol_type = other DNA
ttaaaacagctgtgggttgtacccactcacagggcctactgggcgcgagcactctggtacctcggtacctttgtgcgcctgttttacaccccctccccagtgaaacttagaagcaacaaaccacgatcaatagcaggcataacgctccagttatgtcttgatcaagcacttctgtttccccggactgagtatcaatagactgctcgcgcggttgaaggagaaaacgttcgttatccggctagctacttcggaaaacctagtaacaccatgaaagttgcggagagcttcgttcagcactcccccagtgtagatcaggtcgatgagtcaccgcattccccacgggcgaccgtggcggtggctgcgttggcggcctgcccatggggtaacccatggggcgctctaatacggacatggtgtgaagagtctactgagctagttagtagtcctccggcccctgaatgcggctaatcccaactgcggagcacacgcccacaagccagcgggtagtgtgtcgtaacgggtaactctgcagcggaaccgactactttgggtgtccgtgtttccttttatttttatattggctgcttatggtgacaattaaagaattgttaccatatagctattggattggccatccggtgtgcaacagagcaattgtttacctatttgttggttttgtaccattaaccttgaagtctgtgaccaccctcaattatatcttaacccttaacacagccaaac

SEQ ID NO: 19108 - DNA, 741 bp, synthetic construct
  source 1..741: mol_type = other DNA
ttaaaacagcctgtgggttgcacccactcacagggcccactgggcgcaagcactctggtacctcggtacctttgtgcgcctgttttataaccccccccagtgaaacttagaagcagcaaaccacgatcaatagcaggcataacgctccagttatgtcttgatcaagcacttctgtttccccggactgagtatcaatagactgctcgcgcggttgaaggagaaaacgttcgttatccggctaactacttcgggaaacctagtagcgccatgaaagttgcggagagcttcgttcagcactcccccagtgtagatcaggtcgatgagtcaccgcattccccacgggcgaccgtggcggtggctgcgttggcggcctgcccatggggtaacccatggggcgctctaatacggacatggtgcgaagagtctactgagctagttagtagtcctccggcccctgaatgcggctaatcccaactgcggagcacacgcccacaagccagtgggtagtgtgtcgtaacgggcaactctgcagcggaaccgactactttgggtgcccgtgtttccttttatctttatattggctgcttatggtgacaattaaagagttgttaccatatagctattggattggccatccggtgtgcaacagagcaattgtttacctatttattggttttgtaccattaaccttgaagtctgtgaccacccttaattatatcttgaccctcaacacagttaaac

SEQ ID NO: 19109 - DNA, 741 bp, synthetic construct
  source 1..741: mol_type = other DNA
ttaaaacagcctgtgggttgcacccactcacagggcccactgggcgcaagcactctggtacctcggtacctttgtgcgcctgttttataaccccccccagtgaaacttagaagcagcaaaccacgatcaatagcaggcataacgctccagttatgtcttgatcaagcacttctgtttccccggactgagtatcaatagactgctcgcgcggttgaaggagaaaacgttcgttatccggctaactacttcgggaaacctagtagcatcatgaaagttgcggagagcttcgttcagcactcccccagtgtagatcaggtcgatgagtcaccgcattccccacgggcgaccgtggcggtggctgcgttggcggcctgcccatggggtaacccatggggcgctctaatacggacatggtgcgaagagtctactgagctagttagtagtcctccggcccctgaatgcggctaatcccaactgcggagcacacgcccacaagccagcgggtagtgtgtcgtaacgggcaactctgcagcggaaccgactactttgggtgtccgtgtttctttttatctttatattggctgcttatggtgacaattaaagagttgttaccatatagctattggattggccatccggtgtgcaacagagcaattgtttacctatttattggttttgtaccattaaccttgaaatctgtgaccacccttaattatatcttgaccctcaatacagctaaac

SEQ ID NO: 19110 - DNA, 741 bp, synthetic construct
  source 1..741: mol_type = other DNA
ttaaaacagctgtgggttgcacccactcacagggcctactgggcgcaagcactctggtatctcggtacctttgtgcgcctgttttacaccccctccccagtgaaacttagaagcagcaaaccacgatcaatagcaggcataacgctccagttatgtcttgatcaagcacttctgtttccccggactgagtatcaatagactgctcgcgcggttgaaggagaaaacgttcgttatccgactagctacttcggaaaacctagtaacaccatgaaagttgcggagagcttcgttcagcactcccccagtgtagatcaggtcgatgagtcaccgcattccccacgggcgaccgtggcggtggctgcgttggcggcctgcccatggggtaacccatggggcgctctaatacggacatggtgtgaagagtctactgagctagttagtagtcctccggcccctgaatgcggctaatcccaactgcggagcacacgcccacaagccagcgggtagtgtgtcgtaacgggtaactctgcagcggaaccgactactttgggtgtccgtgtttccttttatctttacattggctgcttatggtgacaattaaagagttgttaccatatagctattggattggccatccggtgtgcaacagagcaattgtttacctatttattggttttgtaccattaaccttgaattctgtgaccacccttaattatatcttgacccttaacacagctaaac

SEQ ID NO: 19111 - DNA, 741 bp, synthetic construct
  source 1..741: mol_type = other DNA
ttaaaacagctgtgggttgtacccactcacagggcccactgggcgcaagcactctggtacctcggtacctttgtgcgcctgttttataacccccccccagtgaaacttagaagcagcaaaccacgatcaatagcaggcataacgctccagttatgtcttgatcaagcacttctgtttccccggactgagtatcaatagactgctcgcgcggttgaaggagaaaacgttcgttatccggctaactacttcgggaaacctagtagcatcatgaaagttgcggagggcttcgttcagcactcccccagtgtagatcaggtcgatgagtcaccgcattccccacgggcgaccgtggcggtggctgcgttggcggcctgcccatggggtaacccatggggcgctctaatacggacatggtgcgaagagtctactgagctagttagtagtcctccggcccctgaatgcggctaatcccaactgcggagcacacgcccacaagccagcgggtagtgtgtcgtaacgggcaactctgcagcggaaccgactactttgggtgtccgtgtttctttttatctttatattggctgcttatggtgacaattaaagagttgttaccatatagctattggattggccatccggtgtgcaacagagcaattgtttacctatttattggttttgtaccattaaccttgaaatctgtgaccacccttaattatatcttgaccctcaacacagctaaac

SEQ ID NO: 19112 - DNA, 741 bp, synthetic construct
  source 1..741: mol_type = other DNA
ttaaaacagcctgtgggttgcacccactcacagggcccactgggcgcaagcactctggtacctcggtacctttgtgcgcctgttttatacccccccccagtgaaacttagaagcagcaaaccacgatcaatagcaggcataacgctccagttatgtcttgatcaagcacttctgtttccccggactgagtatcaatagactgctcgcgcggttgaaggagaaaacgttcgttatccggctaaccacttcggaaaacctagtagcaccatgaaagttgcggagagcttcgttcagcacttccccagtgtagatcaggttgatgagtcaccgcattccccacgggcgaccgtggcggtggctgcgttggcggcctgcccatggggtaacccatggggcgctctaatacggacatggtgcgaagagtctactgagctggttagtagtcctccggcccctgaatgcggctaatcccaactgcggagcacacgcccacaagccagcgggtggtgtgtcgtaacgggcaactctgcagcggaaccgactactttgggtgtccgtgtttccttttatctttatattggctgcttatggtgacaattaaagagttgttaccatatagctattggattggccatccggtgtgcaatagagcaattgtttacctatttattggttttgtaccattaaccttgaagtctgtggccacccttaattatatcttgaccctcaacacagctaaac

SEQ ID NO: 19113 - DNA, 741 bp, synthetic construct
  source 1..741: mol_type = other DNA
ttaaaacagcctgtgggttgcacccactcacagggcctactgggcgcaagcactctggtacctcggtacctttgtgcgcctgttttatacccccccccagtgaaacttagaagcagcaaaccacgatcaatagcaggcataacgctccagttatgtcttgatcaagcacttctgtttccccggactgagtatcaatagactgctcgcgcggttgaaggagaaaacgttcgttatccggctagctacttcggaaaacctagtaacaccatgaaagttgcggagagcttcgttcagcactcccccagtgtagatcaggtcgatgagtcaccgcattccccacgggcgaccgtggcggtggctgcgttggcggcctgcccatggggtaacccatggggcgctctaatacggacatggtgtgaagagtctactgagctagttagtagtcctccggcccctgaatgcggctaatcccaactgcggagcacacgcccacaagccagcgggtagtgtgtcgtaacgggtaactctgcagcggaaccgactactttgggtgtccgtgtttccttttatctttatattggctgcttatggtgacaattaaagaattgttaccatatagctattggattggccatccggtgtgcaacagagcaattatttacctatttattggttttgtaccattaaccttgaattctgtgaccacccttaattatatcttgaccctcaacacagctaaac

SEQ ID NO: 19114 - DNA, 741 bp, synthetic construct
  source 1..741: mol_type = other DNA
ttaaaacagcctgtgggttgcacccactcacagggcccactgggcgcaagcactctggtacctcggtacctttgtgcgcctgttttatacccccccccagtgaaacttagaagcagcaaaccacgatcaatagcaggcataacgctccagttatgtcttgatcaagcacttctgtttccccggaccgagtatcaatagactgctcgcgcggttgaaggagaaaacgttcgttatccggctagctacttcgggaaacctagtaacaccatgaaagttgcggagagcttcgttcagcactcccccagtgtagatcaggtcgatgagtcaccgcattccccacgggcgaccgtggcggtggctgcgttggcggcctgcccatggggtaacccatggggcgctctaatacggacatggtgtgaagagtctactgagctagttagtagtcctccggcccctgaatgcggctaatcccaactgcggagcacacgcccacaagccagcgggtagtgtgtcgtaacgggcaactctgcagcggaaccgactactttgggtgtccgtgtttccttttatctttatattggctgcttatggtgacaattaaagaattgttaccatatagctattggattggccatccggtgtgcaacagagcaattgtttacctatttattggttttgtaccattaaccttgaagactgtgaccacccttaattatatcttgacccttaacacagctaaac

SEQ ID NO: 19115 - DNA, 741 bp, synthetic construct
  source 1..741: mol_type = other DNA
ttaaaacagcctgtgggttgcacccactcacagggcctactgggcgcaagcactctggtatcttggtacctttgtgcgcctgttttatacccccccccagtgaaacttagaagcagcaaaccacgatcaatagcaggcataacgctccagttatgtcttgatcaagcacttctgtttccccggactgagtatcaatagactgctcgcgcggttgaaggagaaaacgttcgttacccggctagctacttcggaaaacttagtaacaccatgaaagttgcggagagcttcgttcagcactcccccggtgtagatcaggtcgatgagtcaccgcattccccacgggcgaccgtggcggtggctgcgttggcggcctgcccatggggtaacccatggggcgctctaatacagacatggtgtgaagagtctactgagctagttagtagtcctccggcccctgaatgcggctaatcccaactgcggagcacacgcccacaagccagcgggtagtgtgtcgtaacgggtaactctgcagcggaaccgactactttgggtgtccgtgtttccttttatctttatattggctgcttatggtgacaattaaagaattgttaccatatagctattggattggccatccggtgtgcaacagagcaattatttacctatttattggttttgtaccattaactttgaattctgtgaccacccttaattatatcttgacccttaacacagctaaac

SEQ ID NO: 19116 - DNA, 742 bp, synthetic construct
  source 1..742: mol_type = other DNA
tttaaaacagcctgtgggttgtccccacccacagggcccactgggcgttagcactctggtattacggtacctttgtgcgcctgttttataacccctccccaactgtaaattagaagcaacacacgtcgatcaatagtaggcgtgacgcaccagtcacgtcttgatcaaggacttctgttgccccggaccgagtatcaatagactgctcacgcggttgaaggagaaaacgttcgttacccgaccaactacttcgaaaaacctagtagcaccatgaaggttgcggagtgtttcgctcggcacttccccagtgtagatcaggtcgatgagtcaccgcattccccacgggcgaccgtggcggtggctgcgctggcggcctgcctatggggtaacccataggacgctctaatacggacatggtgcgaagagtctattgagctagttggtagtcctccggcccctgaatgcggctaatcctaactgcggagcgcgcgcccccattccaggaggtagcgcgtcgtaacgggcaactctgcagcggaaccgactactttgggtgtccgtgtttccttttatctttattctggctgcttatggtgacaattgacagattgttaccatatagctattggattggccatccgatcacaagcagagcgattatctaccaatttattggatttatcccactgcacactcgtgaatataacacattactgctgatactgagtttggacaaagcaaa

SEQ ID NO: 19117 - DNA, 741 bp, synthetic construct
  source 1..741: mol_type = other DNA
ttaaaacagcctgtgggttgcacccactcacagggcctactgggcgcaagcactctggtatcttggtacctttgtgcgcctgttttatacccccccccagtgaaacttagaagcagcaaaccacgatcaatagcaggcataacgctccagttatgtcttgatcaagcacttctgtttccccggactgagtatcaatagactgctcgcgcggttgaaggagaaaacgttcgttatccggctaactacttcggaaaacctagtaacaccatgaaagttgcggagagcttcgttcagcactcccccagtgtagatcaggtcgatgagtcaccgcattccccacgggcgaccgtggcggtggctgcgttggcggcctgcccatggggtaacccatggggcgctctaatacagacatggtgtgaagagtctactgagctagttagtagtcctccggcccctgaatgcggctaatcccaactgcggagcacacgcccacaagccagcgggtagtgtgtcgtaacgggtaactctgcagcggaaccgactactttgggtgtccgtgtttccttttatctttgtattggctgcttatggtgacaattaaagaattgttaccatatagctattggattggccatccggtgtgcaacagagcaattatttacctatttattggttttgtaccattaactttgaattctgtgaccacccttaattatatcttaacccttaacacagctgaac

SEQ ID NO: 19118 - DNA, 741 bp, synthetic construct
  source 1..741: mol_type = other DNA
ttaaaacagcctgtgggttgcacccactcacagggcctactgggcgcaagcactctggtatcttggtacctttgtgcgcctgttttatacccccccccagtgaaacttagaagcagcaaaccacgatcaatagcaggcataacgctccagttatgtcttgatcaagcacttctgtttccccggactgagtatcaatagactgctcacgcggttgaaggagaaaacgttcgttatccggctaactacttcggaaaacctagtaacaccatgaaagttgcggagagcttcgttcagcactcccccagtgtagatcaggtcgatgagtcaccgcattccccacgggcgaccgtggcggtggctgcgttggcggcctgcccatggggtaacccatggggcgctctaatacagacatggtgtgaagagtctactgagctagttagtagtcctccggcccctgaatgcggctaatcccaactgcggagcacacgcccacaagccagcgggtagtgtgtcgtaacgggtaactctgcagcggaaccgactactttgggtgtccgtgtttccttttatctttgtattggctgcttatggtgacaattaaagaattgttaccatatagctattggattggccatccggtgtgcaacagagcaattatctacctatttattggttttgtaccattaactttgaattctgtgaccacccttaattatatcttaacccttaacacagctaaac

SEQ ID NO: 19119 - DNA, 741 bp, synthetic construct
  source 1..741: mol_type = other DNA
ttaaaacagcctgtgggttgcacccactcacagggcccactgggcgcaagcactctggtacctcggtacctttgtgcgcctgttttatacccccccccagtgaaacttagaagcagcaaaccacgatcaatagcaggcataacgctccagttatgtcttgatcaagcacttctgtttccccggactgagtatcaatagactgctcgcgcggttgaaggagaaaacgttcgtcatccggctagctacttcggaaaacctagtaacaccatgaaagttgcggagagcttcgttcagcactcccccagtgtagatcaggtcgatgagtcaccgcattccccacgggcgaccgtggcggtggctgcgttggcggcctgcccatggggtaacccatggggcgctctaatacggacatggtgtgaagagtcaactgagctagttagtagtcctccggcccctgaatgcggctaatcccaactgcggagcacacgcccacaagccagtgggtagtgtgtcgtaacgggtaactctgcagcggaaccgactactttgggtgtccgtgtttccttttatctttatattggctgcttatggtgacaattaaagaattgttaccatatagctattggattggccatccggtgtgcaacagagcaattatttacctatttattggttttgtaccattaaccttgaattctgtgaccacccttaattatatcttgacccttaacacagctaaac

SEQ ID NO: 19120 - DNA, 741 bp, synthetic construct
  source 1..741: mol_type = other DNA
ttaaaacagcctgtgggttgcacccactcacagggcctactgggcgcaagcactctggtatcttggtacctttgtgcgcctgttttatacccccccccagtgaaacttagaagcagcaaaccacgatcaatagcaggcataacgctccagttatgtcttgatcaagcacttctgtttccccggactgagtatcaatagactgctcgcgcggttgaaggagaaaacgttcgttatccggctaactacttcggaaaacctagtaacaccatgaaagttgcggagagcttcgttcagcactcccccagtgtagatcaggtcgatgagtcaccgcattccccacgggcgaccgtggcggtggctgcgttggcggcctgcccatggggtaacccatggggcgctctaatacagacatggtgtgaagagtctactgagctagttagtagtcctccggcccctgaatgcggctaatcccaactgcggagcacacgcccacaagccagcgggtagtgtgtcgtaacgggtaactctgcagcggaaccgactactttgggtgtccgtgtttccttttacctttatattggctgcttatggtgacaattaaagaattgttaccatatagctattggattggccatccggtgtgcaacagagcaattatttacctatttattggttttgtaccattaactttgaattctgtgaccacccttaattatatcctgacccttaacacagctaaac

SEQ ID NO: 19121 - DNA, 741 bp, synthetic construct
  source 1..741: mol_type = other DNA
ttaaaacgcctgtgggttgcacccactcacagggcctactgggcgcaagcactctggtacctcggtacctttgtgcgcctgttttataccccccccctagtgaaacttagaagcagcaaaccacgatcaatagcaggcataacgctccagttatgtcttgatcaagcacttctgtttccccggactgagtatcaatagactgctcgcgcggttgaaggagaaaacgttcgttatccggctaactacttcggaaaacctagtaacaccatgaaagttgcggagagcttcgttcagcactcccccagtgtagatcaggtcgatgagtcaccgcattccccacgggcgaccgtggcggtggctgcgttggcggcctgcccatggggtaacccatggggcgctctaatacggacatggtgtgaagagtctactgagctagttggtagtcctccggcccctgaatgcggctaatcccaactgcggagcacacgcccacaagccagcgggtagtgtgtcgtaacgggtaactctgcagcggaaccgactactttgggtgtccgtgtttccttttatctttatattggctgcttatggtgacaattaaagaattgttaccatatagctattggattggccatccggtgtgcaacagagcaattatttacctatttattggttttgtaccattaaccttgaattctgtgaccacccttaattatatcttgacccttaacacagctaaac

SEQ ID NO: 19122 - DNA, 741 bp, synthetic construct
  source 1..741: mol_type = other DNA
ttaaaacagcctgtgggttgcacccactcacagggcccactgggcgcaagcactctggtacctcggtacctttgtgcgcctgttttacacccccccccagtgaaacttagaagcagcaaaccacgatcaatagcaggcataacgctccagttatgtcttgatcaagcacttctgtctccccggaccgagtatcaatagactgctcacgcggttgaaggagaaaacgttcgttatccggctagctacttcgggaaacctagtaacaccatgaaagttgcggagagcttcgttcagcactcccccagtgtagatcaggtcgatgagtcaccgcattccccacgggcgaccgtggcggtggctgcgttggcggcctgcccatggggtaacccatggggcgctctaatacggacatggtgtgaagagtctactgagctagttagtagtcctccggcccctgaatgcggctaatcctaactgcggagcacacgcccacaagccagcgggtagtgtgtcgtaacgggtaactctgcagcggaaccgactactttgggtgtccgtgtttccttttatctttatattggctgcttatggtgacaattaaagaattgttaccatatagctattggattggccatccggtgtgcaacagagcaattgtttacctatttattggatttgtaccattaaccttgaagtctgtgactacccttaattatatcttgatccttaacacagctaaac

SEQ ID NO: 19123 - DNA, 741 bp, synthetic construct
  source 1..741: mol_type = other DNA
ttaaaacagcctgtgggttgcacccactcacagggcctactgggcgcaagcactctggtatctcggtacctttgtgcgcctgttttatacccccccccagtgaaacttagaagcagcaaactacgatcaatagcaggcataacgctccagttatgtcttgatcaagcacttctgtttccccggactgagtatcaatagactgctcgcgcggttgaaggagaaaacgttcgttatccggctagctacttcggaaaacctagtaacaccatgaaagttgcggagagcttcgttcagcactcccccagtgtagatcaggtcgatgagtcaccgcattccccacgggcgaccgtggcggtggctgcgttggcggcctgcccatggggtaacccatggggcgctctaatacggacatggtgtgaagagtctactgagctagttagtagtcctccggcccctgaatgcggctaatcctaactgcggagcacacgcccacaagccagcgggtagtgtgtcgtaacgggcaactctgcagcggaaccgactactttgggtgtccgtgtttccttttatctttatattggctgcttatggtgacaattaaagaattgttaccatatagctattggattggccatccggtgtgcaacagagcaattgtttacctattcattggttttgtaccattaaccttgaattctgtgaccacccttaattatatcttgacccttaacacagctaaac

SEQ ID NO: 19124 - DNA, 741 bp, synthetic construct
  source 1..741: mol_type = other DNA
ttaaaacagcctgtgggttgcacccactcacagggcctactgggcgcaagcactctggtacctcggtacctttgtgcgcctgttttatacccccccccagtgaaacttagaagcagcaaaccacgatcaatagcaggcatagcgctccagttatgtcttgatcaagcacttctgtttccccggactgagtatcaatagactgctcgcgcggttgaaggagaaaacgttcgttatccggctaactacttcggaaaacctagtaacaccatgaaagttgcggagagcttcgttcagcactcccccagtgtagatcaggtcgatgagtcaccgcattccccacgggcgaccgtggcggtggctgcgttggcggcctgcccatggggtaacccatggggcgctctaatacggacatggtgtgaagagtctactgagctagttggtagtcctccggcccctgaatgcggctaatcccaactgcggagcacacgctcacaagccagcgggtagtgtgtcgtaacgggtaactctgcagcggaaccgactactttgggtgtccgtgtttccttttatctttatattggctgcttatggtgacaattaaagaattgttaccatatagctattggattggccatccggtgtgcaacagagcaattatttacctatttattggttttgtaccattaaccttgaattctgtgaccacccttaattatatcttgacccttaacacagctaaac

SEQ ID NO: 19125 - DNA, 741 bp, synthetic construct
  source 1..741: mol_type = other DNA
ttaaaacagcctgtgggttgcacccactcacagggcctactgggcgcaagcactctggtacttcggtacctttgtgcgcctgttttacacccccccccagtgaaacttagaagcagcaaaccacgatcaatagcaggcatagcgctccagttatgtcttgatcaagcactcctgtttccccggactgagtatcaatagactgctcgcgcggttgaaggagaaaacgttcgttacccggccaactacttcggaaaacctagtaacaccatgaaagttgcggagagtttcgttcagcactcccccagtgtagatcaggtcgatgagtcaccgcattccccacgggcgaccgtggcggtggctgcgttggcggcctgcccatggggtaacccatggggcgctctaatacggacatggtgtgaagagtctactgagctagttggtagtcctccggcccctgaatgcggctaatcccaactgcggagcacacgcccacaagccagcgggtagtgtgtcgtaatgggtaactctgcagcggaaccgactactttgggtgtccgtgtttccttttatctttatattggctgcttatggtgacaattagagaattgttaccatatagctattggattggccatccggtgtgcaacagagcaattatttacctgtttattggttttgtaccattaactttgacttctgtgaccacccttaattatatcttgacccttaatacagctaaac

SEQ ID NO: 19126 - DNA, 741 bp, synthetic construct
  source 1..741: mol_type = other DNA
ttaaaacagcctgtgggttgcacccactcacagggcctactgggcgcaagcactctggtacttcggtacctttgtgcgcctgttttacacccccccccagtgaaacttagaagcagcaaaccacgatcaatagcaggcatagcgctccagttatgtcttgatcaagcactcctgtttccccggactgagtatcaatagactgctcgcgcggttgaaggagaaaacgttcgttacccggccaactacttcggaaaacctagtaacaccatgaaagttgcggagagtttcgttcagcactcccccagtgtagatcaggtcgatgagtcaccgcattccccacgggcgaccgtggcggtggctgcgttggcggcctgcccatggggtaacccatggggcgctctaatacggacatggtgtgaagagtctactgagctagttggtagtcctccggcccctgaatgcggctaatcccaactgcggagcacacgcccacaagccagcgggtagtgtgtcgtaatgggtaactctgcagcggaaccgactactttgggtgtccgtgtttccttttatctttatattggctgcttatggtgacaattagagaattgttaccatatagctattggattggccatccggtgtgcaacagagcaattatttacctatttattggttttgtaccattaaccttgaattctgtgaccacccttaattatatcttgacccttaacacagctaaac

SEQ ID NO: 19127 - DNA, 741 bp, synthetic construct
  source 1..741: mol_type = other DNA
ttaaaacagcctgtgggttgcacccactcacagggcctactgggcgcaagcactctggtatcttggtacctttgtgcgcctgttttatgcccccccccagtgaaacttagaagcagcaaaccacgatcaatagcaggcataacgctccagttatgtcttgatcaagcacttctgtttccccggactgagtatcaatagactgctcacgcggttgaaggagaaaacgttcgttatccggctaactacttcggaaaacctagtaacaccatgaaagttgcggagagcttcgttcagcactcccccagtgtagatcaggtcgatgagtcaccgcattccccacgggcgaccgtggcggtggctgcgttggcggcctgcccatggggtgacccatggggcgctctaatacagacatggtgtgaagagtctactgagctagttagtagtcctccggcccctgaatgcggctaatcccaactgcggagcacacgcccacaagccagcgggtagtgtgtcgtaacgggtaactctgcagcggaaccgactactttgggtgtccgtgtttccttttacctttatattggctgcttatggtgacaattaaagaattgttaccatatagctattggattggccatccagtgtgcaacagagcaattatttacctatttattggttttgtaccattaactttgaattctgtgaccacccttaattatatcctgacccttaacacagctaaat

SEQ ID NO: 19128 - DNA, 741 bp, synthetic construct
  source 1..741: mol_type = other DNA
ttaaaacagcctgtgggttgcacccactcacagggcccactgggcgtaagcactctggtatcttggtacctttgtgcgcctgttttatacccccccctattgtaatttagaagcactaaaccacgatcaatagcaggcataacgctccagttatgtctcgatcaagcacttctgtttccccggactgagtatcaatagactgctcacgcggttgaaggagaaaacgttcgttatccggctagctacttcggaaagcctagtaacaccatgaaagttgcggagagcttcgttcagcactcccccagtgtagatcaggtcgatgagtcaccgcattccccacgggcgaccgtggcggtggctgcgttggcggcctgcccatggggtaacccatggggcgctctaatacagacatggtgtgaagagcctactgagctagttagtagtcctccggcccctgaatgcggctaatcccaactgcggagcacacgcccacaagccagcgggtagtgtgtcgtaacgggtaactctgcagcggaaccgactactttgggtgtccgtgtttccttttatctttatattggctgcttatggtgacaattaaagaattgttaccatatagctattggattggccatccggtgtgcagcagagcaatcatttacctatttgttggttttgtaccattaactttgaattctgtgaccactcttaattatatcttgacccttaacacagccaaac

SEQ ID NO: 19129 - DNA, 741 bp, synthetic construct
  source 1..741: mol_type = other DNA
ttaaaacagcctgtgggttgcacccactcacagggcctactgggcgcaagcactctggtatcttggtacctttgtgcgcctgttttatgcccccccccagtgaaacttagaagcagcaaaccacgatcaatagcaggcataacgctccagttatgtcttgatcaagcacttctgtttccccggactgagtatcaatagactgctcgcgcggttgaaggagaaaacgttcgttatccggctaactacttcggaaaacctagtaacaccatgaaagttgcggagagcttcgttcagcactcccccagtgtagatcaggtcgatgagtcaccgcattccccacgggcgaccgtggcggtggctgcgttggcggcctgcccatggggtaacccatggggcgctctaatacagacatggtgtgaagagtctactgagctagttagtagtcctccggcccctgaatgcggctaatcccaactgcggagcacacgcccacaagccagcgggtagtgtgtcgtaacgggtaactctgcagcggaaccgactactttgggtgtccgtgtttccttttatctttgtattggctgcttatggtgacaattaaagaattgttaccatatagctattggattggccatccggtgtgcaacagagcaattatttacttatttattggttttgtaccattaactttggattctgtgaccacccttaattatatcctgacccttaacacagctaaac

SEQ ID NO: 19130 - DNA, 741 bp, synthetic construct
  source 1..741: mol_type = other DNA
ttaaaacgcctgtgggttgcacccactcacaggggccactgggcgcaagcactctggtacctcggtacctttgtgcgcctgttttataccccctccccagtgaaacttagaagcagcaaaccacgatcaatagcaggcataacgctccagttatgtcttgatcaagcacttctgtttccccggactgagtatcaatagactgctcgcgcggttgaaggagaaaacgttcgttatccggctagctacttcggaaaacctagtaacaccatgaaagttgcggagagcttcgttcagcactcccccagtgtagatcaggtcgatgagtcaccgcattccccacgggcgaccgtggcggtggctgcgttggcggcctgcccatggggtaacccatggggcgctctaatacggacatggtgtgaagagtctactgagctagttagtagtcctccggcccctgaatgcggctaatcccaactgcggagcacacgcccacaagccagcgggtagtgtgtcgtaacgggtaactctgcagcggaaccgactactttgggtgtccgtgtttccttttatctttatattggctgcttatggtgacaattaaagaattgttaccatatagctattgggttggccatccggtgtgcatcagagcaatcatttacctatttattggttttgtaccattaaccttggattctgtgaccacccttaattatatcttgacccttaacgcagttaaac

SEQ ID NO: 19131 - DNA, 740 bp, synthetic construct
  source 1..740: mol_type = other DNA
ttaaaacagctgtgggttgcacccactcacagggcctactgggcgcgagcactctggtacctcggtacctttgtgcgcctgttttacacccccccccagtggaacttagaagcagcaaaccacgatcaatagcaggcataacgctccagttgtgtcttgatcaagcacttctgtttccccggaccgagtatcaatagactgctcgcgcggttgaaggagaaaacgttcgttatccggctagctacttcgggaaacctagtaacaccatgaaagttgcggagagcttcgttcagcactcccccagtgtagatcaggtcgatgagtcaccgcattccccacgggcgaccgtggcggtggctgcgttggcggcctgcccatggggtaacccatggggcgctctgatacggacatggtgtgaagagtctactgagctagttagtagtcctccggcccctgaatgcggctaatcccaactgcggagcacacgcccacaagccagcgggtagtgtgtcgtaacgggtaactctgcagcggaaccgactactttgggtgtccgtgtttccttttatctttatattggctgcttatggtgacaattaaagaattgttaccatatagctattggattggccatccagtgtgtaacagagcaattatttacctatttattggttttgtaccattaaccttgaagtctgtgaccacccttaattatatcttgacccttaacacagctaaac

SEQ ID NO: 19132 - DNA, 740 bp, synthetic construct
  source 1..740: mol_type = other DNA
ttaaaacagctgtgggttgcacccactcacagggcctactgggcgcaagcactctggtatctcggtacctttgtgcgcctgttttatacccccccccagtgaaacttagaagcagcaaaccacgatcaatagcaggcataacgctccagttatgtcttgatcaagcacttctgtttccccggactgagtatcaatagactgctcgcgcggttgaaggagaaaacgttcgttacccgactagctacttcggaaagcctagtaacaccatgaaagttgcggagggcttcgttcagcactcccccagtgtagatcaggtcgatgagtcaccgcattccccacgggcgaccgtggcggtggctgcgttggcggcctgcccatggggtaacccatggggcgctctaatacggacatggtgtgaagagtctactgagctagttagtagtcctccggcccctgaatgcggctaatcccaactgcggagcacacgcccacaagccagcgggtagtgtgtcgtaatgggtaactctgcagcggaaccgactactttgggtgtccgtgtttccttttatctttatattggctgcttatggtgacaattaaagaattgttaccatatagctattggattggccatccggtgtgcaacagagcaattatttacctatccattggttttgtaccattaaccttgaattctgtaaccacccttaattatatctcgacccttaacacagctaaac

SEQ ID NO: 19133 - DNA, 742 bp, synthetic construct
  source 1..742: mol_type = other DNA
tttaaaacagcctgtgggttgtccccacccacagggcccactgggcgttagcactctggtattacggtacctttgtgcgcctgttttataacccctccccaactgtaaattagaagcaacacacgtcgatcaatagtaggcgtgacgcaccagtcacgtcttgatcaagcacttctgtttccccggaccgagtatcaataggctgctcacgcggttgaaggagaaaacgttcgttacccgaccaactacttcgaaaaacctagtagcaccatgaaggttgcggagtgtttcgctcggcacttccccagtgtagatcaggtcgatgagtcaccgcattccccacgggcgaccgtggcggtggctgcgctggcggcctgcctatggggtaacccataggacgctctaatacggacatggtgcgaagagtctattgagctagttggtagtcctccggcccctgaatgcggctaatcctaactgcggagcgcgcgcccccattccaggaggtagcgcgtcgtaacgggcaactctgcagcggaaccgactactttgggtgtccgtgtttccttttatctttattctggctgcttatggtgacaattgacagattgttaccatatagctattggattggccatccggtcacaagcagagcgattatctaccaatttattggatttatcccactgcacactcgtgaatataacacattactgctgatactgagtttggacaaagcaaa

SEQ ID NO: 19134 - DNA, 738 bp, synthetic construct
  source 1..738: mol_type = other DNA
agctgtgggttgttcccacccacagggcccactgggcgctagcacactgattctgcgggatctttgtgcgcctgttttataaccccttccctaagcagcaacttagaagcttcacactatcacgaccagcagtgggcgtgacgcaccagtcacgtcttggtcaagcacttctgtttccccggactgagtatcaatagactgctcatgcggttgaaggagaaaacgttcgttatccggctaactacttcgagaaacctagtagcaccgtgaaagttgcggagtgtttcgctcagcacttcccccgtgtagatcaggtcgatgagtcactgtaaaccccacgggcgaccgtgacagtggctgcgttggcggcctgcccatggggaaacccatgggacgctctaatacagacacggtgtgaagagtctattgagctagttagtagtcctccggcccctgaatgcggctaatcctaactgcggagcgcgtaccctcaacccagagggcggcgcgtcgtaatgggtaactctgcagcggaaccgactactttgggtgtccgtgtttcctttttattccttattggctgcttatggtgacaattgaaaagttgttaccatatagctattggattggccatccagtgaccaacagagctattgtttacctgtttattggatacgtccctcttaatctcaagaccatccaaactcttgattatatattactccttaatcataagaa

SEQ ID NO: 19135 - DNA, 715 bp, synthetic construct
  source 1..715: mol_type = other DNA
ggacagggcccactgggcgctagcactctgattctgcggaatctttgtgcgcctgttttataacctccccaaacttgcaacttagaagttatgtacgttactgatcaacagcaggcgtggcacaccagccatgtcttgatcaagcacttctgtaccccggactgagtatcaatagactgctcacgtggtcgaaggagaaaacgttcgttatccggctaactacttcgagaaacctagtagcaccactgaaactgcggagtgtttcgctcagcacttcccccgtgtagatcaggtcgatgagtcactgcttaccccacgggtgaccgtggcagtggctgcgttggcggcctgcctatggggcaacccataggacgctctaaagtggacatggtgcgaagagtctattgagctagttagtagtcctccggcccctgaatgcggctaatcctaactgcggagcgcatgccttcaaaccagagggtggtgcgtcgtaacgggtaactctgcagcggaaccgactactttgggtgtccgtgtttcttttattctcataatggctgcttatggtgacaattgaggaattgttaccatatagctattggattggccatccggtgtgcaacagagctattatctacttgtttgttgggtacattccattaacacctaaatccttcaatacattgcactatatcttaacactgaacgcaaggaa

SEQ ID NO: 19136 - DNA, 742 bp, synthetic construct
  source 1..742: mol_type = other DNA
tttaaaacagcctgtgggttgcacccactcacagggcccactgggcgcaagcactctggtacctcggtacctttgtgcgcctgttttatacccccccccagtgaaacttaaaagcagcaaaccacgatcaatagcaggcataacgctccagttatgtcttgatcaagcacttctgtttccccggactgagtatcaataaactgctcgcgcggttgaaggaaaaaacgttcgttatccggctaactacttcggaaaacttagtaacaccatgaaagttgcggaaagcttcgttcagcactcccccagtgtaaatcaggtcgatgagtcaccgcattccccacgggcgaccgtggcggtggctgcgttggcggcctgcccatggggtaacccatggggcgctctaatacagacatggtgtgaagagtctactgagctagttagtagtcctccggcccctgaatgcggctaatcccaactgcggagcacacgcccacaagccagcgggtagtgtgtcgtaacgggtaactctgcagcggaaccgactactttgggtgtccgtgtttccttttacctttattttggctgcttatggtgacaattaaagaattgttaccatatagctattggattagccatccggtgtgcaacagagcaattatttacctatttattggttttgtaccattaactttgaattctgtgaccacccttaattatatcctgacccttaacacagctaaac

SEQ ID NO: 19137 - DNA, 729 bp, synthetic construct
  source 1..729: mol_type = other DNA
gttgttcccacccacagggcccactgggcgccagcactctgattccatggaatctttgtgcgcctgttttataacccttccccaatttgcaacttagaagtaatacacactacagatcaatagtaggcatggcgcgccagtcatgtctcgatcaagcacttctgtttccccggactgagtatcaatagactgcccacgcggttgaaggagaaaacgtccgttacccggctaactacttcgagaaacctagtagcaccaaataagctgcagagcgtttcgctcagcacctcccccgtgtagatcaggctgatgagtcactgcaatccccacgggcgaccgtggcagtggctgcgctggcggcctgcctatggggcaacccataggacgctctaatgtggacatggtgcgaagagtctattgagctagttagtagtcctccggcccctgaatgcggctaatcctaactgcggagcacataccttcaatccaggaggtggtgtgtcgtaacgggtaactctgcagcggaaccgactactttgggtgtccgtgtttccttttatccttatattggctgcttatggtgacaatcacggaattgttgccatatagctattggattggccatccggtgtctaatagagctattgtatacctatttgttggatttactccactatcatataaatctctgaacactttgtacttcatattgaacttaaacacacgaaa

SEQ ID NO: 19138 - DNA, 729 bp, synthetic construct
  source 1..729: mol_type = other DNA
gggttgtacccacccacggggcccattgggcgctagcactctggtaccacggtacctttgtgcgcctgttttattaccccacccctacctgaaacgtagaagcaacaattagtcgaccaatagtgggtgtggcacaccagccacatcttggtcaagcacttctgtttccccgggttgagtatcaatatgctgttcacacggctgaaggagaaaacgcccgttacccggccaactacttcgagaagcctagtaccgccatgaacattgcaaggcgtttcactcagcacttcccccgtgtagatcaggccgatgagtcaccgcattccccacgggcgaccgtggcggtggctgcgctggcggcctgcctgtgggttgacccacaggacgccttaatatagacatggtgcgaagagcctattgagctagttggtattcctccggcccctgaatgcggctaatcctaactgtggagcacatactcacaagccagtgggtggtgtgtcgtaatgggcaactctgcagcggaaccgactactttgggtgtccgtgtttccttttattcttatactggctgcttatggtgacaatcagagaattgttaccatatagctattggattggccatccggtgtgcaacagagctattgtgtatttatttgttggatttgtcccactgtcgtatacatccctcaacactttgtattttattttgaaattaaacgcaagaaa

SEQ ID NO: 19139 - DNA, 737 bp, synthetic construct
  source 1..737: mol_type = other DNA
tggggggtggtacccactcacagggcccacgtggcgctagcactctgattctacggaatctttgtgcgcctgttttacaacccacccccaatttgcaacttagaagcaatacacaacactgatcaacagcaggcatggcgcaccagccatgtcttgatcaagcacttctgtttccccggactgagcatcaatagactgctcacgcggttgaagaagaaagcgtccgttatccggctaactacttcgagagacctagtagcaccattcaagctgcggagtgtttcgctcggcacttcccccgtgtagatcaggccgatgagtcactgcaatccccacgggcgaccgtggcagtggctgcgctggcggcctgcctatggggcaacccataggacgctctaatgtggacatggtgcgaagagtctattgagctagttagtagtcctccggcccctgaatgcggctaatcctaactgcggagcacatgccctcaacccagagggtagtgtgtcgtaacgggcaactctgcagcggaaccgactactttgggtgtccgtgtttccttttattcttacattggctgcttatggtgacaatcacagaattgttaccatatagctattggattggccatccggtgtgcgatagagctattatatacctatctgttggctttgtaccactaaccttaaaatctataaccaccctcaactttatattaactctcaatacagtcaaac

SEQ ID NO: 19140 - DNA, 741 bp, synthetic construct
  source 1..741: mol_type = other DNA
ttaaaacagcctgtgggttgcacccacccacagggcctactgggcgcaagcactctggtatcttggtacctttgtgcgcctgttttatacccccccccagtgaaacttagaagcagcaaatcacgatcaatagcaggcataacgctccagttgtgtctcgatcaagcacttctgtttccccggactgagtatcaatagactgctcgcgcggttgaaggagaaaacgttcgttatccggctagctacttcggaaaacctagtaacaccatgaaagttgcggagagcttcgttcagcactcccccagtgtagatcaggtcgatgagtcaccgcattccccacgggcgaccgtggcggtggctgcgttggcggcctgcccatggggtaacccatggggcgctctaatacggacatggtgtgaagagtctactgagctagctagtagtcctccggcccctgaatgcggctaatcccaactgcggagcacacgcccacaagccagcgggtagtgtgtcgtaatgggtaactctgcagcggaaccgactactttgggtgtccgtgtttccttttatctttatattggctgcttatggtgacaattaaagaattgttaccatatagctattggattggccatccggtgtgcaacagagcgattgtctacctatttattggttttgttccattaactttgaattctgtgaccacccttaattatatcttgacccttaacacagccaaac

SEQ ID NO: 19141 - DNA, 744 bp, synthetic construct
  source 1..744: mol_type = other DNA
ttaaaacagcctgtgggttgcacccacccacagggcctactgggtgctagcactctggtactaaggtacctttgtgcgcctgtttttattccccttccccaaagtaacttagaagttgtgtaccaacgatcaatagtaggtgtgacacaccagtcatatcttgatcaagtacttctgtttccccggaccgagtatcaataggctgctcgcgcggctgaaggagaaaacgttcgttacccggccaactacttcgagaagcttagtaccaccatgaacgatgcagggtgtttcgttcagcacaaccccagtgtagatcaggctgatgagtcactgcaacccccatgggcgaccatggcagtggctgcgttggcggcctgcccatggagaaatccatgggacgctctaattctgacatggtgtgaagagcctattgagctagctggtagtcctccggcccctgaatgcggctaatcctaactgcggagcacatgctcacaaaccagtgggtggtgtgtcgtaatgggcaactctgcagcggaaccgactactttgggtgtccgtgtttccttttattcttatgttggctgcttatggtgacaatcaaagaattgttaccatatagctattggattggccatccggtgtgcaacagagcaattgtttacctatttgttggtttcgtaccactatcactgaagtctgtgaccactctcaaattcattttgaccctcaactcaatcaaac

SEQ ID NO: 19142 - DNA, 746 bp, synthetic construct
  source 1..746: mol_type = other DNA
ttaaacaagcctgtgggttgttcccacccacagggcccactgggcgctagcacactgattctgcgggatctttgtgcgcctgttttataaccccttccctaagcagcaacttagaagcttcacactatcacgaccagcagtgggcgtgacgcaccagtcacgtcttggtcaagcacttctgtttccccggactgagtatcaatagactgctcatgcggttgaaggagaaaacgttcgttatccggctaactacttcgagaaacctagtagcaccgtgaaagttgcggagtgtttcgctcagcacttcccccgtgtagatcaggtcgatgagtcactgtaaaccccacgggcgaccgtgacagtggctgcgttggcggcctgcccatggggaaacccatgggacgctctaatacagacacggtgtgaagagtctattgagctagttagtagtcctccggcccctgaatgcggctaatcctaactgcggagcgcgtaccctcaacccagagggcggcgcgtcgtaatgggtaactctgcagcggaaccgactactttgggtgtccgtgtttcctttttattccttattggctgcttatggtgacaattgaaaagttgttaccatatagctattggattggccatccagtgaccaacagagctattgtttacctgtttattggatacgtccctcttaatctcaagaccatccaaactcttgattatatattactccttaatcataagaa

SEQ ID NO: 19143 - DNA, 735 bp, synthetic construct
  source 1..735: mol_type = other DNA
ctgtgggttgttcccacccacagggcccattgggcgctagcacactggttttgcggaatctttgtgcgcctgttttataacccttcccccaagtagcaacttagaagtattgcacaatcacggccagtagtgggcgtggcgcaccagccacgtcttggtcaagcacttctgtatccccggactgagtatcaatagactgctcacgcggttgaaggagaaaacgttcgttacccggctaactacttcggaaaacctagtagcaccttgaaagttgcagagtgtttcgctcagcacttcccccgtgtagatcaggtcgatgagccactgtaaaccccacgggcgaccgtgacagtggctgcgttggcggcctgcccatggggcaacccatgggacgctctaatacagacatggtgtgaagagtctactgagctagttagtagtcctccggcccctgaatgcggctaatcctaactgcggagcacacaccctcaacccagggggcggtgtgtcgtaatgggtaactctgcagcggaaccgactactttgggtgtccgtgtttccttttattccttactggctgcttatggtgacaattgaaaagttgttaccatatagctattggattggccatccggtgtctaacagagccattgtttacttatttattggatacgtccctcttaatcttaaggctattcaaactcttaattatatattgctccttaactataagaa

SEQ ID NO: 19144 - DNA, 742 bp, synthetic construct
  source 1..742: mol_type = other DNA
ttaaaacagcctgtgggttgcacccactcacagggcccactgggcgcaagcactctggtatcttggtacctttgtgcgcctgttttatacccctcccctattgtaatttagaagcagcaaaccacgatcaatagcaggcataacgctccagttatgtcttgatcaagcacttctgtttccccggactgagtatcaatagactgctcgcgcggttgaaggagaaaacgttcgttatccggctagctacttcggaaaacctagtaacaccatgaaagttgcggagagcttcgttcagcactcccccagtgtagatcaggtcgatgagtcaccgcattccccacgggcgaccgtggcggtggctgcgttggcggcctgcccatggggtaacccatggggcgctctaatacagacatggtgtgaagagtctactgagctagttagtagtcctccggcccctgaatgcggctaatcccaactgcggagcacacgcccacaagccagcgggtagtgtgtcgtaacgggtaactctgcagcggaaccgactactttgggtgaccgtgtttccttttatctttatattggctgcttatggtgacaattaaggaattgttaccatatagctattggattggccatccggtgtgcaacagagcaatcatttacctatttattggttttgtaccattaactttgaattctgtgaccacccttaattatattttgacccttaaccaggctaaac

SEQ ID NO: 19145 - DNA, 736 bp, synthetic construct
  source 1..736: mol_type = other DNA
cctgtgggttgttcccacccacagggcccattgggcgctagcacactgattttgcggaatctttgtgcgcctgttttataacccttcccccaagcagtaacttagaagcattgcacaatcgcgaccagtagtgggcgtgacgcgccagtcacgtcttggtcaagcacttctgtatccccggactgagtatcaatagactgctcacgcggttgaaggagaaaacgttcgttatccggctaactacttcgggaaacctagtagcaccttgaaagttgcagagtgtttcgctcagcacttcccccgtgtagatcaggccgatgagccactgtaaaccccacgggcgaccgtgacagtggctgcgttggcggcctgcccatggggaaacccatgggacgctctaatacagacatggtgtgaagagtctactgagctagttagtagtcctccggcccctgaatgcggctaatcctaactgcggatcacacaccctcaacccagggggcagtgtgtcgtaatgggtaactctgcagcggaaccgactactttgggtgaccgtgtttccttttattccttattggctgcttatggtgacaattgaaaagttgttaccatatagctattggattggccatccggtgtctaacagagctattgtttacttatttattggatacgttcctcttaatttcaagactatccaaactcttgattatatattgctccttaatcacaagaa

SEQ ID NO: 19146 - DNA, 728 bp, synthetic construct
  source 1..728: mol_type = other DNA
gttgtccccacccacagggcccactgggcgctagcacactggttctgcgggacctttgtgcgcctgttttataacccttccctaagcagtaacttagaagctttgtacaatcatggccaatagtgggcgtggcgcgccagtcacgtcttggtcaagcacttctgtatccccggactgagtatcaatagactgctcacgtggttgaaggagaaaacgtccgttacccggctaactacttcgagaaacctagtagcaccatgaaagttgcggagtgtttcgttcagcacttcccccgtgtagatcaggtcgatgagtcactgtaaaccccacgggcgaccgtgacagtggctgcgttggcggcctgcccatggggtaacccatgggacgctctaatacagacatggtgcgaagagtctattgagctagttagcagtcctccggcccctgaatgcggctaatcctaactgcggagcgcgcaccctcaacccagggggcggcgcgtcgtaatgggcaactctgcagcggaaccgactactttgggtgtccgtgtttccttttattctttattggctgcttatggtgacaattgaaaagttgttaccatatagctattggattggccatccggtgtctaacagagctattgtttacctattcattggattcgtccctcttaatctcaaggtcattcaaactctcgattgcatattgctccttaactgtaagaa

SEQ ID NO: 19147 - DNA, 745 bp, synthetic construct
  source 1..745: mol_type = other DNA
ttaaaacagcctgtgggttgttcccacccacagggcccactgggcgctagcacactgattctgcgggatctttgtgcgcctgttttataaccccttccctaagcagcaacttagaagcttcacacaatcacgaccagtagcgggcgtggcgcgccagtcacgtcttggtcaagcacttctgttcccccggactgagtatcaatagactgctcacgcggttgaaggagaaaacgttcgttatccggctaactacttcgagaaacctagtagcaccgtgaaagttgcggattgtttcgctcagcacttcccccgtgtagatcaggtcgatgagtcactgtaaaccccacgggcgaccgtgacagtggctgcgttggcggcctgcccatggggtaacccatgggacgctctaatacagacacggtgtgaagagtctattgagctagttagtagtcctccggcccctgaatgcggctaatcccaactgcggagcacgcaccctcaacccagggggcggcgtgtcgtaatgggtaactctgcagcggaaccgactactttgggtgtccgtgtttccttttattccttattggctgcttatggtgacaattgaaaagttgttgccatatagctattggattggccatccggtgaccaacagagccattgtttacctgtttattggatacgtccctcttaatcccaaggccattcaaactcttgattatatattgctccttaactgtaagaa

SEQ ID NO: 19148 - DNA, 745 bp, synthetic construct
  source 1..745: mol_type = other DNA
ttaaaacagcctgtgggttgttcccacccacagggcccactgggcgttagcacactgattctgcgggacctttgtgcgcctgttttataaccccttccctaagcagcaacttagaagcttcacacgatcacgaccaatagtgggcgtggcgcgccagtcacgtcttggtcaagcacttctgttcccccggactgagtatcaatagactgctcacgcggttgaaggagaaaacgttcgttatccggctaactacttcgagaaacctagtagcaccgtgaaagttgcggagtgtttcgctcagcacttcccccgtgtagatcaggtcgatgagtcactgtaaaccccacgggcgaccgtgacagtggctgcgttggcggcctgcccatggggtaacccatgggacgctctaatacagacatggtgtgaagagtctattgagctagttggtagtcctccggcccctgaatgcggctaatcctaactgcggagcacgcaccctcaacccagggggcggcgtgtcgtaatgggtaactctgcagcggaaccgactactttgggtgtccgtgtttccttttattccttattggctgcttatggtgacaattgaaaagttgttaccatatagctattggattggccatccggtgtccaacagagctattgtctacctatttattggatacgtccctcttaatctcaaggccattcaaactcttgattatatattgttccttaactgcaagaa

SEQ ID NO: 19149 - DNA, 735 bp, synthetic construct
  source 1..735: mol_type = other DNA
ctgtgggttgttcccacccacagggcccactgggcgctagcacactgattctgcgggatctttgtgcgcctgttttataaccccttccctaagcagcaacttagaagcttcacactatcacgaccagtagtgggcgtggcgcgccagtcacgtcttggtcaagcacttctgtttccccggactgagtatcaatagactgctcacgcggttgaaggagaaaacgttcgttatccggctaactacttcgagaaacctagtagcaccgtgaaagttgcggagcgtttcgctcagcacttcccccgtgtagatcaggtcgatgagtcactgtaaaccccacgggcgaccgtgacagtggctgcgttggcggcctgcccatggggcaacccatgggacgctctaatacagacacggtgtgaagagtctattgagctagttagtagtcctccggcccctgaatgcggctaatcctaactgcggagcgcgcaccctcaacccagggggcggcgcgtcgtaatgggtaactctgcagcggaaccgactactttgggtgtccgtgtttccttttattccttattggctgcttatggtgacaattgaaaagttgttaccatatagctattggattggccatccggtgaccaacagagctattgtctacctgtttattggatacgtccctcttaatctcaaggtcattcaaactcttgattatatattactccttaattgtgagaa

SEQ ID NO: 19150 - DNA, 746 bp, synthetic construct
  source 1..746: mol_type = other DNA
ttaaaacagcctgtgggttgtacccacccacagggcccactgggcgttagcacactgattctacggaatctttgtgcgcctgttttatatccctcccctaaaatagtaacttagaagttgaacatttacacgaccaatagtgggcgtggcgcaccagccacgtcttggtcaagcactcctgtttccccggactgagtatcaataggctgctcacgtggctgaaggagaaagtgttcgttatccggctaactacttcgggaaacccagtaacaccatgaaagttgcagagtgtttcgctcagcacttcccccgtgtagatcaggctgatgagtcactgcgaaccccacgggcgaccgtggcagtggctgcgttggcggcctgcctatggggtaacccataggacgctctaatacagacatggtgcgaagagtctactgagctagttggtattcctccggcccctgaatgcggctaatcctaactgcggagcacataccctcaatccagagggtggtgtgtcgtaacgggcaactctgcagcggaaccgactactttgggtgtccgtgtttccttttactcttatactggctgcttatggtgacaattgaaaggttgttaccatatagctattggattggccatccggtgactaacagagctttgatttatcaattcattgggtttgtgcccttatcatctacagtttattcaaccttggtgtacttgttatatcttaatagtaagaa

SEQ ID NO: 19151 - DNA, 746 bp, synthetic construct
  source 1..746: mol_type = other DNA
ttaaaacagcctgtgggttgtacccacccacagggcccactgggcgttagcacactgattctacggaatctttgtgcgcctgttttatatccctcccctaaaatagtaacttagaagttgaacatctacacgaccaatagtgggcgtggcgcaccagccacgtcttggtcaagcactcctgtttccccggactgagtatcaataggctgctcacgtggctgaaggagaaagtgttcgttatccggctaactacttcgggaaacccagtaacaccatgaaagttgcagagtgtttcgctcagcacttcccccgtgtagatcaggctgatgagtcactgcgaaccccacgggcgaccgtggcagtggctgcgttggcggcctgcctatggggcaacccataggacgctctaatacagacatggtgcgaagagtctactgagctagttggtattcctccggcccctgaatgcggctaatcctaactgcggagcacatgccctcaatccagagggtggtgtgtcgtaacgggcaactctgcagcggaaccgactactttgggtgtccgtgtttccttttactcttatactggctgcttatggtgacaattgaaaggttgttaccatatagctattggattggccatccggtgactaacagagctttgatttatcaattcattgggtttgtgcccttatcatctacagtttattcaaccttggtgtacttgttatatcttaatagtaagaa

SEQ ID NO: 19152 - DNA, 746 bp, synthetic construct
  source 1..746: mol_type = other DNA
ttaaaacagcctgtgggttgtacccacccacagggcccactgggcgttagcacactgattctacggaacctttgtgcgcctgttttatatccctcccctaaaatagtaacttagaagttgaacatttacacgaccaatagtgggcgtggcgcaccagccacgtcttggtcaagcactcctgtttccccggactgagtatcaataggctgctcacgtggctgaaggagaaagtgttcgttatccggctaactacttcgggaaacccagtaacaccatgaaagttgcagagtgtttcgctcagcacttcccccgtgtagatcaggctgatgagtcactgcgaaccccacgggcgatcgtggcagtggctgcgttggcggcctgcctatggggcaacccataggacgctctaatacagacatggtgcgaagagtctactgagctagttggtattcctccggcccctgaatgcggctaatcctaactgcggagcacatgccctcaatccagagggtggtgtgtcgtaacgggcaactctgcagcggaaccgactactttgggtgtccgtgtttccttttactcttatactggctgcttatggtgacaattgaaaggttgttaccatatagctattggattggccatccggtgactaacagagctttgatttatcaattcattgggtttgtgcccttatcatctacagtttactcaaccttggtgtacttgttatatcttaatagtaagaa

SEQ ID NO: 19153 - DNA, 746 bp, synthetic construct
  source 1..746: mol_type = other DNA
ttaaaacagcctgtgggttgtacccacccacagggcccactgggcgttagcacactgattctacggaacctttgtgcgcctgttttatatccctcccctaaaatagtaacttagaagttgaacatttacacgaccaatagtgggcgtggcgcaccagccacgtcttggtcaagcactcctgtttccccggactgagtatcaataggctgctcacgtggctgaaggagaaagtgttcgttatccggctaactacttcgggaaacccagtaacaccatgaaagttgcagagtgtttcgctcagcacttcccccgtgtagatcaggctgatgagtcactgcgaaccccacgggcgaccgtggcagtggctgcgttggcggcctgcctatggggcaacccataggacgctctaatacagacatggtgcgaagagtctactgagctagttggtattcctccggcccctgaatgcggctaatcctaactgcggagcacatgccctcaatccagagggtggtgtgtcgtaacgggcaactctgcagcggaaccgactactttgggtgtccgtgtttccttttactcttatactggctgcttatggtgacaattgaaaggttgttaccatatagctattggattggccatccggtgactaacagagctttgatttatcaattcattgggtttgtgcccttatcatctacagtttattcaaccttggtgtacttgttatatcttaatagtaagaa

SEQ ID NO: 19154 - DNA, 742 bp, synthetic construct
  source 1..742: mol_type = other DNA
aaacagcctgtgggttgttcccacccacagggcccactgggcgctagcacactgattctgcgggatctttgtgcgcctgttttataaccctccccctaagcagtaacttagaagctttgtacagtcacgactagtagtgggcgtggcgcgccagccacgtcttggtcaagcacttctgtatccccggactgagtatcaatagactgctcacgcggtcgaaggagaaaacgttcgttacccggctaactacttcgagaaacctagtaacaccatgaaagttgcggagtgtttcgctcagcacttcccccgtgtagatcaggtcgatgagtcactgtaaaccccacgggcgaccgtgacagtggctgcgttggcggcctgcccatggggtagcccatgggacgctctaatacggacatggtgtgaagagtctattgagctagttagtagtcctccggcccctgaatgcggctaatcctaactgcggagcgcgcaccctcaacccagggggcggcgcgtcgtaatgggtaactctgcagcggaaccgactactttgggtgtccgtgtttccttttactccttactggctgcttatggtgacaattgaaaagttgttaccatatagctattggattggccatccggtgtctaacagagctattgtttacctatttattggatacgtccctcttaatctcaaagccattcaaactcttgactatatattgctccttaactgtaagaa

SEQ ID NO: 19155 - DNA, 741 bp, synthetic construct
  source 1..741: mol_type = other DNA
aaacagcctgtgggttgctcccacccacagggcccactgggcgctagcacactgattctgcgggatctttgtgcgcctgttttgcaacccttcccctaagcagcaacttagaagctttgtacaatcacgaccaatagtgggcgtggcgcgccagtcacgtcttggtcaagcacttctgtatccccggaccgagtatcaatagactgctcacgcggttgaaggagaaaacgttcgttacccggctaactacttcgagaaacctagtagcaccatgaaagttgcggagtgtttcgctcagcacttccccgtgtagatcaggtcgatgagtcactgtaaaccccacaggcgaccgtgacagtggctgcgttggcggcctgcccatggggtaacccatgggacgctctaatacagacatggtgcgaagagtctattgagctagttagcagtcctccggcccctgaatgcggctaatcctaactgcggagcgcgcaccctcaacccagggggcggcgtgtcgtaatgggtaactctgcagcggaaccgactactttgggtgtccgtgtttccttttattctttattggctgcttatggtgacaattgaaaagttgttaccatatagctattggattggccatccggtgtctaacagaactattgtttacctatttattggatacgtccctcttaatctcaaggccattcaaactcttgactatatattgctcctcaactgtaagaa

SEQ ID NO: 19156 - DNA, 747 bp, synthetic construct
  source 1..747: mol_type = other DNA
ttaaaacagcctgtgggttgttcccacccacagggcccactgggcgctagcacactgattctgcgggatctttgtgcgcctgttttataaccctttccctaagcagcaacttagaagctttgtacaatcacgaccaatagtgggcgtgacgcgccagtcacgtcttggtcaagcacttctgtatccccggactgagtaccaatagactgcccacgcggttgaaggggaaaacgttcgttacccggctaactacttcgagaaacctagtagtaccatgaaagttgcggagtgtttcgctcagcacttccccagtgtagatcaggtcgatgagtcactgtaaaccccacgggcgaccgtgacagtggctgcgttggcggcctgcccatggggtaacccatgggacgctctaatacagacatggtgcgaagagtctattgagctagttagcagtcctccggcccctgaatgcggctaatcctaactgcggagcgcgcaccctcaacccagggggcggcgtgtcgtaatgggtaactctgcagcggaaccgactactttgggtgtccgcgtttccttttttattctttattggctgcttatggtgacaattgaaaagttgttaccatatagctattggattggccatccggtgtctaacagagctattgtttacctatttattgggtacgtccctcttaatctcaaggccattcaaactcttgattatatattgctccttaactgtaggaa

SEQ ID NO: 19157 - DNA, 742 bp, synthetic construct
  source 1..742: mol_type = other DNA
aaacagcctgtgggttgttcccacccacagggcccactgggcgctagcacactgattttgcgggatctttgtgcgcctgttttataaccctcccccttaagcagcaacttagaagctttgtacgaccacgaccagtagtgtgcgtggcgcgccagccacgtcttggtcaagcacttctgtatccccggactgagtatcaatagactgcttacgcggtcgaaggagaaaacgttcgttacccggctaactacttcgagaaacctagtagcaccatgaaagttgcagagtgtttcgctcagcacttccccgtgtagatcaggtcgatgagtcactgtaaaccccacgggcgaccgtgacagtggctgcgttggcggcctgcccatggggtaacccatgggacgctctaatacagacatggtgtgaagagtctattgagctagttagtagtcctccggcccctggatacggctaatcctaactgcggagcgcgcaccctcaacccagggggcggcgcgtcgtaatgggcaactctgcagcggaaccgactactttgggtgtccgtgtttccttttactccttattggctgcttatggtgacaattgaaaagttgttaccatatagctattggattggccatccggtgtctaacagagctattgtttacctgtttattggatacgtctcccttaatcccaaagccattcaaactcttgactatatattgctccttaactgtaagaa

SEQ ID NO: 19158 - DNA, 743 bp, synthetic construct
  source 1..743: mol_type = other DNA
aaacagcctgtgggttgttcccacccacagggcccactgggcgctagcacactgattctgcgggatctttgtgcgcctgttttataacccttcccctaagcagcaacttagaagctttgtacaatcacgaccaacagtgggcgtggcgcgccagtcacgtcttggtcaagcacttctgtatccccggactgagtatcaatagactgctcacgcggttgaaggagaaaacgttcgttacccggctaactacttcgagaaacttagtagcaccatgaaagttgcggagtgtttcgctcagcacttcccccgtgtagatcaggtcgatgagtcactgtaaaccccacgggcgaccgtgacagtggctgcgttggcggcctgcccatggggtaacccatgggacgctctaatacagacatggtgcgaagagtctattgagctagttagcagccctccggcccctgaatgcggctaatcctaactgcggagcgcgcaccctcaacccaggggggcggcgtgtcgtgatgggtaactctgcagcggaaccgactactttgggtgtccgtgtttccttttattctttattggctgcttatggtgacaattgaagagttgttaccatatagctattggattggccatccggtgtctaacagagctattgtttacctatttattggatacgtccctcttaatctcaaggccattcaaactcttgattatatattgctccttaactgtaagaa

SEQ ID NO: 19159 - DNA, 742 bp, synthetic construct
  source 1..742: mol_type = other DNA
aaacagcctgtgggttgttcccacccacagggcccactgggcgctagcacactgattctgcgggatctttgtgcgcctgttttataaccctcccccctaagcagtaacttagaagctttgcacaatcacgaccagtagtgggcgtggcgcgccagccacgtcttggtcaagcacttctgtatccccggactgagtatcaatagactgctcacgcggtcgaaggagaaaacgttcgttacccggctaaccacttcgagaaacctagtagcaccatgaaagttgcggagtgtttcgctcagcacttcccccgtgtagatcaggtcgatgagtcactgtaaaccccacgggcgaccgtgacagtggctgcgttggcggcctgcccatggggtaacccatgggacgctctaatacagacatggtgtgaagagtctattgagctggttagtagtcctccggcccctgaatgcggctaatcctaactgcagagcgcgcaccctcaacccagggggcggcgtgtcgtaacgggtaactctgcagcggaaccgactactttgggtgtccgtgtttccttttactccttattggctgcttatggtgacaattgaaaagttgttaccatatagctattggattggccatccggtgtctaacagagctattgtttactattcattggatacgtccctcttagtctcaaagccattcaaactcttgactatatattgctccttaactgtaagaa

SEQ ID NO: 19160 - DNA, 745 bp, synthetic construct
  source 1..745: mol_type = other DNA
ttaaaacagcctgtgggttgttcccacctacagggcccactgggcgctagcacactgattctgcgagatctttgtgcgcctgttttataacccttcccctaagcagcaacttagaagctttgtacaatcacgaccaatagtgggcgtggcgcgccagtcacgtcttggtcaagcacttctgtatccccggactgagtatcaatagactgctcacgcggttgaaggagaaaacgttcgttacccggctaactacttcgagaaacctagtagcaccatgaaagttgcggagtgtttcgctcagcacttcccccgtgtagatcaggtcgatgagtcactgtgaaccccacgggcgaccgtgacagtggctgcgttggcggcctgcccatggggtaacccatgggacgctctaatacagacatggtgcgaagagtctattgagctagttagcagtcctccggcccctgaatgcggctaatcctaactgcggagcgcgcaccctcaacccagggggcggcgtgtcgtaatgggtaactctgcagcggaaccgactactttgggtgtccgtgtttccttttattctttattagctgcttatggtgacaattgaaaagttgttaccatatagctattggattggccatccggtgtctaacagagctattgtttacctatttattggatacgtccctcttaatctcaaagccattcaaactcttgattatatattgctccttaactgtaggaa

SEQ ID NO: 19161 - DNA, 745 bp, synthetic construct
  source 1..745: mol_type = other DNA
aaacagcctgtgggttgttcccacccacagggcccactgggcgctagcacactgattctgcgggatctttgtgcgcctgttttataaccctccccctaagcagcaacttagaagctttgcacaatcacgaccagtagtgggcgtggcgcgccagccacgtcttggtcaagcacttctgtatccccggactgagtatcaatagactgcttacgcggtcgaaggagaaaacgttcgttacccggctaactacttcgagaaacctagtagcaccatgaaagttgcggagtgtttcgctcagcacttcccccgtgtagatcaggtcgatgagtcactgtaaaccccacgggcgaccgtgacagtggctgcgttggcggcctgcccatggggtaacccatgggacgctctaatacagacatggtgtgaagagtctattgagctagttagtagtcctccggcccctgaatgcggctaatcctaactgcggagcgcgcaccctcaacccagggggcggcgcgtcgtgatgggtaactctgcagcggaaccgactactttgggtgtccgtgtttccttttttccctccttattggctgcttatggtgacaattgaaaagttgttaccatatagctattggattggccatccggtgtctaacagagctattgtttacctattcattggatacgtccctcttaatctcaaagccattcaaactcttgactatatattgctccttaactgtaagaa

SEQ ID NO: 19162 - DNA, 742 bp, synthetic construct
  source 1..742: mol_type = other DNA
aaacagcctgtgggttgttcccacccacagggcccactgggcgctagcgcactgatcctgcgggacctttgtgcgcctgttttataacccttcccctaagcagtaacttagaagctttacactatcatgaccaatagtaggcgtggcgcaccagtcacgtctcggtcaagcacttctgtttccccggactgagtatcaatagactgctcacgcggttgaaggagaaaacgttcgttatccgactaactacttcgagaaacctagtagcatcgtgaaagttgcggagtgtttcgctcagcacttcccccgtgtagatcaggtcgatgagtcactgtaaaccccacgggtgaccgtgacagtggctgcgttggcggcctgcccatgggataacccatgggacgctctaaaacagacacggtgtgaagagtctattgagctagttagtagtcctccggcccctgaatgcggctaatcctaactgcggagcgcgtaccctcactccagggggcagcgcgtcgtaatgggtaactctgcagcggaaccgactactttgggtgtccgtgtttctttttattccttattggctgcttatggcgacaattgaaaggttgttaccatatagctattggattggccatccggtaactaacagagctattgtttacctgtttattggatacgtccctctcaatctcaaggccattcaaactcttgattatatattacttctcaactgtaagaa

SEQ ID NO: 19163 - DNA, 743 bp, synthetic construct
  source 1..743: mol_type = other DNA
aaacagcctgtgggttgttcccacccacagggcccactgggcgctagcacactgattctgcgggatctttgtgcgcctgttttataacccttccccctaagcagcaatttagaagctttgtacaatcacgaccaatagtgggcgtggcgcgccagtcacgttttggtcaagcacttctgtatccccggaccgagtatcaatagactgctcacgcggttgaaggagaaaacgttcgttacccggctaactacttcgagaaacctagtagcaccatgaaagttgcggagtgtttcgctcagcacttcccccgtgtagatcaggtcgatgagtcactgtaaaccccacgggcgaccgtgacagtggctgcgttggcggcctgcccatggggtaacccatgggacgctctaatacagacatggtgcgaagagtctattgagctagttagcagtcctccggcccctgaatgcggctaatcctaactgcggagcacgcaccctcaagccagggggcggcgtgtcgtaatgggtaactctgcagcggaaccgactactttgggtgtccgtgtttccttttattctttattggctgcttatggtgacaattgaaaagttgttaccatatagctattggattggccatccggtgtccaacagagctattgtttacctatttattggatacgtccctcttaatctcaaggccattcaaactcttgattatatactgctccttaactgtaagag

SEQ ID NO: 19164 - DNA, 703 bp, synthetic construct
  source 1..703: mol_type = other DNA
agcactcttattctacggaatatttgtgcgcctgttttatagccctcccccattaagtaacttagaagtgatgtgcagcacagatcaatagcaggcatagcgcaccagctgtgtcttgatcaagcacttctgtttccccggactgagtatcaataaactgctcacgcggttgaaggagaaaacgttcgttacccggctaaccacttcgagaaacttagtaacaccattgaagctgtagagtgtttcgctcagcacttccccagtgtagatcaggctgatgagtcactgcgaccctcacgggcgaccgtggcagtggctgcgctggcggcctgcctatggggcaacccataggacgctctaaagtggacatggtgtgaagagtctattgagctggttagtagtcctccggcccctgaatgcggctaatcctaactgcggagcgcatgccctcaaaccagggggtggtgcgtcgtaacgggtaactctgcagcggaaccgactactttgggtgtccgtgtttccttttattctcacattggctgcttatggtgacaattgaagaattgttaccatatagctattggattggccatccggtgtgtaacagagcgattatcttctcttttattgcctttgtcccattgaccccaactgcgttaaacactctgcaatatatactctatcttaactctaggaagcgaac

SEQ ID NO: 19165 - DNA, 746 bp, synthetic construct; identical to SEQ ID NO: 1128
  source 1..746: mol_type = other DNA

SEQ ID NO: 19166 - DNA, 746 bp, synthetic construct
  source 1..746: mol_type = other DNA
ttaaaacagctctggggttgtacccacccacagggcccactgggcgttagcacactgattctacggaatctttgtgcgcctgttttatatcccttccctaaaatagtaacttagaagttgaacatttacacgaccaatagcgggcgtggcgcaccagccacgtcttggtcaagcactcctgtttccccggactgagtatcaataggctgctcacgtggctgaaggagaaagtgttcgttatccggctaactacttcgggaaacccagtaacaccatgaaggttgcagagtgtttcgctcagcacttcccccgtgtagatcaggctgatgagtcactgcgaaccccacgggcgaccgtggcagtggctgcgttggcggcctgcctatggggcaacccataggacgctctaatacagacatggtgcgaagagtctactgagctagttggtattcctccggcccctgaatgcggctaatcctaactgcggagcacatgccctcaatccagagggtggtgtgtcgtaacgggcaactctgcagcggaaccgactactttgggtgtccgtgtttccttttattcttatactggctgcttatggtgacaattgaaaggttgttaccatatagctattggattggccatccggtgactaacagagctttgatttatcaattcattgggttcgtgcccctatcatctacagtttattcaactttggtgtacttattatatcttaatagtaagaa

SEQ ID NO: 19167 - DNA, 744 bp, synthetic construct
  source 1..744: mol_type = other DNA
ttaaaacagcctgtgggttgtccccacccacagggcccactgggcgctagcacactggttctgcgggacctttgtgcgcctgttttataacccttccctaagcagtaacttagaagctttgcacaattatggccaatagtgggcgtggcgcgccagtcacgtcttggtcaagcacttctgtgtccccggactgagtatcaatagactgctcacgcggttgaaggagaaaacgttcgttacccggctaactacttcgagaaacctagtagcaccatgaaagttgcggagtgtttcgctcagcacttcccccgtgtagatcaggtcgatgagtcactgtaaaccccacgggcgaccgtgacagtggctgcgttggcggcctgcccatggggtaacccatgggacgctctaatacagacatggtgcgaagagtctattgagctagttagcagtcctccggcccctgaatgcggctaatcctaactgcggagcgcgcactctcaacccagggggcggcgcgtcgtaatgggcaactctgcagcggaaccgactactttgggtgtccgtgtttccttttattctttattggctgcttatggtgacaattgagaagttgttgccatatagctattggattggccatccggtgtctaacagagctattgtttacctattcattggattcgtccctctcaatctcaaggtcattcaaactctcaattgcatattgctccttaactataagaa

SEQ ID NO: 19168 - DNA, 746 bp, synthetic construct
  source 1..746: mol_type = other DNA
ttaaaacagcctgtgggttgtacccacccacagggcccactgggcgttagcacactgattctacggaatctttgtgcgcctgttttatatccctcccctaaaatggtaacttagaagttgaacatttacacgaccaatagtgggcgcggcgcaccagccacgtcttggtcaagcactcctgtttccccggactgagtatcaataggctgctcacgtggctgaaggagaaagtgttcgttatccggctaactacttcgggaaacccagtaacaccatgaaagttgcagagtgtttcgctcagcacttcccccgtgtagatcaggctgatgagtcactgcgaaccccacgggcgaccgtggcagtggctgcgttggcggcctgcctatggggcaacccataggacgctctaatacagacatggtgcgaagagtctactgagctagttagtattcctccggcccctgaatgcggctaatcctaactgcggagcacatgccctcaatccagagggtggtgtgtcgtaacgggcaactctgcagcggaaccgactactttgggtgtccgtgtttccttttattcctgtactggctgcttatggtgacaattgaaaggttgttaccatatagctattggattggccatccggtgactaacagagctttggtttatcaattcattgggttcgtacccttatcatctacagtttattcaactttggtttacttgttatatcttaatagcaagaa

SEQ ID NO: 19169 - DNA, 746 bp, synthetic construct
  source 1..746: mol_type = other DNA
ttaaaacagcctgtgggttgtacccacccacagggcccactgggcgctagcacactgattctacggaatctttgtgcgcctgttttatatccctcccctaaaatagtaacttagaagttgaacatttacgcgaccaatagtgggcgtggcgcaccagccacgtcttggtcaagcactcctgtttccccggactgagtatcaataggctgctcacgtggctgaaggagaaagtgttcgttatccggctaactactacgggaaacccagtaacaccatgaaagttgcagagtgtttcgctcagcacttcccccgtgtagatcaggctgatgagtcactgcgaaccccacgggcgaccgtggcagtggctgcgttggcggcctgcctatggggcaacccataggacgctctaatacagacatggtgcgaagagtctactgtgctagttagtattcctccggcccctgaatgcggctaatcctaactgcggagcacatgccctcaatccagagggtggtgtgtcgtaacgggcaactctgcagcggaaccgactactttgggtgtccgtgtttccttttattcctgtactggctgcttatggtgacaattgaaaggttgttaccatatagctattggattggccatccggtgactaacagagctttggtttatcaattcattgggttcgtacccttatcatctacagtttattcaactttggtttacttgttatatcttaatagtaagaa

SEQ ID NO: 19170 - DNA, 746 bp, synthetic construct
  source 1..746: mol_type = other DNA
ttaaaacagcctgtgggttgtacccacccacagggcccactgggcgttagcacactgattctacggaatctttgtgcgcctgttttatatccctcccctaaaatagtaacttagaagttgaacatttacacgaccaatagtgggcgtggcgcaccagccacgtcttggtcaagtactcctgtttccccggactgagtatcaataggctgctcacgtggctgaaggagaaagtgttcgttatccggctaactacttcgggaaacccagtaacaccatgaaagttgcagagtgtttcgctcagcacttcccccgtgtagatcaggctgatgagtcactgcgaaccccacgggcgaccgtggcagtggctgcgttggcggcctgcctatggggtaacccataggacgctctaatacagacatggtgcgaagagtctactgagctagttggtattcctccggcccctgaatgcggctaatcctaactgcggagcacatgccctcaatccagagggtggtgtgtcgtaacgggtaactctgcagcggaaccgactactttgggtgtccgtgtttccttttattcttgtactggctgcttatggtgacaattgaaaggttgttaccatatagctattggattggccatccggtgactaacagagctttgatctatcaattcattgggttcgtgcccttatcatctacagtttattcaactttggtgtacttgttatatcttaatagtaagaa

SEQ ID NO: 19171 - DNA, 746 bp, synthetic construct
  source 1..746: mol_type = other DNA
ttaaaacagcctgtgggttgcacccactcacagggcccactgggcgttagcacactgattctacggaatctttgtgcgcctgttttatatccctcccctaagatagtaacttagaagttgagcatttacacgaccaatagtgggcgtggcgcaccagccacgtcttggtcaagcactcctgtttccccggactgagtatcaataagctgctcacgcggctgaaggagaaagtgttcgttatccggctaactacttcgggaaacccagtaacaccatgaaagttgcagagtgtttcgctcagcacttcccccgtgtagatcaggctgatgagtcactgcgaaccccacgggcgaccgtggcagtggctgcgttggcggcctgcctatggggcaacccataggacgctctaatacagacatggtgcgaagagtctactgagctagttggtattcctccggcccctgaatgcggctaatcctaactgcggagcacatgccctcaatccagagggtggtgtgtcgtaacgggcaactctgcagcggaaccgactactttgggtgtccgtgtttccttttactcttatactggctgcttatggtgacgatcgaaaggttgttgccatatagctattggattggccatccggtgactaacagagctttgatttatcaattcattgggtttgtgcccttatcatctgcagtttattcaactttggtgtacttgttatatcttaatagtaggaa

SEQ ID NO: 19172 - DNA, 737 bp, synthetic construct
  source 1..737: mol_type = other DNA
acagcctgtgggttgtacccactcacagggcccactgggcgccagcactctggtactgcggtacccttgtgcgcctgttttatcaccccaccccatctgaaacgtagaagcaatgcacaactgaccaatagtgggtgtggcgcaccagccacatcttggtcaagcacttctgtttccccgggtttagtatcaataagctgctcacgcggctgaaggagaaaacacccgttatccggccaactacttcgagaaacctagtaccgctatgaacgttgcaaggcgtttcgctcaacacttcccccgtgtagatcaggctgatgagtcaccgcatccctcacgggcgaccgtggcggtggctgcgctggcggcctgcctatgggcttgcccataggacgccttaatactgacatggtgcgaagagtctattgagctagttggtagtcctccggcccctgaatgcggctaatcctaactgcggagcacacactcacaaaccagtgagcggtgtgtcgtaacgggcaactctgcagcggaaccgactactttgggtgtccgtgtttccttttattcttatactggctgcttatggtgacaattaaagaattgttaccatatagctattggattggccatccggtgtctaacagaggcattatatacttgttcgttggattcacctcgttgtcatacaaatcccttaacactttgtgctttatcttgagtttgaattcaaaaag

SEQ ID NO: 19173 - DNA, 729 bp, synthetic construct
  source 1..729: mol_type = other DNA
ggttgtccccacccacagggcccactgggcgctagcacactggttttgcgggacctttgtgcgcctgttttataacccttccctaagcagtaacttagaagctttgtacaatcatggccaatagtgggcgtggcgcgccagtcacgtcttggtcaagcacttctgtatccccggactgagtatcaatagactgctcacgtggttgaaggagaaaacgttcgttacccggctaactacttcgagaaacctagtagcaccatgaaagttgcggagtgtttcgctcagcacttcccccgtgtagatcaggttgatgagtcactgtaaaccccacgggcgaccgtgacagtggctgcgttggcggcctgcccatggggtaacccatgggacgctctaatacagacatggtgcgaagagtctattgagctagttagcagtcctccggcccctgaatgcggctaatcctaactgcggagcgcgcaccctcaacccagggggcggcgcgtcgtaatgggcaactctgcagcggaaccgactactttgggtgtccgtgtttccttttattctttattggctgcttatggtgacaattgaaaagttgttaccatatagctattggattggccatccggtgtctaacagagctattgtttacctattcattggattcgtccctcttaatctcaaggtcattcaaactctcgattgcatattgctccttaactgtaagaa

SEQ ID NO: 19174 - DNA, 735 bp, synthetic construct
  source 1..735: mol_type = other DNA
ctgtgggttgttcccacccacagggcccactgggcgctagcacactgattctgcgggatctttgtgcgcctgttttataaccccttccctaagcagcaacttagaagcttcacactatcacgaccagcagtgggcgtggcgcgccagtcacgtcttggtcaagcacttctgtttccccggactgagtatcaatagactgctcacgcggttgaaggagaaaacgttcgttatccggctaactacttcgagaagcctagtagcaccgtgaaagttgcagagtgtttcgctcagcacttcccccgtgtagatcaggtcgatgagtcactgtaaaccccacgggcgaccgtgacagtggctgcgttggcggcctgcccatggggtaacccatgggacgctctaatacagacacggtgtgaagagtctattgagctagttagtagtcctccggcccctgaatgcggctaatcctaactgcggagcgcgtaccctcaacccagggggcggcgcgtcgtaatgggtaactctgcagcggaaccgactactttgggtgtccgtgtttccttttattccttattggctgcttatggtgacaattgaaaagttgttaccatatagctattggattggccatccggtgaccaacagagctattgtttacctgtttgttggatacgtccctcttaatctcaaggccattcaaactcttgattatatattgctccttaactacaagaa

SEQ ID NO: 19175 - DNA, 747 bp, synthetic construct; identical to SEQ ID NO: 1152
  source 1..747: mol_type = other DNA

SEQ ID NO: 19176 - DNA, 714 bp, synthetic construct
  source 1..714: mol_type = other DNA
acagggcccactgggcgctagcactccgattctgcggaatctttgtgcgcctgttttataacctccccgaatctgtaacttagaagtcatgtacgttactgatcaacagcaggcgtggcacaccagccatgtcttgatcaagcacttctgtacccccggactgagtatcaatagactgcttacgtggtcgaaggagaaaacgttcgttatccggctaactacttcgagaaacctagtagcaccactgaaactgcggagtgtttcgctcagcacttcccccgtgtagatcaggtcgatgagtcactgcttaccccacgggtgaccgtggcagtggctgcgttggcggcctgcctatggggcaacccataggacgctctaaagtggacatggtgcgaagagtctattgagctagttggtagtcctccggcccctgaatgcggctaatcctaactgcggagcgcatgccctcaaaccagagggtggtgcgtcgtaacgggtaactctgcagcggaaccgactactttgggtgtccgtgtttcttttattctcataatggctgcttatggtgacaattgaggaattgttaccatatagctattggattggccatccggtgtgcaacagagctattatctacttgtttgttggatacattccactaacacctaaatcctttaatacactgcactatattctgacgctgaacgcaagaga

SEQ ID NO: 19177 - DNA, 1000 bp, synthetic construct; identical to SEQ ID NO: 1483
  source 1..1000: mol_type = other DNA

SEQ ID NO: 19178 - DNA, 744 bp, synthetic construct
  source 1..744: mol_type = other DNA
ttaaaacagcctgtgggttgttcccacccacagggcccactgggcgctagcacactgattctgcgggatctttgtgcgcctgttttataacccttccctaaacagcaacttagaagttttgcacatccacgaccagtagtaagcgtgacgcgccagtcacgtcttggtcaagcacttctgtatccccggactgagtatcaatagactgctcacgcggttgaaggagaaaacgttcgttatccggctaactacttcgagaaacctagtaacaccgtgaaagttgcggagtgtttcgctcagcacttcccccgtgtagatcaggccgatgagtcactgtaaaccccacgggcgaccgtgacagtggctgcgttggcggcctgcccatggggcaactcatgggacgctctgatacagacatggtgtgaagagtctattgagctagttagtagtcctccggcccctgaatgcggctaatcctaactgcggagcacgcaccctcaacccagggggcggcgtgtcgtaatgggtaactctgcagcggaaccgactactttgggtgtccgtgtttccttttattccttattggctgcttatggtgacaattgaagagttgttgccatatagctattggattggccatccggtatctaatagagctattgtttacctgttcattggatacgtccctcttagtcttaagatcattcaaactcttgattacatattactccttaactataagaa

SEQ ID NO: 19179 - DNA, 741 bp, synthetic construct
  source 1..741: mol_type = other DNA
ttaaaacagcctgtgggttgcacccactcacagggcctactgggcgcaagcactctggtacttcggtacctttgtgcgcctgttttacacccccccccagtgaaacttagaagcagcaaaccacgatcaatagcaggcatagcgctccagttatgtcttgatcaagcactcctgtttccccggactgagtatcaatagactgctcgcgcggttgaaggagaaaacgttcgttacccggccaactacttcggaaaacctagtaacaccatgaaagttgcggagagtttcgttcagcactcccccagtgtagatcaggtcgatgagtcaccgcattccccacgggcgaccgtggcggtggctgcgttggcggcctgcccatggggtaacccatggggcgctctaatacggacatggtgtgaagagtctactgagctagttggtagtcctccggcccctgaatgcggctaatcccaactgcggagcacacgcccacaagccagcgggtagtgtgtcgtaatgggtaactctgcagcggaaccgactactttgggtgtccgtgtttccttttatctttatattggctgcttatggtgacaattagagaattgttaccatatagctattggattggctatccggtgtgcaacagagcaattatttacctgtttattggttttgtaccattaactttgaattctgtgaccacccttaattatatcctgacccttaacacagctaaac

SEQ ID NO: 19180 - DNA, 736 bp, synthetic construct
  source 1..736: mol_type = other DNA
cagcctgtgggttgtacccactcacagggcccactgggcgccagcactctggtactgcggtacctttgtgcgcctgttttatcaccccaccccatttgaaacgtagaagcaatgcacaactgatcaatagcgggtgtggcgcaccagccacatctcgatcaagcacttctgttcccccgggtttagtatcaataagctgctcacgcggctgaaggagaaaacacccgttatccggccgactacttcgagaaacctagtaccgctatgaacgttgcaaggcgtttcgctcagcacttcccccgtgtagatcaggctgatgagtcaccgcttccctcacgggcgaccgtggcggtggctgcgctggcggcctgcctatgggcttgcccataggacgccttaatactgacatggtgcgaagagtctattgagctagttggtagtcctccggcccctgaatgcggctaatcctaactgcggagcacatactcacaaaccagtgagcggtgtgtcgtaacgggcaactctgcagcggaaccgactactttgggtgtccgtgtttccttttattcttatactggctgcttatggtgacaattaaagaattgttaccatatagctattggattggccatccggtgtctaacagagatattatatacttgtttgttggattcacctcgttgtcatacgaatccctcaacactttgtgccttatcttaaatttaaactcaaaaag

SEQ ID NO: 19181 - DNA, 726 bp, synthetic construct
  source 1..726: mol_type = other DNA
tgtccccacccacagggcccactgggcgctagcacactggttctgcgggacctttgtgcgcctgttttataacccttccctaagcagtaacttagaagctttgtacaatcatggccaatagtgggcgcgacgcaccagtcacgtcttggtcaagcacttctgtattcccggactgagtatcaatagactgctcacgcggttgaaggagaaaacgttcgttacccggctaactacttcgagaaacctagtagcaccatgaaagttgcggagtgtttcgctcagcacttcccccgtgtagatcaggtcgatgagtcactgtaaaccccacgggcgaccgtgacagtggctgcgttggcggcctgcccatggggtaacccatgggacgctctaatacagacatggtgcaaagagtctattgagctagttagcagtcctccggcccctgaatgcggctaatcctaactgcggagcgcgcaccctcaacccagggggcggcgcgtcgtaatgggtaactctgcagcggaaccgactactttgggtgtccgtgtttccttttattctttattggctgcttatggtgacaattgaaaagttgttaccatatagctattggattggccatccggtgtctaacagagctattgtttacctattcattggcttcgtccctctcaatctcaaggccattcaaactctcggttacatattgctcctcaattgtaagaa

SEQ ID NO: 19182 - DNA, 726 bp, synthetic construct
  source 1..726: mol_type = other DNA
gttcccacccacagggcccactgggcgctagcacactgattctgcgggatctttgtgcgcctgttttataaccctccccctaagcagcaacttagaagctctgtacaatcacgaccagtagtgggcgtggcgcgccagccatgtcttggtcaagcacttctgtatccccggactgagtatcaatagactgcttacgtggtcgaaggagaaaacgttcgttacccggctaactacttcgagaaacccagtagcactatgaaagttgcggagtgtttcgctcagcacttcccccgtgtagatcaggtcgatgagtcactgtaaaccccacgggcaaccgtgacagtggctgcgttggcggcctgcccatggggtaacccatgggacgctctaatacagacatggtgtgaagagtctattgagctagttagtagtcctccggcccctgaatgcggctaatcctaactgcggagcgcgcaccctcaacccagggggcggcgcgtcgtaatgggtaactctgcagcggaaccgactactttgggtgtccgtgtttccttttattccttattggctgcttatggtgacaattgagaagttgttaccatatagctattggattggccatccggtgtctaacagagccattgtttacctattcattggatacgtccctcttgatctcaaggccattcaaactcttgactatatattgctccttaactgcaagaa

SEQ ID NO: 19183 - DNA, 727 bp, synthetic construct
  source 1..727: mol_type = other DNA
ttgtccccacccacagggcccactgggcgctagcacactggttctgcgggacctttgtgcgcctgttttataacccttccctaagcagtaacttagaagctttgtacaatcatgaccaatagtgggcgtggcgcgccagtcacgtcttggtcaagcacttctgtatccccggactgagtatcaatagactgctcacgtggttgaaggagaaaacgtccgttacccggctaactacttcgagaaacctagtagcaccatgaaagttgcggagtgtttcgttcagcacttcccccgtgtagatcaggtcgatgagtcactgtaaaccccacgggcgaccgtgacagtggctgcgttggcggcctgcccatggggtaacccatgggacgctctaatacagacatggtgcgaagagtctattgagctagttagtggtcctccggcccctgaatgcggctaatcctaactgcggagcgcgcaccctcaacccagggggcggcgcgtcgtaatgggcaactctgcagcggaaccgactactttgggtgtccgtgtttccttttattttttattggctgcttatggtgacaattgaaaagttgttaccatatagctattggattggccatccggtgtctaacagagctattgtttacctattcattggattcgtccctcttaatctcaaggtcattcaaactctcgattgcatattgctccttaactgtaagaa

SEQ ID NO: 19184 - DNA, 748 bp, synthetic construct
  source 1..748: mol_type = other DNA
ttaaaacagcctgtgggttgcacccacccacagggcccactgggcgctagcactctgattctatggaatctttgtgcgcctgttttataaccccctcccccaagtttgtaatttagaagcaaagtaccgtaacgatcaacagcaggcgtggcgtaccagccatgtctcgatcaagcacttctgtttccccggacagagtatcaatagactactcacgtggttgaaggagaaaacgtccgttatccggctaactacttcgagaaacctagtaacaccattgaagctgcagagcgtttcgctcagcacttaccccgtgtagatcaggtcgatgagtcactgcattccccacgggcgaccgtggcagtggctgcgttggcggcctgcctatggggtcacccataggacgctctaatgtggacatggtgcgaagagtctattgagctagttagtagtcctccggcccctgaatgcggctaatcctaactgcggagcgcataccctcaaaccagggggtggtgcgtcgtaacgggtaactctgcagcggaaccgactactttgggtgtccgtgtttccttttattttcttactggctgcttatggtgacaattgaagaattgttgccatatagctattggattggccatccggtgtgtaacagagcaatcatctatttgtttgtcgggtatatcccactaacgctcaactcttttaacacattacagtatatactaatcctgaatacaagaaa

SEQ ID NO: 19185 - DNA, 744 bp, synthetic construct
  source 1..744: mol_type = other DNA
ttaaaacagcctgtgggttggccatccggtgggcccactgggcgttagcacactgattctacggaatctttgtgcgcctgttttatatccctcccctaaaatagtaacttagaagttgaacatttacacgaccaatagtgggcgtggcgcaccagccacgtcttggtcaagcactcctgtttccccggactgagtatcaataggctactcacgtggctgaaggagaaagtgttcgttatccggctaactacttcgggaaacccagtaacaccatgaaagttgcagagtgtttcgctcagcacttcccccgtgtagatcaggctgatgagtcactgcgaacctcacgggcgaccgtggcagtggctgcgttggcggcctgcctatggggcaacccataggacgctctaatacagacatggtgcgaagagtctactgagctagttagtattcctccggcccctgaatgcggctaatcctaactgcggagcacatgccttcaatccagagggtggtgtgtcgtaacgggcaactctgcagcggaaccgactactttgggtgtccgtgtttccttttattcttatactggctgcttatggtgacaattgaaaggttgttaccatatagctattggattggccatccggtgactaacagagctttgatttatcaattcattgggttcgtgcccttatcatctacagtttattcaactttggtgtacttgttatatcttaatagtaggaa

SEQ ID NO: 19186 - DNA, 744 bp, synthetic construct
  source 1..744: mol_type = other DNA
ttaaaacagcctgtgggttggccatccggtgggcccactgggcgttagcacactgattctacggaatctttgtgcgcctgttttatatccctcccctaaaatagtaacttagaagttgaacatttacacgaccaatagtgggcgtggcgcaccagccacgtcttggtcaagcactcctgtttccccggactgagtatcaataggctactcacgtggctgaaggagaaagtgttcgttatccggctaactacttcgggaaacccagtaacaccatgaaagttgcagagtgtttcgctcagcacttcccccgtgtagatcaggctgatgagtcactgcgaaccccacgggcgaccgtggcagtggctgcgttggcggcctgcctatggggcaacccataggacgctctaatacagacatggtgcgaagagtctactgagctagttagtattcctccggcccctgaatgcggctaatcctaactgcggagcacatgccctcaatccagagggtggtgtgtcgtaacgggcaactctgcagcggaaccgactactttgggtgtccgtgtttccttttattcttatactggctgcttatggtgacaattgaaaggttgttaccatatagctattggattggccatccggtgactaatagagccttggtttatcaattcattgggttcgtgcccttatcatctacagtttattcaactttggtgtacttgttatatcttaatagtaagaa

SEQ ID NO: 19187 - DNA, 744 bp, synthetic construct
  source 1..744: mol_type = other DNA
ttaaaacagcctgtgggttggccacccggtgggcccactgggcgttagcacactgattctacggaacctttgtgcgcctgttttatatccctcccctaaaatagtaacttagaagttgaacatttacacgaccaatagtgggcgtggcgcaccagccacgtcttggtcaagcactcctgtttccccggactgagtatcaataggctgctcacgtggctgaaggagaaagtgttcgttatccggctaactacttcgggaaacccagtaacaccatgaaagttgcagagtgtttcgctcagcacttcccccgtgtagatcaggctgatgagtcactgcgaaccccacgggcgaccgtggcagtggctgcgttggcggcctgcctatggggcaacccataggacgctctaatacagacatggtgcgaagagcctactgagctagttggtattcctccggcccctgaatgcggctaatcctaactgcggagcacatgccctcaatccagagggtggtgtgtcgtaacgggcaactctgcagcggaaccgactactttgggtgtccgtgtttccttttattcttatactggctgcttatggtgacaattgaaaggttgttaccatatagctattggattggccatccggtgactaacagagctttgatttatcaattcattgggttcgtgcccctatcacctacagtttattcaactttggtgtacttattatatcttaatagtaagaa

SEQ ID NO: 19188 - DNA, 744 bp, synthetic construct
  source 1..744: mol_type = other DNA
ttaaaacagcctgtgggttggccatccggtgggcccactgggcgttagcacactgattctacggaacctttgtgcgcctgttttatatccctcccctaaaatagtaacttagaagttgaacatttacatgaccaatagtaggcgtggcgcaccagccacgtcttggtcaagcactcctgtttccccggactgagtatcaataggctgctcacgcggctgaaggagaaagtgttcgttatccggctaactacttcgggaaacccagtaacaccatgaaagttgcagagtgtttcgctcagcacttcccccgtgtagatcaggctgatgagtcactgcgaaccccacgagcgatcgtggcagtggctgcgttggcggcctgcctatggggcaacccataggacgctctaatacagacatggtgcgaagagtctactgagctagttggtattcctccggcccctgaatgcggctaatcctaactgcggagcacatgccctcaatccagagggtggtgtgtcgtaacgggcaactctgcagcggaaccgactactttgggtgtccgtgtttccttttattctcatactggctgcttatggtgacaattgaaaggttgttaccatatagctattggattggccatccggtgactaacagagctttgatttatcaattcattgggtttgtgcccttatcacctacagtttattcaactttggtgtacttgttacatcttaatagtaagaa

SEQ ID NO: 19189 - DNA, 744 bp, synthetic construct
  source 1..744: mol_type = other DNA
ttaaaacagcctgtgggttggccatccggtgggcccactgggcgttagcacactgattctacggaatctttgtgcgcctgttttatatccctcccctaaaatagtaacttagaagttgaacatttacacgaccaatagtgggcgtggcgcaccagccacgtcttggtcaagcactcctgtttccccggactgagtatcaataggctgctcacgtggctgaaggagaaagtgttcgttatccggctaactacttcgggaaacccagtaacaccatgaaagttgcagagtgtttcgctcagcacttcccccgtgtagatcaggctgatgagtcactgcgaaccccacgggcgaccgtggcagtggctgcgttggcggcctgcctatggggcaacccataggacgctctaatacagacatggtgcgaagagtctactgagctagttggtattcctccggcccctgaatgcggctaatcctaactgcggagcacatgccctcaatccagagggtggtgtgtcgtaacgggcaactctgcagcggaaccgactactttgggtgtccgtgtttccttttattcttatactggctgcttatggtgacaattgaaaggttgttaccatatagctattggattggccatccggtgactaacagagctttgatttatcaattcattgggttcgtgcccctatcacctacagtttattcaactttggtgtacttattatatcttaatagtaagaa

SEQ ID NO: 19190 - DNA, 738 bp, synthetic construct
  source 1..738: mol_type = other DNA
cctgtgggttgcacccacccacaggacccacgcggtgctagcactctggttctacgggacctttgtgcgcctgttttacgtcccctccccgatttgtaacttagaagcaatttgcaatactgatcagtagcaggcatagcgcaccagctatgtcttgatcaagcacttctgtttccccggaccgagtatcaatagactgttcacacggttgaaggagaaaacgtccgttatccggctaactacttcgagaaacccagtagcgccattgaaactgcagagtgtttcgctccacacttcccccgtgtagatcaggtcgatgagtcactgcaatccccacgggcgaccgtggcagtggctgcgctggcggcctgcctatggggcaacccataggacgctctaatgtggacatggtgtgaagagtctattgagctagttagtagtcctccggcccctgaatgcggctaatcctaactgcggagcacatgccttcaatccagagggtagtgtgtcgtaatgggcaactctgcagcggaaccgactactttgggtgtccgtgtttccttttattctcacattggctgcttatggtgacaattacggaattgttaccatatagctattggattggccatccggtgtgcaatagagctattatatacctatttgttggctttgtaccactgaccttaaaatctataaccactctcgagtgtatattaacccttaatacaatcaagc

SEQ ID NO: 19191 - DNA, 745 bp, synthetic construct
  source 1..745: mol_type = other DNA
ttaaaacagcctgtgggttgttcccacccacagggcccactgggcgctagcacactgattctgcgggatctttgtgcgcctgttttataacccttcccctaaacagcaacttagaagttttgtacaatcacgaccaatagtgggcgtgacgcgccagtcacgtcttggtcaaacacttctgtatccccggactgagtaccaataggctgctcacgcggttgaaggggaaaacgttcgttacccggctaactacttcgagaaacctagtaacaccatgaaagttgcggagtgtttcgctcagcacttcccccgtgtagatcaggtcgatgagtcactgtaaaccccacgggcgaccgtgacagtggctgcgttggcggcctgcccatggggtaacccatgggacgctctaatacagacatggtgcgaagagtctattgagctagttagcagtcctccggcccctgaatgcggctaatcctaactgcggagcgcgcaccctcaatccagggggcggcgtgtcgtaatgggtaactctgcagcggaaccgactactttgggtgtccgtgtttccttttattctttattggctgcttatggtgacaattgaaaagttgttaccatatagctattggattggccatccggtgtctaacagagctattgtttacctatttattggatacgtccctctcaatctcaaggtcattcaaactcttgattatatattgctccttaactgtaggaa

SEQ ID NO: 19192 - DNA, 735 bp, synthetic construct
  source 1..735: mol_type = other DNA
gcctgtgggttgcacccacccacagggcccactgggcgttagcactctggtaccacggtacccttgtgcgcctgttttatcaccctaccccaacttgaaacttagaagcaatacacaatcgaccaatagcaggtgtggcgcaccagccgcatctaggtcaagcacttctgtttccccgggttgagtatcaataagctgtccacacggctgaaggagaaaacgcccgttatccggccaattacttcgagaaacctagtatcactatgaacgttgcaaggcgtttcgctcagcacttcccccgtgtagatcaggtcgatgagtcaccgcattccccacgggcgaccgtggcggtggctgcgttggcggcctgcctatgggttaacccataggacgccttaatactgacatggtgtgaagagtctattgagctaattggtagtcctccggcccctgaatgcggctaatcctaactgcggagcacatgctcacaacccagtgagtggtgtgtcgtaacgggcaactctgcagcggaaccgactactttgggtgtccgtgtttccttttattcttacattggctgcttatggtgacaatcacagaattgttaccatatagctattggattggccatccgacttctaacagagctattatttacctgtttgttggattcactccgttgacatataaatccctaaacactttgtgctttattttgaacttgaacgcacgaaa

SEQ ID NO: 19193 - DNA, 735 bp, synthetic construct
  source 1..735: mol_type = other DNA
agcctgtgggttgcacccacccacagggcccactgggcgccagcactctggtactgcggtacctttgtgcgcctgttttatcaccccaccccatccggaacgtagaagcaatgcacaactgaccaatagtgggtgtggcgcaccagccacatcatggtcaagcactcctgtttccccgggtttagtatcaataagctgctcacgtggctgaaggagaaaacacccgttatccggccaactacttcgagaaacttagtaccgctatgaacgttgcaaggcgtttcgctcagcacttcccccgtgtagatcaggccgatgagtcaccgcattcctcacgggcgaccgtggcggtggctgcgctggcggcctgcctatgggcttgcccataggacgccttaatactgacatggtgcgaagagtctattgagctagttggtagtcctccggcccctgaatgcggctaatcctaactgcggagcacatactcacaaaccagtgagcagtgtgtcgtaacgggcaactctgcagcggaaccgactactttgggtgtccgtgtttccttttattcctacactggctgcttatggtgacaattaaagaattgttaccatatagctattggattggccatccggtgtctaacagagctattatatacttgtttgttggattcatctcgttatcacacaaatcccttaacactttgtgctttatcttgaatttgaactcaaaaag

SEQ ID NO: 19194 - DNA, 734 bp, synthetic construct
  source 1..734: mol_type = other DNA
aagctgtgggttgcacccactcacagggcccactgggcgcaagcactctggtacctcggtacctttgtgcgcctgttttatacccccccccagtgaaacttagaagcagcaaatcacggtcaatagcaggcataacgctccagttatgtcttgatcaagcacttctgtttccccggaccgagtatcaatagactgctcgcgcggttgaaggagaaaacgttcgttatccggctagctacttcgggaaacccagtaacaccatgaaagttgcggagagcttcgttcagcactcccccagtgtagatcaggtcgatgagtcaccgcattccccacgggcgaccgtggcggtggctgcgttggcggcctgcccatggggtaacccatggggcgctctaatacggacatggtgtgaagagtctactgagctagttagtagtcctccggcccctgaatgcggctaatcccaactgcggagcacgcgcccacaaaccagtgggtagtgtgtcgtaacgggcaactctgcagcggaaccgactactttgggtgtccgtgtttccttttatctttatactggctgcttatggtgacaattaaagaattgttaccatatagctattggattggccatccggtgtgcaacagagcaattgtttacctatttattggttttgtaccattaaccttgaagtctgcgaccacccttaactatatcttaaccctcaacacagctaaac

SEQ ID NO: 19195 - DNA, 733 bp, synthetic construct
  source 1..733: mol_type = other DNA
gtgggttgttcccactcacagggcccactgggcgctagcacactgattctgcgggatctttgtgcgcctgttttataaccccttccctaagcagcaacttagaagcttcacactaccacgaccagtagtgggcgtggcgcgccagtcacgtcttggtcaagcacttctgtttccccggactgagtatcaatagactgctcacgcggttgaaggagaaaacgttcgttatccggctaactacttcgagaaacctagtagcaccgtgaaagttgcggagtgtttcgctcagcacttcccccgtgtagatcaggtcgatgagtcactgtaaaccccacgggcgaccgtgacagtggctgcgttggcggcctgcccatggggtaacccatgggacgctctaatacagacacggtgtgaagagtctattgagctagttagtagtcctccggcccctgaatgcggctaatcctaactgcggagcgcgcaccctcaacccagggggcggcgcgtcgtaatgggtaactctgcagcggaaccgactactttgggtgtccgtgtttccttttattccttattggctgcttatggtgacaattgaaaagttgttaccatatagctattggattggccatccggtgaccaacagagctattgtttacctgtttattggatacgtccctcttaatctcaaggccattcaaactcttgattatatattactccttaactgtaagaa

SEQ ID NO: 19196 - DNA, 739 bp, synthetic construct
  source 1..739: mol_type = other DNA
ttaaaacagcctgtgggttgcacccactcacagggcccactgggcgtcagcactctggtacctcggtacctttgtgcgcctgttttatatccccccccattgaaacttagaagcaatgcacctcgatcaatagcgggcgtggcgcaccagccacgtcatgatcaagcacttctgtttccccggaccgagtatcaatagactgctaacgcggttgagggagaaaacgtccgttacccggccaactgcttcgagaaatccagtaacatcatgaaaattgcagagtgtttcgctcagcacttccccagtgtagatcaggtcgatgagtcaccgcgttccccacgggcgaccgtggcggtggctgcgttggcggcctgcctgtggagcaacccacaggacgctctaatatagacatggtgtgaagaatctattgagccagttggtagtcctccggcccctgaatgcggctaatcctaactgcggagcacgtgccctcaatccagtgggtagcgtgtcgtaatgggtaactctgcagcggaaccgactactttgggtgtccgtgtttccatttattcttacattggctgcttatggtgacaattgaaagattgttgccatatagctattggattggccatccggtatcgaatagagcggttatctatcagtttattggatttatcccgttgagtgtgcagcagtatcgcactttgcttttaatagtgagactgaatagtataaa

SEQ ID NO: 19197 - DNA, 739 bp, synthetic construct
  source 1..739: mol_type = other DNA
ttaaaacagcctgtgggttgcacccactcacagggcccactgggcgtcagcactctggtacctcggtacctttgtgcgcctgttttatacccccccccattgaaacttagaagcgatgcacttcgatcaatagcgggcgtggcacaccagccacgtcgtgatcaagcacttctgtttccccggaccgagtatcaatagactgctaacgcggttgagggagaaaacgtccgttacccggccaactgcttcgagaaatccagtaacaccatgaaaattgcagagtgtttcgctcagcacttccccagtgtagatcaggtcgatgagtcaccgcattccccacgggcgaccgtggcggtggctgcgttggcggcctgcctgtggggcaacccacaggacgctctaatatagacatggtgtgaagaatctattgagccagttggtagtcctccggcccctgaatgcggctaatcctaactgcggagcacgtgccctcaatccagtgggtggcgtgtcgtaatgggtaactctgcagcggaaccgactactttgggtgtccgtgtttccatttattcttacattggctgcttatggtgacaattgaaagattgttaccatatagctattggattggccatccggtgtcgaatagagcgattatctatcagtttattggatttatcccgttgaatgtgcagcagtatcgcactttgcttttaatagtgagattgaatagtacaaa

SEQ ID NO: 19198 - DNA, 743 bp, synthetic construct
  source 1..743: mol_type = other DNA
ttaaaacagcctgtgggttgcacccactcacagggcccactgggcgctagcactctgattctacggaatccttgtgcgcctgttttagagccccttcccccaatgtaatttagaagcaaagtactaacgatcaacagcaggcgtggcgcaccagccatgtctcgatcaagcacttctgttcccccggacagagtatcaatagactactcacgtggttgaaggagaaaacgtccgttatccggctaactacttcgagaaacctagtaacaccattgaagctgcagagcgtttcgttcagcacttaccccgtgtagatcaggtcgatgagtcactgcattccccacgggcgaccgtggcagtggctgcgttggcggcctgcctatggggtcacccataggacgctctaatgtggacatggtgcgaagagtctattgagctagttagtagtcctccggcccctgaatgcggctaatcctaactgtggagcgcataccctcaaaccagggggcggtgcgtcgtaacgggcaactctgcagcggaaccgactactttgggtgtccgtgtttccttttattttcttactggctgcttatggtgacaattgaagaattgttgccatatagctattggattggccatccggtgtgtaacagagcaatcatctatttgtttgtcgggtatatcccactaacgctcaactcttttaacacattacaatatatactaatcctgaatacaagaaa

SEQ ID NO: 19199 - DNA, 743 bp, synthetic construct
  source 1..743: mol_type = other DNA
ttaaaacagcctgtgggttgtacccacccacagggcccactgggcgctagcactctgattctacggaatctttgtgcgcctgttttataatcccctcccccaatgtaatttagaagcaaagtactaacgatcaacagcaggcgtggcgcgccagccatgtctcgatcaagcacttctgtttccccggacagagtatcaatagactactcacgtggttgaaggagaaaacgtccgttatccggctaactacttcgagaaacctagtaacaccattgaagctgcagagcgtttcgctcagcacttaccccgtgtagatcaggtcgatgagtcactgcattccccacgggcgaccgtggcagtggctgcgttggcggcctgcctatggggtcacccataggacgctctaatgtggacatggtgcgaagagtctattgagctagttagtagtcctccggcccctgaatgcggctaatcctaactgcggagcgcataccctcaaaccagggggtggtgcgtcgtaacgggcaactctgcagcggaaccgactactttgggtgtccgtgtttccttttattttcttactggctgcttatggtgacaattgaagaattgttgccatatagctattggattggccatccggtgtgtaacagagcaatcatctatttgtttgtcgggtatatcccactaacgctcaactcttttaacacattacagtatatactaatcctgaatacaagaaa

SEQ ID NO: 19200 - DNA, 743 bp, synthetic construct
  source 1..743: mol_type = other DNA
ttaaaacagcctgtgggttgcacccactcacagggcccactgggcgctagcactctgattctacggaatctttgtgcgcctgttttataaccccctcccccaatgtaatttagaagcaatgcaccaatgatcaacagcaggcgtggcgcaccagccatgtctcgatcaagcacttctgtttccccggacagagtatcaatagactgctcgcgtggtcgaaggagaaaacgtccgttacccggctaactacttcgagaaacctagtagcaccaatgaagctgcagagcgtttcgctcagcacttaccccgtgtagatcaggccgatgagtcactgcgttccccacgggcgaccgtggcagtggctgcgttggcggcctgcctatggggtcacccataggacgctctaatgtggacatggtgcgaagagtctattgagctagttagtagtcctccggcccctgaatgcggctaatcctaactgcggagcgcataccctcaaaccagggggtggtgcgtcgtaacgggtaactctgcagcggaaccgactactttgggtgtccgtgtttccttttattctcttaatggctgcttatggtgacaattgaggaattgttaccatatagctattggattggccatccggtgtgtaacagagcaattatctacttgtttgcaggatttaccccattaacgttcaaatctcttaacacactacagtacatactaaccttgaatacaagaaa

SEQ ID NO: 19201 - DNA, 743 bp, synthetic construct
  source 1..743: mol_type = other DNA
ttaaaacagcctgtgggttgtacccacccacagggcccactgggcgctagcactctgattctacggaatctttgtgcgcctgttttacaaccccctccccctatgtaacttagaagcaatgcaccaatgatcaacagcaggcgtggcgcaccagccatgtcttgatcaagcacttctgtttccccggacagagtatcaatagactgctcgcgtggtcgaaggagaaaacgtccgttacccggctaactacttcgagaaacctagtagcaccaatgaagctgcagagcgtttcgctcagcacttaccccgtgtagatcaggccgatgagtcactgcgttccccacgggcgaccgtggcagtggctgcgttggcggcctgcctatggggtcacccataggacgctctaatgtggacatggtgcgaagagtctattgagctagttagtagtcctccggcccctgaatgcggctaatcctaactgcggagcgcataccctcaaaccagggggtggtgcgtcgtaacgggtaactctgcagcggaaccgactactttgggtgtccgtgtttccttttattttcttaatggctgcttatggtgacaattgaggaattgttaccatatagctattggattggccatccggtgtgtaacagagcaattatctacttgtttgtaggatataccccattaacgttcaaatctcttaacacactacagtacatactaactttgaacacaagaaa

SEQ ID NO: 19202 - DNA, 743 bp, synthetic construct
  source 1..743: mol_type = other DNA
ttaaaacagcctgtgggttgtacccacccacagggcccactgggcgctagcactctgattctacggaatctttgtgcgcctgttttataaccccctcccccaatgtaatttagaagcaaagtactaacgatcaacagcaggcgtggcgcaccagccatgtctcgatcaagcacttctgtttccccggacagagtatcaatagactactcacgtggtcgaaggagaaaacgtccgttatccggctaactacttcgagaaacctagtaacgccattgaagctgcagagtgtttcgctcagcacttaccccgtgtagatcaggtcgatgagtcactgcattccccacgggcgaccgtggcagtggctgcgttggcggcctgcctatggggtcacccataggacgctctaatgtggacatggtgcgaagagtctattgagctagttagtggtcctccggcccctgaatgcggctaatcctaactgcggagcgcataccctcaaaccagggggtggtgcgtcgtaacgggcaactctgcagcggaaccgactactttgggtgtccgtgtttccttttattttcttactggctgcttatggtgacaattgaagaattgttgccatatagctattggattggccatccggtgtgtaacagagcaatcatctatttgtttgtcggatacatcccactaacgcttaactcttttaacacattacagtatatactaatcctgaacacaagaaa

SEQ ID NO: 19203 - DNA, 728 bp, synthetic construct
  source 1..728: mol_type = other DNA
gggttgtacccactcacagggcccaccgggcgctagcactctggtactgcggtacctttgtgcgcctgttttatcaccccaccccatctgaaacgtagaagcaatgcacaaccgaccaatagtgggtgtggcgcaccagccacatcttggtcaagcacttctgtttccccgggtttagtatcaataagctgctcacgcggctgagggagaaaacacccgttatccggccgactacttcgagaaacctagtaccgctatgaacgttgcaaggcgtttcgctcagcacttcccccgtgtagatcaggctgatgagtcaccgcatccctcacgggcgaccgtggcggtggctgcgctggcggcctgcctatgggcttgcccataggacgccttaatactgacatggtgcgaagagtctattgagctagttggtagtcctccggcccctgaatgcggctaatcctaactgcggagcacatactcacaaaccagtgagcggtgtgtcgtaacgggcaactctgcagcggaaccgactactttgggtgtccgtgtttccttttattcttatactggctgcttatggtgacaattaaagaattgttaccatatagctattggattggccatccggtgtctaacagagatattatatacttgttcgttggattcacctcgttgtcatacaaatcccttaacactttgtgctttatcttggatttaaactcaaaaag

SEQ ID NO: 19204 - DNA, 739 bp, synthetic construct
  source 1..739: mol_type = other DNA
tttaaacagctctggggttgtacccactcacagggcccactgggcgtcagcactctggtaccccggtacccttgtgcgcctgttttatatccccccccattgaaacttagaagtaatgcacctcgatcaatagcgggcgtggcgcaccagccacgtcatgatcaagcacttctgtttccccggaccgagtatcaatagactgctaacgcggttgagggagaaaacgtccgttatccggccaactgcttcgagaaatccagtaacatcatgaaaattgcagagtgtttcgctcagcacttccccagtgtagatcaggtcgatgagtcaccgcgttccccacgggcgaccgtggcggtggctgcgttggcggcctgcctgtggggcaacccgcaggacgctctaatatggacatggtgtgaagaatctattgagccagttggtagtcctccggcccctgaatgcggctaatcctaactgcggagcacgcgccttcaatccagtgggtagcgtgtcgtaatgggtaactctgcagcggaaccgactactttgggtgtccgtgtttccatttactcttacattggctgcttatggtgacaattgaaagattgttaccatatagctattggattggccatccggtatcgaatagagcaattatctatcagtttattggatttattccgttgagtgtgcagcagtatcgcactttgcttttaatagtgagactgaatagtgcaaa

SEQ ID NO: 19205 - DNA, 739 bp, synthetic construct
  source 1..739: mol_type = other DNA
cttaaacagcctcggggttgtaccaactcacagggcccactgggcgtcagcactctggtaccccggtacccttgtgcgcctgttttatatccctccccattgaaacttagaagtaatgcacctcgatcaatagcgggcgtggcgcaccagccacgtcatgatcaagcacttctgtttccccggaccgagtatcaatagactgctaacgcggttgagggagaaaacgtccgttatccggccaactgcttcgagaaatccagtaacatcatgaaaattgcagagtgtttcgctcagcacttccccagtgtagatcaggtcgatgagtcaccgcgttccccacgggcgaccgtggcggtggctgcgttggcggcctgcctgtggggcaacccgcaggacgctctaatatggacacggtgtgaagaatctattgagccagttggtagtcctccggcccctgaatgcggctaatcctaactgcggagcacgcgccttcaatccagtgggtagcgtgtcgtaatgggcaactctgcagcggaaccgactactttgggtgtccgtgtttccatttactcttacattggctgcttatggtgacaattgaaagattgttaccatatagctattggattggccatccggtatcgaatagagcaattatctatcagtttattggatttattccgttgagtgtgcagcagtatcgcactgtgcttttaatagtgagactgaatagtgcaaa

SEQ ID NO: 19206 - DNA, 739 bp, synthetic construct
  source 1..739: mol_type = other DNA
cttaaacagcctcggggttgtaccaactcacagggcccactgggcgtcagcactctggtaccccggtacccttgtgcgcctgttttatatccctccccattgaaacttagaagtaatgcacctcgatcaatagcgggcgtggcgcaccagccacgtcatgatcaagcacttctgtttccccggaccgagtatcaatagactgctaacgcggttgagggagaaaacgtccgttatccggccaactgcttcgagaaatccagtaacatcatgaaaattgcagagtgtttcgctcagcacttccccagtgtagatcaggtcgatgagtcaccgcgttccccacgggcgaccgtggcggtggctgcgttggcggcctgcctgtggggcaacccgcaggacgctctaatatggacatggtgtgaagaatctattgagccagttggtagtcctccggcccctgaatgcggctaatcctaactgcggagcacgcgccttcaatccagtgggtagcgtgtcgtaatgggcaactctgcagcggaaccgactactttgggtgtccgtgtttccatttactcttacattggctgcttatggtgacaattgaaagattgttaccatatagctattggattggccatccggtatcgaatagagcaattatctatcagtttattggatttattccgttgagtgtgcagcagtatcgcactttgcttttaatagtgagactgaatagtgcaaa

SEQ ID NO: 19207 - DNA, 744 bp, synthetic construct
  source 1..744: mol_type = other DNA
ttaaaacaggctgtgggttgtacccactcacagggcctactgggcgctagcactctggcactaaggtgcctttgtgcgcctgtttttacttcccttccccaaagtaacttagaagttgtgtaccaacgatcaatagcaggtgtgacacaccagtcatatcttgatcaagtacttctgtttccccggaccgagtatcaataggctgctcgcgcggctgaaggagaaaacgttcgttacccgaccaactacttcgagaagcttagtaccaccatgaacgaggcagagtgtttcgttcagcacaaccccggtgtagatcaggctgatgagtcactgcaacccccatgggcgaccatggcagtggctgcgttggcggcctgcccatggagaaatccatgggacgctctaattctgacatggtgtgaagagcctattgagctagctggtagtcctccggcccctgaatgcggctaatcctaactgcggagcacatgctcacaaaccagtgggtggtgtgtcgtaatgggcaactctgcagcggaaccgactactttgggtgtccgtgtttccttttattcttatattggctgcttatggtgacaatcaaagaattgttaccatatagctattggattggccatccggtgtgcaacagagcaattgtttacttatttattggtttcgtaccactatcactgaagtctgtgaccattctcgaattcattttgaccctcaactcaatcaaac

SEQ ID NO: 19208 - DNA, 745 bp, synthetic construct
  source 1..745: mol_type = other DNA
ttaaacaagcctgtgggttgttcccacccacagggcccactgggcgctagcacactgattctgcgggatctttgtgcgcctgttttataaccccttccctaagcagcaacttagaagcttcacactatcacgaccagtagtgggcgtggcgcgccagtcacgtcttggtcaagcatttctgtttccccggactgagtatcaatagactgctcacgcggttgaaggagaaaacgttcgttatccggctaactacttcgagaaacctagtagcaccgtgaaagttgcggagtgtttcgctcagcacttcccccgtgtagatcaggtcgatgagtcactgtaaaccccacgggcgaccgtgacagtggctgcgttggcggcctgcccatggggtaacccatgggacgctctaacacagacacggtgtgaagagtctattgagctagttagtagtcctccggcccctgaatgcggctaatcctaactgcggagcgcgcaccctcaacccagggggcggcgcgtcgtaacgggtaactctgcagcggaaccgactactttgggtgtccgtgtttccttttattccttattggctgcttatggtaacaattgaaaagttgttaccatatagctattggattggccatccggtgaccaacagagctattgtttacctgtttattggatacgtccctcttaatctcaagaccattcaaactcttgagtatatattactccttaactgtaagaa

SEQ ID NO: 19209 - DNA, 743 bp, synthetic construct
  source 1..743: mol_type = other DNA
aaacaagcctgtgggttgttcccacccacagggcccactgggcgttagcacactgattctgcgggatctttgtgcgcctgttttataaccccttccctaagcagtaacttagaagcttcacacaatcacgaccagtagtgggcgtggcgcgccagtcacgtcttggtcaagcacttctgtttccccggactgagtatcaatagactgctcacgcggttgaaggagaaaacgttcgttatccggctaactacttcgagaaacctagtagcaccgtgaaagttgcggagtgtttcgctcagcacttcccccgtgtagatcaggtcgatgagtcactgtaaaccccacgggcgaccgtgacagtggctgcgttggcggcctgcccatggggtaacccatgggacgctctaatacagacatggtgtgaagagtctattgagctagttagtagtcctccggcccctgaatgcggctaatcctaactgcggagcacgcaccctcaacccagggggcggcgtgtcgtaatgggtaactctgcagcggaaccgactactttgggtgtccgtgtttccttttattccttactggctgcttatggtgacaattgaaaagttgttatcatatagctattggattggccatccggtgtccaacagagctattgtttacctatttattggatacgtccctcttaatctcaaggctattcaaactcttgattatatattgctccttaactgtaagaa

SEQ ID NO: 19210 - DNA, 732 bp, synthetic construct
  source 1..732: mol_type = other DNA
ctgtgggttgcacccactcacagggcctactgggcgcaagcactctggtacctcggtacctttgtgcgcctgttttacaccccccccctagtgaaacttagaagcagcaaaccccgatcaatagcaggcatagcgctccagttatgtcttgatcaagcacttctgtttccccggactgagtatcaatagactgctcgcgcggttgaaggagaaaacgttcgttatccggccaactacttcggaaaacctagtaacactatgaaagttgcagagagcttcgttcagcactcccccagtgtagatcaggtcgatgagtcaccgcattccccacgggcgaccgtggcggtggctgcgttggcggcctgcccatggggtaacccatggggcgctctaatacggacatggtgtgaagagtctactgagctagttggtagtcctccggcccctgaatgcggctaatcccaactgcggagcacacgcccacaaaccagcgggtagtgtgtcgtaacgggtaactctgcagcggaaccgactactttgggtgtccgtgtttccttttaactttatattggctgcttatggtgacaattagagaattgttgccatatagctattggatcggccatccggtgtgcaacagagcaattatttacttattcactggttttataccattaactttgaattctgtgaccacccttaattatatcttgacccttaacacggctaaac

SEQ ID NO: 19211 - DNA, 732 bp, synthetic construct
  source 1..732: mol_type = other DNA
tgggttgcacccacccacaggacccacgcggtgctagcactctgattctgcgggatctttgtgcgcctgttttataatccctcccccaagcagtaacttagaagcttcatactaccacgaccaatagtaggcgtggcgcaccagtcacgtctcggtcaagcacttctgtttccccggactgagtatcaatagactgctcacgcggttgaaggagaaagcgttcgttatccggctaactacttcgagaaacttagtagcaccgtgaaagttgcggagcgtttcgctcagcacttcccccgtgtagatcaggtcgatgagtcactgtgaaccccacgggcgaccgtgacagtggctgcgttggcggcctgcccatggggtaacccatgggacgctctaatacagacacggtgtgaagagtctattgagctagttagtagtcctccggcccctgaatgcggctaatcctaactgcggagcgcgcaccctcaatccagtgggcagcgcgtcgtaatgggtaactctgcagcggaaccgactactttgggtgtccgtgtttcctgttattccttattggctgcttatggtgacaattgaaaagttgttaccatatagctattggattggccatccggtgaccaacagagctattgtttatttgtttattgggtacgtccctctcaatctcaaagtcattcaaactcttgattatatactacttctcaattgtaagaa

SEQ ID NO: 19212 - DNA, 691 bp, synthetic construct
  source 1..691: mol_type = other DNA
cactctgattctgcggaatctttgtgcgcctgttttataaccctcccccgacttgcaccttagaagttatgtacgttgatcaacagcaggcgtggcacaccagccatgtcttgatcaagcacttctgtgcccccggactgagtatcaatagactgctcacgtggtcgaaggagaaaacgttcgttatccggctaactacttcgagaaacctagtaacaccactgaaactgcggagtgtttcgctcagcacttcccccgtgtagatcaggtcgatgagtcactgcttaccccacgggtgaccgtggcagtggctgcgttggcggcctgcctatggggcaacccataggacgctctaaagtggacatggtgcgaagagtctattgagctagttagtagtcctccggcccctgaatgcggctaatcctaactgcggagcgcatgcccccaaaccagagggtggtgcgtcgtaacgggtaactctgcagcggaaccgactactttgggtgtccgtgtttcttttattctcataatggctgcttatggtgacaattgaggaattgttaccgtatagctattggattggccatccggtgtgtaacagagctattatctacttgtttgttggatacattccattaacacctaaatccttcaatacattgcattacattctaacgctgaacgcaagaaa

SEQ ID NO: 19213 - DNA, 730 bp, synthetic construct
  source 1..730: mol_type = other DNA
gggttgcacccacccacagggcccactgggcgctagcactctggcactgaggtgcctttgtgcgcctgtttttacttcccttccccgaagtaacttagaagctgtaaatcaacgatcaatagtaggtgtgacgcaccagtcatatcttgatcaagcacttctgtttccccggactgagtatcaataggctgctcgcgcggctgaaggagaaaacgttcgttacccgaccaactacttcgagaagcttagtaccaccatgaacgaagcagagtgtttcgttcagcacaaccccagtgtagatcaggctgatgagccactgcaacccccatgggcgaccatggcagtggctgcgttggcggcctgcccatggagaaatccatgggacgctctaattctgacatggtgtgaagagcctattgagctagctggtagtcctccggcccctgaatgcggctaatcctaactgcggagcacatgctcacaaaccagtgggtggtgtgtcgtaacgggcaactctgcagcagaaccgactactttgggtgtccgtgtttccttttattcttatattggctgcttatggtgacaatcaaagaattgttaccatatagctattggattggccatccggtgtgcaacagagcaattgtttacctatttattggttttgtaccattatcactgaagtctgtgaccactctcaaattcattctgaccctcaacacaatcaaac

SEQ ID NO: 19214 - DNA, 724 bp, synthetic construct
  source 1..724: mol_type = other DNA
tgcacccactcacagggcccactgggcgccagcactctggtactgcggtacctttgtgcgcctgttttatcaccccaccccatccggaacgtagaagcgatgcacaactgaccaatagtgggtgtggcgcaccagtcacatcttggtcaagcacttctgtttccccgggtttagtatcaataagctgctcacgcggctgaaggagaaaacacccgttatccggccgactacttcgagaaacctagtaccgctatgaacgttgcaaggcgtttcgctcagcacttcccccgtgtagatcaggccgatgagtcaccgcactcctcacgggcgaccgtggcggtggctgcgttggcggcctgcctatgggcttgcccataggacgccttaatgctgacatggtgcgaagagtctattgagctagttggtagtcctccggcccctgaatgcggctaatcctaactgcggagcacatactcacaaaccagtgagcggtgtgtcgtaacgggcaactctgcagcggaaccgactactttgggtgtccgtgtttccttttattcttatactggctgcttatggtgacaattaaagaattgttaccatatagctattggattggccatccggtgtctaacagagctattatatacttgtttgttggattcatctcgttatcacacaaatccctcaacactttgtgctttattttgaatttaaactcaaaaag

SEQ ID NO: 19215 - DNA, 719 bp, synthetic construct
  source 1..719: mol_type = other DNA
ccactcacagggcccactgggcgccagcactctggtactgcggtacctttgtgcgcctgttttatcaccccaccccatctgaaacgtagaagcaatgcacaaccgaccaatagtgggtgtggcgcaccagccacatcttggtcaagcacttctgtttccccgggtttagtatcaataagctgctcacgcggctgaaggagaaaacacccgttatccggccgactacttcgagaaacctagtaccgctatgaacgttgcaaggcgtttcgctcagcacttcccccgtgtagatcaggctgatgagtcaccgcatccctcacgggcgaccgtggcggtggctgcgctggcggcctgcctatgggcttgcccataggacgccttaatactgacatggtgcgaagagtctattgagctagttggtagtcctccggcccctgaatgcggctaatcctaactgcggagcacatactcacaaaccagtgagcggtgtgtcgtaacgggcaactctgcagcggaaccgactactttgggtgtccgtgtttccctttattcatatactggctgcttatggtgacaatcaaagaattgttaccatatagctattggattggccatccggtgtctaacagagatattatatacttgttcattggattcacctcgttgtcatacaaatcccttaacactttgtgctttatcttgaatttaaactcaaaaag

SEQ ID NO: 19216 - DNA, 744 bp, synthetic construct
  source 1..744: mol_type = other DNA
ttaaaacaggctgtgggttgtacccactcacagggcctactgggcgctagcactctggcactaaggtacctttgtgcgcctgtttttacttccctttcccaaagaaacttagaagttgtgtaccaatgatcaatagcaggtgtgacgcaccagtcacatcttgatcaagcacttctgtttccccggaccgagtatcaataggctgctcgcgcggctgaaggagaaaacgttcgttacccgaccagctacttcgagaagcttagtaccaccatgaacgaggcagagtgtttcgttcagcacaaccccagtgtagatcaggctgatgagtcactgcaacccccatgggcgaccatggcagtggctgcgttggcggcctgctcatggagaaatccatgagacgctctaattctgacatggtgtgaagagcctattgagctagctggtattcctccggcccctgaatgcggctaatcctaactgcggagcacatgctcacgagccagtgggtggtgtgtcgtaatgggcaactctgcagcggaaccgactactttgggtgtccgtgtttccttttattcttatgttggctgcttatggtgacaatcaaagaattgttaccatatagctattggattggccatccggtgtgcaacagagcaattgtttatctatttattggtttcgtaccactatcactgaagtctgtgaccactctcgaattcattttgaccctcaactcaatcaaac

SEQ ID NO: 19217 - DNA, 744 bp, synthetic construct
  source 1..744: mol_type = other DNA
ttaaaacaggctgtgggttgtacccactcacagggcctactgggcgctagcactctggcactaaggtacctttgtgcgcctgtttttacttccctttcccaaagtaacttagaagttgtgtaccaatgatcaatagcaggtgtgacgcaccagtcacatcttgatcaagcacttctgtttccccggaccgagtatcaataggctgctcgcgcggctgaaggagaaaacgttcgttacccgaccagctacttcgagaagcttagtaccaccatgaacgaggcagagtgtttcgttcagcacaaccccagtgtagatcaggctgatgagtcactgcaacccccatgggcgaccatggcagtggctgcgttggcggcctgcccatggagaaatccatgggacgctctaattctgacatggtgtgaagagcctattgagctagctggtattcctccggcccctgaatgcggctaatcctaactgcggagcacatgctcacgagccagtgggtggtgtgtcgtaatgggcaactctgcagcggaaccgactactttgggtgtccgtgtttccttttattcttatgttggctgcttatggtgacaatcaaagaattgttaccatatagctattggattggccatccggtgtgcaacagagcaattgtttatctatttattggtttcgtaccactatcactgaagtctgtgaccactctcgaattcattttgaccctcaactcaatcaaac

SEQ ID NO: 19218 - DNA, 744 bp, synthetic construct
  source 1..744: mol_type = other DNA
ttaaaacaggctgtgggttgtacccactcacagggcctactgggcgctagcactctggcactaaggtacctttgtgcgcctgtttttacttcccttccccaaagtaacttagaagttgtgcaccagcgatcaatagcaggtgtgacacaccagtcatatcttgatcaagcacttctgtttccccggaccgagtatcaataggccgctcgcgcggctgaaggagaaaacgttcgttacccggccaactacttcgagaagcttagtaccaccatgaacgaggcagagtgtttcgttcagcacaaccccagtgtagatcaggctgatgagccactgcaacccccatgggtgaccatggcagtggctgcgttggcggcctgcccatggagaaatccatgggacgctctaattctgacatggtgtgaagagcctattgagctagctggtatttctccggcccctgaatgcggctaatcctaactgcggagcacatgctcacaaaccagtgggtggtgtgtcgtaatgggcaactctgcagcggaaccgactactttgggtgtccgtgtttccttttattcttatgttggctgcttatggtgacaatcaaagaattgttaccatatagctattggattggccatccggtgtgcaacagagcaattgtttacctatttattggtttcgtaccactatcactgaagtctgtgaccactctcaaattcattttgaccctcaactcaatcaaac

SEQ ID NO: 19219 - DNA, 744 bp, synthetic construct
  source 1..744: mol_type = other DNA
ttaaaacaggctgtgggttgtacccactcacagggcctactgggcgctagcactctggcactaaggtacctttgtgcgcctgtttttacttccctttcccaaagaaacttagaagttgtgtaccaatgatcaatagcaggtgtgacgtacaaataacatcttgatcaagcacttctgtttccccggaccgagtatcaataggctgctcacgcggctgaaggagaaaacgttcgttacccggccaactacttcgagaagcttagtaccaccatgaacgaggcagagtgtttcgttcagcacaaccccagtgtagatcaggctgatgagtcactgcaacccccatgggtgaccatggcagtggctgcgttggcggcctgcccatggagaaatccatgggacgctccaattctgacatggtgtgaagagcctattgagctagctggtatttctccggcccctgaatgcggctaatcctaactgcggagcacatgctcacaaaccagtgggtggtgtgtcgtaatgggcaactctgcagcggaaccgactactttgggtgtccgtgtttccttttattcttatgttggctgcttatggtgacaatcaaagaattgttaccatatagctattggattggccatccggtgtgcaacagagcaattgtttatctatttattggtttcgtaccactatcactgaagtctgtgaccactctcgaattcattttgaccctcaactcaatcaaac

SEQ ID NO: 19220 - DNA, 744 bp, synthetic construct
  source 1..744: mol_type = other DNA
ttaaaacaggctgtgggttgtacccactcacagggcctactgggcgctagcactctggcactaaggtacctttgtgcgcctgtttttacttcccttccccaaagtaacttagaagttgtgcaccagcgatcaatagcaggtgtgacacaccagtcatatcttgatcaagcacttctgtttccccggaccgagtatcaataggctgctcgcgcggctgaaggagaaaacgttcgttacccgaccaactacttcgagaagcttagtaccaccatggacgaggcagagtgtttcgttcagcacaaccccagtgtagatcaggctgatgagccactgcaacccccatgggcgaccatggcagtggctgcgttggcggcctgcccatggagaaatccatgggacgctccaattctgacatggtgtgaagagcctattgagctagctggtattcctccggcccctgaatgcggctaatcctaactgcggagcacatgctcacaaaccagtgggtggtgtgtcgtaatgggcaactctgcagcggaaccgactactttgggtgtccgtgtttccttttattctcatgttggctgcttatggtgacaatcaaagaattgttaccatatagctattggattggccatccggtgtgcaatagagcaattgtttacctatttattggtttcgtaccactatcactgaagtctgtgaccactctcaaattcattttggccctcaattcaatcaaac

SEQ ID NO: 19221 - DNA, 735 bp, synthetic construct
  source 1..735: mol_type = other DNA
gtgggttgcacccactcacaggacccacgtggtgctagcactctggttctacggaacctttgtgcgcctgttttacgccccctccccaatttgtaatttagaagcgattcacaacacagatcaatagcaggcatggcgcaccagctatgtctcgatcaagcacttctgtttccccggaccgagtatcaatagactgctcacgtggttgaaggagaaaacgtccgttatccggctaactacttcgagaaacctagtagcgccattgaaactgcagagtgtttcgctccacacttcccccgtgtagatcaggtcgatgagtcactgcaatccccacgggcgaccgtggcagtggctgcgctggcggcctgcctatggggcaacccataggacgctctaatgtggacatggtgcgaagagtctattgagctagttagtagtcctccggcccctgaatgcggctaatcctaactgcggagcacatgccttcaacccagagggtagtgtgtcgtaatgggcaactctgcagcggaaccgactactttgggtgtccgtgtttccttttattctcacattggctgcttatggtgacaattacagaattgttaccatatagctattggattggccatccggtgtgcaatagagctattatatacctatttgttggctttgtaccactaaccttaaaatctgtaaccactctcgactatatattaaccctcaatacaaataaac

SEQ ID NO: 19222 - DNA, 740 bp, synthetic construct
  source 1..740: mol_type = other DNA
taaaacagcctgtgggttgcacccactcacagggcctactgggcgcaagcactctggtacctcggtacctttgtgcggctgttttatacccccccccagtgaaacttagaagcagtaaaccacgatcaatagcaggcataacgctccagttatgtcttgatcaagcacttctgtttccccggactgagtatcaatagactgctcgcgcggttgaaggagaaaacgttcgttatccggctaactacttcggaaaacctagtaacaccatgaaagttgcggagagcttcgttcagcactcccccagtgtagatcaggtcgatgagtcaccgcgttccccacgggcgaccgtggcggtggctgcgttggcggcctgcccatggggtaacccatggggcgctctaatacggacatggtgtgaagagtctactgagctagttggtagtcctccggcccctgaatgcggctaatcccaactgcggagcacacgcccacaagccagcgggtagtgtgtcgtaacgggtaactctgcagcggaaccgactactttgggtgtccgtgtttccttttatctttatattggctgcttatggtgacaatcaaagaattgttaccatatagctattggattggccatccggtgtgcaacagagcaattatttacctatttattggttttataccactaaccttgaattctgtgactacccttaattatattttgacccttaacacagctaaac

SEQ ID NO: 19223 - DNA, 742 bp, synthetic construct
  source 1..742: mol_type = other DNA
ttaaaacagcctgtgggttgcacccactcacagggcccactgggcgcaagcactctggtacttcggtacctttgtgcgcctgttttataacccccccccagtgaaacttagaagcagcaaaccacgatcaatagcaggcatagcgctccagttatgtcttgatcaagcacttctgtttccccggactgagtatcaatagactgctcgcgcggttgaaggaaaaaacgttcgttatccggccaactacttcggaaaacctagtaacaccatgaaagttgcggaaagcttcgttcagcactcccccagtgtaaatcaggtcgatgagtcaccgcattccccacgggcgaccgtggcggtggctgcgttggcggcctgcccatggggtaacccatggggcgctctaatacggacatggtgtgaagagtctactgagctagttggtagtcctccggcccctgaatgcggctaatcccaactgcggagcacacgcccacaagccagcgggtagtgtgtcgtaacgggtaactctgcagcggaaccgactactttgggtgtccgtgtttccttttatccttatattggctgcttatggtgacaattagagaattgttaccatatagctattggattggccatccggtgtgcaacagagcaattatttacctatttattagttttgtaccattaaccttgaattctgtgaccacccttaattatatcttgacccttaacacagctaaac

SEQ ID NO: 19224 - DNA, 731 bp, synthetic construct
  source 1..731: mol_type = other DNA
tgtgggttgcacccacccacagggcccactgggcgctagcactctggtgccacggtacctttgtgcgcctgttttattaccctaccccatacgaaacttagaagtaatacataaccgaccaatagtaggtgtggcgcaccagccacatcttggtcaagcacttctgtttccccgggtcgagtatcaataagctgttcacgcggctgaaggagaaaacacccgttatccggccaactacttcgagaaacctagtaccgccatgaacgttgcaaggcgtttcgctcagcacttcccccgtgtagatcaggccgatgagtcaccgcattccccacgggtgaccgtggcggtggctgcgttggcggcctgcctatgggttatcccataggacgccttaatactgacatggtgcgaagagtctattgagctagttggtagtcctccggcccctgaatgcggctaatcctaactgcggagcacatactcgcaaaccagtgagtggtgtgtcgtaacgggtaactctgcagcggaaccgactactttgggtgtccgtgtttccttttatctttatattggctgcttatggtgacaatcagtgaattgttaccatatagctattggattggccatccggtgtctaatagagctattatatacctgtttgttggattcattccgttgacctataaatccctaaccatcctgtactacattttgaaattaaacacacgaaa

SEQ ID NO: 19225 - DNA, 747 bp, synthetic construct
  source 1..747: mol_type = other DNA
ttaaaacagcctgtgggttgcacccacccacaggacccacgcggtgctagcactctggttctacgggacctttgtgcgcctgttttatgtcccctccccaattcgtaacttagaagcaatttgcaacactgatcagtagtaggcatagcgcaccagctatgtcttgatcaagcacttctgtttccccggaccgagtatcaatagactgttcacacggttgaaggagaaagcgtccgttatccggctaactacttcgagaaacccagtagcgccattgaaactgcagagtgtttcgctccacactttccccgtgtagatcaggtcgatgagtcactgcaatccccacgggcgaccgtggcagtggctgcgctggcggcctgcctatggggcaacccataggacgctctaatgtggacatggtgtgaagagtctattgagctagttggtaatcctccggcccctgaatgcggctaatcctaactgcggagcacatgccttcaatccagagggtagtgtgtcgtaatgggcaactctgcagcggaaccgactactttgggtgtccgtgtttccttttattctcacattggctgcttatggtgacaattacggaattgttaccatatagctattggattggccatccggtgtgcaatagagctattatatacctatttgttggctttgtaccactgaccttaaaatctataaccactctcgagtatatattaacccttaacacaatcaaac

SEQ ID NO: 19226 - DNA, 747 bp, synthetic construct
  source 1..747: mol_type = other DNA
ttaaaacagcctgtgggttgcacccacccacaggacccacgtggtgctagcactctggttctacgggacctttgtgcgcctgttttatgtcccctccccaatttgtaacttagaagcaatttgcaacactgatcagtagtaggcgtagcgcaccagctatgtcttgatcaagcacttctgtttccccggaccgagtatcaatagactgttcacacggttgaaggagaaagcgtccgttatccggctaactacttcgagaaacccagtagcgccattgaaattgcagagtgtttcgctccacacttcccccgtgtagatcaggtcgatgagtcactgcaatccccacgggcgaccgtggcagtggctgcgctggcggcctgcctatggggtaacccataggacgctctaatgtggacatggtgtgaagagtctattgagctagttagtagtcctccggcccctgaatgcggctaatcctaactgcggagcacatgccttcaatccagagggtagtgtgtcgtaatgggcaactctgcagcggaaccgactactttgggtgtccgtgtttccttttattctcacattggctgcttatggtgacaattacggaattgttaccatatagctattggattggccatccggtgtgcaatagagctattatatacctatttgttggctttgtaccactgaccttaaaatctataaccactctcgagtatatattaacccttaacacaatcaaac

SEQ ID NO: 19227 - DNA, 747 bp, synthetic construct
  source 1..747: mol_type = other DNA
ttaaaacagcctgtgggttgcacccactcacaggacccacgtggtgctagcactctggttctacggaacctttgtgcgcctgttttacgccccctccccaatttgtaacttagaagcaatttacaacactgatcaatagcaggcatggcgcgccagctatgtcttgatcaagcacttctgtttccccggaccgagtatcaatagactgttcacacggttgaaggagaaagcgtccgttatccggctaactacttcgagaaacccagtagcgccactgaagctgcagagtgtttcgctccacacttcccccgtgtagatcaggtcgatgagtcactgcaatcctcacgggcgaccgtggcagtggctgcgctggcggcctgcctatggggcgacccataggacgctctaatgtggacatggtgcgaagagtctattgagctagttagtagtcctccggcccctgaatgcggctaatcctaactgcggagcacatgccttcaatccagagggtagtgtgtcgtaatgggcaactctgcagcggaaccgactactttgggtgtccgtgtttccttttattctcacattggctgcttatggtgacaattacagaattgttaccatatagctattggattggccatccggtgtgcaatagagctattatatacctatttgttggctttataccactaaccttaaagtctgcaaccactctcgagtatatattaaccctcaatacaatcaaac

SEQ ID NO: 19228 - DNA, 747 bp, synthetic construct
  source 1..747: mol_type = other DNA
ttaaaacagcctgtgggttgcacccactcacaggacccacgtggtgctagcactctggttctacggaacctttgtgcgcctgttttacaccccctccccaatttgtaacttagaagcaatttacaacactgatcaatagcaggcatggcgcaccagctatgtcttgatcaagcacttctgtttccccggaccgagtatcaatagactgttcacacggttgaaggagaaagcgtccgttatccggctaactacttcgagaaacccagtagcgccattgaagctgcagagtgtttcgctccacacttcccccgtgtagatcaggtcgatgagtcactgcaatcctcacgggcgaccgtggcagtggctgcgttggcggcctgcctatggggtaacccataggacgctctaatgtggacatggtgcgaagagtctattgagctagttagtagtcctccggcccctgaatgcggctaatcctaactgcggagcacatgccttcaatccagagggtagtgtgtcgtaatgggcaactctgcagcggaaccgactactttgggtgtccgtgtttccttttattcttacattggctgcttatggtgacaattacagaattgttaccatatagctattggattggccatccggtgtgcaatagagctattatatacctatttgttggctttataccactaaccttaaaatctgtgatcactctcgagtatatattaaccctcaatacaatcaaac

SEQ ID NO: 19229 - DNA, 747 bp, synthetic construct
  source 1..747: mol_type = other DNA
ttaaaacagcctgtgggttgcacccactcacaggacccacgtggtgctagcactctggttctacggaacctttgtgcgcctgttttacgccccctccccaatttgtaacttagaagcaatttacaacactgatcaatagcaggcatggcgcgccagctatgtcttgatcaagcacttctgtttccccggaccgagtatcaatagactgttcacacggttgaaggagaaagcgtccgttatccggctaactacttcgagaaacccagtagcgccattgaagctgcagagtgtttcgctccacacttcccccgtgtagatcaggtcgatgagtcactgcaatcctcacgggcgaccgtggcagtggctgcgctggcggcctgcctatggggcgacccataggacgctctaatgtggacatggtgcgaagagtctattgagctagttagtagtcctccggcccctgaatgcggctaatcctaactgcggagcacatgccttcaatccagagggtagtgtgtcgtaatgggcaactctgcagcggaaccgactactttgggtgtccgtgtttccttttattctcacattggctgcttatggtgacaattacagaattgttaccatatagctattggattggccatccggtgtgcaatagagctattatatacctatttgttggctttataccactaaccttaaaatctgtaaccactctcgagtatatattaaccctcaatacaatcaaac

SEQ ID NO: 19230 - DNA, 747 bp, synthetic construct
  source 1..747: mol_type = other DNA
ttaaaacagcctgtgggttgcacccactcacaggacccacgtggtgctagcactctggttctacggaacctttgtgcgcctgttttacgccccctccccaatttgtaacttagaagcaatttacaacactgatcaatagcaggcatggcgcaccagctatgtcttgatcaagcacttctgtttccccggaccgagtatcaatagactgttcacacggttgaaggagaaagcgtccgttatccggctaactacttcgagaaacccagtagcgccattgaagctgcagagtgtttcgctccacacttcccccgtgtagatcaggtcgatgagtcactgcaatcctcacgggcgaccgtggcagtggctgcgctggcggcctgcctatggggcgacccataggacgctctaatgtggacatggtgcgaagagtctattgagctagttagtagtcctccggcccctgaatgcggctaatcctaactgcggagcacatgccttcaatccagagggtagtgtgtcgtaatgggcaactctgcagcggaaccgactactttgggtgtccgtgtttccttttattctcacactggctgcttatggtgacaattacagaattgttaccatatagctattggattggccatccggtgtgtaatagagctattatatacctgtttgttggctttataccactaaccttaaaatctgtaaccactctcgagtatatattaaccctcaatacaattaaac

SEQ ID NO: 19231 - DNA, 747 bp, synthetic construct
  source 1..747: mol_type = other DNA
ttaaaacagcctgtgggttgcacccactcacaggacccacgtggtgctagcactctggttctacggaacctttgtgcgcctgttttacgccccctccccaatttgtaacttagaagcaatttacaacactgatcaatagcaggcatggtgcaccagctatgtcttgatcaagcacttctgtttccccggaccgagtatcaatagactgttcacacggttgaaggagaaagcgtccgttatccggctaactacttcgagaaacccagtagcgccattgaagctgcagagtgtttcgctccacacttcccccgtgtagatcaggtcgatgagtcactgcaatcctcacgggcgaccgtggcagtggctgcgctggcggcctgcctatggggcgacccataggacgctctaatgtggacatggtgcgaagagtctattgagctagttagtagtcctccggcccctgaatgcggctaatcctaactgcggagcacatgccttcaatccagagggtagtgtgtcgtaatgggcaactctgcagcggaaccgactactttgggtgtccgtgtttccttttattctcacactggctgcttatggtgacaattacagaattgttaccatatagctattggattggccatccggtgtgcaatagagctattatatacctgtttgttggctttataccactaaccttaaaatctgtaaccactctcgagtatatattaaccctcaatacaatcaaac

SEQ ID NO: 19232 - DNA, 747 bp, synthetic construct
  source 1..747: mol_type = other DNA
ttaaaacagcctgtgggttgcacccactcacaggacccacgtggtgctagcactctggttctacggaacctttgtgcgcctgttttacgccccctccccaatttgtaacttagaagcaatttacaacactgatcaatagcaggcatggcgcaccagctatgtcttgatcaagcacttctgtttccccggaccgagtatcaatagactgttcacacggttgaaggagaaagcgtccgttatccggctaactacttcgagaaacccagtagcgccattgaagccgcagagtgtttcgctccacacttcccccgtgtagatcaggtcgatgagtcactgcaatcctcacgggcgaccgtggcagtggctgcgctggcggcctgcctatggggcgacccataggacgctctaatgtggacatggtgcgaagagtctattgagctagttagtagtcctccggcccctgaatgcggctaatcctaactgcggagcacatgccttcaatccagagggtagtgtgtcgtaatgggcaactctgcagcggaaccgactactttgggtgtccgtgtttccttttattctcacattggctgcttatggtgacaattacagaattgttaccatatagctattggattggccatccggtgtgcaatagagctattatatacctatttgttggctttataccactaaccttaaaatctgtaaccactctcgagtatatattaaccctcaatacaatcaaac

SEQ ID NO: 19233 - DNA, 747 bp, synthetic construct
  source 1..747: mol_type = other DNA
ttaaaacagcctgtgggttgcacccactcacaggacccacgtggtgctagcactctggttctacggaacctttgtgcgcctgttttacgccccctccccaatttgtaacttagaagcaattcacaacactgatcaatagcaggcatggcgcaccagctatgtcttgatcaagcacttctgtttccccggaccgagtatcaatagactgttcacacggttgaaggagaaagcgtccgttatccggctaactacttcgagaaacccagtagcgccattgaagctgcagagtgtttcgctccacacttcccccgtgtagatcaggtcgatgagtcactgcaatcctcacgggcgaccgtggcagtggctgcgctggcggcctgcctatggggcgacccataggacgctctaatgtggacatggtgcgaagagtctattgagctagttagtagtcctccggcccctgaatgcggctaatcctaactgcggagcacatgccttcaatccagagggtagtgtgtcgtaatgggcaattctgcagcggaaccgactactttgggtgtccgtgtttcctttcattctcacactggctgcttatggtgacaattacagaattgttaccatatagctattggattggccatccggtgtgcaatagagctattatatacctgtttgttggctttataccactaaccttaaaatctgtaaccactctcgagtatatattgaccctcaacacaatcaaac

SEQ ID NO: 19234 - DNA, 747 bp, synthetic construct
  source 1..747: mol_type = other DNA
ttaaaacagcctgtgggttgcacccactcacaggacccacgtggtgctagcactctggttccacggaacctttgtgcgcctgttttatgccccctccccaatttgtaacttagaagcaatttacaacactgatcagtagcaggcatagcgcaccagctatgtcttgatcaagcacttctgtttccccggaccgagtatcaatagactgttcacacggttaaaggagaaagcgtccgttatccggctaactacttcgagaaacccagtagcgccattgaagctgcagagtgtttcgctccacacttcccccgtgtagatcaggtcgatgagtcactgcaatccccacgggcgaccgtggcagtggctgcgctggcggcctgcctatggggcaacccataggacgctctaatgtggacatggtgcgaagagtctattgagctagttagtagtcctccggcccctgaatgcggctaatcctaactgcggagcacatgccttcaatccagagggtagtgtgtcgtaatgggcaactctgcagcggaaccgactactttgggtgtccgtgtttccttttattctcacattggctgcttatggtgacaattacagaattgttaccatatagctattggattggccatccggtgtgcaatagagctatcatatacctatttgttggctttgtaccactaaccttaaaatccgtaaccactctcgagtatatattaaccctcaatacaatcaaac

SEQ ID NO: 19235 - DNA, 747 bp, synthetic construct
  source 1..747: mol_type = other DNA
ttaaaacagcctgtgggttgcacccactcacaggacccacgtggtgctagcactctggttctacggaacctttgtgcgcctgttttacgccccctccccaatttgtaacttagaagcaatttacaacactgatcaatagcaggcatggcgcgccagctatgtcttgatcaagcacttctgtttccccggaccgagtatcaatagactgttcacacggttgaaggagaaagcgtccgttatccggctaactacttcgagaaacccagtagcgccattgaagctgcagagtgtttcgctccacactttccccgtgtagatcaggtcgatgagtcactgcaatcctcacgggcgaccgtggcagtggctgcgctggcggcctgcctatggggcgacccataggacgctctaatgtggacatggtgcgaagagtctattgagctagttagtagtcctccggcccctgaatgcggctaatcctaactgcggagcacatgccttcaatccagagggtagtgtgtcgtaatgggcaactctgcagcggaaccgactactttgggtgtccgtgtttccttttattctcacattggctgcttatggtgacaattacagaattgttaccatatagctattggattggccatccggtgtgcaatagagctattatatacctatttgttggctttataccactaaccttaaagtctacaaccactctcgaatatatattaaccctcaatacaatcaaac

SEQ ID NO: 19236 - DNA, 747 bp, synthetic construct
  source 1..747: mol_type = other DNA
ttaaaacagcctgtgggttgtacccactcacaggacccacgcggtgctagcactctggttccacggaacctttgtgcgcctgttttacgtcccctccccaatttgtaacttagaagcaatttacagcactgatcaatagcaggcatggcgcaccagctatgtcttgatcaagcacctctgtttccccggaccgagtatcaatagactgttcacacggtcgaaggagaaagcgttcgttatccggctaactacttcgagaaacccagtagcgccattgaagctgcagagtgtttcgctccacacttcccccgtgtagatcaggtcgatgagtcactgcaatccccacgggcgaccgtggcagtggctgcgttggcggcctgcctatggggtaacccataggacgctctaatgtggacatggtgcgaagagtctattgagctagttagtagtcctccggcccctgaatgcggctaatcctaactgcggagcacatgccttcaatccagagggtagtgtgtcgtaatgggcaactctgcagcggaaccgactactttgggtgtccgtgtttccttttattctcacattggctgcttatggtgacaattacagaattgttaccatatagctattggattggccatccggtgtgcaatagagctattatatacctatttgttggctttgtaccactaaccttaaaatctgtaatcactctcgagtatatattgacccttaatacaattaaac

SEQ ID NO: 19237 - DNA, 747 bp, synthetic construct
  source 1..747: mol_type = other DNA
ttaaaacagcctgtgggttgtacccactcacaggacccacgcggtgcttgcactctggttccacggaacctttgtgcgcctgttttacgtcccctccccaatttgtaacttagaagcaatttacagcactgatcaatagcaggcatggcgcaccagctatgtcttgatcaagcacctctgtttccccggaccgagtatcaatagactgttcacacggtcgaaggagaaagcgttcgttatccggctaactacttcgagaaacccagtagcgccattgaaactgcagagtgtttcgctccacacttcccccgtgtagatcaggtcgatgagtcactgcaatccccacgggcgaccgtggcagtggctgcgttggcggcctgcctatggggtaacccataggacgctctaatgtggacatggtgcgaagagtctattgagctagttagtagtcctccggcccctgaatgcggctaatcctaactgcggagcacatgccttcaatccagagggtagtgtgtcgtaatgggcaactctgcagcggaaccgactactttgggtgtccgtgtttccttttattctcacattggctgcttatggtgacaattacagaattgttaccatatagctattggattggccacccggtgtgcaatagagctattatatacctatttgttggctttgtaccactaaccttaaagtctgtaatcactctcgagtatatattgacccttaatacgattaaac

SEQ ID NO: 19238 - DNA, 747 bp, synthetic construct
  source 1..747: mol_type = other DNA
ttaaaacagcctgtgggttgtacccactcacaggacccacgcggtgctagcactctggttccacggaacctttgtgcgcctgttttacgtcccctccccaatttgtaacttagaagcaatttacagtactgatcaatagcaggcatggcgcaccagctatgtcttgatcaagcacctctgtttccccggaccgagtatcaatagactgttcacacggtcgaaggagaaagcgttcgttatccggctaactacttcgagaaacccagtagcgccattgaaactgcagagtgtttcgctccacacttcccccgtgtagatcaggtcgatgagtcactgcaatccccacgggcgaccgtggcagtggctgcgttggcggcctgcctatggggtaacccataggacgctctaatgtggacatggtgcgaagagtctattgagctagttagtagtcctccggcccctgaatgcggctaatcctaactgcggagcacatgccttcaatccagagggtagtgtgtcgtaatgggcaactctgcagcggaaccgactactttgggtgtccgtgtttccttttattctcacattggctgcttatggtgacaattacagaattgttaccatatagctattggattggccatccggtgtgcaatagagctattatatacctatttgttggctttgtaccactaaccttaaaatctgtaatcactctcgagtatatattgacccttaatacaattaaac

SEQ ID NO: 19239 - DNA, 747 bp, synthetic construct
  source 1..747: mol_type = other DNA
ttaaaacagcctgtgggttgtacccactcacaggacccacgcggtgctagcactctggttccacggaacctttgtgcgcctgttttacgtcccctccccaatttgtaacttagaagcaatttacagcactgatcaatagcaggcatggcgcaccagctatgtcttgatcaagcacctctgtttccccggaccgagtatcaatagactgttcacacggtcgaaggagaaagcgttcgttatccggctaactacttcgagaaacccagtagcgccattgaaactgcagagtgtttcgctccacacttcccccgtgtagatcaggtcgatgagtcactgcaatccccacgggcgaccgtggcagtggctgcgttggcggcctgcctatggggtaacccataggacgctctaatgtggacatggtgcgaagagtctattgagctagttagtagtcctccggcccctgaatgcggctaatcctaactgcggagcacatgccttcaatccagagggtagtgtgtcgtaatgggcaactctgcagcggaaccgactactttgggtgtccgtgtttccttttattctcacattggctgcttatggtgacaattacagaattgttaccatatagctattggattggccatccggtgtgcaatagagctattatatacctatttgttggctttgtaccactaaccttaaaatctgtaatcaccctcgagtatatattgacccttaatacaattgaac

SEQ ID NO: 19240 - DNA, 747 bp, synthetic construct
  source 1..747: mol_type = other DNA
ttaaaacagcctgtgggttgtacccactcacaggacccacgcggtgctagcactctggttccacggaacctttgtgcgcctgttttacgtcccctccccaatttgtaacttagaagcaattcacagcactgatcaatagcaggcatggcgcaccagctatgtcttgatcaagcacctctgtttccccggaccgagtatcaatagactgttcacacggtcgaaggagaaagcgttcgttatccggctaactacttcgagaaacccagtagcgccattgaaactgcagagtgtttcgctccacacttcccccgtgtagatcaggtcgatgagtcactgcaatccccacgggcgaccgtggcagtggctgcgttggcggcctgcctatggggtaacccataggacgctctaatgtggacatggtgcgaagagtctattgagctagttagtagtcctccggcccctgaatgcggctaatcctaactgcggagcacatgccttcaatccagagggtagtgtgtcgtaatgggcaactctgcagcggaaccgactactttgggtgtccgtgtttccttttattctcacattggctgcttatggtgacaattatagaattgttaccatatagctattggattggccatccggtgtgcaatagagctattatatacctatttgttggctttgtaccactaaccttaaaatctgtaatcactctcgaatatatattgacccttaatacaattaaac

SEQ ID NO: 19241 - DNA, 747 bp, synthetic construct
  source 1..747: mol_type = other DNA
ttaaaacagcctgtgggttgtacccactcacaggacccacgcggtgctagcactctggctccacggaacctttgtgcgcctgttttacgtcccttccccaatttgtaacttagaagcaatttacagcactgatcaatagcaggcatggcgcaccagctatgtcttgatcaagcacctctgtttccccggaccgagtatcaatagactgttcacacggtcgaaggagaaagcgttcgttatccggctaactacttcgagaaacccagtagcgccattgaaactgcagagtgtttcgctccacacttcccccgtgtagatcaggtcgatgagtcactgcaatccccacgggcgaccgtggcagtggctgcgttggcggcctgcctatggggtaacccataggacgctctaatgtggacatggtgcgaagagtctattgagctagttagtagtcctccggcccctgaatgcggctaatcctaactgcggagcacatgccttcaatccagagggtagtgtgtcgtaatgggcaactctgcagcggaaccgactactttgggtgtccgtgtttccttttattctcacattggctgcttatggtgacaattacagaattgttaccatatagctattggattggccatccggtgtgcaatagagctattatatacctatttgttggctttgtaccactaaccttaagatctgtaatcactctcgagtttatattgacccttaatacaattaaac

SEQ ID NO: 19242 - DNA, 747 bp, synthetic construct
  source 1..747: mol_type = other DNA
ttaaaacagcctgtgggttgtacccactcacaggacccacgcggtgctagcactctggttccatggaacctttgtgcgcctgttttacgtcccctccccaatttgtaacttagaagcaatttacagcactgatcaatagcaggcatggcgcaccagctatgtcttgatcaagcacctctgtttccccggaccgagtatcaatagactgttcacacggtcgaaggagaaagcgttcgttatccggctaactacttcgagaaacccagtagcgccattgaaactgcagagtgtttcgctccacacttcccccgtgtagatcaggtcgatgagtcactgcaatccccacgggcgaccgtggcagtggctgcgttggcggcctgcctatggggtaacccataggacgctctaatgtggacatggtgcgaagagtctattgagctagttagtagtcctccggcccctgaatgcggctaatcctaactgcggagcacatgccttcaatccagagggtagtgtgtcgtaatgggcaactctgcagcggaaccgactactttgggtgtccgtgtttccttttattctcacattggctgcttatggtgacaattacagaattgttaccatatagctattggattggccatccggtgtgcaatagagctattatatacctatttgttggctttgtaccactaaccttaaaatctgtaatcactctcgagtatatattgacccttaacgcaattaaac

SEQ ID NO: 19243 - DNA, 747 bp, synthetic construct
  source 1..747: mol_type = other DNA
ttaaaacagcctgtgggttgtacccactcacaggacccacgcggtgctagcactctggttccacggaacctttgtgcgcctgttttacgtcccctccccaatttgtaacttagaagcaatttacagcactgatcaatagcaggcatggcgcaccagctatgtcttgatcgagcacctctgtttccccggaccgagtatcaatagactgttcacacggtcgaaggagaaagcgttcgttatccggctaactacttcgagaaacccagtagcgccattgaaactgcagagtgtttcgctccacacttcccccgtgtagatcaggtcgatgagtcactgcaatccccacgggcgaccgtggcagtggctgcgttggcggcctgcctatggggtaacccataggacgctctaatgtggacatggtgcgaagagtctattgagctagttagtagtcctccggcccctgaatgcggctaatcctaactgcggagcacatgccttcaatccagagggtagtgtgtcgtaatgggcaactctgcagcggaaccgactactttgggtgtccgtgtttccttttattctcacattggctgcttatggtgacaattacagaattgttaccatatagctattggattggccatccggtgtgcaatagagctatcatatacctatttgttggctttgtaccactaaccttaaaatctgtaatcaccctcgagtatatattgacccttaatacaattgaac

SEQ ID NO: 19244 - DNA, 747 bp, synthetic construct
  source 1..747: mol_type = other DNA
ttaaaacagcctgtgggttgtacccactcacaggacccacgcggtgctagcactctggttccacggaacctttgtgcgcctgttttacgtcccctccccaatttgtaacttagaagcaatttacagcactgatcaatagcaggcatggcgcaccagctatgtcttgatcaagcacctctgtttccccggaccgagtatcaatagactgttcacacggtcgaaggagaaagcgttcgttatccggctaactacttcgagaaacccagtagcgccattgaaactgcagagtgtttcgctccacacttcccccgtgtagatcaggtcgatgagtcactgcaatccccacgggcgaccgtggcagtggctgcgttggcggcctgcctatggggtaacccataggacgctctaatgtggacatggtgcgaagagtctattgagctagttagtagtcctccggcccctgaatgcggctaatcctaactgcggagcacatgccttcaatccagagggtagtgtgtcgtaatgggcaactctgcagcggaaccgactactttgggtgtccgtgtttccttttattctcacattggctgcttatggtgacaattacagaattgttaccatatagctattggattggccatccggtgtgcaatagagctattatatacctatttgttggctttgtaccactaaccttaaaacctgtgatcactctcgagtgtatattgacccttaatacaattaaac

SEQ ID NO: 19245 - DNA, 747 bp, synthetic construct
  source 1..747: mol_type = other DNA
ttaaaacagcctgtgggttgtacccactcacaggacccacgcggtgctagcactctggttccacggaacctttgtgcgcctgttttacgtcccctccccaatttgtaacttagaagcaatttacagcactgatcaatagcaggcatggcgcaccagctatgtcttgatcaagcacctctgtttccccggaccgagtatcaatagactgttcacacggtcgaaggagaaagcgttcgttatccggctaactacttcgagaaacccagtagcgccattgaagctgcagagtgtttcgctccacacttcccccgtgtagatcaggtcgatgagtcactgcaatccccacgggcgaccgtggcagtggctgcgttggcggcctgcctatggggtaacccataggacgctctaatgtggacatggtgcgaagagtctattgagctagttagtagtcctccggcccctgaatgcggctaatcctaactgcggagcacatgccttcaatccagagggtagtgtgtcgtaatgggcaactctgcagcggaaccgactactttgggtgtccgtgtttccttttattctcacattggctgcttatggtgacaattacaggattgttaccatatagctattggattggccatccggtgagcaatagagctattatatacctatttgttggctttataccactaaccttaaaatctgtaatcactctcgagtatatattgacccttaatacaattaaac

SEQ ID NO: 19246 - DNA, 743 bp, synthetic construct
  source 1..743: mol_type = other DNA
ttaaaacagcctgtgggttgtacccactcacagggcccactgggcgccagcactctggtaatacgttacctttgtgcgcctgttttacctccccctaccctggaacactttagaagtaaagcatttctggtcaatagaaggtgtggcgaaccagctgcatctcgaccaagcacttctgtttccccggactgagtatcaatagactgctaacgcggtcgaaggagaaaacgttcgttatccggctagctacttcgagaagcttagtaacactatgaaagttgcagagtgtttcactcagcacttcccccgtgtagatcaggtcgatgagtcaccgcggcccccacgggcgaccgtggcggtggctgcgttggcggcctgcctgtggggtaacccacaggacgctctaatacagacatggtgtgaagagcctattgagctagctagtagtcctccggcccctgaatgcggctaatcctaactgcggagcacatgctcgtgagccagcgagtagtgtgtcgtaatgggtaactctgcagcggaaccgactactttgggcgtccgtgtttctttttattcttacattggctgcttatggtgacaattaaagaattggcaccatatagctattggattggccatcctgtgactaacagagctattatatatctctttgttggatttgttcctttgaggctcactacttataacacactttgttttatattgactctcaattcagcaaa

SEQ ID NO: 19247 - DNA, 743 bp, synthetic construct
  source 1..743: mol_type = other DNA
ttaaaacagcctgtgggttgtacccactcacagggcccactgggcgctagcactctggtaatatgttacctttgtgcgcctgttttacctccccctaccctggaacactttagaagtaaagcatttctggtcaatagaaggtgtggcgaaccagctgcatctcgaccaagcacttctgtttccccggactgagtatcaatagactgctaacgcggtcgaaggagaaaacgttcgttatccggctagctacttcgagaagcctagtaacaccatgaaagttgcagagtgtttcactcagcacttcccccgtgtagatcaggtcgatgagtcaccgcgacccccacgggcgaccgtggcggtggctgcgctggcggcctgcctgtggggcaacccataggacgctctaatacagacatggtgtgaagagcctattgagctagctagtagtcctccggcccctgaatgcggctaatcctaactgcggagcacatgctcgtgagccagcgagtagtgtgtcgtaatgggtaactctgcagcggaaccgactactttgggtgtccgtgtttctttttattcctacattggctgcttatggtgacaattaaagaattggcaccatatagctattggattggccatcctgtgactaacagagctattatatatctctttgttggatttgttcctttgaggctcactacttataacacactttgttttatattgactctcaatacagcaaa

SEQ ID NO: 19248 - DNA, 743 bp, synthetic construct
  source 1..743: mol_type = other DNA
ttaaaacagcctgtgggttgtacccactcacagggcccactgggcgccagcactctggtaatacgttacctttgtgcgcctgttttacctccccctaccctggaacactttagaagtaaagcatttctggtcaatagaaggtgtggcgagccagctgcatctcgaccaagcacttctgtttccccggactgagtatcaatagactgctaacgtggtcgaaggagaaaacgttcgttatccggctagctacttcgagaagcctagtaacaccatgaaagttgcagagtgtttcactcagcacttcccccgtgtagatcaggtcgatgagtcaccgcgacccccacgggcgaccgtggcggtggctgcgttggcggcctgcctgtggggcaacccataggacgctctaatacagacatggtgtgaagagcctattgagctagctagtagtcctccggcccctgaatgcggctaatcctaactgcggagcacatgctcgtgagccagcgagtagtgtgtcgtaatgggtaactctgcagcggaaccgactactttgggtgtccgtgtttctttttattcttacaatggctgcttatggtgacaattaaagaattggcaccatatagctattggattggccatcctgtgactaacagagctattatatatctctttgttggattcattcctttgaggctcactacttataacacactttgttttatattgactctcaattcagcaaa

SEQ ID NO: 19249 - DNA, 743 bp, synthetic construct
  source 1..743: mol_type = other DNA
ttaaaacagcctgtgggttgtacccactcacagggcccactgggcgccagcactctggtaatacgttacctttgtgcgcctgttttacctccccctaccctggaacactttagaagtaaagcatatccggtcaatagaaggtgcggcgaaccagctgcatcccgaccaagcacttctgtttccccggactgagtatcaatagactgctaccgcggttgaaggagaaaacgttcgttatccggctagctacttcgagaagcccagtaacaccatgaaagttgcagagtgtttcactcagcacttcccccgtgtagatcaggtcgatgagtcaccgcgacccccacgggcgaccgtggcggtggctgcgttggcggcctgcctgtggggcaacccacaggacgctctaatacagacatggtgtgaagagcctattgagctagctagtagtcctccggcccctgaatgcggctaatcctaactgcggagcacatgttcgtgaaccagcgagtagtgtgtcgtaatgggtaactctgcagcggaaccgactactttgggtgtccgtgtttctttttattcttacattggctgcttatggtgacaattaaggaattggcaccatatagctattggattggccatcctgtgactaacagagctattatatatctctttgttggatttgttcccttgaggctcgctacttataacacactttgttttatattgactctcaattcagcaaa

SEQ ID NO: 19250 - DNA, 743 bp, synthetic construct
  source 1..743: mol_type = other DNA
ttaaaacagcctgtgggttgtacccactcacggggcccactgggcgtcagcactctggtaatacgttacctttgtgcgcctgttttacctccccctaccctggaacactttagaagtaaagcatatccggtcaatagaaggtgtggcgaaccagctgcatctcgaccaagcacttctgtttccccggactgagtatcaatagactgctaccgcggtcgaaggagaaaacgttcgttatccggctagctacttcgagaagcccagtaacaccatgaaagttgcagagtgtttcattcagcacttcccccgtgtagatcaggtcgatgagtcaccgcgacccccacgggtgaccgtggcggtggctgcgttggcggcctgcctgtggggcaacccacaggacgctctaatacagacatggtgtgaagagcctattgagctagctagtagtcctccggcccctgaatgcggctaatcctaactgcggagcacatgctcgtgaaccagcgagtagtgtgtcgtaatgggtaactctgcagcggaaccgactactttgggtgtccgtgtttctttttattctcacattggctgcttatggtgacaattaaagaattggcaccatatagctattggattggccatcccgtgactaacagagctattatatacctctttgttggatttgttcccttgaggctcactacttataacacactttgttttatattgactctcaattcagcaaa

SEQ ID NO: 19251 - DNA, 743 bp, synthetic construct
  source 1..743: mol_type = other DNA
ttaaaacagcctgtgggttgtacccactcacagggcccactgggcgccagcactctggtaatgcgttacctttgtgcgcctgttttacccccccctaccctggaacactttagaagtaaagcatttccggtcaatagaaggtgcggcgaaccagctgcatctcgaccaagcacttctgtttccccggactgagtatcaatagactgctaacgcggtcgaaggagaaaacgttcgttacccggctagctacttcgagaagcctagtaacgccatgaaagttgcagagtgtttcgctcagcacttcccccgtgtagatcaggccgatgagtcaccgcgacccccacgggcgaccgtggcggtggctgcgttggcggcctgcctgtggggcaacccataggacgctctaatacagacatggtgtgaagagcctattgagctagctagtagtcctccggcccctgaatgcggctaatcctaactgcggagcacatgctcgtgagccagcgagtagtgtgtcgtaatgggtaactctgcagcggaaccgactactttgggtgtccgtgtttctttttattctcacattggctgcttatggtgacaattaaagaattgacaccatatagctattggattggccatcctgcgactaacagagctattatatatctttttgttggatttgttcccttgaggcttactacttataacacactttgttttatattgactctcaattcagcaaa

SEQ ID NO: 19252 - DNA, 742 bp, synthetic construct
  source 1..742: mol_type = other DNA
ttaaaacagcctgtgggttgtacccacccacagggcccactgggcgctagcactctggtattacggtacctttgtgcgcctgttttatttcccttccccattgtaactttagaagaaacaaaactggatcaatagcccatcacccaaaccagggtggtgacgatcaagcacttctgtttccccggatctagtatcaatagactgttagcacggttgaaggagaacgattcgttatccggctcactacttcgagaagcctagtaccactatgaaagtgaaatagcgtttcgctcagcacaaccccagtgtagatcaggccgatgagtcactgcattccccacgggcgaccgtggcagtggctgcgttggcggcctgcctgtgggtccccccacaggacgctaattcatggacatggtgcgaagagcctattgagctagtgagtagtcctccggcccctgaatgcggctaatcctaaccacggagcatccgctggcagtccagccagtagggtgtcgtaacgggtaactctgtggcggaaccgactactttgggtgtccgtgtttcctgttttacttactttggctgcttatggtgacaatttacggattgttgccatatagctattggattggccatccggattataaacacacaatactgttattttttcctttttgggatttcttcccttgagttttactaattattttatcttgttaatagttttaaagttgaatacatt

SEQ ID NO: 19253 - DNA, 744 bp, synthetic construct
  source 1..744: mol_type = other DNA
ttaaaacagcctgtgggttgttcccacccacagggcccactgggcgctagcacactgattctgcgggatctttgtgcgcctgttttataacccttccctaagcagcaacttagaagcttcacactatcacgaccagtagcgggcgtggcgcgccagtcacgtctcggtcaagcacttctgtttccccggactgagtatcaatagactgctcacgcggttgaaggagaaaacgttcgttatccggctaactacttcgagaaacctagtagcaccgtgaaagttgcggagtgtttcgctcagcacttcccccgtgtagatcaggtcgatgagtcactgtaaaccccacgggcgaccgtgacagtggctgcgttggcggcctgcctatggggtaacccatgggacgctctaatacagacacggtgtgaagagtccattgagctagttagtagtcctccggcccctgaatgcggctaatcctaactgcggagcgcgcaccctcaacccagggggcggcgcgtcgtaatgggtaactctgcagcggaaccgactactttgggtgtccgtgtttccttttattccttattggctgcttatggtgacaattgaaaagttgttaccatatagctattggattggccatccggtgaccaacagagctattgtttacctgtttattggatacgtccctcttaatctcaaggccattcaaactcttgattatatattactccttaactgtaagaa

SEQ ID NO: 19254 - DNA, 731 bp, synthetic construct
  source 1..731: mol_type = other DNA
tgtgggttgcacccacccacagggcccactgggcgctagcactctggtgtcacggcacctttgtgcgcctgttttatcaccctaccccacacgagacttagaagtagtacacaaccgaccaatagtaggtgtggcgcaccagccacatcttggtcaagcacttctgtttccccgggttgagtatcaataagctgttcacacggctgaaggagaaagcacccgttacccggccaactacttcgagaaacctagtaccgccatggacgttgcaaggtgtttcgctcagcacttcccccgtgtagatcaggccgatgagtcaccgcatcccccacgggtgaccgtggcggtggctgcgttggcggcctgcctatgggttaacccataggacgccttaatactgacatggtgcgaagagtctattgagctagttggtagtcctccggcccctgaatgcggctaatcctaactgcggagcacatactcacaaaccagtgagcggtgtgtcgtaacgggtaactctgcagcggaaccgactactttgggtgtccgtgtttccttttatctttatattggctgcttatggtgacaatcagagaattgttaccatatagctattggattggccatccggtgtctaatagagctattatatacctgtttattggattcactccgttgacctataaatccctaaacaccttgtgctatattttgaatttaaacacacgaaa

SEQ ID NO: 19255 - DNA, 742 bp, synthetic construct
  source 1..742: mol_type = other DNA
ttaaaacagcctgtgggttgtacccactcacagggcctactgggcgctagcactctggtaatacgttacctttgtgcgcctgttttacctccccttaccctggaacactttagaagtaaagcattcctggtcaatagaaggtgtggcgaaccagctgcatcacgaccaagcacttctgtttccccggactgagtatcaatagactgctaacgcggttgaaggagaaaacgttcgttatccggctagctacttcgagaagcctagtaacaccatgaaagttgcagagtgtttcactcagcacttcccccgtgtagatcaggtcgatgagtcaccgcgacccccacgggcgaccgtggcggtggctgcgttggcggcctgcctgtggggtaacccataggacgctctaatacagacatggtgtgaagagcctattgagctagttagtagtcctccggcccctgaatgcggctaatcctaactgcggagcacacgctcgtgagccagcgagtagtgtgtcgtaatgggtaactctgcagcggaaccgactactttgggtgtccgtgtttcttttattcttacattggctgcttatggtgacaatcaaagaattggcaccatatagctattggattggccatcctgtgactaacagagctattatatatctctttgttggatttgttcctttgagactcactacttataacacactttgtttcatattgactctcaactcagcaaa

SEQ ID NO: 19256 - DNA, 742 bp, synthetic construct
  source 1..742: mol_type = other DNA
ttaaaacagcctgtgggttgtacccactcacagggcctactgggcgctagcactctggtaatacgttacctttgtgcgcctgttttacctccccctaccctggaacactttagaagtaaagcattcctggtcaatagaaggtgtggcgaaccagctgcatcacgaccaagtacttctgtttccccggactgagtatcaatagactgctaacgcggttgaaggagaaaacgttcgttatccggctagctacttcgagaagcctagtaacaccatgaaagttgcagagtgtttcactcagcacttcccccgtgtagatcaggtcgatgagtcaccgcgatccccacgggcgaccgtggcggtggctgcgttggcggcctgcctatggggcaacccataggacgctctaatacagacatggtgtgaagagcctattgagctagttagtagtcctccggcccctgaatgcggctaatcctaactgcggagcacacgctcgtgagccagcgagtagtgtgtcgtaatgggtaactctgcagcggaaccgactactttgggtgtccgtgtttcttttattcttacattggctgcttatggtgacaattaaagaattggcaccatatagctattggattggccatcctgtgactaacagagctattatatatctctttgttggatttgttcctttgaggctcactacttataacacactttgtttcatattgactctcaactcagcaaa

SEQ ID NO: 19257 - DNA, 727 bp, synthetic construct
  source 1..727: mol_type = other DNA
cacccactcacagggcccactgggcgctagcactctgattttacgaaatccttgtgcgcctgttttatatcccttccctaattcgaaacgtagaagcaatgcgcaccactgatcaatagtaggcgtaacgcgccagttacgtcatgatcaagcatatctgttcccccggactgagtatcaatagactgcttacgcggttgaaggagaaaacgttcgttatccggctaactacttcgagaagcccagtaacaccatggaagctgcagggtgtttcgctcagcacttcccccgtgtagatcaggtcgatgagccactgcaatccccacaggtgactgtggcagtggctgcgttggcggcctgcctatggggagacccataggacgctctaatgtggacatggtgcgaagagcctattgagctagttagtagtcctccggcccctgaatgcggctaatcctaactgcggagcacatgccttcaacccagagggtagtgtgtcgtaacgggcaactctgcagcggaaccgactactttgggtgtccgtgtttctttttatttttatattggctgcttatggtgacaattacagaattgttaccatatagctattggattggccatccggtgtgtaatagagctgttatatacctatttgttggctttgtaccactaactttaaaatctataactaccctcaactttgtattaactctcaatacagctgatc

SEQ ID NO: 19258 - DNA, 729 bp, synthetic construct
  source 1..729: mol_type = other DNA
gggttgttcccacccacagggcccactgggcgccagcactctgattccacggaatctttgtgcgcctgttttacaaccctccccaatttgtaacgtagaagcaatacacactactgatcaatagtaggcatggcgcgccagtcatgtcatgatcaagcacttctgttccccggactgagtatcaatagactgctcacgcggttgaaggagaaaacgttcgttacccggctaactacttcaagaaacctagtagcaccatggaagctgcggagtgtttcgctcagcacttcccccgtgtagatcaggtcgatgagtcactgcaatccccacgggcgaccgtggcagtggctgcgttggcggcctgcctatggggtaacccataggacgctctaatgtggacatggtgcgaagagtctattgagctagttagtagtcctccggcccctgaatgcggctaatcctaactgcggagcacatgccttcaacccaggaggtggtgtgtcgtaacgggtaactctgcagcggaaccgactactttgggtgtccgtgtttccttttatccttatattggctgcttatggtgacaatcacggaattgttgccatatagctattggattggccatccggtgtctaacagagctattgtatacctatttgttggatttactcccctatcatacaaatctctgaacactttgtgctttatactgaacttaaacacacgaaa

SEQ ID NO: 19259 - DNA, 730 bp, synthetic construct
  source 1..730: mol_type = other DNA
gggttgttcccacccacagggcccactgggcgccagcactctgattccacggaatctttgtgcgcctgttttacaacccttcccaatctgtaacgtagaagtaatgcacactattgatcaatagtaggcatggcgcgccagtcatgtcgtgatcaagcacttctgttcccccggactgagtatcaatagactgctcacgcggttgaaggagaaaacgttcgttacccggctaactacttcgagaaacctagtagcaccatggaagctgcagagtgtttcgctcagcacctcccccgtgtagatcaggtcgatgagtcactgcaatccccacgggcgaccgtggcagtggctgcgttggcggcctgcctatggggtaacccataggacgctctaatgtggacatggtgcgaagagtctattgagctagttagtagtcctccggcccctgaatgcggctaatcctaactgcggagcacatgccttcaacccaggaggtggtgtgtcgtaacgggtaactctgcagcggaaccgactactttgggtgtccgtgtttccttttatccttatactggctgcttatggtgacaatcacggaattgttaccatatagctattggattggccatccggtgtctaatagagctattgtgtacctatttgttggattcactcccctatcgtataaatctctgaacactttgtgttttatattgaacttaaacacacgaaa

SEQ ID NO: 19260 - DNA, 747 bp, synthetic construct
  source 1..747: mol_type = other DNA
ttaaaacagcctgtgggttgtacccactcacaggacccacgcggtgctagcactctggttccacggaacctttgtgcgcctgttttacgtcccctccccaatttgtaacttagaagcaatatacagcactgatcaatagcaggcatggcgcaccagctatgtcttgatcaagcacctctgtttccccggaccgagtatcaatagactgttcacacggtcgaaggagaaagcgttcgttatccggctaactacttcgagaaacccagtagcgccattgaaactgcagagtgtttcgctccacacttcccccgtgtagatcaggtcgatgagtcactgcaatccccacgggcgaccgtggcagtggctgcgttggcggcctgcctatggggtaacccataggacgctctaatgtggacatggtgcgaagagtctattgagctagttagtagtcctccggcccctgaatgcggctaatcctaactgcggagcacatgccttcaatccagagggtagtgtgtcgtaatgggcaactctgcagcggaaccgactactttgggtgtccgtgtttccttttattctcacattggctgcttatggtgacaattacagaattgttaccatatagctattggattggccatccggtgtgcaatagagctattatatacctatttgttggctttgtaccactaaccttaaaatctgtaatcactctcgagtgtatattgacccttaatacaattaaac

SEQ ID NO: 19261 - DNA, 738 bp, synthetic construct
  source 1..738: mol_type = other DNA
agcctgtgggttgttcccacccacagggcccactgggcgctagcacactgattctgcgggatctttgtgcgcctgttttataaccccttccctaagcagcaacttagaagcttcacactatcacgaccagtagtgggcgtggcgcgccagtcacgtcttggtcaagcacttctgtttccccggactgagtatcaatagactgctcacgcggttgaaggagaaaacgttcgttatccggctaactacttcgagaagcctagtagcatcgtgaaagttgcggagtgtttcgctcggcacttcccccgtgtagatcaggtcgatgagtcactgtaaaccccacgggcgaccgtgacagtggctgcgttggcggcctgcccatggggtaacccatgggacgctctaatacagacacggtgtgaagagtctattgagctagttagtagtcctccggcccctgaatgcggctaatcctaactgcggagcgcgcaccctcaacccagggggcggcgcgtcgtaacgggtaactctgcagcggaaccgactactttgggtgtccgtgtttccttttatcccttattggctgcttatggtgacaattgaaaagttgttaccatatagctattggattggccatccggtgaccaacagagctattgtttacctgtttattggatacgtccctcttaatctcaaggccattcaaactcttgattacatattactccttaactgtaagaa

SEQ ID NO: 19262 - DNA, 744 bp, synthetic construct
  source 1..744: mol_type = other DNA
ttaaaacagcctgtgggttgtacccactcacagggcccactgggcgttagcactctggtactaaggtacctttgtgcgcctgttttaactccctttccctgaagtaacttagaagcagtaaactaatgatcaatagtgggcatgacataccagccatgtctcgatcaagcacttctgtttccccggaccgagtatcaataggctgctcgcgcggctgaaagagaaaacgttcgttacccggccagctacttcgagaagcttagtaccatcatgaacgaagcagagcgtttcgctcagcacaatcccagtgtagatcaggctgatgagtcactgcaaaccccatgggcgaccatggcagtggctgcgttggcggcctgcccatggagaaatccatgggacgctctaattctgacatggtgcgaagagcctattgagctagctggtagtcctccggcccctgaatgcggctaatcctaactgcggagcacgcacccacaaaccagtgggcagtgtgtcgtaatgggtaactctgcagcggaaccgactactttgggtgtccgtgtttccttttattcttatattggctgcttatggtgacaatcaaagagttgttaccatatagctattggattggccatccggtgtgcaacagagcaattgtttacctatttattgggtttgtaccactaacgttgaagtctgtgaccacactcaactttatcctgaacctcaatacagtaaaac

SEQ ID NO: 19263 - DNA, 747 bp, synthetic construct
  source 1..747: mol_type = other DNA
ttaaaacagcctgtgggttgtacccactcacaggacccacgcggtgctagcactctggttccacggaacctttgtgcgcctgttttacgtcccctccccaatttgtaacttagaagcaatttacagcactgatcaatagcaggcatggcgcaccagctatgtcttgatcaagcacctctgtttccccggaccgagtatcaatagactgttcacacggtcgaaggagaaagcgttcgttatccggctaactacttcgagaaacccagtagcgccattgaaactgcagagtgtttcgctccacacttcccccgtgtagatcaggtcgatgagtcactgcaatccccacgggcgaccgtggcagtggctgcgttggcggcctgcctatggggtaacccataggacgctctaatgtggacatggtgcgaagagtctattgagctagttagtagtcctccggcccctgaatgcggctaatcctaactgcggagcacatgccttcaatccagagggtagtgtgtcgtaatgggcaactctgcagcggaaccgactactttgggtgtccgtgtttccttttattctcacattggctgcttatggtgacaattacagaattgttaccatatagctattggattggccatccggtgtgcaatagagctattatatacctatttgttggctttgtaccactaaccttaaaatctgtgatcactctcgagtatatattgacccttaatacaattaaac

SEQ ID NO: 19264 - DNA, 727 bp, synthetic construct
  source 1..727: mol_type = other DNA
tgttcccacccacagggcccactgggcgccagcactctgattccatggaatctttgtgcgcctgttttataacccttccccgatttgtaacgtagaagtaatacacactacagatcaatagtaggcatggcgcgccagtcatgtctcgatcaagcacttctgtttccccggactgagtatcaatagactgcccacgcggttgaaggagaaaacgtccgttacccggctaactacttcgagaaacccagtagcaccatataagctgcagagtgtttcgctcagcacttcccccgtgtagatcaggccgatgagtcactgcaacccccacgggcgaccgtggcagtggctgcgctggcggcctgcctatggggcaacccataggacgctctaatgtggacatggtgcgaagagtctattgagctagttagtagtcctccggcccctgaatgcggctaatcctaactgcggagcacatgccttcaatccaggaggtggtgtgtcgtaacgggtaactctgcagcggaaccgactactttgggtgtccgtgtttccttttatccttatattggctgcttatggtgacaatcacggaattgttgccatatagctattggattggccatccggtgtctaatagagctattgtgtacctatttgttggatttactccactgtcatataaatctctgaacactttgtgctttatattgaacttaaacacacgaaa

SEQ ID NO: 19265 - DNA, 728 bp, synthetic construct
  source 1..728: mol_type = other DNA
gttgttcccacccacagggcccactgggcgccagcactctgattccacggaacctttgtgcgcctgttttacaaccctccccaatttgtaacgtagaagtaatacacactactgatcaatagtaggcatggcgcgccagtcatgtcatgatcaagcacttctgttctcccggactgagtatcaatagactgctcacgcggttgaaggagaaaacgttcgttacccggctaactacttcaagaaacctagtagcaccatggaaactgcggagcgtttcgctcagcacttcccccgtgtagatcaggtcgatgagtcactgcaatccccacgggcgaccgtggcagtggctgcgttggcggcctgcctatggggtaacccataggacgctctaatgtggacatggtgcgaagagtctattgagctagttagtagtcctccggcccctgaatgcggctaatcctaactgcggagcacatgccttcaacccaggaggtggtgtgtcgtaacgggtaactctgcagcggaaccgactactttgggtgtccgtgtttccttttatccttatattggctgcttatggtgacaatcacggaattgttgccatatagctattggattggccatccggtgtctaacagagctattgtatacctatttgttggatttactcccctatcatacaaatctctgaacactttgtgctttatattgaacttaaacacacgaaa

SEQ ID NO: 19266 - DNA, 747 bp, synthetic construct
  source 1..747: mol_type = other DNA
ttaaaacagcctgtgggttgtacccactcacaggacccacgcggtgctagcactctggttccacggaacctttgtgcgcctgttttacgtcccctccccaatttgtaacttagaagcaatttacagcactgatcaatagcaggcatggcgcaccagctatgtcttgatcaagcacctctgtttccccggaccgagtatcaatagactgttcacacggtcgaaggagaaagcgttcgttatccggctaactacttcgagaaacccagtagcgccattgaagctgcagagtgtttcgctccacacttcccccgtgtagatcaggtcgatgagtcactgcaatccccacgggcgaccgtggcagtggctgcgttggcggcctgcctatggggtaacccataggacgctctaatgtggacatggtgcgaagagtctattgagctagttagtagtcctccggcccctgaatgcggctaatcctaactgcggagcacatgccttcaatccagagggtagtgtgtcgtaatgggcaactctgcagcggaaccgactactttgggtgtccgtgtttccttttattctcacattggctgcttatggtgacaattacagaattgttaccatatagctattggattggccatccggtgtgcaatagagctattatatacctatttgttggctttataccactaaccttaaaatctgtaatcactctcgagtatatattgacccttaatacaattaaac

SEQ ID NO: 19267 - DNA, 723 bp, synthetic construct
  source 1..723: mol_type = other DNA
ccactcacagggcccactgggcgctagcactctgattctgcggaatctttgtgcgcctgttttacaacccctcccccaatttgtaacttagaagtagtgcacatcaccgatcaacagcaagcgtggcgcgccagccatgtttagatcaagcacttctgtttccccggactgagtatcaatagactgctcacgcggttgaaggagaaaacgttcgttacccgactaactacttcgagaaacctagtagcaccatcgaaactgcagggtgtttcgctcagcacttcccccgtgtagatcaggtcgatgagtcactgcaatccccacgggcgaccgtggcagtggctgcgttggcggcctgcctatgggcttacccataggacgccctaatgtggacatggtgtgaagagtctattgagctagttagtagtcctccggcccctgaatgcggctaatcctaactgcggagcgcataccctcaatccagggggtggtgcgtcgtaatgggcaactctgcagcggaaccgactactttgggtgtccgtgtttccttttattcttacattggctgcttatggtgacaattgagaaattgttaccatatagctattggattggccatccagtgtctaacagagcaattgtatacttatttgttggattcattccactgtcacacacatccattaataccctatactacatcataaaattgaacacaagaaa

SEQ ID NO: 19268 - DNA, 725 bp, synthetic construct
  source 1..725: mol_type = other DNA
ccacccacagggcccactgggcgttagcacactgattctaaggaatctttgtgcgcctgttttatatccctcccctccaaaagtgtaacttagaagtttaatgcactcacgaccaatagcgggcgcgacgcaccagtcacgtcttggtcaagtacttctgtctccccgggccaagtatcaatagactgcttacgcggttgaaggagaaaacgctcgttacccggctaactacttcgagaaacccagtagcaccatggaagttgcagggtgtttcgttcagcacttcccccgtgtagatcaggtcgatgagtcactgcaaaccccacgggcgaccgtggcagtggctgcgttggcggcctgcccatggggtaacccatgggacgctctaatacagacatggtgtgaagagtctattgagctggttagtagtcctccggcccctgaatgcggctaatcctaactgcggagcacacaccctcaacccagggggcggtgtgtcgtaacgggtaactctgcagcggaaccgactactttgggtgtccgtgtttccttttatatttactatggctgcttatggtgacaattgaagaattgttaccatatagctattggattggccatccggtgtctaacagagcaattgtatacttatttgttggatttgtccctctatcacacacacctctcaaaaccttatactatattataaagttgaatacaggaag

SEQ ID NO: 19269 - DNA, 725 bp, synthetic construct
  source 1..725: mol_type = other DNA
caacccacagggcccactgggcgttagcacactgatttcaaggaatctttgtgcgcctgttttatatccctcccccccaaaagtgtaacttagaagtttaatgcactcacgaccaatagtaggcgagacgcaccagtcacgtcttggtcaagtacttctgtctccccgggcccagtatcaatagactgcttacgcggttgaaggagaaaacgctcgttacccgactaactacttcgagaaacccagtagcaccatgaaagttgcagggtgtttcgttcagcacttcccccgtgtagatcaggtcgatgagtcactgcaaaccccacgggcgaccgtggcagtggctgcgttggcggcctgcccatggggtaacccatgggacgctctaatacagacatggtgtgaagagtctattgagctagttagtaatcctccggcccctgaatgcggctaatcctaactgcggagcacacaccctcaacccagggggcggtgtgtcgtaacgggtaactctgcagcggaaccgactactttgggtgtccgtgtttccttttatacttactgtggctgcttatggtgacaattgaagaattgttaccatatagctattggattggccatccggtgtctaatagagcaattgtgtacctatttgttggatttgtccctctgtcatacacacctctcaataccttatactatattataaagttgaatacaggaag

SEQ ID NO: 19270 - DNA, 723 bp, synthetic construct
  source 1..723: mol_type = other DNA
ccactcacagggcccactgggcgctagcactctgattctgcggaatctttgtgcgcctgttttacaacccctcccccaatttgtaacttagaagtagtgcacatcaccgatcaacagcaagcgtggcgcgccagccatgtttagatcaagcacttctgtttccccggactgagtatcaatagactgctcacgcggttgaaggagaaaacgttcgttacccgactgactacttcgagaaacctagtagcaccatcgaaactgcagggtgtttcgctcagcacttcccccgtgtagatcaggtcgatgagtcactgcaatccccacgggcgaccgtggcagtggctgcgttggcggcctgcctatgggcttacccataggacgccctaatgtggacatggtgtgaagagtctattgagctagttagtagtcctccggcccctgaatgcggctaatcttaactgcggagcgcataccctcaatccagggggtggtgcgtcgtaatgggcaactctgcagcggaaccgactactttgggtgtccgtgtttccttttattcttacattggctgcttatggtgacaattgagaaattgttaccatatagctattggattggccatccagtgtctaacagagcaattgtatacttatttgttggattcattccactgtcacacacatccattaataccctacactacatcataaaattgaacacaagaaa

SEQ ID NO: 19271 - DNA, 731 bp, synthetic construct
  source 1..731: mol_type = other DNA
tgtgggttgtacccactcacagggcccactgggcgccagcactctggtactgcggtacctttgtgcgcctgttttatcaccccaccccatttgaaacgtagaagcaatgcacaaccggccaatagtaggtgtggcgcaccagccacatcttggccaagcacttctgtttccccgggtttagtatcaataagctgctcacgcggctgaaggagaaaacacccgttatccggccgactacttcgagaaacctagtaccactatgaacgttgcaaggcgtttcgctcagcacttcccccgtgtagatcaggctgatgagtcaccgcatccctcacgggcgaccgtggcggtggctgcgttggcggcctgcctatgggcttgcccataggacgccttaacactgacatggtgcgaagagtctattgagctagttggtagtcctccggcccctgaatgcggctaatcctaactgcggagcacacactcacaaaccagtgagcggtgtgtcgtaacgggcaactctgcagcggaaccgactactttgggtgtccgtgtttccttttattcttatactggctgcttatggtgacaattaaagaattgttaccatatagctattggattggccatccggtgtctaacagagatattatatacttgtttgttggattcacctcgttatcatacaaatcccttaacactttgtgctttatcttgagtttgaattcaaaaag

SEQ ID NO: 19272 - DNA, 747 bp, synthetic construct
  source 1..747: mol_type = other DNA
ttaaaacagcctgtgggttgtacccactcacaggacccacgcggtgctagcactctggttccacggaacctttgtgcgcctgttttacgtcccctccccaatttgtaacttagaagcaatatacagcactgatcaatagcaggcatggcgcaccagctatgtcttgatcaagcacctctgtttccccggaccgagtatcaatagactgttcacacggtcgaaggagaaagcgttcgttatccggctaactacttcgagaaacccagtagcgccattgaaactgcagagtgtttcgctccacacttcccccgtgtagatcaggtcgatgagtcactgcaatccccacgggcgaccgtggcagtggctgcgttggcggcctgcctatggggtaacccataggacgctctaatgtggacatggtgcgaagagtctattgagctagttagtagtcctccggcccctgaatgcggctaatcctaactgtggagcacatgccttcaatccagagggtagtgtgtcgtaatgggcaactctgcagcggaaccgactactttgggtgtccgtgtttccttttattctcacattggctgcttatggtgacaattacagaattgttaccatatagctattggattggccatccggtgtgcaatagagctattatatacctatttgttggctttgtaccactaaccttaaaatctgtaatcactctcgagtatatattgacccttaatacaattaaac

SEQ ID NO: 19273 - DNA, 734 bp, synthetic construct
  source 1..734: mol_type = other DNA
gcctgtgggttgtacccactcacagggcccactgggcgcaagcactctggtaccctggtacctttgtgcgcctgttttatatcccccccccaatgaaacctagaagcagtaaaccacgatcaatagcaggcataacgctccagttatgtcttgatcaagcacttctgtttccccggactgagtatcaatagactgctcgcgcggttgaaggagaaaacgttcgttatccggctagctacttcggaaaacctagtaacaccatgaaagttgcggagagcttcgttcagcactcccccagtgtagatcaggtcgatgagtcaccgcattccccacgggcgaccgtggcggtggctgcgttggcggcctgcccatggggcaacccatggggcgctctaatacggacatggtgtgaagagtctactgagctagttagtagtcctccggcccctgaatgcggctaatcccaactgcggagcacacgcccacaaaccagcgggtagtgtgtcgtaacgggtaactctgcagcggaaccgactactttgggtgtccgtgtttccttttatctttatattggctgcttatggtgacaattaaagaattgttaccatatagctattggattggccatccggtgtgcaacagagcaattatttaccaatttattggttttgtaccattaaccttgaattctgtgaccacccttaattatatcttgacccttaacgcagctaaac

SEQ ID NO: 19274 - DNA, 734 bp, synthetic construct
  source 1..734: mol_type = other DNA
gcctgtgggttgtacccactcacagggcccactgggcgcaagcactctggtaccctggtacctttgtgcgcctgttttatatcccccccccaatgaaacctagaagcagtaaaccacgatcaatagcaggcataacgctccagttatgtcttgatcaagcacttctgtttccccggactgagtatcaatagactgctcacgcggttgaaggagaaaacgttcgttatccggctagctacttcggaaaacctagtaacaccatgaaagttgcggagagcttcgttcagcactcccccagtgtagatcaggtcgatgagtcaccgcattccccacgggcgaccgtggcggtggctgcgttggcggcctgcccatggggtaacccatggggcgctctaatacggacatggtgtgaagagtctactgagctagttagtagtcctccggcccctgaatgcggctaatcccaactgcggagcacacgcccacaaaccagcgggtagtgtgtcgtaacgggtaactctgcagcggaaccgactactttgggtgtccgtgtttccttttatctttatattggctgcttatggtgacaattaaagaattgttaccatatagctattggattggccatccggtgtgcaacagagcaattatttaccaatttattggttttgtaccattaaccttgaattctgtgaccacccttaattatatcttgacccttaacgcagctaaac

SEQ ID NO: 19275 - DNA, 734 bp, synthetic construct
  source 1..734: mol_type = other DNA
gcctgtgggttgtacccactcacagggcccactgggcgcaagcactctggtaccctggtacctttgtgcgcctgttttatatcccccccccaatgaaacctagaagcagtaaaccacgatcaatagcaggcataacgctccagttatgtcttgatcaagcacttctgtttccccggactgagtatcaatagactgctcgcgcggttgaaggagaaaacgttcgttatccggctagctacttcggaaaacctagtaacaccatgaaagttgcggagagcttcgttcagcactcccccagtgtagatcaggtcgatgagtcaccgcattccccacgggcgaccgtggcggtggctgcgttggcggcctgcccatggggtaacccatggggcgctctaatacggacatggtgtgaagagtctactgagctagttagtagtcctccggcccctgaatgcggctaatcccaactgcggagcacacgcccacaaaccagcgggtagtgtgtcgtaacgggtaactctgcagcggaaccgactactttgggtgtccgtgtttccttttatctttatattggctgcttatggtgacaattaaagaattgttaccatatagctattggattggccatccggtgtgcaacagagcaattatttaccaatttattggttttgtaccattaaccttgaattctgtgaccacccttaattatatcttgacccttaacgcagctaaac

SEQ ID NO: 19276 - DNA, 724 bp, synthetic construct
  source 1..724: mol_type = other DNA
cactcacaggacccacgcggtgctagcactctggttccacgggacctttgtgcgcctgttttatgtcccctcccccaatttgtaacttagaagcaatttgcaacactgatcagtagcaggcatagcgcaccagctatgtcttgatcaagcacttctgtttccccggaccgagtatcaatagactgtttacacggttgaaggagaaagcgtccgttatccggctaactacttcgagaaacccagtagcaccattgaaactacagagtgtttcgctccacacttcccccgtgtagatcaggtcgatgagtcactgcaatccccacgggcgaccgtggcagtggctgcgctggcggcctgcctatggggcaacccataggacgctctaatgtggacatggtgtgaagagtctattgagctagttagtagtcctccggcccctgaatgcggctaatcccaactgcggagcacatgccttcaacccagagggtagtgtgtcgtaatgggcaactctgcagcggaaccgactactttgggtgtccgtgtttccttttattctcacattggctgcttatggtgacaattacagaattgttaccatatagctattggattggccatccggtgtgcaatagagctattatatacctatttgttggctttgtaccactgaccttaaaatctttaaccactcttgagtgtatattaacccttaatacaattaaac

SEQ ID NO: 19277 - DNA, 724 bp, synthetic construct
  source 1..724: mol_type = other DNA
cactcacaggacccacgcggtgctagcactctggtcccacgggacctttgtgcgcctgttttatgtcccctcccccaatttgtaacttagaagcaatttgcaacactgatcagtagcaggcatagcgcaccagctatgtcttgatcaagcacttctgtttccccggaccgagtatcaatagactgttcacgcggttgaaggagaaagcgtccgttatccggctaactacttcgagaaacccagtagcaccattaaaactacagagtgtttcgctccacacttcccccgtgtagatcaggtcgatgagtcactgcaatccccacgggcgaccgtggcagtggctgcgctggcggcctgcctatggggcaacccataggacgctctaatgtggacatggtgtgaagagtctattgagctagttagtagtcctccggcccctgaatgcggctaatcctaactgcggagcacatgccttcaacccagagggtggtgtgtcgtaatgggcaactctgcagcggaaccgactactttgggtgtccgtgtttccttttattctcacattggctgcttatggtgacaattatagaattgttaccatatagctattggattggccatccggtgtgcaatagagctattatatacctatttgttggctttgtaccactgactttaaaatctttaaccactcttgagtgtatattaacccttaatacaatcaaac

SEQ ID NO: 19278 - DNA, 724 bp, synthetic construct
  source 1..724: mol_type = other DNA
gtacccactcacagggcccactgggcgtagcactctggtactgcggtacctttgtgcgcctgttttatccccctcccccaaaagtaacttagaagctttgaactaatgatcaatagtaggtgtggcaggccagccacatctcgatcaagcacttctgtctccccggactgagtatcaataggctgctcacgtggctgaaagagaaaacgttcgttacccggccaactacttcgagaagcttagtaccaccatgaacgaggcagagcgtttcgctcggcactaccccagtgtagatcaggctgatgagtcactgcaatccccatgggcgaccatggcagtggctgcgctggcggcctgcccatggagagatccatgggacgctctaattttgacatggtgcgaagagcctattgagctagttggtagtcctccggcccctgaatgcggctaatcctaactgcggagcacacacccacatgccagtgggcagtgtgtcgtaacgggcaactctgcagcggaaccgactactttgggtgtccgtgtttccttttattcttatgctggctgcttatggtgacaatcgaagagttgttaccatatagctattggattggccatccggtgtgcaacagagcgattgtttatcagtttattggctttgtaccactgacattaaagtctataattacccttaattttatcttgacccttaatacagtcaagc

SEQ ID NO: 19279 - DNA, 735 bp, synthetic construct
  source 1..735: mol_type = other DNA
ctgtgggttgttcccacccacagggcccactgggcgctagcacactgattctgcgggatctttgtgcgcctgttttataaccccttccctaagcagcaacttagaagcttcacactatcacgaccagtagtgggcgtggcgcgccagtcacgtcttggtcaagcacttctgtttccccggactgagtatcaatagactgctcacgcggttgaaggagaaaacgttcgttatccggctaactacttcgagaaacctagtagcaccgtgaaagttgcggagtgtttcgctcagcacttcccccgtgtagatcaggtcgatgagtcactgtaaaccccacgggcgaccgtgacagtggctgcgttggcggcctgcccatggggtaacccatgggacgctctaatacagacacggtgtgaagagtctattgagctagttagtagtcctccggcccctgaatgcggctaatcctaactgcggagcgcgcaccctcaacccagggggcggcgcgtcgtaatgggtaactctgcagcggaaccgactactttgggtgtccgtgtttccttttattccttattggctgcttatggtgacaattgaaaagttgttaccatatagctattggattggccatccggtgaccaacagagctattgtttacctgtttattggatacgtccctcttaatctcaaggccattcaaactcttgattatatattactccttaactgtaagaa

SEQ ID NO: 19280 - DNA, 732 bp, synthetic construct
  source 1..732: mol_type = other DNA
gggttgttcccacccacagggcccactgggcgctagcacactgattctgcgggatctttgtgcgcctgttttataaccctcccccctaagcagcaacttagaagctctgtacaatcacgaccagcagtgggcgtggcgcgccagccatgtcttggtcaagcacttctgtatccccggactgagtatcaatagactgcttacgtggtcgaaggagaaaacgttcgttacccggctaactacttcgagaaacccagtagcactatgaaagttgcggagtgtttcgctcagcacttcccccgtgtagatcaggccgatgagtcactgtaaaccccacgggcgaccgtgacagtggctgcgttggcggcctgcccatggggtaacccatgggacgctctaatacagacatggtgtgaagagtctattgagctagttagtagtcctccggcccctgaatgcggctaatcctaactgcggagcgcgcaccctcaacccagggggcggcgcgtcgtaatgggtaactctgcagcggaaccgactactttgggtgtccgtgtttccttttattccttattggctgcttatggtgacaattgagaagttgttaccatatagctattggattggccatccggtgtctaacagagccattgtttacctattcattggatacgtccctcttgatctcaaggccattcaaacccttgactatatattgctccttaactgcaagaa

SEQ ID NO: 19281 - DNA, 742 bp, synthetic construct
  source 1..742: mol_type = other DNA
ttaaaacagcctgtgggttgcacccactcacagggcccactgggcgcaagcactctggtacctcggtacctttgtgcgcctgttttataacccccccccagtgaaacttagaagcagcaaaccacgatcaatagcaggcataacgctccagttatgtcttgatcaagcacttctgtttccccggactgagtatcaatagactgctcgcgcggttgaaggagaaaacgttcgttatccggctaactacttcgggaaacccagtagcatcatgaaagttgcggagagcttcgttcagcactcccccagtgtagatcaggtcgatgagtcaccgcattccccacgggcgaccgtggcggtggctgcgttggcggcctgcccatggggtaacccatggggcgctctaatacggacatggtgcgaagagtctactgagctagttagtagtcctccggcccctgaatgcggctaatcccaactgcggagcacacgcccacaagccagcgggtagtgtgtcgtaacgggcaactctgcagcggaaccgactactttgggtgtccgtgtttccttttatctttatattggctgcttatggtgacaattgaagagttgttaccatatagctattggattggccatccggtgtgcaacagagcaattgtttacctatttattggttttgtaccattaaccttgaagtctgtgaccacccttagttatatcttgaccctcaacacagctaaac

SEQ ID NO: 19282 - DNA, 747 bp, synthetic construct
  source 1..747: mol_type = other DNA
ttaaaacagcctgtgggttgtacccactcacaggacccacgcggtgttagcactctggttccacggaacctttgtgcgcctgttttacgtcccctccccaatttgtaacttagaagcaatttacagcactgatcaatagcaggcatggcgcaccagctatgtcttgatcaagcacctctgtttccccggaccgagtatcaatagactgttcacacggtcgaaggagaaagcgttcgttatccggctaactacttcgagaaacccagtagcgccattgaaactgcagagtgtttcgctccacacttcccccgtgtagatcaggtcgatgagtcactgcaatccccacgggcgaccgtggcagtggctgcgttggcggcctgcctatggggtaacccataggacgctctaatgtggacatggtgcgaagagtctattgagctagttagtagtcctccggcccctgaatgcggctaatcctaactgcggagcacatgccttcaatccagagggtagtgtgtcgtaatgggcaactctgcagcggaaccgactactttgggtgtccgtgtttccttttattttcacattggctgcttatggtgacaattacagaattgttaccatatagctattggattggccatccggtgtgcaatagagctattatatacctatttgttggctttgtaccactaaccttaaaatctgtaatcactctcgagtatatattgacccttaatacaattaaac

SEQ ID NO: 19283 - DNA, 747 bp, synthetic construct
  source 1..747: mol_type = other DNA
ttaaaacagcctgtgggttgtacccactcacaggacccacgcggtgctagcactctggttccacggaacctttgtgcgcctgttttacgtcccctccccaatttgtaacttagaagcaatttacagcactgatcaatagcaggcatggcgcaccagctatgtcttgatcaagcacctctgtttccccggaccgagtatcaatagactgttcacacggtcgaaggagaaagcgttcgttatccggctaactacttcgaaaaacccagtagcgccattgaagctgcagagtgtttcgctccacacttcccccgtgtagatcaggtcgatgagtcactgcaatccccacgggcgaccgtggcagtggctgcgttggcggcctgcctatggggtaacccataggacgctctaatgtggacatggtgcgaagagtctattgagctagttagtagtcctccggcccctgaatgcggctaatcctaactgcggagcacatgccttcaatccagagggtagtgtgtcgtaatgggcaactctgcagcggaaccgactactttgggtgtccgtgtttccttttattctcacattggctgcttatggtgacaattacagaattgttaccatatagctattggattggccatccggtgtgcaatagagctattatatacctatttgttggctttataccactaaccttaaaatctgtaatcactctcgagtatatattgacccttaatacaattaaac

SEQ ID NO: 19284 - DNA, 726 bp, synthetic construct
  source 1..726: mol_type = other DNA
gcacccacccacagggcccactgggcgccagcactctgattccgcggaatctttgtgtgcctgttttatcacccttcccccaaactcgcaacttagaagcagcacttcactgaccaatagcaggcgtggcgcaccagccatgtctaggtcaagcacttctgtttccccggactgagtatcaataggctgctcacgcggctgaaggagaaaacgttcgtcatccggctaactacttcgagaaacctagtagcaccggtgaagctgcagagtgtttcgctcagcacttcccccgtgtagatcaggtcgatgagtcactgcactccccacgggcgaccgtggcagtggctgcgctggcggcctgcctatgggtcaacccataggacgctctaatgtggacacggtgcgaagagtctattgagctagttagtagtcctccggcccctgaatgcggctaatcctaactgcggagcacatgcccccgaaccagggggtggtgtgtcgtaacgggcaactctgcagcggaaccgactactttgggtgaccgtgtttccttttgttcttattatggctgcttatggtgacaattgaagaattgttaccatatagctattggattggccatccagtgtctaacagagctatcatatacctatttgttggattcgttccattgtcatacacatcactcaatacattacattttattgtgagattaaatacaagaaa

SEQ ID NO: 19285 - DNA, 723 bp, synthetic construct
  source 1..723: mol_type = other DNA
cactcacagggcccacgcggtgctagcactctggttccacgggacctttgtgcgcctgttttatgtcccctccccaatttgtaacttagaagcaatttgcaacactgatcagtagcaggcatagcgcaccagctatgtcttgatcaagcacttctgtttccccggaccgagtatcaatagactgttcacacggttgaaggagaaagcgtccgttatccggctaactacttcgagaaacccagtagcatcattgaaactacagagtgtttcgctccacacttcccccgtgtagatcaggtcgatgagtcactgcaatccccacgggcgaccgtggcagtggctgcgctggcggcctgcctatggggcaacccataggacgctctaatgtggacatggtgtgaagagtctattgagctagttagtagtcctccggcccctgaatgcggctaatcctaactgcggagcacatgccttcaacccagagggtggtgtgtcgtaatgggcaactctgcagcggaaccgactactttgggtgtccgtgtttccttttattctcacattggctgcttatggtgacaatcacagaattgttaccatatagctattggattggccatccggtgtgcaatagagctattatatacctatttgttggctttgtaccactaaccttaaaatctttaaccactcttgagtgtatattaacccttaatacaatcaagc

SEQ ID NO: 19286 - DNA, 723 bp, synthetic construct
  source 1..723: mol_type = other DNA
cactcacaggacccacgcggtgctagcactctggttccacgggacctttgtgcgcctgttttatgtcccctccccaatttgtaacttagaagcaatttgcaacactgatcagtagcaggcatagcgcaccagctatgtctcgatcaagcacttctgtttccccggaccgagtatcaatagactgttcacacggttgaaggagaaagcgtccgttatccggctaactacttcgagaaacccagtagcaccattgaaactacagagtgtttcgctccacacttcccccgtgtagatcaggtcgatgagtcactgcaatccccacgggcgaccgtggcagtggctgcgctggcggcctgcctatggggcaacccataggacgctctaatgtggacatggtgtgaagagtctattgagctagttagtagtcctccggcccctgaatgcggctaatcctaactgcggagcacatgccttcaatccagagggtagtgtgtcgtaatgggcaactctgcagcggaaccgactactttgggtgtccgtgtttccttttattctcacattggctgcttatggtgacaattactgaattgttaccatatagctattggattggccatccggtgtgcaatagagctattatatacctatttgttggttttgtaccactaaccttaaaatctataaccactctcgagtgtatattaacccttaatacaatcaaac

SEQ ID NO: 19287 - DNA, 723 bp, synthetic construct
  source 1..723: mol_type = other DNA
cactcacaggacccacgcggtgctagcactctggttccacgggacctttgtgcgcctgttttatgtcccctccccaatttgtaacttagaagcaatttgcaacactgatcagtagcaggcatagcgcaccagctatgtctcgatcaagcacttctgtttccccggaccgagtatcaatagactgttcacacggttgaaggagaaagcgtccgttatccggctaactacttcgagaaacccagtagcaccattgaaactacagagtgtttcgctccacacttcccccgtgtagatcaggtcgatgagtcactgcaatccccacgggcgaccgtggcagtggctgcgctggcggcctgcctatggggcaacccataggacgctctaatgtggacatggtgtgaagagtctattgagctagttagtagtcctccggcccctgaatgcggctaatcctaactgcggagcacatgccttcaatccagagggcagtgtgtcgtaatgggcaactctgcagcggaaccgactactttgggtgtccgtgtttccttttattctcacatcggctgcttatggtgacaattactgaattgttaccatatagctattggattggccatccggtgtgcaatagagctattatatacctatttgttggttttgtaccactaaccttaaaatctataaccactctcgagtgtatattaacccttaatacaatcaaac

SEQ ID NO: 19288 - DNA, 723 bp, synthetic construct
  source 1..723: mol_type = other DNA
cactcacaggacccacgcggtgctagcactctggttccacgggacctttgtgcgcctgttttatcttccctccccaatttgtaacttagaagcaatttgcaacactgatcagtagcaggcatagcgcaccagctatgtcttgatcaagcacttctgtttccccggaccgagtatcaatagactgttcacatggttgaaggagaaagcgtccgttatccggctaactacttcgagaaacccagtagcaccattgaaactacagagtgtttcgctccacacttcccccgtgtagatcaggtcgatgagtcactgcaatccccacgggcgaccgtggcagtggctgcgctggcggcctgcctatggggcaacccataggacgctttgatgtggacatggtgtgaagagtctattgagctagttagtagtcctccggcccctgaatgcggctaatcctaactgcggagcacatgccttcaacccagagggtagtgtgtcgtaatgggcaactctgcagcggaaccgactactttgggtgtccgtgtttccttttattttcacattggctgcttatggtgacaattacagaattgttaccatatagctattggattggccatccggtgtgcaatagagctattatatacctatttgttggctttgtaccactgaccttaaaatctttaaccactcttgagcgtatattaatccttaatacagtcaaac

SEQ ID NO: 19289 - DNA, 735 bp, synthetic construct
  source 1..735: mol_type = other DNA
ctgtgggttgttcccacccacagggcccattgggcgctagcacactggttttgcggaatctttgtgcgcctgttttataacccttcccctaagcagcaacttagaagtattgcacaatcacggccagtagtgggcgtggcgcgccagccacgtcttggtcaagcacttctgtatccccggactgagtatcaatagactgctcacgcggttgaaggagaaaacgttcgttacccggctaactacttcggaaaacctagtagcaccttgaaagttgcagagtgtttcgctcagcacttcccccgtgtagatcaggtcgatgagccactgtaaaccccacgggcgaccgtgacagtggctgcgttggcggcctgcccatggggtaacccatgggacgctctaatacagacatggtgtgaagagtctactgagctagttagtagtcctccggcccctgaatgcggctaatcctaactgcggagcacacaccctcaacccagggggcggtgtgtcgtaatgggtaactctgcagcggaaccgactactttgggtgtccgtgtttccttttattccttactggctgcttatggtgacaattgaaaagttgttgccatatagctattggattggccatccggtgtctaacagagctattgtttacttatttattggatacgtccctcttaatcttaaggctactcaaactcttaattatatattgctccttaactataagaa

SEQ ID NO: 19290 - DNA, 735 bp, synthetic construct
  source 1..735: mol_type = other DNA
ctgtgggttgttcccacccacagggcccactgggcgccagcacactgattctgcgggatctttgtgcgcctgttttataaccccttccctaagcagcaacttagaagcttcacactatcacgaccagtagtgggcgtggcgcgccagtcacgtcttggtcaagtacttctgtttccccggactgagtatcaatagactgctcacgcggttgaaggagaaaacgttcgttacccggctaactacttcgagaaacctagtagcaccgtgaaagttgcggagtgtttcgctcagcacttcccccgtgtagatcaggtcgatgagtcactgtaaaccccacgggcgaccgtgacagtggctgcgttggcggcctgcccatgggttaacccatgggacgctctaatacagacacggtgtgaagagtctattgagctagttagtagtcctccggcccctgaatgcggctaatcctaactgcggagcgcgcaccctcaacccagggggcagcgtgtcgtaatgggcaactctgcagcggaaccgactactttgggtgtccgtgtttccttttattccttattggctgcttatggtgacaattgaaaagttgttaccatatagctattggattggccatccggtgactaacagagctattatttacctgtttattggatacatccctctcactctcaaggccattcaaactcttgattatatattactccttaactgtaagaa

SEQ ID NO: 19291 - DNA, 735 bp, synthetic construct
  source 1..735: mol_type = other DNA
ctgtgggttgttcccactcacagggcccattgggcgctagcacactggttttgcggaatctttgtgcgcctgttttataacccttcccctaagcagcaacttagaagtattgcacaatcacggccagtagtgggcgtggcgcgccagccacgtcttggtcaagcacttctgtatccccggactaagtatcaatagactgctcacgcggttgaaggagaaaacgttcgttacccggctaactacttcggaaaacctagtagcaccttgaaagttgcagagtgtttcgctcagcacttcccccgtgtagatcaggtcgatgagccactgtaaaccccacgggcgaccgtgacagtggctgcgttggcggcctgcccatggggtaacccatgggacgctctaatacagacatggtgtgaagagtctactgagctagttagtagtcctccggcccctgaatgcggctaatcctaactgcggagcacacaccctcaacccagggggcggtgtgtcgtaatgggtaactctgcagcggaaccgactactttgggtgtccgtgtttccttttattccttactggctgcttatggtgacaattgaaaagttgttaccatatagctattggattggccatccggtgtctaacagagctattgtttacttatttattggatacgtccctcttaatcttaaggctattcaaactcttaattatatattgctccttaactataagaa

SEQ ID NO: 19292 - DNA, 730 bp, synthetic construct
  source 1..730: mol_type = other DNA
gtgggttgcacccacccacagggcccactgggcgccagcactctggtactgcggtacctttgtgcgcctgttttattaccccaccccacccggaacgtagaagcaatacacaactgaccaatagtgggtgtggcgcaccagccacatcatggtcaagcactcctgtttccccgggtttagtatcaataagctgctcacgcggctgaaggagaaaacacccgttacccggccaactacttcgagaaacttagtaccgctatgaacgttgcaaggcgtttcgctcagcacttcccccgtgtagatcaggccgatgagtcaccgcattcctcacgggcgaccgtggcggtggctgcgctggcggcctgcctatgggcttgcccataggacgccttaatgctgacatggtgcgaagagtctattgagctagttggtagtcctccggcccctgaatgcggctaatcctaactgcggagcacatactcacaaaccagtgagcagtgtgtcgtaacgggcaactctgcagcggaaccgactactttgggtgtccgtgtttccttttattcctatactggctgcttatggtgacaattaaagaattgttaccatatagctattggattggccatccggtgtctaacagagctattatatacttgtttgttggattcatctcgttatcacacaaatccctcaacactttgtgctttatcttgaatttgaactcaaaaag

SEQ ID NO: 19293 - DNA, 742 bp, synthetic construct
  source 1..742: mol_type = other DNA
ttaaaacagcctgtgggttgcacccactcacagggcccactgggcgcaagcactctggtacctcggtacctttgtgcgcctgttttataacccccccccagtgaaacttagaagcagcaaaccacgatcaatagcaggcataacgctccagttatgtcttgatcaagcacttctgtttccccggactgagtatcaatagactgctcgcgcggttgaaggagaaaacgttcgttatccggctaactacttcgggaaacctagtagcatcatgaaagttgcggagagcttcgttcagcactcccccagtgtagatcaggtcgatgagtcaccgcattccccacgggcgaccgtggcggtggctgcgttggcggcctgcccatggggtaacccatggggcgctctaatacggacatggtgcgaagagtctactgagctagttagtagtcctccggcccctgaatgcggctaatcccaactgcggagcacacgcccacaagccagcgggtagtgtgtcgtaacgggcaactctgcagcggaaccgactactttgggtgtccgtgtttctttttatctttatattggctgcttatggtgacaattaaagagttgttaccatatagctattggattggccatccggtgtgcaacagagcaattgtttacctatttattggttttgtaccattaaccttgaaatctgtgaccacccttaattatatcttgaccctcaacacagctaaac

SEQ ID NO: 19294 - DNA, 742 bp, synthetic construct
  source 1..742: mol_type = other DNA
ttaaaacagcctgtgggttgcacccactcacagggcccactgggcgcaagcactctggtacctcggtacctttgtgcgcctgttttataaccccccctcagtgaaacttagaagcagcaaaccacgatcaatagcaggcataacgctccagttatgtcttgatcaagcacttctgtttccccggactgagtatcaatagactgctcgcgcggttgaaggagaaaacgttcgttatccggctaactacttcgggaaacccagtagcatcatgaaagttgcggagagcttcgttcagcactcccccagtgtagatcaggtcgatgagtcaccgcattccccacgggcgaccgtggcggtggctgcgttggcggcctgcccatggggtaacccatggggcgctctaatacggacatggtgcgaagagtctactgagctagttagtagtcctccggcccctgaatgcggctaatcccaactgcggagcacacgcccacaagccagcgggtagtgtgtcgtaacgggcaactctgcagcggaaccgactactttgggtgtccgtgtttccttttatctttatattggctgcttatggtgacaattgaagagttgttaccatatagctattggattggccatccggtgtgcaacagagcaattgtttacctatttattggttttgtaccattaaccttgaagtctgtgaccacccttagttatatcttgaccctcaacacagctaaac

SEQ ID NO: 19295 - DNA, 742 bp, synthetic construct
  source 1..742: mol_type = other DNA
ttaaaacagcctgtgggttgcacccactcacagggcccactgggcgcaagcactctggtacctcggtacctttgtgcgcctgttttataaccctcccccagtgaaacttagaagcagcaaaccacgatcaatagcaggcataacgctccagttatgtcttgatcaagcacttctgtttccccggactgagtatcaatagactgctcgcgcggttgaaggagaaaacgttcgttatccggctaactacttcgggaaacctagtagcatcatgaaagttgcggagagcttcgttcagcactcccccagtgtagatcaggtcgatgagtcaccgcattccccacgggcgactgtggcggtggctgcgttggcggcctgcccatggggtaacccatggggcgctctaatacggacatggtgcgaagagtctactgagctagttagtagtcctccggcccctgaatgcggctaatcccaactgcggagcacacgcccacaagccagcgggtagtgtgtcgtaacgggcaactctgcagcggaaccgactactttgggtgtccgtgtttccttttatctttatattggctgcttatggtgacaattgaagagttgttaccatatagctattggattggccatccggtgtgcaacagagcaattgtttacctatttattggtttcgtaccattaaccttgaagtctgtgaccacccttaattatatcttgaccctcaacacagctaaac

SEQ ID NO: 19296 - DNA, 742 bp, synthetic construct
  source 1..742: mol_type = other DNA
ttaaaacagcctgtgggttgcacccactcacagggcccactgggcgtaagcactctggtacctcggtacctttgtgcgcctgttttataacccccccccagtgaaacttagaagcagcaaaccacgatcaatagcaggcataacgctccagttatgtcttgatcaagcacttctgtttccccggactgagtatcaatagactgctcgcgcggttgaaggagaaaacgttcgttatccggctaactacttcgggaaacctagtagcatcatgaaagttgcggagagcttcgttcagcactcccccagtgtagatcaggtcgatgagccaccgcattccccacgggcgactgtggcggtggctgcgttggcggcctgcccatggggtaacccatggggcgctctaatacggacatggtgcgaagagtctactgagctagttagtagtcctccggcccctgaatgcggctaatcccaactgcggagcacacgcccacaagccagcgggtagtgtgtcgtaacgggcaactctgcagcggaaccgactactttgggtgtccgtgtttccttttatctttatattggctgcttatggtgacaattgaagagttgttaccatatagctattggattggccatccggtgtgcaacagagcaattgtctacctatttattggttttgtaccattaaccttgaagtctgtgaccacccttaattatatcttgaccctcaacacagctaaac

SEQ ID NO: 19297 - DNA, 742 bp, synthetic construct
  source 1..742: mol_type = other DNA
ttaaaacagcctgtgggttgcacccactcacagggcccactgggcgcaagcactctggtacctcggtacctttgtgcgcctgttttataacccccccccagtgaaacttagaagcagcaaaccacgatcaatagcaggcgtaacgctccagttatgtcttgatcaagcacttctgtttccccggactgagtatcaatagactgctcgcgcggttgaaggagaaaacgttcgttatccggctaactacttcgggaaacctagtagcatcatgaaagttgcggagagcttcgttcagcactcccccagtgtagatcaggtcgatgagtcaccgcattccccacgggcgaccgtggcggtggctgcgttggcggcctgcccatggggtaacccatggggcgctctaatacagacatggtgcgaagagtctactgagctagttagtagtcctccggcccctgaatgcggctaatcccaactgcggagcacacgcccacaagccagcgggtagtgtgtcgtaacgggcaactctgcagcggaaccgactactttgggtgtccgtgtttccttttatctttatattggctgcttatggtgacaattgaagagttgttaccatatagctattggattggccatccggtgtgtaacagagcaattgtttacctatttattggttttgtaccattaaccttgaagtctgtgaccacccttaattatatcttgaccctcaacacagctaaac

SEQ ID NO: 19298 - DNA, 724 bp, synthetic construct
  source 1..724: mol_type = other DNA
cactcacaggacccacgcggtgctagcactctggttccacgggacctttgtgcgcctgttttatgtcccctcccccaatttgtaacttagaagcaatttgcaacactgatcagtagcaggcatagcgcaccagctatgtcttgatcaagcacttctgtttccccggaccgagtatcaatagactgttcacacggttgaaggagaaagcgtccgttatccggctaactacttcgagaaacccagtagcaccattgaaactacagagtgtttcgctccacacttcccccgtgtagatcaggtcgatgagtcactgcaatccccacgggcgaccgtggcagtggctgcgctggcggcctgcctatggggcaacccataggacgctctaatgtggacatggtgtgaagagtctattgagctagttagtagtcctccggcccctgaatgcggctaatcccaactgcggagcacatgccttcaacccagagggtagtgtgtcgtaatgggcaactctgcagcggaaccgactactttgggtgtccgtgtttccttttattctcacattggctgcttatggtgacaattacagaattgttaccatatagctattggattggccatccggtgtgcaatagagctattatatacctatttgttggctttgtaccactgaccttaaaatctttaaccactcttgagtgtatattaacccttaatacaatcaaac

SEQ ID NO: 19299 - DNA, 734 bp, synthetic construct
  source 1..734: mol_type = other DNA
tgtgggttgttcccacccacagggcccactgggcgttagcacactgattctgcgggatctttgtgcgcctgttttataaccccttccctaagcagtaacttagaagcttcacacaatcacgaccagtagtgggcgtggcgcgccagtcacgtcttggtcaagcacttctgtttccccggactgagtatcaatagactgctcacgcggttgaaggagaaaacgttcgttatccggctaactacttcgagaaacctagtagcaccgtgaaagttgcggagtgtttcgctcagcacttcccccgtgtagatcaggtcgatgagtcactgtaaaccccacgggcgaccgtgacagtggctgcgttggcggcctgcccatggggtaacccatgggacgctctaatacagacatggtgtgaagagtctattgagctagttagtagtcctccggcccctgaatgcggctaatcctaactgcggagcacgcaccctcaacccagggggcggcgtgtcgtaatgggtaactctgcagcggaaccgactactttgggtgtccgtgtttccttttattccttattggctgcttatggtgacaattgaaaagttgttaccatatagctattggattggccatccggtgtccaacagagctattgtttacctatttattggatacgtccctcttaatctcaaggctattcaaactcttgattatatattgctccttaactgtaagaa

SEQ ID NO: 19300 - DNA, 741 bp, synthetic construct
  source 1..741: mol_type = other DNA
ttaaaacagcctgtgggttgcacccactcacagggcccactgggcgcaagcactctggtacctcggtacctttgtgcgcctgttttataaccccccccagtgaaacttagaagcagcaaaccacgatcaatagcaggcataacactccagttatgtcttgatcaagcacttctgtttccccggactgagtatcaatagactgctcgcgcggttgaaggagaaaacgttcgttatccggctaactacttcgggaaacctagtagcatcatgaaagttgcggagagcttcgttcagcactcccccggtgtagatcaggtcgatgagtcaccgcattccccacgggcgaccgtggcggtggctgcgttggcggcctgcccatggggtaacccatggggcgctctaatacggacatggtgcgaagagtctactgagctagttagtagtcctccggcccctgaatgcggctaatcccaactgcggagcacacgcccacaagccagcgggtagtgtgtcgtaacgggcaactctgcagcggaaccgactactttgggtgtccgtgtttccttttatctttatattggctgcttatggtgacaattgaagagttgttaccatatagctattggattggccatccggtgtgcaacagagcaattgtttacctatttattggttttgtaccattaaccttgaagtctgtgaccacccttaattatatcttgaccctcaacacagctaaac

SEQ ID NO: 19301 - DNA, 741 bp, synthetic construct
  source 1..741: mol_type = other DNA
ttaaaacagcctgtgggttgcacccactcacagggcccactgggcgcaagcactctggtacctcggtacctttgtgcgcctgttttataaccccccccagtgaaacttagaagcagcaaaccacgatcaatagcaggcgtaacgctccagttatgtcttgatcaagcacttctgtttccccggactgagtatcaatagactgctcgcgcggttgaaggagaaaacgttcgttatccggctaactacttcgggaaacctagtagcatcatgaaagttgcggagagcttcgttcagcactcccccagtgtagatcaggtcgatgagtcaccgcattccccacgggcgaccgtggcggtggctgcgttggcggcctgcccatggggtaacccatggggcgctctaatacagacatggtgcgaagagtctactgagctagttagtagtcctccggcccctgaatgcggctaatcccaactgcggagcacacgcccacaagccagcgggtagtgtgtcgtaacgggcaactctgcagcggaaccgactactttgggtgtccgtgtttccttttatctttatattggctgcttatggtgacaattgaagagttgttaccatatagctattggattggccatccggtgtgtaacagagcaattgtttacctatttattggttttgtaccattaaccttgaagtctgtgaccacccttaattatatcttgaccctcaacacagctaaac

SEQ ID NO: 19302 - DNA, 723 bp, synthetic construct
  source 1..723: mol_type = other DNA
cactcacaggacccacgcggtgctagcactctggttccacgggacctttgtgcgcctgttttatgccccctccccaatttgtaacttagaagcaatttgcaacactgatcagtagcaggcatagcgcaccagctatgtcttgatcaagcacttctgtttccccggaccgagtatcaatagactgttcacacggttgaaggagaaagcgtccgttatccggctaactacttcgagaaacccagtagcaccattgaaactacagagtgtttcgctccacacttcccccgtgtagatcaggtcgatgagtcactgcaatccccacgggcgaccgtggcagtggctgcgctggcggcctgcctatggggcaacccataggacgctttgatgtggacatggtgtgaagagtctattgagctagttagtagtcctccggcccctgaatgcggctaatcctaactgcggagcacatgccttcaacccagagggtagtgtgtcgtaatgggcaactctgcagcggaaccgactactttgggtgtccgtgtttccttttattctcacattggctgcttatggtgacaattacagaattgttaccatatagctattggactggccatccggtgtgcaatagagctattatatacctatttgttggctttgtaccactgaccttaaaatctttaaccactcttgagtgtatattaacccttaatacaatcaaac

SEQ ID NO: 19303 - DNA, 723 bp, synthetic construct
  source 1..723: mol_type = other DNA
cactcacaggacccacgcggtgctagcactctggttccacgggacctttgtgcgcctgttttatgtcccctccccaatttgtaacttagaagcaatttgcaacactgatcagtagcaggcatagcgcaccagctatgtcttgatcaagcacttctgtttccccggaccgagtatcaatagactgttcacatggttgaaggagaaagcgtccgttatccggctaactacttcgagaaacccagtagcaccattgaaactacagagtgtttcgctccacacttcccccgtgtagatcaggtcgatgagtcactgcaatccccacgggcgaccgtggcagtggctgcgctggcggcctgcctatggggcaacccataggacgctttgatgtggacatggtgtgaagagtctattgagctagttagtagtcctccggcccctgaatgcggctaatcctaactgcggagcacatgccttcaacccagagggtagtgtgtcgtaatgggcaactctgcagcggaaccgactactttgggtgtccgtgtttccttttattttcacattggctgcttatggtgacaattacagaattgttaccatatagctattggattggccatccggtgtgcaatagagctattatatacctatttgttggctttgtaccactgaccttgaaatctttaaccactcttgagtgtatattaatccttaatacaatcaaac

SEQ ID NO: 19304 - DNA, 723 bp, synthetic construct
  source 1..723: mol_type = other DNA
cactcacagggcccacgcggtgctagcactctggttctacggaacctttgtgcgcctgttttgcgtcccctccccaatttgtaacctagaagcaatttacaacactgatcaatagcaggcatggcgcaccagctatgtcttgatcaagcacctctgtttccccggaccgagtatcaatagactgttcacacggtcgaaggagaaagcgttcgttatccggctaactacttcgagaaacccagtagcgccattgaaactgcagagtgtttcgctccacacttcccccgtgtagatcaggtcgatgagtcactgcaatccccacgggcgaccgtggcagtggctgcgttggcggcctgcctatggggtaacccataggacgctctaatgtggacatggtgcgaagagtctattgagctagttagtagtcctccggcccctgaatgcggctaatcctaactgcggagcacatgccttcaatccagagggtagtgtgtcgtaatgggcaactctgcagcggaaccgactactttgggtgtccgtgtttccatttattctcacattggctgcttatggtgacaattatagaattgttaccatatagctattggattggccatccggtgtgcaatagagctattatatacctatttgttggctttgtaccactaacctcaaaatctgtgatcactctcaagtatatattgacccttaatacaattaagc

SEQ ID NO: 19305 - DNA, 723 bp, synthetic construct
  source 1..723: mol_type = other DNA
cactcacaggacccacgcggtgctagcactctggttccacgggacctttgtgcgcctgttttatgtcccttccccaatttgtaacttagaagcaatttacaacactgatcagtagcaggcatagcgcaccagctatgtcttgatcaagcacttctgtttccccggaccgagtatcaatagactgttcacacggttgaaggagaaagcgtccgttatccggctaactacttcgagaaacccagtagcaccattgaaactacagagtgtttcgctccacacttcccccgtgtagatcaggtcgatgagtcactgcaacccccacgggcgaccgtggcagtggctgcgctggcggcctgcctatggggcaacccataggacgctctaatgtggacatggtgtgaagagtctattgagctagttagtagtcctccggcccctgaatgcggctaatcctaactgcggagcacatgccttcaatccagagggtagtgtgtcgtaatgggcaactctgcagcggaaccgactactttgggtgtccgtgtttccttttattcttacattggctgcttatggtgacaattacagaattgttaccatatagctattggattggccatccggtgtgcaatagagctattatatacctatttgttggctttgtaccactgaacttaaaatctttaaccactcttgagtgtatattaacccttaatacaatcaaac

SEQ ID NO: 19306 - DNA, 737 bp, synthetic construct
  source 1..737: mol_type = other DNA
ccgatctgttgtacccacccacagggcccactgggcgctagcactccgattctgcggaatctttgtgcgcctgttttatgaccctcccccgaaacttgtaacttagaagctatgtacattaccgatcaacagcaggcgtggcgcaccagccatgtcttgatcaagtacttctgtacccccggactgagtatcaatagactgctcacgcggttgaaggagaaaacgttcgttacccggctaactacttcgagaaacctagtaacaccattgaaactgcggagtgtttcgctcagcatttcccccatgtagatcaggtcgatgagtcactgcttaccccacgggcgaccgtggcagtggctgcgttggcggcctgcctatggggcaacccataggacgctctaaagtggacatggtgcgaagagtctattgagctagttagtagtcctccggcccctgaatgcggctaatcctaactgcggagcgcatgtcctcaaaccagagggtggtgcgtcgtaatgggtaactctgcagcggaaccgactactttgggtgtccgtgtttcttttattcttataatggctgcttatggtgacaatcgaggaattgttaccatatagctattggattggccatccggtgtgcaacagagctattatctacttgtttgtcggatacattcccttaacacctaaatccttcaacacattgcactatattctaacattgaacgcgagaaa

SEQ ID NO: 19307 - DNA, 738 bp, synthetic construct
  source 1..738: mol_type = other DNA
ctgtgggttgcacccactcacaggacccacgcggtgctagcactctggttccacgggacctttgtgcgcctgttttatgtcccctcccccaatttgtaacttagaagcaatttgcaacactgatcagtagcaggcatagcgcaccagctatgtcttgatcaagcacttctgtttccccggaccgagtatcaatagactgttcacacggttgaaggagaaagcgtccgttatccggctaactacttcgagaaacccagtagcaccattgaaactacagagtgtttcgctccacacttcccccgtgtagatcaggtcgatgagtcactgcaatccccacgggcgaccgtggcagtggctgcgctggcggcctgcctatggggcaacccataggacgctctaatgtggacatggtgtgaagagtctattgagctagttagtagtcctccggcccctgaatgcggctaatcccaactgcggagcacatgccttcaacccagagggtagtgtgtcgtaatgggcaactctgcagcggaaccgactactttgggtgtccgtgtttccttttattctcacattggctgcttatggtgacaattacagaattgttaccatatagctattggattggccatccggtgtgcaatagagctattatatacctatttgttggctttgtaccactgaccttaaaatctttaaccactcttgagtgtatattaacccttaatacaatcaaac

SEQ ID NO: 19308 - DNA, 720 bp, synthetic construct
  source 1..720: mol_type = other DNA
acccacagggcctactgggcgctagcactctggtactaaggtacctttgtgcgcctgtttttattccctccccctaaagtaacctagaagttgtgcaccaacgatcaatagtaggtgtgacacaccagtcatatctcgatcaagtacttctgttttccccggaccgagtatcaataggctgctcgcgcggctgaaggagaaaacgttcgttacccggccaactacttcgagaagcttagtaccaccatgaacgatgcagagtgtttcgttcagcacaaccccagtgtagatcaggctgatgagtcactgcaacccccatgggcgaccatggcagtggctgcgttggcggcctgcccatggagaaatccatgggacgctctaattctgacatggtgtgaagagcctattgagctagctggtagtcctccggcccctgaatgcggctaatcctaactgcggagcacatgctcacaaaccagtgggtggtgtgtcgtaatgggcaactctgcagcggaaccgactactttgggtgtccgtgtttccttttattcttatgttggctgcttatggtgacaatcaaagaattgttaccatatagctattggattggccatccggtgtgcaacagagcaattgtgtacctatttgttggttttgtaccattatcactgaagtctgtaaccactctcaaatttattttgaccctcaactcaatcaaac

SEQ ID NO: 19309 - DNA, 721 bp, synthetic construct
  source 1..721: mol_type = other DNA
ccacccgcagggcccactgggcgctagcacactgattctacggaaactttgtgcgcctgttttatatccctccccaaacgagtaacttagaagtttaacatattcatgaccaatagcaggcgtgacacaccagtcacgtcttggtcaagtacttctgtctccccggactgagtatcaataagctgctcacgcggctgaaagagaaaacgttcgttacccggctaactacttcgagaaacctagtaacaccatgaacgttgcagagtgtttcgctcagcacttcccccgtgtagatcaggtcgatgagtcactgcaaaccccacgggtaaccgtggcagtggctgcgttggcggcctgcccatggggtaacccatgggacgctctaatacagacatggtgcgaagagtctattgagctagttagtagtcctccggcccctgaatgcggctaatcctaactgcggagcacacaccttcaatccagggggcagtgtgtcgtaacgggtaactccgcagcggaaccgactactttgggtgtccgtgtttccttttatcttattatggctgcttatggtgacaattgaggaattgttaccatatagctattggattggccatccggtgtctaacagagcaattgtatacctatttgttggacttgtccctctgtcacacacatctctcaataccttatactacattataaagttaaatataaggag

SEQ ID NO: 19310 - DNA, 721 bp, synthetic construct
  source 1..721: mol_type = other DNA
ccacccacagggcccactgggcgctagcacactgattctacggaaactttgtgcgcctgttttatatccctccccaaacgagtaacttagaagtttaacatattcatgaccaatagcaggcgtgacacaccagtcacgtcttggtcaagtacttctgtctccccggactgagtatcaataagctgctcacgcggctgaaagagaaaacgttcgttacccggctaactacttcgagaaacctagtaacaccatgaacgttgcagagtgtttcgatcagcacttcccccgtgtagatcaggtcgatgagtcactgcaaaccccacgggtaaccgtggcagtggctgcgttggcggcctgcccatggggtaacccatgggacgctctaatacagacatggtgcgaagagtctattgagctagttagtagtcctccggcccctgaatgcggctaatcctaactgcggagcacacaccttcaatccagggggcagtgtgtcgtaacgggcaactccgcagcggaaccgactactttgggtgtccgtgtttccttttatcttattatggctgcttatggtgacaattgaggaattgttaccatatagctattggattggccatccggtgtctaacagagcaattgtatacctatttgttggatttgtccctctgtcacacacatctctcaataccttatactacattataaagttaaatataaggag

SEQ ID NO: 19311 - DNA, 721 bp, synthetic construct
  source 1..721: mol_type = other DNA
ccactcacagggcccactgggcgctagcacactgattctacggaagctttgtgcgcctgttttatatccctccccaaacgagtaacttagaagtttaacacattcatgaccaatagcaggcgtgacacaccagtcacgtcttggtcaagtacttctgtctccccggactgagtatcaataagctgcttacgcggctgaaagagaaaacgttcgttacccggctaactacttcgagaaacctagtaacaccatgaacgttgcagagtgtttcgctcagcacttcccccgtgtagatcaggtcgatgagtcactgcaaaccccacgggtaaccgtggcagtggctgcgttggcggcctgcccatggggtaacccatgggacgctctaatacagacatggtgcgaagagtctattgagctagttagtagtcctccggcccctgaatgcggctaatcctaactgcggagcacacaccttcaatccagggggcagtgtgtcgtaacgggcaactccgcagcggaaccgactactttgggtgtccgtgtttctttttatcttattatggctgcttatggtgacaattgaggaattgttaccatatagctattggattggccatccggtgtctaacagagcaattgtatacctatttgttggatttgtccctctgtcacacatatctctcaataccttatactacattataaagttaaatataagaag

SEQ ID NO: 19312 - DNA, 747 bp, synthetic construct
  source 1..747: mol_type = other DNA
ttaaaacagcctgtgggttgtacccactcacaggacccacgcggtgctagcactctggttccacggaacccttgtgcgcctgttttacgtcccctccccaatttgtaacttagaagcaatttacagtactgatcaatagcaggcatggcgcaccagctatgtcttgatcaagcacctctgtttccccggaccgagtatcaatagactgttcacacggtcgaaggagaaagcgttcgttatccggctaactacttcgagaaacccagtagcgccagtgaaactgcagagtgtttcgctccacacttcccccgtgtagatcaggtcgatgagtcactgcaatccccacgggcgaccgtggcagtggctgcgttggcggcctgcctatggggtaacccataggacgctctaatgtggacatggtgcgaagagtctattgagctagttagtagtcctccggcccctgaatgcggctaatcctaactgcggagcacatgccttcaatccagagggtagtgtgtcgtaatgggcaactctgcagcggaaccgactactttgggtgtccgtgtttccttttattctcacattggctgcttatggtgacaattacagaattgttaccatatagctattggattggccatccggtgtgcaatagagctattatatacctatttgttggctttgtaccactaaccttaaaatctgtaatcactctcgagtatatattgacccttaatacaattaaac

SEQ ID NO: 19313 - DNA, 747 bp, synthetic construct
  source 1..747: mol_type = other DNA
ttaaaacagcctgtgggttgtacccactcacaggacccacgcggtgctagcactctggttccacggaacctttgtgcgcctgttttacgtcccttccccaatttgtaacttagaagcaatttacagcactgatcaatagcaggcatggcacaccagctatgtcttgatcaagcacctctgtttccccggaccgagtatcaatagactgttcacacggtcgaaggagaaagcgttcgttatccggctaactacttcgagaaacccagtagcgccactgaaactgcagagtgtttcgctccacacttcccccgtgtagatcaggtcgatgagtcactgcaatccccacgggcgaccgtggcagtggctgcgttggcggcctgcctatggggtaacccataggacgctctaatgtggacatggtgcgaagagtctattgagctagttagtagtcctccggcccctgaatgcggctaatcctaactgcggagcacatgccttcaatccagagggtagtgtgtcgtaatgggcaactctgcagcggaaccgactactttgggtgtccgtgtttccttttattctcacattggctgcttatggtgacaattacagaattgttaccatatagctattggattggccatccggtgtgcaatagagctattatatatctatttgttggctttgtaccactaaccttaagatctgtaatcactctcgagtatatattgacccttaatacaattaaac

SEQ ID NO: 19314 - DNA, 724 bp, synthetic construct
  source 1..724: mol_type = other DNA
cactcacaggacccacgcggtgctagcactctggttccacgggacctttgtgcgcctgttttatgtcccctcccccaatttgtaacttagaagcaatttgcaacactgatcagtagcaggcatagcgcaccagctatgtcttgatcaagcacttctgtttccccggaccgagtatcaatagactgttcacacggttgaaggagaaagcgtccgttatccggctaactacttcgagaaacccagtagcaccattgaaactacagagtgtttcgctccacacttcccccgtgtagatcaggtcgatgagtcactgcaatccccacgggcgaccgtggcagtggctgcgctggcggcctgcctatggggcaacccataggacgctctaatgtggacatggtgtgaagagtctattgagctagttagtagtcctccggcccctgaatgcggctaatcccaactgcggagcacatgccttcaacccagagggtagtgtgtcgtaacgggcaactctgcagcggaaccgactactttgggtgtccgtgtttccttttatcctcacattggctgcttatggtgacaattacagaattgttaccatatagctattggattggccatccggtgtgcaatagagctattatatacctatttgttggctttgtaccactgaccttaaaatctttaaccactcttgagtgtatattaacccttaatacaatcaaac

SEQ ID NO: 19315 - DNA, 736 bp, synthetic construct
  source 1..736: mol_type = other DNA
ctgtgggttgtacccacccacagggcccactgggcgctagcactccgattctgcggaatctttgtgcgcctgttttatgaccctcccccgaaacttgtaacttagaagttatgtacatcaccgatcaatagcaggcgtggcgcaccagccatgtcttgatcaagcacttctgtacccccggactgagtatcaatagactgctcacgcggttgaaggagaaaatgttcgttacccggctaactacttcgagaaacctagtaacaccattgaaactgcggagtgtttcgctcagcattccccccatgtagatcaggtcgatgagtcactgcttaccccacgggcgaccgtggcagtggctgcgttggcggcctgcctatggggcaacccataggacgctctaaagtggacatggtgcgaagagtctattgagctagttagtagtcctccggcccctgaatgcggctaatcctaactgcggagcgcatgtcctcaaaccagagggtggtgcgtcgtaatgggtaactctgcagcggaaccgactactttgggtgtccgtgtttcttttgttcttaaaatggctgcttatggtgacaatcgaggaattgttaccatatagctattggattggccatccggtgtgcaacagagctattatctacttgtttgtcggatacatccccttaacacctaaatcctttaatacattgcattatattttaacattgaacgcgagaaa

SEQ ID NO: 19316 - DNA, 728 bp, synthetic construct
  source 1..728: mol_type = other DNA
gggttgcacccacccacagggcccactgggcgctagcactctggtaccacggtacctttgtgcgcctgttttatcaccccaccccatttgaaactcagaagcaacgcacaaccgaccaatagcgggtgtggcacaccagctgcatcttggtcaagcacttctgtttccccgggttgagtatcagtaagctgttcacacggctgaaggagaaagtacccgttacccggccaactacttcgagaaacctagtaccaccatgaacgttgcaaggcgtttcgctcagcacttcccccgtgtagatcaggctgatgagtcaccgcattccccacgggcgaccgtggcggtggctgcgctggcggcctgcctatgggttagcccataggacgccttaatactgacatggtgcgaagagtctattgagctagttggtagtcctccggcccctgaatgcggctaatcctaactgcggagcacatactcacaaaccagtgagcagtgtgtcgtaatgggtaactctgcagcggaaccgactactttgggtgtccgtgtttccttttattcttatattggctgcttatggtgacaatcagagaattgttgccatatagctattggattggccatccggtgtctaatagagctattatatacttgtttgttggatttattccgttgtcatataaatctctaaacactttgtgctttatcttgaacttgaacacacgaaa

SEQ ID NO: 19317 - DNA, 725 bp, synthetic construct
  source 1..725: mol_type = other DNA
cactcacaggacccacgcggtgctagcactctggttccacgggacctttgtgcgcctgttttatgtcccctcccccaatttgtaacttagaagcaatttgcaacactgatcagtagcaggcatagcgcaccagctatgtcttgatcaagcacttctgtttccccggaccgagtatcaatagactgtttacacggttgaaggagaaagcgtccgttatccggctaactacttcgagaaacccagtagcaccattgaaactacagagtgtttcgctccacacttcccccgtgtagatcaggtcgatgagtcactgcaatccccacgggcgaccgtggcagtggctgcgctggcggcctgcctatggggcaacccataggacgctctaatgtggacatggtgtgaagagtctattgagctagttagtagtcctccggcccctgaatgcggctaatcccaactgcggagcacatgccttcaacccagagggtagtgtgtcgtaatgggcaactctgcagcggaaccgactactttgggtgtccgtgtttcctttttattctcacattggctgcttatggtgacaattacagaattgttaccatatagctattggattggccatccggtgtgcaatagagctattatatacctatttgttggctttgtaccactgaccttaaaatctttaaccactcttgagtgtatattaacccttaatacaattaaac

SEQ ID NO: 19318 - DNA, 723 bp, synthetic construct
  source 1..723: mol_type = other DNA
cactcacaggacccacgcggtgctagcactctggttccacgggacctttgtgcgcctgttttatgtccccacccccgatttgtaacttagaagcaatttgcaacactgatcagtagcaggcatagcgcaccagctatgtcttgatcaagcacttctgtttccccggaccgagtatcaatagactgttcacacggttgaaggagaaagcgtccgttatccggctaactacttcgagaagcccagtagcaccattgaaactacagagtgtttcgctccacacttccccgtgtagatcaggtcgatgagtcactgcaatccccacgggcgaccgtggcagtggctgcgctggcggcctgcctatggggcaacccataggacgctctaatgtggacatggtgtgaagagtctattgagctagttagtagtcctccggcccctgaatgcggctaatcctaactgcggagcacatgccttcaacccagagggtagtgtgtcgtaatgggcaactctgcagcggaaccgactactttgggtgtccgtgtttccttttattctcacattggctgcttatggtgacaattacagaattgttaccatatagctattggattggccatccggtgtgcaatagagctattatatacctatttgttggctttgtaccactgaccttaaaatctttaaccactcttgagtgtatattaacccttaatacaatcaaac

SEQ ID NO: 19319 - DNA, 728 bp, synthetic construct
  source 1..728: mol_type = other DNA
gggttgcacccactcacagggcccactgggcgccagcactctggtactgcggtacctttgtgcgcctgttttatcaccccaccccatctgaaacgtagaagcgatgcacaaccgaccaatagtgggtgtggcgcaccagccacatcttggtcaagcacttctgttcccccgggtttagtatcaataagctgctcacgcggctgaaggagaaaacacccgttatccggccaactacttcgagaaacctagtaccgctatgaacgttgcaaggcgtttcgctcagcacttcccccgtgtagatcaggctgatgagtcaccgcttccctcacgggcgaccgtggcggtggctgcgctggcagcctgcctatgggcttgcccataggacgccttaatactgacatggtgcgaagagtctattgagctagttggtagtcctccggcccctgaatgcggctaatcctaactgcggagcacatactcacaaaccagtgagcggtgtgtcgtaacgggcaactctgcagcggaaccgactactttgggtgtccgtgtttccttttattcttatattggctgcttatggtgacaattgaagaattgttaccatatagctattggattggccatccggtgtctaacagagatattatatacttgtttgttggattcacctcgttgtcatacaaatcccttaacactttgtgctttatcttaaatttgaactcaaaaag

SEQ ID NO: 19320 - DNA, 725 bp, synthetic construct
  source 1..725: mol_type = other DNA
cactcacaggacccacgcggtgctagcactctggttccacgggacctttgtgcgcctgttttatgtcccctccccccaatttgtaacttagaagcaatttgcaacactgatcagtagcaggcatagcgcaccagctatgtcttgatcaagcacctctgtttccccggaccgagtatcaatagactgtttgcacggttgaaggagaaagcgtccgttatccggctaactacttcgagaaacccagtagcaccattgaaactacagagtgtttcgctccacacttcccccgtgtagatcaggtcgatgagtcactgcaatccccacgggcgaccgtggcagtggctgcgctggcggcctgcctatggggcaacccataggacgctctaatgtggacatggtgtgaagagtctattgagctagttagtagtcctccggcccctgaatgcggctaatcccaactgcggagcacatgccttcaacccagagggtagtgtgtcgtaatgggcaactctgcagcggaaccgactactttgggtgtccgtgtttccttttattctcacattggctgcttatggtgacaattacagaattgttaccatatagctattggattggccatccggtgtgcaatagagctattatatacctatttgttggctttgtaccactgaccttaaaatctttaaccactcttgagtgtatattaacccttaatacaatcaaac

SEQ ID NO: 19321 - DNA, 724 bp, synthetic construct
  source 1..724: mol_type = other DNA
cactcacaggacccacgcggtgctagcactctggttccacgggacctttgtgcgcctgttttatgtcccttccccaatttgtaacttagaagcaatttgcaacactgatcagtagcaggcatagcgcaccagctatgtcttgatcaagcacttctgtttccccggaccgagtatcaatagactgtacacacggttgaaggagaaagcgtccgttatccggctaactacttcgagaagcccagtagcaccattgaaactacagagtgtttcgctccacacttccccccgtgtagatcaggtcgatgagtcactgcaatccccacgggcgaccgtggcagtggctgcgctggcggcctgcctatggggcaacccataggacgctctaatgtggacatggtgtgaagagtctattgagctagttagtagtcctccggcccctgaatgcggctaatcctaactgcggagcacatgccttcaatccagagggtagtgtgtcgtaatgggcaactctgcagcggaaccgactactttgggtgtccgtgtttccttttattctcacattggctgcttatggtgacaattacagaattgttaccatatagctattggattggccatccggtgtgcaatagagctattatatacctatttgttggctttgtaccactaaccttaaaatctttaaccactctcgagtgtatattaacccttaatacaatcaaac

SEQ ID NO: 19322 - DNA, 724 bp, synthetic construct
  source 1..724: mol_type = other DNA
cactcacaggacccacgcggtgctagcactctggttccacgggacctttgtgcgcctgttttatgtcccctcccccaatttgtaacttagaagcaatttgcaacactgatcagtagcaggcatagcgcaccagctatgtcttgatcaagcacttctgtttccccggaccgagtatcaatagactgttcacacggttgaaggagaaagcgtccgttatccggctaactacttcgagaaacccagtagcaccattgaaactacagagtgtttcgctccacacttcccccgtgtagatcaggtcgatgagtcactgcaatccccacgggcgaccgtggcagtggctgcgctggcggcctgcctatggggcaacccataggacgctctaatgtggacatggtgtgaagagtctattgagctagttagtagtcctccggcccctgaatgcggctaatcccaactgcggagcacatgccttcaacccagagggtagtgtgtcgtaatgggcaactctgcagcggaaccgactactttgggtgtccgtgtttccttttattttcacattggctgcttatggtgacaattacagaattgttaccatatagctattggattggccatccggtgtgcaatagagctattatatacctatttgttggctttgtaccactgaccttaaaatctttaaccactcttgagtgtatattaacccttaatacaatcaaac

SEQ ID NO: 19323 - DNA, 724 bp, synthetic construct
  source 1..724: mol_type = other DNA
cactcacaggacccacgcggtgctagcactctggttccacgggacctttgtgcgcctgttttatgtccccacccccaatttgtaacttagaagcaatttgcaacactgatcagtagcaggcatagcgcaccagctatgtcttgatcaagcacttctgtttccccggaccgagtatcaatagactgttcacacggttgaaggagaaagcgtccgttatccggctaactacttcgagaagcccagtagcaccattgaaactacagagtgtttcgctccacacttcccccgtgtagatcaggtcgatgagtcactgcaatccccacgggcgaccgtggcagtggctgcgctggcggcctgcctatggggcaacccataggacgctctaatgtggacatggtgtgaagagtctattgagctagttagtagtcctccggcccctgaatgcggctaatcctaactgcggagcacatgccttcaacccagagggtagtgtgtcgtaatgggcaactctgcagcggaaccgactactttgggtgtccgtgtttccttttattctcacattggctgcttatggtgacaattacagaattgttaccatatagctattggattggccatccggtgtgcaatagagctattatatacctatttgttggctttgtaccactaaccttaaaatctttaaccactcttgagtgtatattaacccttaatacaatcaaac

SEQ ID NO: 19324 - DNA, 723 bp, synthetic construct
  source 1..723: mol_type = other DNA
cactcacaggacccacgcggtgctagcactctggttccacgggacctttgtgcgcctgttttatgtcccctccccaatttgtaacttagaagcaatttgcaacactgatcagtagcaggcatagcgcaccagctatgtcttgatcaagcacttctgtttccccggaccgagtatcaatagactgttcacacggttgaaggagaaagcgtccgttatccggctaactacttcgagaaacccagtagcaccattgaaactacagagtgtttcgctccacacttcccccgtgtagatcaggtcgatgagtcactgcaatccccacgggcgaccgtggcagtggctgcgctggcggcctgcctatggggcaacccataggacgctctaatgtggacatggtgtgaagagtctattgagctagttagtagtcctccggcccctgaatgcggctaatcctaactgcggagcacatgccttcaatccagagggtagtgtgtcgtaatgggcaactctgcagcggaaccgactactttgggtgtccgtgtttccttttattctcacattggctgcttatggtgacaattaaagaattgttaccatatagctattggattggccatccggtgtgcaatagagctatcatatatttatttgttggttttgtaccactgaccttaaaatctataaccactctcgagtgtatattaacccttaatacaatcaaac

SEQ ID NO: 19325 - DNA, 723 bp, synthetic construct
  source 1..723: mol_type = other DNA
cactcacaggacccacgcggtgctagcactctggttccacgggacctttgtgcgcctgttttatgtcccctccccaatttgtaacttagaagcaatttgcaacactggtcagtagcaggcatagcgcaccagctatgtcttgatcaagcacttctgtttccccggaccgagtatcaatagactgtacacacggttgaaggagaaagcgtccgttatccggctaactacttcgagaaacccagtagcaccattgaaactacagagtgtttcgctccacacttcccccgtgtagatcaggtcgatgagtcactgcaatccccacgggcgaccgtggcagtggctgcgctggcggcctgcctatggggcaacccataggacgctctgatgtggacatggtgtgaagagtctattgagctagttagtagtcctccggcccctgaatgcggctaatcctaactgcggagcacatgccttcaatccagagggtagtgtgtcgtaatgggcaactctgcagcggaaccgactactttgggtgtccgtgtttccttttattctcacattggctgcttatggtgacaattacagaattgttaccatatagctattggattggccatccggtgtgcaatagagctattatatacctatttgttggctttgtaccactaaccttaaaatctttaaccactctcgagtgtatattaacccttaatacaatcaaac

SEQ ID NO: 19326 - DNA, 724 bp, synthetic construct
  source 1..724: mol_type = other DNA
cactcacaggacccacgcggtgctagcactctggttccacgggacctttgtgcgcctgttttatgtcccctccccagtttgtaacttagaagcaatttgcaacaccgatcagtagcaggcatagcacaccagctatgtcttgatcaagcacttctgtttccccggaccgagtatcaatagactgttcacacggttgaaggagaaagcgtccgttacccggctaactacttcgagaaacccagtaacaccattgaaattgcagagtgtttcgctccacactttcccccgtgtagatcaggtcgatgagtcactgcaatccccacgggcgaccgtggcagtggctgcgctggcggcctgcctatggggcaacccataggacgctctaatgtggacatggtgtgaagagtctattgagctagttagtagtcctccggcccctgaatgcggctaatcctaactgcggagcacatgccttcaacccagagggtagtgtgtcgtaatgggcaactctgcaacggaaccgactactttgggtgtccgtgtttccttttattcttacattggctgcttatggtgacaattacagaattgttaccatatagctattggattggccatccggtgtgcaatagagctattatatacctatttgttggctttgtaccattgaccttaaaatctttaaccactcttgagtgtatattaacccttaatacaatcaaac

SEQ ID NO: 19327 - DNA, 724 bp, synthetic construct
  source 1..724: mol_type = other DNA
cactcacaggacccacgcggtgctagcactctggttccacgggacctttgtgcgcctgttttatgtcccctcccccaatttgtaacttagaagcaatttgcaacactgatcagtagcaggcatagcgcaccagctatgtcttgatcaagcacttctgtttccccggaccgagtatcaatagactgtttacacggttgaaggagaaagcgtccgttacccggctaactacttcgagaaacccagtagcaccattgaaactacagagtgtttcgctccacacttcccccgtgtagatcaggtcgatgagtcactgcaatccccacgggcgaccgtggcagtggctgcgctggcggcctgcctatggggcaacccataggacgctctaatgtggacatggtgtgaagagtctattgagctagttagtagtcctccggcccctgaatgcggctaatcccaactgcggagcacatgccttcaacccagagggtagtgtgtcgtaatgggcaactctgcagcggaaccgactactttgggtgtccgtgtttccttttattctcacattggctgcttatggtgacaattacagaattgttaccatatagctattggattggccatccggtgtgcaatagagctattatatacctatttgttggctttgtaccactgaccttaaaatctttaaccactcttgagtgtatattaacccttaatacaattaaac

SEQ ID NO: 19328 - DNA, 724 bp, synthetic construct
  source 1..724: mol_type = other DNA
cactcacaggacccacgcggtgctagcactctggttccacgggacctttgtgcgcctgttttatgtcccctcccccaatttgtaacttagaagcaatttgcaacactgatcagtagcaggcatagcgcaccagctatgtcttgatcaagcacttctgtctccccggaccgagtatcaatagactgtttacacggttgaaggagaaagcgtccgttatccggctaactacttcgagaaacccagtagcaccattgaaactacagagtgtttcgctccacacttcccccgtgtagatcaggtcgatgagtcactgcaatccccacgggcgaccgtggcagtggctgcgctggcggcctgcctatggggcaacccataggacgctctaatgtggacatggtgtgaagagtctattgagctagttagtagtcctccggcccctgaatgcggctaatcccaactgcggagcacatgccttcaacccagagggtagtgtgtcgtaatgggcaactctgcagcggaaccgactactttgggtgtccgtgtttccttttattctcacattggctgcttatggtgacaattacagaattgttaccatatagctattggattggccatccggtgtgcaatagagctattatatacctatttgttggctttgtaccactgaccttaaaatctttaaccactcttgagtgtatattaacccttaatacaattaaac

SEQ ID NO: 19329 - DNA, 724 bp, synthetic construct
  source 1..724: mol_type = other DNA
cactcacaggacccacgcggtgctagcactctggttccacgggacctttgtgcgcctgttttatgtcccctcccccaatttgtaacttagaagcaatttgcaacactgatcagtagcaggcatagcgcaccagctatgtcttgatcaagcacttctgtttccccggaccgagtatcaatagactgtttacacggttgaaggagaaagcgtccgttatccggctaactacttcgagaaacccagtagcaccattgaaactacagagtgtttcgctccacacttcccccgtgtagatcaggtcgatgagtcactgcaatccccacgggcgaccgtggcagtggctgcgttggcggcctgcctatggggcaacccataggacgctctaatgtggacatggtgtgaagagtctattgagctagttagtagtcctccggcccctgaatgcggctaatcccaactgcggagcacatgccttcaacccagagggtagtgtgtcgtaatgggcaactctgcagcggaaccgactactttgggtgtccgtgtttccttttattctcacattggctgcttatggtgacaattacagaattgttaccatatagctattggattggccatccggtgtgcaatagagctattatatacctatttgttggctttgtaccactgaccttaaaatctttaaccactcttgagtgtatattaacccttaatacaattaaac

SEQ ID NO: 19330 - DNA, 724 bp, synthetic construct
  source 1..724: mol_type = other DNA
cactcacaggacccacgcggtgctagcactctggttccacgggacctttgtgcgcctgttttatgtcccctcccccaatttgtaacttagaagcaatttgcaacactgatcagtagcaggcatagcgcaccagctatgtcttgatcaagcacttctgtttccccggaccgagtatcaatagactgtttacacggttgaaggagaaagcgtccgttatccggctaactacttcgagaaacccagtagcaccattgaaactacagagtgtttcgctccacacttcccccgtgtagatcaggtcgatgagtcactgcaatccccacgggcgaccgtggcagtggctgcgttggcggcctgcctatggggcaacccataggacgctctaatgtggacatggtgtgaagagtctattgagctagttagtagtcctccggcccctgaatgcggctaatcccaactgcggagcacatgccttcaacccagagggtagtgtgtcgtaatgggcaactctgcagcggaaccgactactttgggtgtccgtgtttccttttattctcacattggctgcttatggtgacaattatagaattgttaccatatagctattggattggccatccggtgtgcaatagagctattatatacctatttgttggctttgtaccactgaccttaaaatctttaaccactcttgagtgtatattaacccttaatacaattaaac

SEQ ID NO: 19331 - DNA, 724 bp, synthetic construct
  source 1..724: mol_type = other DNA
cactcacaggacccacgcggtgctagcactctggttccacgggacctttgtgcgcctgttttatgtcccctcccccaatttgtaacttagaagcaatttgcaacactgatcagtagcaggcatagcgcaccagctatgtcttgatcaagcacttctgtttccccggaccgagtatcaatagactgtttacacggttgaaggagaaagcgtccgttatccggctaactacttcgagaaacccagtagcaccattgaaactacagagtgtttcgctccacacttcccccgtgtagatcaggtcgatgagtcactgcaatccccacgggcgaccgtggcagtggctgcgctggcggcctgcctatggggcaacccataggacgctctaatgtggacatggtgtgaagagtctattgagctagttagtagtcctccggcccctgaatgcggctaatcccaactgcggagcacatgccttcaacccagagggtagtgtgtcgtaatgggcaactctgcagcggaaccgactactttgggtgtccgtgtttccttttattctcacattggctgcttatggtgacaattacagaattgttaccatatagctattggattggccatccggtgtgcaatagagctattatatacctatttgttggctttgtaccactgaccttaaaatctttaaccactcttgagtgtatattaacccttaatacaatcaaac

SEQ ID NO: 19332 - DNA, 724 bp, synthetic construct
  source 1..724: mol_type = other DNA
cactcacaggacccacgcggtgctagcactctggttccacggaacctttgtgcgcctgttttatgtcccctcccccaatttgtaacttagaagcaatttgcaacactgatcagtagcaggcatagcgcaccagctatgtcttgatcaagcacttctgtttccccggaccgagtatcaatagactgtttacacggttgaaggagaaagcgtccgttatccggctaactacttcgagaaacccagtagcaccattgaaactacagagtgtttcgctccacacttcccccgtgtagatcaggtcgatgagtcactgcaatccccacgggcgaccgtggcagtggctgcgctggcggcctgcctatggggcaacccataggacgctctaatgtggacatggtgtgaagagtctattgagctagttagtagtcctccggcccctgaatgcggctaatcccaactgcggagcacatgccttcaacccagagggtagtgtgtcgtaatgggcaactctgcagcggaaccgactactttgggtgtccgtgtttccttttattctcacattggctgcttatggtgacaattacagaattgttaccatatagctattggattggccatccggtgtgcaatagagctattatatacctatttgttggctttgtaccactgaccttaaaatctttaaccactcttgagtgtatattaacccttaatacaatcaaac

SEQ ID NO: 19333 - DNA, 724 bp, synthetic construct
  source 1..724: mol_type = other DNA
cactcacaggacccacgcggtgctagcactctggttccacgggacctttgtgcgcctgttttatgtcccctcccccaatttgtaacttagaagcaatttgcaacactgatcagtagcaggcatagcgcaccagctatgtcttgatcaagcacttctgtttccccggaccgagtatcaatagactgtttgcacggttgaaggagaaagcgtccgttatccggctaactacttcgagaaacccagtagcaccattgaaactacagagtgtttcgctccgcacttcccccgtgtagatcaggtcgatgagtcactgcaatccccacgggcgaccgtggcagtggctgcgctggcggcctgcctatggggcaacccataggacgctctaatgtggacatggtgtgaagagtctattgagctagttagtagtcctccggcccctgaatgcggctaatcccaactgcggagcacatgccttcaacccagagggtagtgtgtcgtaatgggcaactctgcagcggaaccgactactttgggtgtccgtgtttccttttattctcacattggctgcttatggtgacaattacagaattgttaccatatagctattggattggccatccggtgtgcaatagagctattatatacctatttgttggctttgtaccactgaccttaaaatctttaaccactcttgagtgtatattaacccttaatacaatcaaac

SEQ ID NO: 19334 - DNA, 724 bp, synthetic construct
  source 1..724: mol_type = other DNA
cactcacaggacccacgcggtgctagcactctggttccacgggacctttgtgcgcctgttttatgtcccctcccccaatttgtaacttagaagcaatttgcaacactgatcagtagcaggcatagcgcaccagctatgtcttgatcaagcacttctgtttccccggaccgagtatcaatagactgttcacacggttgaaggagaaagcgtccgttatccggctaactacttcgagaaacccagtagcaccattgaaactacagagtgtttcgctccacacttcccccgtgtagatcaggtcgatgagtcactgcaatccccacgggcgaccgtggcagtggctgcgctggcggcctgcctatggggcaacccataggacgctctaatgtggacatggtgtgaagagtctattgagctagttagtagtcctccggcccctgaatgcggctaatcccaactgcggagcacatgccttcaacccagagggtagtgtgtcgtaatgggcaactctgcagcggaaccgactactttgggtgtccgtgtttccttttattctcacattggctgcttatggtgacaattacagaattgttaccatatagctattggattggccatccggtgtgcaatagagctattatatacctatttgttggctttgtaccactgaccttgaaatctttaaccactcttgagtgcatattaacccttaatacaatcaaac

SEQ ID NO: 19335 - DNA, 724 bp, synthetic construct
  source 1..724: mol_type = other DNA
cactcacaggacccacgcggtgctagcactctggttccacgggacctttgtgcgcctgttttatgtcccctcccccaatttgtaactcagaagcaatttgcaacactgatcagtagcaggcatagcgcaccagctatgtcttgatcaagcacttctgtttccccggaccgagtatcaatagactgttcacacggttgaaggagaaagcgtccgttatccggctaactacttcgagaaacccagtagcaccattgaaactacagagtgtttcgctccacacttcccccgtgtagatcaggtcgatgagtcactgcaatccccacgggcgaccgtggcagtggctgcgctggcggcctgcctatggggcaacccataggacgctctaatgtggacatggtgtgaagagtctattgagctagttagtagtcctccggcccctgaatgcggctaatcccaactgcggagcacatgccttcaacccagagggtagtgtgtcgtaatgggcaactctgcagcggaaccgactactttgggtgtccgtgtttccttttattctcacattggctgcttatggtgacaattacagaattgttaccatatagctattggattggccatccggtgtgcaatagagctattatatacctatttgttggctttgtaccactgaccttaaaatctttaaccactcttgagtgtatattaacccttaatacaatcaaac

SEQ ID NO: 19336 - DNA, 724 bp, synthetic construct
  source 1..724: mol_type = other DNA
cactcacaggacccacgcggtgctagcactctggttccacgggacctttgtgcgcctgttttatgtcccctcccccaatttgtaacttagaagcaatttgcaacactgatcagtagcaggcatagcgcaccagctatgtcttgatcaagcacttctgtttccccggaccgagtatcaatagactgttcacacggttgaaggagaaagcgtccgttatccggctaactacttcgagaaacccagtagcaccattgaaactacagagtgtttcgctccacacttcccccgtgtagatcaggtcgatgagtcactgcaatccccacgggcgaccgtggcagtggctgcgctggcggcctgcctatggggcaacccataggacgctctaatgtggacatggtgtgaagagtctattgagctagttagtagtcctccggcccctgaatgcggctaatcccaactgcggagcacatgccttcaacccagagggtagtgtgtcgtaatgggcaactctgcagcggaaccgactactttgggtgtccgtgtttccttttatcctcacattggctgcttatggtgacaattacagaattgttaccatatagctattggattggccatccggtgtgcaatagagctattatatacctatttgttggctttgtaccactgaccttaaaatctttaaccactcttgagtgtatattaacccttaatacaatcaaac

SEQ ID NO: 19337 - DNA, 724 bp, synthetic construct
  source 1..724: mol_type = other DNA
cactcacaggacccacgcggtgctagcactctggttccacgggacctttgtgcgcctgttttatgtcccctcccccaatttgtaacttagaagcaatttgcaacactgatcagtagcaggcatagcgcaccagctatgtcttgatcaagcacttctgtttccccggaccgagtatcaatagactgttcacacggttgaaggagaaagcgtccgttatccggctaactacttcgagaaacccagtagcaccattgaaactacagagtgtttcgctccacacttcccccgtgtagatcaggtcgatgagtcactgcaatccccacgggcgaccgtggcagtggctgcgctggcggcctgcctatggggcaacccataggacgctctaatgtggacatggtgtgaagagtctattgagctagttagtagtcctccggcccctgaatgcggctaatcccaactgcggagcacatgccttcaacccagagggtagtgtgtcgtaatgggcaactctgcggcggaaccgactactttgggtgtccgtgtttccttttattctcacattggctgcttatggtgacaattacagaattgttaccatatagctattggattggccatccggtgtgcaatagagctattatatacctatttgttggctttgtaccgctgaccttaaaatctttaaccactcttgagtgtgtattaacccttaatacaatcaaac

SEQ ID NO: 19338 - DNA, 724 bp, synthetic construct
  source 1..724: mol_type = other DNA
cactcacaggacccacgcggtgctagcactctggttccacgggacctttgtgcgcctgttttatgtcccctcccctaatttgtaacttagaagcaatttgcaacactgatcagtagcaggcatagcgcaccagctatgtcttgatcaagcacttctgtttccccggaccgagtatcaatagactgttcacacggttgaaggagaaagcgtccgttatccggctaactacttcgagaaacccagtagcaccattgaaactacagagtgtttcgctccacacttcccccgtgtagatcaggtcgatgagtcactgcaatccccacgggcgaccgtggcagtggctgcgctggcggcctgcctatggggcaacccataggacgctctaatgtggacatggtgtgaagagtctattgagctagttagtagtcctccggcccctgaatgcggctaatcccaactgcggagcacatgccttcaacccagagggtagtgtgtcgtaatgggcaactctgcagcggaaccgactactttgggtgtccgtgtttccttttattctcacattggctgcttatggtgacaattacagaattgttaccatatagctattggattggccatccggtgtgcaatagagctattatatacctatttgttggctttgtaccactgaccgtaaaatctttaaccactcttgagtgtatattaacccttaatacaatcaaac

SEQ ID NO: 19339 - DNA, 724 bp, synthetic construct
  source 1..724: mol_type = other DNA
cactcacaggacccacgcggtgctagcactctggttccacgggacctttgtgcgcctgttttatgtcccctcccctaatttgtaacttagaagcaatttgcaacactgatcggtagcaggcatagcgcaccagctatgtcttgatcaagcacttctgtttccccggaccgagtatcaatagactgttcacacggttgaaggagaaagcgtccgttacccggctaactacttcgagaaacccagtagcaccattgaaactacagagtgtttcgctccacacttcccccgtgtagatcaggtcgatgagtcactgcaatccccacgggcgaccgtggcagtggctgcgctggcggcctgcctatggggcaacccataggacgctctaatgtggacatggtgtgaagagtctattgagctagttagtagtcctccggcccctgaatgcggctaatcctaactgcggagcacatgccttcaacccagagggtggtgtgtcgtaatgggcaactctgcagcggaaccgactactttgggtgtccgtgtttccttttattctcacattggctgcttatggtgacaattacagaattgttaccatatagctattggattggccatccggtgtgcaatagagctattatatacctatttgttggctttgtaccactgactttaaaatctttaaccactcttgagtgtatattaacccttaatacaatcaaac

SEQ ID NO: 19340 - DNA, 724 bp, synthetic construct
  source 1..724: mol_type = other DNA
cactcacaggacccacgcggtgctagcactctggttccacgggacctttgtgcgcctgttttatgtcccctcccccaatttgtaacttagaagcaatttgcaacactgatcagtagcaggcatagcgcaccagctatgtcttgatcaagcacttctgtttccccggaccgagtatcaatagactgttcacgcggttgaaggagaaagcgtccgttatccggctaactacttcgagaaacccagtagcaccattgaaactacagagtgtttcgctccacacttcccccgtgtagatcaggtcgatgagtcactgcaatccccacgggcgaccgtggcagtggctgcgctggcggcctgcctatggggcaacccataggacgctctaatgtggacatggtgtgaagagtctattgagctagttagtagtcctccggcccctgaatgcggctaatcctaactgcggagcacatgccttcaacccagagggtggtgtgtcgtaatgggcaactctgcagcggaaccgactactttgggtgtccgtgtttccttttattctcacattggctgcttatggtgacaattacagaattgttaccatatagctattggattggccatccggtgtgcaatagagctattatatacctatttgttggctttgtaccactgactttaaaatctttaaccactcttgagtgtatattaacccttaatacaatcaaac

SEQ ID NO: 19341 - DNA, 723 bp, synthetic construct
  source 1..723: mol_type = other DNA
cactcacaggacccacgcggtgctagcactctggttccacgggacctttgtgcgcctgttttatgtcccctccccaatttgtaacttagaagcaatttgcaacactgatcagtagcaggcatagcgcaccagctatgtcttgatcaagcacttctgtttccccggaccgagtatcaatagactgttcacacggttgaaggagaaagcgtccgttatccggctaactacttcgagaaacccagtagcaccattgaaactacagagtgtttcgctccacacttcccccgtgtagatcaggtcgatgagtcactgcaatccccacgggcgaccgtggcagtggctgcgctggcggcctgcctatggggcaacccataggacgctctaatgtggacatggtgtgaagagtctattgagctagttagtagtcctccggcccctgaatgcggctaatcctaactgcggagcacatgccttcaacccagagggtagtgtgtcgtaatgggcaactctgcagcggaaccgactactttgggtgtccgtgtttccttttattctcacattggctgcttatggtgacaattacagaattgttaccatatagctattggattggccatccggtgtgcaatagagctattatatacctatttgttggctttgtaccactgaccttaaaatctttaaccactcttgagtgtatattaacccttaatacaatcaaac

SEQ ID NO: 19342 - DNA, 723 bp, synthetic construct
  source 1..723: mol_type = other DNA
cactcacaggacccacgcggtgccagcactctggttccacgggacctttgtgcgcctgttttatgtcccctccccaatttgtaatttagaagcaatttgcaacactgatcagtagcaggcatagcgcaccagctatgtcttgatcaagcacttctgtttccccggaccgagtatcaatagactgtacacacggttgaaggagaaagcgtccgttatccggctaactacttcgagaaacccagtagcaccattgaaactacagagtgtttcgctccacacttcccccgtgtagatcaggtcgatgagtcactgcaatccccacgggcgaccgtggcagtggctgcgctggcggcctgcctatggggcaacccataggacgctctaatgtggacatggtgtgaagagtctattgagctagttagtagtcctccggcccctgaatgcggctaatcctaactgcggagcacatgccttcaatccagagggtagtgtgtcgtaatgggcaactctgcagcggaaccgactactttgggtgtccgtgtttccttttattctcacattggctgcttatggtgacaattacagaattgttaccatatagctattggattggccatccggtgtgcaatagagctattatatacctatttgttggctttgtaccactaaccttaaaatctttaaccactctcgagtgtatattaacccttaatacagtcaaac

SEQ ID NO: 19343 - DNA, 723 bp, synthetic construct
  source 1..723: mol_type = other DNA
cactcacaggacccacgcggtgctagcactctggttccacgggacctttgtgcgcctgttttatgtcccctccccaatttgtaacttagaagcaatttgcaacactgatcagtagcaggcatagcgcaccagctatgtcttgatcaagcacttctgtttccccggaccgagtatcaatagactgtacacacggttgaaggagaaagcgtccgttatccggctaactacttcgagaaacccagtaccaccattgaaattacagagcgtttcgctccacacttcccccgtgtagatcaggtcgatgagtcactgcaatccccacgggcgaccgtggcagtggctgcgctggcggcctgcctatggggcaacccataggacgctctaatgtggacatggtgcgaagagtctattgagctagttagtagtcctccggcccctgaatgcggctaatcccaactgcggagcacatgccttcaatccagagggtagtgtgtcgtaatgggcaactctgcagcggaaccgactactttgggtgtccgtgtttccttttattctcatattggctgcttatggtgacaattacagaattgttaccatatagctattggattggccatccggtgtgcaatagagctattatatacctatttgttggctttgtaccactgaccataaaatctttaaccactctcgagtgcatattaacccttaatacaatcaaac

SEQ ID NO: 19344 - DNA, 723 bp, synthetic construct
  source 1..723: mol_type = other DNA
cactcacaggacccacgcggtgctagcactctggttccacgggacctttgtgcgcctgttttatgtcccctccccaatttgtaacttagaagcaatttgcaacactgatcagtagtaggcatagcgcaccagctatgtcttgatcaagcacttctgtttccccggaccgagtatcaatagactgttcacacggttgaaggagaaagcgtccgttacccggctaactacttcgagaaacccagtaacaccattgaaactacagagtgtttcgctccacacttcccccgtgtagatcaggtcgatgagtcactgcaatccccacgggcgaccgtggcagtggctgcgctggcggcctgcctatggggcaacccataggacgctttgatgtggacatggtgtgaagagtctattgagctagttagtagtcctccggcccctgaatgcggctaatcctaactgcggagcacatgccctcaacccagagggtagtgtgtcgtaatgggcaactctgcagcggaaccgactactttgggtgtccgtgtttccttttattctcacattggctgcttatggtgacaattacagaattgttaccatatagctattggattggccatccggtgtgcaatagagctattatatacctatttgttggctttgtaccactgaccttaaaatctttaaccaatcttgagtgtatattaacccttaacacaatcaaac

SEQ ID NO: 19345 - DNA, 723 bp, synthetic construct
  source 1..723: mol_type = other DNA
cactcacaggacccacgcggtgctagcactctggttccacgggacctttgtgcgcctgttttatcttccctccccaatttgtaacttagaagcaatttgcaacactgatcagtagcaggcatagcgcaccagctatgtcttgatcaagcacttctgtttccccggaccgagtatcaatagactgttcacatggttgaaggagaaagcgtccgttatccggctaactacttcgagaaacccagtagcaccattgaaactacagagtgtttcgctccacacttcccccgtgtagatcaggtcgatgagtcactgcaatccccacgggcgaccgtggcagtggctgcgctggcggcctgcctatggggcaacccataggacgctttgatgtggacatggtgtgaagagtctattgagctagttagtagtcctccggcccctgaatgcggctaatcctaactgcggagcacatgccttcaacccagagggtagtgtgtcgtaatgggcaactctgcagcggaaccgactactttgggtgtccgtgtttccttttattttcacattggctgcttatggtgacaattacagaattgttaccatatagctattggattggccatccggtgtgcaatagagctattatatacctatttgttggctttgcaccactgaccttaaaatctttgaccactcttgagcgtatattaatccttaatacagtcaaac

SEQ ID NO: 19346 - DNA, 716 bp, synthetic construct
  source 1..716: mol_type = other DNA
atgttctgctcatggcgctagcacactggttctgcgggacctttgtgcgcctgttttataacccttcccttaagcagtaacttagaagctttgtacaatcatggccaatagtgggcgtggcgcgccagtcacgtcttggtcaagcacttctgtatccccggactgagtatcaatagactgctcacgcggttgaaggagaaaacgttcgttacccggctaactacttcgagaaacctagtagcaccatgaaagttgcggagtgtttcgctcagcacttcccccgtgtagatcaggtcgatgagtcactgtaaaccccacgggcgaccgtgacagtggctgcgttggcggcctgcccatggggtaacccatgggacgctctaatacggacatggtgcgaagagtctattgagctagttagcagtcctccggcccctgaatgcggctaatcctaactgcggagcgcgcaccttcaatccagggggcggcgcgtcgtaatgggtaactctgcagcggaaccgactactttgggtgtccgtgtttccttttattctttattggctgcttatggtgacaattgaaaagttgttaccatatagctattggattggccatccggtgtctaacagagctattgtttacctattcattggcttcgtcccttttaatctcaaggccatccaagctctcgattacatattgctcctcaactgtaggaa

SEQ ID NO: 19347 - DNA, 724 bp, synthetic construct
  source 1..724: mol_type = other DNA
cactcacaggacccacgcggtgctagcactctggttccacgggacctttgtgcgcctgttttatgtcccctcccccaatttgtaacttagaagcaatttgcaacactgatcaatagcaggcatagcgcaccagctatgtcttgatcaagcacttctgtttccccggaccgagtatcaatagactgtttacacggttgaaggagaaagcgtccgttatccggctaactacttcgagaaacccagtagcaccattgaaactacagagtgtttcgctccacacttcccccgtgtagatcaggtcgatgagtcactgcaatccccacgggcgaccgtggcagtggctgcgctggcggcctgcctatggggcaacccataggacgctctgatgtggacatggtgtgaagagtctattgagctagttagtagtcctccggcccctgaatgcggctaatcccaactgcggagcacatgccttcaacccagagggtagtgtgtcgtaatgggcaactctgcagcggaaccgactactttgggtgtccgtgtttccttttattctcacattggctgcttatggtgacaattacagaattgttaccatatagctattggattggccatccggtgtgcaatagagctattatatacctatttgttggctttgtaccactgaccttaaaatctttaaccactcttgagtgtatattaacccttaatacaattaaac

SEQ ID NO: 19348 - DNA, 724 bp, synthetic construct
  source 1..724: mol_type = other DNA
cactcacaggacccacgcggtgctagcactctggttccacgggacctttgtgcgcctgttttatgtcccctcccccaatttgtaacttagaagcaatttgcaacactgatcagtagcaggcatagcgcaccagctatgtcttgatcaagcacttctgtttccccggaccgagtatcaatagactgtttacacggttgaaggagaaagcgtccgttatccggctaactacttcgagaaacccagtagcaccattgaaactacagagtgtttcgctccacacttcccccgtgtagatcaggtcgatgagtcactgcaatccccacgggcgaccgtggcagtggctgcgctggcggcctgcctatggggcaacccataggacgctctaatgtggacatggtgtgaagagtctattgagctagttagtagtcctccggcccctgaatgcggctaatcccaactgcggagcacatgccttcaacccagagggtagtgtgtcgtaatgggcaactctgcagcggaaccgactactttgggtgtccgtgtttccttttattctcacattggctgcttatggtgacaattacagaattgttaccatatagctattggattggccatctggtgtgcaatagagctattatatacctatttgttggctttgtaccactgaccttaaaatctttaaccactcttgagtgtatattaacccttaatacaattaaac

SEQ ID NO: 19349 - DNA, 724 bp, synthetic construct
  source 1..724: mol_type = other DNA
cactcacaggacccacgcggtgctagcactctggttccacgggacctttgtgcgcctgttttatgtcccctcccccaatttgtaacttagaagcaatttgcaacactgatcagtagcaggcatagcgcaccagctatgtcttgatcaagcacttctgtttccccggaccgagtatcaatagactgtttacacggttgaaggagaaagcgtccgttatccggctaactacttcgagaaacccagtagcaccattgaaactacagagtgtttcgctccacacttcccccgtgtagatcaggtcgatgagtcactgcaatccccacgggcgaccgtggcagtggctgcgctggcggcctgcctatggggcaacccataggacgctctaatgtggacatggtgtgaagagtctattgagctagttagtagtcctccggcccctgaatgcggctaatcccaactgcggagcacatgccttcaacccagagggtagtgtgtcgtaatgggcaactctgcagcggaaccgactactttgggtgtccgtgtttccttttattctcacattggctgcttatggtgacaattacagaattgttaccatatagctattggattggccatccagtgtgcaatagagctattatatacctatttgttggctttgtaccactgaccttaaaatctttaaccactcttgagtgtatattaacccttaatacaattaaac

SEQ ID NO: 19350 - DNA, 723 bp, synthetic construct
  source 1..723: mol_type = other DNA
cactcacaggacccacgcggtgctagcactctggttccacgggacctttgtgcgcctgttttatgtcccctccccaatttgtaacttagaagcaatttgcaacactgatcagtagcaggcatagcgcaccagctatgtcttgatcaagcacttctgtttccccggaccgagtatcaatagactgttcacacggttgaaggagaaagcgtccgttatccggctaactacttcgagaaacccagtagcaccattgaaactacagagtgtttcgctccacacttcccccgtgtagatcaggtcgatgagtcactgcaatccccacgggcgaccgtggcagtggctgcgctggcggcctgcctatggggcaacccataggacgctctaatgtggacatggtgtgaagagtctattgagctagttagtagtcctccggcccctgaatgcggctaatcctaactgcggagcacatgccttcaacccagagggtagtgtgtcgtaatgggcaactctgcagcggaaccgactactttgggtgtccgtgtttccttttattctcgcattggctgcttatggtgacaattacagaattgttaccatatagctattggattggccatccggtgtgcaatagagctattatatacctatttgttggctttgtaccactgaccttaaaatctttaaccactcttgagtgtatattaacccttaatacaatcaaac

SEQ ID NO: 19351 - DNA, 723 bp, synthetic construct
  source 1..723: mol_type = other DNA
cactcacaggacccacgcggtgctagcactctggttccacgggacctttgtgcgcctgttttatgttccctccccaatttgtaacttagaagcaatttgcaacactgatcagtagcaggcatagcgcaccagctatgtcttgatcaagcacttctgtttccccggaccgagtatcaatagactgttcacacggttgaaggagaaagcgtccgttatccggctaactacttcgagaaacccagtagcaccattgaaactacagagtgtttcgctccacacttcccccgtgtagatcaggtcgatgagtcactgcaatccccacgggcgaccgtggcagtggctgcgctggcggcctgcctatggggcaacccataggacgctctaatgtggacatggtgtgaagagtctattgagctagttagtagtcctccggcccctgaatgcggctaatcctaactgcggagcacatgccttcaacccagagggtagtgtgtcgtaatgggcaactctgcagcggaaccgactactttgggtgtccgtgtttccttttattctcacattggctgcttatggtgacaatcacagaattgttaccatatagctattggattggccatccggtgtgcaacagagctattatacacctgtttgttggctttgtaccactaaccttaaaatctttagccactcttgagtgtatattaacccttaatacaatcaagc

SEQ ID NO: 19352 - DNA, 723 bp, synthetic construct
  source 1..723: mol_type = other DNA
cactcacaggacccacgcggtgctagcactctggttccacgggacctttgtgcgcctgttttatgtcccctccccaatttgtaacttagaagcaatttgcaacactgatcagtagcaggcatagcgcaccagctatgtcttgatcaagcacttctgtttccccggaccgagtatcaatagactgttcacacggttgaaggagaaagcgtccgttatccggctaactacttcgagaaacccagtagcaccattgaaactacagagtgtttcgctccacacttcccccgtgtagatcaggtcgatgagtcactgcaatccccacgggcgaccgtggcagtgactgcgctggcggcctgcctatggggcaacccataggacgctctaatgtggacatggtgtgaagagtctattgagctagttagtagtcctccggcccctgaatgcggctaatcctaactgcggagcacatgccttcaacccagagggtagtgtgtcgtaatgggcaactctgcagcggaaccgactactttgggtgtccgtgtttccttttattctcacattggctgcttatggtgacaatcacagaattgttaccatatagctattggattggccatccggtgtgcaacagagctattatatacctgtttgttggctttgtaccactaaccttaaaatctttaaccactcttgagtgtatattaacccttaatacaatcaagc

SEQ ID NO: 19353 - DNA, 723 bp, synthetic construct
  source 1..723: mol_type = other DNA
cactcacaggacccacgcggtgctagcactctggttccacggaacctttgtgcgcctgttttatgtcccctccccaatttgtaacttagaagcaatttgcaacactgatcagtagcaggcatagcgcaccagctatgtcttgatcaagcacttctgtttccccggaccgagtatcaatagactgttcacacggttgaaggagaaagcgtccgttatccggctaactacttcgagaaacccagtagcaccattgaaactacagagtgtttcgctccacacttcccccgtgtagatcaggtcgatgagtcactgcgatccccacgggcgaccgtggcagtggctgcgctggcggcctgcctatggggcaacccataggacgctctaatgtggacatggtgtgaagagtctattgagctagttagtagtcctccggcccctgaatgcggctaatcctaactgcggagcacatgccttcaacccagagggtagtgtgtcgtaatgggcaactctgcagcggaaccgactactttgggtgtccgtgtttccttttattctcacattggctgcttatggtgacaattacagaattgttaccatatagctattggattggccatccggtgtgcaatagagctattatatacctatttgttggctttgtaccactgaccttaaaatctttaaccactcttgagtgtatattaacccttaatacaatcaaac

SEQ ID NO: 19354 - DNA, 723 bp, synthetic construct
  source 1..723: mol_type = other DNA
cactcacaggacccacgcggtgctagcactctggtttcacgggacctttgtgcgcctgttttatgtcccctccccaatttgtaacttagaagcaatttgcaacactgatcagtagcaggcatagcgcaccagctatgtcttgatcaagcacttctgtttccccggaccgagtatcaatagactgttcacgcggttgaaggagaaagcgtccgttatccggctaactacttcgagaaacccagtagcaccattgaaactacagagtgtttcgctccacacttcccccgtgtagatcaggtcgatgagtcactgcaatccccacgggcgaccgtggcagtggctgcgctggcggcctgcctatggggcaacccataggacgctctaatgtggacatggtgtgaagagtctattgagctagttagtagtcctccggcccctgaatgcggctaatcctaactgcggagcacatgccttcaacccagagggtggtgtgtcgtaatgggcaactctgcagcggaaccgactactttgggtgtccgtgtttccttttattctcacattggctgcttatggtgacaattacagaattgttaccatatagctattggattggccatccggtgtgcaatagagctattatatacctatttgttggctttgtaccactgactttaaaatctttaaccactcttgagtgtatattaacccttaatacaatcaaac

SEQ ID NO: 19355 - DNA, 723 bp, synthetic construct
  source 1..723: mol_type = other DNA
cactcacaggacccacgcggtgccagcactctggttccacgggacctttgtgcgcctgttttatgtcccctccccaatttgtaacttagaagcaatttgcaacactgatcagtagcaggcatagcgcaccagctatgtcttgatcaagcacttctgtttccccggaccgagtatcaatagactgttcacacggttgaaggagaaagcgtccgttatccggctaactacttcgagaaacccagtagcaccattgaaactacagagtgtttcgctccacacttcccccgtgtagatcaggtcgatgagtcactgcaatccccacgggcgaccgtggcagtggctgcgctggcggcctgcctatggggtaacccataggacgctctaatgtggacatggtgtgaagagtctattgagctagttagtagtcctccggcccctgaatgcggctaatcctaactgcggagcacatgccttcaacccagagggtagtgtgtcgtaatgggcaactctgcagcggaaccgactactttgggtgtccgtgtttccttttattctcacattggctgcttatggtgacaattacagaattgttaccatatagctattggattggccatccggtgtgcaatagagctattatatacctatttgttggctttgtaccactgaccttaaaatctttaaccactcttgagtgtatattaacccttaatacaatcaaac

SEQ ID NO: 19356 - DNA, 723 bp, synthetic construct
  source 1..723: mol_type = other DNA
cactcacaggacccacgcggtgctagcactctggttccacgggacctttgtgcgcctgttttatatcccctccccaatttgtaacttagaagcaatttgcaacaccgatcagtagcaggcatagcgcaccagctatgtcttgatcaagcacttctgtttccccggaccgagtatcaatagactgttcacacggttgaaggagaaagcgtccgttatccggctaactacttcgagaaacccagtagcaccattgaaactacagagtgtttcgctccacacttcccccgtgtagatcaggtcgatgagtcactgcaatccccacgggcgaccgtggcagtggctgcgctggcggcctgcctatggggcaacccataggacgctctaatgtggacatggtgtgaagagtctattgagctagttagtagtcctccggcccctgaatgcggctaatcctaactgcggagcacatgccttcaacccagagggtagtgtgtcgtaatgggcaactctgcagcggaaccgactactttgggtgtccgtgtttccttttattctcacattggctgcttatggtgacaattacagaattgttaccatatagctattgggttggccatccggtgtgcaatagagctattatatacctatttgttggctttgtgccactgaccttaaaatctttaaccactcttgagtgtatattaacccttaatacaatcaaac

SEQ ID NO: 19357 - DNA, 723 bp, synthetic construct
  source 1..723: mol_type = other DNA
cactcacaggacccacgcggtgctagcactctggttccacgggacctttgtgcgcctgttttatatcccctccccaatttgtaacttagaagcaatttgcaacaccgatcagtagcaggcatagcgcaccagctatgtcttgatcaagcacttctgtttccccggaccgagtatcaatagactgttcacacggttgaaggagaaagcgtccgttatccggctaactacttcgagaaacccagtagcaccattgaaactacagagtgtttcgctccacacttcccccgtgtagatcaggtcgatgagtcactgcaatccccacgggcgaccgtggcagtggctgcgctggcggcctgcctatggggcaacccataggacgctctaatgtggacatggtgtgaagagtctattgagctagttagtagtcctccggcccctgaatgcggctaatcctaactgcggagcacatgccttcaacccagagggtagtgtgtcgtaatgggcaactctgcagcggaaccgactactttgggtgtccgtgtttccttttattctcacattggctgcttatggtgacaattacagaattgttaccatatagctattgggttggccatccggtgtgcaatagagctattatatacctatttgttggctttgtgccactgaccttaaaatctttaaccactcttgagtgtatattaacccttaatataatcaaac

SEQ ID NO: 19358 - DNA, 723 bp, synthetic construct
  source 1..723: mol_type = other DNA
cactcacaggacccacgcggtgctagcactctggttccacgggacctttgtgcgcctgttttatatcccttccccaatttgtaacttagaagcaatttgcaacaccgatcagtagcaggcatagcgcgccagctatgtcttgatcaagcacttctgtttccccggaccgagtatcaatagactgttcacacggttgaaggagaaagcgtccgttatccggctaactactttgagaaacccagtagcaccattgaaactacagagtgtttcgctccacacttcccccgtgtagatcaggtcgatgagtcactgcaatccccacgggcgaccgtggcagtggctgcgctggcggcctgcctatggggcaacccataggacgctctaatgtggacatggtgtgaagagtctattgagctagttagtagtcctccggcccctgaatgcggctaatcctaactgcggagcacatgccttcaacccagagggtagtgtgtcgtaatgggcaactctgcagcggaaccgactactttgggtgtccgtgtttccttttattctcacattggctgcttatggtgacaattacagaattgttaccatatagctattgggttggccatccggtgtgcaatagagctattatatacctatttgttggctttgtaccactgaccttaaaatctttaaccactcttgagtgtatattaacccttaatacaatcaaac

SEQ ID NO: 19359 - DNA, 723 bp, synthetic construct
  source 1..723: mol_type = other DNA
cactcacaggacccacgcggtgctagcactctggttccacgggacctttgtgcgcctgttttatgttccctccccagtttgtaacttagaagcaatttgcaacaccgatcagtagcaggcatagcacaccagctatgtcttgatcaagcacttctgtttccccggaccgagtatcaatagactgttcacacggttgaaggagaaagcgtccgttacccggctaactacttcgagaaacccagtaacaccattgaaattgcagagtgtttcgctccacactttccccgtgtagatcaggtcgatgagtcactgcaatcctcacgggcgaccgtggcagtggctgcgctggcggcctgcctatggggcaacccataggacgctctaatgtggacatggtgtgaagagtctattgagctagttagtagtcctccggcccctgaatgcggctaatcctaactgcggagcacatgccttcaacccagagggtagtgtgtcgtaatgggcaactctgcagcggaaccgactactttgggtgtccgtgtttccttttattcttacattggctgcttatggtgacaattacagaattgttaccatatagctattggattggccatccggtgtgcaatagagctattatatacctatttgctggctttgtaccattgaccttaaaatctttaaccactcttgagtgtgtattaacccttaatacaatcaaac

SEQ ID NO: 19360 - DNA, 723 bp, synthetic construct
  source 1..723: mol_type = other DNA
cactcacaggacccacgcggtgctagcactctggttccacgggacctttgtgcgcctgttttatgtcccttccccaatttgtaacttagaagcaatttacaacactgatcagtagcaggcatagcgcaccagctatgtcttgatcaagcacttctgtttccccggaccgagtatcaatagactgttcacacggttgaaggagaaagcgtccgttatccggctaactacttcgagaaacccagtagcaccattgaaactacagagtgtttcgctccacacttcccccgtgtagatcaggtcgatgagtcactgcaatccccacgggcgaccgtggcagtggctgcgctggcggcctgcctatggggcaacccataggacgctctaatgtggacatggtgtgaagagtctattgagctagttagtagtcctccggcccctgaatgcggctaatcctaactgcggagcacatgccttcaacccagagggtagtgtgtcgtaatgggcaactctgcagcggaaccgactactttgggtgtccgtgtttccttttattctcacattggctgcttatggtgacaattacagaattgttaccatatagctattggattggccatccggtgtgcaatagagctattatatacccatttgttggctttgtaccactgaccttaaaatctttaaccactctcgagtgtatattaacccttaatacaatcaaac

SEQ ID NO: 19361 - DNA, 723 bp, synthetic construct
  source 1..723: mol_type = other DNA
cactcacaggacccacgcggtgttagcactctggttccacgggacctttgtgcgcctgttttatgtcccctccccaatttgcaacttagaagcaatttgcaacactgatcagtagcaggcatagcgcaccagctatgtcttgatcaagcacttctgtttccccggaccgagtatcaataaactgtccacacggttgaaggagaaagcgtccgttatccggctaactacttcgagaaacccagtagcaccattgaaactgcagagtgtttcgctccacacttcccccgtgtagatcaggtcgatgagtcactgcaatccccacgggcgaccgtggcagtggctgcgctggcggcctgcctatggggcaacccataggacgctctaatgtggacatggtgtgaagagtctattgagctagttagtagtcctccggcccctgaatgcggctaatcctaactgcggagcacatgccttcaatccagagggtagtgtgtcgtaatgggcaactctgcagcggaaccgactactttgggtgtccgtgtttccttttattctcacattggctgcttatggtgacaattactgaattgttaccatatagctattggattggccatccggtgtgcaatagagctattatatacctatttgttggctttgtaccactgaccttagaatctataaccactctcgagtgtatattaaccctcaatacaatcaagc

SEQ ID NO: 19362 - DNA, 723 bp, synthetic construct
  source 1..723: mol_type = other DNA
cactcacaggacccacgcggtgttagcactctggttccacgggacctttgtgcgcctgttttatgtcccctccccaatttgcaacttagaagcaatttgcaacactgatcagtagcaggcatagcgcaccagctatgtcttgatcaagcacttctgtttccccggaccgagtatcaatagactgttcacacggttgaaggagaaagcgtccgttatccggctaactacttcgagaaacccagtagcaccattgaaactgcagagtgtttcgctccacacttcccccgtgtagatcaggtcgatgagtcactgcaatccccacgggcgaccgtggcagtggctgcgctggcggcctgcctatggggcaacccataggacgctctaatgtggacatggtgtgaagagtctattgagctagttagtagtcctccggcccctgaatgcggctaatcctaactgcggagcacatgccttcaatccagagggtagtgtgtcgtaatgggcaactctgcagcggaaccgactactttgggtgtccgtgtttccttttattctcacattggctgcttatggtgacaattactgaattgttaccatatagctactggattggccatccggtgtgcaatagagctattatatacctatttgttggctttgtaccactgaccttaaaatctataaccactctcgagtgtatattaaccctcaatacaatcaaac

SEQ ID NO: 19363 - DNA, 723 bp, synthetic construct
  source 1..723: mol_type = other DNA
cactcacaggacccacgcggtgctagcactctggttccacgggacctttgtgcgcctgttttatgtcccctccccaatctgtaacttagaagcaatttgcaacactgatcagtagcaggcatagcgcaccagctatgtctcgatcaagcacttctgtttccccggaccgagtatcaatagactgttcacacggttgaaggagaaagcgtccgttatccggctaactacttcgagaaacccagtagcaccattgaaactatagagtgtttcgctccacacttcccccgtgtagatcaggtcgatgagtcactgcaatccccacgggcgaccgtggcagtggctgcgctggcggcctgcctatggggcaacccataggacgctctaatgtggacatggtgtgaagagtctattgagctagttagtagtcctccggcccctgaatgcggctaatcctaactgcggagcacatgccttcaatccagagggtagtgtgtcgtaatgggcaactctgcagcggaaccgactactttgggtgtccgtgtttccttttattctcacattggctgcttatggtgacaattactgaattgttaccatatagctattggattggccatccggtgtgcaatagagctattatatacctatttgttggttttgtaccactaaccttaaaatctataaccactctcgagtgtatattaacccttaatacaatcaaac

SEQ ID NO: 19364 - DNA, 723 bp, synthetic construct
  source 1..723: mol_type = other DNA
cactcacaggacccacgcggtgctagcactctggttccacgggacctttgtgcgcctgttttatgtcccctccccaatctgtaacttagaagcaatttgcaacactgatcagtagcaggcatagcgcaccagctatgtctcgatcaagcacttctgtttccccggaccgagtatcaatagactgtttacacggttgaaggagaaagcgtccgttatccggctaactacttcgagaaacccagtagcaccattgaaactatagagtgtttcgctccacacttcccccgtgtagatcaggtcgatgagtcactgcaatccccacgggcgaccgtggcagtggctgcgctggcggcctgcctatggggcaacccataggacgctctaatgtggacatggtgtgaagagtctattgagctagttagtagtcctccggcccctgaatgcggctaatcctaactgcggagcacatgccttcaatccagagggtagtgtgtcgtaatgggcaactctgcagcggaaccgactactttgggtgtccgtgtttccttttattctcacattggctgcttatggtgacaattactgaattgttaccatatagctattggattggccatccggtgtgcaatagagctattatatacttatttgttggttttgtaccactaaccttaaaatctataaccactctcgagtgtatattaacccttaatacaatcaaac

SEQ ID NO: 19365 - DNA, 723 bp, synthetic construct
  source 1..723: mol_type = other DNA
cactcacaggacccacgcggtgctagcactctggttccacgggacctttgtgcgcctgttttatgtcccctccccaatctgtaacttagaagcaatttgcaacactgatcagtagcaggcatagcgcaccagctatgtctcgatcaagcacttctgtttccccggaccgagtatcaatagactgttcgcacggttgaaggagaaagcgtccgttatccggctaactacttcgagaaacccagtagcaccattgaaactatagagtgtttcgctccacacttcccccgtgtagatcaggtcgatgagtcactgcaatccccacgggcgaccgtggcagtggctgcgctggcggcctgcctatggggcaacccataggacgctctaatgtggacatggtgtgaagagtctattgagctagttagtagtcctccggcccctgaatgcggctaatcctaactgcggagcacatgccttcaatccagagggtagtgtgtcgtaatgggcaactctgcagcggaaccgactactttgggtgtccgtgtttctttttattctcacattggctgcttatggtgacaattactgaattgttaccatatagctattggattggccatccggtgtgcaatagagctattatatacctatttgttggttttgtaccactaaccttaaaatctataaccactctcgagtgtatattaacccttaatacaatcaaac

SEQ ID NO: 19366 - DNA, 723 bp, synthetic construct
  source 1..723: mol_type = other DNA
cactcacaggacccacgcggtgctagcactctggttccacgggacctttgtgcgcctgttttatgtcccctccccaatctgtaacttagaagcaatttgcaacactgatcagtagcaggcatagcgcaccagctatgtctcgatcaagcacttctgtttccccggaccgagtatcaatagactgttcacacggttgaaggagaaagcgtccgttatccggctaactacttcgagaaacccagtagcaccattgaaactatagagtgtttcgctccacacttcccccgtgtagatcaggtcgatgagtcactgcaatccccacgggcgaccgtggcagtggctgcgctggcggcctgcctatggggcaacccataggacgctttaatgtggacatggtgtgaagagtctattgagctagttagtagtcctccggcccctgaatgcggctaatcctaactgcggagcacatgccttcaatccagagggtagtgtgtcgtaatgggcaactctgcagcggaaccgactactttgggtgtccgtgtttccttttattctcacattggctgcttatggtgacaattactgaattgttaccatatagctattggattggccatccggtgtgcaatagagctattatatacctatttgttggttttgtaccactaaccttaaaatctataaccactctcgagtgtatattaacccttaatacaatcaaac

SEQ ID NO: 19367 - DNA, 723 bp, synthetic construct
  source 1..723: mol_type = other DNA
cactcacaggacccacgcggtgctagcactctggttccacgggacctttgtgcgcctgttttatgtcccctccccaatctgtaacttagaagcaatttgcaacactgatcagcagcaggcatagcgcaccagctatgtctcgatcaagcacttctgtttccccggaccgagtatcaatagactgttcacacggttgaaggagaaagcgtccgttatccgactaactacttcgagaaacccagtagcaccattgaaactatagagtgtttcgctccacacttcccccgtgtagatcaggtcgatgagtcactgcaatccccacgggcgaccgtggcagtggctgcgctggcggcctgcctatggggcaacccataggacgctctaatgtggacatggtgtgaagagtctattgagctagttagtagtcctccggcccctgaatgcggctaatcctaactgtggagcacatgccttcaatccagagggtagtgtgtcgtaatgggcaactctgcagcggaaccgactactttgggtgtccgtgtttccttttgttctcacattggctgcttatggtgacaattactgaattgttaccatatagctattggattggccatccggtgtgcaatagagctattatatacctatttgttggttttgtaccactaaccttaaaaactataaccactctcgagtgtatattaacccttaatacaatcaaac

SEQ ID NO: 19368 - DNA, 723 bp, synthetic construct
  source 1..723: mol_type = other DNA
cactcacaggacccacgcggtgctagcactctggtttcacgggacctttgtgcgcctgttttatgtcccctccccaatctgtaacttagaagcaatttgcaacactgatcagtagcaggcatagcgcaccagctatgtctcgatcaagcacttctgtttccccggaccgagtatcaatagactgttcacacggttgaaggagaaagcgtccgttatccggctaactacttcgagaaacccagtagcaccattgaaactatagagtgtttcgctccacacttcccccgtgtagatcaggtcgatgagtcactgcaatccccacgggcgaccgtggcagtggctgcgctggcggcctgcctatggggcaacccataggacgctctaatgtggacatggtgtgaagagtctattgagctagttagtagtcctccggcccctgaatgcggctaatcctaactgcggagcacatgccttcaatccagagggtagtgtgtcgtaatgggcaactctgcagcggaaccgactactttgggtgtccgtgtttccttttattctcacattggctgcttatggtgacaattactgaattgttaccatatagctattggattggccatccggtgtgcaatagagctattatatacctatttgttggttttgtaccactaaccttaaaatctataaccactctcgagtgtatattaacccttaatacaatcaaac

SEQ ID NO: 19369 - DNA, 723 bp, synthetic construct
  source 1..723: mol_type = other DNA
cactcacaggacccacgcggtgctagcactctggtttcacgggacctttgtgcgcctgttttatgtcccctccccaatctgtaacttagaagcaatttgcaacactgatcagtagcaggcatagcgcaccagctatgtctcgatcaagcacttctgtttccccggaccgagtatcaatagactgttcacacggttgaaggagaaagcgtccgttatccggctaactacttcgagaaacccagtagcaccattgaaactatagagtgtttcgctccacacttcccccgtgtagatcaggtcgatgagtcactgcaatccccacgggcgaccgtggcagtggctgcgctggcggcctgcctatggggcaacccataggacgctctaatgtggacatggtgtgaagagtctattgagctagttagtagtcctccggcccctgaatgcggctaatcctaactgcggagcacatgccttcaatccagaaggtagtgtgtcgtaatgggcaactctgcagcggaaccgactactttgggtgtccgtgtttccttttattctcacattggctgcttatggtgacaattactgaattgttaccatatagctattggattggccatccggtgtgcaatagagctattatatacctatttgttggttttgtaccactaaccttaaaatctataaccactctcgagtgtatattaactcttaatacaatcaaac

SEQ ID NO: 19370 - DNA, 723 bp, synthetic construct
  source 1..723: mol_type = other DNA
cactcacaggacccacgcggtgctagcactctggttccacgggacctttgtgcgcctgttttatgtcccctccccaatttgtaacttagaagcaatttgcaacactgatcagtagcaggcatagcgcaccagctatgtcttgatcaagcacttctgtttccccggaccgagtatcaatagactgttctcacggttgaaggagaaagcgtccgttatccggctaactacttcgagaaacccagtaacaccattgaaactacagagtgtttcgctccacacttcccccgtgtagatcaggtcgatgagtcactgcaatccccacgggcgaccgtggcagtggctgcgctggcggcctgcctatggggcaacccataggacgctctaatgtggacatggtgtgaagagtctattgagctagttagtagtcctccggcccctgaatgcggctaatcctaactgcggagcacatgccttcaatccagagggtagtgtgtcgtaatgggcaactctgcagcggaaccgactactttgggtgtccgtgtttccttttattctcacattggctgcttatggtgacaattactgaattgttaccatatagctattggattggccatccggtgtgcaatagagctattatatacctatttgttggttttgtaccactaaccgtaaaatctataaccaccctcgagtgtatattaacccttaatacaatcaaac

SEQ ID NO: 19371 - DNA, 723 bp, synthetic construct
  source 1..723: mol_type = other DNA
cactcacaggacccacgcggtgttagcactctggttccacgggacctttgtgcgcctgttttatgccccctccccaaattgtgacttagaagtaacttgcaacactggtcagtagcaggcatagcgcaccagctatgtcttgatcaagcacttctgtttccccggaccgagtatcaatagactgttcacacggttgaaggagaaagcgtccgttatccggctaactacttcgagaaacccagtagcaccattgaaactacagagtgtttcgctccacacttcccccgtgtagatcaggtcgatgagtcactgcaatccccacgggcgaccgtggcagtggctgcgctggcggcctgcctatggggcaacccataggacgctctaatgtggacatggtgtgaagagtctattgagctagttagtaatcctccggcccctgaatgcggctaatcctaactgcggagcacatgccttcaatccagagggtagtgtgtcgtaatgggcaactctgcagcggaaccgactactttgggtgtccgtgtttccttttattctcacattggctgcttatggtgacaattactgaattgttaccatatagctattggattggccatccggtgtgcaatagagctattatatacctatttgttggctttgtaccactgactttaaagtctataaccactctcgattatatattaacccttaatacaatcaaac

SEQ ID NO: 19372 - DNA, 723 bp, synthetic construct
  source 1..723: mol_type = other DNA
cactcacaggacccacgcggtgctagcactctggttccacgggacctttgtgcgcctgttttatgtcccctccccaatttgtaacttagaagcaatttgcaacactgatcagtagcaggcatagcgcaccagctatgtcttgatcaagcacttctgtttccccggaccgagtatcaatagactgtacacacggttgaaggagaaagcgtccgttatccggctaactacttcgagaaacccagtagcaccattgaaactacagagtgtttcgctccacacttcccccgtgtagatcaggtcgatgagtcactgcaatccccacgggcgaccgtggcagtggctgcgctggcggcctgcctatggggcaacccataggacgctctaatgtggacatggtgtgaagagtctattgagctagttagtagtcctccggcccctgaatgcggctaatcctaactgcggagcacatgccttcaatccagagggtagtgtgtcgtaatgggcaactctgcagcggaaccgactactttgggtgtccgtgtttccttttattctcacattggctgcttatggtgacaattacagaattgttaccatatagctattggattggccatccggtgtgcaatagagctattatatacctatttgttggctttgtaccactgaccttaaaatctttaaccactctcgtgtgtatattaacccttaatacaatcaaac

SEQ ID NO: 19373 - DNA, 723 bp, synthetic construct
  source 1..723: mol_type = other DNA
cactcacaggacccacgcggtgctagcactctggttccacgggacctttgtgcgcctgttttatgtcccctccccaatttgtaacttagaagcaatttgcaacactgatcagtagcaggcatagcgcaccagctatgtcttgatcaagcacttctgtttccccggaccgagtatcaatagactgtacacacggttgaaggagaaagcgtccgttatccggctaactacttcgagaaacccagtagcaccattgaaactacagagtgtttcgctccacacttcccccgtgtagatcaggtcgatgagtcactgcaatccccacgggcgaccgtggcagtggctgcgctggcggcctgcctatggggcaacccataggacgctctaatgtggacatggtgtgaagagtctattgagctagttagtagtcctccggcccctgaatgcggctaatcctaactgcggagcacatgccttcaatccagagggtagtgtgtcgtaatgggcaactctgcagcggaaccgactactttgggtgtccgtgtttccttttattctcacattggctgcttatggtgacaattacagaattgttaccatatagctattggattggccatccggtgtgcaatagagctattatatacctatttgttggctttgtgccattgaccttaaaatctttaaccactctcgagtgtatattaacccttaatacaatcaaac

SEQ ID NO: 19374 - DNA, 723 bp, synthetic construct
  source 1..723: mol_type = other DNA
cactcacaggacccacgcggtgctagcactctggttccacgggacctttgtgcgcctgttttatgtcccctccccaatttgtaacttagaagcaatttgcaacactgatcagtagcaggcatagcgcaccagctatgtcttgatcaagcacttctgtttccccggaccgagtatcaatagactgtacacacggttgaaggagaaagcgtccgttatccggctaactacttcgagaaacccagtagcaccattgaaactacagagtgtttcgctccacacttcccccgtgtagatcaggtcgatgagtcactgcaatccccacgggcgaccgtggcagtggctgcgctggcggcctgcctatggggcaacccataggacgctctaatgtggacatggtgtgaagagtctattgagctagttagtagtcctccggcccctgaatgcggctaatcctaactgcggagcacatgccttcaatccagagggtagtgtgtcgtaatgggcaactctgcagcggaaccgactactttgggtgtccgtgtttccttttattctcacattggctgcttatggtgacaattacagaattgttaccatatagctattggattggccatccggtgtgcaatagagctattatatacctatttgttggctttgtgccattgaccttaaaatctttaaccactctcgagtatatattaacccttaatacaatcaaac

SEQ ID NO: 19375 - DNA, 723 bp, synthetic construct
  source 1..723: mol_type = other DNA
cactcacaggacccacgcggtgctagcactctggttccacgggacctttgtgcgcctgttttatgtcccctccccaatttgtaacttagaagcaatttgcaacactgatcagtagcaggcatagcgcaccagctatgtctcgatcaagcacttctgtttccccggaccgagtatcaatagactgtacacacggttgaaggagaaagcgtccgttacccggctaactacttcgagaaacccagtagcaccattgaaactacagagtgtttcgctccacacttcccccgtgtagatcaggtcgatgagtcactgcaatccccacgggcgaccgtggcagtggctgcgctggcggcctgcctatggggcaacccataggacgctctaatgtggacatggtgtgaagagtctattgagctagttagtagtcctccggcccctgaatgcggctaatcctaactgcggagcacatgccttcaatccagagggtagtgtgtcgtaatgggcaactctgcagcggaaccgactactttgggtgtccgtgtttccttttattctcacattggctgcttatggtgacaattacagaattgttaccatatagctattggattggccatccggtgtgcaatagagctattatatacctatttgttggctttgtgccactgaccttaaaatctttaaccactctcgagtgtatattaacccttaacacaatcaaac

SEQ ID NO: 19376 - DNA, 723 bp, synthetic construct
  source 1..723: mol_type = other DNA
cactcacaggacccacgcggtgctagcactctggttccacgggacctttgtgtgcctgttttatgtcccctccccaatttgtaacttagaagcaatttgcaacactgatcagtagcaggcatagcgcaccagctatgtcttgatcaagcacttctgtttccccggaccgagtatcaatagactgtacacacggttgaaggagaaagcgtccgttatccggctaactacttcgagaaacccagtagcaccattgaaactacagagtgtttcgctccacacttcccccgtgtagatcaggtcgatgagtcactgtaatccccacgggcgaccgtggcagtggctgcgctggcggcctgcctatggggcaacccataggacgctctaatgtggacatggtgtgaagagtctattgagctagttagtagtcctccggcccctgaatgcggctaatcctaactgcggagcacatgccttcaatccagagggtagtgtgtcgtaacgggcaactctgcagcggaaccgactactttgggtgtccgtgtttccttttattctcacattggctgcttatggtgacaattacagaattgttaccatatagctattggattggccatccggtgtgcaatagagctattatatacctatttgttggctttgtgccactgaccttaaaatctttaaccactctcgagtgtatattaacccttaatacaatcaaac

SEQ ID NO: 19377 - DNA, 723 bp, synthetic construct
  source 1..723: mol_type = other DNA
cactcacaggacccacgcggtgccagcactctggttccacgggacctttgtgcgcctgttttatgtcccctccccaatttgtaatttagaagcaatttgcaacactgatcagtagcaggcatagcgcaccagctatgtcttgatcaagcacttctgtttccccggaccgagtatcaatagactgtacacacggttgaaggagaaagcgtccgttatccggctaactacttcgagaaacccagtagcaccattgaaactacagagtgtttcgctccacacttcccccgtgtagatcaggtcgatgagtcactgcaatccccacgggcgaccgtggcagtggctgcgctggcggcctgcctatggggcaacccataggacgctctaatgtggacatggtgtgaagagtctattgagctagttagtagtcctccggcccctgaatgcggctaatcctaactgcggagcacatgccttcaatccagagggtagtgtgtcgtaatgggcaactctgcagcggaaccgactactttgggtgtccgtgtttccttttattctcacattggctgcttatggtgacaattacagaattgttaccatatagctattggattggccatccggtgtgcaatagagctgttatatacctatttgttggctttgtaccactaaccttaaaatctttaaccactctcgagtgtatattaacccttaatacagtcaaac

SEQ ID NO: 19378 - DNA, 723 bp, synthetic construct
  source 1..723: mol_type = other DNA
cactcacaggacccacgcggtgccagcactctggttccacgggacctttgtgcgcctgttttatgtcccctccccaatttgtaatttagaagcaatttgcaacactgatcagtagcaggcatagcgcaccagctatgtcttgatcaagcacttctgtttccccggaccgagtatcaatagactgtacacacggttgaaggagaaagcgtccgttatccggctaactacttcgagaaacccagtagcaccattgaaactacagagtgtttcgctccacacttcccccgtgtagatcaggtcgatgagtcactgcaatccccacgggcgaccgtggcagtggctgcgctggcggcctgcctatggggcaacccataggacgctctaatgtggacatggtgtgaagagtctattgagctagttagtagtcctccggcccctgaatgcggctaatcctaactgcggagcacatgccttcaatccagagggtagtgtgtcgtaatgggcaactctgcagcggaaccgactactttgggtgtccgtgtttccttttattctcacattggctgcttatggtgacaattacagaattgttaccatatagctattggattggccatccggtgtgcaatagagctattatatacctatttgttggctttgtaccactaacctcaaaatctttaaccactctcgagtgtatattaacccttaatacagtcaaac

SEQ ID NO: 19379 - DNA, 723 bp, synthetic construct
  source 1..723: mol_type = other DNA
cactcacaggacccacgcggtgccagcactctggttccacgggacctttgtgcgcctgttttatgtcccctccccaatttgtaatttagaagcaatttgcaacactgatcagtagcaggcatagcgcaccagctatgtcttgatcaagcacttctgtttccccggaccgagtatcaatagactgtacacacggttgaaggagaaagcgtccgttatccggctaactacttcgagaaacccagtagcaccattgaaactacagagtgtttcgctccacacttcccccgtgtagatcaggtcgatgagtcactgcaatccccacgggcgaccgtggcagtggctgcgctggcggcctgcctatggggcaacccataggacgctctaatgtggacatggtgtgaagagtctattgagctagttagtagtcctccggcccctgaatgcggctaatcctaactgcggagcacatgccttcaatccagagggtagtgtgtcgtaatgggcaactctgcagcggaaccgactactttgggtgtccgtgtttccttttattctcacattggctgcttatggtgacaattacagaattgttaccatatagctattggattggccatccggtgtgcaatagagctattatatacctatttgttggctttgtaccactaacctcagaatctttaaccactctcgagtgtatattaacccttaatacagtcaaac

SEQ ID NO: 19380 - DNA, 723 bp, synthetic construct
  source 1..723: mol_type = other DNA
cactcacaggacccacgcggtgctagcactctggttccacgggacctttgtgcgcctgttttatgtcccctccccaatttgtaacttagaagcaatttgcaacactgatcagtagcaggcatagcgcaccagctatgtcttgatcaagcacttctgtttccccggaccgagtatcaatagactgtacacacggttgaaggagaaagcgtccgttatccggctaactacttcgagaaacccagtaccaccattgaaactacagagcgtttcgctccacacttcccccgtgtagatcaggtcgatgagtcactgcaatccccacgggcgaccgtggcagtggctgcgttggcggcctgcctatggggcaacccataggacgctctaatgtggacatggtgcgaagagtctattgagctagttagtagtcctccggcccctgaatgcggctaatcccaactgcggagcacatgccttcaatccagagggtagtgtgtcgtaatgggcaactctgcagcggaaccgactactttgggtgtccgtgtttccttttattctcatattggctgcttatggtgacaattacagaattgttaccatatagctattggattggccatccggtgtgcaatagagctattatatacctatttgttggctttgtaccactgaccataaaatctttaaccactctcgagtgcatattaacccttaatacaatcaaac

SEQ ID NO: 19381 - DNA, 723 bp, synthetic construct
  source 1..723: mol_type = other DNA
cactcacaggacccacgcggtgctagcactctggttccacgggacctttgtgcgcctgttttatgtcccctccccaatttgtaacttagaagcaatttgcaacactgatcagtagcaggcatagcgcaccagctatgtcttgatcaagcacttctgtttccccggaccgagtatcaatagactgtacacacggttgaaggagaaagcgtccgttatccggctaactacttcgagaaacccagtaccaccattgaaactacagagcgtttcgctccacacttcccccgtgtagatcaggtcgatgagtcactgcaatccccacgggcgaccgtggcagtggctgcgctggcggcctgcctatggggcaacccataggacgctctaatgtggacatggtgcgaagagtctattgagctagttagtagtcctccggcccctgaatgcggctaatcctaactgcggagcacatgccttcaatccagagggtagtgtgtcgtaatgggcaactctgcagcggaaccgactactttgggtgtccgtgtttccttttattctcatattggctgcttatggtgacaattacagaattgttaccatatagctattggattggccatccggtgtgcaatagagctattatatacctatttgttggctttgtaccactgaccataaaatcttcaaccactctcgagtgcatattaacccttaatacaatcaaac

SEQ ID NO: 19382 - DNA, 723 bp, synthetic construct
  source 1..723: mol_type = other DNA
cactcacaggacccacgcggtgctagcactctggttccacgggacctttgtgcgcctgttttatgtcccctccccaatttgtaacttagaagcaatttgcaacactgatcagtagcaggcatagcgcaccagctatgtcttgatcaagcacttctgtttccccggaccgagtatcaatagactgtacacacggttgaaggagaaagcgtccgttatccggctaactacttcgagaaacccagtagcaccattgaaactgcagagtgtttcgctccacacttcccccgtgtagatcaggtcgatgagtcactgcaatccccacgggcgaccgtggcagtggctgcgctggcggcctgcctatggggcaacccataggacgctctaatgtggacatggtgtgaagagtctattgagctagttagtagtcctccggcccctgaatgcggctaatcctaactgcggagcacatgccttcaatccagagggtagtgtgtcgtaatgggcaactctgcagcggaaccgactactttgggtgtccgtgtttccttttattctcacattggctgcttatggtgacaattacagaattgttaccatatagctattggattggccatccggtgtgcaatagagctattatatacctatttgttggctttgtaccactaaccttaaaatctttaaccactctcgagtgtatattaacccttaatacaatcaaac

SEQ ID NO: 19383 - DNA, 723 bp, synthetic construct
  source 1..723: mol_type = other DNA
cactcacaggacccacgcggtgctagcactctggttccacgggacctttgtgcgcctgttttatgtcccctccccaatttgtaacttagaagcaatttgcaacactgatcagtagcaggcatagcgcaccagctatgtcttgatcaagcatttctgtttccccggaccgagtatcaatagactgtacacacggttgaaggagaaagcgtccgttatccggctaactacttcgagaaacccagtagcaccattgaaactgcagagtgtttcgctccacacttcccccgtgtagatcaggtcgatgagtcactgcaatccccacgggcgaccgtggcagtggctgcgctggcggcctgcctatggggcaacccataggacgctctaatgtggacatggtgtgaagagtctattgagctagttagtagtcctccggcccctgaatgcggctaatcctaactgcggagcacatgccttcaatccagagggtggtgtgtcgtaatgggcaactctgcagcggaaccgactactttgggtgtccgtgtttccttttattctcacattggctgcttatggtgacaattacagaattgttaccatatagctattggattggccatccggtgtgcaatagagctattatatacctatttgttggctttgtaccactaaccttaaaatctttaaccactctcgagtgtatattaacccttaatacaatcaaac

SEQ ID NO: 19384 - DNA, 723 bp, synthetic construct
  source 1..723: mol_type = other DNA
cactcacaggacccacgcggtgctagcactctggttccacgggacctttgtgcgcctgttttatgtcccctccccaatttgtaacttagaagcaatttgcaacactgatcagtagcaggcatagcgcaccagctatgtcttgatcaagcacttctgtttccccggaccgagtatcaatagactgttcacatggttgaaggagaaagcgtccgttatccggctaactacttcgagaaacccagtagcaccattgaaactacagagtgtttcgctccacacttcccccgtgtagatcaggtcgatgagtcactgcaatccccacgggcgaccgtggcagtggctgcgctggcggcctgcctatggggcaacccataggacgctttgatgtggacatggtgtgaagagtctattgagctagttagtagtcctccggcccctgaatgcggctaatcctaactgcggagcacatgccttcaacccagagggtagtgtgtcgtaatgggcaactctgcagcggaaccgactactttgggtgtccgtgtttccttttattctcacattggctgcttatggtgacaattacagaattgttaccatatagctattggattggccatccggtgtgcaatagagctattatatacctatttgttggctttgtaccactgaccttaaaatctttaaccactcttgagtgtatattaacccttaacacaatcaaac

SEQ ID NO: 19385 - DNA, 723 bp, synthetic construct
  source 1..723: mol_type = other DNA
cacccacaggacccacgcggtgctagcactctggttccacgggacctttgtgcgcctgttttatgtcccctccccaatttgtaacttagaagtaatatgcaacactgatcagtagcaggcatagcgcaccagctatgtcttgatcaagcacttctgtttccccggaccgagtatcaatagactgttcacatggttgaaggagaaagcgtccgttatccggctaactactccgagaaacccagtagcaccatcgaaactacagagtgtttcgctccacacttcccccgtgtagatcaggtcgatgagtcactgcaatccccacgggcgaccgtggcagtggctgcgctggcggcctgcctatggggcaacccataggacgctctgatgtggacatggtgtgaagagtctattgggctagttagtagtcctccggcccctgaatgcggctaatcctaactgcggagcacatgccttcaatccagagggtggtgtgtcgtaatgggcaactctgcagcggaaccgactactttgggtgtccgtgtttccttttattcttacattggctgcttatggtgacaattacagaattgttaccatatagctattggattggccatccggtgtgcaatagagctattatatacctatttgttggctttgtaccactaaccttaaaatctttaaccactcttgagtgtatattaacccttaatacaatcaaac

SEQ ID NO: 19386 - DNA, 723 bp, synthetic construct
  source 1..723: mol_type = other DNA
cactcacagggcccacgcggtgctagcactctggttctacggaacctttgtgcgcctgttttgcgtcccctccccaatttgtaacctagaagcaatttacaacactgatcaatagcaggcatggcgcaccagctatgtcttgatcaagcacctctgtttccccggaccgagtatcaatagactgttcacacggtcgaaggagaaagcgttcgttatccggctaactacttcgagaaacccagtagcgccattgaaactgcagagtgtttcgctccacacttcccccgtgtagatcaggtcgatgagtcactgcaatccccacgggcgaccgtggcagtggctgcgttggcggcctgcctatggggtaacccataggacgctctaatgtggacatggtgcgaagagtctattgagctagttagtagtcctccggcccctgaatgcggctaatcctaactgcggagcacatgccttcaatccagagggtagtgtgtcgtaatgggcaactctgcagcggaaccgactactttgggtgtccgtgtttccatttattctcacattggctgcttatggtgacaattatagaattgttaccatatagctattggattggccatccggtgtgcaatagagctattatatacctatttgttggctttgtaccactaacctcaaaatctgtaatcactctcaagtatatattgacccttaatacaattaagc

SEQ ID NO: 19387 - DNA, 723 bp, synthetic construct
  source 1..723: mol_type = other DNA
cactcacagggcccacgcggtgctagcactctggttctacggaacctttgtgcgcctgttttgcgtcccctccccaatttgtaacctagaagcaatttacaacactgatcaatagcaggcatggcgcaccagctatgtcttgatcaagcacctctgtttccccggaccgagtatcaatagactgttcacacggtcgaaggagaaagcgttcgttatccggctaactacttcgagaaacccagtagcgccattgaaactgcagagtgtttcgctccacacttcccccgtgtagatcaggtcgatgagtcactgcaatccccacgggcgaccgtggcagtggctgcgttggcggcctgcctatggggtaacccataggacgctctaatgtggacatggtgcgaagagtctattgagctagttagtagtcctccggcccctgaatgcggctaatcctaactgcggagcacatgccttcaatccagagggtagtgtgtcgtaatgggcaactctgcagcggaaccgactactttgggtgtccgtgtttccatttattctcacattggctgcttatggtgacaattatagaattgttaccatatagctattggattggccatccggtgtgcaatagagctattatatacctatttgttggctttgtaccactaacctcaaaatctataatcactctcaagtatatattgacccttaatacaattaagc

SEQ ID NO: 19388 - DNA, 723 bp, synthetic construct
  source 1..723: mol_type = other DNA
cactcacagggcccacgcggtgctagcactctggttctacggaacctttgtgcgcctgttttgcgtcccctccccaatttgtaacctagaagcaatttacaacgctgatcaatagcaggcatggcgcaccagctatgtcttgatcaagcacctctgtttccccggaccgagtatcaatagactgttcacacggtcgaaggagaaagcgttcgttatccggctaactacttcgagaaacccagtagcgccattgaaactgcagagtgtttcgctccacacttcccccgtgtagatcaggtcgatgagtcactgcaatccccacgggcgaccgtggcagtggctgcgttggcggcctgcctatggggtaacccataggacgctctaatgtggacatggtgcgaagagtctattgagctagttagtagtcctccggcccctgaatgcggctaatcctaactgcggagcacatgccttcaatccagagggtagtgtgtcgtaatgggcaactctgcagcggaaccgactactttgggtgtccgtgtttccatttattctcacattggctgcttatggtgacaattatagaattgttaccatatagctattggattggccatccggtgtgcaatagagctattatatacctatttgttggctttgtaccactaacctcaaaatctgtaatcactctcaagtatatattgacccttaatacaattaagc

SEQ ID NO: 19389 - DNA, 723 bp, synthetic construct
  source 1..723: mol_type = other DNA
cactcacagggcccacgcggtgctagcactctggttctacggaacctttgtgcgcctgttttgcgtcccctccccaatttgtaacctagaagcaatttacaacactgatcaatagcaggcatggcgcaccagctatgtcttgatcaagcacctctgtttccccggaccgagtatcaatagactgttcacacggtcgaaggagaaagcgttcgttatccggctaactacttcgagaaacccagtagcgccattgaaactgcagagtgtttcgctccacacttcccccgtgtagatcaggtcgatgagtcactgcaatccccacgggcgaccgtggcagtggctgcgttggcggcctgcctatggggtaacccataggacgctctaatgtggacatggtgcgaagagtctattgagctagttagtagtcctccggcccctgaatgcggctaatcctaactgcggagcacatgccttcaatccagagggtagtgtgtcgtaatgggcaactctgcagcggaaccgactactttgggtgtccgtgtttccatttattctcacattggctgcttatggtgacaattacagaattgttaccatatagctattggattggccatccggtgtgcaatagagctattatatacctatttgttggctttgtaccactaacctcaaaatctgtaatcactctcaagtatatattgacccttaatacaattaagc

SEQ ID NO: 19390 - DNA, 723 bp, synthetic construct
  source 1..723: mol_type = other DNA
cactcacagggcccacgcggtgctagcactctggttctacggaacctttgtgcgcctgttttacgccccctccccaatttgtaacttagaagcaatttacaacactgatcaatagcaggcatggcgcaccagctatgtcttgatcaagcacctctgtttccccggaccgagtatcaatagactgttcacacggtcgaaggagaaagcgttcgttatccggctaactacttcgagaaacccagtagcgccattgaaactgcagagtgtttcgctccacacttcccccgtgtagatcaggtcgatgagtcactgcaatccccacgggcgaccgtggcagtggctgcgttggcggcctgcctatggggtaacccataggacgctctaatgtggacatggtgcgaagagtctattgagctagttagtagtcctccggcccctgaatgcggctaatcctaactgcggagcacatgccttcaatccagagggtagtgtgtcgtaatgggcaactctgcagcggaaccgactactttgggtgtccgtgtttctttttattctcacattggctgcttatggtgacaattacagaattgttaccatatagctattggattggccatccggtgtgcaatagagctattatatacctatttgttggctttgtaccactaaccttaaaatctgtaatcactctccagtatatattgacccttaatacaattaaac

SEQ ID NO: 19391 - DNA, 732 bp, synthetic construct
  source 1..732: mol_type = other DNA
ggttgcacccactcacaggacccacgcggtgctagcactctggttccacgggacctttgtgcgcctgttttatgtcccctccccaatttgtaacttagaagcaatttgcaacactgatcagtagcaggcataacgcaccagttatgtcttgatcaagcacttctgtttccccggactgagtatcaatagactgttcacacggttgaaggagaaagcgtccgttatccggctaactacttcgagaaacccagtagcaccattgaaactacagagtgtttcgctccacacttcccccgtgtagatcaggtcgatgagtcactgcaatccccacgggcgaccgtggcagtggctgcgctggcggcctgcctatggggcaacccataggacgctctaatgtggacatggtgtgaagagtctattgagctagttagtagtcctccggcccctgaatgcggctaatcctaactgcggagcacatgccttcaatccagagggtagtgtgtcgtaatgggcaactctgcggcggaaccgactactttgggtgtccgtgtttccttttattctcatattggctgcttatggtgacaattacagaattgttaccatatagctattggattggccatccggtgtgcaatagagctattatatacctatttgttggttttgtaccactgaccttaaaatctttaaccactcttgagtgtatattaacccttaatacaatcaaac

SEQ ID NO: 19392 - DNA, 732 bp, synthetic construct
  source 1..732: mol_type = other DNA
ggttgcacccactcacaggacccacgcggtgttagcactctggttccacgggacctttgtgcgcctgttttatgtcccctccccaatttgtaacttagaagtaatttgcaacactggtcagtagcaggcatagcgcaccagctatgtcttgatcaagcacttctgtttccccggaccgagtatcaatagactgttcacacggttgaaggagaaagcgtccgttatccggctaactacttcgagaaacccagtagcaccattgaaactacagagtgtttcgctccacacttcccccgtgtagatcaggtcgatgagtcactgcaatccccacgggcgaccgtggcagtggctgcgctggcggcctgcctatggggcaacccataggacgctctgatgtggacatggtgtgaagagtctattgagctagttagtagtcctccggcccctgaatgcggctaatcctaactgcggagcacatgccttcaatccagagggtagtgtgtcgtaatgggcaactctgcagcggaaccgactactttgggtgtccgtgtttccttttattctcacattggctgcttatggtgacaattactgaattgttaccatatagctattggattggccatccggtgtgcaatagagctattatatacctatttgttgggtttgtaccactgaccttaaaatctataaccactctcgattgtatattaacccttaatacaatcaaac

SEQ ID NO: 19393 - DNA, 730 bp, synthetic construct
  source 1..730: mol_type = other DNA
gttgtacccacccacagggcccactgggcgctagcactctggtactacggtacctttgtgtgcctgttttatctccccagacccccgtaacgctacattagaagatagacaatacgaccaatagtcagtggggcaatccagcttcactttggtcaagcacctctgtttccccgggcttagtaccaataggctgcttgcgcggctgaaggggaacgcgcccgttatccggctaactacttcgagaaacctagtaccaccatggaagttgccgagtgtttcgctcagcacaaccccagtgtagatcaggtcgatgagccaccgtacaccccacgggcgaccgtgacggtggctgcgttggcggcctgcccatggtgcacaccatgggacgctctaatacagacatggtgcgaagagtctattgagctagttagtagtcctccggcccctgaatgcggctaatcctaactgcggagcatgcgctctcaacccagagagtagcgtgtcgtaacgggcaactctgcagcggaaccgactactttgggtgtccgtgtttccttttattcttatattggctgcttatggtgacaattgagagattgttaccatatagctattggattggccatccggtgtgtaatagagctattgtatattcttttgttggctttgtgccattagattatactgcaattgctactttaaggtacatcttgctcctcaacacagcaaa

SEQ ID NO: 19394 - DNA, 737 bp, synthetic construct
  source 1..737: mol_type = other DNA
ccacccacagggcccactgggcgctgcccactgggcgctagcactccgattctgcggaatctttgtgcgcctgttttataaccctcccccgaaacttgcaacttagaagttatgtacgttactgatcaacagcaggcgtggcataccagccatgtcttgatcaagcacttctgtaaccccggactgagtatcaatagactgctcacgtggtcgaaagagaaaacgttcgttatccggctaactacttcgagaaacctagtagcaccactgaaactgcggagtgtttcgctcagcacttcccccgtgtagatcaggtcgatgagtcactgcttaccccacgggtgaccgtggcagtggctgcgttggcggcctgcctatggggcaacccataggacgctctaaagtggacatggtgtgaagagtctattgagctagttagtagtcctccggcccctgaatgcggctaatcctaactgcggagcgcatgcccccaaaccagagggtggtgcgtcgtaacgggtaactctgcagcggaaccgactactttgggtgtccgtgtttcttttattctcataatggctgcttatggtgacaattgaagaattgttaccatatagctattggattggccatccggtgtgcaacagagctattatctacttgtttgttggatacattccattgacacctaaatccttcaatacattgcactatattctaacgctgaacgcaagaaa

SEQ ID NO: 19395 - DNA, 747 bp, synthetic construct
  source 1..747: mol_type = other DNA
ttaaaacagcctgtgggttgtacccactcacaggacccacgcggtgctagcactctggttccacggaacctttgtgcgcctgttttacgtcccttccccaatttgtaacttagaagcaatttacagcactgatcaatagcaggcatggcacaccagctatgtcttgatcaagcacctctgtttccccggaccgagtatcaatagactgttcacacggtcgaaggagaaagcgttcgttatccggctaactacttcgagaaacccagtagcgccactgaaactgcagagtgtttcgttccacacttcccccgtgtagatcaggtcgatgagtcactgcaatccccacgggcgaccgtggcagtggctgcgttggcggcctgcctatggggtaacccataggacgctctaatgtggacatggtgcgaagagtctattgagctagttagtagtcctccggcccctgaatgcggctaatcctaactgcggagcacatgccttcaatccagagggtagtgtgtcgtaatgggcaactctgcagcggaaccgactactttgggtgtccgtgtttccttttattctcacattggctgcttatggtgacaatttcagaattattaccatatagctattggattggccatccggtgtgcaatagagctattatatatctatttgttggctttgtaccactaaccttaagatctgtaatcactctcgagtatatattgacccttaatacaattaaac

SEQ ID NO: 19396 - DNA, 723 bp, synthetic construct
  source 1..723: mol_type = other DNA
cactcacaggacccacgcggtgctagcactctggttccacgggacctttgtgcgcctgttttatgtcccttccccaatttgtaacttagaagcaattcgcaacactgatcagtagcaggcatagcgcaccagctatgtcttgatcaagcacttctgtttccccggaccgagtatcaatagactgttcacacggttgaaggagaaagcgtccgttatccggctaactacttcgagaaacccagtagcaccattgaaactacagagtgtttcgctccacacttcccccgtgtagatcaggtcgatgagtcactgcaatccccacgggcgaccgtggcagtggctgcgctggcggcctgcctatggggcaacccataggacgctctaatgtggacatggtgtgaagagtctattgagctagttagtagtcctccggcccctgaatgcggctaatcctaactgcggagcacatgccttcaacccagagggtagtgtgtcgtaatgggcaactctgcagcggaaccgactactttgggtgaccgtgtttccttttattctcacattggctgcttatggtgacaattacagaattgttaccatatagctattggattggccatccggtgtgcaatagagctattatatacctatttgttggctttgtaccactgaccttaaaatctttgaccactcttgagtgtatattaacccttaatacaattaaac

SEQ ID NO: 19397 - DNA, 723 bp, synthetic construct
  source 1..723: mol_type = other DNA
cactcacaggacccacgcggtgctagcactctggttccacgggacctttgtgcgcctgttttatgtcccctccccaatctgtaacttagaagcaatttgcaacactgatcagtagcaggcatagcgcaccagctatgtctcgatcaagcacttctgtttccccggaccgagtatcaatagactgttcgcacggttgaaggagaaagcgtccgttatccggctaactacttcgagaaacccagtagcaccattgaaactatagagtgtttcgctccacacttcccccgtgtagatcaggtcgatgagtcactgcaatccccacgggcgaccgtggcagtggctgcgctggcggcctgcctatggggcaacccataggacgctctaatgtggacatggtgtgaagagtctattgagctagttagtagtcctccggcccctgaatgcggctaatcctaactgcggagcacatgccttcaatccagagggtagtgtgtcgtaatgggcaactctgcagcggaaccgactactttgggtgtccgtgtttccttttattctcacattggctgcttatggtgacaattactgaattgttaccatatagctattggattggccatccggtgtgcaatagagctattatatacctatttgttggttttgtaccactaaccttaaaatctataaccactctcgagtgtatattaacccttaatacaatcaaac

SEQ ID NO: 19398 - DNA, 723 bp, synthetic construct
  source 1..723: mol_type = other DNA
cactcacaggacccacgcggtgttagcactctggttccacgggacctttgtgcgcctgttttatgtcccctccccaatttgtaacttagaagcaatttgcaacactgatcagtagcaggcatagcgcaccagctatgtcttgatcaagcacttctgtttccccggaccgagtatcaatagactgtacacacggttgaaggagaaagcgtccgttatccggctaactacttcgagaaacccagtagcaccattgaaactacagagtgtttcgctccacacttcccccgtgtagatcaggtcgatgagtcactgcaatccccacgggcgaccgtggcagtggctgcgctggcggcctgcctatggggcaacccataggacgctctaatgtggacatggtgtgaagagtctattgagctagttagtagtcctccggcccctgaatgcggctaatcctaactgcggagcacatgccttcaatccagagggtagtgtgtcgtaatgggcaactctgcagcggaaccgactactttgggtgtccgtgtttccttttattctcacattggctgcttatggtgacaattacagaattgttaccatatagctattggattggccatccggtgtgcaatagagctattatatacctatttgttggctttgtaccactgaccttaaaatctttaaccactctcgagtgtatattaaccctcaatacaatcaaac

SEQ ID NO: 19399 - DNA, 723 bp, synthetic construct
  source 1..723: mol_type = other DNA
cactcacaggacccacgcggtgctagcactctggttccacgggacctttgtgcgcctgttttatgtcccctccccaatttgtaacttagaagcaatttgcaacactgatcagtagcaggcatagcgcaccagctatgtcttgatcaagcacttctgtttccccggaccgagtatcaatagactgtacacacggttgaaggagaaagcgtccgttatccggctaactacttcgagaaacccagtagcaccattgaaactacagagtgtttcgctccacacttcccccgtgtagatcaggtcgatgagtcactgcaatccccacgggcgaccgtggcagtggctgcgctggcggcctgcctatggggcaacccataggacgctctaatgtggacatggtgtgaagagtctattgagctagttagtagtcctccggcccctgaatgcggctaatcctaactgcggagcacatgccttcaatccagagggtagtgtgtcgtaatgggcaactctgcagcggaaccgactactttgggtgtccgtgtttccttttattctcacattggctgcttatggtgacaattacagaattgttaccatatagctattggattggccatccggtgtgcaatagagctattatatacctatttgttggctttgtgccactgaccttaaaatctttaaccactctcgagtgtatattaacccttaatacaatcaaac

SEQ ID NO: 19400 - DNA, 723 bp, synthetic construct
  source 1..723: mol_type = other DNA
cactcacaggacccacgcggtgctagcactctggttccacgggacctttgtgcgcctgttttatgtcccctccccaatttgtaacttagaagcaatttgcaacactgatcagtagcaggcatagcgcaccagctatgtcttgatcaagcacttctgtttccccggaccgagtatcaatagactgtacacacggttgaaggagaaagcgtccgttatccggctaactacttcgagaaacccagtaccaccattgaaactacagagcgtttcgctccacacttcccccgtgtagatcaggtcgatgagtcactgcaatccccacgggcgaccgtggcagtggctgcgctggcggcctgcctatggggcaacccataggacgctctaatgtggacatggtgcgaagagtctattgagctagttagtagtcctccggcccctgaatgcggctaatcccaactgcggagcacatgccttcaatccagagggtagtgtgtcgtaatgggcaactctgcagcggaaccgactactttgggtgtccgtgtttccttttattctcatattggctgcttatggtgacaattacagaattgttaccatatagctattggattggccatccggtgtgcaatagagctattatatacctatttgttggctttgtaccactgaccataaaatctttaaccactctcgagtgcatattaacccttaatacaatcaaac

SEQ ID NO: 19401 - DNA, 723 bp, synthetic construct
  source 1..723: mol_type = other DNA
cacccacaggacccacgcggtgctagcactctggttccaagggacctttgtgcgcctgttttatgtcccctccccaatttgtaacttagaagcaatttgcaacagtgatcagtagcaggcatagcgcaccagctatgtcttgatcaagcacttctgtttccccggaccgagtatcaatagactgttcacatggttgaaggagaaagcgtccgttatccggctaactacttcgagaaacccagtagcaccattgaaactacagagtgtttcgctccacacttcccccgtgtagatcaggtcgatgagtcactgcaatccccacgggcgaccgtggcagtggctgcactggcggcctgcctatggggcaacccataggacgctttgaagtggacatggtgcgaagagtctattgagctagttagtagtcctccggcccctgaatgcggctaatcctaactgcggagcacatgccttcaacccagagggtagtgtgtcgtaatgggcaactctgcagcggaaccgactactttgggtgtccgtgtttccttttattctcacattggctgcttatggtgacaattacagaattgttaccatatagctattggattggccatccggtgtgcaatagagctattatatacctatttgttggctttgtaccactgaccttaaaatctttaaccactcttgagtgtatattaacccttaatacaatcaaac

SEQ ID NO: 19402 - DNA, 723 bp, synthetic construct
  source 1..723: mol_type = other DNA
cactcacaggacccacgcggtgctagcactctggttccacgggacctttgtgcgcctgttttatgtcccctccccaatttgtaacttagaagcaatttgcaacactgatcagtagcaggcatagcacaccagctatgtcttgatcaagcacttctgtttccccggaccgagtatcaatagactgttcacatggttgaaggagaaagcgtccgttatccggctaactacttcgagaaacccagtagcaccattgaaactacagagtgtttcgctccacacttcccccgtgtagatcaggtcgatgagtcactgcaatccccacgggcgaccgtggcagtggctgcgctggcggcctgcctatggggtaacccataggacgctttgatgtggacatggtgtgaagagtctattgagctagttagtagtcctccggcccctgaatgcggctaatcctaactgcggagcacatgccttcaacccagagggtagtgtgtcgtaatgggcaactctgcagcggaaccgactactttgggtgtccgtgtttccttttattttcacattggctgcttatggtgacaattacagaattgttaccatatagctattggattggccatccggtgtgcaatagagctattatatacctatttgttggctttgtaccactgaccttaaaatctttaaccactcttgagtatatattaatccttaatacaatcaaac

SEQ ID NO: 19403 - DNA, 701 bp, synthetic construct
  source 1..701: mol_type = other DNA
ctagcactctggttctacgggacctttgtgcgcctgttttacgtcccctccccaatttgtaacttagaagcaatttgcaacactgatcagtagcaggcatagcgcaccagctatgtcttgatcaagcacttctgtttccccggaccgagtatcaatagactgttcacacggttgaaggagaaagcgtccgttatccggctaactacttcgagaaacccagtagcgccattgaaactgcagagtgtttcgctccacacttccctcgtgtagatcaggtcgatgagtcactgcaatccccacgggcgaccgtggcagtggctgcgctggcggcctgcctatggggcaacccataggacgctctaatgtggacatggtgtgaagagtctattgagctagttagtagtcctccggcccctgaatgcggctaatcctaactgcggagcacatgccttcaatccagagggtagtgtgtcgtaatgggcaactctgcagcggaaccgactactttgggtgtccgtgtttccttttattctcacattggctgcttatggtgacaattacggaattgttaccatatagctattggattggccatccggtgtgcaatagagctattatatacctatttgttggctttgtaccactgaccttaaaatctataaccactctcgagtgtatattaactctcaatacaatcaaac

SEQ ID NO: 19404 - DNA, 692 bp, synthetic construct
  source 1..692: mol_type = other DNA
cactgattctacggaaactttgtgcgcctgttttatatccctccccaaacgagtaacttagaagtttaacatattcatgaccaatagcaggcgtgacacaccagtcacgtcttggtcaagtacttctgtctccccggactgagtatcaataagctgctcacgcggctgaaagagaaaacgttcgttacccggctaactacttcgagaaacctagtaacaccatggacgttgcagagtgtttcgctcagcacttcccccgtgtagatcaggtcgatgagtcactgcaaaccccacgggtgaccgtggcagtggctgcgttggcggcctgcccatggggtaacccatgggacgctctaatacagacatggtgcgaagagtctattgagctagttagtagtcctccggcccctgaatgcggctaatcctaactgcggagcacacaccttcaatccagggggcagtgtgtcgtaacgggcaactccgcagcggaaccgactactttgggtgtccgtgtttccttttatcttattatggctgcttatggtgacaattgaggaattgttaccatatagctattggattggccatccggtgtctaacagagcaattgtattcctatttgttggatttgtccctctgtcacacacatctttcaataccttatactacattataaagttaaatataagaag

SEQ ID NO: 19405 - DNA, 731 bp, synthetic construct
  source 1..731: mol_type = other DNA
gtgggttgcacccacccacagggcccactgggcgctagcactctggtaccacggtacccttgtgcgcctgttttatcaccccaacccaacctgaaacttagaagcaatgcacaatcgaccaatagtaggtgcggcgcaccagccgcatcctggtcaagcactcctgtttccccgggttgagtatcaataagctgtccacacggctgaaagagaaaacacccgttatccggccaactacttcgagaaacctagtaccactatgaacgttgcaaggcgtttcgctcagcacttcccccgtgtagatcaggtcgatgagtcaccgcattccccacgggcgaccgtggcggtggctgcgttggcggcctgcctatgggttaacccataggacgccttaatactgacatggtgcgaagagtctattgagctagttggtagtcctccggcccctgaatgcggctaatcctaactgcggagcacatactcacaacccagtgagcggtgtgtcgtaatgggtaactctgcagcggaaccgactactttgggtgtccgtgtttccttttattcttatactggctgcttatggtgacaatcatagaattgttaccatatagctattggattggccatccgatctctaacagagctattatttacctgtttgttggatttactccgttgacatacaaatccctaaacactttgtgctttattttgaacttgaacgcacgaaa

SEQ ID NO: 19406 - DNA, 723 bp, synthetic construct
  source 1..723: mol_type = other DNA
cactcacaggacccacgcggtgctagcactctggttccacgggacctttgtgcgcctgttttatgtcccctccccaatttgtaacttagaagcaatttgcaacactgatcagtagcaggcatagcgcaccagctatgtcttgatcaagcacttctgtttccccggaccgagtatcaatagactgttcacacggttgaaggagaaagcgtccgttatccggctaactacttcgaaaaacccagtagcaccattgaaactacagagtgtttcgctccacacttcccccgtgtagatcaggtcgatgagtcactgcaatccccacgggcgaccgtggcagtggctgcgctggcggcctgcctatggggcaacccataggacgctttgatgtggacatggtgtgaagagtctattgagctagttagtagtcctccggcccctgaatgcggccaatcctaactgcggagcacatgccttcaacccagagggtagtgtgtcgtaatgggcaactctgcagcggaaccgactactttgggtgtccgtgtttccttttattctcacattggctgcttatggtgacaattacagaattgttaccatatagctattggattggccatccggtgtgcaatagagctattatatacctatttgttggctttgtaccactgaccttaaaatctttaaccactcttgagtgtatattaacccttaacacaatcaaac

SEQ ID NO: 19407 - DNA, 745 bp, synthetic construct
  source 1..745: mol_type = other DNA
ttaaaacagcctgtgggttgttcccacccacagggcccactgggcgctagcacactgattctgcgggatctttgtgcgcctgttttataacccctcccctaagcagtaacttagaagcttcacactatcacgaccaacagtgggcgtggcgcaccagtcacgtcttggtcaagcacttctgtttccccggactgagtatcaatagactgctcacgcggttgaaggagaaaacgttcgttatccggctaactacttcgagaaacctattagcaccgtgaaagttgcggagagtttcgctcagcacttcccccgtgtagatcaggtcgatgagtcactgtgaaccccacgggtgaccgtgacagtggctgcgttggcggcctgcccatggggtaacccatgggacgctctaatacagacacggtgtgaagagtctattgagctagttagtagtcctccggcccctgaatgcggctaatcctaactgcggagcgcgtaccctcaatccagggggcagcgcgtcgtaatgggtaactctgcagcggaaccgactactttgggtgtccgtgtttccttttattccttattggctgcttatggtgacaattgaaaagttgttaccatatagctattggattggccatccggtaaccaacagagctattgcttacctgtttattggatacgtccccctcaatcccaaggccattcaaactcttgattacatattacttctcaactgtaagaa

SEQ ID NO: 19408 - DNA, 747 bp, synthetic construct
  source 1..747: mol_type = other DNA
ttaaaacagcctgtgggttgtacccactcacaggacccacgcggtgctagcactctggttccatggaacctttgtgcgcctgttttacgtcccctccccaatttgtaacttagaagcaatttacagcactgatcaatagcaggcatggcgcaccagctatgtcttgatcaagcacctctgtttccccggaccgagtatcaatagactgttcacacggtcgaaggagaaagcgttcgttatccggctaactacttcgagaaacccagtagcgccattgaaactgcagagtgtttcgctccacacttcccccgtgtagatcaggtcgatgagtcactgcaatccccacgggcgaccgtggcagtggctgcgttggcggcctgcctatggggtaacccataggacgctctaatgtggacatggtgcgaagagtctattgagctagttagtagtcctccggcccctgaatgcggctaatcctaactgcggagcacatgccttcaatccagagggtagtgtgtcgtaatgggcaactctgcagcggaaccgactactttgggtgtccgtgtttccttttattctcacattggctgcttatggtgacaattacagaattgttaccatatagctattggattggccatccggtgtgcaatagagctattatatacctatttgttggctttgtaccactaaccttaaaatctgtaatcactctcgagtatatattgacccttaacacaattaaac

SEQ ID NO: 19409 - DNA, 733 bp, synthetic construct
  source 1..733: mol_type = other DNA
ggttgcacccactcacaggacccacgcggtgctagcactctggttccacgggacctttgtgcgcctgttttatgtcccctccccaatttgtaacttagaagcaatttgcaacactgatcagtagcaggcatagcgcaccagctatgtcttgatcaagcacttctgtttccccggaccgagtatcaatagactgttcacatggttgaaggagaaagcgtccgttatccggctaactacttcgagaaacccagtagcaccattgaaactacagagtgtttcgctccacacttccccccgtgtagatcaggtcgatgagtcactgcaatccccacgggcgaccgtggcagtggctgcgctggcggcctgcctatggggcaacccataggacgctttgatgtggacatggtgtgaagagtctattgagctagttagtagtcctccggcccctgaatgcggctaatcctaactgcggagcacatgccttcaacccagagggtagtgtgtcgtaatgggcaactctgcagcggaaccgactactttgggtgtccgtgtttccttttattctcacattggctgcttatggtgacaattacagaattgttaccatatagctattggattggccatccggtgtgcaatagagctattatatacctatttgttggctttgtaccactgaccttaaaatctttaaccactcttgagtgtatattaacccttaacacaatcaaac

SEQ ID NO: 19410 - DNA, 729 bp, synthetic construct
  source 1..729: mol_type = other DNA
tgcacccactcacaggacccacgcggtgctagcactctggttccacgggacctttgtgcgcctgttttatgccccctccccaatttgtaacttagaagcaatttgcaacactgatcagtagcaggcatagcgcaccagctatgtcttgatcaagcacttctgtttccccggaccgagtatcaatagactgttcacacggttgaaggagaaagcgtccgttatccggctaactacttcgagaaacccagtagcaccattgaaactacagagtgtttcgctccacacttcccccgtgtagatcaggtcgatgagtcactgcaatccccacgggcgaccgtggcagtggctgcgctggcggcctgcctatggggcaacccataggacgctttgatgtggacatggtgtgaagagtctattgagctagttagtagtcctccggcccctgaatgcggctaatcctaactgcggagcacatgccttcaacccagagggtagtgtgtcgtaatgggcaactctgcagcggaaccgactactttgggtgtccgtgtttccttttattctcacattggctgcttatggtgacaattacagaattgttaccatatagctattggattggccatccggtgtgcaatagagctattatatacctatttgttggctttgtaccactgaccttaaaatctttaaccactcttgagtgtatattaacccttaatacaatcaaac

SEQ ID NO: 19411 - DNA, 736 bp, synthetic construct
  source 1..736: mol_type = other DNA
tgtgggttgcacccactcacaggacccacgcggtgctagcactctggttccacgggacctttgtgcgcctgttttatgtcccctccccaatttgtaacttagaagcaatttgcaacactgatcagtagcaggcatagcgcaccagctatgtcttgatcaagcacttctgtttccccggaccgagtatcaatagactgttcacgcggttgaaggagaaagcgtccgttatccggctaactacttcgagaaacccagtagcaccattgaaactacagagtgtttcgctccacacttcccccgtgtagatcaggtcgatgagtcactgcaatccccacgggcgaccgtggcagtggctgcgctggcggcctgcctatggggcaacccataggacgctctaatgtggacatggtgtgaagagtctattgagctagttagtagtcctccggcccctgaatgcggctaatcctaactgcggagcacatgccttcaacccagagggtggtgtgtcgtaatgggcaactctgcagcggaaccgactactttgggtgtccgtgtttccttttattcttacattggctgcttatggtgacaattacagaattgttaccatatagctattggattggccatccggtgtgcaatagagctattatatacctatttgttggctttgtaccactgaccttaaaatctttaaccactcttgagtgtatattaacccttaatacaatcaaac

SEQ ID NO: 19412 - DNA, 742 bp, synthetic construct
  source 1..742: mol_type = other DNA
ttaaaacagcctgtgggttgcacccactcacagggcctactgggcgcaagcactctggtatcttggtacctttgtgcgcctgttttatacccctccccttttgtaacttagaagcagcaaaccacgatcaatagcaggcataacgttccagttatgtctcgatcaagcacttctgtttccccggactgagtatcaatagactgctcgcgcggttgaaggagaaaacgttcgttatccggctagctacttcggaaaacctagtaacaccatgaaagttgcggagagcttcgttcagcactcccccagtgtagatcaggtcgatgagtcaccgcattccccacgggcgaccgtggcggtggctgcgttggcggcctgcccatggggtaacccatggggcgctctaatacggacatggtgtgaagagtctactgagctagttagtagtcctccggcccctgaatgcggctaatcctaactgcggagcacacgcccacaagccagcgggtagtgtgtcgtaacgggtaactctgcagcggaaccgactactttgggtgtccgtgtttccttttatctttatattggctgcttatggtgacaatcaaagaattgttaccatatagctattggattggccatccggtgtgcaacagagcaatcatttacctatttattggttttgtaccattaactttgaattctgtgaccactctaaattatatcttgaccctcaacacagttaaac

SEQ ID NO: 19413 - DNA, 747 bp, synthetic construct
  source 1..747: mol_type = other DNA
ttaaaacagcctgtgggttgtacccactcacaggacccacgcggtgctagcactctggttccacggaacctttgtgcgcctgttttacgtcccctccccaatttgtaacttagaagcaatttacagcactgatcaatagcaggcatggcgcaccagctatgtcttgatcaagcacctctgtttccccggaccgagtatcaatagactgttcacacggtcgaaggagaaagcgttcgttatccggctaactacttcgagaaacccagtagcgccattgaaactgcagagtgtttcgctccacacttcccccgtgtagatcaggtcgatgagtcactgcaatccccacgggcgaccgtggcagtggctgcgttggcggcctgcctatggggtaacccataggacgctctaatgtggacatggtgcgaagagtctattgagctagttagtagtcctccggcccctgaatgcggctaatcctaactgcggagcacatgccttcaatccagagggtagtgtgtcgtaatgggcaactctgcagcggaaccgactactttgggtgtccgtgtttccttttattttcacattggctgcttatggtgacaattacagaattgttaccatatagctattggattggccatccggtgtgcaatagagctattatatacctatttgttggctttgtaccactaaccttaaaatctgtaatcactctcgagtatatattgacccttaatacaattaaac

SEQ ID NO: 19414 - DNA, 731 bp, synthetic construct
  source 1..731: mol_type = other DNA
gttgcacccactcacagggcccacgcggtgctagcactctggttctacggaacctttgtgcgcctgttttgcgtcccctccccaatttgtaacctagaagcaatttacaacactgatcaatagcaggcatggcgcaccagctatgtcttgatcaagcacctctgtttccccggaccgagtatcaatagactgttcacacggtcgaaggagaaagcgttcgttatccggctaactacttcgagaaacccagtagcgccattgaaactgcagagtgtttcgctccacacttcccccgtgtagatcaggtcgatgagtcactgcaatccccacgggcgaccgtggcagtggctgcgttggcggcctgcctatggggtaacccataggacgctctaatgtggacatggtgcgaagagtctattgagctagttagtagtcctccggcccctgaatgcggctaatcctaactgcggagcacatgccttcaatccagagggtagtgtgtcgtaatgggcaactctgcagcggaaccgactactttgggtgtccgtgtttccatttattctcacattggctgcttatggtgacaattatagaattgttaccatatagctattggattggccatccggtgtgcaatagagctattatatacctatttgttggctttgtaccactaacctcaaaatctgtaatcactctcaagtatatattgacccttaatacaattaagc

SEQ ID NO: 19415 - DNA, 728 bp, synthetic construct
  source 1..728: mol_type = other DNA
gcacccactcacaggacccacgcggtgttagcactctggttccacgggacctttgtgcgcctgttttatatcccctccccaatttgtaacttagaagtaatttgcaacactggtcagtagcaggcatagcgcaccagctatgtcttgatcaagcacttctgtttccccggaccgagtatcaatagactgttcacacggttgaaggagaaagcgtccgttatccggctaactacttcgagaaacccagtagcaccattgaaactacagagtgtttcgctccacacttcccccgtgtagatcaggtcgatgagtcactgcaatccccacgggcgaccgtggcagtggctgcgctggcggcctgcctatggggcaacccataggacgctctaatgtggacatggtgtgaagagtctattgagctagttagtagtcctccggcccctgaatgcggctaatcctaactgcggagcacatgccttcaatccagagggtagtgtgtcgtaatgggcaactctgcagcggaaccgactactttgggtgtccgtgtttccttttattctcacattggctgcttatggtgacaattactgaattgttaccatatagctattggattggccatccggtgtgcaatagagctattatatacctatttgttggctttgtaccactgaccttaaaatctataaccactctcgattgtatattaacccttaatacaatcaaac

SEQ ID NO: 19416 - DNA, 728 bp, synthetic construct
  source 1..728: mol_type = other DNA
gcacccactcacaggacccacgcggtgctagcactctggttccacgggacctttgtgcgcctgttttatgtcccctccccaatttgtaacttagaagcaatttgcaacactgatcagtagcaggcatagcgcaccagctatgtcttgatcaagcacttctgtttccccggaccgagtatcaatagactgttcacatggttgaaggagaaagcgtccgttatccggctaactacttcgagaaacccagtagcaccattgaaactacagagtgtttcgctccacacttcccccgtgtagatcaggtcgatgagtcactgcaatccccacgggcgaccgtggcagtggctgcgctggcggcctgcctatggggcaacccataggacgctttgatgtggacatggtgtgaagagtctattgagctagttagtagtcctccggcccctgaatgcggctaatcctaactgcggagcacatgccttcaacccagagggtagtgtgtcgtaatgggcaactctgcagcggaaccgactactttgggtgtccgtgtttccttttattctcacattggctgcttatggtgacaattacagaattgttaccatatagctattggattggccatccggtgtgcaatagagctattatatacctatttgttggctttgtaccactgaccttaaaatctttaaccactcttgagtgtatattaacccttaacacaatcaaac

SEQ ID NO: 19417 - DNA, 708 bp, synthetic construct
  source 1..708: mol_type = other DNA
cactgggcgctagcacactgattctgcgggatctttgtgcgcctgttttataatccctcccccaagcagtaacttagaagcttcatactaccacgaccaatagtaggcgtggcgcaccagtcacgtctcggtcaagcacttctgtttccccggactgagtatcaatagactgctcacgcggttgaaggagaaagcgttcgttatccggctaactacttcgagaaacttagtagcaccgtgaaagttgcggagcgtttcgctcagcacttcccccgtgtagatcaggtcgatgagtcactgtgaaccccacgggcgaccgtgacagtggctgcgttggcggcctgcccatggggtaacccatgggacgctctaatacagacacggtgtgaagagtctattgagctagttagtagtcctccggcccctgaatgcggctaatcctaactgcggagcgcgcaccctcaatccagtgggcagcgcgtcgtaatgggtaactctgcagcggaaccgactactttgggtgtccgtgtttcctgttattccttattggctgcttatggtgacaattgaaaagttgttaccatatagctattggattggccatccggtgaccaacagagctattgtttatttgtttattgggtacgtccctctcaatctcaaagtcattcaaactcttgattatatactactcctcaattgtaagaa

SEQ ID NO: 19418 - DNA, 728 bp, synthetic construct
  source 1..728: mol_type = other DNA
gcacccactcacaggacccacgcggtgctagcactctggttccacgggacctttgtgcgcctgttttatatcccctccccaatttgtaacttagaagcaatttgcaacaccgatcagtagcaggcatagcgcaccagctatgtcttgatcaagcacttctgtttccccggaccgagtatcaatagactgttcacacggttgaaggagaaagcgtccgttatccggctaactacttcgagaaacccagtagcaccattgaaactacagagtgtttcgctccacacttcccccgtgtagatcaggtcgatgagtcactgcaatccccacgggcgaccgtggcagtggctgcgctggcggcctgcctatggggcaacccataggacgctctaatgtggacatggtgtgaagagtctattgagctagttagtagtcctccggcccctgaatgcggctaatcctaactgcggagcacatgccttcaacccagagggtagtgtgtcgtaatgggcaactctgcagcggaaccgactactttgggtgtccgtgtttccttttattctcacattggctgcttatggtgacaattacagaattgttaccatatagctattggattggccatccggtgtgcaatagagctattatatacctatttgttggctttgtaccactgaccttaaaatctttaaccactcttgagtgtatattaacccttaatacaatcaaac

SEQ ID NO: 19419 - DNA, 723 bp, synthetic construct
  source 1..723: mol_type = other DNA
cactcacaggacccacgcggtgttagcactctggttccacgggacctttgtgcgcctgttttatgtcccctccccaatttgtaacttagaagtaatttgcaacactggtcagtagcaggcatagcgcaccagctatgtcttgatcaagcacttctgtttccccggaccgagtatcaatagactgttcacacggttgaaggagaaagcgtccgttatccggctaactacttcgagaaacccagtagcaccattgaaactacagagtgtttcgctccacacttcccccgtgtagatcaggtcgatgagtcactgcaatccccacgggcgaccgtggcagtggctgcgctggcggcctgcctatggggcaacccataggacgctctgatgtggacatggtgtgaagagtctattgagctagttagtagtcctccggcccctgaatgcggctaatcctaactgcggagcacatgccttcaatccagagggtagtgtgtcgtaatgggcaactctgcagcggaaccgactactttgggtgtccgtgtttccttttattctcacattggctgcttatggtgacaattactgaattgttaccatatagctattggattggccatccggtgtgcaatagagctattatatacctatttgttgggtttgtaccactgaccttaaaatctataaccactctcgattgtatattaacccttaatacaatcaaac

SEQ ID NO: 19420 - DNA, 723 bp, synthetic construct
  source 1..723: mol_type = other DNA
cactcacaggacccacgcggtgctagcactctggttccacgggacctttgtgcgcctgttttatgtcccctccccaatttgtaacttagaagcaatttgcaacactgatcagtagcaggcataacgcaccagttatgtcttgatcaagcacttctgtttccccggactgagtatcaatagactgttcacacggttgaaggagaaagcgtccgttatccggctaactacttcgagaaacccagtagcaccattgaaactacagagtgtttcgctccacacttcccccgtgtagatcaggtcgatgagtcactgcaatccccacgggcgaccgtggcagtggctgcgctggcggcctgcctatggggcaacccataggacgctctaatgtggacatggtgtgaagagtctattgagctagttagtagtcctccggcccctgaatgcggctaatcctaactgcggagcacatgccttcaatccagagggtagtgtgtcgtaatgggcaactctgcggcggaaccgactactttgggtgtccgtgtttccttttattctcatattggctgcttatggtgacaattacagaattgttaccatatagctattggattggccatccggtgtgcaatagagctattatatacctatttgttggttttgtaccactgaccttaaaatctttaaccactcttgagtgtatattaacccttaatacaatcaaac

SEQ ID NO: 19421 - DNA, 723 bp, synthetic construct
  source 1..723: mol_type = other DNA
cactcacaggacccacgcggtgctagcactctggttccacgggacctttgtgcgcctgttttatgtcccctccccaatttgtaacttagaagcaatttgcaacactgatcagtagcaggcatagcgcaccagctatgtcttgatcaagcacttctgtttccccggaccgagtatcaatagactgttcacacggttgaaggagaaagcgtccgttatccggctaactacttcgagaaacccagtagcgccattgaaactacagagtgtttcgctccacacttcccccgtgtagatcaggtcgatgagtcactgcaatccccacgggcgaccgtggcagtggctgcgctggcggcctgcctatggggcaacccataggacgctctaatgtggacatggtgtgaagagtctattgagctagttagtagtcctccggcccctgaatgcggctaatcctaactgcggagcacatgccttcaacccagagggtagtgtgtcgtaatgggcaactctgcagcggaaccgactactttgggtgtccgtgtttccttttattctcacattggctgcttatggtgacaattacagaattgttaccatatagctattggattggccatccggtgtgcaatagagctattatatacctatttgttggctttgtaccactgaccttaagatctttaaccactcttaagtgtatattaacccttaatacaatcaagc

SEQ ID NO: 19422 - DNA, 723 bp, synthetic construct
  source 1..723: mol_type = other DNA
cactcacaggacccacgcggtgctagcactctggttccacgggacctttgtgcgcctgttttatgccccctccccaatttgtaacttagaagcaatttgcaacactgatcagtagcaggcatagcgcaccagctatgtcttgatcaagcacttctgtttccccggaccgagtatcaatagactgttcacacggttgaaggagaaagcgtccgttatccggctaactacttcgagaaacccagtagcaccattgaaactacagagtgtttcgctccacacttcccccgtgtagatcaggtcgatgagtcactgcaatccccacgggcgaccgtggcagtggctgcgctggcggcctgcctatggggcaacccataggacgctttgatgtggacatggtgtgaagagtctattgagctagttagtagtcctccggcccctgaatgcggctaatcctaactgcggagcacatgccttcaacccagagggtagtgtgtcgtaatgggcaactctgcagcggaaccgactactttgggtgtccgtgtttccttttattctcacattggctgcttatggtgacaattacagaattgttaccatatagctattggattggccatccggtgtgcaatagagctattatatacctatttgttggctttgtaccactgaccttaaaatctttaaccactcttgagtgtatattaacccttaatacaatcaaac

SEQ ID NO: 19423 - DNA, 727 bp, synthetic construct
  source 1..727: mol_type = other DNA
cacccactcacaggacccacgcggtgctagcactctggttccacgggacctttgtgcgcctgttttatgtcccctccccaatttgtaacttagaagcaatttgcaacactgatcagtagcaggcatagcgcaccagctatgtcttgatcaagcacttctgtttccccggaccgagtatcaatagactgttcacacggttgaaggagaaagcgtccgttatccggctaactacttcgagaaacccagtagcaccattgaaactacagagtgtttcgctccacacttcccccgtgtagatcaggtcgatgagtcactgcaatccccacgggcgaccgtggcagtggctgcgctggcggcctgcctatggggcaacccataggacgctctaatgtggacatggtgtgaagagtctattgagctagttagtagtcctccggcccctgaatgcggctaatcctaactgcggagcacatgccttcaatccagagggtagtgtgtcgtaatgggcaactctgcagcggaaccgactactttgggtgtccgtgtttccttttattctcacattggctgcttatggtgacaattactgaattgttaccatatagctattggattggccatccggtgtgcaatagagctattatatacctatttgttggctttgtaccactgaccttaaaatctataaccactctcgagtgtatattaaccctcaatacaatcaaac

SEQ ID NO: 19424 - DNA, 724 bp, synthetic construct
  source 1..724: mol_type = other DNA
ccacccacagggcccactgggcgctagcactctgattctacggaatctttgtgcgcctgttttataaccctcccccccatttcgcaacttagaagcaacgcgcatcactgatcaacagcaggcatggcgctccagccatgtcttgatcaagcactcctgtttccccggactgagtatcaatagactgcttacgcggttgaaggagaaaacgttcgttacccggctaactacttcgagaaacttagtaacaccatcgaagctgcagggtgtttcgctcagcacttcccccgtgtagatcaggccgatgagtcaccgcaatccccacgggcgaccgtggcggtggctgcgttggcggcctgcctatggggcaacccataggacgccctaaagtggacatggtgcgaagagtctattgagctagttagtagtcctccggcccctgaatgcggctaatcctaactgcggagcacataccctcaagccagagggtagtgtgtcgtaacgggtaactctgcagcggaaccgactactttgggtgtccgtgtttccttttattcttactgtggctgcttatggtgacaattcaagaattgttaccatatagctattggattggccatccggtgtctaacagagctattgtgtacttatttgttgggtacgttccattatcttacacatcccttaacacattacattttattgtgaagctaaatacaagaag

SEQ ID NO: 19425 - DNA, 724 bp, synthetic construct
  source 1..724: mol_type = other DNA
ccacccacagggcccactgggcgctagcactctgattccacggaatctttgtgcgcctgttttataaccctcccccccatttcgcaacttagaagcaacgcgcatcactgatcaacagcaggcatggcgctccagccatgtcttgatcaagcactcctgtttccccggactgagtatcaatagactgcttacgcggttgaaggagaaaacgttcgttacccggctaactacttcgagaaacttagtaacaccatcgaagctgcagggtgtttcgctcagcacttcccccgtgtagatcaggccgatgagtcaccgcaatccccacgggcgaccgtggcggtggctgcgttggcggcctgcctatggggcaacccataggacgccctaaagtggacatggtgcgaagagtctattgagctagttagtagtcctccggcccctgaatgcggctaatcctaactgcggagcacataccctcaagccagagggtagtgtgtcgtaacgggtaactctgcagcggaaccgactactttgggtgtccgtgtttccttttattcttactgtggctgcttatggtgacaattcaagaattgttaccatatagctattggattggccatccggtgtctaacagagctattgtgtacttatttgttgggtacgttccattatcttacacatcccttaacacattacattttattgtgaagctaaatacaagaag

SEQ ID NO: 19426 - DNA, 724 bp, synthetic construct
  source 1..724: mol_type = other DNA
ccgcccacagggcccactgggcgctagcactctgattccacggaatctttgtgcgcctgttttataaccctctcccctatttcgcaacttagaagcaacgcgcatcactgatcaacagcaggcatggcgctccagccatgtcttgatcaagcactcctgtttccccggactgagtatcaatagactgcttacgcggttgaaggagaaaacgttcgttacccggctaactacttcgagaaacttagtaacaccatcgaagctgcagggtgtttcgctcagcacttcccccgtgtagatcaggccgatgagtcaccgcaatccccacgggcgaccgtggcggtggctgcgttggcggcctgcctatggggcaacccataggacgccctaaagtggacatggtgcgaagagtctattgagctagttagtagtcctccggcccctgaatgcggctaatcctaactgcggagcacataccctcaagccagagggtagtgtgtcgtaacgggcaactctgcagcggaaccgactactttgggtgtccgtgtttccttttattcttactgtggctgcttatggtgacaattcaagaattgttaccatatagctattggattggccatccggtgtctaacagagctattgtgtacttatttgttgggtacgttccattatcttacacatcccttaacacattacattttattgtgaagctaaatacaagaag

SEQ ID NO: 19427 - DNA, 724 bp, synthetic construct
  source 1..724: mol_type = other DNA
ccacccacagggcccactgggcgctagcactctgattccacggaatctttgtgcgcctgttttataaccctcccccccatttcgcaacttagaagcaacgcgcatcactgatcaacagcaggcatggcgttccagccatgtcttgatcaagcactcctgtttccccggactgagtatcaatagactgcttacgcggttgaaggagaaaacgttcgttacccggctaactacttcgagaaacttagtaacaccatcgaagctgcagggtgtttcgctcagcacttcccccgtgtagatcaggccgatgagtcaccgcaatccccacgggcgaccgtggcggtggctgcgttggcggcctgcctatggggcaacccataggacgccctaaagtggacatggtgcgaagagtctattgagctagttagtagtcctccggcccctgaatgcggctaatcctaactgcggagcacataccctcaagccagagggtagtgtgtcgtaacgggtaactctgcagcggaaccgactactttgggtgtccgtgtttccttttattcttactgtggctgcttatggtgacaattcaagaattgttaccatatagctattggattggccatccggtgtctaacagagctattgtgtacttatttgttgggtacgttccattatcttacacgtcccttaacacattacattttattgtgaagccaaatacaagaag

SEQ ID NO: 19428 - DNA, 724 bp, synthetic construct
  source 1..724: mol_type = other DNA
ccgcccacagggcccactgggcgctagcactctgattccacggaatctttgtgcgcctgttttataaccctctcccctatttcgcaacttagaagcaacgcgcatcactgatcaacagcaggcatggcgctccagccatgtcttgatcaagcactcctgtttccccggaccgagtatcaatagactgcttacgcggttgaaggagaaaacgttcgttacccggctaactacttcgagaaacttagtaacaccatcgaagctgcagggtgtttcgctcagcacttcccccgtgtagatcaggccgatgagtcaccgcaatccccacgggcgaccgtggcggtggctgcgttggcggcctgcctatggggcaacccataggacgccctaaagtggacatggtgcgaagagtctattgagctagttagtagtcctccggcccctgaatgcggctaatcctaactgcggagcacataccctcaagccagagggtagtgtgtcgtaacgggcaactctgcagcggaaccgactactttgggtgtccgtgtttccttttattcttactgtggctgcttatggtgacaattcaagaattgttaccatatagctattggattggccatccggtgtctaacagagctattgtgtacttatttgttgggtacgttccattatcttacacatcccttaacacattacattttattgtgaagctaaatacaagaag

SEQ ID NO: 19429 - DNA, 724 bp, synthetic construct
  source 1..724: mol_type = other DNA
cactcacaggacccacgcggtgctagcactctggttccacgggacctttgtgcgcctgttttatgtccccacccccaatttgtaacttagaagcaatttgcaacactgatcagtagcgggcatagcgcaccagctatgtcttgatcaagcacttctgtttccccggaccgagtatcaatagactgttcacacggttgaaggagaaagcgtccgttatccggctaactacttcgagaaacccagtagcaccattaaaactacagagtgtttcgctccacacttcccccgtgtagatcaggtcgatgagtcactgcaatccccacgggcgaccgtggcagtggctgcgctggcggcctgcctatggggcaacccataggacgctctaatgtggacatggtgtgaagagtctattgagctagttagtagtcctccggcccctgaatgcggctaatcctaactgcggagcacatgccttcaacccagagggtagtgtgtcgtaatgggcaactctgcagcggaaccgactactttgggtgtccgtgtttccttttattctcacattggctgcttatggtgacaattacagaattgttaccatatagctattggattggccatccggtgtgcaatagagctattatatacctatttgttggctttgtaccactgaccttaaaatctttaaccactcttgagtgtatattaacccttaatacaatcaaac

SEQ ID NO: 19430 - DNA, 723 bp, synthetic construct
  source 1..723: mol_type = other DNA
cactcacaggacccacgcggtgccagcactctggttccacgggacctttgtgcgcctgttttatatcccctccccaatttgtaacttagaagcaatttgcaacactgatcagtagcaggcatagcgcaccagctatgtcttgatcaagcacttctgtttccccggaccgagtatcaatagactgttcacacggttgaaggagaaagcgtccgttatccggctaactacttcgagaaacccagtaacaccattgaaactacagagtgtttcgctccacacttcccccgtgtagatcaggtcgatgagtcactgcaatccccacgggcgaccgtggcagtggctgcgctggcggcctgcctatggggtaacccataggacgctctaatgtggacatggtgtgaagagtctattgagctagttagtagtcctccggcccctgaatgcggctaatcctaactgcggagcacatgccttcaacccagagggtagtgtgtcgtaatgggcaactctgcagcggaaccgactactttgggtgtccgtgtttccttttattctcacattggctgcttatggtgacaattacagaattgttaccatatagctattggattggccatccggtgtgcaatagagctattatatacctatttgttggctttgtaccactgaccttaaaatctttaaccactcttgagtgtatattaacccttaatacaatcaaac

SEQ ID NO: 19431 - DNA, 722 bp, synthetic construct
  source 1..722: mol_type = other DNA
ccacctacagggcccactgggcgctagcacactgattctgcgggatctttgtgcgcctgttttataacccttcccctaagcagcaatttagaagctttgtacaatcatggccaatagtgggcgtggcgcgccagtcacgtcttggtcaagcacttctgtatccccggactgagtatcaatagactgctcacgcggttgaaagagaaaacgttcgttacccggctaactacttcgagaaacctagtagcaccatgaaagttgcagagtgtttcgctcagcactttccccgtgtagatcaggtcgatgagtcactgtaaaccccacgggcgaccgtgacagtggctgcgttggcggcctgcccatggggaaacccatgggacgctctaatacagacatggtgcgaagagtctattgagctagttagcagtcctccggcccctgaatgcggctaatcctaactgcggagcgcgcaccctcaacccagggggcggcgcgtcgtaatgggtaactctgcagcggaaccgactactttgggtgtccgtgtttccttttattctttattggctgcttatggtgacaattgaaaagttgttaccatatagctattggattggccatccggtgtctaacagagctattgtttacttatttattggatacgtccctcttaatctcaaggccattcaaactcttgattacatattgctccttaactgtaagaa

SEQ ID NO: 19432 - DNA, 722 bp, synthetic construct
  source 1..722: mol_type = other DNA
ccactcacagggcccactgggcgctagcacactgattctgcgggatctttgtgcgcctgttttataacccctcccctaagcagtaacttagaagcttcacactatcacgaccaatagcaggcgtggcgcaccagtcacgtcttggtcaagcacttctgtttccccggactgagtatcaatagactgctcacgcggttgaaggagaaagcgttcgttatccggctaactacttcgagaaacctagtagcaccgtgaaagttgcggagtgtttcgctcagcacttcccccgtgtagatcaggtcgatgagtcactgtgtaccccacgggtgaccgtgacagtggctgcgttggcggcctgcccatggggtaacccatgggacgctctaatacagacacggtgtgaagagtctattgagctagttagtagtcctccggcccctgaatgcggctaatcctaactgcggagcgcgtaccctcaatccagggggcagcgcgtcgtaatgggtaactctgcagcggaaccgactactttgggtgtccgtgtttccttttattccttattggctgcttatggtgacaattgaaaagttgttaccatatagctattggattggccatccggtgaccaacagagctattgtttacctgtttattggatacgtccctctcaatctcaaggtcattcaaactcttgattatatactacttctcaactgtaagaa

SEQ ID NO: 19433 - DNA, 722 bp, synthetic construct
  source 1..722: mol_type = other DNA
ccgcctacagggcccactgggcgctagcacactgattctgcgggatctttgtgcgcctgttttataacccttcccctaagcagcaacttagaagctttgtacaatcacgaccaatagtgggcgtgacgcgccagtcacgtcttggtcaagcacttctgtatccccggactgagtaccaatagactgctcacgcggttgaaggggaaaacgttcgttacccggctaactacttcgagaaacctagtagtaccatgaaagttgcggagtgtttcgctcagcacttcccccgtgtagatcaggtcgatgagccactgtaaaccccacgggcgaccgtgacagtggctgcgttggcggcctgcccatggggtaacccatgggacgctctaatacagacatggtgcgaagagtctattgagctagttagcagtcctccggcccctgaatgcggctaatcctaactgcggagcgcgcaccctcaacccagggggcggcgtgtcgtaatgggtaactctgcagcggaaccgactactttgggtgtccgtgtttccttttattctttattggctgcttatggtgacaattgaaaagttgttaccatatagctattggattggccatccggtgtctaacagagctattgtttacctatttgttggatacgtccctcttaatctcaaggccattcaaactcttgattatatattgctccttaactgtaggaa

SEQ ID NO: 19434 - DNA, 722 bp, synthetic construct
  source 1..722: mol_type = other DNA
tcacccacggggcccactgggcgctagcacactgattctgcgggatctttgtgcgcctgttttataacccttcccctaagcagcaacttagaagctttgtacaatcatggccaatagtgggcgtggcgcgccagtcacgtcttggtcaagcacttctgtatccccggactgagtatcaatagactgctcacgcggttgaaagagaaaacgttcgttacccggctaactacttcgagaaacctagtagcaccatgaaagttgcggagtgtttcgctcagcactttccccgtgtagatcaggtcgatgagtcactgtaaaccccacgggcgaccgtgacagtggctgcgttggcggcctgcccatggggaaacccatgggacgctctaatacagacatggtgcgaagagtctattgagctagttagcagtcctccggcccctgaatgcggctaatcctaactgcggagcgcgcaccctcaacccagggggcggcgcgtcgtaatgggtaactctgcagcggaaccgactactttgggtgtccgtgtttccttttattctttattggctgcttatggtgacaattgaaaagttgttaccatatagctattggattggccatccggtgtctaacagagctattgtttacttatttattggatacgtccctcttaatctcaaggccattcaaactcttgattacatattgctccttaactgtaagaa

SEQ ID NO: 19435 - DNA, 722 bp, synthetic construct
  source 1..722: mol_type = other DNA
ccacccacggggcccactgggcgctagcacactgattctgcgggatctttgtgcgcctgttttataacccttcccctaagcagcaacttagaagctttgtacaatcatggccaatagtgggcgtggcgcgccagtcacgtcttggtcaagcacttctgtatccccggactgagtatcaatagactgctcacgcggttgaaagagaaaacgttcgttacccggctaactacttcgagaaacctagtagcaccatgaaagttgcggggtgtttcgctcagcactttccccgtgtagatcaggtcgatgagtcactgtaaaccccacgggcgaccgtgacagtggctgcgttggcggcctgcccatggggaaacccatgggacgctctaatacagacatggtgcgaagagtctattgagctagttagtagtcctccggcccctgaatgcggctaatcctaactgcggagcgcgcaccctcaacccagggggcggcgcgtcgtaatgggtaactctgcagcggaaccgactactttgggtgtccgtgtttccttttattctttattggctgcttatggtgacaattgaaaagttgttaccatatagctattggattggccatccggtgtctaacagagctattgtttacttatttattggatacgtccctcttaatctcaaggccattcaaactcttgattacatattgctccttaactgtaagaa

SEQ ID NO: 19436 - DNA, 722 bp, synthetic construct
  source 1..722: mol_type = other DNA
ccatccacagggcccactgggcgctagcacactgattctgcgggatctttgtgcgcctgttttataacccttcccctaagcagcaacttagaagctttgtacaatcatggccaatagtgggcgtggcgcgccagtcacgtcttggtcaagcacttctgtatccccggactgagtatcaatagactgctcacgcggttgaaagagaaaacgttcgttacccggctaactacttcgagaaacctagtagcaccatgaaagttgcggagtgtttcgctcagcactttccccgtgtagatcaggtcgatgagtcactgtaaaccccacgggcgaccgtgacagtggctgcgctggcggcctgcccatggggaaacccatgggacgctctaatacagacatggtgcgaagagtctattgagctagttagcagtcctccggcccctgaatgcggctaatcctaactgcggagcgcgcaccctcaacccagggggcggcgcgtcgtaatgggtaactctgcagcggaaccgactactttgggtgtccgtgtttccttttattctttattggctgcttatggtgacaattgaaaagttgttaccatatagctattggattggccatccggtgtctaacagagctattgtttacttatttattggatacgtccctcttaatctcaaggccattcaaactcttgattacatattgctccttaactgtaagaa

SEQ ID NO: 19437 - DNA, 722 bp, synthetic construct
  source 1..722: mol_type = other DNA
ccacctacagggcccactgggcgctagcacactgattctgcgggatctttgtgcgcctgttttataacccttcccctaagcagcaacttagaagctttgtacaatcatggccaatagtgggcgtggcgcgccagtcacgtcttggtcaagcacttctgtatccccggactgagtatcaatagactgctcacgcggttgaaagagaaaacgttcgttacccggctaactacttcgagaagcctagtagcaccatgaaagttgcggagtgtttcgctcagcactttccccgtgtagatcaggtcgatgagtcactgtaaaccccacgggcgaccgtgacagtggctgcgttggcggcctgcccatggggaaacccatgggacgctctaatacagacatggtgcgaagagtctattgagctagttagcagtcctccggcccctgaatgcggctaatcctaactgcggagcgcgcaccctcaacccagggggcggcgcgtcgtaatgggtaactctgcagcggaaccgactactttgggtgtccgtgtttccttatattctttattggctgcttatggtgacaattgaaaagttgttaccatatagctattggattggccatccggtgtctaacagagctattgtttacttatttattggatacgtccctcttaatctcaaggccattcaaactcttgattacatattgctccttaactgtaagaa

SEQ ID NO: 19438 - DNA, 724 bp, synthetic construct
  source 1..724: mol_type = other DNA
ccactcacaggacccacgcggtgctagcactctggttccgcgggacctttgtgcgcctgttttatgtcccctccccaatttgtaacttagaagcattttgcaacactgatcagtagcaggcatagcgcaccagctatgtcttgatcaagcacttctgtttccccggaccgagtatcaatagactgttcacacggttgaaggagaaagcgtccgttatccggctaactacttcgagaaacccagtagcaccgttgaaactacagagtgtttcgctccacacttcccccgtgtagatcaggtcgatgagtcactgcaatccccacgggcgaccgtggcagtggctgcgctggcggcctgcctatggggcaacccataggacgctctaatgtggacatggtgtgaagagtctattgagctagttagtagtcctccggcccctgaatgcggctaatcctaactgcggagcacatgccttcaatccagagggtagtgtgtcgtaacgggcaactctgcagcggaaccgactactttgggtgtccgtgtttccttttattctcacattggctgcttatggtgacaattacagaattgttaccatatagctattggattggccatccggtgtgcaatagagctatcatatatctatttgttggctttgtaccactgaccttaaaatctataaccactctcgagtgtatattaacccttaatacaatcaaac

SEQ ID NO: 19439 - DNA, 710 bp, synthetic construct
  source 1..710: mol_type = other DNA
caatttccactgggcgctagcactccgattctgtggaatctttgtgcgcctgttttataaccctcccccgacttgcaacttagaagttatgtacgttgatcaacagcaggcgtggcacaccagccatgtcttgatcaagcacttctgtaaccccggactgagtatcaatagactgctcacgtggtcgaaagagaaacgttcgttatccggctaactacttcgagaaacctagtagcaccactgaaactgcggagtgtttcgctcagcacttcccccgtgtagatcaggtcgatgagtcactgcttaccccacgggtgaccgtggcagtggctgcgttggcggcctgcctatggggcaacccataggacgctctaaagtggacatggtgtgaagagtctattgagctagttagtagtcctccggcccctgaatgcggctaatcctaactgcggagcgcatgcccccaaaccagagggtggtgcgtcgtaacgggtaactctgcagcggaaccgactactttgggtgtccgtgtttcctttattctcataatggctgcttatggtgacaattgaggaattgttaccatatagctattggattggccatccggtgtgcaacagagctattatctacttgtttgttggatacattccattgacacctaaatccttcaatacattgcactatattctaacgttgaacgcaagaaa

SEQ ID NO: 19440 - DNA, 724 bp, synthetic construct
  source 1..724: mol_type = other DNA
cactcacaggacccacgcggtgctagcactctggttccacgggacctttgtgcgcctgttttatgtcccctccccaatttgtaacttagaagcaatttgcaacactgatcagtagcaggcatagcgcaccagctatgtcttgatcaagcacttctgtttccccggaccgagtatcaatagactgttcacatggttgaaggagaaagcgtccgttatccggctaactacttcgagaaacccagtagcaccattgaaactacagagtgtttcgctccacacttccccccgtgtagatcaggtcgatgagtcactgcaatccccacgggcgaccgtggcagtggctgcgctggcggcctgcctatggggcaacccataggacgctttgatgtggacatggtgtgaagagtctattgagctagttagtagtcctccggcccctgaatgcggctaatcctaactgcggagcacatgccttcaacccagagggtagtgtgtcgtaatgggcaactctgcagcggaaccgactactttgggtgtccgtgtttccttttattctcacattggctgcttatggtgacaattacagaattgttaccatatagctattggattggccatccggtgtgcaatagagctattatatacctatttgttggctttgtaccactgaccttaaaatctttaaccactcttgagtgtatattaacccttaacacaatcaaac

SEQ ID NO: 19441 - DNA, 727 bp, synthetic construct
  source 1..727: mol_type = other DNA
cacccactcacaggacccacgtggtgctagcactctggttccacgggacctttgtgcgcctgttttatgtcccctccccagtttgtaacttagaagcaatttgcaacactgatcaatagcaggcatagcgcaccagctatgtcttgatcaagcacttctgtttccccggaccgagtatcaatagactgttcacacggttgaaggagaaagcgtccgttatccggctaactacttcgagaaacccagtagcaccattgaaactacagagtgtttcgctccacacttcccccgtgtagatcaggtcgatgagtcactgcaatccccacgggcgaccgtggcagtggctgcgctggcggcctgcctatggggcaacccataggacgctctaatgtggacatggtgtgaagagtctattgagctagttagtagtcctccggcccctgaatgcggctaatcctaactgcggagcacatgccttcaatccagagggtagtgtgtcgtaatgggtaactctgcagcggaaccgactactttgggtgcccgtgtttccttttattctcacattggctgcttatggtgacaattacagaattgttaccatatagctattggattggccatccggtgtgcaatagagctattatatacctatttgttggctttgtaccactgaccttaaaatctttaaccactctcgagtgtatattaacccttaatacaatcaaac

SEQ ID NO: 19442 - DNA, 727 bp, synthetic construct
  source 1..727: mol_type = other DNA
cacccactcacaggacccacgcggtgctagcactctggttccacgggacctttgtgcgcctgttttatgtcccctccccaatttgtaacttagaagcaatttgcaacactgatcagtagcaggcatagcgcaccagctatgtcttgatcaagcacttctgtttccccggaccgagtatcaatagactgttcacacggttgaaggagaaagcgtccgttatccggctaactacttcgagaaacccagtagcaccattgaaactacagagtgtttcgctccacacttcccccgtgtagatcaggtcgatgagtcactgcaatccccacgggcgaccgtggcagtggctgcgctggcggcctgcctatgggacaccccataggacgctctaatgtggacatggtgtgaagagtctattgagctagttagtagtcctccggcccctgaatgcggctaatcctaactgcggagcacatgccttcaatccagagggtagtgtgtcgtaatgggcaactctgcagcggaaccgactactttgggtgtccgtgtttccatttattctcacattggctgcttatggtgacaattacagaattgttaccatatagctattggattggccatccggtgtgcaatagagctattatatacctatttgttggctttgtaccactgaccttaaaatctataaccactctcgagcgtatattaactcttaatacaatcaaac

SEQ ID NO: 19443 - DNA, 727 bp, synthetic construct
  source 1..727: mol_type = other DNA
cacccactcacaggacccacgcggtgctagcactctggttccacgggacctttgtgcgcctgttttatgtcccctccccaatttgtaacttagaagcaatttgcaacactgatcagtagcaggcatagcgcaccagctatgtcttgatcaagcacttctgtttccccggaccgagtatcaatagactgttcacacggttgaaggagaaagcgtccgttatccggctaactacttcgagaaacccagtagcaccattgaaactacagagtgtttcgctccacacttcccccgtgtagatcaggtcgatgagtcactgcaatccccacgggcgaccgtggcagtggctgcgctggcggcctgcctatggggcaacccataggacgctctaatgtggacatggtgtgaagagtctattgagctagttagtagtcctccggcccctgaatgcggctaatcctaactgcggagcacatgccttcaatccagagggtagtgtgtcgtaatgggcaactctgcagcggaaccgactactttgggtgtccgtgtttccttttattctcacattggctgcttatggtgacaattaaagaattgttaccatatagctattggattggccatccggtgtgcaatagagctatcatatatttatttgttggctttgtaccactgaccttaaaatctataaccactctcgagtgtatattaacccttaatacaatcaaac

SEQ ID NO: 19444 - DNA, 727 bp, synthetic construct
  source 1..727: mol_type = other DNA
cacccactcacaggacccacgcggtgctagcactctggttctacggaacctttgtgcgcctgttttacgtcccctccccaatttgtaacctagaagcaatttacaacactgatcaatagcaggcatggcgcaccagctatgtcttgatcaagcacctctgtttccccggaccgagtatcaatagactgttcacacggtcgaaggagaaagcgttcgttatccggctaactacttcgagaaacccagtagcgccattgaaactgcagagtgtttcgctccacacttcccccgtgtagatcaggtcgatgagtcactgcaatccccacgggcgaccgtggcagtggctgcgttggcggcctgcctatggggtaacccataggacgctctaatgtggacatggtgcgaagagtctattgagctagttagtagtcctccggcccctgaatgcggctaatcctaactgcggagcacatgccttcaatccagagggtagtgtgtcgtaatgggcaactctgcagcggaaccgactactttgggtgtccgtgtttccttttattctcacattggctgcttatggtgacaattacagaattgttaccatatagctattggattggccatccggtgtgcaatagagctattatatacctatttgttggctttgtaccactaaccttaaaatctgtaatcactctcaagtatatattgacccttaatacaattaaac

SEQ ID NO: 19445 - DNA, 727 bp, synthetic construct
  source 1..727: mol_type = other DNA
cacccactcacaggacccacgcggtgctagcactctggttccacgggacctttgtgcgcctgttttatgtcccctccccaatttgtaacttagaagcaatttacaacactgatcagtagcaggcatagcgcaccagctatgtcttgatcaagcacttctgtttccccggaccgagtatcaatagactgttcacacggttgaaggagaaagcgtccgttatccggctaactacttcgagaaacccagtagcaccattgaaactacagagtgtttcgctccacacttcccccgtgtagatcaggtcgatgagtcactgcaatccccacgggcgaccgtggcagtggctgcgctggcggcctgcctatggggcaacccataggacgctctaatgtggacatggtgtgaagagtctattgagctagttagtagtcctccggcccctgaatgcggctaatcctaactgcggagcacatgccttcaatccagagggtagtgtgtcgtaatgggcaactctgcagcggaaccgactactttgggtgtccgtgtttccttttattctcacattggctgcttatggtgacaattacagaattgttaccatatagctattggattggccatccggtgtgcaatagagctattatatacctatttgttggctttgtaccactgaccttaaaatctttaaccactcttgagtgtatattaacccttaatacaatcaaac

SEQ ID NO: 19446 - DNA, 727 bp, synthetic construct
  source 1..727: mol_type = other DNA
cacccactcacaggacccacgcggtgctagcactctggttccacgggacctttgtgcgcctgttttatgtcccctccccaatttgtaacttagaagcaatttgcaacactgatcagtagcaggcatagcgcaccagctatgtcttgatcaagcacttctgtttccccggaccgagtatcaatagactgttcacacggttgaaggagaaagcgtccgttatccggctaactacttcgagaaacccagtagcaccattgaaactacagagtgtttcgctccacacttcccccgtgtagatcaggtcgatgagtcactgcaatccccacgggcgaccgtggcagtggctgcgctggcggcctgcctatggggcaacccataggacgctctaatgtggacatggtgtgaagagtctattgagctagttagtagtcctccggcccctgaatgcggctaatcctaactgcggagcacatgccttcaacccagagggtagtgtgtcgtaatgggcaactctgcagcggaaccgactactttgggtgtccgtgtttccttttattctcacattggctgcttatggtgacaattacagaattgttaccatatagctattggattggccatccggtgtgcaatagagctattatatacctatttgttggctttgtaccactgaccttaaaatctttaaccactcttgagtgtatattaacccttaatacaatcaaac

SEQ ID NO: 19447 - DNA, 727 bp, synthetic construct
  source 1..727: mol_type = other DNA
cacccactcacaggacccacgcggtgctagcactctggttccacgggacctttgtgcgcctgttttatgtcccctccccaatttgtaacttagaagcaatttgcaacactgatcagtagcaggcatagcgcaccagctatgtcttgatcaagcacttctgtttccccggaccgagtatcaatagactgttcacacggttgaaggagaaagcgtccgttatccggctaactacttcgagaaacccagtagcaccattgaaactacagagtgtttcgctccacacttcccccgtgtagatcaggtcgatgagtcactgcaatccccacgggcgaccgtggcagtggctgcgctggcggcctgcctatggggcaacccataggacgctttgatgtggacatggtgtgaagagtctattgagctagttagtagtcctccggcccctgaatgcggctaatcctaactgcggagcacatgccttcaacccagagggtagtgtgtcgtaatgggcaactctgcagcggaaccgactactttgggtgtccgtgtttccttttattctcacattggctgcttatggtgacaattacagaattgttaccatatagctattggattggccatccggtgtgcaatagagctattatatacctatttgttggctttgtaccactgaccttaaaatctttaaccactcttgagtgtatattaacccttaatacaattaaac

SEQ ID NO: 19448 - DNA, 727 bp, synthetic construct
  source 1..727: mol_type = other DNA
cacccactcacaggacccacgcggtgctagcactctggttccacgggacccttgtgcgcctgttttatgtcccctccccaatttgtaacttagaagcaatttgcaacactgatcagtagcaggcatagcgcaccagctatgtcttgatcaagcacttctgtttccccggaccgagtatcaatagactgttcacacggttgaaggagaaagcgtccgttatccggctaactacttcgagaaacccagtagcaccattgaaactacagagtgtttcgctccacacttcccccgtgtagatcaggtcgatgagtcactgcaatccccacgggcgaccgtggcagtggctgcgctggcggcctgcctatggggcaacccataggacgctctaatgtggacatggtgtgaagagtctattgagctagttagtagtcctccggcccctgaatgcggctaatcctaactgcggagcacatgccttcaatccagagggtagtgtgtcgtaatgggcaactctgcagcggaaccgactactttgggtgtccgtgtttccttttattctcacattggctgcttatggtgacaattactgaattgttaccatatagctattggattggccatccggtgtgcaatagagctattatatacctatttgttggctttgtaccactaaccttaaaatctataaccactctcgagtgtatattaacccttaatacaatcaaac

SEQ ID NO: 19449 - DNA, 727 bp, synthetic construct
  source 1..727: mol_type = other DNA
cacccactcacaggacccacgcggtgctagcactctggttccacgggacctttgtgcgcctgttttatgtcccctccccaatttgtaacttagaagcaatttacaacactgatcagtagcaggcatagcgcaccagctatgtcttgatcaagcacttctgtttccccggaccgagtatcaatagactgttcacacggttgaaggagaaagcgtccgttatccggctaactacttcgagaaacccagtagcaccattgaaactacagagtgtttcgctccacacttcccccgtgtagatcaggtcgatgagtcactgcaatccccacgggcgaccgtggcagtggctgcgctggcggcctgcctatggggcaacccataggacgctctaatgtggacatggtgtgaagagtctattgagctagttagtagtcctccggcccctgaatgcggctaatcctaactgcggagcacatgccttcaacccagagggtagtgtgtcgtaatgggcaactctgcagcggaaccgactactttgggtgtccgtgtttcctcttattctcacattggctgcttatggtgacaattacagaattgttaccatatagctattggattggccatccggtgtgcaatagagctattatatacctatttgttggctttgtaccactgaccttaaaatctttaaccactcttgagtgtatattaacccttaatacaatcaaac

SEQ ID NO: 19450 - DNA, 727 bp, synthetic construct
  source 1..727: mol_type = other DNA
cacccactcacaggacccacgcggtgctagcactctggttccacgggacctttgtgcgcctgttttatgtcccctccccaatttgtaacttagaagcaatttgcaacactgatcagtagcaggcatagcgcaccagctatgtcttgatcaagcacttctgtttccccggaccgagtatcaatagactgttcacacggttgaaggagaaagcgtccgttatccggctaactacttcgagaaacccagtagcaccattgaaactacagagtgtttcgctccacacttcccccgtgtagatcaggtcgatgagtcactgcaatccccacgggcgaccgtggcagtggctgcgctggcggcctgcctatggggcaacccataggacgctctaatgtggacatggtgtgaagagtctattgagctagttagcagtcctccggcccctgaatgcggctaatcctaactgcggagcacatgccttcaacccagagggtagtgtgtcgtaatgggcaactctgcagcggaaccgactactttgggtgtccgtgtttcttgttattctcacattggctgcttatggtgacaattacagaattgttaccatatagctattggattggccatccggtgtgcaatagagctattatatacctatttgttggctttgtaccactgaccttaaaatctttaaccactcttgagtgtatattaacccttaatacaatcaaac

SEQ ID NO: 19451 - DNA, 727 bp, synthetic construct
  source 1..727: mol_type = other DNA
cacccactcacaggacccacgcggtgctagcactctggttccacgggacctttgtgcgcctgttttatgtcccctccccaatttgtaacttagaagcaatttgcaacactgatcagtagcaggcatagcgcaccagctatgtcttgatcaagcacttctgtttccccggaccgagtatcaatagactgttcacacggttgaaggagaaagcgtccgttatccggctaactacttcgagaaacccagtagcaccattgaaactacagagtgtttcgctccacacttcccccgtgtagatcaggtcgatgagtcactgcaatccccacgggcgaccgtggcagtggctgcgctggcggcctgcctatggggtaacccataggacgctctaatgtggacatggtgtgaagagtctattgagctagttagtagtcctccggcccctgaatgcggctaatcctaactgcggagcacatgccttcaatccagagggtagtgtgtcgtaatgggcaactctgcagcggaaccgactactttgggtgtccgtgtttccttttattctcacattggctgcttatggtgacaattacagaattgttaccatatagctattggattggccatccggtgtgcaatagagctattatatacctatttgttggctttgtaccactgaccttaaaatctataaccactctcgagtgtatattaacccttaatacaatcaaac

SEQ ID NO: 19452 - DNA, 727 bp, synthetic construct
  source 1..727: mol_type = other DNA
cacccactcacaggacccacgcggtgctagcactctggttccacgggacctttgtgcgcctgttttatgtcccctccccaatttgtaacttagaagcaatttgcaacactgatcagtagcaggcatagcgcaccagctatgtcttgatcaagcacttctgtttccccggactgagtatcaatagactgttcacacggttgaaggagaaagcgtccgttatccgactaactacttcgagaaacccagtagcaccattgaaactacagagtgtttcgctccacacttcccccgtgtagatcaggtcgatgagtcactgcaatccccacgggcgaccgtggcagtggctgcgctggcggcctgcctatggggcaacccataggacgctctaatgtggacatggtgtgaagagtctattgagctagttagtagtcctccggcccctgaatgcggctaatcctaactgcggagcacatgccttcaatccagagggtagtgtgtcgtaatgggcaactctgcagcggaaccgactactttgggtgtccgtgtttccttttattctcacattggctgcttatggtgacaattactgaattgttaccatatagctattggattggccatccggtgtgcaatagagctattatatacctatttgttggctttgtaccactgaccttaaaatctataaccactctcgagtgtatattaaccctcaatacaatcaaac

SEQ ID NO: 19453 - DNA, 727 bp, synthetic construct
  source 1..727: mol_type = other DNA
cacccactcacaggacccacgcggtgctagcactctggttccacgggacctttgtgcgcctgttttatgtcccctccccaatttgtaacttagaagcaatttgcaacactgatcagtagcaggcatagcgcaccagctatgtcttgatcaagcacttctgtttccccggaccgagtatcaatagactgttcacacggttgaaggagaaagcgtccgttatccggctaactacttcgagaaacccagtagcaccattgaaactacagagtgtttcgctccacacttcccccgtgtagatcaggtcgatgagtcactgcaatccccacgggcgaccgtggcagtggctgcgctggcggcctgcctatgggacaccccataggacgctctaatgtggacatggtgtgaagagtctattgagctagttagtagtcctccggcccctgaatgcggctaatcctaactgcggagcacatgccttcaatccagagggtagtgtgtcgtaatgggcaactctgcagcggaaccgactactttgggtgtccgtgtttccttttattctcacattggctgcttatggtgacaattacagaattgttaccatatagctattggattggccatccggtgtgcaatagagctattatatacctatttgttggctttgtaccactgaccttaaaatctataaccactctcgagcgtatattaacccttaatacaatcaaac

SEQ ID NO: 19454 - DNA, 727 bp, synthetic construct
  source 1..727: mol_type = other DNA
cacccactcacaggacccacgcggtgctagcactctggttccacgggacctttgtgcgcctgttttatgtcccctccccaatttgtaacttagaagcaatttgcaacactgatcagtagcaggcatagcgcaccagctatgtcttgatcaagcacttctgtttccccggaccgagtatcaatagactgttcacacggttgaaggagaaagcgtccgttatccggctaactacttcgagaaacccagtagcaccattgaaactacagagtgtttcgctccacacttcccccgtgtagatcaggtcgatgagtcactgcaatccccacgggcgaccgtggcagtggctgcgctggcggcctgcctatggggcaacccataggacgctctaatgtggacatggtgtgaagagtctattgagctagttagtagtcctccggcccctgaatgcggctaatcctaactgcggagcacatgccttcaatccagagggtagtgtgtcgtaatgggcaactctgcagcggaaccgactactttgggtgtccgtgtttccttttattctcacattggctgcttatggtgacaattacagaattgttaccatatagctattggattggccatccggtgtgcaatagagctattatatacctatttgttggttttgtgccactgaccttaaaatctataaccactctcgagtgtatattaacccttaatacaatcgaac

SEQ ID NO: 19455 - DNA, 734 bp, synthetic construct
  source 1..734: mol_type = other DNA
aggggttgcacccactcacaggacccacgcggtgctagcactctggttctacggaacccttgtgcgcctgttttacaccccaccccaacttgtaacttagaagcaattcacaacactgatcaatagtaggcgtggcgcaccagctatgtcttgatcaagcacttctgtttccccggaccgagtatcaatagactgttcacgcggttgaaggagaaagcgtccgttatccggctaactacttcgagaaacccagtaacgccattgaaactgcagagtgtttcgctccacacttcccccgtgtagatcaggtcgatgagtcactgcaatccccacgggcgaccgtggcagtggctgcgctggcggcctgcctatggggcaacccataggacgctctaatgtggacatggtgtgaagagtctattgagctagttagtagtcctccggcccctgaatgcggctaatcctaactgcggagcacatgctctcaatccagagggtagtgtgtcgtaatgggcaactctgcagcggaaccgactactttgggtgtccgtgtttccttttattcttacattggctgcttatggtgacaatcactgaattgttaccatatagctattggattggccatccggtgtgcaacagagctattatatacctatttgttggctttgtaccactaaccttaaaatctacaaccactctcaactatatattaacccttaatacaatcaaac

SEQ ID NO: 19456 - DNA, 723 bp, synthetic construct
  source 1..723: mol_type = other DNA
cactcacaggacccacgcggtgctagcactctggttccacgggacctttgtgcgcctgttttatgtcccctccccaatttgtaacttagaagcaatttgcaacactgatcagtagcaggcatagcgcaccagctatgtcttgatcaagcacttctgtttccccggaccgagtatcaatagactgttcacacggttgaaggagaaagcgtccgttatccggctaactacttcgagaaacccagtagcaccattgaaactacagagtgtttcgctccacacttcccccgtgtagatcaggtcgatgagtcactgcaatccccacgggcgaccgtggcagtggctgcgctggcggcctgcctatggggcaacccataggacgctctaatgtggacatggtgtgaagagtctattgagctagttagtagtcctccggcccctgaatgcggctaatcctaactgcggagcacatgccttcaacccagagggtagtgtgtcgtaatgggcaactctgcagcggaaccgactactttgggtgtccgtgtttccttttattctcacattggctgcttatggtgacaatcacagaattgttaccatatagctattggattggccatccggtgtgcaatagagctattatatacctatttgttggctttgtaccactgaccttaaaatctttaaccactcttgagtgtatattaacccttaatacaatcaaac

SEQ ID NO: 19457 - DNA, 723 bp, synthetic construct
  source 1..723: mol_type = other DNA
cactcacaggacccacgcggtgctagcactctggttccacgggacctttgtgcgcctgttttatgtcccctccccaatttgtaacttagaagcaatttgcaacactgatcagtagcaggcatagcgcaccagctatgtcttgatcaagcacttctgtttccccggaccgagtatcaatagactgctcacacggttgaaggagaaagcgtccgttatccggctaactacttcgagaaacccagtagcaccattgaaactacagagtgtttcgctccacacttcccccgtgtagatcaggtcgatgagtcactgcaatccccacgggcgaccgtggcagtggctgcgttggcggcctgcctatggggcaacccataggacgctctaatgtggacatggtgtgaagagtctattgagctagttagtagtcctccggcccctgaatgcggctaatcctaactgcggagcacatgccttcaacccagagggtagtgtgtcgtaatgggcaactctgcagcggaaccgactactttgggtgtccgtgtttccttttattctcacattggctgcttatggtgacaatcacagaattgttaccatatagctattggattggccatccggtgtgcaatagagctattatatacctatttgttggctttgtaccactgaccttaaaatctttaaccactcttgagtgtatattaacccttaatacaatcaaac

SEQ ID NO: 19458 - DNA, 723 bp, synthetic construct
  source 1..723: mol_type = other DNA
cactcacaggacccacgcggtgttagcactctggttccacgggacctttgtgcgcctgttttatatcccctccccaatttgtaacttagaagtaatttgcaacactggtcagtagcaggcatagcgcaccagctatgtcttgatcaagcacttctgtttccccggaccgagtatcaatagactgttcacacggttgaaggagaaagcgtccgttatccggctaactacttcgagaaacccagtagcaccattgaaactacagagtgtttcgctccacacttcccccgtgtagatcaggtcgatgagtcactgcaatccccacgggcgaccgtggcagtggctgcgctggcggcctgcctatggggcaacccataggacgctctaatgtggacatggtgtgaagagtctattgagctagttagtagtcctccggcccctgaatgcggctaatcctaactgcggagcacatgccttcaatccagagggtagtgtgtcgtaatgggcaactctgcagcggaaccgactactttgggtgtccgtgtttccttttattctcacattggctgcttatggtgacaattactgaattgttaccatatagctattggattggccatccggtgtgcaatagagctattatatacctatttgttggctttgtaccactgaccttaaaatctataaccactctcgattgtatattaacccttaatacaatcaaac

SEQ ID NO: 19459 - DNA, 723 bp, synthetic construct
  source 1..723: mol_type = other DNA
cactcacaggacccacgcggtgctagcactctggttccgcgggacctttgtgcgcctgttttatgtcccctccccaatttgtaacttagaagcattttgcaacactgatcagtagcaggcatagcgcaccagctatgtcttgatcaagcacttctgtttccccggaccgagtatcaatagactgttcacacggttgaaggagaaagcgtccgttatccggctaactacttcgagaaacccagtagcaccgttgaaactacagagtgtttcgctccacacttcccccgtgtagatcaggtcgatgagtcactgcaatccccacgggcgaccgtggcagtggctgcgctggcggcctgcctatggggcaacccataggacgctctaatgtggacatggtgtgaagagtctattgagctagttagtagtcctccggcccctgaatgcggctaatcctaactgcggagcacatgccttcaatccagagggtagtgtgtcgtaacgggcaactctgcagcggaaccgactactttgggtgtccgtgtttccttttattctcacattggctgcttatggtgacaattacagaattgttaccatatagctattggattggccatccggtgtgcaatagagctatcatatatctatttgttggctttgtaccactgaccttaaaatctataaccactctcgagtgtatattaacccttaatacaatcaaac

SEQ ID NO: 19460 - DNA, 722 bp, synthetic construct
  source 1..722: mol_type = other DNA
ccatccacagggcccactgggcgctagcacactgattctgcgggatctttgtgcgcctgttttataacccctcccctaagcagtaacttagaagcttcacactatcacgaccaatagcaggcgtggcgcaccagccacgtcttggtcaagcacttctgtttccccggactgagtatcaatagactgctcacgcggttgaaggagaaagcgttcgttatccggctaactacttcgagaaacctagtagcaccgtgaaagttgcggagtgtttcgctcagcacttcccccgtgtagatcaggtcgatgagtcactgtgtaccccacgggtgaccgtgacagtggctgcgttggcggcctgcccatggggtaacccatgggacgctctaatacagacacggtgtgaagagtctattgagctagttagtagccctccggcccctgaatgcggctaatcctaactgcggagcgcgtaccctcaatccagggggcagcgcgtcgtaatgggtaactctgcagcggaaccgactactttgggtgtccgtgtttccttttattccttattggctgcttatggtgacaattgaaaagttgttaccatatagctattggattggccatccggtgaccaacagagctattgtttacctgtttattggatacgtccctctcaatctcaaggtcattcaaactcttgattatatactacttctcaactgtaagaa

SEQ ID NO: 19461 - DNA, 726 bp, synthetic construct
  source 1..726: mol_type = other DNA
acccactcacaggacccacgcggtgctagcactctggttccacggagcctttgtgcgcctgttttacgtcccctccccaatttgtaacttagaagcaatttacagcactgatcaatagcaggcatggcgcaccagctatgtcttgatcaagcacctctgtttccccggaccgagtatcaatagactgttcacacggtcgaaggagaaagcgttcgttatccggctaactacttcgagaaacccagtagcgccattgaaactgctgagtgtttcgctccacacttcccccgtgtagatcaggtcgatgagtcactgcaatccccacgggcgaccgtggcagtggctgcgttggcggcctgcctatggggtaacccataggacgctctaatgtggacatggtgcgaagagtctattgagctagttagtagtcctccggcccctgaatgcggctaatcctaactgcggagcacatgccttcaatccagagggtagtgtgtcgtaatgggcaactctgcagcggaaccgactactttgggtgtccgtgtttccttttattctcacattggctgcttatggtgacaattacagaattgttaccatatagctattggattggccatccggtgtgcaatagagctattatatacctatttgttggctttgtaccactaaccttaaaatctgtaatcactctcgagtatatattgacccttaatacaattaaac

SEQ ID NO: 19462 - DNA, 701 bp, synthetic construct
  source 1..701: mol_type = other DNA
cgttagcacactgattctacggaatctttgtgcgcctgttttataaccccttccccaagcagcaacttagaagcttcgcgccaccacgaccagtagtgggcgtgacacaccagtcacgttttggtcaagcacttctgtttccccggactgagtatcaatagactgctcacgcggttgaaggagaaaacgttcgttatccggccaactacttcgagaaacctagtagcatcgtggaagttgcggagtgtttcgctcagcacttcccccgtgtagatcaggtcgatgagtcactgtaaaccccacgggcgaccgtgacagtggctgcgttggcggcctgcccatggggcaacccatgggacgctctaatacagacacggtgtgaagagtctattgagctagttggtagtcctccggcccctgaatgcggctaatcctaactgcggagcgcgcaccctcaacccagggggcagtgcgtcgtaacgggtaactctgcagcggaaccgactactttgggtgtccgtgtttccttttattctctattggctgcttatggtgacaattgaaaagttgttaccatatagctattggattagccatccggtgaccaacagagctattatttacctgtttgttgggtatatccctctcactctcaaggccattcaaactcttaactatatattactccttaactgtaagag

SEQ ID NO: 19463 - DNA, 723 bp, synthetic construct
  source 1..723: mol_type = other DNA
ccacccacagggcccactgggcgctagcactccgattctgcggaatctttgtgcgcctgttttataaccctcccccgaaacttgcaacttagaagttatgtacgttactgatcaacagcaggcgtggcacaccagccatgtcttgatcaagcacttctgtaaccccggactgagtatcaatagactgctcacgtggtcgaaagagaaaacgttcgttatccggctaactacttcgagaaacctagtagcaccactgaaactgcggagtgtttcgctcagcacttcccccgtgtagatcaggtcgatgagtcactgcttaccccacgggtgaccgtggcagtggctgcgttggcggcctgcctatggggcaacccataggacgctctaaagtggacatggtgtgaagagtctattgagctagttagtagtcctccggcccctgaatgcggctaatcctaactgcggagcgcatgcccccaaaccagagggtggtgcgtcgtaacgggtaactctgcagcggaaccgactactttgggtgtccgtgtttcttttattctcataatggctgcttatggtgacaattgaggaattgttaccatatagctattggattggccatccggtgtgcaacaaagctattatctacttgtttgttggatatattccattgacacctaaatccttcaatacattgcactatattctgacgctgaacgcaagaaa

SEQ ID NO: 19464 - DNA, 723 bp, synthetic construct
  source 1..723: mol_type = other DNA
ccacccacagggcccactgggcgctagcactccgattctgcggaatctttgtgcgcctgttttataaccctcccccgaaacttgcaacttagaagttatgtacgttactgatcaacagcaggcgtggcataccagccatgtcttgatcaagcacttctgtaaccccggactgagtatcaatagactgctcacgtggtcgaaagagaaaacgttcgttatccggctaactacttcgagaaacctagtagcaccactgaaactgcggagtgtttcgctcagcacttcccccgtgtagatcaggtcgatgagtcactgcttaccccacgggtgaccgtggcagtggctgcgttggcggcctgcctatggggcaacccataggacgctctaaagtggacatggtgtgaagagtctattgagctagttagtagtcctccggcccctgaatgcggctaatcctaactgcggagcgcatgcccccaaaccagagggtggtgcgtcgtaacgggtaactctgcagcggaaccgactactttgggtgtccgtgtttcttttattctcataatggctgcttatggtgacaattgaagaattgttaccatatagctattggattggccatccggtgtgcaacagagctattatctacttgtttgttggatacattccattgacacctaaatccttcaatacattgcactatattctaacgctgaacgcaagaaa

SEQ ID NO: 19465 - DNA, 723 bp, synthetic construct
  source 1..723: mol_type = other DNA
ccacccacagggcccactgggcgctagcactccgattctgcggaatctttgtgcgcctgttttataaccctcccccaaaacttgcaacttagaagttatgtacgttactgatcaacagcaggcgtggcacaccagccatgtcttgatcaagcacttctgtaaccccggactgagtatcaatagactgctcacgtggtcgaaagagaaaacgttcgttatccggctaactacttcgagaaacctagtagcaccactgaaactgcggagtgtttcgctcagcacttcccccgtgtagatcaggtcgatgagtcactgcttaccccacgggtgaccgtggcagtggctgcgttggcggcctgcctatggggcaacccataggacgctctaaagtggacatggtgtgaagagtctattgagctagttagtagtcctccggcccctgaatgcggctaatcctaactgcggagcgcatgcccccaaaccagagggtggtgcgtcgtaacgggtaactctgcaatggaaccgactactttgggtgtccgtgtttcttttattctcataatggctgcttatggtgacaattggggaattgttaccatatagctattggattggccatccggtgtgcaacagagctattatctatttgtttgttggatacattccattgacacctaaatctttcaatacattgcactatattctaacgttgaacgcaagaaa

SEQ ID NO: 19466 - DNA, 723 bp, synthetic construct
  source 1..723: mol_type = other DNA
ccacctacagggcccactgggcgctagcactccgattctgcggaatctttgtgcgcctgttttataaccctcccccgaaacttgcaacttagaagttatgtacgttactgatcaacagcaggtgtggcacaccagccatgtcttgatcaagcacttctgtaaccccggactgagtatcaatagactgctcacgtggtcgaaagagaaaacgttcgttatccggctaactacttcgagaaacctagtagcaccactgaaactgcggagtgtttcgctcagcacttcccccgtgtagatcaggtcgatgagtcactgcttaccccacgggtgaccgtggcagtggctgcgttggcggcctgcctatggggcaacccataggacgctctaaagtggacatggtgtgaagagtctattgagctagttagtagtcctccggcccctgaatgcggctaatcctaactgcggagcgcatgcccccaaaccagagggtggtgcgtcgtaacgggtaactctgcagcggaaccgactactttgggtgtccgtgtttcttttattctcataatggctgcttatggtgacaattgaggaattgttaccatatagctattggattggccatccggtgtgcaacagagctattatctacttgtttgttggatatattccattgacacctaaatccttcaatacattgcactatattctgacgctgaacgcaagaaa

SEQ ID NO: 19467 - DNA, 723 bp, synthetic construct
  source 1..723: mol_type = other DNA
ccacccgcagggcccactgggcgctagcactccgattctgcggaatctttgtgcgcctgttttataaccctcccccgaaacttgcaacttagaagttatgtacgttactgatcaacagcaggcgtggcataccagccatgtcttgatcaagcacttctgtaaccccggactgagtatcaatagactgctcacgtggtcgaaagagaaaacgttcgttatccggctaactacttcgagaaacctagtagcaccactgaaactgcggagtgtttcgctcagcacttcccccgtgtagatcaggtcgatgagtcactgcttaccccacgggtgaccgtggcagtggctgcgttggcggcctgcctatggggcaacccataggacgctctaaagtggacatggtgtgaagagtctattgagctagttagtagtcctccggcccctgaatgcggctaatcctaactgcggagcgcatgcccccaaaccagagggtggtgcgtcgtaacgggtaactctgcagcggaaccgactactttgggtgtccgtgtttcttttattctcataatggctgcttatggtgacaattgaagaattgttaccatatagctattggattggccatccggtgtgcaacagagctattatctacttgtttgttggatacattccattgacacctaaatccttcaatacattgcactatattctaacgctgaacgcaagaaa

SEQ ID NO: 19468 - DNA, 723 bp, synthetic construct
  source 1..723: mol_type = other DNA
ccacccacagggcccactgggcgctagcactccgattctgcggaatctttgtgcgcctgttttataaccctcccccgaaacttgcaacttagaagttatgtacgttactgatcaacagcaggcgtggcataccagccatgtcttgatcaagcacttctgtaaccccggactgagtatcaatagactgctcacgtggtcgaaagagaaaacgttcgttatccggctaactacttcgagaaacctagtagcaccactgaaactgcggagtgtttcgctcagcacttcccccgtgtagatcaggtcgatgagtcactgcttaccccacgggtgaccgtggcagtggctgcgttggcggcctgcctatggggcaacccataggacgctctaaagtggacatggtgtgaagagtctattgagctagttagtagtcctccggcccctgaatgcggctaatcctaactgcggagcgcatgcccccaaaccagagggtggtgcgtcgtaacgggtaactctgcagcggaaccgactactttgggtgtccgtgtttcttttactctcataatggctgcttatggtgacaattgaagaattgttaccatatagctattggattggccatccggtgtgcaacagagctattatctacttgtttgttggatacattccattgacacctaaatccttcaatacattgcactatattctaacgctgaacgcaagaaa

SEQ ID NO: 19469 - DNA, 723 bp, synthetic construct
  source 1..723: mol_type = other DNA
ccacccacggggcccactgggcgctagcactccgattctgcggaatctttgtgcgcctgttttataaccctcccccgaaacttgcaacttagaagttatgtacgttactgatcaacagcaggcgtggcataccagccatgtcttgatcaagcacttctgtaaccccggactgagtatcaatagactgctcacgtggtcgaaagagaaaacgttcgttatccggctaactacttcgagaaacctagtagcaccactgaaactgcggagtgtttcgctcagcacttcccccgtgtagatcaggtcgatgagtcactgcttaccccacgggtgaccgtggcagtggctgcgttggcggcctgcctatggggcaacccataggacgctctaaagtggacatggtgtgaagagtctattgagctagttagtagtcctccggcccctgaatgcggctaatcctaactgcggagcgcatgcccccaaaccagagggtggtgcgtcgtaacgggtaactctgcagcggaaccgactactttgggtgtccgtgtttcttttattctcataatggctgcttatggtgacaattgaagaattgttaccatatagctattggattggccatccggtgtgcaacagagctattatctacttgtttgttggatacattccattgacacctaaatccttcaatacattgcactatattctaacgctgaacgcaagaaa

SEQ ID NO: 19470 - DNA, 723 bp, synthetic construct
  source 1..723: mol_type = other DNA
cactcacaggacccacgcggtgctagcactctggttccacgggacctttgtgcgcctgttttatatcccctccccaatttgtaacttagaagcaatttgcaacaccgatcagtagcaggcatagcgcaccagctatgtcttgatcaagcacttctgtttccccggaccgagtatcaatagactgttcacacggttgaaggagaaagcgtccgttatccggctaactacttcgagaaacccagtagcaccattgaaactacagagtgtttcgctccacacttcccccgtgtagatcaggtcgatgagtcactgcaatccccacgggcgaccgtggcagtggctgcgctggcggcctgcctatggggcaacccataggacgctctaatgtggacatggtgtgaagagtctattgagctagttagtagtcctccggcccctgaatgcggctaatcctaactgcggagcacatgccttcaacccagagggtagtgtgtcgtaatgggcaactctgcagcggaaccgactactttgggtgtccgtgtttccttttattctcacattggctgcttatggtgacaattacagaattgttaccatatagctattggattggccatccggtgtgcaatagagctattatatacctatttgttggctttgtaccactgaccttaaaatctttaaccactcttgagtgtatattaacccttaatacaatcaaac

SEQ ID NO: 19471 - DNA, 723 bp, synthetic construct
  source 1..723: mol_type = other DNA
cactcacaggacccacgcggtgctagcactctggttccacgggacctttgtgcgcctgttttatgtcccctccccaatttgtaacttagaagcaatttgcaacactgatcagtagcaggcatagcgcaccagctatgtcttgatcaagcacttctgtttccccggaccgagtatcaatagactgttcacacggttgaaggagaaagcgtccgttatccggctaactacttcgagaaacccagtagcaccattgaaactacagagtgtttcgctccacacttcccccgtgtagatcaggtcgatgagtcactgcaatccccacgggcgaccgtggcagtggctgcgctggcggcctgcctatggggcaacccataggacgctctaatgtggacatggtgtgaagagtctattgagctagttagtagtcctccggcccctgaatgcggctaatcctaactgcggagcacatgccttcaatccagagggtagtgtgtcgtaatgggcaactctgcagcggaaccgactactttgggtgtccgtgtttccttttattctcacattggctgcttatggtgacaattactgaattgttaccatatagctattggattggccatccggtgtgcaatagagctattatatacctatttgttggctttgtaccactgaccttaaaatctataaccactctcgagtgtatattaaccctcaatacaatcaaac

SEQ ID NO: 19472 - DNA, 723 bp, synthetic construct
  source 1..723: mol_type = other DNA
cactcacagggcccacgcggtgctagcactctggttctacggaacctttgtgcgcctgttttgcgtcccctccccaatttgtaacctagaagcaatttacaacactgatcaatagcaggcatggcgcaccagctatgtcttgatcaagcacctctgtttccccggaccgagtatcaatagactgttcacacggtcgaaggagaaagcgttcgttatccggctaactacttcgagaaacccagtagcgccattgaaactgcagagtgtttcgctccacacttcccccgtgtagatcaggtcgatgagtcactgcaatccccacgggcgaccgtggcagtggctgcgttggcggcctgcctatggggtaacccataggacgctctaatgtggacatggtgcgaagagtctattgagctagttagtagtcctccggcccctgaatgcggctaatcctaactgcggagcacatgccttcaatccagagggtagtgtgtcgtaatgggcaactctgcagcggaaccgactactttgggtgtccgtgtttccatttattctcacattggctgcttatggtgacaattatagaattgttaccatatagctattggattggccatccggtgtgcaatagagctattatatacctatttgttggctttgtaccactaacctcataatctgtaatcactctcaagtatatattgacccttaatacaattaagc

SEQ ID NO: 19473 - DNA, 724 bp, synthetic construct
  source 1..724: mol_type = other DNA
tacccactcacagggcccactgggcgttagcactctggtactaaggtacctttgtgcgcctgttttaactcccttcccctaaagtaacttagaagcagtgaactaatgatcaatagtgggcatgacataccagccatgtctcgatcaagcacttctgtttccccggactgagtatcaataggctgctcgcgcggctgaaagagaaaacgttcgttacccggccagctacttcgagaagcttagtaccatcatgaacgaagtagagcgtttcgctcagcacaatcccagtgtagatcaggctgatgagtcactgcaaaccccatgggcgaccatggcagtggctgcgttggcggcctgcccatggagaaatccatgggacgctctagttctgacatggtgcgaagagcctattgagctagctggtagtcctccggcccctgaatgcggctaatcctaactgcggagcacgcacccacaaaccagtgggcagtgtgtcgtaatgggtaactctgcagcggaaccgactactttgggtgtccgtgtttccttttattcttatattggctgcttatggtgacaatcaaagagttgttaccatatagctattggattggccatccggtgtgcaatagggcaattgtttacctatttattgggtttgtaccactaacgttgaagtctgtgatcacacttgactttatcctgaacctcaatacagtaaaac

SEQ ID NO: 19474 - DNA, 724 bp, synthetic construct
  source 1..724: mol_type = other DNA
tacccactcacagggcccactgggcgttagcactctggtactaaggtacctttgtgcgcctgttttaactcccttcccctaaagtaacttagaagcagtaaactaatgatcaatagtgggcatgacacaccagccatgtctcgatcaagcacttctgtttccccggactgagtatcaataggctgctcgcgcggctgaaagagaaaacgttcgttacccggccagctacttcgagaagcttagtaccatcatgaacgaagtagagcgtttcgctcagcacaaccccagtgtagatcaggctgatgagtcactgcaaaccccatgggcgaccatggcagtggctgcgttggcggcctgcccatggagaaatccgtgggacgctctagttctgacatggtgcgaagagcctattgagctagctggtagtcctccggcccctgaatgcggctaatcctaactgcggagcacgcacccacaaaccagtgggcagtgtgtcgtaatgggtaactctgcagcggaaccgactactttgggtgtccgtgtttccttttattcttatattggctgcttatggtgacaatcaaagagttgttaccatatagctattggattggccatccggtgtgcaacagagcaattgtttacctatttattgggtttgtaccactaacgttgaagtctgtgatcacacttgactttatcctgaacctcaatacagtaaaac

SEQ ID NO: 19475 - DNA, 724 bp, synthetic construct
  source 1..724: mol_type = other DNA
tacccactcacagggcccactgggcgttagcactctggtactaaggtacctttgtgcgcctgttttaactcccttcccctaaagtaacttagaagcagtaaactaatgatcaatagtgggcatgacataccagccatgtctcgatcaagcacttctgtttccccggactgagtatcaataggctgctcgcgcggctgaaagagaaaacgttcgttacccggccagctacttcgagaagcttagtaccatcatgaacgaagtagagcgtttcgctcagcacaatcccagtgtagatcaggctgatgagtcactgcaaaccccatgggcgaccatggcagtggctgcgttggcggcctgcccatggagaaatccatgggacgctctagttctgacatggtgcgaagagcctattgagctagctggtagtcctccggcccctgaatgcggctaatcctaactgcggagcacgcacccacaaaccagtgggcagtgtgtcgtaatgggtaactctgcagcggaaccgactactttgggtgtccgtgtttccttttattcttatattggctgcttatggtgacaatcaaagagttgttaccatatagctattggattggccatccggtgtgcaatagagcaattgtttacctatttattgggtttgtaccactaacgttgaagtctgtgatcacacttgactttatcctgaacctcaatacagtaaaac

SEQ ID NO: 19476 - DNA, 724 bp, synthetic construct
  source 1..724: mol_type = other DNA
tacccactcacagggcccactgggcgttagcactctggtactaaggtacctttgtgcgcctgttttaactcccttcccctgaagtaacttagaagcagtaaactaatgatcaatagtgggcatgacataccagccatgtctcgatcaagcacttctgtttccccggactgagtatcaataggctgctcgcgtggctgaaagagaaaacgttcgttacccggccagctacttcgagaagcttagtaccatcatgaacgaagcagagcgtttcgctcagcacaatcccagtgtagatcaggctgatgagtcactgcaaaccccatgggcgaccatggcagtggctgcgttggcggcctgcccatggagaaatccatgggacgctctaattctgacatggtgcgaagagcctattgagctagctggtagtcctccggcccctgaatgcggctaatcctaactgcggagcacgcacccacaaaccagtgggcagtgtgtcgtaatgggtaactctgcagcggaaccgactactttgggtgtccgtgtttccctttattcttatattggctgcttatggtgacaatcaaagagttgttaccatatagctattggattggccatccggtgtgcaacagagcaattgcttacctattcattgggtttgtaccactgacgttgaagtctgtgaccacactcaactttatcctgaacctcaatacagtaaaac

SEQ ID NO: 19477 - DNA, 724 bp, synthetic construct
  source 1..724: mol_type = other DNA
tacccactcacagggcccactgggcgttagcactctggtactaaggtacctttgtgcgcctgttttaactccctccccctgaagtaacttagaagcagtaaactaatgatcaatagtgggcatgacataccagccatgtctcgatcaagcacttctgtttccccggactgagtatcaataggctgctcgcgtggctgaaagagaaaacgtccgttacccggccagctacttcgagaagcttagtaccatcatgaacgaagcagagcgtttcgctcagcacaatcccagtgtagatcaggctgatgagtcactgcaaaccccatgggcgaccatggcagtggctgcgttggcggcctgcccatggagaaatccatgggacgctctaattctgacatggtgcgaagagcctattgagctagctggtagtcctccggcccctgaatgcggctaatcctaactgcggagcacgcacccacaaaccagtgggcagtgtgtcgtaatgggtaactctgcagcggaaccgactactttgggtgtccgtgtttccctttattcttatattggctgcttatggtgacaatcaaagagttgttaccatatagctattggattggccatccggtgtgtaacagagcaattgtttacctattcattgggtttgtaccactgacgttgaagtctgtgaccacactcaactttatcctgaatctcaatacagtaaaac

SEQ ID NO: 19478 - DNA, 724 bp, synthetic construct
  source 1..724: mol_type = other DNA
cactcacaggacccacgcggtgctagcactctggttccacgggacctttgtgcgcctgttttatgtccccacccccaatttgtaacttagaagcaatttgcaacactgatcagtagcaggcatagcgcaccagctatgtcttgatcaagcacttctgtttccccggaccgagtatcaatagactgttcacacggttgaaggagaaagcgtccgttatccggctaactacttcgagaagcccagtagcaccattgaaactacagagtgtttcgctccacacttcccccgtgtagatcaggtcgatgagtcactgcaatccccacgggcgaccgtggcagtggctgcgctggcggcctgcctatggggcaacccataggacgctctaatgtggacatggtgtgaagagtctattgagctagttagtagtcctccggcccctgaatgcggctaatcctaactgcggagcacatgccttcaacccagagggtagtgtgtcgtaatgggcaactctgcagcggaaccgactactttgggtgtccgtgtttccttttattctcacattggctgcttatggtgacaattacagaattgttaccatatagctattggattggccatccggtgtgcaatagagctattatatacctatttgttggctttgtaccactgaccttaaaatctttaaccactcttgagtgtatattaacccttaatacaatcaaac

SEQ ID NO: 19479 - DNA, 699 bp, synthetic construct
  source 1..699: mol_type = other DNA
agctgtaactgattctgcgggatctttgtacgcctgttttataaccccccccctaagcagtaacttagaagccttacactatcacgaccaatagtaggcgtggcgcaccagccgcgtcttggtcaagcacttctgtttccccggactgagtatcaatagactgctcacgcggttgaaggagaaaacgttcgttatccggctaactacttcgagaaacctagtagcaccgtgaaagttgcagagcgtttcgctcagcacttcccccgtgtagatcaggccgatgagtcactgtgaaccccacgggtgaccgtgacagtggctgcgttggcggcctgcccatggggtaacccatgggacgctctaatacagacacggtgtgaagagtctattgagctagttagtagtcctccggcccctgaatgcggctaatcctaactgcggagcgcgcgccctcaatccagggggtagtgcgtcgtaatgggtaactctgcagcggaaccgactactttgggtgtccgtgtttccttttatcctttattggctgcttatggtgacaattgaaaagttgttgccatatagctattggattggccatccggtaaccaacagagctattgtttacctgtttgttggatacgtccctctcaatctcaaggctattcaaacccttgattacacactacttctcaactgtaagaa

SEQ ID NO: 19480 - DNA, 722 bp, synthetic construct
  source 1..722: mol_type = other DNA
ccacccacagggcccactgggcgctagcacactgattttacggaatctttgtgcgcctgttttataacccctcccctaagcagtaacttagaagcttcacattatcacgaccaatagcgggcgtggcgcaccagtcacgtcttggtcaagcactcctgtttccccggactgagtatcaatagactgctcacgcggttgaaggagaaaatgttcgttatccggctaactacttcgagaaacctagtagcaccgtgaaagttgcggagtgtttcgctcagcacttcccccgtgtagatcaggtcgatgagtcactgtgaaccccacgggtgaccgtgacagtggctgcgttggcggcctgcccatggggtaactcatgggacgctctaatacagacacggtgtgaagagtctattgagctagttagtagtcctccggcccctgaatgcggctaatcctaactgcggagcgcgcaccttcaatccaggaggcggcgcgtcgtaatgggtaactctgcagcggaaccgactactttgggtgtccgtgtttccttttattccttattggctgcttatggtgacaattgaaaagttgttaccatatagctattggattggccatccggtaaccaacagagctattgtttacctgttcgttggatacgtccctctcgacttcaaggccattcaaactcttgattatatactacatctcaactgtaagaa

SEQ ID NO: 19481 - DNA, 722 bp, synthetic construct
  source 1..722: mol_type = other DNA
ccacccacagggcccactgggcgctagcacactgattttacggaatctttgtgcgcctgttttataacccctcccctaagcagtaacttagaagcttcacattatcacgaccaatagcgggcgtggcgcaccagtcacgtcttggtcaagcactcctgtttccccggactgagtatcaatagactgctcacgcggttgaaggagaaaatgttcgttatccggctaactacttcgagaaacctagtagcaccgtgaaagttgcggagtgtttcgctcagcacttcccccgtgtagatcaggtcgatgagtcactgtgaaccccacgggtgaccgtgacagtggctgcgttggcggcctgcccatggggtaactcatgggacgctctaatacagacacggtgtgaagagtctattgagctagttagtagtcctccggcccctgaatgcggctaatcctaactgcggagcgcgcaccttcaatccaggaggcggcgcgtcgtaatgggtaactctgcagcggaaccgactactttgggtgtccgtgtttccttttattccttattggctgcttatggtgacaattgtaaagttgttaccatatagctattggattggccatccggtaaccaacagagctattgtttacctgttcgttggatacgtccctctcgacttcaaggccattcaaactcttgattatatactacatctcaactgtaagaa

SEQ ID NO: 19482 - DNA, 746 bp, synthetic construct
  source 1..746: mol_type = other DNA
ttaaaacagcctgtgggttgtacccacccacagggcccactgggcgttagcacactgattctacggaatctttgtgcgcctgttttatatccctcccctaaaatagtaacttagaagttgaacatttacacgaccaatagcaggcgtggcgcaccagccacgtcttggtcaagcactcctatttccccggactgagtatcaataggctgctcacgtggctgaaggagaaagtgttcgttatccggctaactacttcgggaaacctagtaacaccatgaaagttgcagagtgtttcgctcagcacttcccccgtgtagatcaggctgatgagtcactgcgaaccccacgggcgaccgtggcagtggctgcgttggcggcctgcctatggggcaacccataggacgctctaatacagacatggtgcgaagagtctactgagctagttggtattcctccggcccctgaatgcggctaatcctaactgcggagcacatgccctcaatccagagggtggtgtgtcgtaacgggcaactctgcagcggaaccgactactttgggtgtccgtgtttccttttatccttatactggctgcttatggtgacaattgaaaagttgttaccatatagctattggattggccatccggtgactaacagagctttgatttatcaattcattgggttcgtacccctatcatctacagtttattcaactttggtgtacttattatatcttaatagcaagaa

SEQ ID NO: 19483 - DNA, 723 bp, synthetic construct
  source 1..723: mol_type = other DNA
cactcacaggacccacgcggtgctagcactctggttccacgggacctttgtgcgcctgttttatgtcccctccccaatttgtaacttagaagcaatttgcaacactgatcagtagcaggcatagcgcaccagctatgtcttgatcaagcacttctgtttccccggaccgagtatcaatagactgttcacgcggttgaaggagaaagcgtccgttatccggctaactacttcgagaaacccagtagcaccattgaaactacagagtgtttcgctccacacttcccccgtgtagatcaggtcgatgagtcactgcaatccccacgggcgaccgtggcagtggctgcgctggcggcctgcctatggggcaacccataggacgctctaatgtggacatggtgtgaagagtctattgagctagttagtagtcctccggcccctgaatgcggctaatcctaactgcggagcacatgccttcaacccagagggtggtgtgtcgtaatgggcaactctgcagcggaaccgactactttgggtgtccgtgtttccttttattcttacattggctgcttatggtgacaattacagaattgttaccatatagctattggattggccatccggtgtgcaatagagctattatatacctatttgttggctttgtaccactgaccttaaaatctttaaccactcttgagtgtatattaacccttaatacaatcaaac

SEQ ID NO: 19484 - DNA, 697 bp, synthetic construct
  source 1..697: mol_type = other DNA
tcgcagcactctggtacttcggtacctttgtgcgcctgttttatacccccccccagtgaaacttagaagcagcaaaccacgatcaatagtaggcatagcactccagttatgtcttgatcaagcacttctgtttccccggactgagtatcaatagaccgctcgcgcggttgaaggagaaaacgttcgttacccggccaactacttcggaaaacctagtaacaccatgaaagttgcggagagcttcgttcagcactcccccagtgtagatcaggtcgatgagtcaccgcattccccacgggcgaccgtggcggtggctgcgttggcggcctgcccatggggtaacccatggggcgctctaatacggacatggtgtgaagagtctactgagctagttggtagtcctccggcccctgaatgcggctaatcccaactgcggagcacatgcccacaagccagcgggtagtgtgtcgtaatgggtaactctgcagcggaaccgactactttgggtgtccgtgtttccttttatctttatattggctgcttatggtgacaatcagagaattgttaccatatagctattggattggccatccggtgtgcaatagagcaattatttacctatttgttggttttgtaccattaactttggcttctgtgaccacccttaattatatcttgacccttaacacagttaaac

SEQ ID NO: 19485 - DNA, 721 bp, synthetic construct
  source 1..721: mol_type = other DNA
ccacccacagggcccactgggcgctagcacactggttctgcgggacctttgtgcgcctgttttacaacccttccctaatcagtaacttagaagctttgtacaattatggccaatagtaggcgtggcgcgccagtcacgtcttggtcaagcacttctgtatccccggactgagtatcaatagactgctcacgcggttgaaggagaaaacgttcgttacccggctaactacttcgagaaacctagtagtaccatgaaagttgcggagtgtttcgctcagcacttcccccgtgtagatcaggtcgatgagtcactgtaaaccccacgggcgaccgtgacagtggctgcgttggcggcctgcccatggggtaacccatgggacgctctaatacagacatggtgcgaagagtctattgagctagttagcagtcctccggcccctgaatgcggctaatcttaactgcggagcgcgcaccctcaacccagggggcagcgcgtcgtaatgggtaactctgcagcggaaccgactactttgggtgtccgtgtttccttttattctttattggctgcttatggtgacaattgaaaagttgttaccatatagctattggattggccatccggtgtctaacagagctattgtttatctattcattggattcgtccctctcaatctcaaggccattcaaactctcgattacatattgctccttaattgtaagaa

SEQ ID NO: 19486 - DNA, 721 bp, synthetic construct
  source 1..721: mol_type = other DNA
ccacccatagggcccattgggcgctagcacactgatttttcggaatctttgtgcgcctgttttataacccttcccccaagcagcaacttagaagtattgcacaaccgcggccattagcaggcgtgacacgccagtcatgtcttggtcaagcacttctgtatccccggactgagtatcaatagactgctcacgcggttgaaggagaaaacgttcgttatccggctaactacttcgggaagcctagtagcaccttgaaagttgcagagtgtttcgctcagcacttcccccgtgtagatcaggccgatgagccactgtaaaccccacgggcgaccgtgacagtggctgcgctggcggcctgcccatgggaaacccatgggacgctctaatactgacatggtgtgaagagtctactgagctagttagtagtcctccggcccctgaatgcggctaatcctaactgcggagcacacaccctcaacccagggggcagtgtgtcgtaatgggtaactctgcagcggaaccgactactttgggtgaccgtgtttccttttattccttattggctgcttatggtgacaattgaaaagttgttaccatatagctattggattggccatccggtgtctaacagagccattgtttacttatttgttggatacgttcctcttaatttcaaggctattcaaactcttgattatatattgctccttaattataagaa

SEQ ID NO: 19487 - DNA, 720 bp, synthetic construct
  source 1..720: mol_type = other DNA
ccactcgcagggcctactgggcgctagcactctggtactaaggtacctttgtgcgcctgttttatttcccttccccaaagcaacttagaagttgtgtgccaacgatcaatagtaggtatgacacgccagtcatatcttgatcaagcacttctgtttccccggactgagtatcaataggctgctcgcgcggctgaaggagaaaacgttcgttacccggccaactacttcgagaagcttagtaccaccatgaacgatgcagagtgtttcgttcagcacaaccccagtgtagatcaggctgatgagtcactgcaacccccatgggcgaccatggcagtggctgcgttggcggcctgcccatggagaaatccatgggacgctctaattctgacatggtgcgaagagcctattgagctagctggtagtcctccggcccctgaatgcggctaatcccaactgcggagcacatgctcacaaaccagtgggtggtgtgtcgtaatgggcaactctgcagcggaaccgactactttgggtgtccgtgtttccttttattcttatgttggctgcttatggtgacaattaaagaattgttaccatatagctattggattggccatccggtgtgcaacagagcaattgtttacctatttgttggtttcgtaccactatcactgaaatccgtgaccactctcaaatttattttgacccttaattcaatcaaac

SEQ ID NO: 19488 - DNA, 721 bp, synthetic construct
  source 1..721: mol_type = other DNA
ccccagggggccactggggcgctagcactccgattctgcggaatctttgtgcgcctgttttataaccctcccccgaaacttgtaacttagaagttatgtacgttaccgatcagcagcaggcgtggcacaccagccatgtcttgatcaagcacttctgtacccccggactgagtatcaatagactgctcacgtggtcgaaggagaaaacgttcgttatccggctaactacttcgagaagcctagtagcgccactgaaactgcggagtgtttcgctcagcacttcccccgtgtagatcaggtcgatgagtcactgctcaccccacgggcgaccgtggcagtggctgcgttggcggcctgcctatggggcaacccataggacgctctaaagtggacatggtgcgaagagtctattgagctagttagtagtcctccggcccctgaatgcggctaatcctaactgcggagcgcatgcccccaaaccagagggtggtgcgtcgtaacgggtaactctgcagcggaaccgactactttgggtgtccgtgtttcctttattcttataatggctgcttatggtgacaattgaggaattgttaccatatagctattggattggccatccggtgtgcaacagagctattgtctacttgtttgttggatacattccattaacacctaaatccttcaatacattacactatattctaacgctgaacgcaagaaa

SEQ ID NO: 19489 - DNA, 724 bp, synthetic construct
  source 1..724: mol_type = other DNA
cacccactcacagggcccactgggcgcaagcactctggtaccccggtacctttgtgcgcctgttttataccccctccccccaatgaaacttagaagcagcaaaccacgatcaatagtaggcataacgctccagttatgtcttgatcaagcacttctgtttccccggactgagtatcaatagactgctcgcgcggttgaaggagaaaacgttcgttatccggctagctacttcggaaaacctagtaacaccatgaaagttgcggagagcttcgttcagcactcccccagtgtagatcaggtcgatgagtcaccgcattccccacgggcgaccgtggcggtggctgcgttggcggcctgcccatggggtaacccatggggcgctctaatacggacatggtgtgaagagtctactgagctagttagtagtcctccggcccctgaatgcggctaatcctaactgcggagcacacgcccacaagccagcgggtagtgtgtcgtaacgggtaactctgcagcggaaccgactactttgggtgtccgtgtttccttttatctttatattggctgcttatggtgacaattaaagaattgttaccatatagctattggattggccatccggtgtgcaacagagcaattatttaccaatttattggttttgtaccattaaccttgaattctgtgaccacccttaattatatcttgacccttaacgcagctaaac

SEQ ID NO: 19490 - DNA, 724 bp, synthetic construct
  source 1..724: mol_type = other DNA
cacccactcacagggcccactgggcgcaagcactctggtaccccggtacctttgtgcgcctgttttatacccccctcccccaatgaaacttagaagcagcaaaccacgatcaatagtaggcataacgctccagttatgtcttgatcaagcacttctgtttccccggactgagtatcaatagactgctcgcgcggttgaaggagaaaacgttcgttatccggctagctacttcggaaaacctagtaacgccatgaaagttgcggagagcttcgttcagcactcccccagtgtagatcaggtcgatgagtcaccgcattccccacgggcgaccgtggcggtggctgcgttggcggcctgcccatggggtaacccatggggcgctctaatacggacatggtgtgaagagtctactgagctagttagtagtcctccggcccctgaatgcggctaatcccaactgcggagcacacgcccacaagccagcgggtagtgtgtcgtaacgggtaactctgcagcggaaccgactactttgggtgtccgtgtttccttttatctttatattggctgcttatggtgacaattaaagaattgttaccatatagctattggattggccatccggtgtgcaacagagcaattatttaccaatttattggttttgtaccattaaccttgaattctgtgaccacccttaattatatcttgacccttaacgcagctaaac

SEQ ID NO: 19491 - DNA, 726 bp, synthetic construct
  source 1..726: mol_type = other DNA
cacccactcacaggacccacgcggtgctagcactctggttctacggaacccttgtgcgcctgttttacgccccaccccaacttgtaacttagaagcaatttacaacactgatcaatagtaggcgtggcgcaccagctatgtcttgatcaagcacttctgtttccccggaccgagtatcaatagactgttcacgcggttgaaggagaaagcgtccgttatccggctaactacttcgagaaacccagtaacgccattgaaactgcagagtgtttcgctccacacttcccccgtgtagatcaggtcgatgagtcactgcaatccccacgggcgaccgtggcagtggctgcgctggcggcctgcctatggggcaacccataggacgctctaatgtggacatggtgtgaagagtctattgagctagttagtagtcctccggcccctgaatgcggctaatcctaactgcggagcacatgctctcaatccagagggtagtgtgtcgtaatgggcaactctgcagcggaaccgactactttgggtgtccgtgtttccttttattcttacattggctgcttatggtgacaatcactgaattgttaccatatagctattggattggccatccggtgtgcaacagagctattatatacctatttgttggctttgtaccactaaccttaaaatctacaaccactctcaactatatattaacccttaatacaatcaaac

SEQ ID NO: 19492 - DNA, 697 bp, synthetic construct
  source 1..697: mol_type = other DNA
aaaacagcctgtgggttgtacccactcacagggcccactgggcgctagcactctgatactgcggtacctttgtgcgcctgttttaccaccccaccccatctgaaacgtagaagcaatgcacaaccgaccaatagtgggtgtggcgcaccagccacatcttggtcaagcacttctgtttccccgggtttagtatcaataagctgctcacgcggctgaaggagaaaacacccgttatccggccgactacttcgagaaacctagtaccgccatgaacgttgcaaggcgtttcgctcagcacttcccccgtgtagatcaggctgatgagtcaccgcatccccctcgggcgaccgtggcggtggctgcgctggcggcctgcctatgggcttgcccataggacgccttaatactaacatggtgcgaagagtctattgagctagttggtagtcctccggcccctgaatgcggctaatcctaactgcggagcacatactcacaaaccagtgagcggtgtgtcgtaacgggcaactctgcagcggaaccgactactttgggtgtccgtgtttccttttatccttatactggctgcttatggtgacaattaaagaattgttaccatatagctattggattggccatccggtgtctaacagagatattatatacttgtttgttggattcatcccctaaactcaaaaag

SEQ ID NO: 19493 - DNA, 723 bp, synthetic construct
  source 1..723: mol_type = other DNA
cacccactcacagggcccactgggcgcaagcactctggtaccccggtacctttgtgcgcctgttttatacccccctccccaatgaaacttagaagcagcaaaccacgatcaatagtaggcataacgctccagttatgtcttgatcaagcacttctgtttccccggactgagtatcaatagactgctcgcgcggttgaaggagaaaacgttcgttatccgactagctacttcggaaaacctagtaacaccatgaaagttgcggagagcttcgttcagcactcccccagtgtagatcaggtcgatgagtcaccgcattccccacgggcgaccgtggcggtggctgcgttggcggcctgcccatggggtaacccatggggcgctctaatacggacatggtgtgaagagtctactgagctagttagtagtcctccggcccctgaatgcggctaatcctaactgcggagcacacgcccacaagccagcgggtagtgtgtcgtaacgggtaactctgcagcggaaccgactactttgggtgtccgtgtttccctttatctttatattggctgcttatggtgacaattaaagaattgttaccatatagctattggattggccatccggtgtgcaacagagcaattatttaccaatttattggttttgtaccattaaccttgaattctgtgaccacccttaattatatcttgacccttaacgcagctaaac

SEQ ID NO: 19494 - DNA, 723 bp, synthetic construct
  source 1..723: mol_type = other DNA
cacccactcacagggcccactgggcgcaagcactctggtaccccggtacctttgtgcgcctgttttataccccccctcccaatgaaacttagaagcagcaaaccacgatcaatagtaggcataacgctccagttatgtcttgatcaagcacttctgtttccccggactgagtatcaatagactgctcgcgcggttgaaggagaaaacgttcgttatccggctagctacttcggaaaacctagtaacaccatgaaagttgcggagagcttcgttcagcactcccccagtgtagatcaggtcgatgagtcaccgcattccccacgggcgaccgtggcggtggctgcgttggcggcctgcccatggggtaacccatggggcgctctaatacggacatggtgtgaagagtctactgagctagttagtagtcctccggcccctgaatgcggctaatcccaactgcggagcacacgcccacaagccagcgggtagtgtgtcgtaacgggtaactctgcagcggaaccgactactttgggtgtccgtgtttccttttatctttatattggctgcttatggtgacaattaaagaattgttaccatatagctattggattggccatccggtgtgcaacagagcaattatttaccaatttattggttttgtaccattaaccttgaattctgtgaccacccttgattatatcttgacccttaacgcagctaaac

SEQ ID NO: 19495 - DNA, 723 bp, synthetic construct
  source 1..723: mol_type = other DNA
cacccactcacagggcccactgggcgcaagcactctggtaccccggtacctttgtgcgcctgttttatacccccctccccaatgaaacttagaagcagcaaaccacgatcaatagtaggcataacgctccagttatgtcttgatcaagcacttctgtttccccggactgagtatcaatagactgctcgcgcggttgaaggagaaaacgttcgttatccgactagctacttcggaaaacctagtaacaccatgaaagttgcggagagcttcgttcagcactcccccagtgtagatcaggtcgatgagtcaccgcattccccacgggcgaccgtggcggtggctgcgttggcggcctgcccatggggtaacccatggggcgctctaatacggacatggtgtgaagagtctactgagctagttagtagtcctccggcccctgaatgcggctaatcctaactgcggagcacacgcccacaagccagcgggtagtgtgtcgtaacgggtaactctgcagcggaaccgactactttgggtgtccgtgtttccctttatcttcatattggctgcttatggtgacaattaaagaattgttaccatatagctattggattggccatccggtgtgcaacagagcaattatttaccaatttattggttttgtaccattaaccttgaattctgtgaccacccttaattatatcttgacccttaacgcagctaaac

SEQ ID NO: 19496 - DNA, 723 bp, synthetic construct
  source 1..723: mol_type = other DNA
cacccactcacagggcccactgggcgcaagcactctggtaccccggtacctttgtgcgcctgttttatacccccctccccaatgaaacttagaagcagcaaaccacgatcaatagtaggcataacgctccagttatgtcttgatcaagcacttctgtttccccggactgagtatcaatagactgctcgcgcggttgaaggagaaaacgttcgttatccggctagctacttcggaaaacctagtaacaccatgaaagttgcggagagcttcgttcagcactcccccagtgtagatcaggtcgatgagtcaccgcattccccacgggcgaccgtggcggtggctgcgttggcggcctgcccatggggtaacccatggggcgctctaatacggacatggtgtgaagagtctactgagctagttagtagtcctccggcccctgaatgcggctaatcccaactgcggagcacacgcccacaagccagcgggtagtgtgtcgtaacgggtaactctgcagcggaaccgactactttgggtgtccgtgtttccttttatctttatattggctgcttatggtgacaattaaagaattgttaccatatagctattggattggccatccggtgtgcaacagagcaattatttaccaatttattggttttgtaccattaaccttgaattctgtgaccacccttaattatatcttaacccttaacgctgctaaac

SEQ ID NO: 19497 - DNA, 723 bp, synthetic construct
  source 1..723: mol_type = other DNA
cacccactcacagggcccactgggcgcaagcactctggtaccctggtacctttgtgcgcctgttttatacccccctccccaatgaaacttagaagcagcaaaccacgatcaatagtaggcataacgctccagttatgtcttgatcaagcacttctgtttccccggactgagtatcaatagactgctcgcgcggttgaaggagaaaacgttcgttatccggctagctacttcggaaaacctagtaacaccatgaaagttgcggagagcttcgttcagcactcccccagtgtagatcaggtcgatgagtcaccgcattccccacgggcgaccgtggcggtggctgcgttggcggcctgcccatggggtaacccatggggcgctctaatacggacatggtgtgaagagtctactgagctagttagtagtcctccggcccctgaatgcggctaatcccaactgcggagcacacgcccacaagccagcgggtagtgtgtcgtaacgggtaactctgcagcggaaccgactactttgggtgtccgtgtttccttttatctttatattggctgcttatggtgacaattaaagaattgttaccatatagctattggattggccatccggtgtgcaacagagcaattatttaccaatttattggttttgtaccattaaccttgaattctgtgaccacccttaattatatcttgacccttaacgcagctaaac

SEQ ID NO: 19498 - DNA, 719 bp, synthetic construct
  source 1..719: mol_type = other DNA
cccaggggccactggggcgctagcactccgattctgcggaatctttgtgcgcctgttttataaccctcccccgaaacttgtaacttagaagttatgtacgttaccgatcagcagcaggcgtggcacaccagccatgtcttgatcaagcacttctgtacccccggactgagtatcaatagactgctcacgtggtcgaaggagaaaacgttcgttatccggctaactacttcgagaagcctagtagcgccactgaaactgcggagtgtttcgctcagcacttcccccgtgtagatcaggtcgatgagtcactgctcaccccacgggcgaccgtggcagtggctgcgttggcggcctgcctatggggcaacccataggacgctctaaagtggacatggtgcgaagagtctattgagctagttagtagtcctccggcccctgaatgcggctaatcctaactgcggagcgcatgcccccaaaccagagggtggtgcgtcgtaacgggtaactctgcagcggaaccgactactttgggtgtccgtgtttcctttattcttataatggctgcttatggtgacaattgaggaattgttaccatatagctattggattggccatccggtgtgcaacagagctattgtctacttgtttgttggatacattccattaacacctaaatccttcaatacattacactatattctaacgctgaacgcaagaaa

SEQ ID NO: 19499 - DNA, 693 bp, synthetic construct
  source 1..693: mol_type = other DNA
actctggtactgaggtacctttgtgcgcctgttttacttcccttccccagaaataacttagaagctttgaaccaacgatcaacagtgggtgtgacataccagtcgcatctcgatcaagcacttctgtttccccggactgagtatcaataggctgcttacgcggctgaaagagaaaacgttcgttacccggccaactacttcgagaagcttagtaccaccatgaacgaggcagagcgtttcgctcggcactaccccagtgtagatcaggctgatgagtcactgcaatccccatgggcgaccatggcagtggctgcgctggcggcctgcccatggagagatccatgggacgctctaattttgacatggtgcgaagagcctattgagctagttggtagtcctccggcccctgaatgcggctaatcctaactgcggagcgcacacccacataccagtgggcagtgtgtcgtaacgggcaactctgcagcggaaccgactactttgggtgtccgtgtttccttttattcttatattggctgcttatggtgacaaacgaagagttgttaccatatagctattggattggccatccggtgtgcaacagagcaattgtctaccagtttattggttttgtaccactgacattaaagtctgtaattacccttaaattcatcttgacccttaacacagtcaagc

SEQ ID NO: 19500 - DNA, 722 bp, synthetic construct
  source 1..722: mol_type = other DNA
cacccactcacagggcccactgggcgcaagcactctggtaccccggtacctttgtgcgcctgttttatacccctcccccaatgaaacttagaagcagcaaaccacgatcaatagtaggcataacgctccagttatgtcttgatcaagcacttctgtttccccggactgagtatcaatagactgctcgcgcggttgaaggagaaaacgttcgttatccggctagctacttcggaaaacctagtaacaccatgaaagttgcggagagcttcgttcagcactcccccagtgtagatcaggtcgatgagtcaccgcattccccacgggcgaccgtggcggtggctgcgttggcggcctgcccatggggtaacccatggggcgctctaatacggacatggtgtgaagagtctactgagctagttagtagtcctccggcccctgaatgcggctaatcccaactgcggagcacacgcccacaagccagcgggtagtgtgtcgtaacgggtaactctgcagcggaaccgactactttgggtgtccgtgtttccttttatctttatattggctgcttatggtgacaattaaagaattgttaccatatagctattggattggccatccggtgtgcaacagagcaattatttaccaatttattggttttgtaccattaaccttgaattctgtgaccacccttgattatatcttgacccttaacgcagctaaac

SEQ ID NO: 19501 - DNA, 705 bp, synthetic construct
  source 1..705: mol_type = other DNA
ccactgggcgctagcactccgattctgcggaatctttgtgcgcctgttttataaccctcccccaacttgcaacttagaagttatgtacgttgatcaacagcaggcgtggcacaccagccatgtcttgatcaagcacttctgtaaccccggactgagtatcaatagactgctcacgtggtcgaaagagaaaacgttcgttatccggctaactacttcgagaaacctagtagcaccactgaaactgcggagtgtttcgctcagcacttcccccgtgtagaccaggtcgatgagtcactgcttaccccacgggtgaccgtggcagtggctgcgttggcggcctgcctatggggcaacccataggacgctctaaagtggacatggtgtgaagagtctattgagctagttagtagtcctccggcccctgaatgcggctaatcctaactgcggagcgcatgcccccaaaccagagggtggtgcgtcgtaacgggtaactctgcagcggaaccgactactttgggtgtccgtgtttcttttattctcataatggctgcttatggtgacaattgaggaattgttaccatatagctattggattggccatccggtgtgcaacagagctattatctacttgtttgttggatacattccattgacacctaaatccttcaatacattgcactatattctaacgttgaacgcaagaaa

SEQ ID NO: 19502 - DNA, 649 bp, synthetic construct
  source 1..649: mol_type = other DNA
cctcctaagcacacttagaagctttgcacaatcacgaccagtagtgggcgtggcgcaccagccacgtcttggtcaagcacttctgtatccccggactgagtatcaataaactgctcacgcggttgaaggagaaaacgttcgttacccggctaactacttcgagaaacctagtagcaccatgaaagttgcggagtgtttcgctcagcacttcccccgtgtagatcaggtcgatgagtcactgtaaaccccacgggcgaccgtgacagtggctgcgttggcggcctgcccatggggtaacccatgggacgctctaatacagacatggtgtgaagagtctattgagctagttagtagtcctccggcccctgaatgcggctaatcctaactgcggagcgcgtaccctcaacccagggggcggcgcgtcgtaatgggtaactctgcagcggaaccgactactttgggtgtccgtgtttccttttattccttattggctgcttatggtgacaattgaaaagttgttaccatatagctattggattggccatccggtgtctaacagagccattgtttacctgtttattggatacgtccctcttaatttcaaaaccgtccaaactcttgactatatactgctccttaactgtaagaa

SEQ ID NO: 19503 - DNA, 718 bp, synthetic construct
  source 1..718: mol_type = other DNA
ggaggggccactggggcgctagcactccgattctgcggaatctttgtgcgcctgttttataaccctcccccgaaacttgtaacttagaagttatgtacgttaccgatcagcagcaggcgtggcacaccagccatgtcttgatcaagcacttctgtacccccggactgagtatcaatagactgctcacgtggtcgaaggagaaaacgttcgttatccggctaactacttcgagaagcctagtagcgccactgaaactgcggagtgtttcgctcagcacttcccccgtgtagatcaggtcgatgagtcactgctcaccccacgggcgaccgtggcagtggctgcgttggcggcctgcctatggggcaacccataggacgctctaaagtggacatggtgcgaagagtctattgagctagttagtagtcctccggcccctgaatgcggctaatcctaactgcggagcgcatgcccccaaaccagagggtggtgcgtcgtaacgggtaactctgcagcggaaccgactactttgggtgtccgtgtttcctttattcttataatggctgcttatggtgacaattgaggaattgttaccatatagctattggattggccatccggtgtgcaacagagctattgtctacttgtttgttggatacattccattaacacctaaatccttcaatacattacactatattctaacgctgaacgcaagaaa

SEQ ID NO: 19504 - DNA, 730 bp, synthetic construct
  source 1..730: mol_type = other DNA
gttgtacccactcacagggcccactgggcgctagcactctgattctgcggaatctttgtgcgcctgttttataacccctcccccaatttgtaatttagaagtagtgcacatcgccgatcaacagcaagcgtggcgcgccagccatgtttagatcaagcacttctgtttccccggactgagtatcaatagactgctcacgcggttgaaggagaaaacgttcgttacccgactaactacttcgagaagcctagtagcaccattgaaactgcagagtgtttcgctcagcactttccccgtgtagatcaggtcgatgagtcactgcactccccacgggcgaccgtggcagtggctgcgttggcggcctgcctatgggttcacccataggacgctctaatgtggacatggtgtgaagagtctattgagctagttagtagtcctccggcccctgaatgcggctaatcctaactgcggagcgcatgccctcaatccagggggtggtgcgtcgtaacgggcaactctgcagcggaaccgactactttgggtgtccgtgtttccttttattcttacattggctgcttatggtgacaattgagaaattgttaccatatagctattggattggccatccagtgtctaacagagcaattgtatatttatttgttggattcattccattatcatacacatccattaataccttatactacatcataagattgaacacaagaaa

SEQ ID NO: 19505 - DNA, 701 bp, synthetic construct
  source 1..701: mol_type = other DNA
tgggcgcagcactctggtacctcggtacctttgtgcgcctgttttataacccccccccagtgaaacttagaagcagcaaaccacgatcaatagcaggcataacactccagttatgtcttgatcaagcacttctgtttccccggactgagtatcaatagactgctcgcgcggttgaaggagaaaacgttcgttatccggctagctacttcggaaaacctagtaacaccatgaaagttgcggagagcttcgttcagcactcccccagtgtagatcaggtcgatgagtcaccgcattccccacgggcgaccgtggcggtggctgcgttggcggcctgcccatggggtaacccatggggcgctctaatacggacatggtgtgaagagtctactgagctagttagtagtcctccggcccctgaatgcggctaatcccaactgcggagcacacgcccacaagccagcgggtagtgtgtcgtaacgggtaactctgcagcggaaccgactactttgggtgtccgtgtttccttttatctttatattggctgcttatggtgacaattaaagaattgttaccatatagctattggattggccatccggtgtgcaacagagcaattatttacctatttattggttttgtaccattaaccttgaattctgtgaccacccttaattatatcttgacccttaacacagctaaac

SEQ ID NO: 19506 - DNA, 721 bp, synthetic construct
  source 1..721: mol_type = other DNA
cacccacccacagggcccactgggcgcaagcactctggtacctcggtacctttgtgcgcctgttttatacccctccccaatgaaacttagaagcagcaaaccacgatcaatagtaggcataacgctccagttatgtcttgatcaagcacttctgtttccccggactgagtatcaatagactgctcgcgcggttgaaggagaaaacgttcgttatccggctagctacttcggaaaacctagtagcaccatgaaagttgcggagagcttcgttcagcactcccccagtgtagatcaggtcgatgagtcaccgcattccccacgggcgaccgtggcggtggctgcgttggcggcctgcccatggggtaacccatggggcgctctaatacggacatggtgtgaagagtctactgagctagttagtagtcctccggcccctgaatgcggctaatcccaactgcggagcacacgcccacaagccagcgggtagtgtgtcgtaacgggtaactctgcagcggaaccgactactttgggtgtccgtgtttccttttatctttatattggctgcttatggtgacaattaaagaattgttaccatatagctattggattggccatccggtgtgcaacagagcaattatttaccaattcattggttttgtaccattaaccttgaattctgtgaccacccttgattatatcttgacccttaacgcagctaaac

SEQ ID NO: 19507 - DNA, 721 bp, synthetic construct
  source 1..721: mol_type = other DNA
cacccactcacagggcctactgggcgcaagcactctggtatcttggtacccttgtgcgcctgttttatacccctccccagtgaaacttagaagcagcaaaacacgaccaatagcaggcataacgcaccagttatgtcttggtcaagcacttctgtttccccggactgagtatcaatagactgctcgcgcggttgaaggagaaaacgttcgttatccggctagctacttcggaaaacctagtaacaccatgaaagttgcggagagcttcgttcagcactcccccagtgtagatcaggtcgatgagtcaccgcattccccacgggcgaccgtggcggtggctgcgttggcggcctgcccatggggtaacccatggggcgctctaatacggacatggtgtgaagagtctactgagctagttagtagtcctccggcccctgaatgcggctaatcccaactgcggagcacacgcccacaagccagcgggtagtgtgtcgtaacgggtaactctgcagcggaaccgactactttgggagtccgtgtttccttttacctttatattggctgcttatggtgacaattaaagaattgttaccatatagctattggattggccatccggtgtgcaacagagcaattatttacctatttattggttttgtaccattaactttggattctgcaaccacccttaattatatcttgacccttaacacagctaaac

SEQ ID NO: 19508 - DNA, 721 bp, synthetic construct
  source 1..721: mol_type = other DNA
cacccactcacagggcccactgggcgcaagcactctggtaccctggtacctttgtgcgcctgttttatacccccccccaatgaaacttagaagcagcaaaccacgatcaatagtaggcataacgctccagttgtgtcttgatcaagcacttctgtttccccggactgagtatcaatagactgctcgcgcggttgaaggagaaaacgttcgttatccggctagctacttcggaaaacctagtaacaccatgaaagttgcggagagcttcgttcagcactcccccagtgtagatcaggtcgatgagtcaccgcattccccacgggcgaccgtggcggtggctgcgttggcggcctgcccatggggtaacccatggggcgctctaatacggacatggtgtgaagagtctactgagctagttagtagtcctccggcccctgaatgcggctaatcccaactgcggagcacacgcccacaagccagcgggtagtgtgtcgtaatgggcaactctgcagcggaaccgactactttgggtgtccgtgtttccttttatctttatattggctgcttatggtgacaattaaagaattgttaccatatagctattggattggccatccggtgtgcaacagagcaatcatttaccaatttattggttttgtaccattaaccttgaattctgtgaccacccttaattatatcttgacccttaacacagctaaac

SEQ ID NO: 19509 - DNA, 721 bp, synthetic construct
  source 1..721: mol_type = other DNA
cacccactcacagggcccactgggcgcaagcactctggtacctcggtacctttgtgcgcctgttttatacccccccccaatgaaacttagaagcagcaaaccacgatcaatagtaggcataacgctccagttatgtcttgatcaagcacttctgtttccccggactgagtatcaatagactgctcgcgcggttgaaggagaaaacgttcgttatccggctagctacttcggaaaacctagtaacaccatgaaagttgcggagagcttcgttcagcactcccccagtgtagatcaggtcgatgagtcaccgcattccccacgggcgaccgtggcggtggctgcgttggcggcctgcccatggggtaacccatggggcgctctaatacggacatggtgtgaagagtctactgagctagttagtagtcctccggcccctgaatgcggctaatcccaactgcggagcacacgcccacaagccagcgggtagtgtgtcgtaacgggtaactctgcagcggaaccgactactttgggtgtccgtgtttccttttacctttatattggctgcttatggtgacaattaaagaattgttaccatatagctattggattggccatccggtgtgcaacagagcaattatttaccaatttattggttttgtaccattaaccttgaattctgtgaccacccttaattatatcttgacccttaacgcagctaaac

SEQ ID NO: 19510 - DNA, 721 bp, synthetic construct
  source 1..721: mol_type = other DNA
cacccactcacagggcctactgggcgcaagcactctggtatcttggtacctttgtgcgcctgttttatacccctccccagtgaaacttagaagcagcaaaacacgaccaatagcaggcataacgcaccagttatgtcttggtcaagcacttctgtttccccggactgagtatcaatagactgctcgcgcggttgaaggagaaaacgttcgttatccggctagctacttcgggaaacctagtaacaccatgaaagttgcggagagcttcgttcagcactcccccagtgtagatcaggtcgatgagtcaccgcattccccacgggcgaccgtggcggtggctgcgttggcggcctgcccatggggcaacccatggggcgctctaatacggacatggtgtgaagagtctactgagctagttagtagtcctccggcccctgaatgcggctaatcccaactgcggagcacacgcccacaagccagcgggtagtgtgtcgtaacgggtaactctgcagcggaaccgactactttgggagtccgtgtttccttttacctctatattggctgcttatggtgacaattaaagaattgttaccatatagctattggattggccatccggtgtgcaacagagcaattatttacctatttattggttttgtaccattaactttggattctgtaaccacccttaattatatcttgacccttaacacagctaaac

SEQ ID NO: 19511 - DNA, 721 bp, synthetic construct
  source 1..721: mol_type = other DNA
cacccactcacagggcccactgggcgcaagcactctggtaccccggtacctttgtgcgcctgttttgtacccccccccaatgaaacttagaagcagcaaaccacgatcaatagtaggcataacgctccagttatgtcttgatcaagcacttctgtttccccggactgagtatcaatagactgctcgcgcggttgaaggagaaaacgttcgttatccggctagctacttcggaaaacctagtaacaccatgaaagttgcggagagcttcgttcagcactcccccagtgtagatcaggtcgatgagtcaccgcattccccacgggcgaccgtggcggtggctgcgttggcggcctgcccatggggtaacccatggggcgctctaatacggacatggtgtgaagagtctactgagctagttagtagtcctccggcccctgaatgcggctaatcccaactgcggagcacacgcccacaagccagcgggtagtgtgtcgtaacgggtaactctgcagcggaaccgactactttgggtgtccgtgtttccttttacctttatattggctgcttatggtgacaattaaagaattgttaccatatagctattggattggccatccggtgtgcaacagagcaattatttaccaatttattggttttgtaccattaaccttgaattctgtgaccacccttaattatatcttgacccttaacgcagctaaac

SEQ ID NO: 19512 - DNA, 721 bp, synthetic construct
  source 1..721: mol_type = other DNA
cacccactcacagggcctactgggcgcaagcactctggtatcttggtacctttgtgcgcctgttttatacccctccccagtgaaacttagaagcagcaaaacacgaccaatagcaggcataacgcaccagttatgtcttggtcaagtacttctgtttccccggactgagtatcaatagactgctcgcgcggttgaaggagaaaacgttcgttatccggctagctacttcggaaaacctagtaacaccatgaaagttgcggagagcttcgttcagcactcccccagtgtagatcaggtcgatgagtcaccgcattccccacgggcgaccgtggcggtggctgcgttggcggcctgcccatggggtaacccatggggcgctctaatacggacatggtgtgaagagtctactgagctagttagtagtcctccggcccctgaatgcggctaatcccaactgcggagcacacgcccacaagccagcgggtagtgtgtcgtaacgggtaactctgcagcggaaccgactactttgggagtccgtgtttccttttacctttatattggctgcttatggtgacaattaaagaattgttaccatatagctattggattggccatccggtgtgcaacagagcaattatttacctatttattggttttgtaccattaactttggattctgtaaccacccttaattatatcttgacccttaacacagctaaac

SEQ ID NO: 19513 - DNA, 721 bp, synthetic construct
  source 1..721: mol_type = other DNA
cacccactcacagggcccactgggcgcaagcactctggtaccccggtacctttgtgcgcctgttttatacccccccccaatgaaacttagaagcagcaaaccacgatcaatagtaggcataacgctccagttatgtcttgatcaagcacttctgtttccccggactgagtatcaatagactgctcgcgcggttgaaggagaaaacgttcgttatccggctagctacttcggaaaacctagtaacaccatgaaagttgcggagagcttcgttcagcactcccccagtgtagatcaggtcgatgagtcaccgcattccccacgggcgaccgtggcggtggctgcgttggcggcctgcccatggggtaacccgtggggcgctctaatacggacatggtgtgaagagtctactgagctagttagtagtcctccggcccctgaatgcggctaatcccaactgcggagcatacgcccacaagccagcgggtagtgtgtcgtaacgggtaactctgcagcggaaccgactactttgggtgtccgtgtttccttttatctttatattggctgcttatggtgacaattaaagaattgttaccatatagctattggattggccatccggtgtgcaacagagcaattatttaccaatttattggctttgtaccattaaccttgaattctgtgaccacccttaattatatcttgacccttaacgcagctaaac

SEQ ID NO: 19514 - DNA, 721 bp, synthetic construct
  source 1..721: mol_type = other DNA
cacccactcacagggcccactgggcgcaagcactctggtaccccggtacctttgtgcgcctgttttatacccccccccaatgaaacttagaagcagcaaaccacgatcaatagtaggcataacgctccagttatgtcttgatcaagcacttctgtttccccggactgagtatcaatagactgctcgcgcggttgaaggagaaaacgttcgttatccggctagctacttcggaaaacctagtaacaccatgaaagttgcggagagcttcgttcagcactcccccagtgtagatcaggtcgatgagtcaccgcattccccacgggcgaccgtggcggtggctgcgttggcggcctgcccatggggtaacccatggggcgctctaatacggacatggtgtgaagagtctactgagctagttagtagtcctccggcccctgaatgcggctaatcccaactgcggagcacacgcccacaagccagcgggtagtgtgtcgtaatgggcaactctgcagcggaaccgactactttgggtgtccgtgtttccttttatctttatattggctgcttatggtgacaattaaagaattgttaccatatagctattggattggccatccggtgtgcaacagagcaattatttaccaatttattggttttgtaccattaaccttgaattctgtgaccacccttaattatatcttgacccttaacacagctaaac

SEQ ID NO: 19515 - DNA, 721 bp, synthetic construct
  source 1..721: mol_type = other DNA
cacccactcacagggcccactgggcgcaagcactctggtaccccggtacctttgtgcgcctgttttacacccccccccaatgaaacttagaagcagcaaaccacgatcaacagtaggcataacgctccagttatgtcttgatcaagcacttctgtttccccggactgagtatcaatagactgctcgcgcggttgaaggagaaaacgttcgttatccggctagctacttcggaaaacctagtaacaccatgaaagttgcggagagcttcgttcagcactcccccagtgtagatcaggtcgatgagtcaccgcattccccacgggcgaccgtggcggtggctgcgttggcggcctgcccatggggtaacccgtggggcgctctaatacggacatggtgtgaagagtctactgagctagttagtagtcctccggcccctgaatgcggctaatcccaactgcggagcatgcgcccacaagccagtgggtagtgtgtcgtaacgggtaactctgcagcggaaccgactactttgggtgtccgtgtttccttttatctttatattggctgcttatggtgacaattaaagaattgttaccatatagctattggattggccatccggtgtgcaacagagcaattatttaccaatttattggctttgtaccattaaccttgaattctgtgaccacccttaattatatcttgacccttaacgcagctaaac

SEQ ID NO: 19516 - DNA, 721 bp, synthetic construct
  source 1..721: mol_type = other DNA
cacccactcacagggcctactgggcgcaagcactctggcacctcggtacctttgtgcgcctgttttatacccccccccagtgaaacttagaagcagcaaaccacgatcaatagcaggcatagcgctccagttatgtcttgatcaagcacttctgtttccccggactgagtatcaatagactgctcgcgcggttgaaggagaaaacgttcgttatccggccaactacttcggaaaacctagtaacaccatgaaagttgcggagagcttcgttcagcactcccccagtgtagatcaggtcgatgagtcaccgcattccccacgggcgaccgtggcggtggctgcgttggcggcctgcccatggggtaacccatggggcgctctaatacggacatggtgtgaagagtctactgagctagttggtagtcctccggcccctgaatgcggctaatcccaactgcggagcacacgcccacaagccagcgggtagtgtgtcgtaacgggtaactctgcagcggaaccgactactttgggtgtccgtgtttccttttaactttatactggctgcttatggtgacaattgtagaattgttaccatatagctgttggattggccatccggtgtgcaacagagcaattatttacctatttattggttttgtgccattaactttgaattctgtgaccacccttaattatatcttgacccttaacacagctaaat

SEQ ID NO: 19517 - DNA, 721 bp, synthetic construct
  source 1..721: mol_type = other DNA
acccactcacagggcccaccgggcgcaagcactctggtaccccggtacctttgtgcgcctgttttatactccccccctaatgaaacttagaagcagcaaatcacgatcaatagcaggcataacactccagttatgtcttgatcaagcacatctgtttccccggaccgagtatcaatagactgctcgcgcggttgaaggagaaaacgtccgttacccggctaactacttcgggaaacctagtaacaccatggaagttgcggagagcttcgctcagcactcccccagtgtagatcaggccgatgagtcaccgcattccccacgggtgaccgtggcggtggctgcgttggcggcctgcccatggggtaacccatggggcgctctaatacggacatggtgcgaagagtctactgagctagttagtagtcctccggcccctgaatgcggctaatcccaactgcggagcacacgcccacaagccagcgggtagtgtgtcgtaacgggcaactctgcagcggaaccgactactttgggtgtccgtgtttccttttattcttatattggctgcttatggtgacgactaaagagttgttaccatatagctattggattggccatccggtgtgtaacagagcaattgtttacctatttattggttttgtgccactaaccttgaagtctgtgattaccctcaattatatcttgaccctcaatacagctaaac

SEQ ID NO: 19518 - DNA, 705 bp, synthetic construct
  source 1..705: mol_type = other DNA
tactggggcgcaagcactctggcatctcggtacctttgtgcgcctgttttatacccccccccagtgaaacttagaagcagcaaatcacgatcaatagcaggcataacgctccagttatgtctcgatcaagcacttctgtttccccggactgagtatcaatagactgctcgcgcggttgaaggagaaaacgttcgttatccggctagctacttcggaaaacctagtaacaccatgaaagttgcggagagcttcgttcagcactcccccagtgtagatcaggtcgatgagtcaccgcattccccacgggcgaccgtggcggtggctgcgttggcggcctgcccatggggtaacccatggggcgctctaatacggacatggtgtgaagagtctactgagctagttagtagtcctccggcccctgaatgcggctaatcccaactgcggagcacacgcccacaagccagcgggtagtgtgtcgtaacgggtaactctgcagcggaaccgactactttgggtgtccgtgtttccttttatttttatattggctgcttatggtgacaattaaagaattgttaccatatagctattggattggccatccggtgtgcaacagagcaattatttacctatttattggttttgtaccattaaccttgaattctgtgaccacccttaattatatcttgacccttaacacagctaaac

SEQ ID NO: 19519 - DNA, 720 bp, synthetic construct
  source 1..720: mol_type = other DNA
cacccactcacagggcccactgggcgcaagcactctggtaccccggtacctttgtgcgcctgttttataccccccccaatgaaacttagaagcagcaaaccacgatcaatagtaggcataacgctccagttatgtcttgatcaagcacttctgtttccccggactgagtatcaatagactgctcgcgcggttgaaggagaaaacgttcgttatccggctagctacttcgggaaacctagtaacaccatgaaagttgcggagagcttcgttcagcactcccccagtgtagatcaggtcgatgagtcaccgcattccccacgggcgaccgtggcggtggctgcgttggcggcctgcccatggggtaacccatggggcgctctaatacggacatggtgtgaagagtctactgagctagttagtagtcctccggcccctgaatgcggctaatcccaactgcggagcacacgcccacaagccagcgggtagtgtgtcgtaacgggtaactctgcagcggaaccgactactttgggtgtccgtgtttccttttatctttatattggctgcttatggtgacaattaaagaattgttaccatatagctattggattggccatccggtgtgcaacagagcaattatttatcaatttattggttttgtaccattaaccttgaattctgtgaccacccttaattatatcttgacccttaacgcagctaaac

SEQ ID NO: 19520 - DNA, 722 bp, synthetic construct
  source 1..722: mol_type = other DNA
acccacccacagggcctactgggcgctagcactctggcactgaggtacctttgtgcgcctgttttatttcccttccccgaagtaacttagaagctgtgaactaacgatcaatagtgggtgtgacgcaccagtcacatcttgatcaagcacttctgtttccccggactgagtatcaataggctgctcgcgcggctgaaggagaaaacgttcgttacccgaccaactacttcgagaagcttagtaccaccatgaacgaggcagagtgtttcgttcagcacaaccccagtgtagatcaggctgatgagtcactgcaacccccatgggcgaccatggcagtggctgcgttggcggcctgcccatggaaaaatccatgggacgctctaattctgacatggtgtgaagagcctattgagctagctggtagtcctccggcccctgaatgcggctaatcccaactgcggagcacatgctcacaaaccagtgggtggtgtgtcgtaacgggcaactctgcagcggaaccgactactttgggtgtccgtgtttccttttattcttatgttggctgcttatggtgacaatcaaagaattgttaccatatagctattggattggccatccggtgtgcaacagagcaatcgtctacctatttgttggttttgtaccattatcactgaaggctgtgatcactctcaaattcattttgaccctcaactcaatcaaac

SEQ ID NO: 19521 - DNA, 718 bp, synthetic construct
  source 1..718: mol_type = other DNA
cgaggggccactggggcgctagcactccgattctgcggaatctttgtgcgcctgttttataaccctcccccgaaacttgtaacttagaagttatgtacgttaccgatcagcagcaggcgtggcacaccagccatgtcttgatcaagcacttctgtacccccggactgagtatcaatagactgctcacgtggtcgaaggagaaaacgttcgttatccggctaactacttcgagaagcctagtagcgccactgaaactgcggagtgtttcgctcagcacttcccccgtgtagatcaggtcgatgagtcactgctcaccccacgggcgaccgtggcagtggctgcgttggcggcctgcctatggggcaacccataggacgctctaaagtggacatggtgcgaagagtctattgagctagttagtagtcctccggcccctgaatgcggctaatcctaactgcggagcgcatgcccccaaaccagagggtggtgcgtcgtaacgggtaactctgcagcggaaccgactactttgggtgtccgtgtttcctttattcttataatggctgcttatggtgacaattgaggaattgttaccatatagctattggattggccatccggtgtgcaacagagctattatctacttgtttgttggatacattccattaacacctaaatccttcaatacattacactatattctaacgctgaacgcaagaaa

SEQ ID NO: 19522 - DNA, 718 bp, synthetic construct
  source 1..718: mol_type = other DNA
cgcggggccactgaagcgctagcactccgattctgcggaatctttgtgcgcctgttttataaccctcccccgaaacttgtaacttagaagttatgtacgttaccgatcagcagcaggcgtggcacaccagccatgtcttgatcaagcacttctgtacccccggactgagtatcaatagactgctcacgtggtcgaaggagaaaacgttcgttatccggctaactacttcgagaagcctagtagcgccactgaaactgcggagtgtttcgctcagcacttcccccgtgtagatcaggtcgatgagtcactgctcaccccacgggcgaccgtggcagtggctgcgttggcggcctgcctatggggcaacccataggacgctctaaagtggacatggtgcgaagagtctattgagctagttagtagtcctccggcccctgaatgcggctaatcctaactgcggagcgcatgcccccaaaccagagggtggtgcgtcgtaacgggtaactctgcagcggaaccgactactttgggtgtccgtgtttcctttattcttataatggctgcttatggtgacaattgaggaattgttaccatatagctattggattggccatccggtgtgcaacagagctattgtctacttgtttgttggatacattccattaacacctaaatccttcaatacattacactatattctaacgctgaacgcaagaaa

SEQ ID NO: 19523 - DNA, 738 bp, synthetic construct
  source 1..738: mol_type = other DNA
agcctgtgggttgttcccacccacagggcccattgggcgctagcacactggttttgcggaatctttgtgcgcctgttttataacccttcccccaagcagcaacttagaagtattgcacaatcacggccagtagtgggcgtggcgcgccagccacgtcttggtcaagcacttctgtatccccggactgagtatcaatagactgctcacgcggttgaaggagaaaacgttcgttacccggctaactacttcggaaaacctagtagcaccttgaaagttgcagagtgtttcgctcagcacttcccccgtgtagatcaggtcgatgagccactgtaaaccccacgggcgaccgtgacagtggctgcgttggcggcctgcccatggggtaacccatgggacgctctaatacagacatggtgtgaagagtctactgagctagttagtagtcctccggcccctgaatgcggctaatcctaactgcggagcacacaccctcaacccagggggcggtgtgtcgtaatgggtaactctgcagcggaaccgactactttgggtgtccgtgtttccttttatcccttactggctgcttatggtgacaattgaaaagttgttaccatatagctattggattggccatccggtgtctaacagagctattgtttacttatttattggatacgtccctcttaatcttaaggctattcaaactcttaattatatattgctccttaactataagaa

SEQ ID NO: 19524 - DNA, 711 bp, synthetic construct
  source 1..711: mol_type = other DNA
ccacgtggtgctagcactctggttctacggaacccttgtgcgcctgttttacgcccccaccccaatttgcaacttagaagcaattcacaacactgatcaatagtaggcgtggcgcaccagctacgtcttgatcaagcacttctgtttccccggaccgagtatcaatagactgctcacgcggttgaaggagaaagcgtccgttatccggctaactacttcgagaaacccagtaacgccattgaaactgcagagtgtttcgctccacacttcccccgtgtagatcaggtcgatgagtcactgcaatccccacgggcgaccgtggcagtggctgcgctggcggcctgcctatggggcaacccataggacgctctaatgtggacatggtgtgaagagtctattgagctagttagtagtcctccggcccctgaatgcggctaatcctaactgcggagcacatgccctcaatccagagggtagtgtgtcgtaatgggcaactctgcagcggaaccgactactttgggtgtccgtgtttccttttattctcacattggctgcttatggtgacaatcactgaattgttaccatatagctattggattggccgtccggtgtgcaatagagctattatatacctatttgttggctttgtaccactaaccttaaaatctgcaaccactctcaactatatattaacccttaatacaatcaaac

SEQ ID NO: 19525 - DNA, 690 bp, synthetic construct
  source 1..690: mol_type = other DNA
tggttctgcgggacctttgtgcgcctgttttataacccttcccttaaacagtaacttagaagctttgtacaatcatggccaatagtgggcgtggcgcgccagtcacgtcttggtcaagcacttctgtatccccggactgagtatcaatagactgctcacgcggttgaaggagaaaacgttcgttacccggctaactacttcgagaaacctagtagcaccatgaaagttgcggagtgtttcgctcagcacttcccccgtgtagatcaggtcgatgagtcactgtaaaccccacgggcgaccgtgacagtggctgcgttggcggcctgcccatggggtaacccatgggacgctctaatacggacatggtgcgaagagtctattgagctagttagcagtcctccggcccctgaatgcggctaatcctaactgcggagcgcgcaccttcaatccagggggcggcgcgtcgtaatgggtaactctgcagcggaaccgactactttgggtgtccgtgtttccttttattctttattggctgcttatggtgacaattgaaaagttgttaccatatagctattggattggccatccggtgtctgacagagctattgtttacctattcattggcttcgtccctcttaatctcaaggccatccaaactctcgattacatattgctcctcaactgtaagaa

SEQ ID NO: 19526 - DNA, 723 bp, synthetic construct
  source 1..723: mol_type = other DNA
gttgtacccactcacagggcccactgggcgttagcactctggtaccccggtacctttgtgcgcctgttttatatccccccccattgaaacttagaagtaatgcacctcgatcaatagcgggcgtggcgcaccagccacgtcatgatcaagcacttctgtttccccggaccgagtatcaatagactgctaacgcggttgagggagaaaacgtccgttacccggccaactgcttcgagaaatccagtaacatcatgaaagttgcagagtgtttcgctcagcacttccccagtgtagatcaggtcgatgagtcaccgcgttccccacgggcgaccgtggcggtggctgcgttggcggcctgcctgtggggcaacccgcaggacgctctaatatggacatggtgtgaagaatctattgagccagttggtagtcctccggcccctgaatgcggctaatcctaactgcggagcacgcgccttcaatccagtgggtagcgtgtcgtaatgggtaactctgcagcggaaccgactactttgggtgtccgtgtttccatttattcttacattggctgcttatggtgacaattgaaagattgttaccatatagctattggattggccatccggtatcgaatagagcgattatctatcagtttattggatttattccgttgagtgtgcagcagtatcgcactttgcttttaatagtgagactgaatagtgcaaa

SEQ ID NO: 19527 - DNA, 729 bp, synthetic construct
  source 1..729: mol_type = other DNA
ttgtacccacccacagggcccactgggcgctagcactctgattctgcggaatctttgtgcgcctgttttataaccctcccccgaaacttgtaacttagaagttatgtacgttactgatcaacagcaggcgtggcacaccagccatgtcttgatcaagcacttctgtacccccggactgagtatcaatagactgctcacgtggtcgaaggagaaaacgttcgttatccggctaactacttcgagaaacctagtagcaccactgaaactgcggagtgtttcgctcagcacttcccccgtgtagatcaggccgatgagtcactgcgtaccccacgggtgaccgtggcagtggctgcgttggcggcctgcctatggggcaacccataggacgctctaaagtggacatggtgcgaagagtctattgagctagttagtagtcctccggcccctgaatgcggctaatcctaactgcggagcgcatgccctcaaaccagagggtggtgcgtcgtaacgggaaactctgcagcggaaccgactactttgggtgtccgtgtttcttttattctcataatggctgcttatggtgacaattgaggaattgttaccatatagctattggattggccatccggtgtgcaacagagctattatctacttgtttgttggatacattccattaacacctaaatccttcaatacattgcactacattctaacgttgaacacaagaaa

SEQ ID NO: 19528 - DNA, 729 bp, synthetic construct
  source 1..729: mol_type = other DNA
ttgtacccacccacagggcccactgggcgctagcactctgattctgcggaatctttgtgcgcctgttttataaccctcccccgaaacttgtaacttagaagttatgtacgttactgatcaacagcaggcgtggcacaccagccatgtcttgatcaagcacttctgtacccccggactgagtatcaatagactgctcacgtggtcgaaggagaaaacgttcgttatccggctaactacttcgagaaacctagtagcaccactgaaactgcggagtgtttcgctcagcacttcccccgtgtagatcaggccgatgagtcactgcgtaccccacgggtgaccgtggcagtggctgcgttggcggcctgcctatggggcaacccataggacgctctaaagtggacatggtgcgaagagtctattgagctagttagtagtcctccggcccctgaatgcggctaatcctaactgcggagcgcatgccctcaaaccagagggtggtgcgtcgtaacgggaaactctgcagcggaaccgactactttgggtgtccgtgtttcttttattctcataatggctgcttatggtgacaattgaggaattgttaccatatagctattggattggccatccggtgtgcaacagagctattatctacttgtttgttggatacattccattaacacctaaatccttcaatacattgcactacattctaacgctgaacacaagaaa

SEQ ID NO: 19529 - DNA, 729 bp, synthetic construct
  source 1..729: mol_type = other DNA
ttgtacccacccacagggcccactgggcgctagcactctgattctgtggaatctttgtgcgcctgttttataaccctcccccgaaacttgtaacttagaagttatgtacgttactgatcaacagcaggcgtggcacaccagccatgtcttgatcaagcatttctgtacccccggactgagtatcaatagactgctcacgtggtcgaaggagaaaacgttcgttatccggctaactacttcgagaaacctagtagcaccactgaagctgcggagtgtttcgctcagcacttcccccgtgtagatcaggccgatgagtcactgcgtaccccacgggtgaccgtggcagtggctgcgttggcggcctgcctatggggtaacccataggacgctctaaagtggacatggtgcgaagagtctattgagctagttagtagtcctccggcccctgaatgcggctaatcctaactgcggagcgcatgccctcaaaccagagggtggtgcgtcgtaacgggaaactctgcagcggaaccgactactttgggtgtccgtgtttcttttattctcataatggctgcttatggtgacaattgaggaattgttaccatatagctattggattggccatccggtgtgcaacagagctattatctacttgtttgttggatacattccattaacacctaaatccttcaatacattgcactacattctaacgctgaacataagaaa

SEQ ID NO: 19530 - DNA, 729 bp, synthetic construct
  source 1..729: mol_type = other DNA
ttgtacccacccacagggcccactgggcgctagcactccgattctgcggaatctttgtgcgcctgttttataaccctcccccgaaacttgcaacttagaagttgtgtacgttactgatcaacagcaggcgtggcacaccagccatgtcttgatcaagcacttctgtgtccccggactgagtatcaatagactgctcacgtggtcgaaggagaaaacgttcgttatccggctaactacttcgagaaacctagtagcaccactgaaactgcggagtgtttcgctcagcacttcccccgtgtagaccaggtcgatgagtcactgcttaccccacgggtgaccgtggcagtggctgcgttggcggcctgcctatggggcaacccataggacgctctaaagtggacatggtgcgaagagtctattgagctagttagtagtcctccggcccctgaatgcggctaatcctaactgcggagcgcatgccctcaaaccagagggtggtgcgtcgtaacgggtaactctgcagcggaaccgactactttgggtgtccgtgtttcttttattctcataatggctgcttatggtgacaattgaggaattgttaccatatagctattggattggccatccggtgtgcaacagagctattatctacttgtttgttggatacattccattaacacctaagtccttcaatacattgcactacattctaacgctgaacacaagaaa

SEQ ID NO: 19531 - DNA, 729 bp, synthetic construct
  source 1..729: mol_type = other DNA
ttgtacccacccacagggcccactgggcgctagcactccgattctgcggaatctttgtgcgcctgttttataaccctcccccgaaacttgcaacttagaagttatgcacgccactgatcaacagcaggcgtggcacaccagccatgtcttgatcaagcacttctgtacccccggactgagtatcaatagactgctcacgtggtcgaaggagaaaacgttcgttatccggctaactacttcgagaaacctagtagcaccaccgaaactgcggagtgtttcgctcagcacttcccccgtgtagatcaggtcgatgagtcactgcttaccccacgggtgaccgtggcagtggctgcgttggcggcctgcctatggggcaacccataggacgctctaaagtggacatggtgcgaagagtctattgagctagttagtagtcctccggcccctgaatgcggctaatcctaactgcggagcgcatgccctcaaaccagggggtggtgcgtcgtaacgggtaactctgcagcggaaccgactactttgggtgtccgtgtttcttttattctcataatggctgcttatggtgacaattgaggaattgttgccatatagctattggattggccatccggtgtgcaacagagctgttatctacttgtttgttggatacattccattaacactcaaatccttcaatacattgcactatattctaacgctgaacgcaagaaa

SEQ ID NO: 19532 - DNA, 729 bp, synthetic construct
  source 1..729: mol_type = other DNA
ttgtacccatctacagggcccactgggcgctagcactccgattctgcggaatctttgtgcgcctgttttataaccctcccccgaaacttgtaacttagaagttatgaacattactggtcaacagcaggcgtggcacaccagccatgtcttgatcaagcacttctgtacccccggactgagtatcaatagactgctcacgtggtcgaaggagaaaacgttcgttatccggctaactacttcgagaaacctagtagcaccactgaaactgcggagtgtttcgctcagcacttcccccgtgtagatcaggtcgatgagtcactgcttacctcacgggtgaccgtggcagtggctgcgttggcggcctgcctatggggcaacccataggacgctctaaagtggacatggtgcgaagagtctattgagctagttagtagtcctccggcccctgaatgcggctaatcctaactgcggagcgcatgccctcaaaccagagggtggtgcgtcgtaacgggtaactctgcagcggaaccgactactttgggtgtccgtgtttcttttattctcataatggctgcttatggtgacaattgaggaattgttaccatatagctattggattggccatccggtgtgcaacagagctattatctacttgtttgttggatacattccattaacacttaaatccttcaatacattgcactacattctaacgctgaacacaagaag

SEQ ID NO: 19533 - DNA, 721 bp, synthetic construct
  source 1..721: mol_type = other DNA
ccactcacagggcccactgggcgctagcactctggtaatacgttacctttgtgcgcctgttttatctccccctaccctggaacaccttagaagcaaagcatctctgatcaatagaaggtgcagcgaaccagctgcgtctcgatcaagcacttctgtttccccggactgagtatcaatagactgctaacgcggtcgaaggagaaaacgttcgttatccggctagctacttcgagaagcctagtaacaccatgaaagttgcagagtgtttcactcagcacttcccccgtgtagatcaggtcgatgagtcaccgcgatccccacgggcgaccgtggcggtggctgcgttggcggcctgcctatggggcaacccataggacgctctaatacagacatggtgtgaagagcctattgagctagctagtagtcctccggcccctgaatgcggctaatcctaactgcggagcacatgctcgtgaaccagcgagtagtgtgtcgtaatgggcaactctgcagcggaaccgactactttgggtgtccgtgtttctttttattttctctattggctgcttatggtgacaattaaagaattgttaccatatagctattggattggccatccggtgactaatagagctattatatatctctttgttggatttgtccccttgaggctcactgcttataacacactttgttatatattgactctcaactcagcaaa

SEQ ID NO: 19534 - DNA, 721 bp, synthetic construct
  source 1..721: mol_type = other DNA
ccactcacagggcccactgggcgctagcactctggtaatacgttacctttgtgcgcctgttttatctccccctaccctggaacaccttagaagcaaagcatctctggtcaatagaaggtgcagcgaaccagctgcgtctcgatcaagcacttctgtttccccggactgagtatcaatagactgctaacgcggtcgaaggagaaaacgttcgttatccggctagctacttcgagaagcctagtaacaccatgaaagttgcagagtgtttcactcagcacttcccccgtgtagatcaggtcgatgagtcaccgcgatccccacgggcgaccgtggcggtggctgcgttggcggcctgcctatggggcaacccataggacgctctaatacagacatggtgtgaagagcctattgagctagctagtagtcctccggcccctgaatgcggctaatcctaactgcggagcacatgctcgtgaaccagcgagtagtgtgtcgtaatgggcaactctgcagcggaaccgactactttgggtgtccgtgtttctttttattttctctattggctgcttatggtgacaattaaagaattgttaccatatagctattggattggccatccggtgactaatagagctattatatatctctttgttggatttgtccccttgaggctcactgcttataacacactttgttttatattgactctcaactcagcaaa

SEQ ID NO: 19535 - DNA, 729 bp, synthetic construct
  source 1..729: mol_type = other DNA
ttgtacccacccacagggcccactgggcgctagcactccgattctgcggaatctttgtgcgcctgttttaaaaccctcccccgaaacttgcaacttagaagttatgtacgttactgatcaacagcaggcgtggcataccagccatgtcttgatcaagcacttctgtaaccccggaccgagtatcaatagactgctcacgtggtcgaaagagaaaacgttcgttatccggctaactacttcgagaaacctagtagcaccactgaaactgcggagtgtttcgctcagcacttcccccgtgtagatcaggtcgatgagtcactgcttaccccacgggtgaccgtggcagtggctgcgttggcggcctgcctatggggcaacccataggacgctctaaagtggacatggtgtgaagagtctattgagctagttagtagtcctccggcccctgaatgcggctaatcctaactgcggagcgcatgcccccaaaccagagggtggtgcgtcgtaacgggtaactctgcagcggaaccgactactttgggtgtccgtgtttcttttattctcataatggctgcttatggtgacaattgaggaattgttaccatatagctattggattggccatccggtgtgcaacagagctattatctacctgtttgttggatacattccattgacacctaaatccttcaatacattgcactatatcctaacgttgaacgcaagaaa

SEQ ID NO: 19536 - DNA, 736 bp, synthetic construct
  source 1..736: mol_type = other DNA
ctgtgggttgttcccacccacagggcccactgggcgctagcacactgattctacggaaactttgtgcgcctgttttatgtccctccccctaatatgtaacttagaaatttagtacacccatgaccaatagtaggcgtgacgcaccagtcacgtcttggtcaagcacttctgtctccccgggctgagtatcaatagactgcttacgcggttgaaggagaaaacgctcgttacccggctaactacttcgagaaacctagtaacaccatgaaagttgcagggtgtttcgctcagcacttcccccgtgtagatcaggtcgatgagtcactgcaaaccccacgggcgaccgtggcagtggctgcgttggcggcctgcccatggggtaacccatgggacgctctaatactgacatggtgcgaagagtctattgagctagttagtagtcctccggcccctgaatgcggctaatcctaactgcggagcacacaccctcaacccagggggcggtgtgtcgtaacgggcaactctgcagcggaaccgactactttgggtgtccgtgtttccttttatctctattatggctgcttatggtgacaattgaagaattgttaccatatagctattggattggccatccggtgtttaacagagcaattgtatacctatttgttgggtttgtccctttgtcacacacatctctcaataccttatactacattataaagttgaatacaggaac

SEQ ID NO: 19537 - DNA, 736 bp, synthetic construct
  source 1..736: mol_type = other DNA
ctgtgggttgttcccacccacagggcccactgggcgctagcacactgattctacggaaactttgtgcgcctgttttatgtccctccccctaatatgtaacttagaaatttagtacacccatgaccaatagtaggcgtgacgcaccagtcacgtcttggtcaagcacttctgtctccccgggctgagtatcaatagactgcttacgcggttgaaggagaaaacgctcgttacccggctaactacttcgagaaacctagtaacaccatgaaagttgcagggtgtttcgctcagcacttcccccgtgtagatcaggtcgatgagtcactgcaaaccccacgggcgaccgtggcagtggctgcgttggcggcctgcccatggggtaacccatgggacgctctgatactgacatggtgcgaagagtctattgagctagttagtagtcctccggcccctgaatgcggctaatcctaactgcggagcacacaccctcaacccagggggcggtgtgtcgtaacgggcaactctgcagcggaaccgactactttgggtgtccgtgtttccttttatctctattatggctgcttatggtgacaattgaagaattgttaccatatagctattggattggccatccggtgtttaacagagcaattgtatacctatttgttggatttgtccctttgtcacacacatctctcaataccttatactacattataaagttgaatacaggaac

SEQ ID NO: 19538 - DNA, 702 bp, synthetic construct
  source 1..702: mol_type = other DNA
tgggcgcaagcactctggtacctcggtacctttgtgcgcctgttttataacccccccccagtgaaacttagaagcagcaaaccacgatcaatagcaggcataacactccagttatgtcttgatcaagcacttctgtttccccggactgagtatcaatagactgctcgcgcggttgaaggagaaaacgttcgttatccggctagctacttcggaaaacctagtaacaccatgaaagttgcggagagcttcgttcagcactcccccagtgtagatcaggtcgatgagtcaccgcattccccacgggcgaccgtggcggtggctgcgttggtggcctgcccatggggtaacccatggggcgctctaatacggacatggtgtgaagagtctactgagctagttagtagtcctccggcccctgaatgcggctaatcccaactgcggagcacacgcccacaagccagcgggtagtgtgtcgtaacgggtaactctgcagcggaaccgactactttgggtgtccgtgtttccttttatctttatattggctgcttatggtgacaattaaagaattgttaccatatagctattggattggccatccggtgtgcaacagagcaattatttacctatttattggttttgtaccattaaccttgaattctgtgaccacccttaattatatcttgacccttaacacagctaaac

SEQ ID NO: 19539 - DNA, 663 bp, synthetic construct
  source 1..663: mol_type = other DNA
cctgttttatacccccccccaatgaaacttagaagcagtaaaccacgatcaatagtaagcataacgcaccagttatgtcttgatcaagcacttctgttcccccggactgagtatcaatagactgctcgcgcggttgaaggagaaaacgttcgttatccggctaactacttcgggaaacctagtaactccatgaaagttgcggagagcttcgttcagcacttccccagtgtagatcaggtcgatgagtcaccgcatcccccacgggcgaccgtggcggtggctgcgttggcggcctgcccatgggataacccatggggcgctctaatacggacatggtgtgaagagtctactgagctagttagtagtcctccggcccctgaatgcggctaatcccaactgcggagcacacgcccacaagccagcgggtagtgtgtcgtaacgggcaactctgcagcggaaccgactactttgggtgtccgtgtttccttttatctttatgttggctgcttatggtgacaattaaagaattgttaccatatagctattggattggccatccggtgtgcaacagagcaattatttatcaatttattggttttgtgccattaaccctgaattctgtgaccacccttaattatatcttgacccttaacacagctaaac

SEQ ID NO: 19540 - DNA, 721 bp, synthetic construct
  source 1..721: mol_type = other DNA
cacccactcacagggcctactgggcgcaagcactctggtacctcggtacctttgtgcgcctgttttatacccccccccagtgaaacttagaagcagcaaaccacgatcaatagcaggcatagcgctccagttatgtcttgatcaagcacttctgtttccccggactgagtatcaatagactgcttgcgcggttgaaggagaaaacgttcgttatccggccaactacttcggaaaacctagtaacaccatgaaagttgcggagagcttcgttcagcactcccccagtgtagatcaggtcgatgagtcaccgcattccccacgggcgaccgtggcggtggctgcgttggcggcctgcccatggggtaacccatggggcgctctaatacggacatggtgtgaagagtctactgagctagttggtagtcctccggcccctgaatgcggctaatcccaactgcggagcacacgcccacaagccagcgggtagtgtgtcgtaacgggtaactctgcagcggaaccgactactttgggtgtccgtgtttccttttaactttatactggctgcttatggtgacaattagagaattgttaccatatagctattggattggccatccggtgtgcaacagagcaattatttacctatttattggttttgtaccattaactttgaattctgtgaccacccttaattatatcttgacccttaacacagctaaat

SEQ ID NO: 19541 - DNA, 733 bp, synthetic construct
  source 1..733: mol_type = other DNA
tgggttgtacccacccacagggcccactgggcgctagcactctggtaccacggtacctttgtgtgcctgttttatctccccaaacccccgtaacgctatattagaagatagacaatgcgaccaatagtcagtggggcaacccagcctcactttggtcaagcacctctgtttccccgggcttagtaccaataggctgcttgcgcggctgaaggggaacgcgcccgttatccggctaactacttcaagaaacctagtaccaccatggaagttgcagagtgtttcgctcagcacaaccccagtgtagatcaggtcgatgagtcaccgtacaccccacgggcgaccgtgacggtggctgcgttggcggcctgcccatggtgcacaccatgggacgctctaatacagacatggtgcgaagagtctattgagctagttagtagtcctccggcccctgaatgcggctaatcctaactgcggagcacgtgctctcaatccagagagtagcgtgtcgtaacgggcaactctgcagcggaaccgactactttgggtgtccgtgtttccttttattcttatattggctgcttatggtgacaattgagagattgttaccatatagctattggattggccatccggtgtgtaacagagctattatatattcttttattggctttgtgccattagatcatactgcaattgctactttaaggtacatcttgcttctgaacacagcaaa

SEQ ID NO: 19542 - DNA, 680 bp, synthetic construct
  source 1..680: mol_type = other DNA
ggtacctttgtgcgcctgtttttacttcccgcccccaaagtaacttagaagttatgtaccaacgatcaatagcaggtgtgacacaccagtcatatcttgatcaagcacttctgtttccccggaccgagtatcaataggctgctcgcgcggctgaaggagaaaacgttcgttacccggccaactacttcgagaagcttagtaccaccatgaacgaggcagagtgtttcgctcagcacaaccccagtgtagatcaggctgatgagtcactgcaacccccatgggcgaccatggcagtggctgcgttggcggcctgcccatggagaaatccatgggacgctctaattctgacatggtgtgaagagcctattgagctagctggtagtcctccggcccctgaatgcggctaatcctaactgcggagcacatgtccacaaaccagtgggtggtgtgtcgtaacgggcaactctgcagcggaaccgactactttgggtgtccgtgtttccttttatacctatgttggctgcttatggtgacaatcagagaattgttaccatatagctattggattggccatccggtgtgtaacagagcaattgtttacctatttattggttttgtaccactctcattgaagtctgtgaccactctcgaattcatcttgacccttaactcagtcaaac

SEQ ID NO: 19543 - DNA, 725 bp, synthetic construct
  source 1..725: mol_type = other DNA
gtacccactcacagggcccactgggcgttagcactctggtactaaggtacctttgtgcgcctgttttaactcccttcccctgaagtaacttagaagcagtaaactaatgatcaatagtgggcatgacataccagccatgtctcgatcaagcacttctgtttccccggaccgagtatcaataggctgctcgcgcggctgaaagagaaaacgttcgttacccggccagctacttcgagaagcttagtaccatcatgaacgaagcagagcgtttcgctcagcacaatcccagtgtagatcaggctgatgagtcactgcaaaccccatgggcgaccatggcagtggctgcgttggcggcctgcccatggagaaatccatgggacgctctaattctgacatggtgcgaagagcctattgagctagctggtagtcctccggcccctgaatgcggctaatcctaactgcggagcacgcacccacaaaccagtgggcagtgtgtcgtaatgggtaactctgcagcggaaccgactactttgggtgtccgtgtttccttttattcttatattggctgcttatggtgacaatcaaagagttgttaccatatagctattggattggccatccggtgtgcaacagagcaattgtttacctatttattgggtttgtaccactaacgttgaagtctgtgaccacactcaactttatcctgaacctcaatacagtaaaac

SEQ ID NO: 19544 - DNA, 729 bp, synthetic construct
  source 1..729: mol_type = other DNA
ttgtacccacccacagggcccactgggcgctagcactctggtactacggtacctttgtgtgcctgttttatctccccagacccccgtaacgctacattagaagatagacaatacgaccaatagtcagtggggcaatccagcttcactttggtcaagcacctctgtttccccgggcttagtaccaataggctgcttgcgcggctgaaggggaacgcgcccgttatccggctaactacttcgagaaacctagtaccaccatggaagttgccgagtgtttcgctcagcacaaccccagtgtagatcaggtcgatgagccaccgtacaccccacgggcgaccgtgacggtggctgcgttggcggcctgcccatggtgcacaccatgggacgctctaatacagacatggtgcgaagagtctattgagctagttagtagtcctccggcccctgaatgcggctaatcctaactgcggagcatgcgctctcaacccagagagtagcgtgtcgtaacgggcaactctgcagcggaaccgactactttgggtgtccgtgtttccttttattcttatattggctgcttatggtgacaattgagagattgttaccatatagctattggattggccatccggtgtgtaatagagctattgtatattcttttgttggctttgtgccattagattatactgcaattgctactttaaggtacatcttgctcctcaacacagcaaa

SEQ ID NO: 19545 - DNA, 732 bp, synthetic construct
  source 1..732: mol_type = other DNA
gggttgtacccacccacagggcccactgggcgctagcactctggtactacggtacctttgtgtgcctgttttatctccccagacccccgtaacgctacattagaagatagacaatacgaccaatagtcagtggggcaatccagcttcactttggtcaagcacctctgtttccccgggcttagtaccaataggctgcttgcgcggctgaaggggaacgcgcccgttatccggctaactacttcgagaaacctagtaccaccatggaagttgccgagtgtttcgctcagcacaaccccagtgtagatcaggtcgatgagccaccgtacaccccacgggcgaccgtgacggtggctgcgttggcggcctgcccatggtgcacaccatgggacgctctaatacagacatggtgcgaagagtctattgagctagttagtagtcctccggcccctgaatgcggctaatcctaactgcggagcatgcgctctcaacccagagagtagcgtgtcgtaacgggcaactctgcagcggaaccgactactttgggtgtccgtgtttccttttattcttatattggctgcttatggtgacaattgagagattgttaccatatagctattggattggccatccggtgtgtaatagagctattgtatattcttttgttggctttgtgccattagattatactgcaattgctactttaaggtacatcttgctcctcaacacagcaaa

SEQ ID NO: 19546 - DNA, 717 bp, synthetic construct
  source 1..717: mol_type = other DNA
cccacagggcccattgggcgtagcactctggtactgaggtacctttgtgcgcctgttttacctcccttccccaaaagtaacttagaagctttgaactaatgatcaatagtaggtgtggcagaccagtcacatctcgatcaagcacttctgtctccccggactgagtatcaataggctgcttacgtggctgaaagagaaaacgttcgttacccgaccaactacttcgagaagcttagtaccaccatgaacggggcagagcgtttcgctcggcactaccccagtgtagatcaggctgatgagtcactgcaacccccatgggcgaccatggcagtggctgcgctggcggcctgcccatggagagatccatgggacgctctaactttgacatggtgcgaagagcctattgagctagttggtagtcctccggcccctgaatgcggctaatcctaactgcggagcacacacccacatgccagtgggcagtgtgtcgtaacgggcaactctgcagcggaaccgactactttgggtgtccgtgtttccttttattcttatgttggctgcttatggtgacaatcgaagagttgttaccatatagctattggattggccatccggtgtgcaacagagcaattgtctatcagtttattggctttgtaccactgacattaaagtctgtaattacccttaattttatcttgacccttaatacagttaagc

SEQ ID NO: 19547 - DNA, 737 bp, synthetic construct
  source 1..737: mol_type = other DNA
ctgtgggttgttcccactcacaggacccacgcggtgctagcactctggttccacggaacctttgtgcgcctgttttacgtcccctccccaatttgtaacttagaagcaatttacagcactgatcaatagcaggcatggcgcaccagctatgtcttgatcaagcacctctgtttccccggaccgagtatcaatagactgttcacacggtcgaaggagaaagcgttcgttatccggctaactacttcgagaaacccagtagcgccattgaaactgcagagtgtttcgctccacacttcccccgtgtagatcaggtcgatgagtcactgcaatccccacgggcgaccgtggcagtggctgcgttggcggcctgcctatggggtaacccataggacgctctaatgtggacatggtgcgaagagtctattgagctagttagtagtcctccggcccctgaatgcggctaatcctaactgcggagcacatgccttcaatccagagggtagtgtgtcgtaatgggcaactctgcagcggaaccgactactttgggtgtccgtgtttccttttattctcacattggctgcttatggtgacaattacagaattgttaccatatagctattggattggccatccggtgtgcaatagagctattatatacctatttgttggctttgtaccactaaccttaaaatctgtaatcactctcgagtatatattgacccttaatacaattaaac

SEQ ID NO: 19548 - DNA, 647 bp, synthetic construct
  source 1..647: mol_type = other DNA
caattcgtaatttagaagtaatgcacaccattgatcaacagcaagcgtggcgcgccagccatgttcagatcaaatacttctgttttcccggactgagtatcaatagactgctcacgcggttgaaggagaaaacgttcgttatccggctaactacttcgagaaacctagtagcaccatcgaaactacagagtgtttcgctcagcactttccccgtgtagatcaggtcgatgagtcactgcaatccccacgggcgaccgtggcagtggctgcgttggcggcctgcctatgggcttgcccataggacgctctaatgtggacatggtgtgaagagtctattgagctagttagtagtcctccggcccctgaatgcggctaatcctaactgcggagcgcataccctcagtccagggggtggtgcgtcgtaacgggcaactctgcagcggaaccgactactttgggtgtccgtgtttctttttattcttatattggctgcttatggtgacaattgagagattgttaccatatagctattggattggccatccagtgtctaacagagcaattgtatacttatttgttggattcgttccactatcatatacatccactaacaccttatactatattataagattgaacacaagaaa

SEQ ID NO: 19549 - DNA, 650 bp, synthetic construct
  source 1..650: mol_type = other DNA
cccgaaacttgcaacttagaagttatgtacgttactgatcaacagcaggcgtggcacaccagccatgtcttgatcaagcacttctgtaaccccggactgagtatcaatagactgctcacgtggtcgaaagagaaaacgttcgttatccggctaactacttcgagaaacttagtagcaccactgaaactgcggagtgtttcgctcagcacttcccccgtgtagatcaggtcgatgagtcactgcttaccccacgggtgaccgtggcagtggctgcgttggcggcctgcctatggggcaacccataggacgctctaaagtggacatggtgtgaagagtctattgagctagttagtagtcctccggcccctgaatgcggctaatcctaactgtggagcgcatgcccccaaaccagagggtggtgcgtcgtaacgggtaactctgcagcggaaccgactactttgggtgtccgtgtttcttttattctcataatggctgcttatggtgacaattgaggaattgttgccatatagctattggattggccatccggtgtgcaacagagctattatctacttgtttgttggatacattccattgacatctaaatcccttaatacattgcactatattctaacgttgaacgcaagaaa

SEQ ID NO: 19550 - DNA, 683 bp, synthetic construct
  source 1..683: mol_type = other DNA
gaaatccttgtgcgcctgttttatatcccttccccaatccgaaacatagaagtaatgcgcaccactgatcaatagcaggcgtaacgcgccagttacgtcacgatcaagcacatctgtctccccggaccgagtatcaatagactgcttacgcggttgaaggagaaagcgttcgttatccggctaactacttcgagaagcccagtagcaccatggaagctgcggggtgtttcgctcagcacttcccccgtgtagatcaggtcgatgagccactgcaacccccacaggtgactgtggcagtggctgcgttggcggcctgcctatggggagacccataggacgctctaatgtggacatggtgcgaagagcctattgagctagttagtagtcctccggcccctgaatgcggctaatcctaactgcggagcacatgccttcaacccagagggtagtgtgtcgtaacgggcaactctgcagcggaaccgactactttgggtgtccgtgtttctttttattcttatattggctgcttatggtgacaattacagaattgttaccatatagctattggattggccatccggtgtgcaatagagctgttatatacctgtttgttggttttgtaccactaactttaaaatctataactacccttaattttatattgaccctcaacacagttaaac

SEQ ID NO: 19551 - DNA, 710 bp, synthetic construct
  source 1..710: mol_type = other DNA
catttccactgggggctagcactctgattctgcggaacctttgtgcgcctgttttataaccctcccccgacttgcactttagaagttatgtacgttgatcaatagcaagcgtggcacaccagccatgttttgatcaagcacttctgtacccccggactgagtatcaatagactgcttacgtggtcaaaggagaaaacgtccgttatccggctaactacttcgagaaacctagtaacaccactgaaactgcggagtgtttcgctcagcacttcccccgtgtagatcaggtcgatgagtcactgcttaccccacgggtgaccgtggcagtggctgcgttggcggcctgcctatggggcaacccataggacgctctaaagtggacatggtgcgaagagtctattgagctagttagtagtcctccggcccctgaatgcggctaatcctaactgcggagcgcatgcccccaaaccagagggtggtgcgtcgtaacgggtaactctgcagcggaaccgactactttgggtgtccgtgtttcttttattctcataatggctgcttatggtgacaattgaggaattgttaccatatagctattggattggccatccggtgtgcaacagagctattatctacttgtttgttggatacatcccattaacacctaaatcccttaatacattgcactacatcctaacactgaacgcaagaaa

SEQ ID NO: 19552 - DNA, 725 bp, synthetic construct
  source 1..725: mol_type = other DNA
acccacccacagggcccactgggcgctagcactctggtaccacggtacctttgtgtgcctgttttatctccccaaacccccgtaacgctatattagaagatagacaatgcgaccaatagtcagtggggcaacccagcctcactttggtcaagcacctctgtttccccgggcttagtaccaataggctgcttgcgcggctgaaggggaacgcgcccgttatccggctaactacttcaagaaacctagtaccaccatggaagttgcagagtgtttcgctcagcacaaccccagtgtagatcaggtcgatgagtcaccgtacaccccacgggcgaccgtgacggtggctgcgttggcggcctgcccatggtgcacaccatgggacgctctaatacagacatggtgcgaagagtctattgagctagttagtagtcctccggcccctgaatgcggctaatcctaactgcggagcacgtgctctcaatccagagagtagcgtgtcgtaacgggcaactctgcagcggaaccgactactttgggtgtccgtgtttccttttattcttatattggctgcttatggtgacaattgagagattgttaccatatagctattggattggccatccggtgtgtaacagagctattatatattcttttattggctttgtgccattagatcatactgcaattgctactttaaggtacatcttgcttctgaacacagcaaa

SEQ ID NO: 19553 - DNA, 723 bp, synthetic construct
  source 1..723: mol_type = other DNA
gttgtacccactcacagggcccactgggcgtcagcactctggtaccccggtacctttgtgcgcctgttttatatccccccccattgaaacttagaagtaatgcacctcgatcaatagcgggcgtggcgcaccagccacgtcatgatcaagcacttctgtttccccggaccgagtatcaatagactgctaacgcggttgagggagaaaacgtccgttacccggccaactgcttcgagaaatccagtaacatcatgaaaattgcagagtgtttcgctcagcacttccccagtgtagatcaggtcgatgagtcaccgcgttccccacgggcgaccgtggcggtggctgcgttggcggcctgcctgtggggcaacccgcaggacgctctaatatggacatggtgtgaagaatctattgagccagttggtagtcctccggcccctgaatgcggctaatcctaactgcggagcacgcaccttcaatccagtgggtagcgtgtcgtaatgggtaactctgcagcggaaccgactactttgggtgtccgtgtttccatttattcttacattggctgcttatggtgacaattgaaagattgttaccatatagctattggattggccatccggtatcgaatagagcaattatctatcagtttattggatttattccgttgagtgtgcagcagtatcgcactttgcttttaatagtgagactgaatagtgcaaa

SEQ ID NO: 19554 - DNA, 681 bp, synthetic construct
  source 1..681: mol_type = other DNA
aatccttgtgcgcctgttttatatcccctttcccaagttgaaacatagaagtaatgcgcaccattgatcaatagcaggcgtaacgcgccagttacgtctcgatcaagcacatctgtttccccggaccgagtatcaatagactgctcacgcggttgaaggagaaagcgttcgttacccggctaactacttcgagaaacccagtagcaccatggaagctgcagggtgtttcgctcagcacttcccccgtgtagatcaggtcgatgagccactgcaatccccacgggcgaccgtggcagtggctgcgttggcggcctgcctatggggagacccataggacgctctaatgtggacatggtgcgaagagtctattgagctagttagtatcctccggcccctgaatgcggctaatcctaactgcggagcacatgccttcaacccagaaggtggtgtgtcgtaacgggcaactctgcagcggaaccgactactttgggtgtccgtgtttccttttattcttatattggctgcttatggtgacaattacggaattgttaccatatagctattggattggccatccggtgtgtaatagagctattatatatctgtttgttggctttgtgccattaactttaaagtctacaactactcttgattttatattgaccctcaacacagttaaac

SEQ ID NO: 19555 - DNA, 723 bp, synthetic construct
  source 1..723: mol_type = other DNA
cacccactcacagggcccactgggcgcaagcactctggtaccccggtacctttgtgcgcctgttttatacccccccctccaatgaaacttagaagcagcaaaccacgatcaatagtaggcataacgctccagttatgtcttgatcaagcacttctgtttccccggactgagtatcaatagactgctcgcgcggttgaaggagaaaacgttcgttatccggctagctacttcggaaaacctagtaacaccatgaaagttgcggagagcttcgttcagcactcccccagtgtagatcaggtcgatgagtcaccgcgttccccacgggcgaccgtggcggtggctgcgttggcggcctgcccatggggtaacccatggggcgctctaatacggacatggtgtgaagagtctactgagctagttagtagtcctccggcccctgaatgcggctaatcccaactgcggagcacacgctcacaagccagcgggtagtgtgtcgtaacgggcaactctgcagcggaaccgactactttgggtgtccgtgtttccttttatctttatattggctgcttatggtgacaattaaagaattgttaccatatagctattggattggccatccggtgtgcaacagagcaattatttaccaatttattggttttgtaccattaaccttgaattctgtgatcaccctcaattatatcttgacccttaacgcagctaaac

SEQ ID NO: 19556 - DNA, 677 bp, synthetic construct
  source 1..677: mol_type = other DNA
ctttgtgcgcctgttttatgaccctccccccgaaacttgtaacttagaagttatgtacattaccgatcaatagcaggcgtggcgcaccagccatgtcttgatcaagtacttctgtacccccggactgagtatcaatagactgctcacgcggttgaaggagaaaacgttcgttacccggctaactacttcgagaaacctagtaacaccattgaaactgcggagtgtttcgctcagcattccccccatgtagatcaggtcgatgagtcactgcttaccccacgggcgaccgtggcagtggctgcgttggcggcctgcctatggggcaacccataggacgctctaaagtggacatggtgcgaagagtctattgagctagttagtagtcctccggcccctgaatgcggctaatcctaactgcggagcgcatgtcctcaaaccagagggtggtgcgtcgtaatgggtaactctgcagcgaaccgactactttgggtgtccgtgtttcttttgttcttataatggctgcttatggtgacaatcgaggaattgttaccatatagctattggattggccatccggtgtgcaacagagctattatctacttgtttgtcggatacatccccttaacacctaaatccctcaacacattgcattatattttaacattgaacgcgagaaa

SEQ ID NO: 19557 - DNA, 726 bp, synthetic construct
  source 1..726: mol_type = other DNA
accgagcagtaggagggcccactgggcgttagcactctggtaccaaggtacctttgtgcgcctgttttaactcccttcccctgaagtaacttagaagcagtaaactaatgatcaatagtgggcatgacataccagccatgtctcgatcaagcacttctgttaccccggactgagtatcaataggctgctcgcgcggctgaaagagaaaacgttcgttacccggccagctacttcgagaagcttagtaccatcatgaacgaagcagagcgtttcgctcagcacaatcccagtgtagatcaggctgatgagtcactgcaaaccccatgggcgaccatggcagtgactgcgttggcggcctgcccatggagaaatccatgggacgctctaattctgacatggtgcgaagagcctattgagctagctggtagtcctccggcccctgaatgcggctaatcctaactgcggagcacgcacccacaaaccagtgggcagtgtgtcgtaatgggtaactctgcagcggaaccgactactttgggtgtccgtgtttccgtttattcatatattggctgcttatggtgacaatcaaagagttgttaccatatagctattggattggccatccggtgtgcaacagagcaattatttacctatttattgggtttgtaccactaacgttgaagtctgtgaccacacttaactttatcctgaacctcaatacagtaaaac

SEQ ID NO: 19558 - DNA, 656 bp, synthetic construct
  source 1..656: mol_type = other DNA
ttcccttccccagaaataacttagaagctttgagccaacgatcaacagtgggtgcgacataccagtcgcatctccatcaagcacttctgtttccccggactgagtatcaatacgctgcttacgcggctgaaggagaaaacgttcgttacccggccaactacttcgagaagcttagtaccatcatgaacgaggcagagcgtttcgctcggcactaccccagtgtagatcaggctgatgagtcactgcaatccccatgggcgaccatggcagtggctgcgctggcggcctgcccatggagagatccatgggacgctctaattttgacatggtgcgaagagcctattgagctagttggtagtcctccggcccctgaatgcggctaatcctaactgcggagcgcacacccacataccagtgggcagtgcgtcgtaacgggcaactctgcagcggaaccgactactttgggtgtccgtgtttccttttattcttatattggctgcttatggtgacaatcggagaattgttaccatatagctattggattggccatccggtgtgcaatagagcaattgtctaccagtttattggttttgtgccactgacgttaaagtctgtaattacccttaatttcatcttgacccttaacacagtcaagc

SEQ ID NO: 19559 - DNA, 655 bp, synthetic construct
  source 1..655: mol_type = other DNA
ccaccccaatttgcaacttagaagcgattcacaacactgatcaatagcaggcatggcgcaccagctatgtcttgatcaagcacttctgtttccccggaccgagtatcaatagactgttcacgcggttgaaggagaaagcgtccgttatccggctaactacttcgagaaacccagtaacgccattgaaactgcagagtgtttcgctccacacttcccccgtgtagatcaggtcgatgagtcactgcaatccccacgggcgaccgtggcagtggctgcgctggcggcctgcctatggggcaacccataggacgctctaatgtggacgtggtgtgaagagtctattgagctagttagtagtcctccggcccctgaatgcggctaatcctaactgcggagcacatgccctcaatccagagggtagtgtgtcgtaatgggcaactctgcagcggaaccgactactttgggtgtccgtgtttccttttattctcatattggctgcttatggtgacaatcactgaattgttaccatatagctattggattggccatccggtgtgcaatagagctataatatacctatttgttggctttgtaccactaaccttaaaatctgtaaccactctcaactatatattaacccttaatacaatcaaac

SEQ ID NO: 19560 - DNA, 718 bp, synthetic construct
  source 1..718: mol_type = other DNA
actcacagggcccactgggcgcaagcactctggtaccccggtacctttgtgcgcctgttttatacccccccctccaatgaaacttagaagcaacaaaccacgatcaatagtaggcataacgctccagttatgtcttgatcaagcacttctgtttccccggactgagtatcaatagactgctcgcgcggttgaaggagaaaacgttcgttatccggctagctacttcggaaaacctagtagcaccatgaaagttgcggagagcttcgttcggcactcccccagtgtagatcaggtcgatgagtcaccgcattccccacgggcgaccgtggcggtggctgcgttggcggcctgcccatggggtaacccatggggcgctctaatacggacatggtgtgaagagtctactgagctagttagtagtcctccggcccctgaatgcggctaatcccaactgcggagcacacgcccacaagccagcgggtagtgtgtcgtaacgggtaactctgcagcggaaccgactactttgggtgtccgtgtttccttttatctttatattggctgcttatggtgacaattaaagaattgttaccatatagctattggattggccatccggtgtgcaatagagcaattatttaccaatttattggttttgtaccattaaccttgaattctgtgaccacccttaattatatcttgacccttaacgcagctaaac

SEQ ID NO: 19561 - DNA, 699 bp, synthetic construct
  source 1..699: mol_type = other DNA
agcactctggttctacggaacctttgtgcgcctgttttacgccccctccccaatttgtaacttagaagcaatttacaacactgatcaatagcaggcatggcgcaccagctatgtcttgatcaagcacttctgtttccccggaccgagtatcaatagactgttcacacggttgaaggagaaagcgtccgttatccggctaactacttcgagaaacccagtagcgccattgaagctgcagagtgtttcgctccacacttcccccgtgtagatcaggtcgatgagtcactgcaatcctcacgggcgaccgtggcagtggctgcgctggcggcctgcctatggggcgacccataggacgctctaatgtggacatggtgcgaagagtctattgagctagttagtagtcctccggcccctgaatgcggctaatcctaactgcggagcacatgccttcaatccagagggtagtgtgtcgtaatgggcaactctgcagcggaaccgactactttgggtgtccgtgtttccttttattctcacattggctgcttatggtgacaattacagaattgttaccatatagctattggattggccatccggtgtgcaatagagctattatatacctatttgttggctttataccactaaccttaaaatctgtaaccactctcgagtatatattaaccctcaatacaatcaaac

SEQ ID NO: 19562 - DNA, 722 bp, synthetic construct
  source 1..722: mol_type = other DNA
tgaacccactcacagggcccactgggcgtcagcactctggtaccccggtacctttgtgcgcctgttttatatcccccccccattgaaacttagaagtaatgcacctcgatcaatagcgggcgtggcgcaccagccacgtcatgatcaagcacttctgtttccccggaccgagtatcaatagactgctaacgcggttgagggagaaaacgtccgttacccggccaactgcttcgagaaatccagtaacatcatgaaaattgcagagtgtttcgctcagcacttccccagtgtagatcaggtcgatgagtcaccgcgttccccacgggcgaccgtggcggtggctgcgttggcggcctgcctgcggggcaacctgcaggacgctctaatatggacatggtgtgaagaatctattgagccagttggtagtcctccggcccctgaatgcggctaatcctaactgcggagcacgcgccttcaatccagtgggtagcgtgtcgtaatgggtaactctgcagcggaaccgactactttgggtgtccgtgtttccatttattcttacattggctgcttatggtgacaattgaaagattgttaccatatagctattggattggccatccggtatcgaatagagcaattatctatcagtttattggatttattccgttgagtgtgcagcagtatcgcactttgcttttaatagtgagactgaatagtgcaaa

SEQ ID NO: 19563 - DNA, 701 bp, synthetic construct
  source 1..701: mol_type = other DNA
ggcgctagcactctggcactaaggtacctttgtgcgcctgttttacttcccttccccaaagtaacttagaagttgtgtgccaacgatcaatagcaggtgtgacacaccagtcatatcttgatcaagtacttctgtttccccggaccgagtatcaataggctgctcgcgcggctgaaggagaaaacgttcgttacccgaccagctacttcgagaagcttagtaccaccatgaacgaggcagagtgtttcgttcagcacaaccccagtgtagatcaggctgatgagtcactgcaacccccatgggcgaccatggcagtggctgcgttggcggcctgcccatggagaaatccatgggacgctctaattctgacatggtgagaagagcctattgagctagctggtagtcctccggcccctgaatgcggctaatcctaactgcggagcacatgctcacaaaccagtgggtggtgtgtcgtaatgggcaactctgcagcggaaccgactactttgggtgtccgtgtttccttttattcttatgttggctgcttatggtgacaatcaaggaattgttaccatatagctattggattggccatccggtgtgcaacagagcaattgtttacctatttattggtttcgtaccgctatcactgaagtctgtgaccactctcgaattcattttgaccctcaactcaatcaaac

SEQ ID NO: 19564 - DNA, 705 bp, synthetic construct
  source 1..705: mol_type = other DNA
ctgggcgctagcactctggcactaaggtacctttgtgcgcctgtttttacttcccttccccaaagtaacttagaagttgtgcaccagcgatcaatagcaggtgtgacacaccagtcatatcttgatcaagtacttctgtttccccggaccgagtatcaataggctgctcgcgcggctgaaggagaaaacgttcgttacccgaccaactacttcgagaagcttagtaccaccatgaacgaggcagagtgtttcgttcagcacaaccccagtgtagatcaggctgatgagtcactgcaacccccatgggcgaccatggcagtggctgcgttggcggcctgcccatggagaaatccatgggacgctctaattctgacatggtgtgaagagcctattgagctagctggtagtcctccggcccctgaatgcggctaatcctaactgcggagcacatgctcacaaaccagtgggtggtgtgtcgtaatgggcaactctgcagcggaaccgactactttgggtgtccgtgtttccttttattcttatgttggctgcttatggtgacaatcaaagaattgttaccatatagctattggattggccatccggtgtgcaacagagcaattgtttacctatttattggttttgtaccactatcactgaagtctgtgaccactctcaaattcattttgaccctcaactcaatcaaac

SEQ ID NO: 19565 - DNA, 698 bp, synthetic construct
  source 1..698: mol_type = other DNA
ggctacctctgatttaccaatccttgtgtgcctgttttaatcccttccctaattccaaacatagaagtaatgcgcaccactgatcaatagcaggcgtaacgcaccagttacgtctcgatcaagtacatctgtctccccggaccgagtatcaatagactgctcacgcggttgaaggagaaagcgttcgtcatccggctaactacttcgagaagcccagtaacaccatggaagctgcagggtgtttcgctcagcactccccccgtgtagatcaggtcgatgagccactacaacccccacaggtgactgtggtagtggctgcgttggcggcctgcctatggggagacccataggacgctctaatgtggacatggtgcgaagagcctattgagctagttagtagtcctccggcccctgaatgcggctaatcctaactgcggagcacatgccttcaacccagagggtagtgtgtcgtaacgggcaactctgcagcggaaccgactactttgggtgtccgtgtttctttttattcttatattggctgcttatggtaacaattacagaattgttaccatatagctattggattggccatccggtgtgtaatagagctgttatatacctgtttgttggttttgtaccactaactttaaaatctataactaccctcaattttatattgaccctcaacacagttaaac

SEQ ID NO: 19566 - DNA, 656 bp, synthetic construct
  source 1..656: mol_type = other DNA
acccctcccctaagcagtaacttagaagcttcacactatcacgaccaatagtaggcgtggtgcaccagtcacgtcttggtcaagcacttctgtttccccggactgagtatcaatagactgctcacgcggttgaaggagaaaacgttcgttatccggctaactacttcgagaaacctagtagcaccgtgaaagttgcagagtgtttcgctcagcacttcccccgtgtagatcaggtcgatgagtcactgtgaaccccacgggtgaccgtgacagtggctgcgttggcggcctgcctatggggtaacccatgggacgctctaatacagacacggtgtgaagagtctattgagctagttagtagtcctccggcccctgaatgcggctaatcctaactgcggagcgcgtaccctcaatccagggggcagcgcgtcgtaatgggtaactctgcagcggaaccgactactttgggtgtccgtgtttccttttatcctttattggctgcttatggtgacaattgaaaagttgttaccatatagctattggattggccatccggtaaccaacagagctattgtttacctgtttattggatacgtccctctcaatctcaaggctattcaaactcttgattatatactacttctcaactgtaagaa

SEQ ID NO: 19567 - DNA, 647 bp, synthetic construct
  source 1..647: mol_type = other DNA
caattcgtaatttagaagtaatgcacaccattgatcaacagcaagcgtggcgcgccagccatgttcagatcaagtacttctgttttcccggactgagtatcaatagactgctcacgcggttgagggagaaaacgttcgttacccggctaactacttcgagaaacctagtagcaccatcgaaactgcagagtgtttcgctcagcactttccccgtgtagatcaggtcgatgagtcactgcaatccccacgggcgaccgtggcagtggctgcgttggcggcctgcctatgggctttcccataggacgctctaatgtggacatggtgtgaagagtctattgagctagttagtagtcctccggcccctgaatgcggctaatcctaactgcggagcgcataccctcaatccagggggtggtgcgtcgtaacgggcaactctgcagcggaaccgactactttgggtgtccgtgtttccttttattcttatattggctgcttatggtgacaatagagagattgttaccatatagctattggattggccatccagtgtctaacagagcaattgtatacttatttgttggatttgttccactatcatatacatccactaacaccttacactatattgtaagattgagcacaagaaa

SEQ ID NO: 19568 - DNA, 693 bp, synthetic construct; identical to SEQ ID NO: 829
  source 1..693: mol_type = other DNA

SEQ ID NO: 19569 - DNA, 723 bp, synthetic construct
  source 1..723: mol_type = other DNA
gttgtacccactcacagggcccactgggcgttagcactctggtaccccggtacctttgtgcgcctgttttatatccccccccattgaaacttagaagtaatgcacctcgatcaatagcgggcgtggcgcaccagccacgtcatgatcaagcacttctgtttccccggaccgagtatcaatagactgctaacgcggttgagggagaaaacgtccgttacccggccaactgcttcgagaaatccagtaacatcatgaaaattgcagagtgtttcgctcagcacttccccagtgtagatcaggtcgatgagtcaccgcgttccccacgggcgaccgtggcggtggctgcgttggcggcctgcctgtggggcaacccgcaggacgctctaatatggacatggtgtgaagaatctattgagccagttggtagtcctccggcccctgaatgcggctaatcctaactgcggagcacgcgccttcaatccagtgggtagcgtgtcgtaatgggtaactctgcagcggaaccgactactttgggtgtccgtgtttccatttattcttacattggctgcttatggtgacaattgaaagattgttaccatatagctattggattggccatccggtatcgaatagagcgattatctatcagtttattggatttattccgttgagtgtgcagcagtatcgcactttgcttttaatagtgagactgaatagtgcaaa

SEQ ID NO: 19570 - DNA, 660 bp, synthetic construct
  source 1..660: mol_type = other DNA
cgccccctccccaatttgcaacttagaagcaattcgcaacaccgatcaatagcaggcatggcgcaccagctatgtcttgatcaagcacttctgtttccccggaccgagtatcagtaaactgttcacgcggttgaaggagaaagcgtccgttatccggctaactacttcgagaaacccagtaacgccattgaaactgcagagtgtttcgctccacacttcccccgtgtagatcaggtcgatgagtcactgcaatccccacgggcgaccgtggcagtggctgcgctggcggcctgcctatggggcaacccataggacgctctaatgtggacatggtgtgaagagtctattgagctagttagtagtcctccggcccctgaatgcggctaatcctaactgcggagcacatgccctcaatccagagggtagtgtgtcgtaatgggcaactctgcagcggaaccgactactttgggtgtccgtgtttccttttattctcacattggctgcttatggtgacaatcactgaattgttaccatatagctattggattggccatccggtgtgcaatagagctatcatatacctatttgttggttttgtaccactgaccttaaaatctgtaaccactctcgactatatattgaccctcaatacaatcaaac

SEQ ID NO: 19571 - DNA, 657 bp, synthetic construct
  source 1..657: mol_type = other DNA
cccctccccaatttgtaacttagaagcaatttgcaacactgatcagtagcaggcatagcgcaccagctatgtcttgatcaagcacttctgtttccccggaccgagtatcaatagactgtccacacggttgaaggagaaaacgtccgttatccggctaactacttcgagaaacccagtagcgccattgaaactgcagagcgtttcgctccacacttcccccgtgtagatcaggtcgatgagtcactgcaatccccacgggcgaccgtggcagtggctgcgctggcggcctgcctatggggcaacccataggacgctctaatgtggacatggtgcgaagagtctattgagctagttagtagtcctccggcccctgaatgcggctaatcctaactgcggagcacatgccttcaatccagagggtagtgtgtcgtaatgggcaactctgcagcggaaccgactactttgggtgtccgtgtttccttttattctcacattggctgcttatggtgacaattacggaattgttaccatatagctattggattggccatccggtgtgcaatagagctattatatacctatttgttggctttgtaccactgaccttaaaatctataaccactctcgagtgtatattaacccttaatacaatcaaac

SEQ ID NO: 19572 - DNA, 657 bp, synthetic construct
  source 1..657: mol_type = other DNA
cccttccccaatttgcaacttagacgcaattcacaacaccgatcaatagcaggcatggcgcaccagctatgtcttgatcaagcacttctgtttccccggaccgagtatcaataaactgctcacgcggttgaaggagaaagcgtccgtcacccggctaactacttcgagaaacccagtaacgccattgaaactgcagagtgtttcgctccacactttccccgtgtagatcaggtcgatgagtcactgcaatccccacgggcgaccgtggcagtggctgcgctggcggcctgcctatggggcaacccataggacgctctaatgtggacatggtgtgaagagtctattgagctagttagtagtcctccggcccctgaatgcggctaatcctaactgcggagcacatgccctcaatccagagggtagtgtgtcgtaatgggcaactctgcagcggaaccgactactttgggtgtccgtgtttccttttattcttacattggctgcttatggtgacaatcactgaattgttaccatatagctattggattggccatccggtgtgcaatagagctatcatatacctatttgttggctttgtaccactgaccttaaaatctgtaaccactctcgactacatattaaccctcaatacaatcaaac

SEQ ID NO: 19573 - DNA, 657 bp, synthetic construct
  source 1..657: mol_type = other DNA
cccctccccaatttgcaacttagaagcaattcgcaacaccgatcaatagcaggcatggcgcaccagctatgtcttgatcaagcacttctgtttccccggaccgagtatcagtaaactgttcacgcggttgaaggagaaagcgtccgttatccggctaactacttcgagaaacccagtaacgccattgaaactgcagagtgtttcgctccacacttcccccgtgtagatcaggtcgatgagtcactgcaatccccacgggcgaccgtggcagtggctgcgctggcggcctgcctatggggcaacccataggacgctctaatgtggacatggtgagaagagtctattgagctagttagtagtcctccggcccctgaatgcggctaatcctaactgcggagcacatgccctcaatccagagggtagtgtgtcgtaatgggcaactctgcagcggaaccgactactttgggtgtccgtgtttccttttattctcacattggctgcttatggtgacaatcactgaattgttaccatatagctattggattggccatccggtgtgcaatagagctatcatatacctatttgttggttttgtaccactgaccttaaaatctgtaaccactctcgactatatattgaccctcaatacaatcaaac

SEQ ID NO: 19574 - DNA, 657 bp, synthetic construct
  source 1..657: mol_type = other DNA
cccctccccaatttgcaacttagaagcaattcgcaacaccgatcaatagcaggcatggcgcaccagctatgtcttgatcaagcacttctgtttccccggaccgagtatcagtaaactgttcacgcggttgaaggagaaagcgtccgttatccggctaactacttcgagaaacccagtaacgccattgaaactgcagagtgtttcgctccacacttcccccgtgtagatcaggtcgatgagtcactgcaatccccacgggcgaccgtggcagtggctgcgctggcggcctgcctatggggcaacccataggacgctctaatgtggacatggtgtgaagagtctattgagctagttagtagtcctccggcccctgaatgcggctaatcctaactgcggagcacatgccctcaatccagagggtagtgtgtcgtaatgggcaactctgcagcggaaccgactactttgggtgtccgtgtttccttttattctcacattggctgcttatggtgacaatcactgaattgttaccatatagctattggattggccatccggtgtgcaatagagctatcatatacctatttgttggttttgtaccactgaccttaaaatctgtaaccactctcgactatatattgaccctcaatacaatcaaac

SEQ ID NO: 19575 - DNA, 701 bp, synthetic construct
  source 1..701: mol_type = other DNA
gctagcacactgattctacggaatctttgtgcgcctgttttatatccctcccctaaaatagtaacttagaagttgaacatttacacgaccaatagcgggcgtggcgcaccagcctcgtcttggtcaagtactcctgtttccccggactgagtatcaataggctgctcacgcggctgaaggagaaagtgttcgttatccggctaactacttcgggaaacccagtaacaccatgaaagttgcggagtgtttcgctcagcacttcccccgtgtagatcaggctgatgagtcactgcgaaccccgcgggcgaccgtggcagtggctgcgttggcggcctgcctatggggcaacccataggacgctctaatacagacatggtgcgaagagtctactgagctagttggtattcctccggcccctgaatgcggctaatcctaactgcggagcacatgccctcaatccagagggtggtgtgtcgtaacgggcaactctgcagcggaaccgactactttgggtgtccgtgtttccttttattcttatactggctgcttatggtgacaattgaaaggttgttaccatatagctattggattggccatccggtgactaacagagctttgatttatcaattcattgggttcgtgcccctatcatctacagtttattcaactttggtgtacttattatatcttaatagtaagaa

SEQ ID NO: 19576 - DNA, 704 bp, synthetic construct
  source 1..704: mol_type = other DNA
gtgctagcactctggttccacgggacctttgtgcgcctgttttacgtcccctccccaatctgtaacttagaagcaatttgcaacaccgatcagtagcaggcatggcgcaccagctatgtcttgatcaagcacttctgtttccccggaccgagtatcaatagactgttcacgcggttgaaggagaaagcgtccgttatccggctaactacttcgagaaacccagtagcgccattaaaactgcagagtgtttcgctccacacttcccccgtgtagatcaggtcgatgagtcaccgcaatccccacgggcgaccgtggcggtggctgcgctggcggcctgcctatggggtaacccataggacgctctaatgtggacatggtgcgaagagtctattgagctagttagtagtcctccggcccctgaatgcggctaatcctaactgcggagcacatgccttcaatccagagggtagtgtgtcgtaatgggcaactctgcagcggaaccgactactttgggtgtccgtgtttccttttattcccacattggctgcttatggtgacaattatagaattgttaccatatagctattggattggccatccggtgtgcaatagagctattatatatctatttgttggctttgtaccactgacctcaaaatctgtaaccacccttaagtatatattaaccctcaatacaatcaaac

SEQ ID NO: 19577 - DNA, 691 bp, synthetic construct
  source 1..691: mol_type = other DNA
ctgattttacggaatctttgtgcgcctgttttataacccctcccctaagcagtaacttagaagcttcacattatcacgaccaatagcgggcgtggcgcaccagtcacgtcttggtcaagcactcctgtttccccggactgagtatcaatagactgctcacgcggttgaaggagaaaatgttcgttatccggctaactacttcgagaaacctagtagcaccgtgaaagttgcggagtgtttcgctcagcacttcccccgtgtagatcaggtcgatgagtcactgtgaaccccacgggtgaccgtgacagtggctgcgttggcggcctgcccatggggtaactcatgggacgctctaatacagacacggtgtgaagagtctattgagctagttagtagccctccggcccctgaatgcggctaatcctaactgcggagcgcgcaccttcaatccaggaggcggcgcgtcgtaatgggtaactctgcagcggaaccgactactttgggtgtccgtgtttccttttattccttattggctgcttatggtgacaattgaaaagttgttaccatatagctattggattggccatccggtaaccaacagagctattgtttacctgttcgttggatacgtccctctcgacttcaaggccattcaaactcttgattatatactacatctcaactgtaagaa

SEQ ID NO: 19578 - DNA, 656 bp, synthetic construct
  source 1..656: mol_type = other DNA
ccctccccaatttgtaacttagaagcaattcgcaacaccgatcaatagcaggcatggcgcaccagctatgtcttgatcaagcacttctgtttccccggaccgagtatcagtaaactgttcacgcggttgaaggagaaagcgtccgttatccggctaactacttcgagaaacccagtaacgccattgaaactgcagagtgtttcgctccacacttcccccgtgtagatcaggtcgatgagtcactgcaatccccacgggcgaccgtggcagtggctgcgctggcggcctgcctatggggcaacccataggacgctctaatgtggacatggtgtgaagagtctattgagctagttagtagtcctccggcccctgaatgcggctaatcctaactgcggagcacatgccctcaatccagagggtagtgtgtcgtaatgggcaactctgcagcggaaccgactactttgggtgtccgtgtttccttttattctcacattggctgcttatggtgacaatcactgaattgttaccatatagctattggattggccatccggtgtgcaatagagctatcatatacctatttgttggttttgtaccactgaccttaaaatctgtaaccactctcgactatatattgaccctcaatacaatcaaac

SEQ ID NO: 19579 - DNA, 636 bp, synthetic construct
  source 1..636: mol_type = other DNA
cttagaagcagcaaaccacgatcaatagcaggcataacgctccagttatgtcttgatcaagcacttctgtttccccggaccgagtatcaatagactgctcgcgcggttgaaggagaaaacgttcgttatccggctagctacttcgggaaacctagtaacaccatgaaagttgcggagggcttcgttcagcactcccccagtgtagatcaggccgatgagtcaccgcattccccacgggcgaccgtggcggtggctgcgttggcggcctgcccatggggtaacccatggggcgctctaatacggacatggtgtgaagagtctactgagctagttagtagtcctccggcccctgaatgcggctaatcccaactgcggagcacacgcccacaagccagcgggtagtgtgtcgtaacgggcaactctgcagcggaaccgactactttgggtgtccgtgtttccttttatctttatattggctgcttatggtgacaattaaagaattgttaccatatagctattggattggccatccggtgtgtaacagagcaattgtttacctatttattggttttgtaccattaaccttgaagactgtgaccacccttaattatatcttgaccctcaacacagctaaac

SEQ ID NO: 19580 - DNA, 720 bp, synthetic construct
  source 1..720: mol_type = other DNA
cacccacagggcccactgggcgctagcacactggttctgcgggacttttgtgcgcctgttttataacccttccctaagcagtaacttagaagctttgtacaatcatggccaatagtgggcgcgacgcaccagtcacgtcttggtcaagcacttctgtatccccggactgagtatcaatagactgctcacgcggttgaaggagaaaacgttcgttacccggctaactacttcgagaaacctagtagcaccatgaaagttgcggagtgtttcgctcagcacttcccccgtgtagatcaggtcgatgagtcactgtaaaccccacgggcgaccgtgacagtggctgcgttggcggcctgcccatggggtaacccatgggacgctctaatacagacatggtgcaaagagtctattgagctagttagcagtcctccggcccctgaatgcggctaatcctaactgcggagcgcgcaccctcaacccagggggcggcgcgtcgtaatgggtaactctgcagcggaaccgactactttgggtgtccgtgtttccttttattctttattggctgcttatggtgacaattgaaaagttgttaccatatagctattggattggccatccggtgtctaacagagctattgtttacctattcattggcttcgtccctctcaatctcaaggccattcaaactctcagttacatattgctcctcaattgtaagaa

SEQ ID NO: 19581 - DNA, 682 bp, synthetic construct
  source 1..682: mol_type = other DNA
gaatctttgtgcgcctgttttacaccccctccccaattcgcaacttagaagcaatatacaacactgatcaacagcgggcgtggcgcaccagccatgtcttgatcaagcacttctgtttccccggactgagtatcgatagactgctcacgcggttgaaggagaaagcgtccgttatccggctaactacttcgagaaacctagtagcaccattgaagctgcagagtgtttcgctcggcacttcccccgtgtagatcaggtcgatgagtcactgcaatccccacgggcgaccgtggcagtggctgcgctggcggcctgcctatggggtaacccataggacgctctaatgtggacatggtgcgaagagtctattgagctagttagtagtcctccggcccctgaatgcggctaatcctaactgcggagcacatgccttcaacccagagggtagtgtgtcgtaatgggcaactctgcagcggaaccgactactttgggtgtccgtgtttctttttattctcatattggctgcttatggtgacaattacagaattgttaccatatagctattggattggccatccggtgtgtaatagagctgttatatacctgtttgttggctttgtgccactaactttaaaatctataactaccctcaattttatattaaccctcaatacagttaaac

SEQ ID NO: 19582 - DNA, 691 bp, synthetic construct
  source 1..691: mol_type = other DNA
ctggttctgcggaacctttgtgcgcctgttttataacccttcccttaagcagtaacttagaagctttgtacaatcatggccaacagtgggcgtggcgcgccagtcacgtcttggtcaagcacttctgtatccccggactgagtatcaatagactgctcacgcggttgaaggagaaaacgttcgtcacccggctaattacttcaagaaacctagtagcaccatgaaagttgcggagtgtttcgctcagcacttcccccgtgtagatcaggtcgatgagtcactgtaaaccccacgggcgaccgtgacagtggctgcgttggcggcctgcccatggggtaacccatgggacgctctaatacggacatggtgtgaagagtctattgagctagttagtagtcctccggcccctgaatgcggctaatcctaactgcggagcgcgcaccctcaacccagggggcagcgcgtcgtaatgggtaactctgcagcggaaccgactactttgggtgtccgtgtttccttttactctttattggctgcttatggtgacaattgaaaagttgttaccatatagctattggattggccatccggtgtctaacagagctattgtttacctgttcattggattcgtccctcttaatctcaagaccattcaaactctcgattacatattgctccttaactgtaagaa

SEQ ID NO: 19583 - DNA, 688 bp, synthetic construct
  source 1..688: mol_type = other DNA
ggtactgaggtacctttgtgcgcctgttttacctcccttcccccgaagtaacttagaagctgtgaaccaacgatcaatagtaggtgtgacataccagtcatatctcgatcaagcacttctgtttccccggactgagtatcaataggctgctcgcgcggctgaaagagaaaacgttcgttacccggccaactacttcgagaagcttagtaccaccatgaacgaggcagagcgtttcgctcggcacaatcccagtgtagatcaggctgatgagtcactgcaatccccatgggcgaccatggcagtggctgcgttggcggcctgcccatggagaaatccatgggacgctctaattttgacatggtgcgaagagcctattgagctagttggtagtcctccggcccctgaatgcggctaatcccaactgcggagcacacacccacaagccagtgggcagtgtgtcgtaacgggcaactctgcagcggaaccgactactttgggtgtccgtgtttccttttattcttatgttggctgcttatggtgacaatcaaagagttgttaccatatagctattggattggccgtccggtgtgcaacagagcaattgtttacttatttattggttttgtaccattgacactgaagtctgtagtcacccttaattttatcttgaccctcaatacagttaaac

SEQ ID NO: 19584 - DNA, 678 bp, synthetic construct
  source 1..678: mol_type = other DNA
tacctttgtgcgcctgtttttacttcccttccccaaagtaacttagaagttgcgcaccaacgatcaatagcaggtgtgacacaccagtcatatcttgatcaagtacttctgtttccccggaccgagtatcaataggctgctcgcgcggctgaaggagaaaacgttcgttacccgaccaactacttcgagaagcttagtaccaccatgaacgaggcagagtgtttcgttcagcacaaccccagtgtagatcaggctgatgagtcactgcaacccccatgggcaaccatggcagtggctgcgttggcggcctgcccatggagaaatccatgggacgctctaattctgacatggtgtgaagagcctattgagctagctggtagtcctccggcccctgaatgcggctaatcctaactgcggagcacatgctcacaaaccagtgggtggtgtgtcgtaatgggcaactctgcagcggaaccgactactttgggtgtccgtgtttccttttattcttatgttggctgcttatggtgacaatcaaagaattgttaccatatagctattggattggccatccggtgtgcaacagagcaattgtttacctatttattggtttcgtaccactatcactgaagtctgtgaccactctcaaattcattttgaccctcaactcaatcaaac

SEQ ID NO: 19585 - DNA, 666 bp, synthetic construct
  source 1..666: mol_type = other DNA
ctgttttataacccctcccctaagcagtaacttagaagcttcacactatcacgaccaatagtaggcgtggcgcaccagtcacgtcttggtcaagcacttctgtctccccggactgagtatcaatagactgctcacgcggttgaaggagaaagcgttcgttatccggctaactacttcgagaaacttagtagcaccgtgaaagttgcggagtgtttcgctcagcacttccctcgtgtagatcaggtcgatgagtcactgtgaaccccacgggcgaccgtgacagtggctgcgttggcggcctgcccatggggtaacccatgggacgctctaatacagacacggtgcgaagagtctattgagctagttagtagtcctccggcccctgaatgcggctaatcctaactgcggagcgcgcaccctcaatccagtgggcagcgcgtcgtaatgggtaactctgcagcggaaccgactactttgggtgtccgtgtttccttttattctttattggctgcttatggtgacaattgaaaagttgttaccatatagctattggattggccatccggtgaccaacagagctattgtttatctgttcattgggtacgtccctctcaatctcaaggtcattcaaactcttgattatatactacttctcaattataagaa

SEQ ID NO: 19586 - DNA, 724 bp, synthetic construct
  source 1..724: mol_type = other DNA
tacccactcacagggcccactgggcgttagcactctggcactaaggtacctttgtgcgcctgttttaactcccttcccctgaagtaacttagaagcagtaaactaatgatcaatagtgggcatgacataccagccatgtctcgatcaagcacttctgtttccccggactgagtatcaataggctgctcgcgtggctgaaagagaaaacgttcgtcacccggccagctacttcgagaagcttagtaccatcatgaacgaagcagagcgtttcgctcagcacaatcccagtgtagatcaggctgatgagtcactgcaaaccccatgggcgaccatggcagtggctgcgttggcggcctgcccatggagaaatccatgggacgctctaattctgacatggtgcgaagagcctattgagctagctggtagtcctccggcccctgaatgcggctaatcctaactgcggagcacgcacccacaaaccagtgggcagtgtgtcgtaatgggtaactctgcagcggaaccgactactttgggtgtccgtgtttccttttattcttatattggctgcttatggtgacaatcaaagagttgttaccatatagctattggattggccatccggtgtgcaacagagcaattgtttacctattcattgggtttgtaccactgacgttgaagtctgtgaccacactcaactttatcctgaacctcaatacagtaaaac

SEQ ID NO: 19587 - DNA, 683 bp, synthetic construct
  source 1..683: mol_type = other DNA
ggaatctttgtgcgcctgttttacaccccctccccaattcgcaacttagaagcaatatacaacactgatcaacagcgggcgtggcgcaccagccatgtcttgatcaagcacttctgtttccccggactgagtatcaatagactgctcacgcggttgaaggagaaagcgtccgttatccggctaactacttcgagaaacctagtagcaccattgaagctgcagagtgtttcgctcggcacttcccccgtgtagatcaggtcgatgagtcactgcaatccccacgggcgaccgtggcagtggctgcgctggcggcctgcctatggggtaacccataggacgctctaatgtggacatggtgcgaagagtctattgagctagttagtagtcctccggcccctgaatgcggctaatcctaactgcggagcacatgccttcaacccagagggtagtgtgtcgtaatgggcaactctgcagcggaaccgactactttgggtgtccgtgtttctttttattctcatattggctgcttatggtgacaattacagaattgttaccatatagctattggattggccatccggtgtgtaatagagctgttatatacctgtttgttggctttgtgccactaactttaaaatctataactaccctcaattttatattaaccctcaatacagttaaac

SEQ ID NO: 19588 - DNA, 698 bp, synthetic construct
  source 1..698: mol_type = other DNA
gcgctagcactctggtatcttggtacctttgtgcgcctgttttatacccctccccagtgaaacttagaagcagcaaaacacgaccaatagcaggcataacgcaccagttatgtcttggtcaagcacttctgtttccccggactgagtatcaatagactgctcgcgcggttgaaggagaaaacgttcgttatccggctagctacttcggaaaacctagtaacaccatgaaagttgcggagagcttcgttcagcactcccccagtgtagatcaggtcgatgagtcaccgcattccccacgggcgaccgtggcggtggctgcgttggcggcctgcccatggggtaacccatggggcgctctaatacggacatggtgtgaagagtctactgagctagctagtagtcctccggcccctgaatgcggctaatcccaactgcggagcacacgcccacaagccagcgggtagtgtgtcgtaacgggtaactctgcagcggaaccgactactttgggagtccgtgtttccttttaactttatattggctgcttatggtgacaattaaagaattgttaccatatagctattggattggccatccggtgtgcaacagagcaattatttacctatttattggttttgtaccattaactttggattctgtaaccacccttaattatatcttgacccttaacacagctaaac

SEQ ID NO: 19589 - DNA, 683 bp, synthetic construct
  source 1..683: mol_type = other DNA
aaatccttgtgcgcctggttttatatcccttccccaatccgaaacatagaagtaatgcgcaccactgatcaatagcaggcgtaacgcgccagttacgtcacgatcaagcacatctgtctccccggaccgagtatcaatagactgcttacgcggttgaaggagaaagcgttcgttatccggctaactacttcgagaagcccagtagcaccatggaagctgcagggtgtttcgctcagcacttcccccgtgtagatcaggtcgatgagccactgcaacccccacaggtgactgtggcagtggctgcgttggcggcctgcctatggggagacccataggacgctctaatgtggacatggtgcgaagagcctattgagctagttagtagtcctccggcccctgaatgcggctaatcctaactgcggagcacacgccttcaacccagagggtagtgtgtcgtaacgggcaactctgcagcggaaccgactactttgggtgtccgtgtttctttttatccttatattggctgcttatggtgacaattacagaattgttaccatatagctattggattggccatccggtgtgcaatagagctgttatatacctctttgttggttttgtaccactaactttaaaatctatagctacccttaattttatattgaccctcaacacagtcaaac

SEQ ID NO: 19590 - DNA, 683 bp, synthetic construct
  source 1..683: mol_type = other DNA
tgaggtacctttgtgcgcctgttttacctcccctcccccgaagcaacttagaagctgtgaaccaacgatcaatagtaggtgtgacataccagtcatatctcgatcaagcacttctgtttccccggactgagtatcaataggctgctcgcgcggctgaaagagaaaacgttcgttacccggccaactacttcgagaagcttagtaccaccatgaacgaggcagagcgtttcgctcggcacaaccccagtgtagatcaggctgatgagtcactgcaacccccatgggcgaccatggcagtggctgcgttggcggcctgcccatggagaaatccatgggacgctctaattttgacatggtgcgaagagcctattgagctagttggtagtcctccggcccctgaatgcggctaatcctaactgcggagcacacacccacaaaccagtgggcagtgtgtcgtaacgggcaactctgcagcggaaccgactactttgggtgtccgtgtttccttttattcttatgttggctgcttatggtgacaactaaagagttgttaccatatagctattggattggccacccggtgtgcaacagagcaattgtttacctatttattggttttgtaccgttgacgctgaagtctgtggtcacccttaattttatcttgatcctcaacacggtcaaac

SEQ ID NO: 19591 - DNA, 604 bp, synthetic construct
  source 1..604: mol_type = other DNA
cataacgctccagttatgtcttgatcaagcacttctgtctccccggactgagtatcaatagactgctcgcgcggttgaaggagaaaacgttcgttatccggctagctacttcggaaaacctagtaacaccatgaaagttgcggagagcttcattcagcactcccccagtgtagatcaggtcgatgagtcaccgcattccccacgggcgaccgtggcggtggctgcgttggcggcctgcccatggggtaacccatggggcgctctaatacggacatggtgtgaagagtctactgagctagttagtagtcctccggcccctgaatgcggctaatcccaactgcggagcacacgcccacaagccagcgggtagtgtgtcgtaacgggtaactctgcagcggaaccgactactttgggtgtccgtgtttctttttatctttatattggctgcttatggtgacaattaaagaattgttaccatatagctattggattggccatccggtgtgcaacagagcaattgtttacctatttattggatttgtaccattaaccttgaagtctgtgaccacccttaattatatcttgacccttaacacagctaaac

SEQ ID NO: 19592 - DNA, 681 bp, synthetic construct
  source 1..681: mol_type = other DNA
aatccttgtgtgcctgttttatatccctcccctaattcgaaacatagaagtaatgcgcaccactgatcaatagcaggcgtaacgcgccagttacgtctcgatcaagcacatctgtttccccggaccgagtatcaatagactgctcacgcggttgaaggagaaagtgttcgttatccggctaactacttcgagaagcccagtaacaccatggaagctgcagggtgtttcgctcaacacttcccccgtgtagatcaggtcgatgagtcactgcaatccccacgggtgaccgtggcagtggctgcgttggcggcctgcctatggggagacccataggacgctctaatgtggacatggtgcgaagagtctattgagctagttagtaatcctccggcccctgaatgcggctaatcctaactgcggagcacatgccttcaatccagagggtagtgtgtcgtaacgggcaactctgcagcggaaccgactactttgggtgtccgtgtttctttttattcttatattggctgcttatggtgacaattacagaattgttaccatatagctattggattggccatccggtgtgtaatagagctattatatacctgtttgttggttttgtgccactaactttaaaatctatagttactctcaattttatattgaccctcaacacagctaaac

SEQ ID NO: 19593 - DNA, 692 bp, synthetic construct
  source 1..692: mol_type = other DNA
ctgatttacgaaatccttgtgcgcctgttttatatcccttccctaattcgaaacatagaagtaatgcgcaccactgatcaatagcaggcgtaacgcgccagttacgtctcgatcaagcacatctgtctccccggaccgagtatcaatagactgcttacgcggttgaaggagaaagcgttcgttatccggctaactacttcgagaagcccagtagcaccatggaagctgcagggtgtttcgctcagcacttcccccgtgtagatcaggtcgatgagccactgcaacccccacaggtgactgtggcagtggctgcgttggcggcctgcctatggggagacccataggacgctctaatgtagacatggtgcgaagagcctattgagctagttagtagtcctccggcccctgaatgcggctaatcctaactgcggagcacatgccttcaacccagagggtagtgtgtcgtaacgggcaactctgcagcggaaccgactactttgggtgtccgtgtttctttttattcttatattggctgcttatggtgacaactacagaattgttaccatatagctattggattggccatccggtgtgtaatagagctgttatatacctgtttgttggttttgtaccactaactttaaaatctataactacccttaattttatattgaccctcaacgcagttaaac

SEQ ID NO: 19594 - DNA, 623 bp, synthetic construct
  source 1..623: mol_type = other DNA
aaccacgatcaatagcaggcataacgctccagttatgtcttgatcaagcacttctgtctccccggactgagtatcaatagactgctcgcgcggttgaaggagaaaacgttcgttatccggctagctacttcggaaaacctagtaacaccatgaaagttgcggagagcttcattcagcactcccccagtgtagatcaggtcgatgagtcaccgcattccccacgggcgaccgtggcggtggctgcgttggcggcctgcccatggggtaacccatggggcgctctaatacggacatggtgtgaagagtctactgagctagttagtagtcctccggcccctgaatgcggctaatcccaactgcggagcacacgcccacaagccagcgggtagtgtgtcgtaacgggtaactctgcagcggaaccgactactttgggtgtccgtgtttctttttatctttatattggctgcttatggtgacaattaaagaattgttaccatatagctattggattggccatccggtgtgcaacagagcaattgtttacctatttattggatttgtaccattaaccttgaagtctgtgaccacccttaattatatcttgacccttaacacagctaaac

SEQ ID NO: 19595 - DNA, 720 bp, synthetic construct
  source 1..720: mol_type = other DNA
ccacaggacccacgcggtgctagcactctggttccacgggacctttgtgcgcctgttttacgtcccctccccaatctgtaacttagaagcaatttgcaacaccgatcagtagcaggcatggcgcaccagctatgtcttgatcaagcacttctgtttccccggaccgagtatcaatagactgttcacgcggttgaaggagaaagcgtccgttatccggctaactacttcgagaaacccagtagcaccattaaaactgcagagtgtttcgctccacacttcccccgtgtagatcaggtcgatgagtcaccgcaatccccacgggcgaccgtggcggtggctgcgctggcggcctgcctatggggtaacccataggacgctctaatgtggacatggtgcgaagagtctattgagctagttagtagtcctccggcccctgaatgcggctaatcctaactgcggagcacatgccttcaatccagagggtagtgtgtcgtaatgggcaactctgcagcggaaccgactactttgggtgtccgtgtttccttttattcccacattggctgcttatggtgacaattatagaattgttaccatatagctattggattggccatccggtgtgcaatagagctattatatatctatttgttggctttgtaccactgacctcaaaatctgtaaccacccttaagtatatattaaccctcaatacaatcaaac

SEQ ID NO: 19596 - DNA, 672 bp, synthetic construct
  source 1..672: mol_type = other DNA
gtgcctgttttatatcccttccctaattcgaaacatagaagtaatgcgcaccactgatcaatagcaggcgtaacgcgccagttacgtctcgatcaagcacatctgtttccccggaccgagtatcaatagactgctcacgcggttgaaggagaaagtgttcgttatccggctaactacttcgagaagcccagtagcaccatggaagctgcagggtgtttcgctcaacacttcccccgtgtagatcaggtcgatgagtcactgcaatccccacgggtgaccgtggcagtggctgcgttcgcggcctgcctatggggagacccataggacgctctaatgtggacatggtgcgaagagtctattgagctagttagtaatcctccggcccctgaatgcggctaatcctaactgcggagcacatgccttcaacccagaaggtagtgtgtcgtaacgggcaactctgcagcggaaccgactactttgggtgtccgtgtttctttttattcttatattggctgcttatggtgacaattacagaattgttaccatatagctattggattggccatccggtgtgtaatagagctattatatacctgtttgttggttttgtgccactaactttaaaatctatagttactctcaattttatattgaccctcaacacagctaaac

SEQ ID NO: 19597 - DNA, 650 bp, synthetic construct
  source 1..650: mol_type = other DNA
cccccccaatgaaacttagaagcagcaaaccacgatcaatagtaggcataacgctccagttatgtcttgatcaagcacttctgtttccccggactgagtatcaatagactgctcgcgcggttgaaggagaaaacgttcgttatccggctagctacttcggaaaacctagtaacaccatgaaagttgcggagagcttcgttcagcactcccccagtgtagatcaggtcgatgagtcaccgcattccccacgggcgaccgtggcggtggctgcgttggcggcctgcccatggggtaacccatggggcgctctaatacggacatggtgtgaagagtctactgagctagttagtagtcctccggcccctgaatgcggctaatcccaactgcggagcacacgcccacaagccagcgggtagtgtgtcgtaacgggtaactctgcagcggaaccgactactttgggtgtccgtgtttccttttatctttatattggctgcttatggtgacaattaaagaattgttaccatatagctattggattggccatccggtgtgcaacagagcaattatttaccaatttattggttttgtaccattaaccttgaattctgtgaccacccttaattatatcttgacccttaacgcagctaaac

SEQ ID NO: 19598 - DNA, 650 bp, synthetic construct
  source 1..650: mol_type = other DNA
cccccccaatgaaacttagaagcagcaaaccacgatcaatagtaggcataacgctccagttatgtcttgatcaagcacttctgtttccccggactgagtatcaatagactgctcgcgcggttgaaggagaaaacgttcgttatccggctagctacttcggaaaacctagtaacaccatgaaagttgcggagagcttcgttcagcactcccccagtgtagatcaggttgatgagtcaccgcattccccacgggcgaccgtggcggtggctgcgttggcggcctgcccatggggtaacccatggggcgctctaatacggacatggtgtgaagagtctactgagctagttagtagtcctccggcccctgaatgcggctaatcccaactgcggagcacacgcccacaagccagcgggtagtgtgtcgtaacgggtaactctgcagcggaaccgactactttgggtgtccgtgtttccttttatctttatattggctgcttatggtgacaattaaagaattgttaccatatagctattggattggccatccggtgtgcaacagagcaattatttaccaatttattggttttgtaccattaaccttgaattctgtgaccacccttaattatatcttgacccttaacgcagctaaac

SEQ ID NO: 19599 - DNA, 650 bp, synthetic construct
  source 1..650: mol_type = other DNA
cccccccaatgaaacttagaagcagcaaaccacgatcaatagtaggcataacgctccagttatgtcttgatcaagcacttctgtttccccggactgagtatcaatagactgctcgcgcggttgaaggagaaaacgttcgttatccggctagctacttcggaaaacctagtaacaccatgaaagttgcggagagcttcgttcagcactcccccagtgtagatcaggtcgatgagtcaccgcattccccacgggcgaccgtggcggtggctgcgttggcggcctgcccatggggtaacccatggggcgctctaatacggacatggtgtgaagagtctactgagctagttagtagtcctccggcccctgaatgcggctaatcccaactgcggagcacacgcccacaagccagcgggtagtgtgtcgtaacgggtaactctgcagcggaaccgactactttgggtgtccgtgtttccttttatctttatactggctgcttatggtgacaattaaagaattgttaccatatagctattggattggccatccggtgtgcaacagagcaattatttaccaatttattggttttgtaccattaaccttgaattctgtgaccacccttaattatatcttgacccttaacgcagctaaac

SEQ ID NO: 19600 - DNA, 668 bp, synthetic construct
  source 1..668: mol_type = other DNA
cctgtttttactccccttcccccgaagtaacttagaagctgtaaatcaacgatcaatagcaggtgtggcacaccagtcataccttgatcaagcacttctgtttccccggactgagtatcaataggctgctcgcgcggctgaaggagaaaacgttcgttacccgaccaactacttcgagaagcttagtaccaccatgaacgaggcagagtgtttcgctcagcacaaccccagtgtagatcaggctgatgagtcactgcaacccccatgggcgaccatggcagtggctgcgttggcggcctgcccatggagaaatccatgggacgctctaattctgacatggtgtgaaagagcctattgagctagctggtagtcctccggcccctgaatgcggctaatcctaactgcggagcacatgctcacgaaccagtgggtggtgtgtcgtaacgggcaactctgcagcggaaccgactactttgggtgtccgtgtttccttttattcctatattggctgcttatggtgacaatcaaagagttgttaccatatagctattggattggccatccggtgtgcaacagggcaattgtttacctatttattggttttgtaccattatcactgaagtctgtgatcactctcaaattcattttgaccctcaacacaatcaaac

SEQ ID NO: 19601 - DNA, 684 bp, synthetic construct
  source 1..684: mol_type = other DNA
cgggacctttgtgcgcctgttttatgtcccctccccaatttgtaacttagaagtaatttgcaacactgatcagtagcaggcatagcgcaccagctatgtcttgatcaagcacttctgtttccccggaccgagtatcaatagactgtacacacggttgaaggagaaagcgtccgttacccggctaactacttcgagaaacccagtagcaccattgaaactacagagtgtttcgctccacacttcccccgtgtagatcaggtcgatgagtcactgcaatccccacgggcgaccgtggcagtggctgcgctggcggcctgcctatggggcaacccataggacgctctaatgtggacatggtgtgaagagtctattgagctagttagtagtcctccggcccctgaatgcggctaatcctaactgcggagcacatgccttcaatccagagggtagtgtgtcgtaatgggcaactctgcagcggaaccgactactttgggtgtccgtgtttccttttattctcacattggctgcttatggtgacaattatagaattgttaccatatagctattggattggccatccggtgtgcaatagagctattatatacctatttgttggctttgtaccactaaccttaaaatctttaaccactctcgagtgtatattaacccttaatacaatcaaac

SEQ ID NO: 19602 - DNA, 675 bp, synthetic construct
  source 1..675: mol_type = other DNA
ctttgtgcgcctgtttttacttcccttccccgaagtaacttagaagctgtaaaccaacgatcaatagtaggtgtgacacgccagtcatatcttgatcaagcacttctgtttccccggactgagtatcaataggctgctcgcgcggctgaaggagaaaacgttcgttacccgaccaactacttcgagaagcttagtaccaccatgaacgaggcagagtgtttcgctcagcacaaccccagtgtagatcaggctgatgagccactgcaacccccatgggcgaccatggcagtggctgcgttggcggcctgcccatggagaaatccatgggacgctctaattctgacatggtgtgaagagcctattgagctagctggtagtcctccggcccctgaatgcggctaatcctaactgcggagcacatgctcacaaaccagtgggtggtgtgtcgtaacgggcaactctgcagcggaaccgactactttgggtgtccgtgtttccttttattcttatattggctgcttatggtgacaatcaaagaattgttaccatatagctattggattggccattcggtgtgcaacagagcaattgtttacctatttattggttttgtaccactatcactgaagtctgtgatcaccctcgaattcattttgaccctcaacacaatcagac

SEQ ID NO: 19603 - DNA, 683 bp, synthetic construct
  source 1..683: mol_type = other DNA
taaggtacctttgtgcgcctgtttttacttcccttccccaaagtaacttagaagttgcgcaccaacgatcaatagcaggtgtgacacaccagtcatatcttgatcaagtacttctgtttccccggaccgagtatcaataggctgctcgcgcggctgaaggagaaaacgttcgttacccgaccaactacttcgagaagcttagtaccaccatgaacgaggcagagtgtttcgttcagcacaaccccagtgtagatcaggctgatgagtcactgcaacccccatgggcgaccatggcagtggctgcgttggcggcctgcccatggagaaatccatgggacgctctaattctgacatggtgtgaagagcctattgagctagctggtagtcctccggcccctgaatgcggctaatcctaactgcggagcacatgctcacaagccagtgggtggtgtgtcgtaatgggcaactctgcagcggaaccgactactttgggtgtccgtgtttccttttattcttatgttggctgcttatggtgacaatcaaagaattgttaccatatagctattggattggccatccggtgtgcaacagagcaattgtttacctatttattggtttcgtaccactatcactgaagtctgtgaccactctcaaattcattttgaccctcaactcaatcaaac

SEQ ID NO: 19604 - DNA, 714 bp, synthetic construct
  source 1..714: mol_type = other DNA
gggcccactgggcgctagcactccggtaccacggtacctttgtgcgcctgttttatccccccaaacccccgtaacgctacactagaagatagacaatgcgaccaatagccagtggggcaacccagcctcactctggtcaagcacctctgtttccccgggcttagtaccaataagctgctcgcgcggctgaaggggaacgcgcccgttatccggctaactacttcgagaaacctagtaccaccatggaagttgcagagtgtttcgctcagcacaaccccagtgtagatcaggccgatgagtcaccgtgcaccccacgggcgaccgtgacggtggctgcgctggcggcctgcccatggtgtacaccatgggacgctctaatacagacatggtgcgaagagtctattgagctagttagtagtcctccggcccctgaatgcggctaatcctaactgcggggcacgcgctctcaacccagagagtagcgtgtcgtaacgggcaactctgcagcggaaccgactactttgggtgtccgtgtttccctttatttttacattggctgcttatggtgacaattgagagattgttaccatatagctattggattggccatccggtgtgtaacagagctatcatatattcttttgttggctttgtaccactaaattatactgtaattattactttaaggtacatcttgcttttaaacacagcaaa

SEQ ID NO: 19605 - DNA, 714 bp, synthetic construct
  source 1..714: mol_type = other DNA
gggcccactgggcgctagcactccggtaccacggtacctttgtgcgcctgttttatccccccaaacccccgtaacgctacactagaagatagacaatgcgaccaatagccagtggggcaacccagcctcactctggtcaagcacctctgtttccccgggcttagtaccaataagctgctcgcgcggctgaaggggaacgcgcccgttatccggctaactacttcgagaaacctagtaccaccatggaagttgcagagtgtttcgctcagcacaaccccagtgtagatcaggccgatgagtcaccgtgcaccccacgggcgaccgtgacggtggctgcgctggcggcctgcccatggtgtacaccatgggacgctctaatacagacatggtgcgaagagtctattgagctagttagtagtcctccggcccctgaatgcggctaatcctaactgcggagcacgcgctctcaacccagagagtagcgtgtcgtaacgggcaactctgcagcggaaccgactactttgggtgtccgtgtttccctttatttttacattggctgcttatggtgacaattgagagattgttaccatatagctattggattggccatccggtgtgtaacagagctatcatatattcttttgttggctttgtaccactaaattatactgtaattattactttaaggtacatcttgcttttaaacacagcaaa

SEQ ID NO: 19606 - DNA, 714 bp, synthetic construct
  source 1..714: mol_type = other DNA
gggcccactgggcgctagcactccggtaccacggtacctttgtgcgcctgttttatccccccaaacccccgtaacgctacactagaagatagacaatgcgaccaatagccagtggggcaacccagcctcactctggtcaagcacctctgtttccccgggcttagtaccaataagctgctcgcgcggctgaaggggaacgcgcccgttatccggctaactacttcgagaaacctagtaccaccatggaagttgcagagtgtttcgctcagcacaaccccagtgtagatcaggccgatgagtcaccgtgcaccccacgggcgaccgtgacggtggctgcgctggcggcctgcccatggtgtacaccatgggacgctctaatacagacatggtgcgaagagtctattgagctagttagtagtcctccggcccctgaatgcggctaatcctaactgcggagcacgcgctctcaacccagagagtagcgtgtcgtaacgggcaactctgcagcggaaccgactactttgggtgtccgtgtttccctttatttttacattggctgcttatggtgacaattgagagattgttaccatatagctattggattggccatccggtgtgtaacagagctatcatatattcttttgttggctttgtgccactaaattatactgtaattattactttaaggtacatcttgcttttaaacacagcaaa

SEQ ID NO: 19607 - DNA, 714 bp, synthetic construct
  source 1..714: mol_type = other DNA
gggcccactgggcgctagcactccggtaccacggtacctttgtgcgcctgttttatccccccaaacccccgtaacgctacactagaagatagacaatgcgaccaatagccagtggggcaacccagcctcactctggtcaagcacctctgtttccccgggcttagtaccaataagctgctcgcgcggctgaaggggaacgcgcccgttatccggctaactacttcgagaaacctagtaccaccatggaagttgcagagtgtttcgctcagcacaaccccagtgtagatcaggccgatgagtcaccgtgcaccccacgggcgaccgtgacggtggctgcgctggcggcctgcccatggtgtacaccatgggacgctctaatacagacatggtgcgaagagtctattgagctagttagtagtcctccggcccctgaatgcggctaatcctaactgcggagcacgcgctctcaacccagagagtagcgtgtcgtaacgggcaactctgcagcggaaccgactactttgggtgtccgtgtttccctttatttttacattggctgcttatggtgacaattgagagattgttaccatatagctattggattggccatccggtgtgtaacagagctatcatatattcttttgttggctttgtgccactaaattatactgtgattattactttaaggtacatcttgcttttaaacacagcaaa

SEQ ID NO: 19608 - DNA, 714 bp, synthetic construct
  source 1..714: mol_type = other DNA
gggcccactgggcgctagcactccggtaccacggtacctttgtgcgcctgttttatccccccaaacccccgtaacgctgcactagaagatagacaatgcgaccaatagccagtggggcaacccagcctcactctggtcaagcacctctgtttccccgggcttagtaccaataagctgctcgcgcggctgaaggggaacgcgcccgttatccggctaactacttcgagaaacctagtaccaccatggaagttgcagagtgtttcgctcagcacaaccccagtgtagatcaggccgatgagtcaccgtgcaccccacgggcgaccgtgacggtggctgcgctggcggcctgcccatggtgtacaccatgggacgctctaatacagacatggtgcgaagagtctattgagctagttagtagtcctccggcccctgaatgcggctaatcctaactgcggagcacgcgctctcaacccagagagtagcgtgtcgtaacgggcaactctgcagcggaaccgactactttgggtgtccgtgtttccctttatttttacattggctgcttatggtgacaattgagagattgttaccatatagctattggattggccatccggtgtgtaacagagctatcatatattcttttgttggctttgtaccactaaattatactgtaattattactttaaggtacatcttgcttttaaacacagcaaa

SEQ ID NO: 19609 - DNA, 714 bp, synthetic construct
  source 1..714: mol_type = other DNA
gggcccactgggcgctagcactccggtaccacggtacctttgtgcgcctgttttatccccccaaacccccgtaacgctacactagaagatagacaatgcgaccaatagccagtggggcaacccagcctcactctggtcaagcacctctgtttccccgggcttagtaccaataagctgctcgcgcggctgaaggggaacgcgcccgttatccggctaactacttcgagaaacctagtaccaccatggaagttgcagagtgtttcgctcagcacaaccccagtgtagatcaggccgatgagtcaccgtgcaccccacgggcgaccgtgacggtggctgcgctggcggcctgcccatggtgtacaccatgggacgctctaatacagacatggtgcgaagagtctattgagctagttagtagtcctccggcccctgaatgcggctaatcctaactgcggagcacgcgctctcaacccagagagtagcgtgtcgtaacgggcaactctgcagcggaaccgactactttgggtgtccgtgtttccctttatttttacattggctgcttatggtgacaattgagagattgttaccatatagctattggattggccatccggtgtgtaacagagctatcatatattcttttgttggctttgtaccactaaattacactgtaattattactttaaggtacatcttgcttttaaacacagcaaa

SEQ ID NO: 19610 - DNA, 714 bp, synthetic construct
  source 1..714: mol_type = other DNA
gggcccactgggcgctagcactctggtaccacggtacccttgtgcgcctgttttatccccccaaacccccgtaacgctacactagaagatagacaatgcgaccaatagtcagtggggcaatccagccccactttggtcaagcacctctgtttccccgggcttagtaccaataagctgctcgcgcggctgaaggggaacgcgcccgttatccggctaactacttcgagaaacctagtaccaccatggaagttgcagagtgtttcgctcagcacaaccccagtgtagatcaggccgatgagtcaccgtgcaccccacgggcgaccgtgacggtggctgcgttggcggcctgcccatggtgtacaccatgggacgctctaatacaaacatggtgcgaagagtctattgagctagttagtagtcctccggcccctgaatgcggctaatcctaactgcggagcacgcgctctcaacccagagagtagcgtgtcgtaacgggcaactctgcagcggaaccgactactttgggtgtccgtgtttccttttattctcacattggctgcttatggtgacaattgagagattgttaccatatagctattggattggccatccggtgtgtaacagagctatcatatattcttttgttggctttgtgccactagattatactgcaattgttactttaaggtacatcttgcttttgaacacagcaaa

SEQ ID NO: 19611 - DNA, 714 bp, synthetic construct
  source 1..714: mol_type = other DNA
gggcccactgggcgctagcactccggtaccacggtacctttgtgcgcctgttttatccccccaaacccccgtaacgctacactagaagatagacaatgcgaccaatagccagtggggcaacccagcctcactctggtcaagcacctctgtttccccgggcttagtaccaataagctgctcgcgcggctgaaggggaacgcgcccgttatccggctaactacttcgagaaacctagtaccaccatggaagttgcagagtgtttcgctcagcacaaccccagtgtagatcaggccgatgagtcaccgtgcaccccacgggcgaccgtgacggtggctgcgctggcggcctgcccatggtgtacaccatgggacgctctaatacagacatggtgcgaagagtctattgagctagttagtagtcctccggcccctgaatgcggctaatcctaactgcggagcacgcgctctcaacccagagagtagcgtgtcgtaacgggcaactctgcagcggaaccgactactttgggtgtccgtgtttccctttatttttccattggctgcttatggtgacaattgagagattgttaccatatagctattggattggccatccggtgtgtaacagagctatcatatattcttttgttggctttgtaccactaaattatactgtaattattactttaaggtacatcttgcttttaaacacagcaaa

SEQ ID NO: 19612 - DNA, 714 bp, synthetic construct
  source 1..714: mol_type = other DNA
gggcccactgggcgctagcactccggtaccacggtacctttgtgcgcctgttttatccccccaaacccccgtaacgctacactagaagatagacaatgcgaccaatagccagtggggcaacccagcctcactctggtcaagcacctctgtttccccgggcttagtaccaataagctgctcgcgcggctgaaggggaacgcgcccgttatccggctaactacttcgagaaacctagtaccaccatggaagttgcagagtgtttcgctcagcacaaccccagtgtagatcaggccgatgagtcaccgtgcaccccacgggcgaccgtgacggtggctgcgctggcggcctgcccatggtgtacaccatgggacgctctaatacagacatggtgcgaagagtctattgagctagttagtagtcctccggcccctgaatgcggctaatcctaactgcggagcacgcgctctcaacccagagagtagcgtgtcgtaacgggcaactctgcagcggaaccgactactttgggtgtccgtgtttccctttatttttacattggctgcttatggtgacaattgggagattgttaccatatagctattggattggccatccggtgtgtaacagagctatcatatattcttttgttggctttgtaccactaaattacactgtaattattactttaaggtacatcttgcttttaaacacagcaaa

SEQ ID NO: 19613 - DNA, 714 bp, synthetic construct
  source 1..714: mol_type = other DNA
gggcccactgggcgctagcactccggtaccacggtacctttgtgcgcctgttttatccccccaaacccccgtaacgctacactagaagatagacaatgcgaccaatagccagtggggcaacccagcctcactctggtcaagcacctctgtttccccgggcttagtaccaataagctgctcgcgcggctgaaggggaacgcgcccgttatccggctaactacttcgagaaacctagtaccaccatggaagttgcagagtgtttcgctcagcacaaccccagtgtagatcaggccgatgagtcaccgtgcaccccacgggcgaccgtgacggtggctgcgctggcggcctgcccatggtgtacaccatgggacgctctaatacagacatggtgcgaagagtctattgagctagttagtagtcctccggcccctgaatgcggctaatcctaactgcggagcacgcgctctcaacccagagagtagcgtgtcgtaacgggcaactctgcagcggaaccgactactttgggtgtccgtgtttccctttatttttacattggctgcttatggtgacaattgagagattgttaccatatagctattggattggccatccggtgtgtaacagagctatcatatattcttttgttggctttgtaccactaaattatactgtaattattactttaagatacatcttgcttttaaacacagcaaa

SEQ ID NO: 19614 - DNA, 714 bp, synthetic construct
  source 1..714: mol_type = other DNA
gggcccactgggcgctagcactccggtaccacggtacctttgtgcgcctgttttatccccccaaacccccgtaacgctacactagaagatagacaatgcgaccaatagccagtggggcgacccagcctcactctggtcaagcacctctgtttccccgggcttagtaccaataagctgctcgcgcggctgaaggggaacgcgcccgttatccggctaactacttcgagaaacctagtaccaccatggaagttgcagagtgtttcgctcagcacaaccccagtgtagatcaggccgatgagtcaccgtgcaccccacgggcgaccgtgacggtggctgcgctggcggcctgcccatggtgtacaccatgggacgctctaatacagacatggtgcgaagagtctattgagctagttagtagtcctccggcccctgaatgcggctaatcctaactgcggagcacgcgctctcaacccagagagtagcgtgtcgtaacgggcaactctgcagcggaaccgactactttgggtgtccgtgtttccctttatttttacattggctgcttatggtgacaattgagagattgttaccatatagctattggattggccatccggtgtgtaacagagctatcatatattcttttgttggctttgtaccactaaattatactgtaattattactttaagatacatcttgcttttaaacacagcaaa

SEQ ID NO: 19615 - DNA, 714 bp, synthetic construct
  source 1..714: mol_type = other DNA
gggcccactgggcgctagcactccggtaccacggtacctttgtgcgcctgttttatccccctaaacccccgtaacgctacactagaagatagacaatgcgaccaatagccagtggggcaacccagcctcactctggtcaagcacctctgtttccccgggcttagtaccaataagctgctcgcgcggctgaaggggaacgcgcccgttatccggctaactacttcgagaaacctagtaccaccatggaagttgcagagtgtttcgctcagcacaaccccagtgtagatcaggccgatgagtcaccgtgcaccccacgggcgaccgtgacggtggctgcgctggcggcctgcccatggtgtacaccatgggacgctctaatacagacatggtgcgaagagtctattgagctagttagtagtcctccggcccctgaatgcggctaatcctaactgcggagcacgcgctctcaacccagagagtagcgtgtcgtaacgggcaactctgcagcggaaccgactactttgggtgtccgtgtttccctttatttttacattggctgcttatggtgacaattgagagattgttaccatatagctattggattggccatccggtgtgtaacagagctatcatatattcttttgttggctttgtaccactaaattatactgtaattattactttaaggtacatcttgcttttaaacacagcaaa

SEQ ID NO: 19616 - DNA, 714 bp, synthetic construct
  source 1..714: mol_type = other DNA
gggcccactgggcgctagcactccggtaccacggtacctttgtgcgcctgttttatccccccaaacccccgtaacgctacactagaagatagacaatgcgaccaatagccagtggggcaacccagcctcactctggtcaagcacctctgtttccccgggcttagtaccaataagctgctcgcgcggctgaaggggaacgcgcccgttatccggctaactacttcgagaaacctagtaccaccacggaagttgcagagtgtttcgctcagcacaaccccagtgtagatcaggccgatgagtcaccgtgcaccccacgggcgaccgtgacggtggctgcgctggcggcctgcccatggtgtacaccatgggacgctctaatacagacatggtgcgaagagtctattgagctagttagtagtcctccggcccctgaatgcggctaatcctaactgcggagcacgcgctctcaacccagagagtagcgtgtcgtaacgggcaactctgcagcggaaccgactactttgggtgtccgtgtttccctttatttttacattggctgcttatggtgacaattgagagattgttaccatatagctattggattggccatccggtgtgtaacagagctatcatatattcttttgttggctttgtaccactaaattatactgtaattattactttaaggtacatcttgcttttaaacacagcaaa

SEQ ID NO: 19617 - DNA, 724 bp, synthetic construct
  source 1..724: mol_type = other DNA
cacccactcacagggcccactgggtgcaagcactctggtaccccggtacctttgtgcgcctgttttataccccccctccccaatgaaacttagaagcagcaaaccacgatcaatagtaggcataacgctccagttatgtcttgatcaagcacttctgtttccccggactgagtatcaatagactgctcgcgcggttgaaggagaaaacgttcgttatccggctagctacttcggaaaacctagtaacaccatgaaagttgcggagggcttcgttcagcactcccccagtgtagatcaggtcgatgagtcaccgcattccccacgggcgaccgtggcggtggctgcgttggcggcctgcccatggggtaacccatggggcgctctaatacggacatggtgtgaagagtctactgagctagttagtagtcctccggcccctgaatgcggctaatcccaactgcggagcacacgcccacaagccagcgggtagtgtgtcgtaacgggtaactctgcagcggaaccgactactttgggtgtccgtgtttccttttatctttatattggctgcttatggtgacaattaaagaattgttaccatatagctattggattggccatccggtgtgcaacagagcaattatttaccaatttgttggttttgtaccattaaccttgaattctgtgaccacccttaattatatcttaacccttaacgcagctaaac

SEQ ID NO: 19618 - DNA, 689 bp, synthetic construct
  source 1..689: mol_type = other DNA
ttttacgaaatccttgtgtgcctgttttatatcccttccctaacttgaaacgtagaagcaatgcgcaacactgatcaatagcaggcgtaacgcgccagttacgtcatgatcaagcatatctgttcccccggactgagtatcaatagactgcttacgcggttgaaggagaaaacgttcgttatccggctaactacttcgagaagcccagtaacaccatggaagctgcagggtgtttcgctcagcactttccccgtgtagatcaggtcgatgagccactgcaatcctcacgggtgaccgtggcagtggctgcgttggcggcctgcctatggggagacccataggacgctctaatgtggacatggtgcgaagagcctattgagctagttagtagtcctccggcccctgaatgcggctaatcctaactgcggagcacatgccttcaacccagggggtagtgtgtcgtaatgggcaactctgcagcggaaccgactactttgggtgtccgtgtttctctttattcttatattggctgcttatggtgacaattaaagaattgttaccatatagctattggattggccatccggtgtgtaatagagctgttatatacctgtttgttggctttgtaccactaactttaaaatctataactaccctcaattttatattaaccctcaatacagttaaac

SEQ ID NO: 19619 - DNA, 653 bp, synthetic construct
  source 1..653: mol_type = other DNA
ccctccccccagtgaaacttagaagcagcaaaccacgatcaatagcaggcataacgctccagttatgtcttgatcaagcacttctgtttccccggactgagtatcaatagactgctcgcgcggttgaaggagaaaacgttcgttatccggctagctacttcggaaaacctagtaacaccatgaaagttgcggagagcttcgttcagcactcccccagtgtagatcaggtcgatgagtcaccgcattccccacgggcgaccgtggcggtggctgcgttggcggcctgcccatggggtaacccatggggcgctctaatacagacatggtgtgaagagtctactgagctagttagtagtcctccggcccctgaatgcggctaatcccaactgcggagcacacgcccacaagccagcgggtagtgtgtcgtaacgggtaactctgcagcggaaccgactactttgggtgtccgtgtttccttttatctttatattggctgcttatggtgacaattaaagaattgttaccatatagctattggattggccatccggtgtgcaacagagcaatcatttacctatttattggttttgtaccattaactttgaattctgtgaccacccttaattatatcttgacccttaacacagctaaac

SEQ ID NO: 19620 - DNA, 644 bp, synthetic construct
  source 1..644: mol_type = other DNA
caatgaaacttagaagcagcaaaccacgatcaatagtaggcataacgctccagttgtgtcttgatcaagcacttctgtttccccggactgagtatcaatagactgctcgcgcggttgaaggagaaaacgttcgttatccggctagctacttcggaaaacctagtaacaccatgaaagttgcggagagcttcgttcagcactcccccagtgtagatcaggtcgatgagtcaccgcattccccacgggcgaccgtggcggtggctgcgttggcggcctgcccatggggtaacccatggggcgctctaatacggacatggtgtgaagagtctactgagctagttagtagtcctccggcccctgaatgcggctaatcccaactgcggagcacacgcccacaagccagcgggtagtgtgtcgtaatgggcaactctgcagcggaaccgactactttgggtgtccgtgtttccttttatctttatattggctgcttatggtgacaattaaagaattgttaccatatagctattggattggccatccggtgtgcaacagagcaattatttaccaatttattggttttgtaccattaaccttgaattctgtgaccacccttaattatatcttgacccttaacacagctaaac

SEQ ID NO: 19621 - DNA, 668 bp, synthetic construct
  source 1..668: mol_type = other DNA
ctgttttacgccccctccccaatttgcaacttagaagcaatacacaacactgatcaacagcaggcatggcgcaccagctatgtcttgatcaagcacttctgtttccccgggccgactatcaatagactgttcacacggttgaaggagaaagcgcccgttatccggctaactacttcgagaagcccagtagcaccatcgaggctgcagagtgtttcgctcagcacttcccccgtgtagatcaggtcgatgagtcactgcaatccccacgggcgaccgtggcagtggctgcgctggcggcctgcctatggggcaacccataggacgctctaatgtggacatggtgcgaagagtctattgagctagttagtagtcctccggcccctgaatgcggctaatcctaactgtggagcacatgccttcaatccagagggtagtgtgtcgtaatgggcaactctgcagcggaaccgactactttgggtgtccgtgtttccttttattcttacattggctgcttatggtgacaattacagagttgttaccatatagctattggattggccatccggtgtgcaatagagctattatatacctgtttgttggctttgtaccactaaccttaaaatctgtaatcaccctcgattttatattaacccttaatacaatcaaac

SEQ ID NO: 19622 - DNA, 657 bp, synthetic construct
  source 1..657: mol_type = other DNA
cccctccccaatttgcaacttagaagcaattcgcaacaccgatcaatagcaggcatggcgcaccagctatgtcttgatcaagcacttctgtttccccggaccgagtatcaataaactgttcacgcggttgaaggagaaagcgtccgttatccggctaactacttcgagaaacccagtaacgccattgaaactgcagagtgtttcgctccacacttcccccgtgtagatcaggtcgatgagtcactgcaatccccacgggcgaccgtggcagtggctgcgctggcggcctgcctatggggcaacccataggacgctctaatgtggacatggtgtgaagagtctattgagctagttagtagtcctccggcccctgaatgcggctaatcctaactgcggagcacatgccctcaatccagagggtagtgtgtcgtaatgggcaactctgcagcggaaccgactactttgggtgtccgtgtttccttttattctcacattggctgcttatggtgacaatcactgaattgttaccatatagctattggattggccatccggtgtgcaatagagctatcatatacctatttgttggctttgtaccactgaccttaaaatctgtaaccactctcgactatatattgaccctcaatacaatcaaac

SEQ ID NO: 19623 - DNA, 646 bp, synthetic construct
  source 1..646: mol_type = other DNA
caactcgtaatttagaagtaacgcacaccattgatcaacagtaagcgtggcgcgccagccatgtttagatcaagtacttctgtttcccggactgagtatcaatagactgctcacgcggttgaaggagaaaacgttcgttacccggctaactacttcgagaaacctagtagcaccatcgaaactgcagagtgtttcgttcagcactttccccgtgtagatcaggtcgatgagtcactgcaatccccacgggcgaccgtggcagtggctgcgttggcggcctgcctatgggcttacccataggacgctctaatgtggacatggtgtgaagagtctattgagctagttagtagtcctccggcccctgaatgcggctaatcctaactgcggagcgcataccctcaacccagggggtggtgcgtcgtaacgggcaactctgcagcggaaccgactactttgggtgtccgtgtttccttttattcttatattggctgcttatggtgacaattgagagattgttaccatatagctattggattggccatccagtgtctaatagagcaattgtatacttatttgttggattcgttccactatcatatacatccactaacaccttatactatattataagattgaacacaaggaa

SEQ ID NO: 19624 - DNA, 656 bp, synthetic construct
  source 1..656: mol_type = other DNA
acccctcccctaagcagtaacttagaagcttcatactatcacgaccagtagtaggcgtggcgcaccagccacgtcttggtcaagcacttctgtttccccggactgagtatcaatagactgctcacgcggttgaaggagaaaacgttcgttatccggctaactacttcgagaaacctagtagcatcgtgaaagttgcggggtgtttcgctcagcacttcccccgtgtagatcaggtcgatgagtcactgtgaaccccacgggcgaccgtgacagtggctgcgttggcggcctgcccatggggcaacccatgggacgctctaatacagacacggtgtgaagagtctattgagctagttggtagtcctccggcccctgaatgcggctaatcctaactgcggagcgcgcaccctcaatccagggggcagcgcgtcgtaatgggtaactctgcagcggaaccgactactttgggtgtccgtgtttccttttattctttattggctgcttatggtgacaattgaagagttgttaccatatagctattggattggccatccggtaaccaacagagctattgtttacctgttcattggatacgtccctctcaatctcaaggccattaaaactcttgattatatattacttctcaactataagaa

SEQ ID NO: 19625 - DNA, 619 bp, synthetic construct
  source 1..619: mol_type = other DNA
atcacgaccaatagtaggcgtggcgcgccagccacgtcttggtcaagcacttctgtttccccggaccgagtatcaatagactgctcacgcggttgaaggagaaaacgttcgtcatccggctaactacttcgagaaacctagtagcatcgtgaaagttgcggagtgtttcgttcagcacttcccccgtgtagatcaggtcgatgagtcactgtgaaccccacgggcgaccgtgacagtggctgcgttggcggcctgcccatggggcagcccatgggacgctctaatacagacacggtgtgaagagtctattgagctagttggtagtcctccggcccctgaatgcggctaatcctaactgcggagcgcgcaccctcaatccagggggcagtgcgtcgtaatgggtaactctgcagcggaaccgactactttgggtgtccgtgtttccttttattccttattggctgcttatggtgacaattgaaaagttgttaccatatagctattggattggccatccggtaaccaacagagctattgtttacctgtttgttggatacgtccctctcaatttcaaggtcattaaaactcttgattatatattacttctcaactgtgagaa

SEQ ID NO: 19626 - DNA, 650 bp, synthetic construct
  source 1..650: mol_type = other DNA
ccaatttgcaacttagaagcaattcgcaacaccgatcaatagcaggcatggcgcaccagctatgtcttgatcaagcacttctgtttccccggaccgagtatcaataaactgttcacgcggttgaaggagaaagcgtccgttatccggctaactacttcgagaaacccagtaacgccattgaaactgcagagtgtttcgctccacacttcccccgtgtagatcaggtcgatgagtcactgcaatccccacgggcgaccgtggcagtggctgcgctggcggcctgcctatggggcaacccataggacgctctaatgtggacatggtgtgaagagtctattgagctagttagtagtcctccggcccctgaatgcggctaatcctaactgcggagcacatgccctcaatccagagggtagtgtgtcgtaatgggcaactctgcagcggaaccgactactttgggtgtccgtgtttccttttattctcacattggctgcttatggtgacaatcactgaattgttaccatatagctattggattggccatccggtgtgcaatagagctatcatatacctatttgttggctttgtaccactgaccttaaaatctgtaaccactctcgactatatattgaccctcaatacaatcaaac

SEQ ID NO: 19627 - DNA, 656 bp, synthetic construct
  source 1..656: mol_type = other DNA
ttcccctccccaaaagtaacttagaagctttgaaccaacgatcaacagtaggtgtgacatgccagtcacatctcgatcaagcacttctgtttccccggactgagtatcaataggctgctcacgcggctgaaagagaaaacgttcgttacccggccaactacttcgagaagcttagtaccaccatgaacgaggcagagcgtttcgctcggcactaccccagtgtagatcaggctgatgagtcactgcaatccccatgggcgaccatggcagtggctgcgctggcggcctgcccatggagagatccatgggacgctctaattttgacatggtgcgaagagcctattgagctagttggtagtcctccggcccctgaatgcggctaatcctaactgcggagcgcacacccacataccagtgggcagtgtgtcgtaacgggcaactctgcagcggaaccgactactttgggtgtccgtgtttccttttattctcatgttggctgcttatggtgacaattgaagagttgttaccatatagctattggattggccatccggtgtgcaacagagcaattgtctaccagtttattggttttgtaccactgacattaaagtctgtaattacccttaattttatcttgacccttaacacagtcaagc

SEQ ID NO: 19628 - DNA, 646 bp, synthetic construct
  source 1..646: mol_type = other DNA
tttgtaacttagaagcaatttgcaacactgatcagtagtaggcatggcgcaccagctatgtcttgatcaagcacttctgtttccccggaccgagtatcaacagactgttcacacggttgaaggagaaagcgtccgttatccggctaactacttcgagaaacccagtagcgccattgaaactgcagagtgtttcgctccacacttcccccgtgtagatcaggtcgatgagtcactgcaatccccacgggcgaccgtggcagtggctgcgctggcggcctgcctatggggtaacccataggacgctctaatgtggacatggtgtgaagagtctattgagctagttagtagtcctccggcccctgaatgcggctaatcctaactgcggagcacatgccttcaatccagagggtagtgtgtcgtaatgggcaactctgcagcggaaccgactactttgggtgtccgtgtttccttttatcctcacattggctgcttatggtgacaattgcggaattgttaccatatagctattggattggccatccggtttgcaatagagctattatatacctatttgttggctttgtaccactgaccttaaaatctatatccactctcgagtatatattaacccttaacacaatcaaac

SEQ ID NO: 19629 - DNA, 653 bp, synthetic construct
  source 1..653: mol_type = other DNA
tccccaatttgtaacttagaagcaatttgcaacactgatcagtagtaggcatagcgcaccagctatgtcttgatcaagcacttctgtttccccggaccgagtatcaatagactgttcacacggttgaaggagaaagcgtccgttatccggctaactacttcgagaaacccagtagcgccattgaaactgcagagtgtttcgctccacacttcccccgtgtagatcaggtcgatgagtcactgcaatccccacgggcgaccgtggcagtggctgcgctggcggcctgcctatggggtaacccataggacgctctaatgtggacatggtgtgaagagtctattgagctagttagtagtcctccggcccctgaatgcggctaatcctaactgcggagcacatgccttcaatccagagggtagtgtgtcgtaatgggcaactctgcagcggaaccgactactttgggtgtccgtgtttccttttattctcacattggctgcttatggtgacaattacggaattgttaccatatagctattggattggccatccggtgtgcaatagagctattatatacctatttgttggctttgtaccactgaccttaaaatctataaccactctcgagtatatattaacccttaacacaatcaaac

SEQ ID NO: 19630 - DNA, 672 bp, synthetic construct
  source 1..672: mol_type = other DNA
cgcctgttttataaccctccccccctacttcgcaacttagaagcaacgcgcatcactgatcaacagcaggcatggcgctccagccatgtcttgatcaagcactcctgtttccccggactgagtatcaatagactgcttacgcggttgaaggagaaaacgttcgttacccggctaactacttcgagaaacttagtaacaccatcgaagctgcagggtgtttcgctcagcacttcccccgtgtagatcaggccgatgagtcaccgcaatccccacgggcgaccgtggcggtggctgcgttggcggcctgcctatggggcaacccataggacgccctaaagtggacatggtgcgaagagtctattgagctagttagtagtcctccggcccctgaatgcggctaatcctaactgcggagcacacaccctcaagccagagggtagtgtgtcgtaacgggtaactctgcagcggaaccgactactttgggtgtccgtgtttccttttattcttattgtggctgcttatggtgacaattcaagaattgttaccatatagctattggattggccatccggtgtctaacagagctattgtgtacttatttgttgggtacgttccattatctcacacatcccttaacacattacattttattgtgaagctaaatacaagaag

SEQ ID NO: 19631 - DNA, 657 bp, synthetic construct
  source 1..657: mol_type = other DNA
ctccccttcccccaaagtaacttagaagctgtaaatcaacgatcaatagcaggtgtggcacaccagtcataccttgatcaagcacttctgtttccccggactgagtatcaataggctgctcgcgcggctgaaggagaaaacgttcgttacccgaccaactacttcgagaagcttagtaccaccatgaacgaggcagggtgtttcgctcagcacaaccccagtgtagatcaggctgatgagtcactgcaacccccatgggcgaccatggcagtggctgcgttggcggcctgcccatggagaaatccatgggacgctctaattctgacatggtgtgaagagcctattgagctagctggtagtcctccggcccctgaatgcggctaatcctaactgcggagcacatgctcacaaaccagtgggtggtgtgtcgtaacgggcaactctgcagcggaaccgactactttgggtgtccgtgtttccttttattcctatattggctgcttatggtgacaatcaaagagttgttaccatatagctattggattggccatccggtgtgcaacagggcaattgtttacctatttattggttttgtaccattatcactgaagtctgtgatcactctcaaattcattttgaccctcaacacaatcaaac

SEQ ID NO: 19632 - DNA, 575 bp, synthetic construct
  source 1..575: mol_type = other DNA
agcacttctgttttcccggaccgagtatcaatagactgctaacgcggttgaaggagaaaacgttcgttatccggctaactacttcgagaaacctagtagcaccatcgaagctgcggagtgtttcgctcagcacttcccccgtgtagatcaggtcgatgagtcactgcaatcctcacgggtgaccgtggcagtggctgcgttggcggcctgcctatggggcaacccataggacgcttcaaagtggacatggtgtgaagagtctattgagctagttagtagtcctccggcccctgaatgcggctaatcccaactgcggagcacataccttcaatccagaaggcagtgtgtcgtaacgggcaactctgcagcggaaccgactactttgggtgtccgtgtttccttttattctcttgttggctgcttatggtgacaattgaagaattgttaccatatagctattggattggccatccagtgtctaacagagcaattgtgtacttatttgttggttttgttcctttgtcttacacgtctcttagtaccttgtactacattataaaactgaactcggaaag

SEQ ID NO: 19633 - DNA, 651 bp, synthetic construct
  source 1..651: mol_type = other DNA
ccccccccaatgaaacttagaagcagcaaaccacgatcaatagtaggcatgacgctccagttatgtcttgatcaagcacttctgtttccccggactgagtatcaatagactgctcgcgcggttgaaggagaaaacgttcgttatccggctagctacttcggaaaacctagtaacaccgtgaaagttgcggagagcttcgttcagcactcccccagtgtagatcaggtcgatgagtcaccgcattccccacgggcgaccgtggcggtggctgcgttggcggcctgcccatggggtaacccatggggcgctctaatacggacatggtgtgaagagtctactgagctagttagtagtcctccggcccctgaatgcggctaatcccaactgcggagcacacgcccacaagccagcgggtagtgtgtcgtaacgggtaactctgcagcggaaccgactactttgggtgtccgtgtttccttttatctttatattggctgcttatggtgacaattaaagaattgttaccatatagctattggattggccatccggtgtgcaacagagctattatttaccaatttattggttttgtaccattaaccttgaattctgtgaccacccttaattatatcttgacccttaacgcagctaaac

SEQ ID NO: 19634 - DNA, 664 bp, synthetic construct
  source 1..664: mol_type = other DNA
tgttttataacccctccctaaacggcaatttagaagttctgcacatccacgaccagtagtaagcgtgacgcgccagtcacgtcttggtcaagtacttctgtatccccggactgagtatcaatagactgctcacgcggttgaaggagaaaacgttcgttatccggctaactacttcgagaaacctagtaacaccgtgaaagttgcggagtgtttcgctcagcacttcccccgtgtagatcaggccgatgagtcactgtaaaccccacgggcgaccgtgacagtggctgcgttggcggcctgcccatgaggcaactcatgggacgctctaatacagacatggtgtgaagagtctattgagctagttagtagtcctccggcccctgaatgcggctaatcctaactgcggagcacgcaccctcaacccagggggcggcgtgtcgtaatgggtaactctgcagcggaaccgactactttgggtgtccgtgtttccttttattccttattggctgcttatggtgacaattgaaaagttgttaccatatagctattggattggccatccggtatctaatagagctattgtttacctgttcattggatacgtccctcttagtcctaaggtcattcaaactcttgattacatattactccttaaccacaagaa

SEQ ID NO: 19635 - DNA, 687 bp, synthetic construct
  source 1..687: mol_type = other DNA
gtactgaggtacctttgtgcgcctgttttacttcccttccccagaaataacttagaagctttgaaccaacgatcaacagtgggtgtgacataccagtcgcatctcgatcaagcacttctgtttccccggactgagtatcaataggctgcttacgcggctgaaagagaaaacgttcgttacccggccaactacttcgagaagcttagtaccaccatgaacgaggcagagcgtttcgctcggcactaccccagtgtagatcaggctgatgagtcactgcaatccccatgggcgaccatggcagtggctgcgctggcggcctgcccatggagagatccatgggacgctctaattttgacatggtgcgaagagcctattgagctagttggtagtcctccggcccctgaatgcggctaatcctaactgcggagcgcacacccacataccagtgggcagtgtgtcgtaacgggcaactctgcagcggaaccgactactttgggtgtccgtgtttccttttattcttatattggctgcttatggtgacaaacgaagagttgttaccatatagctattggattggccatccggtgtgcaacagagcaattgtctaccagtttattggttttgtaccactgacattaaagtctgtaattacccttaaattcatcttgacccttaacacagtcaagc

SEQ ID NO: 19636 - DNA, 650 bp, synthetic construct
  source 1..650: mol_type = other DNA
ctcaatttggtaacatagaagttagaaacatatatggccaatagcaggcgtggcgcaccagtcgcgtctcggtcaagcacttctgtttccccggactgagtatcaataagctgctcgcgcggctgaaggagaaaacgttcgttatccggctaactacttcgagaaacctagtagcaccatgaaagttgcggagtgtttcgctcagcacttcccccgtgtagatcaggtcgatgagtcactgcattccccacgggcgaccgtggcagtggctgcgttggcggcctgcctatggggtaacccataggacgctctaatacggacatggtgcgaagagtcaattgagctagttagtagtcctccggcccctgaatgcggctaatcctaactgcggagcacataccctcaatccagggggcggtgtgtcgtaatgggcaactctgcagcggaaccgactactttgggtgtccgtgtttccttttattcttatattggctgcttatggtgacaattgagagattgttaccatatagctattggattggccatccggtgtccaacagagctctggtttacttgttcgttggctttgtacctctgtcacccacagtttattcaactctggtgttcttaatacaccttaacagtaagag

SEQ ID NO: 19637 - DNA, 593 bp, synthetic construct
  source 1..593: mol_type = other DNA
caccagccatgtcttgatcaagtacttctgtacccccggactgagtatcaatagactgctcacgcggttgaaggagaaaacgttcgttacccggctaactacttcgagaaacctagtaacaccattgaaactgcggagtgtttcgctcagcattccccccatgtagatcaggtcgatgagtcactgcttaccccacgggcgaccgtggcagtggctgcgttggcggcctgcctatggggcaacccataggacgctctaaagtggacatggtgcgaagagtctattgagctagttagtagtcctccggcccctgaatgcggctaatcctaactgcggagcgcatgtcctcaaaccagagggtggtgcgtcgtaatgggtaactctgcagcgaaccgactactttgggtgtccgtgtttcttttgttcttataatggctgcttatggtgacaatcgaggaattgttaccatatagctattggattggccatccggtgtgcaacagagctattatctacttgtttgtcggatacatccccttaacacctaaatccctcaacacattgcattatattttaacattgaacgcgagaaa

SEQ ID NO: 19638 - DNA, 594 bp, synthetic construct
  source 1..594: mol_type = other DNA
caccagccatgtcttgatcaagtacttctgtacccccggactgagtatcaatagactgctcacgcggttgaaggagaaaacgttcgttacccggctaactacttcgagaaacctagtaacaccattgaaactgcggagtgtttcgctcagcattccccccatgtagatcaggtcgatgagccactgcttaccccacgggcgaccgtggcagtggctgcgttggcggcctgcctatggggcaacccataggacgctctaaagtggacatggtgcgaagagtctattgagctagttagtagtcctccggcccctgaatgcggctaatcctaactgcggagcgcatgtcctcaaaccagagggtggtgcgtcgtaatgggtaactctgcagcggaaccgactactttgggtgtccgtgtttcttttgttcttataatggctgcttatggtgacaatcgaggaattgttaccatatagctattggattggccatccggtgtgcaacagagctattatctacttgtttgtcggatacatccccttaacacctaaatccttcaacacattgcattatattttaacattgaacgcgagaaa

SEQ ID NO: 19639 - DNA, 617 bp, synthetic construct
  source 1..617: mol_type = other DNA
gatcaatagcaggcatggcgcaccagctatgtcttgatcaagcacttctgtttccccggaccgagtatcaataaactgttcacgcggttgaaggagaaagcgtccgttatccggctaactacttcgagaaacccagtaacgctattgaaactgcagagtgtttcgctccacacttcccccgtgtagatcaggtcgatgagtcactgcaatccccacgggcgaccgtggcagtggctgcgctggcggcctgcctatggggcaacccataggacgctctaatgtggacatggtgtgaagagtctattgagctagttagtagtcctccggcccctgaatgcggctaatcctaactgcggagcacatgccctcaatccagagggtagtgtgtcgtaatgggcaactctgcagcggaaccgactactttgggtgtccgtgtttccttttattctcacattggctgcttatggtgacaatcactgaattgttaccatatagctattggattggccatccggtgtgcaatagagctatcatatacctatttgttggctttgtaccactgaccttaaaatctgtaaccactctcgactatatattgaccctcaatacaatcaaac

SEQ ID NO: 19640 - DNA, 563 bp, synthetic construct
  source 1..563: mol_type = other DNA
ttaccccggattgagtatcaatagactgctagcgcggttgaggagaaacgtccgttacccggctaactacttcgagaaacttagtagcaccattgaagctgcggagtgtttcgctcagcactctcccagtgtagatcaggtcgatgagtcactgcactccccacgggtgaccgtggcagtgactgcgttggcggcctgcctatggggcaacccgtaggacgctctaaagtggacatggtgcgaagagtctattgagctagttagtagtcctccggcccctgaatgcggctaatcctaactgcggagcacatgccctcaatccagggggtggtgtgtcgtaacgggcaactctgcagcggaaccgactactttgggtgtccgtgtttccttttattcttacattggctgcttatggtgacaattgagagattgttaccatatagctattggattggccatccagtgacaaacagagctttgatatacttgttcgtgggtttcgttccactcaccattcgtacagttcatactctaaaatacattttgattctgaataatagaaa

SEQ ID NO: 19641 - DNA, 646 bp, synthetic construct
  source 1..646: mol_type = other DNA
aaactgcaacttagaagaatagcactctatcgatcaatagcaggcatggcacgccagtcatgtctaggtcaagcacttctgtctccccggaccgagtatcaatagactgctaatgcggttgaaggagaaaacgtccgttacccggctaactacttcgagaaacttagtagtaccattgaagctgcagagtgtttcgctcagcactcccccagtgtagatcaggtcgatgagtcactgcaatccccacgggcgaccgtggcagtggctgcgttggcggcctgcctatggggcaacccataggacgctctaaagtggacatggtgcgaagggtctattgagctagttagtagtcctccggcccctgaatgcggctaatcctaactgcggagcgcataccctcaatccagggggtggtgtgtcgtaacgggcaactctgcagcggaaccgactactttgggtgtccgtgtttccttttattcttatattggctgcttatggtgacaattgagaggttgttaccatatagctattggattggccatccggtgaccaacagagctttgatatacttatttgtaggttttgttccactcacaaatcgtacggtctatactctgaagtacattttgattctgaacaatagaaa

SEQ ID NO: 19642 - DNA, 646 bp, synthetic construct
  source 1..646: mol_type = other DNA
aaactgtaacttagaagaatagcactctatcgatcaatagcaggcatggcgcgccagtcatgtctaaatcaagcacttctgtctccccggaccgagtatcaatagactgctagcgcggttgaaggagaaaacgtccgttacccggctaactacttcgagaaacttagtagcaccattgaagctgcagagtgtttcgctcagcactcccccagtgtaaatcaggtcgatgagtcactgcattccccacgggcgaccgtggcagtggctgcgttggcggcctgcctatggggcaacccataggacgctctaaagtggacatggtgcgaagagtctattgagctagttagtagtcctccggcccctgaatgcggctaatcctaactgcggagcgcatgccctcaatccagggggtagtgtgtcgtaacgggcaactctgcagcggaaccgactactttgggtgtccgtgtttccttttattcttatattggctgcttatggtgacaattgagagattgttaccatatagctattggattggccatccggtgaccaacaaagctctgatatacttgtttgtgggtttcgttccactcaccaatcgtacagtccatactctaaagtacattttgattctgaataatagaaa

SEQ ID NO: 19643 - DNA, 633 bp, synthetic construct
  source 1..633: mol_type = other DNA
agaagttatgtacgttactgatcagcagtaggcgtggcacaccagccatgtcttgatcaagcacttctgtaaccccggactgagtatcaatagactgctcacgtggtcgaaagagaaaacgttcgttatccggctaactacttcgagaaacctagtagcaccactgaaactgcggagtgtttcgctcaacacttcccccgtgtagatcaggtcgatgagtcactgcttaccccacgggtgaccgtggcagtggctgcgttggcggcctgcctgtggggcaacccataggacgctctaaagtggacatggtgtgaagagtctattgagctagttagtagtcctccggcccctgaatgcggctaatcctaactgcggagcgcatgcccccaaaccagagggtggtgcgtcgtaacgggtaactctgcagcggaaccgactactttgggtgtccgtgtttcttttattctcataatggctgcttatggtgacaattgaggaattgttaccatatagctattggattggccacccggtgtgtaacagagctattatttacttgtttgttggatacattccattgacacctaaatccttcagtacattgcactatattctaacgttaaacgcaagaaa

SEQ ID NO: 19644 - DNA, 577 bp, synthetic construct
  source 1..577: mol_type = other DNA
caagcacttctgtttccccggactgagtatcaatagactgcttacgcggttgaaggagaaaacgttcgttacccggctaactacttcgagaaacttagtaacaccatcgaagctgcagggtgtttcgctcagcacttcccccgtgtagatcaggccgatgagtcaccgcaatccccacgggcgaccgtggcggtggctgcgttggcggcctgcctatggggcaacccataggacgccctaaagtggacatggtgcgaagagtctattgagctagttagtagtcctccggcccctgaatgcggctaatcctaactgcggagcacataccctcaagccagagggtggtgtgtcgtaacgggtaactctgcagcggaaccgactactttgggtgtccgtgtttccttttattcttactgtggctgcttatggtgacaattcaagaattgttaccatatagctattggattggccatccagtgtctaacagagctattgtgtacttatttgttgggtacgttccattatcttacacatcccttaacacattacattttattgtgaagctaaatacaagaag

SEQ ID NO: 19645 - DNA, 657 bp, synthetic construct
  source 1..657: mol_type = other DNA
cctccccccctatttcgcaacttagaagcaacgcgcatcattgatcaacagcaggcatggcgctccagccatgtcttgatcaagcactcctgtttccccggactgagtatcaatagactgcttacgcggttgaaggagaaaacgttcgttacccggctaactacttcgagaaacttagtaacaccatcgaagctgcagggtgtttcgctcagcacttcccccgtgtagatcaggccgatgagtcaccgcaatccccacgggcgaccgtggcggtggctgcgttggcggcctgcctatggggcaacccataggacgccctaaagtggacatggtgcgaagagtctattgagctagttagtagtcctccggcccctgaatgcggctaatcctaactgcggagcacataccctcaagccagagggtggtgtgtcgtaacgggtaactctgcagcggaaccgactactttgggtgtccgtgtttccttttattcttattgtggctgcttatggtgacaattcaagaattgttaccatatagctattggattggccatccggtgtctaacagagctattgtgtacttatttgttgggtacgttccattatctcacacatcccttaacacattacattttattgtgaagctaaatacaagaag

SEQ ID NO: 19646 - DNA, 614 bp, synthetic construct
  source 1..614: mol_type = other DNA
gatcaacagcaggcgtggcacaccagccatgtcttgatcaagcacttctgtaaccccggactgagtatcaatagactgctcacgtggtcgaaagagaaaacgttcgttatccggctaactacttcgagaaacttagtagcaccactgaaactgcggagtgtttcgctcagcacttcccccgtgtagatcaggtcgatgagtcactgcttaccccacgggtgaccgtggcagtggctgcgttggcggcctgcctatggggcaacccataggacgctctaaagtggacatggtgtgaagagtctattgagctagttagtagtcctccggcccctgaatgcggctaatcctaactgtggagcgcatgcccccaaaccagagggtggtgcgtcgtaacgggtaactctgcagcggaaccgactactttgggtgtccgtgtttcttttattctcataatggctgcttatggtgacaattgaggaattgttgccatatagctattggattggccatccggtgtgcaacagagctattatctacttgtttgttggatacattccattgacatctaaatcccttaatacattgcactatattctaacgttgaacgcaagaaa

SEQ ID NO: 19647 - DNA, 614 bp, synthetic construct
  source 1..614: mol_type = other DNA
gatcaatagcaggcgtggcacaccagccatgtcttgatcaagcacttctgtacccccggactgagtatcaatagactgctcacgtggtcgaaggagaaaacgttcgttatccggctaactacttcgagaaacctagtaacaccactgaaactgcggagtgtttcgctcagcacttcccccgtgtagatcaggtcgatgagccactgcttaccccacgggtgaccgtggcagtggctgcgttggcggcctgcctatggggcaacccataggacgctctaaagtggacatggtgcgaagagtctattgagctagttagtagtcctccggcccctgaatgcggctaatcctaactgcggagcgcatgcccccaaaccagagggtggtgcgtcgtaacgggtaactctgcagcggaaccgactactttgggtgtccgtgtttcttttattctcataatggctgcttatggtgacaattgaggaattgttaccatatagctattggattggccatccggtgtgcaacagagctattatctacttgtttgttggatacattccattaacacccaaatccttcaatacattgcattacattctaacgctgaacgcaagaaa

SEQ ID NO: 19648 - DNA, 614 bp, synthetic construct
  source 1..614: mol_type = other DNA
ggtcaacagcaggcgtggcacaccagccatgtcttgatcaagcacttctgtacccccggactgagtatcaatagactgctcacgtggtcgaaggagaaaacgttcgttatccggctaactacttcgagaaacttagtagcaccattgaaactgtggagtgtttcgctcagcacttcccccgtgtagatcaggtcgatgagtcactgcttaccccacgggtgaccgtggcagtggctgcgttggcggcctgcctatggggcaacccataggacgctctaaagtggacatggtgcgaagagtctattgagctagttagtagtcctccggcccctgaatgcggctaatcctaactgcggagcgcatgctctcataccagagggtggtgcgtcgtaacgggtaactctgcagcggaaccgactactttgggtgtccgtgtttcttttattctcataatggctgcttatggtgacaattgaggaattgttaccatatagctattggattggccatccggtgtgtaacagagctattatctacttgtttgttggatacattccattaacacttaaatccttcaatacattgcactatattctgacgctgaacgcaagaag

SEQ ID NO: 19649 - DNA, 614 bp, synthetic construct
  source 1..614: mol_type = other DNA
gatcagcagcaggcgtggcacaccagccatgtcttgatcaagcacttctgtaaccccggactgagtatcgatagactgctcacgtggtcgaaagagaaaacgttcgttatccggctaactacttcgagaaacctagtagcaccactgaaactgcggagtgtttcgctcagcacttcccccgtgtagatcaggtcgatgagtcactgcttaccccacgggtgaccgtggcagtggctgcgttggcggcctgcctatggggcaacccataggacgctctaaagtggacatggtgtgaagagtctattgagctagttagtagtcctccggcccctgaatgcggctaatcctaactgcggagcgcatgcccccaaaccagagggtggtgcgtcgtaacgggtaactctgcagcggaaccgactactttgggtgtccgtgtttcttttattctcataatggctgcttatggtgacaattgaggaattgttgccatatagctattggattggccatccggtgtgcaacagagctattatctacttgtttgttggatacattccattgacacctaaatccttcaatacactgcactatattctaacgttgaacgcaagaaa

SEQ ID NO: 19650 - DNA, 614 bp, synthetic construct
  source 1..614: mol_type = other DNA
gatcaacagcaggcgtggcacaccagccatgtcttgatcaagcacttctgtaaccccggactgagtatcaatagactgctcacgtggtcgaaagagaaaacgttcgttatccggctaactacttcgagaaacctagtagcaccactgaagctgcggagtgtttcgctcagcacttcccccgtgtagatcaggtcgatgagtcactgcttaccccacgggtgaccgtggcagtggctgcgttggcggcctgcctatggggcaacccataggacgctctaaagtggacatggtgtgaagagtctattgagctagttagtagtcctccggcccctgaatgcggctaatcctaactgcggagcgcatgcccccaaaccagagggtggtgcgtcgtaacgggtaactctgcagcggaaccgactactttgggtgtccgtgtttcttttattctcataatggctgcttatggtgacaattgaggaattgttaccatatagctattggattggccatccggtgtgcaacagagctattatctacttgtttgttggatacattccattgacacctaaatccttcaatacattgtactatattttaacgttgaacgcaagaaa

SEQ ID NO: 19651 - DNA, 613 bp, synthetic construct
  source 1..613: mol_type = other DNA
gatcaacagcaggcgtggcacaccagccatgtcttgatcaagcacttctgtaccccggactgagtatcaatagactgctcacgtggtcgaaggagaaaacgttcgttatccggctaactacttcgagaaacctagtagcaccactgaaactgcggagtgtttcgctcagcacttcccccgtgtagatcaggtcgatgagtcactgcttaccccacgggtgaccgtggcagtggctgcgttggcggcctgcctatggggcaacccataggacgctctaaagtggacatggtgcgaagagtctattgagctagttagtagtcctccggcccctgaatgcggctaatcctaactgcggagcgcatgccttcaaaccagagggtggtgcgtcgtaacgggtaactctgcagcggaaccgactactttgggtgtccgtgtttcttttattctcataatggctgcttatggtgacaattgaggaattgttaccatatagctattggattggccatccggtgtgcaacagagctattatctacttgtttgttgggtacattccattaacacctaaatccttcaatacattgcactatatcttaacactgaacgcaaggaa

SEQ ID NO: 19652 - DNA, 614 bp, synthetic construct
  source 1..614: mol_type = other DNA
gatcaacagcaggcgtggcacaccagccatgtcttgatcaagcacttctgtacccccggactgagtatcaatagactgcttacgtggtcgaaggagaaaacgttcgttatccggctaactacttcgagaaacctagtagcaccactgaaactgcggagtgtttcgctcagcacttcccccgtgtagatcaggtcgatgagtcactgcttaccccacgggtgaccgtggcagtggctgcgttggcggcctgcctatggggcaacccataggacgctctaaagtggacatggtgcgaagagtctattgagctagttggtagtcctccggcccctgaatgcggctaatcctaactgcggagcgcatgccctcaaaccagagggtggtgcgtcgtaacgggtaactctgcagcggaaccgactactttgggtgtccgtgtttcttttattctcataatggctgcttatggtgacaattgaggaattgttaccatatagctattggattggccatccggtgtgcaacagagctattatctacttgtttgttggatacattccactaacacctaaatcctttaatacactgcactatattctgacgctgaacgcaagaga

SEQ ID NO: 19653 - DNA, 614 bp, synthetic construct
  source 1..614: mol_type = other DNA
gatcaacagcaggcgtggcacaccagccatgtcttgatcaagcacttctgtaaccccggaccgagtatcaatagactgctcacgtggtcgaaagagaaaacgttcgttatccggctaactacttcgagaaacctagtagcaccactgaaactgcggagtgtttcgctcagcacttcccccgtgtagatcaggtcgatgagtcactgcttaccccacgggtgaccgtggcagtggctgcgttggcggcctgcctatggggcaacccataggacgctctaaagtggacatggtgtgaagagtctattgagctagttagtagtcctccggcccctgaatgcggctaatcctaactgcggagcgcatgcccccaaaccagagggtggtgcgtcgtaacgggtaactctgcagcggaaccgactactttgggtgtccgtgtttcttttattctcataatggctgcttatggtgacaattgaggaattgttaccatatagctattggattggccatccggtgtgcaacagagctattatctacttgtttgttggatacattccattgacacctaaatccttcaatacattgcactatattctaacgttgaacgcaagaaa

SEQ ID NO: 19654 - DNA, 645 bp, synthetic construct
  source 1..645: mol_type = other DNA
attggtaacttagaagtttagcacacctgcgaccaatagcaggcatgacgcgccagtcatgtcttggtcaagcacttctgttcccccggactgagtatcaatagactgctcacgcggtcgaaggagaaaacgttcgtcatccggctggctacttcaagaaacccagtagcatcatgaaagttgcagagtgtttcgctcagcactacccccgtgtagatcaggtcgatgagtcactgcgaaccccacgggtgaccgtggcagtggctgcgttggcggcctgcccatggggtaacccatgggacgctctaatacagacatggtgtgaagagtctattgagctagccagtagtcctccggcccctgaatgcggctaatcctaactgcggagcacataccctcaatccagggggtggtgtgtcgtaacgggtaactctgcagcggaaccgactactttgggtgtccgtgtttccttttatccttattatggctgcttatggtgacaattgaaggattgttaccatatagctgttggattggccatccggtgtctaacagagctattgtatatctatttgttggatacgtccctcttgattacaaggccctacagactctcaaatacatcttgtaccttaatcaaaagag

SEQ ID NO: 19655 - DNA, 700 bp, synthetic construct
  source 1..700: mol_type = other DNA
gctagcacactgattctgcgggatctttgtgcgcctgttttataaccctccccctaagcagtaacttagaagctttgcacaatcacgaccagtagtgggcgtggcgcgccagccacgtcttggtcaagcacttctgtatccccggactgagtatcaatagactgctcacgcggtcgaaggagaaaacgttcgttacccggctaactacttcgagaaacctagtagcactatgaaagttgcggagtgtttcgctcagcacttcccccgtgtagatcaggtcgatgagtcactgtaaaccccacgggcgaccgtgacagtggctgcgttggcggcctgcccatggggtaacccatgggacgctctaatacagacatggtgtgaagagtctattgagctagttagtagtcctccggcccctgaatgcggctaatcctaactgcggagcgcgcaccctcaacccagggggcggcgcgtcgtaatgggtaactctgcagcggaaccgactactttgggtgtccgtgtttccttttactccttattggctgcttatggtgacaattgaaaagttgttaccatatagctattggattggccatccggtgtccaacagagctattgtttacctattcattggatacgtccctcttagtctcaaagccattcaaactcttgactatatattactccttaactgtaagaa

SEQ ID NO: 19656 - DNA, 716 bp, synthetic construct
  source 1..716: mol_type = other DNA
actcacagggcccactgggcgcaagcactctggtacctcggtacctttgtgcgcctgttttatacccccccccagtgaaacttagaagcagcaaaccacgatcaatagcaggcatagcgctccagttatgtcttgatcaagcacttctgtttccccggactgagtatcaatagactgctcgcgcggttgaaggagaaaacgttcgttatccggccaactacttcggaaaacctagtaacaccatgaaagttgcggagagcttcgttcagcactcccccagtgtagatcaggtcgatgagtcaccgcattccccacgggcgaccgtggcggtggctgcgttggcggcctgcccatggggtaacccatggggcgctctaatacggacatggtgtgaagagtctactgagctagttggtagtcctccggcccctgaatgcggctaatcccaactgcggagcacacgcccacaagccagcgggtagtgtgtcgtaacgggtaactctgcagcggaaccgactactttgggtgtccgtgtttccttttaactttatactggctgcttatggtgacaattagagaattgttaccatatagctattggattggccatccggtgtgcaacagagcaattatttacctatttattggttttgtaccattgactttgaattctgtgaccacccttaattatatcttgacccttaacacagctaaat

SEQ ID NO: 19657 - DNA, 643 bp, synthetic construct
  source 1..643: mol_type = other DNA
gtaacttagaagcaatttgcaacactgatcagtagtaggcatagcgcaccagctatgtcttgatcaagcacttctgtttccccggaccgagtatcaatagactgttcacacggttgaaggagaaagcgtccgttatccggctaactacttcgagaaacccagtagcgccattgaaattgcagagtgtttcgctccacacttcccccgtgtagatcaggtcgatgagtcactgtaatccccacgggcgaccgtggcagtggctgcgctggcggcctgcctatggggcaacccataggacgctctaatgtggacatggtgtgaagagtctattgagctagttagtagtcctccggcccctgaatgcggctaatcctaactgcggagcacatgccttcaatccagagggtagtgtgtcgtaatgggcaactctgcagcggaaccgactactttgggtgtccgtgtttccttttattctcacattggctgcttatggtgacaattacggaattgttaccatatagctattggattggccatccggtgtgcaatagagctattatatacctatttgttggctttgtaccactgaccttaaaatctataaccactctcgagtgtatattaacccttaatacaatcaagc

SEQ ID NO: 19658 - DNA, 573 bp, synthetic construct
  source 1..573: mol_type = other DNA
cttctgtttccccggactgagtatcaatagactgctcgcgcggttgaaggagaaaacgttcgttatccggccaactacttcggaaaacctagtaacactatgaaagttgcagagagcttcgttcagcactcccccagtgtagatcaggtcgatgagtcaccgcattccccacgggcgaccgtggcggtggctgcgttggcggcctgcccatggggtaacccatggggcgctctaatacggacatggtgtgaagagtctactgagctagttggtagtcctccggcccctgaatgcggctaatcccaactgcggagcacacgcccacaaaccagcgggtagtgtgtcgtaacgggtaactctgcagcggaaccgactactttgggtgtccgtgtttccttttaactttatattggctgcttatggtgacaattagagaattgttgccatatagctattggatcggccatccggtgtgcaacagagcaattatttacttattcactggttttgtaccattaactttgaattctgtgaccacccttaattatatcttgacccttaacacggctaaac

SEQ ID NO: 19659 - DNA, 570 bp, synthetic construct
  source 1..570: mol_type = other DNA
cttctgtacccccggactgagtatcaatagactgctcacgcggttgaaggagaaaacgttcgttacccggctaactacttcgagaaacctagtaacaccattgaaactgcggagtgtttcgctcagcattccccccatgtagatcaggtcgatgagtcactgcttaccccacgggcgaccgtggcagtggctgcgttggcggcctgcctatggggcaacccataggacgctctaaagtggacatggtgcgaagagtctattgagctagttagtagtcctccggcccctgaatgcggctaatcctaactgcggagcgcatgtcctcaaaccagagggtggtgcgtcgtaatgggtaactctgcagcggaaccgactactttgggtgtccgtgtttcttttgttcttataatggctgcttatggtgacaatcgaggaattgttaccatatagctattggattggccatccggtgtgcaacagagctattatctacttgtttgtcggatacatccccttaacacctaaatccttcaacacattgcattatattttaacattgaacgcgagaaa

SEQ ID NO: 19660 - DNA, 644 bp, synthetic construct
  source 1..644: mol_type = other DNA
acagtaacatagaagtcagaaacctacacgaccaatagcaggcgtgacgcaccagtcatgtcttggtcaaacacttctgtttccccggactgagtatcaataagctgctcacgcggctgaaggagaaaacgttcgttatccggctaactacttcgagaaacctagtaacaccatgaaagttgcagagtgtttcgctcagcacttccccccgtgtagatcaggtcgatgagtcactgcatcccccacgggcgaccgtggcagtggctgcgttggcggcctgcctatggggcaacccataggacgctctaatacagacatggtgtgaagagtctattgagctagttagtagtcctccggcccctgaatgcggctaatcccaactgcggagcacgcaccctcaatccagggggcggcgtgtcgtaacgggtaactccgcagcggaaccgactactttgggtgtccgtgtttccttttatcacttactggctgcttatggtgacaatcaaagagttgttaccatatagcttttggattggccatccggtgtctaacagagctattgtttacctgtttgttggatacattcctctcaattacaaggttctccaaactctcaactatatattgctccttaattataagaa

SEQ ID NO: 19661 - DNA, 655 bp, synthetic construct
  source 1..655: mol_type = other DNA
cccccctcaatttggtaacatagaagttagaaacatatatggccaatagcaggcgtggcgcaccagtcgcgtctcggtcaagcacttctgtttccccggactgagtatcaataagctgctcgcgcggctgaaggagaaaacgttcgttatccggctaactacttcgagaaacctagtaacaccatgaaagttgcggagtgtttcgctcagcacttcccccgtgtagatcaggtcgatgagtcactgcattccccacgggcgaccgtggcagtggctgcgttggcggcctgcctatggggtaacccataggacgctctaatacggacatggtgcgaagagtcaattgagctagttagtagtcctccggcccctgaatgcggctaatcctaactgcggagcacataccctcaatccagggggcggtgtgtcgtaatgggcaactctgcagcggaaccgactactttgggtgtccgtgtttccttttattcttatattggctgcttatggtgacaattgagagattgttaccatatagctattggattggccatccggtgtccaacagagctctggtttacttgttcgttggctttgtacctctgtcacccacagtttattcaactctagtgttcttaatacaccttaacagtaagag

SEQ ID NO: 19662 - DNA, 731 bp, synthetic construct
  source 1..731: mol_type = other DNA
gatgcggccccatggggtagtgggtttccactggggctagcactccgattctgcggaatctttgtgcgcctgttttacaaccctcccccaatttgcaacttagaagttatgtacgttgatcaatagcaggcgtggcacaccagccatgtcttgatcaagcacttctgtgaccccggactgagtatcaatagactgctcacgtggtcgaaagagaaaacgttcgttatccggctaactacttcgagaaacctagtagcaccactgaagctgcggagtgtttcgctcagcacttcccccgtgtagatcaggtcgatgagtcactgcttaccccacgggtgaccgtggcagtggctgcgttggcggcctgcctatggggcaacccgtaggacgctctaaggtggacatggtgtgaagagtctattgagctagttagtagtcctccggcccctgaatgcggctaatcctaactgcggagcgcatgcccccaaaccagagggtggtgcgtcgtaacgggtaactctgcagcggaaccgactactttgggtgtccgtgtttcttttattctcataatggctgcttatggtgacaattgaggaattgttaccatatagctattggattggccatccggtgtgcaacagagctattatctacttgtttgttggatacattccattgacacctaaatccttcaatacattgcactatattctaacgttgaacgcaagata

SEQ ID NO: 19663 - DNA, 640 bp, synthetic construct
  source 1..640: mol_type = other DNA
gtaacatagaagttagaaacatatatggccaatagcaggcgtggcgcaccagtcgcgtctcggtcaagcacttctgtttccccggactgagtatcaataagctgctcgcgcggctgaaggagaaaacgttcgttatccggctaactacttcgagaaacctagtagcaccatgaaagttgcggagtgtttcgctcagcacttcccccgtgtagatcaggtcgatgagtcactgcattccccacgggcgaccgtggcagtggctgcgttggcggcctgcctatgggtaacccataggacgctctaatacggacatggtgcgaagagtcaattgagctagttagtagtcctccggcccctgaatgcggctaatcctaactgcggagcacataccctcaatccagggggcggtgtgtcgtaatgggcaactctgcagcggaaccgactactttgggtgtccgtgtttccttttatttttatattggctgcttatggtgacaattgagagattgttaccatatagctattggattggccatccggtgtccaacagagctctggtttacttgttcgttggctttgtacctctgtcacccacagtttattcaactctagtgttcttgatacaccttaacagtaagag

SEQ ID NO: 19664 - DNA, 554 bp, synthetic construct
  source 1..554: mol_type = other DNA
agtatcaatagactgctcgtgcgattgaaggagaaaacgttccttatcaggctagatacttcgggaaacctatcagcagcatgaaagatgcggagaggttcgttcagcactcccccagtgtagatcaagtcgatgagtcaccgcattccccacgggcgaccgtggcggtggctgcgttggcggcctgcccatggggtaacccatggggcgctctaatacggacatggtgtgaagagtctactgagctagttagtagtcctccggcccctgaatgcggctaatcccaactgcggagcacatgcccacaagccagcgggtagtgtgtcgtaacgggcaactctgcagcggaaccgactactttgggtgtccgtgtttccttttatctttatattggctgcttatggtgacaattgaagaattgttaccatatagctattggattggccatccggtgtgcaacagagcaattgtttacctatttattggttttgtaccactaaccttgaagactgtgaccaccctcaattatattttgacccttaacacagctaaac

SEQ ID NO: 19665 - DNA, 549 bp, synthetic construct
  source 1..549: mol_type = other DNA
tatcaatagactgctcacgcggttgaaggagaaaacgttcgttacccggctaactacttcgagaaacctagtaacaccattgaaactgcggagtgtttcgctcagcattccccccatgtagatcaggtcgatgagccactgcttaccccacgggcgaccgtggcagtggctgcgttggcggcctgcctatggggcaacccataggacgctctaaagtggacatggtgcgaagagtctattgagctagttagtagtcctccggcccctgaatgcggctaatcctaactgcggagcgcatgtcctcaaaccagagggtggtgcgtcgtaatgggtaactctgcagcggaaccgactactttgggtgtccgtgtttcttttgttcttataatggctgcttatggtgacaatcgaggaattgttaccatatagctattggattggccatccggtgtgcaacagagctattatctacttgtttgtcggatacatccccttaacacctaaatccttcaacacattgcattatattttaacattgaacgcgagaaa

SEQ ID NO: 19666 - DNA, 554 bp, synthetic construct
  source 1..554: mol_type = other DNA
tgagtatcaatagactgcttacgcggttgaaggagaaaacgtccgttatccggctaactacttcgagaaacttagtaacaccatcgaagctgcagggtgtttcgctcagcacttcccccgtgtagatcaggccgatgagtcaccgcaatccccacgggcgaccgtggcggtggctgcgttggcggcctgcctatggggcaacccataggacgccctaaagtggacatggtgcgaagagtctattgagctagttagtagtcctccggcccctgaatgcggctaatcctaactgcggagcacataccctcaagccagagggtggtgtgtcgtaacgggtaactctgcagcggaaccgactactttgggtgtccgtgtttccttttactcttactgtggctgcttatggtgacaattcaagaattgttaccatatagctattggattggccatccggtgtctaacagagctattgtgtacttatttgttgggtacatttcattatcttacacatcccttagcacattacattttattgtgaaactaaatacaagaag

SEQ ID NO: 19667 - DNA, 646 bp, synthetic construct
  source 1..646: mol_type = other DNA
caattcgtaatttagaagtaatacacaccattgatcaacagcaagcatggcgcgccagccatgtttagatcaagtacttctgtttccccggactgagtatcaatagactgctcacgcggttgaaggagaaaacgttcgttacccggctaactacttcgagaaacctagtagcaccatcgaaactgcagagtgtttcgttcagcacttccccgtgtagatcaggtcgatgagtcactgcaatccccacgggcgaccgtggcagtggctgcgttggcggcctgcctatgggcctacccataggacgctctaatgtggacatggtgtgaagagtctattgagctagttagtagtcctccggcccctgaatgcggctaatcctaactgcggagcgcatatcctcaatccagggggtggtgcgtcgtaacgggcaactctgcagcggaaccgactactttgggtgtccgtgtttccttttactcttatattggctgcttatggtgacaattgagagattgttaccatatagctattgggttggccatccagtgtctaacagagcaattgtatacttatttgttggattcattccgctatcatatacatccattagcaccttatactatattataagattgaacacaagaaa

SEQ ID NO: 19668 - DNA, 549 bp, synthetic construct
  source 1..549: mol_type = other DNA
tatcaatagactgctcacgcggttgaaggagaaaacgttcgttacccggctaactacttcgagaaacctagtaacaccattgaaactgcggagtgtttcgctcagcattccccccatgtagatcaggtcgatgagtcactgcttaccccacgggcgaccgtggcagtggctgcgttggcggcctgcctatggggcaacccataggacgctctaaagtggacatggtgcgaagagtctattgagctagttagtagtcctccggcccctgaatgcggctaatcctaactgcggagcgcatgtcctcaaaccagagggtggtgcgtcgtaatgggtaactctgcagcggaaccgactactttgggtgtccgtgtttcttttgttcttataatggctgcttatggtgacaatcgaggaattgttaccatatagctattggattggccatccggtgtgcaacagagctattatctacttgtttgtcggatacatccccttaacacctaaatccttcaacacattgcattatattttaacattgaacgcgagaaa

SEQ ID NO: 19669 - DNA, 549 bp, synthetic construct
  source 1..549: mol_type = other DNA
tatcaatagtctgctcacgcggttgaaggagaaaacgttcgttatccggctaactacttcgagaaacctagtaacaccattgaaactgcggagtgtttcgctcagcatttcccccatgtagatcaggtcgatgagtcactgcttaccccacgggcgaccgtggcagtggctgcgttggcggcctgcctatggggcaacccataggacgctctaaagtggacatggtgcgaagagtctattgagctagttagtagtcctccggcccctgaatgcggctaatcctaactgcggagcgcatgtcctcaaaccagagggtggtgcgtcgtaatgggtaactctgcagcggaaccgactactttgggtgtccgtgtttcttttgttcttataatggctgcttatggtgacaatcgaggaattgttaccatatagctattggattggccatccggtgtgcaacagagctattatctacttgtttgtcggatacattcccttaacacctaaatccctcaacacattgcactatattctaacattgaacgcgagaaa

SEQ ID NO: 19670 - DNA, 607 bp, synthetic construct
  source 1..607: mol_type = other DNA
aggcataacgctccagttgtgtcttgatcaagcacttctgtttccccggactgagtatcaatagactgctcgcgcggttgaaggagaaaacgttcgttatccggctagctacttcggaaaacctagtaacaccatgaaagttgcggagagcttcgttcagcactcccccagtgtagatcaggtcgatgagtcaccgcattccccacgggcgaccgtggcggtggctgcgttggcggcctgcccatggggtaacccatggggcgctctaatacggacatggtgtgaagagtctactgagctagttagtagtcctccggcccctgaatgcggctaatcccaactgcggagcacacgcccacaagccagcgggtagtgtgtcgtaatgggcaactctgcagcggaaccgactactttgggtgtccgtgtttccttttatctttatattggctgcttatggtgacaatcaaagaattgttaccatatagctattggattggccatccggtgtgcaacagagcaattatttaccaatttattggttttgtaccattaaccttgaattctgtgaccacccttaattatatcttgacccttaacacagctaaac

SEQ ID NO: 19671 - DNA, 563 bp, synthetic construct
  source 1..563: mol_type = other DNA
tccccggactgagtatcaatagactgcttacgcggttgaaggagaaaacgttcgttacccggctaactacttcgagaaacttagtaacaccgtcgaagctgcagggtgtttcgctcagcacttcccccgtgtagatcaggccgatgagtcaccgcaatccccacgggcgaccgtggcggtggctgcgttggcggcctgcctatggggcaacccataggacgccctaaagtggacatggtgcgaagagtctattgagctagttagtagtcctccggcccctgaatgcggctaatcctaactgcggagcacataccctcaagccagagggtggtgtgtcgtaacgggtaactctgcagcggaaccgactactttgggtgtccgtgtttccttttattcttactgtggctgcttatggtgacaattcaagaattgttaccatatagctattggattggccatccggtgtctaacagagctattgtgtacttatttgttgggtacgttccattatcttacacatcccttaacacattacattttattgtgaagctaaatacaagaag

SEQ ID NO: 19672 - DNA, 563 bp, synthetic construct
  source 1..563: mol_type = other DNA
tccccggactgagtatcaatagactgcttacgcggttgaaggagaaaacgttcgttacccggctaactacttcgagaaacttagtaacaccatcgaagctgcagggtgtttcgctcagcacttcccccgtgtagatcaggccgatgagtcaccgcaatccccacgggcgaccgtggcggtggctgcgttggcggcctgcctatggggcaacccataggacgccctaaagtggacatggtgcgaagagtctattgagctagttagtagtcctccggcccctgaatgcggctaatcctaactgcggagcacataccctcaagccagagggtggtgtgtcgtaacgggtaactctgcagcggaaccgactactttgggtgtccgtgtttccttttattcttactgtggctgcttatggtgacaattcaagaattgttaccatatagctattggattggccatccggtgtctaacagagctattgtgtacttatttgttgggtacgttccattatcttacacatcccttaacacattacattttattgtgaagctaaatacaagaag

SEQ ID NO: 19673 - DNA, 563 bp, synthetic construct
  source 1..563: mol_type = other DNA
tccccggactgagtatcaatagactgcttacgcggttgaaggagaaaacgttcgttacccggctaactacttcgagaaacttagtaacaccatcgaagctgcagggtgtttcgctcagcacttcccccgtgtagatcaggccgatgagtcaccgcaatccccacgggcgaccgtggcggtggctgcgttggcggcctgcctatggggcaacccataggacgccctaaagtggacatggtgcgaagagtctattgagctagttagtagtcctccggcccctgaatgcggctaatcctaactgcggagcacacaccctcaagccagagggtggtgtgtcgtaacgggtaactctgcagcggaaccgactactttgggtgtccgtgtttccttttattcttactgtggctgcttatggtgacaattcaagaattgttaccatatagctattggattggccatccggtgtctaacagagctattgtgtacttatttgttgggtacgttccattatcttacacatcccttaacacattacattttattgtgaagctaaatacaagaag

SEQ ID NO: 19674 - DNA, 563 bp, synthetic construct
  source 1..563: mol_type = other DNA
tccccggactgagtatcaatagactgcttacgcggttgaaggagaaaacgttcgttacccggctaactacttcgagaaacttagtaacaccatcgaagctgcagggtgtttcgctcagcacttcccccgtgtagatcaggccgatgagtcaccgcaatccccacgggcgaccgtggcggtggctgcgttggcggcctgcctatggggcaacccataggacgccctaaagtggacatggtgcgaagagtctattgagctagttagtagtcctccggcccctgaatgcggctaatcctaactgcggagcacataccctcaagccagagggtggtgtgtcgtaacgggtaactctgcagcggaaccgactactttgggtgtccgtgtttccttttattcttactgtggctgcttatggtgacaattcaagaattgttaccatatagctattggattggccatccggtgtctaacagagctattgtctacttatttgttgggtacgttccattatcttacacatcccttaacacattacattttattgtgaagctaaatacaagaag

SEQ ID NO: 19675 - DNA, 563 bp, synthetic construct
  source 1..563: mol_type = other DNA
tccccggactgagtatcaatagactgctcacgcggttgaaggagaaaacgttcgttacccggctaactacttcgagaaacttagtaacaccatcgaagctgcagggtgtttcgctcagcacttcccccgtgtagatcaggccgatgagtcaccgcaatccccacgggcgaccgtggcggtggctgcgttggcggcctgcctatggggcaacccataggacgccctaaagtggacatggtgcgaagagtctattgagctagttagtagtcctccggcccctgaatgcggctaatcctaactgcggagcacacaccctcaagccagagggtggtgtgtcgtaacgggtaactctgcagcggaaccgactactttgggtgtccgtgtttccttttattcttactgtggctgcttatggtgacaattcaagaattgttaccatatagctattggattggccatccggtgtctaacagagctattgtgtacttatttgttgggtacgttccattatcttacacatcccttaacacattacattttattgtgaagctaaatacaagaag

SEQ ID NO: 19676 - DNA, 563 bp, synthetic construct
  source 1..563: mol_type = other DNA
tccccggactgagtatcaatagactgcttacgcggttgaaggagaaaacgttcgttacccggctaactacttcgagaaacttagtaacaccatcgaagctgcagggtgtttcgctcagcacttcccccgtgtagatcaggccgatgagtcaccgcaatccccacgggcgaccgtggcggtggctgcgttggcggcctgcctatggggcaacccataggacgccctaaagtggacatggtgcgaagagtctattgagctagttagtagtcctccggcccctgaatgcggctaatcctaactgcggagcacataccctcaagccagagggtggtgtgtcgtgacgggtaactctgcagcggaaccgactactttgggtgtccgtgtttccttttattcttactgtggctgcttatggtgacaattcaagaattgttaccatatagctattggattggccatccggtgtctaacagagctattgtgtacttatttgttgggtacgttccattatcttacacatcccttaacacattacattttattgtgaagctaaatacaagaag

SEQ ID NO: 19677 - DNA, 563 bp, synthetic construct
  source 1..563: mol_type = other DNA
tccccggactgagtatcaatagactgcttacgcggttgaaggagaaaacgttcgttacccggctaactacttcgagaaacttagtaacgccatcgaagctgcagggtgtttcgctcagcacttcccccgtgtagatcaggccgatgagtcaccgcaatccccacgggcgatcgtggcggtggctgcgttggcggcctgcctatggggcaacccataggacgccctaaagtggacatggtgcgaagagtctattgagctagttagtagtcctccggcccctgaatgcggctaatcctaactgcggagcacataccctcaagccagagggtggtgtgtcgtaacgggtaactctgcagcggaaccgactactttgggtgtccgtgtttccttttattcttactgtggctgcttatggtgacaattcaagaattgttaccatatagctattggattggccatccggtgtctaacagagctattgtgtactcatttgttgggtacgttccattatcttacacatcccttaacacattacattttattgtgaagctaaatacaagaag

SEQ ID NO: 19678 - DNA, 563 bp, synthetic construct
  source 1..563: mol_type = other DNA
tccccggactgagtatcaatagactgcttacgcggttgaaggagaaaacgttcgttacccggctaactacttcgagaaacttagtaacgccatcgaagctgcagggtgtttcgctcagcacttcccccgtgtagatcaggccgatgagtcaccgcaatccccacgggcgaccgtggcggtggctgcgttggcggcctgcctatggggcaacccataggacgccctaaagtggacatggtgcgaagagtctattgagctagttagtagtcctccggcccctgaatgcggctaatcctaactgcggagcacataccctcaagccagagggtggtgtgtcgtaacgggtaactctgcagcggaaccgactactttgggtgtccgtgtttccttttattcttactgtggctgcttatggtgacaattcaagaattgttaccatatagctattggattggccatccggtgtctaacagagctattgtgtactcatttgttgggtacgttccattatcttacacatcccttaacacattacattttattgtgaagctaaatacaagaag

SEQ ID NO: 19679 - DNA, 535 bp, synthetic construct
  source 1..535: mol_type = other DNA
cgcggttgaaggagaaaacgttcgttatccggctagctacttcggaaaacctagtaacaccatgaaagttgcggagagcttcgttcagcacttccccagtgtagatcaggtcgatgagtcaccgcattccccacgggcgaccgtggcggtggctgcgttggcggcctgcccatggggtaacccatggggcgctctaatacagacatggtgtgaagagtctactgagctagttagtagtcctccggcccctgaatgcggctaatcctaactgcggagcacacgcccacaagccagcgggtagtgtgtcgtaacgggtaactctgcagcggaaccgactactttgggtgtccgtgtttccttttatctttatattggctgcttatggtgacaatcaaagaattgttaccatatagctattggattggccatccggtgtgcaacagagcaatcatttacctatttattggtttcgtaccattaactttgaattctgtgaccactctaaattatatcttgaccctcaacacagttaaac

SEQ ID NO: 19680 - DNA, 563 bp, synthetic construct
  source 1..563: mol_type = other DNA
tccccggactgagtatcaatagactgcttacgcggttgaaggagaaaacgttcgttacccggctagctacttcgagaaacttagtaacaccatcgaagctgcagggtgtttcgctcagcacttcccccgtgtagatcaggccgatgagtcaccgcaatccccacgggcgaccgtggcggtggctgcgttggcggcctgcctatggggcaacccataggacgccctaaagtggacatggtgcgaagagtctattgagctagttagtagtcctccggcccctgaatgcggctaatcctaactgcggagcacataccctcaagccagagggtggtgtgtcgtaacgggtaactctgcagcggaaccgactactttgggtgtccgtgtttccttttattcttactgtggctgcttatggtgacaattcaagaattgttaccatatagctattggattggccatccggtgtctaacagagctattgtgtacttatttgttgggtacgttccattatcttacacatcccttaacacattacattttattgtgaagctaaatacaagaag

SEQ ID NO: 19681 - DNA, 562 bp, synthetic construct
  source 1..562: mol_type = other DNA
ccccggactgagtatcaatagactgcttgcgcggttgaaggagaaaacgttcgttatccggctaactacttcgagaaacttagtaacgccatcgaagctgcagggtgtttcgctcagcacttcccccgtgtagatcaggccgatgagtcaccgcaatccccacgggcgaccgtggcggtggctgcgttggcggcctgcctatggggcaacccataggacgtcctaaagtggacatggtgtgaagagtctattgagctagttagtagtcctccggcccctgaatgcggctaatcctaactgcggagcacatgccctcgagccagagggtggtgtgtcgtaacgggcaactctgcagcggaaccgactactttgggtgtccgtgtttccttttattcttattgtggctgcttatggtgacaattcaaggattgttaccatatagctattggattggccatccggtatctaacagagctattgtgtacttatttgttggatacgttccattatcttacacatcccttaacacattacattttattgtgaagctaaatacaagaag

SEQ ID NO: 19682 - DNA, 556 bp, synthetic construct
  source 1..556: mol_type = other DNA
tgagtatcaataggctgctcgcgcggctgaaggagaaaacgttcgttacccggccaactacttcgagaagcttagtatcaccatgaacgatgcagagtgtttcgttcagcacaaccccagtgtagatcaggctgatgagtcactgcaatccccatgggcgaccatggcagtggctgcgttggcggcctgcccatggagaaatccatgggacgctctaattctgacatggtgtgaagagcctattgagctagctggtagtcctccggcccctgaatgcggctaatcctaactgcggagcacatgctcacaaaccagtgggtggtgtgtcgtaatgggcaactctgcagcggaaccgactactttgggtgtccgtgtttccttttattcttatgttggctgcttatggtgacaattaaagaattgttaccatatagctattggattggccatccggtgtgcaacagagcaattgtttacctatttgttggttttgtaccactatcactgaagtctgtgaccactcttgagttcatcttgaccctcaactcaatcaaac

SEQ ID NO: 19683 - DNA, 560 bp, synthetic construct
  source 1..560: mol_type = other DNA
tccccggactgagtatcaataggctgcttacgcggctgaaagagaaaacgttcgttacccggccaactacttcgagaagcttagtaccaccatcaacgaggcagagtgtttcgctcggcactaccccagtgtagatcaggctgatgagtcactgcattccccatgggcgaccatggcagtggctgcgttggcggcctgcccatggagagatccataggacgctctaatttggacatggtgcgaagagcctattgagctagttggtagtcctccggcccctgaatgcggctaatcctaactgcggagcgcacacccacataccagtgggcagtgtgtcgtaacgggcaactctgcagcggaaccgactactttgggtgtccgtgtttccatttattcttatattggctgcttatggtgacaatcgaagagttgttaccatatagctattggattggccatccggtgtgtaacagagcaatcgtctaccagtttattggttttgtaccactacattaaagtctgtaacacattaatttcatcttgaccctaaacacacaagc

SEQ ID NO: 19684 - DNA, 560 bp, synthetic construct; identical to SEQ ID NO: 608
  source 1..560: mol_type = other DNA

SEQ ID NO: 19685 - DNA, 620 bp, synthetic construct
  source 1..620: mol_type = other DNA
cacgatcaatagtaggcataacgctccagttatgtcttgatcaagcacttctgtttccccggactgagtatcaatagactgctcgcgcggttgaaggagaaaacgttcgttatccggctagctacttcggaaaacctagtaacaccatgaaagttgcggagagcttcgttcagcactcccccagtgtagatcaggtcgatgagtcaccgcattccccacgggcgaccgtggcggtggctgcgttggcggcctgcccatggggtaacccatggggcgctctaatacggacatggtgtgaagagtctactgagctagttagtagtcctccggcccctgaatgcggctaatcccaactgcggagcacacgcccacaagccagcgggtagtgtgtcgtaacgggcaactctgcagcggaaccgactactttgggtgtccgtgtttccttttatctttatattggctgcttatggtgacaattaaagaattgttaccatatagctattggattggccatccggtgtgcaacagagcaattatttaccaatttattggttttgtaccattaaccttgaattctgtgaccacccttaattatatcttgacccttaacgcagctaaac

SEQ ID NO: 19686 - DNA, 581 bp, synthetic construct
  source 1..581: mol_type = other DNA
ggttttcgtcaagcacttctgtttccccggacttagtaccaataggctgtacccacggctgaaagggaaaacgttcgttatccggctacctacttcgagaagcctagtatcatcattgaatgtctcaagtgttacgctcagcacaaccccagtgtagttcaggctgatgagtcaccgaattccccacgggcgaccgtgtcggtggctgcgttggcggcctgcctgcgagtttcactcgcaggacgcttgattcatgacatggtgcgaagagcctattgagctaggtagtagtcctccggcccctgaatgcggctaatcccaaccacggagcatccactgacaaaccagtcagcagggtgtcgtaacgggtaactctgtggcggaaccgactactttgggtgtccgtgtttcctgttttacttactctggctgcttatggtgacaatttacggattgttaccatatagctattggattggccatccggattacaagcaaataatattattgtttgtgggatttcttcccttgaatcacactaattacttcattttattaattgttttaaagttagttgcatc

SEQ ID NO: 19687 - DNA, 620 bp, synthetic construct
  source 1..620: mol_type = other DNA
ctatcacgaccaatagtaggcgtggcgcgccagccacgtcttggtcaagcacttctgtttccccggaccgatatcaatagactgctcacgcggttgaaggagaaaacgttcgttatccggctaactacttcgagaaacctagtagcatcgtgaaagttgcggagtgtttcgctcagcacttcccccgtgtagatcaggtcgatgagtcactgtgaaccccacgggcgaccgtgacagtggctgcgttggcggcctgcccatggggtaacccatgggacgctctaatacagacacggtgtgaagagtctattgagctagttggtagtcctccggcccctgaatgcggctaatcctaactgcggagcgcgcaccctcaatccagggggcagcgcgtcgtaatgggtaactctgcagcggaaccgactactttgggtgtccgtgtttccttttattccttattggctgcttatggtgacaattgaaaagttgttaccatatagctattggattggccatccggtaaccaacagagctattgtttacctgtttgttgggtacgtccctctcaatttcaaggtcattaaaactcttgattatatattacttctcaactgtgagaa

SEQ ID NO: 19688 - DNA, 492 bp, synthetic construct
  source 1..492: mol_type = other DNA
ggaaaacctagtaacaccatgaaagttgcggagagcttcgttcagcactcccccagtgtagatcaggtcgatgagtcaccgcattccccacgggcgaccgtggcggtggctgcgttggcggcctgcccatggggcaacccatggggcgctctaatacagacatggtgtgaagagtctactgagctagttagtagtcctccggcccctgaatgcggctaatcccaactgcggagcacacgcccacaagccagcgggtagtgtgtcgtaacgggtaactctgcagcggaaccgactactttgggtgtccgtgtttccttttatctttatattggctgcttatggtgacaattaaagaattgttaccatatagctattggattggccatccggtgtgcaacagagcaatcatttacctatttattggttttgtaccattaactttgaattctgtgaccacccttaattatatcttgacccttaacacaactaaac

SEQ ID NO: 19689 - DNA, 424 bp, synthetic construct
  source 1..424: mol_type = other DNA
cgatgagtcactgcaatccccacgggcgaccgtggcagtggctgcgctggcggcctgcctatggggcaacccataggacgctctaatgtggacatggtgtgaagagtctattgagctagttagtagtcctccggcccctgaatgcggctaatcctaactgcggagcacatgccttcaatccagagggtagtgtgtcgtaatgggcaactctgcagcggaaccgactactttgggtgtccgtgtttccttttattctcacattggctgcttatggtgacaattacagaattgttaccatatagctattggattggccatccggtgtgcaatagagctattatatacctatttgttggctttgtaccactgaccttaaaatctttaaccactcttgagtgtatattaacccttaatacaatcaaac

SEQ ID NO: 19690 - DNA, 602 bp, synthetic construct
  source 1..602: mol_type = other DNA
taacgctccagttatgtcttgatcaagcacttctgtttccccggactgagtatcaatagactgctcgcgcggttgaaggagaaaacgttcgttatccggctagctacttcggaaaacctagtaacaccatgaaagttgcggagagcttcgttcagcacttccccagtgtagatcaggtcgatgagtcaccgcattccccacgggcgaccgtggcggtggctgcgttggcggcctgcccatggggtaacccatggggcgctccaatacggacatggtgtgaagagtctactgagctagttagtagtcctccggcccctgaatgcggctaatcccaactgcggagcacacgcccacaagccagcgggtagtgtgtcgtaacgggtaactctgcagcggaaccgactactttgggtgtccgtgtttccttttatctttatattggctgcttatggtgacaattaaagaattgttaccatatagctattggattggccatccggtgtgcaacagagcaattatttaccaatttgttggttttgtaccattaaccttgaattctgtgaccacccttaattatatcttgacccttaacgcagctaaac

SEQ ID NO: 19691 - DNA, 562 bp, synthetic construct
  source 1..562: mol_type = other DNA
ccccggactgagtatcaataagctgctcacgtggctgaaggagaaaacgttcgttatccggctaactacttcgagaaacttagtaacgccatcgaagctgcagggtgtttcgctcagcacttcccccgtgtagatcgggccgatgagtcaccgcgttccccacgggcgaccgtggcggtggctgcgttggcggcctgcccatggagcaatccataggacgctctaaagcggacatggtgcgaagagtctattgagctaattggtagtcctccggccccggaatgcggctaatcctaactgcggagcagatacccacatgtcagtgggcagtcggtcgtaacgggcaacgctgcagcagaaccgactactgtgggtgtccgtgtttccttttattcttactgtggctgcttatggtgacaattcaaggattgttaccatatagctattggattggccatccggtatctaacagagctattgtgtacttatttgttggatacgttccattatcttacacatcccttaacacattacattttattgtgaagctaaatacaagaag

SEQ ID NO: 19692 - DNA, 550 bp, synthetic construct; identical to SEQ ID NO: 592
  source 1..550: mol_type = other DNA

SEQ ID NO: 19693 - DNA, 565 bp, synthetic construct
  source 1..565: mol_type = other DNA
tccccggactgagtatcaatagactgctcgcgcggttgaaggagaaaacgttcgttatccggctagctacttcggaaaacctagtaacaccatgaaagttgcggagagcttcgttcagcactcccccagtgtagatcaggtcgatgagtcaccgcattccccacgggcgaccgtggcggtggctgcgttggcggcctgcccatggggtaacccatggggcgctctaatacggacatggtgtgaagagtctactgagctagttagtagtcctccggcccctgaatgcggctaatcccaactgcggagcacacgcccacaagccagcgggtagtgtgtcgtaacgggtaactctgcagcggaaccgactactttgggtgtccgtgtttccttttatctttatattggctgcttatggtgacaattaaagaattgttaccatatagctattggattggccatccggtgtgcaacagagcaattatttaccaatttattggttttgtaccattaaccttgaattctgtgaccacccttaattatatcttgacccttaacgcagctaaac

SEQ ID NO: 19694 - DNA, 647 bp, synthetic construct
  source 1..647: mol_type = other DNA
ccccaatgaaacttagaagcagcaaaccacgatcaatagtaggcataacgctccagttatgtcttgatcaagcacttctgtttccccggactgagtatcaatagactgcgcgagcggttgaaggagaaaacgttcgttatccggctagctacttcggaaaacctagtaacaccatgaaagttgcggagagcttcgttcagcactcccccagtgtagatcaggtcgatgagccaccgcattccccacgggcgaccgtggcggtggctgcgttggcggcctgcccatggggtaacccatggggcgctctaatgcggacatggtgtgaagagtctactgagctagctagtagtcctccggcccctgaatgcggctaatcccaactgcggagcacacgcccacaagccagcgggtagtgtgtcgtaacgggtaactctgcagcggaaccgactactttgggtgtccgtgtttccttttatctttatattggctgcttatggtgacaattaaagaattgttaccatatagctattggattggccatccggtgtgcaacagagcaattatttaccaatttattggttttgtaccattaaccttgaactctgtgaccacccttaattatatcttgacccttaacgcagctaaac

SEQ ID NO: 19695 - DNA, 407 bp, synthetic construct
  source 1..407: mol_type = other DNA
ccccacgggcgaccgtggcggtggctgcgttggcggcctgcccatggggtaacccatggggcgctctaatacagacatggtgtgaagagtctactgagctagttagtagtcctccggcccctgaatgcggctaatcccaactgcggagcacacgcccacaagccagcgggtagtgtgtcgtaacgggtaactctgcagcggaaccgactactttgggtgtccgtgtttccttttatctttatattggctgcttatggtgacaattaaagaattgttaccatatagctattggattggccatccggtgtgcaacagagcaatcatttacctatttattggttttgtaccattaactttaaattctgtgaccacccttaattatatcttggcccttaacacagctagac

SEQ ID NO: 19696 - DNA, 533 bp, synthetic construct
  source 1..533: mol_type = other DNA
cggttgaaggagaaaacgttcgttatccggctagctacttcggaaaacctagtaacaccatgaaagttgcggagagcttcgttcagcactcccccagtgtagatcaggtcgatgagccaccgcattccccacgggcgaccgtggcggtggctgcgttggcggcctgcccatggggtaacccatggggcgctctaatgcggacatggtgtgaagagtctactgagctagctagtagtcctccggcccctgaatgcggctaatcccaactgcggagcacacgcccacaagccagcgggtagtgtgtcgtaacgggtaactctgcagcggaaccgactactttgggtgtccgtgtttccttttatctttatattggctgcttatggtgacaattaaagaattgttaccatatagctattggattggccatccggtgtgcaacagagcaattatttaccaatttattggttttgtaccattaaccttgaactctgtgaccacccttaattatatcttgacccttaacgcagctaaac

SEQ ID NO: 19697 - DNA, 594 bp, synthetic construct
  source 1..594: mol_type = other DNA
cagctatgtcttgatcaagcacttctgtttccccggaccgagtatcaatagactgttcacgcggttgaaggagaaagcgtccgttatccggctaactacttcgagaaacccagtaacgccattgaaactgcagagtgtttcgctccacacttcccccgtgtagatcaggtcgatgagtcactgcaatccccacgggcgaccgtggcagtggctgcgctggcggcctgcctatggggcaacccataggacgctctaatgtggacatggtgtgaagagtctattgagctagttagtagtcctccggcccctgaatgcggctaatcctaactgcggagcacatgctctcaatccagagggtagtgtgtcgtaatgggcaactctgcagcggaaccgactactttgggtgtccgtgtttccttttattcttacattggctgcttatggtgacaatcactgaattgttaccatatagctattggattggccatccggtgtgcaacagagctattatatacctatttgttggctttgtaccactaaccttaaaatctacaaccactctcaactatatattaacccttaatacaatcaaac

SEQ ID NO: 19698 - DNA, 394 bp, synthetic construct
  source 1..394: mol_type = other DNA
cgtggcggtggctgcgctggcggcctgcctatggggtaacccataggacgctctaatgtggacatggtgcgaagagtctattgagctagttagtagtcctccggcccctgaatgcggctaatcctaactgcggagcacatgccttcaatccagagggtagtgtgtcgtaatgggcaactctgcagcggaaccgactactttgggtgtccgtgtttccttttattcccacattggctgcttatggtgacaattatagaattgttaccatatagctattggattggccatccggtgtgcaatagagctattatatatctatttgttggctttgtaccactgacctcaaaatctgtaaccacccttaagtatatattaaccctcaatacaatcaaac

SEQ ID NO: 19699 - DNA, 557 bp, synthetic construct; identical to SEQ ID NO: 603
  source 1..557: mol_type = other DNA

SEQ ID NO: 19700 - DNA, 291 bp, synthetic construct
  source 1..291: mol_type = other DNA
cggcccctgaatgcggctaatcctaactgcggagcacatgccctcaatccagggggtggtgtgtcgtaacgggcaactctgcagcggaaccgactactttgggtgtccgtgtttccttttattcttatattggctgcttatggtgacaattgagagattgttaccatatagctattggattggccatccattaacgaacagagctttgatatatttgttcgtgggtttcgttccactcaccaatcgtgcagtccatactctaaagcacattttgattctgaacaatagaaa

SEQ ID NO: 19701 - DNA, 289 bp, synthetic construct
  source 1..289: mol_type = other DNA
gcccctgaatgcggctaatcctaactgcggagcgcataccctcaacccagagggtggtgcgtcgtaacgggcaactctgcagcggaaccgactactttgggtgtccgtgtttccttttatttttatactggctgcttatggtgacgattgaaagattgttaccatatagctattggattggccatccagtgactaacagagctttgatatacctgtttgtgggttttgttccactcaccaatcgtacagtttatactttgaagtacattttaatcctgaataatagaaa

SEQ ID NO: 19702 - DNA, 288 bp, synthetic construct
  source 1..288: mol_type = other DNA
gcccctgaatgcggctaatcctaactgcggagcgcgcaccctcaatccagtgggcagcgcgtcgtaatgggtaactctgcagcggaaccgactactttgggtgtccgtgtttcctgttattccttattggctgcttatggtgacaattgaaaagttgttaccatatagctattggattggccatccggtaaccaacagagctattgtttatctgttcattgggtgcgtccctctcaatctcaaggtcattcaaactcttgattatatactatttctcaattgtaagaa

SEQ ID NO: 19703 - DNA, 289 bp, synthetic construct
  source 1..289: mol_type = other DNA
ggcccctgaatgcggctaatcctaactgcggagcgcatgccctcaaaccagagggtggtgcgtcgtaacgggcaactctgcagcggaaccgactactttgggtgtccgtgtttcctttattctcatattggctgcttatggtgacaatcgaggaattgttgccatatagctattggattggccatccggtgtgcaatagagcaattatctacttgttcgttggatatattccgttaacacttaaacccctcaacacattgcactacattttaaccctaaacgcaagaaa

SEQ ID NO: 19704 - DNA, 289 bp, synthetic construct
  source 1..289: mol_type = other DNA
ggcccctgaatgcggctaatcctaactgcggggcgcgcaccctcagtccagggggcagcgcgtcgtaatgggtaactccgcagcggaaccgactactttgggtgtccgtgtttccttttattccttattggctgcttatggtgacaattgaaaagttgttaccatatagctattggattggccatccggtaactaacagagctattgtttacctgtttattggatacgtccctctcgatctcaaggccattcaaactcttgattatatactacttctcaactgtaagaa

SEQ ID NO: 19705 - DNA, 288 bp, synthetic construct
  source 1..288: mol_type = other DNA
gcccctgaatgcggctaatcctaactgtggagcgcgcaccctcagcccagggggcagcgcgtcgtaatgggtaactccgcagcggaaccgactactttgggtgtccgtgtttccttttattccttattggctgcttatggtgacaattgagaagttgttaccatatagctattggattggccacccggtaaccaacagagctattgtttacctgtttattggatacgtccctctcgatctcaaggccattcaaactcttgattatatactacttctcaactgtaagaa

SEQ ID NO: 19706 - DNA, 288 bp, synthetic construct
  source 1..288: mol_type = other DNA
gcccctgaatgcggctaatcctaactgtggagcgcgcaccctcagcccagggggcagcgcgtcgtaatgggtaactccgcagcggaaccgactactttgggtgtccgtgtttccttttattccttattggctgcttatggtgacaattgagaagttgttaccatatagctattggattggccacccggtaaccaacagagctattgtttacctgtttattggatacgtccctctcgatctcaaggctattcaaactcttgattatatactacttctcaactgtaagaa

SEQ ID NO: 19707 - DNA, 286 bp, synthetic construct
  source 1..286: mol_type = other DNA
tgaatgcggctaatcccaactgcggagcacacgcccacaagccagcgggtagtgtgtcgtaacgggtaactctgcagcggaaccgactactttgggtgtccgtgtttccttttatctttatattggctgcttatggtgacaattaaagaattgttaccatatagctattggattggccatccggtgtgcaacagagcaattatttaccaatttattggttttgtaccattaaccttgaattctgtgaccacccttaattatatcttgacccttaacgcagctaaac

SEQ ID NO: 19708 - DNA, 290 bp, synthetic construct
  source 1..290: mol_type = other DNA
ggcccctgaatgcggctaatcctaactgcggagcacacgccctcaacccagggggttgtgtgtcgtaacgggtaactctgcagcggaaccgactactttgggtgtccgtgtttcctattattcttatattggctgcttatggtgacaattgagagattgttaccatatagctattggattggccatccgatatctaacagagctttggtatatcagttcattggctttgtgcctttgtcatctacagtttattcaactctagtgttcttaatataccttaatagtaagaa

SEQ ID NO: 19709 - DNA, 291 bp, synthetic construct
  source 1..291: mol_type = other DNA
cggcccctgaatgcggctaatcctaactgcggagcatgtactcacaatccagtgggcagcatgtcgtaacgggtaactctgcagcggaaccgactactttgggtgtccgtgtttccttttattcttatattggctgcttatggtgacaattgaaagattgttgccatatagctattggattggccatccggtgtctaacagagctctgatttatcagtttgttggttttgtgcctttatcacctacagtttacttaaccttagtgtttttgatacatcttaacagcaagaa

SEQ ID NO: 19710 - DNA, 290 bp, synthetic construct
  source 1..290: mol_type = other DNA
ggcccctgaatgcggctaatcctaactgcggagcacatgccctcaatccagggggtggtgtgtcgtaacgggcaactctgcagcggaaccgactacttcgggtgtccgtgtttccttttattctcatattggctgcttatggtgacaattgagagattgttaccatatagctattggattggccatccggtgtctaacagagctctggtttatcaatttgttggctttgtgcctttgtcacctacagtttattcaactttggtgtttttactacatcttaacaacaagaa

SEQ ID NO: 19711 - DNA, 290 bp, synthetic construct
  source 1..290: mol_type = other DNA
ggcccctgaatgcggctaatcctaactgcggagcacataccttcaacccagagggtggtgtgtcgtaacgggcaactctgcagcggaaccgactactttgggtgtccgtgtttccttttattcctatattggctgcttatggtgacaattgagagattgttgccatatagctattggattggccatccggtgtcaaacagagccctagtttaccagttcgttggttttgtacctttatcacccacagtctattcaaccttggtatttctaattcaccttaatagcaagaa

SEQ ID NO: 19712 - DNA, 554 bp, synthetic construct
  source 1..554: mol_type = other DNA
gatatcaatagactgttcacacggtcgaaggagaaagcgttcgttatccggctaactacttcgagaaacccagtagcgccattgaaactgcagagtgtttcgctccacacttcccccgtgtagatcaggtcgatgagtcactgcaatccccacgggcgaccgtggcagtggctgcgttggcggcctgcctatggggtaacccataggacgctctaatgtggacatggtgcgaagagtctattgagctagttagtagtcctccggcccctgaatgcggctaatcctaactgcggagcacatgccttcaatccagagggtagtgtgtcgtaatgggcaactctgcagcggaaccgactactttgggtgtccgtgtttccttttattctcacattggctgcttatggtgacaattacagaattgttaccatatagctattggattggccatccggtgtgcaatagagctattatatacctatttgttggctttgtaccactaaccttaaaatctgtaatcactctcaagtatatattgacccttaatacaattaaac

SEQ ID NO: 19713 - DNA, 495 bp, synthetic construct
  source 1..495: mol_type = other DNA
tacttcgagaagcctagtaacaccatgaaagttgcggagtgtttcgctcagcacttcccccgtgtagatcaggccgatgagtcactgcaaaccccacgggtgaccgtggcagtggctgcgctggcggcctgcccatggggtaacccatgggacgctctaatacagacatggtgtgaagagcctattgagctagttagtggtcctccggcccctgaatgcggctaatcctaactgcggagcacgcaccctcaacccagggggcggcgtgtcgtaatgggtaactctgcagcggaaccgactactttgggtgtccgtgtttccttttattccttattggctgcttatggtgacaattgaaaagttgttaccatatagctattggattggccatccggtatctaatagagctattgtttacctattcattggatacatccctcttagtcttaaagccattcaaactctcaactacatattgctccttaattgtaggaa

SEQ ID NO: 19714 - DNA, 286 bp, synthetic construct
  source 1..286: mol_type = other DNA
tgaatgcggctaatcccaactgcggagcacacgcccacaagccagcgggtagtgtgtcgtaacgggtaactctgcagcggaaccgactactttgggtgtccgtgtttccttttatctttatattggctgcttatggtgacaattaaagaattgttaccatatagctattggattggccatccggtgtgcaacagagcaattatttaccaatttattggttttgtaccattaaccttgaactctgtgaccacccttaattatatcttgacccttaacgcagctaaac

SEQ ID NO: 19715 - DNA, 276 bp, synthetic construct
  source 1..276: mol_type = other DNA
gctaatcctaactgcggagcacacgccctcaatccagggggtggtgtgtcgtaacgggcaactctgcagcggaaccgactactttgggtgtccgtgtttccttttattcttatattggctgcttatggtgacaattgagagattgttaccatatagctattggattggccatccggtgtctaatagagctctggtttatcaatttgttggctttgtgcctttgtcatctacagtttattcaactttagtgtttttaatatatcttaacaacaagaa

SEQ ID NO: 19716 - DNA, 495 bp, synthetic construct
  source 1..495: mol_type = other DNA
tacttcgagaagcctagtaacaccatgaaagttgcggagtgtttcgctcagcacttcccccgtgtagatcaggccgatgagtcactgcaaaccccacgggtgaccgtggcagtggctgcgctggcggcctgcccatggggtaacccatgggacgctctaatacagacatggtgtgaagagtctattgagctagttagtggtcctccggcccctgaatgcggctaatcctaactgcggagcacgcaccctcaacccagggggcggcgtgtcgtaatgggtaactctgcagcggaaccgactactttgggtgtccgtgtttccttttattccttattggctgcttatggtgacaattgaaaagttgttaccatatagctattggattggccatccggtatctaatagagctattgtttacctattcattggatacatccctcttagtcttaaagccattcaaactctcaactacatattgctccttaattgtaggaa

SEQ ID NO: 19717 - DNA, 560 bp, synthetic construct
  source 1..560: mol_type = other DNA
ggactgagtatcaatagactgctcgcgcggttgaaggagaaaacgttcgttatccggctagctacttcggaaaacctagtaacaccatgaaagttgcggagagcttcgttcagcactcccccagtgtagatcaggtcgatgagtcaccgcattccccacgggcgaccgtggcggtggctgcgttggcggcctgcccatggggtaacccatggggcgctctaatacggacatggtgtgaagagtctactgagctagttagtagtcctccggcccctgaatgcggctaatcccaactgcggagcacacgcccacaagccagcgggtagtgtgtcgtaacgggtaactctgcagcggaaccgactactttgggtgtccgtgtttccttttacctttatattggctgcttatggtgacaattaaagaattgttaccatatagctattggattggccatccagtgtgcaacagagcaattatttaccaatttattggttttgtaccattaaccttgaattctgtgatcacccttaattatattttgacccttaacgcagctaaac

SEQ ID NO: 19718 - DNA, 549 bp, synthetic construct
  source 1..549: mol_type = other DNA
tatcaatagactgctcacgcggttgaaggagaaaacgttcgttatccggctaactacttcgagaaacctagtagcatcgtgaaagttgcggagtgtttcgctcagcacttcccccgtgtagatcaggtcgatgagtcactgtgaaccccacgggcgaccgtgacagtggctgcgttggcggcctgcccatggggtaacccatgggacgctctaatacagacacggtgtgaagagtctattgagctagttggtagtcctccggcccctgaatgcggctaatcctaactgcggagcgcgcaccctcaatccagggggcagcgcgtcgtaatgggtaactctgcagcggaaccgactactttgggtgtccgtgtttccttttattccttattggctgcttatggtgacaattgaaaagttgttaccatatagctattggattggccatccggtaaccaacagagctattgtttacctgtttgttgggtacgtccctctcaatttcaaggtcattaaaactcttgattatatattacttctcaactgtgagaa

SEQ ID NO: 19719 - DNA, 265 bp, synthetic construct
  source 1..265: mol_type = other DNA
gcggagcacacgcccacaagccagcgggtagtgtgtcgtaacgggtaactctgcagcggaaccgactactttgggtgtccgtgtttccttttatctttatattggctgcttatggtgacaattaaagaattgttaccatatagctattggattggccatccggtgtgcaacagagcaattatttaccaatttattggttttgtaccattaaccttgaattctgtgaccactcttaattatatcttgactcttaacgcagctaaac

SEQ ID NO: 19720 - DNA, 550 bp, synthetic construct
  source 1..550: mol_type = other DNA
tcaatagactgttcacacggtcgaaggagaaagcgttcgttatccggctaactacttcgagaaacccagtagcgccattgaaactgcagagtgtttcgctccacacttcccccgtgtagatcaggtcgatgagtcactgcaatccccacgggcgaccgtggcagtggctgcgttggcggcctgcctatggggtaacccataggacgctctaatgtggacatggtgcgaagagtctattgagctagttagtagtcctccggcccctgaatgcggctaatcctaactgcggagcacatgccttcaatccagagggtagtgtgtcgtaatgggcaactctgcagcggaaccgactactttgggtgtccgtgtttccttttattctcacattggctgcttatggtgacaattacagaattgttaccatatagctattggattggccatccggtgtgcaatagagctattatatacctatttgttggctttgtaccactaaccttaaaatctgtaatcactctcaagtatatattgacccttaatacaattaaac

SEQ ID NO: 19721 - DNA, 720 bp, synthetic construct
  source 1..720: mol_type = other DNA
caagagtagtgggttccactgggggctagcactctgattctgcggaatctttgtgcgcctgttttataaccctcccccgacttgcaccttagaagttatgtacgttgatcaacagcaggcgtggcacaccagccatgtcttgatcaagcacttctgtgcccccggactgagtatcaatagactgctcacgtggtcgaaggagaaaacgttcgttatccggctaactacttcgagaaacctagtaacaccactgaaactgcggagtgtttcgctcagcacttcccccgtgtagatcaggtcgatgagtcactgcttaccccacgggtgaccgtggcagtggctgcgttggcggcctgcctatggggcaacccataggacgctctaaagtggacatggtgcgaagagtctattgagctagttagtagtcctccggcccctgaatgcggctaatcctaactgcggagcgcatgcccccaaaccagagggtggtgcgtcgtaacgggtaactctgcagcggaaccgactactttgggtgtccgtgtttcttttattctcataatggctgcttatggtgacaattgaggaattgttaccatatagctattggattggccatccggtgtgtaacagagctattatctacttgtttgttggatacattccattaacacctaaatccttcaatacattgcattacattctaacgctgaacgcaagaaa

SEQ ID NO: 19722 - DNA, 695 bp, synthetic construct
  source 1..695: mol_type = other DNA
ctagcactccgattctgcggaatctttgtgcgcctgttttataacccccccccgacttgcaacttagaagttatgtacgttgatcaacagcaggcgtggcacaccagccatgtcttgatcaagcacttctgtaaccccggactgagtatcaatagactgctcacgtggtcgaaagagaaaacgttcgttatccggctaactacttcgagaaacctagtagcaccactgaaactgcggagtgtttcgctcagcacttcccccgtgtagatcaggtcgatgagtcactgcttaccccacgggtgaccgtggcagtggctgcgttggcggcctgcctatggggcaacccataggacgctctaaagtggacatggtgtgaagagtctattgagctagttagtagtcctccggcccctgaatgcggctaatcctaactgcggagcgcatgcccccaaaccagagggtggtgcgtcgtaacgggtaactctgcagcggaaccgactactttgggtgtccgtgtttcttttattctcataatggctgcttatggtgacaattgaggaattgttaccatatagctattggattggccatccggtgtgcaacagagctattatctacttgtttgttggatacattccattgacatctaaatccttcaatacattgcactatattctaacgttgaacacaagaaa

SEQ ID NO: 19723 - DNA, 619 bp, synthetic construct
  source 1..619: mol_type = other DNA
acgatcaatagtaggcataacgctccagttatgtcttgatcaagcacttctgtttccccggactgagtatcaatagactgcgcgagcggttgaaggagaaaacgttcgttatccggctagctacttcggaaaacctagtaacaccatgaaagttgcggagagcttcgttcagcactcccccagtgtagatcaggtcgatgagccaccgcattccccacgggcgaccgtggcggtggctgcgttggcggcctgcccatggggtaacccatggggcgctctaatgcggacatggtgtgaagagtctactgagctagctagtagtcctccggcccctgaatgcggctaatcccaactgcggagcacacgcccacaagccagcgggtagtgtgtcgtaacgggtaactctgcagcggaaccgactactttgggtgtccgtgtttccttttatctttatattggctgcttatggtgacaattaaagaattgttaccatatagctattggattggccatccggtgtgcaacagagcaattatttaccaatttattggttttgtaccattaaccttgaactctgtgaccacccttaattatatcttgacccttaacgcagctaaac

SEQ ID NO: 19724 - DNA, 745 bp, synthetic construct
  source 1..745: mol_type = other DNA
ttaaaacagcctgtgggttgttcccacccacagggcccactgggcgctagcacactgattctgcgggatctttgtgcgcctgttttataacccttcccctaagcagcaacttagaagctttgcacaatcacgaccagcagtgggcgtggcgcgccagtcacgtcttggtcaagcacttctgtatccccggactgagtatcaatagactgctcacgcggttgaaggagaaaacgttcgttacccggctagctacttcgagaaacctagtagcaccgtgaaagttgcggagtgtttcgctcagcacttcccccgtgtagatcaggtcgatgagtcactgtaaaccccacgggcgaccgtgacagtggctgcgttggcggcctgcccatggggtaacccatgggacgctctaatacagacatggtgtgaagagtctattgagctagttagtagtcctccggcccctgaatgcggctaatcctaactgcggagcgcgcaccctcaacccagggggcggcgtgtcgtaatgggtaactctgcagcggaaccgactactttgggtgtccgtgtttccttttattctttattggctgcttatggtgacaattgaaaagttgttaccgtatagctattggattggccatccggtgtctaacagagctattgtttacctattcattggatacgtccctcttaatctcaaagtcattcaaactcttgattatatattgctccttaactgtaagaa

SEQ ID NO: 19725 - DNA, 372 bp, synthetic construct
  source 1..372: mol_type = other DNA
gcctgcccatggggtaacccatggggcgctctaatacggacatggtgtgaagagtctactgagctagttagtagtcctccggcccctgaatgcggctaatcccaactgcggagcacacgcccacaaaccagcgggtagtgtgtcgtaacgggtaactctgcagcggaaccgactactttgggtgtccgtgtttccttttatctttatattggctgcttatggtgacaattaaagaattgttaccatatagctattggattggccatccggtgtgcaacagagcaattatttaccaatttattggttttgtaccattaaccttgaattctgtgaccacccttaattatatcttgacccttaacgcagctaaac

SEQ ID NO: 19726 - DNA, 440 bp, synthetic construct
  source 1..440: mol_type = other DNA
cccccgtgtagatcaggtcgatgagtcactgtgaaccccacgggcgaccgtgacagtggctgcgttggcggcctgcccatggggtaacccatgggacgctctaatacagacacggtgtgaagagtctattgagctagttggtagtcctccggcccctgaatgcggctaatcctaactgcggagcgcgcaccctcaatccagggggcagcgcgtcgtaatgggtaactctgcagcggaaccgactactttgggtgtccgtgtttcctttttattacttattggctgcttatggtgacaattgaaaagttgttaccatatagctattggattggccatccggtaatcaacagagctattgtttacttgtttgtaggatacgtccctctcaatttcaaagtcattaaaactcttgattatatattactcctcaactgtgagaa

SEQ ID NO: 19727 - DNA, 705 bp, synthetic construct
  source 1..705: mol_type = other DNA
ggcgctagcactctgattctacggaatctttgtgcgcctgttttacaacccctcccaatttgcaacttagaagcaatacacaacactgatcaacagcaggcatggcgcaccagccatgtcttgatcaagcacttctgttttccccggactgagtatcaatagactgctcacgcggttgaaggagaaagcgtccgttatccggctaactacttcgagaaacctagtagcaccattgaagctgcggagtgtttcgctcggcacttcccccgtgtagatcaggtcgatgagtcactgcaatccccacgggcgaccgtggcagtggctgcgctggcggcctgcctatggggcaacccataggacgctctaatgtggacatggtgcgaagagtctattgagctagttagtagtcctccggcccctgaatgcggctaatcctaactgcggagcacatgccctcaacccagagggtagtgtgtcgtaacgggcaactctgcagcggaaccgactactttgggtgtccgtgtttccttttatttttacattggctgcttatggtgacaatcacagaattgttaccatatagctattggattggccatccggtgtgcaatagagctattatatacctatttgttggctttgtaccactaaccttaaaatctataaccaccctcaactttatattaactctcaatacagtcaaac

SEQ ID NO: 19728 - DNA, 296 bp, synthetic construct
  source 1..296: mol_type = other DNA
tcctccggcccctgaatgcggctaatcctaactgcggagcgcatgccctcaatccagggggtggtgtgtcgtaacgggcaactctgcagcggaaccgactactttgggtgtccgtgtttccttttattcttacattggctgcttatggtgacaattgagagattgttaccatatagctattggattggccatccagtgaccaacagagctttgatatacttgtttgtgggtttcgttccactcactaatcgtacagtccatactctaaagcacattttgattctgaacaatagaaa

SEQ ID NO: 19729 - DNA, 637 bp, synthetic construct; identical to SEQ ID NO: 763
  source 1..637: mol_type = other DNA

SEQ ID NO: 19730 - DNA, 643 bp, synthetic construct
  source 1..643: mol_type = other DNA
agcagtaacttagaagctttacacaatcacgaccaatagtaggcgtggcgcgccagtcacgtcttggtcaagcacctctgttccccggactgagtatcaatagactgctcacgcggttgaaggagaaaacgttcgttatccggctaactacttcgagaaacctagtagcaccgtgaaagttgcggagtgtttcgctcagcacttcccccgtgtagatcaggtcgatgagtcactgtaaaccccacgggcgaccgtgacagtggctgcgttggcggcctgcccatggggtgacccatgggacgctctaatacagacatggtgtgaagagtctattgagctagttagtagtcctccggcccctgaatgcggctaatcctaactgcggagcacgcaccctcaacccagggggcggcgtgtcgtaatgggtaactctgcagcggaaccgactactttgggtgtccgtgtttccttttatttcttactggctgcttatggtgacaattgaaaagttgttaccatatagctattggattggccacccggtgtctaacagagctattgtttacctatttactggatacgtccctcttaatctcaaggccattcaaactcttaattatatattgctccttaactgtaagaa

SEQ ID NO: 19731 - DNA, 636 bp, synthetic construct
  source 1..636: mol_type = other DNA
acttagaagcttcacacaatcacgaccaatagtaggcgtggcgcgccagtcacgtctcggtcaagcacttctgttccccggactgagtatcaatagactgcttacgcggttgaaggagaaaacgttcgttatccggctaactacttcgagaaacctagtagcaccgtgaaagttgcggagcgtttcgctcagcacttcccccgtgtagatcaggccgatgagtcactgtaaaccccacgggcgaccgtgacagtggctgcgttggcggcctgcccatggggtaacccatgggacgctctaatacagacatggtgtgaagagtctattgagctagttagtagtcctccggcccctgaatgcggctaatcctaactgcggagcacgcaccctcaacccagggggcggcgtgtcgtaatgggtaactctgcagcggaaccgactactttgggtgtccgtgtttccttttattccttactggctgcttatggtgacaattgaaaagttgttaccatatagctattggattggccatccggtgtctaacagagctattgtttacctatttactggatacgtccctcttaatctcaaggccattcaaactcttaattatatattgctccttaattgtaagaa

SEQ ID NO: 19732 - DNA, 637 bp, synthetic construct
  source 1..637: mol_type = other DNA
acttagaagttttgcacaatcacgaccaatagtaggcgtggcgcgccagtcacgtcttggtcaagcactcctgttcccccggactgagtatcaatagactgctcgcgcggttgaaggagaaaacgttcgttatccggctaactacttcgagaagcctagtagcaccgtgaaagttgcggagtgtttcgctcagcacttcccccgtgtagatcaggtcgatgagtcactgtaaaccccacgggcgaccgtgacagtggctgcgttggcggcctgcccatggggtaacccatgggacgctctaatacagacatggtgtgaagagtctattgagctagttagtagtcctccggcccctgaatgcggctaatcctaactgcggagcacgcaccctcaacccagggggcggcgtgtcgtaatgggtaactctgcagcggaaccgactactttgggtgtccgtgtttccttttattccttactggctgcttatggtgacaattgaaaagttgttaccatatagctattggattggccatccggtgtctaacagagctattgtttacctattcattggatacgtccctcttaatctcaaggtcattcaaactcttaattatatattgctccttaactgcaagaa

SEQ ID NO: 19733 - DNA, 637 bp, synthetic construct
  source 1..637: mol_type = other DNA
acttagaagcttcacacaatcacgaccaatagtaggcgtggcgcgccagtcacgtcttggtcaggcacttctgttcccccggactgagtatcaatagactgctcacgcggttgaaggagaaaacgttcgttatccggctaactacttcgagaaacctagtagcaccatgaaagttgcggagtgtttcgctcagcacttcccccgtgtagatcaggtcgatgagtcactgtaaaccccacgggcgaccgtgacagtggctgcgttggcggcctgcccatggggtaacccatgggacgctctaatacagacatggtgtgaagagtctattgagctagttagtagtcctccggcccctgaatgcggctaatcctaactgcggagcacgcaccctcaacccagggggcggcgtgtcgtaatgggtaactctgcagcggaaccgactactttgggtgtccgtgtttctttttattccttactggctgcttatggtgacaattgaaaagttgttaccatacagctattggattggccatccggtgtctaacagagctattgtttacctatttattggatacgtccctcttaatctcaaggctactcaaactcttaattatatattgctccttaactgtaagaa

SEQ ID NO: 19734 - DNA, 637 bp, synthetic construct
  source 1..637: mol_type = other DNA
acttagaagcttcacacaatcacgaccaatagtaggcgtggcgcgccagtcacgtcttggtcaagcacttctgttcccccggactgagtatcaatagactgctcacgcggttgaaggagaaaacgttcgttatccggctaactacttcgagaaacctagtagcaccgtgaaagttgcggagtgtttcgctcagcacttcccccgtgtagatcaggtcgatgagtcactgtaaaccccacgggcgaccgtgacagtggctgcgttggcggcctgcccatggggtaacccatgggacgctctaatacagacatggtgtgaagagtctattgagctagttagtagtcctccggcccctgaatgcggctaatcctaactgcggagcacgcaccctcaacccagggggcggcgtgtcgtaatgggtaactctgcagcggaaccgactactttgggtgtccgtgtttccttttattccttactggctgcttatggtgacaattgaaaagttgttaccatatagctattggattggccatccggtgtctaacagagccattgtttacctatttattggatacgtcccccttaatctcaaggccattcaaactcttaattatatattgctccttaactgtaagaa

SEQ ID NO: 19735 - DNA, 637 bp, synthetic construct
  source 1..637: mol_type = other DNA
acttagaagcttcacacaatcacgaccaatagtaggcgtggcgcgccagtcacgttttggtcaagcacttctgttcccccggactgagtatcaatagactgctcacgcggttgaaggagaaaacgttcgttatccggctaactacttcgagaaacctagtagcaccgtgaaagttgcggagtgtttcgctcagcacttcccccgtgtagatcaggtcgatgagtcactgtaaaccccacgggcgaccgtgacagtggctgcgttggcggcctgcccatggggtaacccatgggacgctctaatacagacatggtgtgaagagtctattgagctagttagtagtcctccggcccctgaatgcggctaatcctaactgcggagcacgcaccctcaacccagggggcggcgtgtcgtaatgggtaactctgcagcggaaccgactactttgggtgtccgtgtttccttttattccttactggctgcttatggtgacaattgaaaagttgttaccatatagctattggattggccatccggtgtctaacagagctattgtttacctatttattggatacgtccctcttaatctcaaggtcattcaaactcttaattatatattgctccttaactgtaagaa

SEQ ID NO: 19736 - DNA, 637 bp, synthetic construct
  source 1..637: mol_type = other DNA
acttagaagttttacgcaattacgaccagtagtgggcgtggcgcgccagtcacgtcttggtcaagcacttctgtatccccggactgagtatcaatagactgctcacgcggttgaaggagaaaacgttcgttatccggctaactacttcgagaaacctagtagcaccgtgaaagttgcggagtgtttcgctcagcacttcccccgtgtagatcaggtcgatgagtcactgtaaaccccacgggcgaccgtgacagtggctgcgttggcggcctgcccatggggtaacccatgggacgctctaatacagacatggtgtgaagagtctattgagctagttagtagtcctccggcccctgaatgcggctaatcctaactgcggagcacgcaccctcaacccagggggcggcgtgtcgtaatgggtaactctgcagcggaaccgactactttgggtgtccgtgtttccttttattccttattggctgcttatggtgacaattgagaagttgttaccatatagctattggattggccatccggtgtctaacagagctattatttacctatttattggatacgtccctcttgatttcaaggccattcaaactcttgattatatattgctccttaactgcaagaa

SEQ ID NO: 19737 - DNA, 637 bp, synthetic construct
  source 1..637: mol_type = other DNA
acttagaagcttcacacaatcacgaccaatagtaggcgtggcgcgccagtcacgtcttggtcaagcacttctgttcccccggactgagtatcaatagactgctcacgcggttgaaggagaaaacgttcgttatccggctaactacttcgagaaacctagtagcaccgtgaaagttgcggagtgtttcgctcagcacttcccccgtgtagatcaggtcgatgagtcactgtaaaccccacgggcgaccgtgacagtggctgcgttggcggcctgcccatggggtaacccatgggacgctctaatacagacatggtgtgaagagtctattgagctagttagtagtcctccggcccctgaatgcggctaatcctaactgcggagcacgcaccctcaacccagggggcggcgtgtcgtaatgggtaactctgcagcggaaccgactactttgggtgtccgtgtttccttttattccttactggctgcttatggtgacaattgaaaagttgttaccatatagctattggattggccatccggtgtctaacagagctattgtttacctatttattggatacgtccctcttgatctcaaggccattcaaactcttaattatatattgctccttaactgtaagaa

SEQ ID NO: 19738 - DNA, 637 bp, synthetic construct
  source 1..637: mol_type = other DNA
acttgaaagcttcacacaatcacgaccaatagtaggcgtggcgcgccagtcacgtcttggtcaagcacttctgttcccccggactgagtatcaatagactgctcacgcggttgaaggagaaaacgttcgttatccggctaactacttcgagaaacctagtagcaccgtgaaagttgcggagtgtttcgctcagcacttcccccgtgtagatcaggtcgatgagtcactgtaaaccccacgggcgaccgtgacagtggctgcgttggcggcctgcccatggggtaacccatgggacgctctaatacagacatggtgtgaagagtctattgagctagttagtagtcctccggcccctgaatgcggctaatcctaactgcggagcacgcaccctcaacccagggggcggcgtgtcgtaacgggtaactctgcagcggaaccgactactttgggtgtccgtgtttcctgttattccttactggctgcttatggtgacaattgaaaagttgttaccatatagctattggattggccatccggtgtctaacagagctattgtttacctatttattggatacgtccctcttaatctcaagaccattcaaactcttaattatatattgctccttaactgtaagaa

SEQ ID NO: 19739 - DNA, 637 bp, synthetic construct
  source 1..637: mol_type = other DNA
atttagaagctttacacaatcacgaccagtagtgggcgtggcgcgccagtcacgtcttggtcaagcacttctgtatccccggactgagtatcaatagactgctcgcgcggttgaaggagaaaacgttcgttatccggctaactacttcgagaaacctagtagtaccatgaaagttgcggagtgtttcgctcagcacttcccccgtgtagatcaggtcgatgagtcactgtaaaccccacgggcgaccgtgacagtggctgcgctggcggcctgcccatggggcaacccatgggacgctctaatacagacatggtgtgaagagtctattgagctagttagtagtcctccggcccctgaatgcggctaatcctaactgcggagcacgcaccctcaacccagggggcggcgtgtcgtaatgggtaactctgcagcggaaccgactactttgggtgtccgtgtttccttttattccttattggctgcttatggtgacaattgaaaagttgttaccatatagctattggattggccatccggtgtctaacagagctattgtttacttatttattggatacgtccctcttaatctcaaggccattcaaactctcgattacatattgttccttaactgtaagaa

SEQ ID NO: 19740 - DNA, 637 bp, synthetic construct
  source 1..637: mol_type = other DNA
acttagaagcttcacacaatcacgaccaatagtaggcgtggcgcgccagtcacgtcttggtcaggcacttctgttcccccggactgagtatcaatagactgctcacgcggttgaaggagaaaacgttcgttatccggctaactacttcgagaaacctagtagcaccatgaaagttgcggagtgtttcgctcagcacttcccccgtgtagatcaggtcgatgagtcactgtaaaccccacgggcgaccgtgacagtggctgcgttggcggcctgcccatggggtaacccatgggacgctctaatacagacatggtgtgaagagtctattgagctagttagtagtcctccggcccctgaatgcggctaatcctaactgcggagcacgcaccctcaacccagggggcggcgtgtcgtaatgggtaactctgcagcggaaccgactactttgggtgtccgtgtttctttttattccttactggctgcttatggtgacaattgaaaagttgttaccatatagctattggattggccatccggtgtctaacagagctattgtttacctatttattggatacgtccctcttaatctcaaggctactcaaactcttaattatatattgctccttaactgtaagaa

SEQ ID NO: 19741 - DNA, 637 bp, synthetic construct
  source 1..637: mol_type = other DNA
acttagaagcttcacacaatcacgaccaatagtaggcgtggcgcgccagtcacgtcttggtcaagcacttctgttcccccggactgagtatcaatagactgctcacgcggttgaaggagaaaacgttcgttacccggctaactacttcgagaaacctagtagcaccgtgaaagttgcggagtgtttcgctcagcacttcccccgtgtagatcaggtcgatgagtcactgtaaaccccacgggcgaccgtgacagtggttgcgttggcggcctgcccatggggtaacccatgggacgctctaatacagacatggtgtgaagagtctattgagctagttagtagtcctccggcccctgaatgcggctaatcctaactgcggagcacgcaccctcaacccagggggcggcgtgtcgtaatgggtaactctgcagcggaaccgactactttgggtgtccgtgtttctttttattccttactggctgcttatggtgacaattgaaaagttgttaccatatagctattggattggccatccggtgtctaacagagctattgtttacctatttattggatacgtccctcttaatctcaaggctattcaaactcttaattatatattgctccttaactgtaagaa

SEQ ID NO: 19742 - DNA, 637 bp, synthetic construct
  source 1..637: mol_type = other DNA
acttagaagcttcacacaatcacgaccaatagtaggcgtggcgcgccagtcacgtcttggtcaagcacttctgttcccccggactgagtatcaatagactgctcacgcggttgaaggagaaaacgttcgttatccggctaactacttcgagaaacctagtagcaccgtgaaagttgcggagtgtttcgctcagcacttcccccgtgtagatcaggtcgatgagtcactgtaaaccccacgggcgaccgtgacagtggctgcgttggcggcctgcccatggggtaacccatgggacgctctaatacagacatggtgtgaagagtctattgagctagttagtagtcctccggcccctgaatgcggctaatcctaactgcggagcacgcaccctcaacccagggggcggcgtgtcgtaatgggtaactctgcagcggaaccgactactttgggtgtccgtgtttctttttattccttactggctgcttatggtgacaattgaaaagttgttaccatatagctattggattggccatccggtgtctaacagagctattgtttacctatttattggatacgtccctcttaatctcaaggccattcaaactcttaattatatattgctccttaactgtaagaa

SEQ ID NO: 19743 - DNA, 637 bp, synthetic construct
  source 1..637: mol_type = other DNA
acttagaagcttcacacaatcacgaccaatagtaggcgtggcgcgccagtcacgtcttggtcaagcacttctgttcccccggactgagtatcaatagactgctcacgcggttgaaggagaaaacgttcgttatccggctaactacttcgagaaacctagtagcaccgtgaaagttgcggagtgtttcgctcagcacttcccccgtgtagatcaggtcgatgagtcactgtaaaccccacgggcgaccgtgacagtggctgcgttggcggcctgcccatggggtaacccatgggacgctctaatacagacatggtgtgaagagtctattgagctagttagtagtcctccggcccctgaatgcggctaatcctaactgcggagcacgcaccctcaacccagggggcggcgtgtcgtaatgggtaactctgcagcggaaccgactactttgggtgtccgtgtttctttttattccttactggctgcttatggtgacaattgaaaagttgttaccatatagctattggattggccatccggtgtctaacagagctattgtttacctatttattggatacgtccctcttaatctcaaggctattcaaactcttaattatatattgctccttaactgtaagaa

SEQ ID NO: 19744 - DNA, 637 bp, synthetic construct
  source 1..637: mol_type = other DNA
acttagaagctttacacaatcacgaccagtagcgggcatggcgcaccagccacgtcttggtcaagcacttctgtatccccggactgagtatcaatagactgctcacgcggttgaaggagaaaacgttcgttatccggctaactacttcgagaaacctagtagcaccgtgaaagttgcggagtgtttcgctcagcacttcccccgtgtagatcaggtcgatgagtcactgtaaaccccacgggcgaccgtgacagtggctgcgttggcggcctgcccatggggtaacccatgggacgctctaatacagacacggtgtgaagagtctattgagctagttagtagtcctccggcccctgaatgcggctaatcctaactgcggagcacgcaccctcaacccagggggcggcgtgtcgtaatgggtaactctgcagcggaaccgactactttgggtgtccgtgtttccttttattccttattggctgcttatggtgacaattgaaaagttgttaccatatagctactggattggccatccggtgtctaacagagctattgtttacctatttattggatacgtccctcttaatctcaaggccattcaaactcttgattacatattgctccttaactgtaagaa

SEQ ID NO: 19745 - DNA, 636 bp, synthetic construct
  source 1..636: mol_type = other DNA
acttaaagcttcacacaatcacgaccaatagtaggcgtggcgcgccagtcacgtcttggtcaagcacttctgttcccccggactgagtatcaatagactgctcacgcggttgaaggagaaaacgttcgttatccggctaactacttcgagaaacctagtagcaccgtgaaagttgcggagtgtttcgctcagcacttcccccgtgtagatcaggtcgatgagtcactgtaaaccccacgggcgaccgtgacagtggctgcgttggcggcctgcccatggggtaacccatgggacgctctaatacagacatggtgtgaagagtctattgagctagttagtagtcctccggcccctgaatgcggctaatcctaactgcggagcacgcaccctcaacccagggggcggcgtgtcgtaatgggtaactctgcagcggaaccgactactttgggtgtccgtgtttccttttattccttactggctgcttatggtgacaattgaaaagttgttaccatatagctattggattggccatccggtgtctaatagagctattgtttacctatttattggatacgtccctcttaatctcaaggccattcaaactcttaagtatatatggctccttaactgtaagaa

SEQ ID NO: 19746 - DNA, 636 bp, synthetic construct
  source 1..636: mol_type = other DNA
acttagaagcttcacacaatcacgaccaatagtaggcgtggcgcgccagccacgtcttggtcaagcacttctgttccccggactgagtatcaatagactgctcacgcggttgaaggagaaaacgttcgttatccggctaactacttcgagaaacctagtagcaccgtgaaagttgcggagtgtttcgctcagcacttcccccgtgtagatcaggtcgatgagtcactgtaaaccccacgggcgaccgtgacagtggctgcgttggcggcctgcccatggggtaacccatgggacgctctaatacagacatggtgtgaagagtctattgagctagttagtagtcctccggcccctgaatgcggctaatcctaactgcggagcacgcaccctcaacccagggggcggcgtgtcgtaatgggtaactctgcagcggaaccgactactttgggtgtccgtgtttccttttattccttactggctgcttatggtgacaattgaaaagttgttaccatatagctattggattggccatccggtgtctaacagagctattgtttacctatttattggatacgtccctcttaatctcaaggccattcaaactcttaattatatattgctccttaactgtaagaa

SEQ ID NO: 19747 - DNA, 637 bp, synthetic construct
  source 1..637: mol_type = other DNA
acttagaagctttacacaatcacgaccagtagtgggcgtggcgcgccagccacgtcttggtcaagtacttctgtatccccggactgagtatcaatagactgctcacgcggttgaaggagaaaacgttcgttacccggctaactacttcgagaaacctagtagcaccgtgaaagttgcggagtgtttcgctcaacacttcccccgtgtagatcaggtcgatgagtcactgtaaaccccacgggcgaccgtgacagtggctgcgttggcggcctgcccatggggcaacccatgggacgctctaatacagacatggtgtgaagagtctattgagctagttagtagtcctccggcccctgaatgcggctaatcctaactgcggagcacgcaccctcaacccagggggcggcgtgtcgtaatgggtaactctgcagcggaaccgactactttgggtgtccgtgtttccttttattccttattggctgcttatggtgacaattgaaaagttgttaccatatagctattggattggccatccggtgtctaacagagctattgtttacctatttattggatacatccctctcaatctcaaggccattcaaactcttgattatatattgctccttaactgtaagaa

SEQ ID NO: 19748 - DNA, 616 bp, synthetic construct
  source 1..616: mol_type = other DNA
atcaatagcaggcataacgctccagttatgtcttgatcaagcacttctgtttccccggactgagtatcaatagactgctcgcgcggttgaaggagaaaacgttcgttacccggctaactacttcggaaaacctagtaacaccatgaaagttgcggagagcttcgttcagcacttccccagtgtagatcaggtcgatgagtcaccgctttccccacgggcgaccgtggcggtggctgcgttggcggcctgcccatggggtaacccatggggcgctctaatatggacatggtgcgaagagtctactgagctagttagtagtcctccggcccctgaatgcggctaatcccaactgcggagcacacgcccacaagccagcgggtagtgtgtcgtaacgggtaactctgcagcggaaccgactactttgggtgtccgtgtttccttttatctttatattggctgcttatggtgacaattaaagaattgttgccatatagctattggattggccatccggtgtgtaacagagcaattgtttacttattcattggttttgtaccattaaccttgaagtctgtggccactcttaattatatcttgaccctcaatacagcaagat

SEQ ID NO: 19749 - DNA, 616 bp, synthetic construct
  source 1..616: mol_type = other DNA
atcaatagcaggcataacattccagttatgtcttgatcaagcacttctgtttccccgggctgagtatcaatagactgctcacgcggttgaaggagaaaacgctcgttatccggctaactacttcggaaagcctagtaacaccatgaaggttgcggagagcttcgttcagcacttccccagtgtagatcaggtcgatgagtcaccgcattccccacgggcgaccgtggcggtggctgcgttggcggcctgcccatggggtaacccatggggcgctctaatacggacatggtgcgaagagtctactgagctagttagtagtcctccggcccctgaatgcggctaatcccaactgcggagcacacgcccacaagccagcgggtggtgtgtcgtaacgggcaactctgcagcggaaccgactactttgggtgtccgtgtttccttttatctttatactggctgcttatggtgacaattaaagagttgttaccatatagctattggattggccatccggtgtgtaacagagcaattgtttacctattcattggttttgtaccattaaccttgaagtctgtgaccacccttaattatatcttgaccctcaacacagtaaaac

SEQ ID NO: 19750 - DNA, 616 bp, synthetic construct
  source 1..616: mol_type = other DNA
atcaatagcaggcataacactccagttatgtctcgatcaagcacttctgtttccccggactgagtatcaatagactgctcacgcggttgaaggagaaaacgttcgttatccggctaactacttcggaaaacccagtaacaccatgaaagttgcggagagcttcgttcagcactttcccagtgtagatcaggtcgatgagtcaccgcattccccacgggcgaccgtggcggtggctgcgttggcggcctgcccatggggtaacccatggggcgctctaatacggacatggtgcgaagagtctactgagctagttagtagtcctccggcccctgaatgcggctaatcccaactgcggagcacacgcccacaagccagcgggtagtgtgtcgtaacgggtaactctgcagcggaaccgactactttgggtgtccgtgtttccttttatctttatattggctgcttatggtgacaattaaagaattgttgccatatagctattggattggccatccggtgtgtaacagagcaattgtttacttattcattggttttgtaccattaaccttgaagtctgtggccactcttaattatatcttgaccctcaatacagcaagat

SEQ ID NO: 19751 - DNA, 616 bp, synthetic construct
  source 1..616: mol_type = other DNA
atcaatagcaggcataacgctccagttatgtcttgatcaagcacttctgtttccccggaccgagtatcaatagactgctcacgcggttgaaggagaaaacgttcgttatccggctaactacttcggaaaacctagtagcaccatgaaagttgcggagagcttcgctcagcacttccccagtgtagatcaggtcgatgagtcaccgcattccccacgggtgaccgtggcggtggctgcgttggcggcctgcccacggggtaacccgtggggcgctctaatacggacatggtgcgaagagtctactgagctagttagtagtcctccggcccctgaatgcggctaatcccaactgcggagcacacacccacaagccagtgggtagtgtgtcgtaacgggcaactctgcagcggaaccgactactttgggtgtccgtgtttccttttatctttatattggctgcttatggtgacaattaaagagttgttaccatatagctattggattggccatccggtgtgtaacagagcaattgtttacctatttattggttttgtaccattaaccttgaagtctgtgatcacccttaattatattttgaccctcaacacagcaaaac

SEQ ID NO: 19752 - DNA, 616 bp, synthetic construct
  source 1..616: mol_type = other DNA
atcaatagcaggcataacgctccagttatgtctcgatcaagcacttctgtttccccggactgagtatcaatagactgcttacgcggttgaaggagaaaacgttcgttatccggctaactacttcggaaaacctagtaacaccatagaagttgcggggagcttcgttcagcacttccccagtgtagatcaggtcgatgagtcaccgcattccccacgggcgaccgtggcggtggctgcgttggcggcctgcccatggggtaacccgtggggcgctctaatacggacatggtgcgaagagtctactgagctagttagtagtcctccggcccctgaatgcggctaatcctaactgcggagcacacgcccacaatccagcgggtagtgtgtcgtaacgggcaactctgcagcggaaccgactactttgggtgtccgtgtttccttttatttttgtattggctgcttatggtgacaattaaagagttgttaccatattgctattggattggccatccggtgtgtaacagagcaattgtctacttatttattggttttgtaccaataactttgaagtctgtgaccactctcaattatatcttgaccctcaatacagtcaaac

SEQ ID NO: 19753 - DNA, 616 bp, synthetic construct
  source 1..616: mol_type = other DNA
atcaatagcaggcataacactccagttatgtcttgatcaagcactcctgtttccccggactgagtatcaatagactgctcacgcggttgaaggagaaaacgttcgttatccggctaactacttcggaaaacctagtagcaccatgaaagttgcggagggcttcgttcagcacttccccagtgtagatcaggtcgatgagtcaccgcattccccacgggcgaccgtggcggtggctgcgttggcggcctgcccatggggtgacccatggggcgctctaatacggacatggtgcgaagagtctactgagctagttagtagtcctccggcccctgaatgcggctaatcccaactgcggagcacacgcccaaaagccagtgggtagtgtgtcgtaacgggcaactctgcagcggaaccgactactttgggtgtccgtgtttccttttatctttacattggctgcatatggtgacaattgaagagttgttaccatattgctattggattggccatccggtgtgtaacagagcaattgtttacctgtttattggctttgtaccattaaccttgaagtctgtgaccaccctcaattatatcttgaccctcaacgcagtgaaac

SEQ ID NO: 19754 - DNA, 616 bp, synthetic construct
  source 1..616: mol_type = other DNA
atcaatagcaggcataacactccagttatgtctcgatcaagcacttctgtttccccggactgagtatcaatagactgctcacgcggttgaaggagaaaacgttcgttatccggctaactacttcggaaaacccagtaacaccatgaaagttgcggagagcttcgttcagcactttcccagtgtagatcaggtcgatgagtcaccgcattccccacgggcgaccgtggcggtggctgcgttggcggcctgcccatggggtaacccatggggcgctctaatacggacatggtgcgaagagtctactgagctagttagtagtcctccggcccctgaatgcggctaatcccaactgcggagcacacgcccacaagccagcgggtagtgtgtcgtaacgggtaactctgcagcggaaccgactactttgggtgtccgtgtttccttttatctttatattggctgcttatggtgacaatcaaagagttgttaccatatagctattggattggccatccggtgtgcaacagagcaattgtttacctatttattggttttgtaccattaaccttgaagtctgtgaccacccttaattatatcctgaccctcaacacagctaaac

SEQ ID NO: 19755 - DNA, 616 bp, synthetic construct
  source 1..616: mol_type = other DNA
atcaatagcaggcataacactccagttatgtctcgatcaagcacttctgtttccccggactgagtatcaatagactgctcacgcggttgaaggagaaaacgttcgttatccggctaactacttcggaaaacccagtaacaccatgaaagttgcggagagcttcgttcagcactttcccagtgtagatcaggtcgatgagtcaccgcattccccacgggcgaccgtggcggtggctgcgttggcggcctgcccatggggtaacccatggggcgctctaatacggacatggtgcgaagagtctactgagctagttagtagtcctccggcccctgaatgcggctaatcccaactgcggagcacacgcccacaagccagcgggtagtgtgtcgtaacgggcaactctgcagcggaaccgactactttgggtgtccgtgtttccttttatctttatactggctgcttatggtgacaattaaagagttgttgccatatagctattggattggccatccggtgtgtaacagagcgattgtttacttattcattggttttgtaccattaaccttgaagtctgtgaccactctcaattatatcttgaccctcaatacagcaaaac

SEQ ID NO: 19756 - DNA, 616 bp, synthetic construct
  source 1..616: mol_type = other DNA
atcaatagcaggcataacgctccagttatgtcttgatcaagcacttctgtttccccggactgagtatcaatagactgctcgcgcggttgaaggagaaaacgttcgttacccggctaactacttcggaaaacctagtaacaccatgaaagttgcggagagcttcgttcagcacttccccagtgtagatcaggtcgatgagtcaccgctttccccacgggcgaccgtggcggtggctgcgttggcggcctgcccatggggtaacccatggggcgctctaatacggacatggtgcgaagagtctactgagctagttagtagtcctccggcccctgaatgcggctaatcccaactgcggagcacacgcccacaagccagcgggtagtgtgtcgtaacgggcaactctgcagcggaaccgactactttgggtgtccgtgtttccttttatctttatactggctgcttatggtgacaattaaagagttgttaccatatagctattggattggccatccggtgtgtaacagagcaattgtttacctattcattggttttgtaccattaaccttgaagtctgtgaccacccttaattatattttgaccctcaacacagcaaaat

SEQ ID NO: 19757 - DNA, 616 bp, synthetic construct
  source 1..616: mol_type = other DNA
atcaatagcaggcataacactccagttatgtctcgatcaagcacttctgtttccccggactgagtatcaatagactgctcacgcggttgagggagaaaacgttcgttatccggctaactacttcggaaaacccagtaacaccatgaaagttgcggagagcttcgttcagcactcccccagtgtagatcaggtcgatgagtcaccgcattccccacgggcgaccgtggcggtggctgcgttggcggcctgcccatggggtaacccatggggcgctctaatacggacatggtgcgaagagtctactgagctagttagtagtcctccggcccctgaatgcggctaatcccaactgcggagcacacgcccacaagccagcgggtagtgtgtcgtaacgggcaactctgcagcggaaccgactactttgggtgtccgtgtttccttttatctttatattggctgcttatggtgacaattaaagagttgttaccatatagctattggattggccatccggtgtgtaacagagcaattatttacctatttattggttacgtgccactaactttgaagtctgtgaccacccttaattatattttgattcttaacacagcaagac

SEQ ID NO: 19758 - DNA, 616 bp, synthetic construct
  source 1..616: mol_type = other DNA
atcaatagcaggcatgacgcaccagtcatgtctcgatcaagcacttctgtttccccggactgagtatcaatagactgctcgcgcggttgaaggagaaaacgttcgttatccggctaactacttcggaaaacctagtaacaccatgaaagttgcggagagcttcgttcagcacttccccagtgtagatcaggtcgatgagtcaccgcattccccacgggcgaccgtggcggtggctgcgttggcggcctgcccatgaggtaactcatggggcgctctaatacagacatggtgcgaagagtctactgagctagttagtagtcctccggcccctgaatgcggctaatcctaactgcggagcacatgcccacaagccagcgggtagtgtgtcgtaacgggcaactctgcagcggaaccgactactttgggtgtccgtgtttccttttatctttatattggctgcttatggtgacaattaaagaattgttgccatatagctattggattggccatccggtgtgtaacagagcaattgtttacttattcattggttttgtaccattaaccttgaagtctgtggccactcttaattatatcttgaccctcaatacagcaagat

SEQ ID NO: 19759 - DNA, 616 bp, synthetic construct
  source 1..616: mol_type = other DNA
atcaatagcaggcatgacgcaccagtcatgtctcgatcaagcacttctgtttccccggactgagtatcaatagactgctcgcgcggttgaaggagaaaacgttcgttatccggctaactacttcggaaaacctagtaacaccatgaaagttgcggagagcttcgttcagcacttccccagtgtagatcaggtcgatgagtcaccgcattccccacgggcgaccgtggcggtggctgcgttggcggcctgcccatgaggtaactcatggggcgctctaatacggacatggtgcgaagagtctactgagctagttagtagtcctccggcccctgaatgcggctaatcctaactgcggagcacatgcccacaagccagcgggtagtgtgtcgtaacgggcaactctgcagcggaaccgactactttgggtgtccgtgtttccttttatctttatattggctgcttatggtgacaattaaagagttgttaccatatagctattggattggccatccggtgtgtaacagagcaattatctacctatttattggttacgtgccactaactttgaagtctgtgaccacccttaattatattttgattcttaacacagcaagac

SEQ ID NO: 19760 - DNA, 616 bp, synthetic construct
  source 1..616: mol_type = other DNA
atcaatagcaggcatgacgcaccagtcatgtctcgatcaagcacttctgtttccccggactgagtatcaatagactgctcgcgcggttgaaggagaaaacgttcgttatccggctaactacttcggaaaacctagtaacaccatgaaagttgcggagagcttcgttcagcacttccccagtgtagatcaggtcgatgagtcaccgcattccccacgggcgaccgtggcggtggctgcgttggcggcctgcccatgaggtaactcatggggcgctctaatacggacatggtgcgaagagtctactgagctagttagtagtcctccggcccctgaatgcggctaatcctaactgcggagcacatgcccacaagccagcgggtagtgtgtcgtaacgggcaactctgcagcggaaccgactactttgggtgtccgtgtttccttttatctttatattggctgcttatggtgacaattaaagagttgttaccatatagctattggattggccatccggtgtgtaacagagcaattatttacctatttattggttacgtgccactaactttgaagtctgtgaccacccttaattatattttgattcttaacacagcaagac

SEQ ID NO: 19761 - DNA, 616 bp, synthetic construct
  source 1..616: mol_type = other DNA
atcaatagcaggcataacactccagttatgtctcgatcaagcacttctgtttccccggactgagtatcaataaacggctcacgcggttgaaggaaaaaacgttcgttatccggctaactacttcggaaaacccagtaacaccatgaaagttgcggaaagcttcgttcagcacttccccagtgtaaatcaggtcaatgagtccccgcattccccacgggcgaccgtggcggtggctgcgttggcggcctgcccatggggtaacccatggggcgctctaatacggacatggggcgaaaagtctactgagctagttagtagtcctccggcccctgaatgcggctaatcccaactgcggagcacacgcccacaagccagcgggtggtgtgtcgtaacgggtaactctgcagcggaaccgactactttgggtgtccgtgtttccttttatctttacattggctgcttatggtgacaattaaagaattgttgccatatagctattggattggccatccggtgtgtaacagagcgattgtttacttattcattggttttgtaccattaaccttgaagtctgtgaccactcttaattatatcttgaccctcaatacagcaaaac

SEQ ID NO: 19762 - DNA, 616 bp, synthetic construct
  source 1..616: mol_type = other DNA
atcaatagcaggcataacgctccagttatgtcttgatcaagcacttctgtttccccggaccgagtatcaatagactgctcgcgcggttgaaggagaaaacgttcgttatccggctaactacttcgggaaacctagtagcatcatgaaagttgcggagagcttcgttcagcacttccccagtgtagatcaggtcgatgagtcaccgcattccccacgggcgaccgtggcggtggctgcgttggcggcctgcccatggggtaacccatggggcgctctaatacggacatggtgcgaagagtctactgagctagttagtagtcctccggcccctgaatgcggctaatcccaactgcggagcacacgcccacaagccagcgggtagtgtgtcgtaacgggcaactctgcagcggaaccgactactttgggtgtccgtgtttccttttatctttatattggctgcttatggtgacaattaaagagttgttaccatatagctattggattggccatccggtgtgcaacagagcaattgtttacctatttattggttttgtaccattaaccttgaagtctgtgatcacccttaattatatcttgaccctcaacacaactaaac

SEQ ID NO: 19763 - DNA, 616 bp, synthetic construct
  source 1..616: mol_type = other DNA
atcaatagcaggcataccgctccagttatgtcttgatcaagcacttctgtttccccggaccgagtatcaatagactgctcgcgcggttgaaggaaaaaacgttcgttatccggctaactacttcgggaaacctagtaacaccatgaaagttgcggaaagcttcgttcagcacttccccagtgtagatcaggtcgatgagtcaccgcattccccacgggcgaccgtggcggtggctgcgttggcggcctgcccatggggtaacccatggggcgctctaatacggacatggtgcgaagagtctactgagctagttagtagtcctccggcccctgaatgcggctaatcccaactgcggagcacacgcccacaaaccagcgggtagtgtgtcgtaacgggcaactctgcagcggaaccgactactttgggtgtccgtgtttccttttatctatatattggctgcttatggtgacaattgaagagttgttaccatatagctattggattggccatccggtgtgcaacagagcaattgtttacctatttattggttttgtaccattaaccttgaagtctgtgaccacccttaattatattttgaccctcaacacagctaaac

SEQ ID NO: 19764 - DNA, 616 bp, synthetic construct
  source 1..616: mol_type = other DNA
acgaccagtagtgggcgtggcgcgccagtcacgtcttggtcaagcacttctgttcccccggactgagtaccaatagactgctcacgcggttgaaggagaaaacgttcgttatccggctaactacttcgagaaacctagtagcaccgtgaaagttgcggagtgtttcgctcagcacttcccccgtgtagatcaggtcgatgagtcactgtaaaccccacgggcgaccgtgacagtggctgcgttggcggcctgcccatggggtaacccgtgggacgctctaatacagacacggtgtgaagagtctattgagctagttagtagtcctccggcccctgaatgcggctaatcctaactgcggagcgcgcaccctcaatccagggggcggcgcgtcgtaatgggtaactctgcagcggaaccgactactttgggtgtccgtgtttccttttattccttattggctgcttatggtgacaattgaaaggttgttgccatatagctattggattggccatccggtgaccaacagagctattatttacctgtttattggatacgtccctcttaatctcaaggccattcaaactcttgattatatattactccttaactgtaagaa

SEQ ID NO: 19765 - DNA, 563 bp, synthetic construct
  source 1..563: mol_type = other DNA
tccccggactgagtatcaatagactgcttacgcggttgaaggagaaaacgttcgttacccggctaactacttcgagaaacttagtaacaccatcgaagctgcagggtgtttcgctcagcacttcccccgtgtagatcaggccgatgagtcaccgcaatccccacgggcgaccgtggcggtggctgcgttggcggcctgcctatggggcaacccataggacgccctaaagtggacatggtgcgaagagtctattgagctagttagtagtcctccggcccctgaatgcggctaatcctaactgcggagcacacaccctcaagccagagggtggtgtgtcgtaacgggtaactctgcagcggaaccgactactttgggtgtccgtgtttccttttattctcactgtggctgcttatggtgacaattcaagaattgttaccatatagctattggattggccatccggtgtctaacagagctattgtgtacttatttgttgggtacgttccattatcttacacatcccttaacacattacattttattgtgaagctaaatacaagaag

SEQ ID NO: 19766 - DNA, 616 bp, synthetic construct
  source 1..616: mol_type = other DNA
cgaccaatagtaggcgtggcgcgccagtcacgtcttggtcaagcacttctgttcccccggactgagtatcaatagactgctcacgcggttgaaggagaaaacgttcgttatcccggctaactacttcgagaaacctagtagcaccgtgaaagttgcggagtgtttcgctcagcacttcccccgtgtagatcaggtcgatgagtcactgtaaaccccacgggcgaccgtgacagtggctgcgttggcggcctgcccatggggtaacccatgggacgctctaatacagacatggtgtgaagagtctattgagctagttagtagtcctccggcccctgaatgcggctaatcctaactgcggagcacgcaccctcaacccagggggcggcgtgtcgtaatgggtaactctgcagcggaaccgactactttgggtgtccgtgtttccttttattccttactggctgcttatggtgacaattgaaaagttgttaccatatagctattggattggccatccggtgtctaacagagctattgtttacctatttattggatacgtccctcttaatctcaaggccattcaaactcttaattatatattgctccttaactgtaagaa

SEQ ID NO: 19767 - DNA, 615 bp, synthetic construct
  source 1..615: mol_type = other DNA
cgaccaatagtaggcgtggcgcgccagtcacgtcttggtcaagcacttctgttcccccggactgagtatcaatagactgctcacgcggttgaaggagaaaacgttcgttatccggctaactacttcgagaaacctagtagcaccgtgaaagttgcggagtgtttcgctcagcacttcccccgtgtagatcaggtcgatgagtcactgtaaaccccacgggcgaccgtgacagtggctgcgttggcggcctgcccatgggataacccatgggacgctctaatacagacatggtgtgaagagtctattgagctagttagtagtcctccggcccctgaatgcggctaatcctaactgcggagcacgcaccctcaacccagggggcggcgtgtcgtaatgggtaactctgcagcggaaccgactactttgggtgtccgtgtttccttttattccttactggctgcttatggtgacaattgaaaagttgttaccatatagctattggattggccatccggtgtctaacagagctattgtttacttatttattggatacgtccctcttaatctcaaggccattcaaactcttaattatatattgctccttaactgtaagaa

SEQ ID NO: 19768 - DNA, 615 bp, synthetic construct
  source 1..615: mol_type = other DNA
cgaccaatagtaggcgtggcgcgccagtcacgtcttggtcaagcacttctgttcccccggactgagtatcaatagactgctcacgcggttgaaggagaaaacgttcgttatccggctaactacttcgagaaacctagtagcaccgtgaaagttgcggagtgtttcgctcagcacttcccccgtgtagatcaggtcgatgagtcactgtaaaccccacgggcgaccgtgacagtggctgcgttggcggcctgcccatggggtaacccatgggacgctctaatacagacatggtgtgaagagtctattgagctagttagtagtcctccggcccctgaatgcggctaatcctaactgcggagcacgcaccctcaacccagggggcggcgtgtcgtaatgggtaactctgcagcggaaccgactactttgggtgtccgtgtttccttttattccttactggctgcttatggtgacaattgaaaagttgttaccatatagctattggattggccatccggtgtctaacagagctattgtttacttatttattggatacgtccctcttaatctcaaggccattcaaactcttaattatatattgctccttaactgtaagaa

SEQ ID NO: 19769 - DNA, 615 bp, synthetic construct
  source 1..615: mol_type = other DNA
cgaccaatagtaggcgtggcgcgccagtcacgtcttggtcaggcacttctgttcccccggactgagtatcaatagactgctcacgcggttgaaggagaaaacgttcgttatccggctaactacttcgagaaacctagtagcaccatgaaagttgcggagtgtttcgctcagcacttcccccgtgtagatcaggtcgatgagtcactgtaaaccccacgggcgaccgtgacagtggctgcgttggcggcctgcccatggggtaacccatgggacgctctaatacagacatggtgtgaagagtctattgagctagttagtagtcctccggcccctgaatgcggctaatcctaactgcggagcacgcaccctcaacccagggggcggcgtgtcgtaatgggtaactctgcagcggaaccgactactttgggtgtccgtgtttctttttattccttactggctgcttatggtgacaattgaaaagttgttaccatatagctattggattggccatccggtgtctaacagagctattgtttacctatttattggatacgtccctcttaatctcaaggctactcaaactcttaattatatattgctccttaactgtaagaa

SEQ ID NO: 19770 - DNA, 615 bp, synthetic construct
  source 1..615: mol_type = other DNA
cgaccaatagtaggcgtggcgcgccagtcacgtcttggtcaagcacttctgttcccccggactgagtatcaatagactgctcacgcggttgaaggagaaaacgttcgttatccggctaactacttcgagaaacctagtagcaccgtgaaagttgcagagtgtttcgctcagcacttcccccgtgtagatcaggtcgatgagtcactgtaaaccccacgggcgaccgtgacagtggctgcgttggcggcctgcccatggggtaacccatgggacgctctaatacagacatggtgtgaagagtctattgagctagttagtagtcctccggcccctgaatgcggctaatcctaactgcggagcacgcaccctcaacccagggggcggcgtgtcgtaatgggtaactctgcagcggaaccgactactttgggtgtccgtgtttctttttattccttactggctgcttatggtgacaattgaaaagttgttaccatatagctattggattggccatccggtgtctaacagagctattgtttacctatttattggatacgtccctcttaatctcaaggccattcaaactcttaattatatattgctccttaactgtaagaa

SEQ ID NO: 19771 - DNA, 615 bp, synthetic construct
  source 1..615: mol_type = other DNA
cgaccagtagtgggcgtggcgcgccagccacgtcttggtcaagcacttctgtatccccggactgagtatcaatagactgctcacgcggttgaaggagaaaacgttcgttacccgactaactacttcgagaaacctagtagcaccgtgaaagttgcggagtgtttcgctcagcacttcccccgtgtagatcaggtcgatgagtcactgtaaaccccacgggcgaccgtgacagtggctgcgttggcggcctgcccatggggcaacccgtgggacgctctgatacagacatggtgtgaagagtctattgagctagttagtagtcctccggcccctgaatgcggctaatcctaactgcggagcacgcaccctcaacccagggggcggcgtgtcgtaatgggtaactctgcagcggaaccgactactttgggtgtccgtgtttccttttattccttactggctgcttatggtgacaattgaagagttgttaccatatagctattggattggccatccggtgtctaacagagctattgtttatctatttattggatacatccctcttaatctcaagtccattcaaactcttgattatatattgctccttaactgtaagaa

SEQ ID NO: 19772 - DNA, 615 bp, synthetic construct
  source 1..615: mol_type = other DNA
cgaccagtagtgggcgtggcgcgccagtcacgtcttgatcaaacacttctgtatccccggactgagtatcaatagactgctcacgcggttgaaggagaaaacgttcgttatccggctaactacttcgagaaacctagtagcaccgtgaaagttgcggagtgtttcgctcagcacttcccccgtgtagatcaggtcgatgagtcactgtaaaccccacgggcgaccgtgacagtggctgcgttggcggcctgcccatggggtaacccatgggacgctctaatacagacatggtgtgaagagtctattgagctagttagtagtcctccggcccctgaatgcggctaatcctaactgcggagcacgcaccctcaacccagggggcggcgtgtcgtaatgggtaactctgcagcggaaccgactactttgggtgtccgtgtttccttttattccttattggctgcttatggtgacaattgaaaagttgttaccatatagctattggattggccatccggtgtctaacagagctattatttacctatttattggatacgtccctcttgatttcaaggccattcaaactcttgattatatattgctccttaactgcaagaa

SEQ ID NO: 19773 - DNA, 615 bp, synthetic construct
  source 1..615: mol_type = other DNA
cgaccaatagtgggcgtgacgcaccagtcacgtcttggtcaagcacttctgtctccccggaccgagtatcaatagactgcttacgcggttgaaggagaaaacgttcgttacccggctaactacttcgagaaacctagtagcaccatgaaagttgcagagtgtttcgctcagcacttcccccgtgtagatcaggtcgatgagccactgtaaaccccacgggcgaccgtgacagtggctgcgttggcggcctgcccatggggcaacccgtgggacgctctaatacagacatggcgtgaagagtctattgagctagttagtaatcctccggcccctgaatgcggctaatcctaactgcggagcacgcaccctcaatccagggggtagtgtgtcgtaacgggtaactctgcagcggaaccgactactttgggtgtccgtgtttccttttattccttactggctgcttatggtgacaatcaaagagttgttaccatatagctattggattggccatccggtgtccaacagagctattgtctacctgttcattggatacgtccctctcaattacaagactttccaaactcttaactacatactgctactcaatcataagaa

SEQ ID NO: 19774 - DNA, 615 bp, synthetic construct
  source 1..615: mol_type = other DNA
cgaccaatagtgggcgtgacgcaccagtcacgtcttggtcaagcacttctgtttccccggaccgagtatcaataaactgcttacgcggttgaaggagaaagcgttcgttacccggctaactacttcaagaaacctagtagcaccatgaaagtcgcagagtgtttcgctcagcacttcccccgtgtagatcaggtcgatgagccactgtgaaccccacgggcgaccgtgacagtggctgcgttggcggcctgcccatggggcaacccgtgggacgctctaatacagacatggtgtgaagagtctattgagctagttagtaatcctccggcccctgaatgcggctaatcctaactgcggagcacgcaccctcaatccagggggcggtgtgtcgtaacgggtaactctgcagcggaaccgactactttgggtgtccgtgtttccttttataccttactggctgcttatggtgacaatcaaagagttgttaccatatagctattggattggccatccggtgtctaacagagctattgtctacctgttcattggatacgtccctctcaattacaagactttccaaactcttaactacatactgctacttaatcataagaa

SEQ ID NO: 19775 - DNA, 614 bp, synthetic construct
  source 1..614: mol_type = other DNA
cgaccaatagtgggcgtgacgcaccagtcacgtcttggtcaagcacttctgtttcccggaccgagtatcaatagactgcttacgcggttgaaggagaaaacgttcgttacccggctaactacttcgagaaacctagtagcaccgtgaaagttgcagagtgtttcgctcagcacttcccccgtgtagatcaggtcgatgagccactgtaaaccccacgggcgaccgtgacagtggctgcgttggcggcctgcccatggggcaacccgtgggacgctctaatacagacatggtgtgaagagtctattgagctagttagtaatcctccggcccctgaatgcggctaatcctaactgcggagcacgcacccccaatccagggggcagtgtgtcgtaacgggtaactctgcagcggaaccgactactttgggtgtccgtgtttccttttattccttactggctgcttatggtgacaatcaaagagttgttaccatatagctattggattggccatccggtgtctaacagagctattgtctacctgttcattggatacgtccctctcaattacaagactttccgaactcttaactacatactgctactcaatcacaagaa

SEQ ID NO: 19776 - DNA, 614 bp, synthetic construct
  source 1..614: mol_type = other DNA
cgaccaatagtaggcgtggcgcgccagtcacgtctcggtcaagcacttctgttccccggactgagtatcaatagactgcttacgcggttgaaggagaaaacgttcgttatccggctaactacttcgagaaacctagtagcaccgtgaaagttgcggagcgtttcgctcagcacttcccccgtgtagatcaggccgatgagtcactgtaaaccccacgggcgaccgtgacagtggctgcgttggcggcctgcccatggggtaacccatgggacgctctaatacagacatggtgtgaagagtctattgagctagttagtagtcctccggcccctgaatgcggctaatcctaactgcggagcacgcaccctcaacccagggggcggcgtgtcgtaatgggtaactctgcagcggaaccgactactttgggtgtccgtgtttccttttattccttactggctgcttatggtgacaattgaaaagttgttaccatatagctattggattggccatccggtgtctaacagagctattgtttacctatttactggatacgtccctcttaatctcaaggccattcaaactcttaattatatattgctccttaattgtaagaa

SEQ ID NO: 19777 - DNA, 614 bp, synthetic construct
  source 1..614: mol_type = other DNA
cgaccaatagtaggcgtggcgcgccagtcacgtctcggtcaagcacttctgttccccggactgagtatcaatagactgcttacgcggttgaaggagaaaacgttcgttatccggctaactacttcgagaaacctagtagcaccgtgaaagttgcggagtgtttcgctcagcacttcccccgtgtagatcaggtcgatgagtcactgtaaaccccacgggcgaccgtgacagtggctgcgttggcggcctgcccatggggtaacccatgggacgctctaatacagacatggtgtgaagagtctattgagctagttagtagtcctccggcccctgaatgcggctaatcctaactgcggagcacgcaccctcaacccagggggcggcgtgtcgtaatgggtaactctgcagcggaaccgactactttgggtgtccgtgtttccttttattccttactggctgcttatggtgacaattgaaaagttgttaccatatagctattggattggccatccggtgtctaacagagctattgtttacctatttactggatacgtccctcttaatctcaaggccattcaaactcttaattatatattgctccttaactgtaagaa

SEQ ID NO: 19778 - DNA, 614 bp, synthetic construct
  source 1..614: mol_type = other DNA
cgaccaatagtaggcgtggcgcgccagtcacgtctcggtcaagcacttctgttccccggactgagtatcaatagactgcttacgcggttgaaggagaaaacgttcgttatccggctaactacttcgagaaacctagtagcaccgtgaaagttgcggagtgtttcgctcagcacttcccccgtgtagatcaggtcgatgagtcactgtaaaccccacgggcgaccgtgacagtggctgcgttggcggcctgcccatggggtaacccatgggacgctctaatacagacatggtgtgaagagtctattgagctagttagtagtcctccggcccctgaatgcggctaatcctaactgcggagcacgcaccctcaacccagggggcggcgtgtcgtaatgggtaactctgcagcggaaccgactactttgggtgtccgtgtttccttttattccttactggctgcttatggtgacaattgaaaagttgttaccatatagctattggattggccatccggtgtctaacagagctattgtttacctatttactggatacgtccctcttaatctcaaggccattcaaactcttaattgtatattgctccttaactgtaagaa

SEQ ID NO: 19779 - DNA, 391 bp, synthetic construct
  source 1..391: mol_type = other DNA
gtggcggtggctgcgttggcggcctgcctatggggcaacccataggacgccctaaagtggacatggtgcgaagagtctattgagctagttagtagtcctccggcccctgaatgcggctaatcctaactgcggagcacataccctcaagccagagggtggtgtgtcgtaacgggtaactctgcagcggaaccgactactttgggtgtccgtgtttccttttattcttactgtggctgcttatggtgacaattcaagaattgttaccatatagctattggattggccatccagtgtctaacagagctattgtgtacttatttgttgggtacgttccattatcttacacatcccttgacacattacattttattgtgaagctaaatacaagaag

SEQ ID NO: 19780 - DNA, 391 bp, synthetic construct
  source 1..391: mol_type = other DNA
gtggcggtggctgcgttggcggcctgcctatggggcaacccataggacgccctaaagtggacatggtgcgaagagtctattgagctagttagtagtcctccggcccctgaatgcggctaatcctaactgcggagcacataccctcaagccagagggtggtgtgtcgtaacgggtaactctgcagcggaaccgactactttgggtgtccgtgtttccttttattcttactgtggctgcttatggtgacaattcaagaattgttaccatatagctattggattggccatccggtgtctaacagagctattgtgtacttatttgtcgggtacgttccattatcttacacatcccttaacacattacattttattgtgaagctaaatacaagaag

SEQ ID NO: 19781 - DNA, 292 bp, synthetic construct
  source 1..292: mol_type = other DNA
ccggcccctgaatgcggctaatcctaactgcggagcacgcgccctcaatccagtgggtagtgtgtcgtaatgggcaactctgcagcggaaccgactactttgggtgtccgtgtttccatttattcttatattggctgcttatggtgacaattgaaagattgttaccatatagctattggattggccatccggtatcgaatagagcagttatctatcagtttgttggattcatcccgttgagtgtgcagcagtatcgcactttgcttttaatagtgagactgaatagtacaaa

SEQ ID NO: 19782 - DNA, 813 bp, synthetic construct
  source 1..813: mol_type = other DNA
ttaaaacagcctgtgggttgttcccacccacagggcccactgggcgctagtacactggtatgccagcaccttggtatcacggtaccattgtgcgtcagtacctttgtacgcctgttttatattcccttccccatatgtaaccttagaagtttaagtaaacaaagaccaataggagtccaacatccagttggatcgcggtcaagcacttctgtttccccggacctagtagtgataggctgtacccacggccgaagatgaacccgtccgttatccggccagctacttcgagaagcctagtagcatcaaagatctgtcttggcgtttcgctcagcgcgttccccccgcgtagatcgggctgatgggtctccgcataccccacgggcgaccgtggcggaggccgcgtggcggcccgcctatggcgaaagccataggacgccatttcagtgacagggtgtgaagagcctattgagctagttggtagtcctccggcccctgaatgcggctaatcctaaccacggagcgtccaccagcaaaccagctgggagggcgtcgtaacgggtaactctgtggcggaaccgactactttgggtgtccgtgtttccttttgatcctatattggctgcttatggtgacaacgataagttgttatcataaagcttttgggttggccacctggaaaaagttatcagtgtttgatattgttcggctttcacgcctaccaataaaacaagctttatatttgttaatttcattttatccatccaaggatatcactgaatttcatttacaactcttgcttacactgtcaacaag

SEQ ID NO: 19783 - DNA, 842 bp, synthetic construct
  source 1..842: mol_type = other DNA
tttgtcgacggtacctaatacgactcactatattaaaacagcctgtgggttgtacccacccacagggcccactgggcgctagtacactggtatgatagtaccatggtattacggtaccatggtatgccagtacctttgtacgcctgttttatactccctccccatgtaactttagaagtctaagcaaacaaagaccaatagaagtccaacatccagttggattgcggtcaagcacttctgtttccccggacctagtagtgataggctgtacccacggccgaagatgaacccgtccgttatccggccagctacttcgagaagcctagtagcatcaaagatctgtcttggcgtttcgctcagcgcgttccccccgcgtagatcgggctgatgggtctccgcattccccacgggcgaccgtggcggaggccgcgtggcggcccgcctatggcgaaagccataggacgccatttcagtgacagggtgtgaagagcctattgagctagttggtagtcctccggcccctgaatgcggctaatcctaaccacggagcgtccaccagcaaaccagctggcagggcgtcgtaacgggtaactctgtggcggaaccgactactttgggtgtccgtgtttccttttgatcctattgtggctgcttatggtgacaacttacagttgttatcataaagcttttggattggccatccggaaagagttaacagtttgttcgctcgctgctttatcaaaacttccattgaggaaagcattttacttgttaattgcattttataaacttgaccagatatcaagtgcacacttagagttgctaatacaattacatcaaac

SEQ ID NO: 19784 - DNA, 813 bp, synthetic construct
  source 1..813: mol_type = other DNA
tttaaaacagcctgtgggttgttcccactcacagggcccattgggcgccagtactctggtatgtcagtactctggtatcacggtaccaccgtacgccagtacctttgtacgcctgttttatatccccttcccaaatgtaactttagaagcacaactaagtaaagaccaataggagtccaacatccagttggattacggtcaagcacttctgtttccccggacctagtagtgataggctgtacccacggccgaagatgaacccgtccgttatccggccagctacttcgagaagcctagtaacaccaaagatctgtcttggcgtttcgctcagcgcgttccccccgcgtagatcgggctgatgggtctccgcataccccacgggcgaccgtggcggaggccgcgtggcggcccgcctatggcgaaagccataggacgccatttcagtgacagggtgtgaagagcctattgagctagttggtagtcctccggcccctgaatgcggctaatcctaaccacggagcactcgccaacaaaccagttggtagggtgtcgtaacgggtaactctgtggcggaaccgactactttgggtgtccgtgtttccttttgatcctatgttggctgcttatggtgacaacgataagttgttatcataaagcttttgggttggccacctggaaaaagttatcagtgtttgatattgttcggctttcacgcctaccaacaaaacaagctttatattacttgatttccttttatccaaaagaggaaatttttgaatttcatcttcaattgctcctgtcgttaacagcaaa

SEQ ID NO: 19785 - DNA, 815 bp, synthetic construct
  source 1..815: mol_type = other DNA
gggtgtgtttggcttatttgggttgatcccacccaaagggcccactgggcgccagtacactggtacgacagtaccttggtatcacggtaccattgtacgccagtacctttgtacgcctgttttatatcccttccccacatgtaaccttagaagtttaatgaacaagaccaataggagtccaacatccagttggattgcggtcaagcacttctgtttccccggacctagtagtgataggctgtacccacggccgaagatgaacccgtccgttatccggccagctacttcgagaagcctagtaacatcaaagatctgtcttggcgtttcgctcagcgcgttccccccgcgtagatcgggctgatgggtctccgcataccccacgggcgaccgtggcggaggccgcgtggcggcctgcctatggcgaaagccataggacgccatttcagtgacagggtgtgaagagcctattgagctagttggtagtcctccggcccctgaatgcggctaatcctaaccacggagcatccaccagcaatccagctgggagggtgtcgtaacgggtaactctgtggcggaaccgactactttgggtgtccgtgtttccttttgatcctattttggctgcttatggtgacaacgataagttgttatcataaagcttttgggttggccacctggaaaaagttatcagtgtttgatattgttcggctttcacgcctaccaataaaacaatccttatattacttaatttccttttatccaaaggaggaaattactgaatttcacctccagttactcctaacattatcatcaaa

SEQ ID NO: 19786 - DNA, 813 bp, synthetic construct
  source 1..813: mol_type = other DNA
ttaaaacagcctgtgggttgttcccacccacagggcccactgggcgccagtacactggtatgtcagtacctcggtaccacggtaccgttgtacgccagtacctttgtacgcctgttttatattccctcccccaaatgtaactttagaagcttaagtaaccaaagaccaataggagtccaacatccagttggattgcggtcaagcacttctgtttccccggacctagtagtgataggctgtacccacggccgaagatgaacccgtccgttatccggccagctacttcgagaagcctagtagcatcaaagatctgtcttggcgtttcgctcagcgcgttccccccgcgtagatcgggtcgatgggtctccgcataccccacgggcgaccgtggcggaggccgcgtggcggcccgcctatggcgaaagccataggacgccatttcagtgacagggtgtgaagagcctattgagctagttggtagtcctccggcccctgaatgcggctaatcctaaccactgagcgtccaccaacaaaccagttgggagggcgtcgtaacgggtaactcggtggcggaaccgactactttgggtgtccgtgtttccttttgatcctatattggctgcttatggtgacaacgataagttgttatcataaagcttttgggttggccacctggaaaaagttatcagtgtttgatattgttcggctttcacgcctgccaataagacaagctttatatttgatagtttcattttatccatctgaggatattactgaatttcatttacaactcttgcttgcactatcgacaag

SEQ ID NO: 19787 - DNA, 813 bp, synthetic construct
  source 1..813: mol_type = other DNA
ttaaaacagcctgtgggttgttcccacccacagggcccactgggcgccagtacactggtacgtcagtacctcggtatcacggtaccgttgtacgtcagtacctttgtacgcctgttttattttccctcccccaaatgtaactttagaagcttaagtaattaaagaccaataggagtccaacatccagttggattgcggtcaagcacttctgtttccccggacctagtagtgataggctgtacccacggccgaagatgaacccgtccgttatccggccagctacttcgagaagcctagtagcatcaaagatctgtcttggcgtttcgctcagcgcgttccccccgcgtagatcgggctgatgggtctccgcataccccacgggcgaccgtggcggaggccgcgtggcggcccgcctatggcgaaagccataggacgccatttcagtgacagggtgtgaagagcctattgagctagttggtagtcctccggcccctgaatgcggctaatcctaaccactgagcgtccaccagcaaaccagctgggagggcgtcgtaacgggtaactcggtggcggaaccgactactttgggtgtccgtgtttccttttgatcctatattggctgcttatggtgacaacgataagttgttatcataaagcttttgggttggccacctggaaaaagttatcagtgtttgatattgttcggctttcacgcctaccaataaaacaagctttatattatttggtttccttttattcaaaggaagaaatttctgaatttcattttcaattgctcctaacattatcagcaaa

SEQ ID NO: 19788 - DNA, 800 bp, synthetic construct
  source 1..800: mol_type = other DNA
gtgggttgttcccactcacagggcccattgggcgccagtactctggtatgtcagtactctggtatcacggtaccaccgtacgccagtacctttgtacgcctgttttatatccccttcccaaatgtaactttagaagcacaactaagtaaagaccaataggagtccaacatccagttggattacggtcaagcacttctgtttccccggacctagtagtgataggctgtacccacggccgaagatgaacccgtccgttatccggccagctacttcgagaagcctagtaacaccaaagatctgtcttggcgtttcgctcagcgcgttccccccgcgtagatcgggctgatgggtctccgcataccccacgggcgaccgtggcggaggccgcgtggcggcccgcctatggcgaaagccataggacgccatttcagtgacagggtgtgaagagcctattgagctagttggtagtcctccggcccctgaatgcggctaatcctaaccacggagcactcgccaacaaaccagttggtagggtgtcgtaacgggtaactctgtggcggaaccgactactttgggtgtccgtgtttccttttgatcctatgttggctgcttatggtgacaacgataagttgttatcataaagcttttgggttggccacctggaaaaagttatcagtgtttgatattgttcggctttcacgcctaccaacaaaacaagctttatattacttgatttccttttatccaaaagaggaaatttttgaatttcatcttcaattgctcctgtcgttaacagcaaa

SEQ ID NO: 19789 - DNA, 805 bp, synthetic construct
  source 1..805: mol_type = other DNA
gccctgtgggttgttcccactcacagggcccactgggcgctagtacactggtatgccagtactctggtattacggtaccactgtacgccagtacctttgtacgcctgttttatatccctttcccaaacgtaaccttagaagtttaagtaaacaaagaccaataggagtccaacatccagttggactgcggtcaagcacttctgtttccccggacctagtagtgataggctgtacccacggccgaagatgaacccgtccgttatccggccagctacttcgagaagcctagtagcatcaaagatctgtcttggtgtttcgctcagcgcgttccccccgcgtagatcgggttgatgggtctccgcatcccccacgggcgaccgtggcggaggccgcgtggcggcccgcctatggcgaaagccataggacgccatttcagtgacagggtgtgaagagcctattgagctagttggtagtcctccggcccctgaatgcggctaatcctaaccacggagcgcccaccagcaaaccagctgggagggcgtcgtaacgggtaactctgtggcggaaccgactactttgggtgtccgtgtttccttttgatcctatattggctgcttatggtgacaacgataagttgttatcataaagcttttgggttggccacctggaaaaagttatcagtgtttgatatcgttcggctttcacgcctgccaataaaacaagctttatatttgttaatctcattttatccatctgaggatattactgaatttcatttacaactcttgctctcactgtcaacaag

SEQ ID NO: 19790 - DNA, 804 bp, synthetic construct
  source 1..804: mol_type = other DNA
cctgtgggttgttcccacccacagggcccactgggcgctagtacactggtatgccagtactctggtattacggtaccactgtacgccagtacctttgtacgcctgttttatatccctttccccaaacgtaaccttagaagtttaagtaaacaaagaccaataggagtccaacatccagttggattgcggtcaagcacttctgtttccccggacctagtagtgataggctgtacccacggccgaagatgaacccgtccgttatccggccagctacttcgagaagcctagtagcatcaaagatctgttttggcgtttcgctcagcgcgttccccccgcgtagatcgggtcgatgggtctccgcatcccccacgggcgaccgtggcggaggccgcgtggcggcccgcctatggcgaaagccataggacgccatttcagtgacagggtgtgaagagcctattgagctagttggtaatcctccggcccctgaatgcggctaatcctaaccacggagcgtccaccagcaagccagctgggagggcgtcgtaacgggtaactctgtggcggaaccgactactttgggtgtccgtgtttccttttgatcctatattggctgcttatggtgacaacgataagttgttatcataaagcttttgggttggccacctggaaaaagttatcagtgtttgatatcgttcggctttcacgcctgccaataaaacaagctttatatttgttaatctcattttatccatctgaggatattactgaatttcatttacaactcttgctctcactgtcaacaag

SEQ ID NO: 19791 - DNA, 813 bp, synthetic construct
  source 1..813: mol_type = other DNA
ttaaaacagcctgtgggttgttcccacccacagggcccactgggcgccagtacactggttcgtcagtacctcggtatcacggtaccgttgtacgtcagtacctttgtacgcctgttttatattccctcccccaaatgtaaccttagaagtttaagtaaccaaagaccaataggagtccaacatccagttggattgcggtcaagcacttctgtttccccggacctagtagtgataggctgtacccacggccgaaaatgaacccgtccgttatccggccagctacttcgagaagcctagtagcatcaaagatctgtcttggcgtttcgctcagcgcgttccccccgcgtaaatcgggtcgatgggtctccgcataccccacgggcgaccgtggcggaggccgcgtggcggcccgcctatggcgaaagccataggacgccatttcagtgacagggtgtgaaaagcctattgagctagttggtagtcctccggcccctgaatgcggctaatcctaaccactgagcgtccaccaacaaaccagttgggagggcgtcgtaacgggtaactcggtggcggaaccgactactttgggtgtccgtgtttccttttgatcctatattggctgcttatggtgacaacgataagttgttatcataaagcttttgggttggccacctggaaaaagttatcagtgtttgatattgttcggctttcacgcctaccaataaaacaagctttatatttgttagtttcattttatccatccaaggatattactgaatttcatctacaactcttgcttgcattatcgacaag

SEQ ID NO: 19792 - DNA, 801 bp, synthetic construct
  source 1..801: mol_type = other DNA
gtgggttgttcccacccacagggcccactgggcgctagtacactggtatgccagtactctggtattacggtaccactgtacgccagtacctttgtacgcctgttttatatccctttccccaaacgtaaccttagaagtttaagtaaacaaagaccaataggagtccaacatccagttggattgcggtcaagcacttctgtttccccggacctagtagtgataggctgtacccacggccgaagatgaacccgtccgttatccggccagctacttcgagaagcctagtagcatcaaagatctgtcttggcgtttcgctcagcgcgttccccccgcgtagatcgggtcgatgggtctccgcatcccccacgggcgaccgtggcggaggccgcgtggcggcccgcctatggcgaaagccataggacgccatttcagtgacagggtgtgaagagcctattgagctagttggtagtcctccggcccctgaatgcggctaatcctaaccacggagcgtccaccagcaaaccagctgggagggcgtcgtaacgggtaactctgtggcggaaccgactactttgggtgtccgtgtttccttttgatcctattgtggctgcttatggtgacaacgataagttgttatcataaagcttttgggttggccacctggaaaaagttatcagtgtttgatatcgttcggctttcacgcctgccaataaaacaagctttatatttgttaatctcattttatccatctgaggatattactgaatttcatttacaactcttgctctcactgtcaacaag

SEQ ID NO: 19793 - DNA, 813 bp, synthetic construct
  source 1..813: mol_type = other DNA
ttaaaacagcctgtgggttgttcccacccacagggcccactgggcgctagtacactggtatgacctaacctcggtattgcggtaccgttgtgttacagtacctttgtacgcctgttttatactcccctccccaaacgtaactttagaagttttaacaaataaagaccactaggagtccaacatccagttggattgcggtcaagcacttctgtttccccggacctagtagtgataggctgtacccacggccgaagatgaacccgtccgttatccggccagctacttcgagaagcctagtaacatcaaagatctgtcttggcgtttcgctcagcgcgttccccccgcgtagatcgggctgatgggtctccgcataccccacgggcgaccgtggcggaggccgcgtggcggcccgcctatggcgaaagccataggacgccatttcagtgacagggtgtgaagagcctattgagctagttggtagccctccggcccctgaatgcggctaatcctaaccacggagcgtccaccagcaagccagctggcagggcgtcgtaacgggtaactctgtggcggaaccgactactttgggtgtccgtgtttccttttgatcctatattggctgcttatggtgacaacgataagttgttatcataaagcttttgggttggccacctggaaaaagttatctgtgtttgatattgttcggctttcacgcctaccaataaaacaagctttatattatttagtttccttttatccaaaggaggaaattactgaattccatcttcaactattgcttacattatcagcaaa

SEQ ID NO: 19794 - DNA, 801 bp, synthetic construct
  source 1..801: mol_type = other DNA
gtgggttgttcccacccacagggcccactgggcgctagtacactggtatgccagtactctggtatcacggtaccactgtacgccagtacctttgtacgcctgttttacatcccctccccataatgcaaccttagaagcttaagtaaacaaagaccaataggagtccaacatccagttggattacggtcaagcacttctgtttccccggacctagtagtgataggctgtacccacggccgaagatgaacccgtccgttatccggccagctacttcgagaagcctagtaacatcaaagatctgtcttggcgtttcgctcagcgcgttccccccgcgtagatcgggtcgatgggtctccgcattccccacgggcgaccgtggcggaggccgcgtggcggcccgcctatggcgaaagccataggacgccatttcagtgacagggtgtgaagagcctattgagctagttggtagtcctccggcccctgaatgcggctaatcctaaccacggagcgtccaccagtgaaccagctgggagggcgtcgtaacgggcaactctgtggcggaaccgactactttgggtgtccgtgtttccttttgatcctatattggctgcttatggtgacaacgataagttgttatcataaagctcttgggttggccacctggaaaaagttatcagtgtttgatattgttcggctttcacgcctaccaataaaacaagctttatatttgttgatttcattttatccatccaaagatattactgagtttcatttacaactcttgcttacactatcggcaaa

SEQ ID NO: 19795 - DNA, 804 bp, synthetic construct
  source 1..804: mol_type = other DNA
aaatagcctatggggcgctcccacccaagggccaacctggcgctagtacactggtacgccagtaccttggtatcacggtaccactgtatgttagtacctttgtatgcctatttgcaccccttcccaaagtaactttagaaacttaaaatacaaagaccaataggagtccaacacccagttggattgcggtcaagcacttctgtttccccggacctagtagtgataggctgtacccacggccgaagatgaacccgtccgttatccggccagctacttcgagaagcctagtagcatcaaagatctgtcttggcgtttcgctcagcgcgttccccccgcgtagatcgggctgatgggtctccgcattccccacgggcgaccgtggcggaggccgcgtggcggcccgcctatggcgaaagccataggacgccatttcagtgacagggtgtgaagagcctattgagctagttggtagtcctccggcccctgaatgcggctaatcctaaccacggagcgtccaccaacaaaccagttggcagggcgtcgtaacgggtaactctgtggcggaaccgactactttgggtgtccgtgtttccttttgatcctatgttggctgcttatggtgacaacgataagttgttatcataaagctcttgggttggccacctggaaaaagttatcagtgtttgatattgttcggcttgcacgcctaccaataaaacaagctctatatttgttaatctcattttatccatctgaggatattactgaattccatttacaactcctgcttacattgtcaacaag

SEQ ID NO: 19796 - DNA, 804 bp, synthetic construct
  source 1..804: mol_type = other DNA
aaatagcctatggggcgctcccacccaagggccaatctggcgctagtacactggtacgccagtaccttggtatcacggtaccactgtacgttagtacctttgtatgcctatttgcatcccttcccaaagtaactttagaaacttaaaatacaaagaccaataggagtccaacacccagttggattgcggtcaagcacttctgtttccccggacctagtagtgataggctgtacccacggccgaagatgaacccgtccgttatccggccagctacttcgagaagcctagtaacatcaaagatctgtcttggcgtttcgctcagcgcgttccccccgcgtagatcgggctgatgggtctccgcataccccacgggcgaccgtggcggaggccgcgtggcggcccgcctatggcgaaagccataggacgccatttcagtgacagggtgtgaagagcctattgagctagttggtagtcctccggcccctgaatgcggctaatcctaaccactgagcgtccaccaacaaaccagttgggagggcgtcgtaacgggtaactctgtggcggaaccgactactttgggtgtccgtgtttccttttgatcctatattggctgcttatggtgacaacgataagttgttatcataaagcttttgggttggccacctggaaaaagttatcagtgtttgatattgttcggctttcacgcctaccaataaaacaagctctatatttgttaatctcattttatccatctgaggatattactgaattccatttacaactcctgctcacattgtcaacaag

SEQ ID NO: 19797 - DNA, 810 bp, synthetic construct
  source 1..810: mol_type = other DNA
taataacagtctatgggttgttcccaccctagagcccactgggcgctagtacactggtacgccagtaccttggtatcacggtatcattgtacgtcagtacctttgtatgcctgttttatgccccttcccccaatgtaactttagaagcttacaaaacaaagaccactaggagtccaacacccagttggattgcggtcaagcacttctgtttccccggacctagtagtgataggctgtacccacggccgaagatgaacccgtccgttatccggccagctacttcgagaagcctagtagcatcaaagatctgtcttggcgtttcgctcagcgcgttccccccgcgtagatcgggctgatgggtctccgcatcccccacgggcgaccgtggcggaggccgcgtggcggcccgcctatggcgaaagccataggacgccatttcagtgacagggtgtgaagagcctattgagctagttggtagtcctccggcccctgaatgcggctaatcctaaccacggagcgtccaccagcaaaccagctggcagggcgtcgtaacgggtaactcggtggcggaaccgactactttgggtgtccgtgtttccttttgatcctatattggctgcttatggtgacaacgataagttgttatcataaagcttttgggttggccacctggaaaaagttatcagtgtttgatattgttcggctttcacgcctaccaataagacaagctctatatttgttaatttcattttatccatctgaggatattactgaatttcatttacaactcctgcttacattgtcaacaag

SEQ ID NO: 19798 - DNA, 797 bp, synthetic construct
  source 1..797: mol_type = other DNA
ggctgttcccacccacagggcccactgggcgccagtacactggtacgtcagtaccttggtattacggtaccattgtacgccagtacctttgtacgcctgttttatatcccttccccaatcgtaaccttagaagcataagtaaacatagaccactaggagtccaacatccagttggattgcggtcaagcacttctgtttccccggacctagtagtgataggctgtacccacggccgaagatgaacccgtccgttatccggccagctacttcgagaagcctagtagcatcaaagatctgtcttggcgtttcgctcagcgcgttccccccgcgtagatcgggctgatgggtctccgcataccccacgggcgaccgtggcggaggccgcgtggcggcccgcctatggcgaaagccataggacgccatttcagtgacagggtgtgaagagcctattgagctagttggtagtcctccggcccctgaatgcggctaatcctaaccacggagcatccgccaacaaaccagttggtagggtgtcgtaacgggtaactctgtggcggaaccgactactttgggtgtccgtgtttccttttgatcctatattggctgcttatggtgacaacgataagttgttatcataaagctcttgggttggccacctggaaaaagttatcagtgtttgatattgttcggctttcacgcctaccaataaaacaagctttatatttgttaatttcattttatccatctgaggatattactgaatttcacttacaactcttgcttacactgtcaacaag

SEQ ID NO: 19799 - DNA, 796 bp, synthetic construct
  source 1..796: mol_type = other DNA
tgttcccacccacagggcccaccgggcgctagtacactggtacgtcagtaccttggtatcacggtaccattgtacgccagtacctttgtacgcctgttttatatccccttcccccatatgtaactttagaagtttaagtaaacaaagaccaataggagtccaatatccagttggattgcggtcaagcacttctgttttcccggacctagtagtgataggctgtacccacggccgaagatgaacccgtccgttatccggccagctacttcgagaagcctagtagcatcaaagatctgtcttggcgtttcgctcagcgcgttccccccgcgtagatcgggctgatgggtctccgcataccccacgggcgaccgtggcggaggccgcgtggcggcccgcctatggcgaaagccataggacgccatttcagtgacagggtgtgaagagcctattgagctagttggtagtcctccggcccctgaatgcggctaatcctaaccactgagcgtccaccaacaaaccagttgggagggcgtcgtaacgggtaactcggtggcggaaccgactactttgggtgtccgtgtttccttttgatcctactgtggctgcttatggtgacaacttacagttgttatcataaagcttttggattggccatccggaaagagttaacagtttgttcgctcattgctttatcaaaacttcctttgaggaaagcaatttatctgttaatttcattttacaaacttgaaagtatatcaagtgctcacttgaatttactcatacaattacatcaaat

SEQ ID NO: 19800 - DNA, 804 bp, synthetic construct
  source 1..804: mol_type = other DNA
aaatagcctatggggcgctcccacccaagggccaacctggcgctagtacactggtacgccagtaccttggtatcacggtaccactgtatgttagtacctttgtatgcctatttgcaccccttcccaaagtaactttagaaacttaaaatacaaagaccaataggagtccaacacccagttggattgcggtcaagcacttctgtttccccggacctagtagtgataggctgtacccacggccgaagatgaacccgtccgttatccggccagctacttcgagaagcctagtaacatcaaagatctgtcttggcgtttcgctcagcgcgttccccccgcgtagatcgggctgatgggtctccgcataccccacgggcgaccgtggcggaggccgcgtggcggcccgcctatggcgaaagccataggacgccatttcagtgacagggtgtgaagagcctattgagctagttggtagtcctccggcccctgaatgcggctaatcctaaccactgagcgtccaccaacaaaccagttgggagggcgtcgtaacgggtaactcggtggcggaaccgactactttgggtgtccgtgtttccttttgatcctatattggctgcttatggtgacaacgataagttgttatcataaagcttttgggttggccacctggaaaaagttatcagtgtttgatattgttcggctttcacgcctgccaataaaacaagctctatatttgttaatctcattttatccatctgaggatattactgaattccatttacaactcctgcttactttgtcaacaag

SEQ ID NO: 19801 - DNA, 797 bp, synthetic construct
  source 1..797: mol_type = other DNA
gttgttcccacccacagggcccactgggcgctagtacactggtatgccagcactttggtatcacggtaccattgtgcgtcagtacctttgtacgcctgttttatactcccttccccacatgtaaccttagaagtttaaacaaacaaggaccaataggagtccaacatccagttggatcgcggtcaagcacttctgtttccccggacctagtagtgataggctgtacccacggccgaagatgaacccgtccgttatccggccagctacttcgagaagcctagtagcatcaaagatctgtcttggcgtttcgctcagcgcgttccccccgcgtagatcgggctgatgggtctccgcataccccacgggcgaccgtggcggaggccgcgtggcggcccgcctatggcgaaagccataggacgccatttcagtgacagggtgtgaagagcctattgagctagttggtagtcctccggcccctgaatgcggctaatcctaaccacggagcgtccaccagcaaaccagctggcagggcgtcgtaacgggtaactctgtggcggaaccgactactttgggtgtccgtgtttccttttgatcctatattggctgcttatggtgacaacgataagttgttatcataaagctcttgggttggccacctggaaaaagttatcagtgtttgatattgttcggctttcacgcctaccaataaaacaagctttatatttgttaatttcattctatccatccaaggatattactgaatttcatttacaactcttgctatcactgtcgacaag

SEQ ID NO: 19802 - DNA, 811 bp, synthetic construct
  source 1..811: mol_type = other DNA
taataacagtctatgggttgttcccaccctagagcccactgggcgctagtacactggtacgccagtaccttggtatcacggtaccattgtacgtcagtacctttgtatgcctgttttatgccccttccccaaatgtaactttagaagcttaagaaaacaaagaccactaggagtccaacacccagttggattgcggtcaagcacttctgtttccccggacctagtagtgataggctgtacccacggccgaagatgaacccgtccgttatccggccagctacttcgagaagcctagtagcatcaaagatctgtcttggcgtttcgctcagcgcgttccccccgcgtagatcgggctgatgggtctccgcatcccccacgggcgaccgtggcggaggccgcgtggcggcccgcctatggcgaaagccataggacgccatttcagtgacagggtgtgaagagcctattgagctagttggtagtcctccggcccctgaatgcggctaatcctaaccactgagcgtccaccaacaaaccagttgggagggcgtcgtaacgggtaactcggtggcggaaccgactactttgggtgtccgtgtttccttttgatcctattttggctgcttatggtgacaacgataagttgttatcataaagcttttgggttggccacctggaaaaagttatcagtgtttgatattgttcggctttcacgcctaccaataaaacaagccctatatttgttaatctcattttatccatctgaggatattactgaatttcatttacaactcctgcttacattgtcaacaag

SEQ ID NO: 19803 - DNA, 811 bp, synthetic construct
  source 1..811: mol_type = other DNA
taataacagtctatgggttgttcccaccctagagcccactgggcgctagtacactggtacgccagtaccttggtatcacggtatcattgtacgtcagtacctttgtatgcctgttttatatcccctccccaaatgtaaccttagaagtttaagcaaacaaagaccagtaggagtccaacatccagttggattgcggtcaagcacttctgtttccccggacctagtagtgataggctgtacccacggccgaagatgaacccgtccgttatccggccagctacttcgagaagcctagtaacatcaaagatctgtcttggcgtttcgctcagcgcgttccccccgcgtagatcgggctgatgggtctccgcataccccacgggcgaccgtggcggaggccgcgtggcggcccgcctatggcgaaagccataggacgccatttcagtgacagggtgtgaagagcctattgagctagttggtagtcctccggcccctgaatgcggctaatcctaaccactgagcgtccaccaacaaaccagttgggagggcgtcgtaacgggtaactcggtggcggaaccgactactttgggtgtccgtgtttccttttgatcctatattggctgcttatggtgacaacgataagttgttatcataaagcttttgggttggccacctggaaaaagttatcagtgtttgatattgttcggctttcacgcctaccaataagacaagctctatatttgttaatctcattttatccatctgaggatattactgaatttcatttacaactcctgcttacattgtcaacaag

SEQ ID NO: 19804 - DNA, 804 bp, synthetic construct
  source 1..804: mol_type = other DNA
aaatagcctatggggcgctcccacccaagggccaacctggcgctagtacactggtacgccagtaccttggtatcacggtaccactgtatgttagtacctttgtatgcctatttgcaccccttcccaaagtaactttagaaacttaaaatacaaagaccaataggagtccaacacccagttggattgcggtcaagcacttctgtttccccggacctagtagtgataggctgtacccacggccgaagatgaacccgtccgttatccggccagctacttcgagaagcctagtaacatcaaagatctgtcttggcgtttcgctcagcgcgttccccccgcgtagatcgggctgatgggtctccgcattccccacgggcgaccgtggcggaggccgcgtggcggcccgcctatggcgaaagccataggacgccatttcagtgacagggtgtgaagagcctattgagctagttggtagtcctccggcccctgaatgcggctaatcctaaccactgagcgtccaccaacaaaccagttgggagggcgtcgtaacgggtaactcggtggcggaaccgactactttgggtgtccgtgtttccttttgatcctatattggctgcttatggtgacaacgataagttgttatcataaagctcttgggttggccacctggaaaaagttatcagtgtttgatattgttcggctttcacgcctgccaataaaacaagctctatatttgttaatctcattttatccatctgaggatattactgaattccatttacaactcctgcttactttgtcaacaag

SEQ ID NO: 19805 - DNA, 813 bp, synthetic construct
  source 1..813: mol_type = other DNA
ttaaaacagcctgtgggttgttcccacccacagggcccaccgggcgctagtacactggtatgccagcaccttggtatcatggtaccattgtgcgttagtacctttgtacgcctgttttatactcccttccccacatgtaaccttagaagtttaaataaacaaagaccaataggggtccaacatccagttggattgcggtcaagcacttctgtttccccggacctagtagtgataggctgtacccacggccgaagatgaacccgtccgttatccggccagctacttcgagaagcctagtagcatcaaagatctgtcttggcgtttcgctcagcgcgttccccccgcgtagatcgggctgatgggtctccgcataccccacgggcgaccgtggcggaggccgcgtggcggcccgcctatggcgaaagccataggacgccatttcagtgacagggtgtgaagagcctattgagctagttggtagtcctccggcccctgaatgcggctaatcctaaccacggagcgtccaccagcaaaccagctgggagggcgtcgtaacgggtaactctgtggcggaaccgactactttgggtgtccgtgtttccttttgatcctatattggctgcttatggtgacaacgataagttgttatcataaagctcttgggttggccacctggaaaaagttatcagtgtttgatattgttcggctttcacgcctaccaataaagcaagctttatatttgttaatttcattttatccatccaaggatattactgaatttcacttacaactcttgcttacactgtcgacaag

SEQ ID NO: 19806 - DNA, 805 bp, synthetic construct
  source 1..805: mol_type = other DNA
aaatagcctatggggcgctcccacccaagggccaacctggcgctagtacactggtacgccagtaccttggtatcacggtaccactgtacgttagtacctttgtatgcctatttgcatcccttcccaaagtaactttagaaacttaagaatacaaagaccaataggagtccaacacccagttggattgcggtcaagcacttctgtttccccggacctagtagtgataggctgtacccacggccgaagatgaacccgtccgttatccggccagctacttcgagaagcctagtagcatcaaagatctgtcttggcgtttcgctcagcgcgttccccccgcgtagatcgggctgatgggtctccgcattccccacgggcgaccgtggcggaggccgcgtggcggcccgcctatggcgaaagccataggacgccatttcagtgacagggtgtgaagagcctattgagctagttggtagtcctccggcccctgaatgcggctaatcctaaccacggagcgtccaccagcaaaccagctggcagggcgtcgtaacgggtaactctgtggcggaaccgactactttgggtgtccgtgtttccttttgatcctatattggctgcttatggtgacaacgataagttgttatcataaagcttttgggttggccacctggaaaaagttatcagtgtttgatattgttcggctttcacgcctaccaataaaacaagctctatatttgttaatctcattttatccatctgaggatattactgaattccatttacaactcctgctcacattgtcaacaag

SEQ ID NO: 19807 - DNA, 797 bp, synthetic construct
  source 1..797: mol_type = other DNA
gttgttcccacccacagggcccactgggcgccagtacactggtatgccagtaccttggtatcacggtaccattgtacgccagtacctttgtacgcctgttttatactccctcccccacatgtaaccttagaagtttaaataaacaaggaccaataggagtccaacacccagttggattgcggtcaagcacttctgtctccccggacctagtagtgataggctgtacccacggccgaagatgaacccgtccgttatccggccagctacttcgagaagcctagtaacatcaaagatctgtcttggcgtttcgctcagcgcgttccccccgcgtagatcgggctgatgggtctccgcataccccacgggcgaccgtggcggaggccgcgtggcggcccgcctatggcgaaagccataggacgccatttcagtgacagggtgtgaagagcctattgagctagttggtagtcctccggcccctgaatgcggctaatcctaaccacggagcgtccaccagcaaaccagctgggagggcgtcgtaacgggtaactctgtggcggaaccgactactttgggtgtccgtgtttccttttgatcctattttggctgcttatggtgacaacgataagttgttatcataaagcttttgggttggccacctggaaaaagttatcagtgtttgacattgttcggctctcacgcctaccaataaaacaagctttatatttgttaatttcattttatccatccaaggatattactgaatttcacttacaactcttgcttacactatcaacaag

SEQ ID NO: 19808 - DNA, 811 bp, synthetic construct
  source 1..811: mol_type = other DNA
taataacagtctatgggttgttcccaccctagagcccactgggcgccagtacactggtacgccagtaccttggtatcacggtaccattgtacgccagtacctttgtacgcctgttttatatcccctccccaaatgtaaccttagaagtttaagcaaacaaagaccagtaggagtccaacatccagttggattgcggtcaagcacttctgtttccccggacctagtagtgataggctgtacccacggccgaagatgaacccgtccgttatccggccagctacttcgagaagcctagtaacatcaaagatctgtcttggcgtttcgctcagcgcgttccccccgcgtagatcgggctgatgggtctccgcataccccacgggcgaccgtggcggaggccgcgtggcggcccgcctatggcgaaagccataggacgccatttcagtgacagggtgtgaagagcctattgagctagttggtagtcctccggcccctgaatgcggctaatcctaaccactgagcgtccaccaacaaaccagttgggagggcgtcgtaacgggtaactcggtggcggaaccgactactttgggtgtccgtgtttccttttgatcctatattggctgcttatggtgacaacgataagttgttatcataaagcttttgggttggccacctggaaaaagttatcagtgtttgatattgttcggctttcacgcctaccaataagacaagctctatatttgttaatttcattttatccatctgaggatattactgaatttcatttacaactcctgcttacattgtcaacaag

SEQ ID NO: 19809 - DNA, 812 bp, synthetic construct
  source 1..812: mol_type = other DNA
ttaaaacagcctgtgggttgttcccacccgcagggcccactgggcgctagtacactggtatgccagtacattagtacgctagtactcttgtatgccagtacctttgtacgcctgttttatactcccctccccatatgtaacattagaagtttaagtaataaagaccaataggagtccaacatccagttggattacggtcaagcacttctgtttccccggacctagtagtgataggctgtacccacggccgaagatgaacccgtccgttatccggccagctacttcgagaagcctagtaacatcaaagatctgtcttggcgtttcgctcagcgcgttccccccgcgtagatcgggctgatgggtctccgcataccccacgggtgaccgtggcggaggccgcgtggcggcccgcctatggcgaaagccataggacgccatttcagtgacagggtgtgaagagcctattgagctagttggtagtcctccggcccctgaatgcggctaatcctaaccacggagcgtccaccaacaatccagttggcagggcgtcgtaacgggtaactctgtggcggaaccgactactttgggtgtccgtgtttccttttgatcctatattggctgcttatggtgacaacgataagttgttatcataaagcttttgggttggccacctggaaaaagttgtcagtgtttgatattgttcggctttcacgcctaccaataaagcaagctttatatttgttagtttcattttatccattaaaggatattaccgaatttcacttacagcttttgctcacattatcagcaaa

SEQ ID NO: 19810 - DNA, 790 bp, synthetic construct
  source 1..790: mol_type = other DNA
ccacccacagggcccactgggcgctagtacactggtatgacagtaccttggtatcacggtaccattgtacgccagtacctttgtacgcctgttttatattcccttcccccaaatgtaaccttagaagtttaaacaataaagaccaataggagtccaacatccagttggattgcggtcaagcacttctgtttccccggacctagtagtgataggctgtacccacggccgaagatgaacccgtccgttatccggccagctacttcgagaagcctagtagcatcaaagatctgtcttggcgtttcgctcagcgcgttccccccgcgtagatcgggctgatgggtctccgcattccccacgggcgaccgtggcggaggccgcgtggcggcccgcctatggcgaaagccataggacgccatttcagtgacagggtgtgaagagcctattgagctagttggtagtcctccggcccctgaatgcggctaatcctaaccactgagcgtccaccagcaaaccagctgggagggcgtcgtaacgggtaactcggtggcggaaccgactactttgggtgtccgtgtttccttttgatcctattttggctgcttatggtgacaacgataagttgttatcataaagcttttgggttggccacctggaaaaagttatcagtgtttgatattgctcggctttcacgcctaccaataaaacaagccttacttttattagtatcattttatccaaccaaggatattactgaatttcatctacaacttttgctcacattgtctgcaaa

SEQ ID NO: 19811 - DNA, 713 bp, synthetic construct
  source 1..713: mol_type = other DNA
tacctttgtacgcctgttttatattccctccccaaatgtaaatttagaagtttaagaaacaaagaccaataggagtccaacaaccagttggattgcggtcaagcacttctgtctccccggacctagtagtgataggctgtacccacggccgaagatgaacccgtccgttatccggccagctacttcgagaagcctagtaacatcaaagatctgtcttggcgtttcgctcagcgcgttccccccgcgtagatcgggtcgatgggtctccgcataccccacgggcgaccgtggcggaggccgcgtggcggcccgcctatggcgaaagccataggacgccatttcagtgacagggtgtgaagagcctattgagctagttggtagtcccccggcccctgaatgtggctaatcctaaccacggagcgtccaccagcaaaccagctggcagggcgtcgtaacgggtaactctgtggcggaaccgactactttgggtgtccgtgtttccttttgatcctatattggctgcttatggtgacaacgataagttgttatcataaagctcttgggttggccacctggaagaagttgtcagtgtttgatattgtccggctttcacgcctaccaacaaaacaagctttatatttgttaatttcattttatccatccaaggatattactgaatttcatttacaactcttgcttacactatcgtcaag

SEQ ID NO: 19812 - DNA, 790 bp, synthetic construct
  source 1..790: mol_type = other DNA
ccacccacagggcccactgggcgccagtacactggtatgacagtaccttggtatcacggtaccattgtacgccagtacctttgtacgcctgttttatattcccttcccccaaatgtaaccttagaagtttaaacaataaagaccaataggagtccaacatccagttggattgcggtcaagcacttctgtttccccggacctagtagtgataggctgtacccacggccgaagatgaacccgtccgttatccggccagctacttcgagaagcctagtagcatcaaagatctgtcttggcgtttcgctcagcgcgttccccccgcgtagatcgggctgatgggtctccgcattccccacgggcgaccgtggcggaggccgcgtggcggcccgcctatggcgaaagccataggacgccatttcagtgacagggtgtgaagagcctattgagctagttggtagtcctccggcccctgaatgcggctaatcctaaccactgagcgtccaccagcaaaccagctgggagggcgtcgtaacgggtaactcggtggcggaaccgactactttgggtgtccgtgtttccttttgatcctattttggctgcttatggtgacaacgataagttgttatcataaagcttttgggttggccacctggaaaaagttatcagtgtttgatattgctcggctttcacgcctaccaataaaacaagccttacttttattagtatcattttatccaaccaaggatattactgaatttcatctacaacttttgctcacattgtctgcaaa

SEQ ID NO: 19813 - DNA, 645 bp, synthetic construct
  source 1..645: mol_type = other DNA
atagggatccaacatccagttgggtcatggtcaagcacttctgtctccccggacctagtagtgataggctgtacccacggccgaagatgaacacgtccgttatccggccaactacttcgagaagcctagtaacatcaaagatctgtcttggcgtttcgctcagcgcgtttcccccgcgtagatcgggctgatgggtctccgcataccccacgggcgaccgtggcggaggccgcgtggcggcccgcctatggcgaaagccataggacgccatttcagtgacagggtgtgaagagcctattgagctagttggtagtcctccggcccctgaatgcggctaatcctaaccacggagcgtccaccagcaaaccagctgggagggcgtcgtaacgggtaactctgtggcggaaccgactactttgggtgtccgtgtttccttttgatcctatattggctgcttatggtgacaacgataagttgttatcataaagcttttgggttggccacctggaaaaagttatcagtgtttgatattgttcggctttcacgcctaccaataaaacaagctttatatttgttagtttcattttatccatccaaggatattactgaatttcatttacaactcttgcttacactagcgacaag

SEQ ID NO: 19814 - DNA, 862 bp, synthetic construct
  source 1..862: mol_type = other DNA
ttaaaagagcctgggggtgactccagcccccaggacccacgtggtgccagcactacttagttacgattatttagtgcgcctcttttatatcccctcccccacccttcccttttccttgaattctttcgtaacaagtgcctcagcatgacgtttgcacggtgtactgtaaccatcaggcaaccagcctgtaaagcaggaagcacttctgtttccccggtgtggatattaggctgttcccacggccgaaaatgaagcatcgttatccccactggtactgcgcgaaagctagtaacaccaatgatttagatggatctttcgctcagcaattgccccgattgtagatcgggcggatggggctcctcgttcctcactggcgacagtggaggagcccgcgtggccgcccgcctaccccgcatggggtaggaggtccagataatgacagggtgtgaagactcaagtgcgctaccagtgcatcctccaggcctctgaatgcggctaatcctaaccccggagcacccgctcacagtccagtaagtagggtgtcgtaacgcgtaagtctgggatggaaccgactactttgagtgacctgtgtttcttttatttttattgaggttgtttatggtgacaaagattggctctatcgtgtatagagtttacaaggtgaaagaggatttttacagacttttgttatcaatcttgtcctatcctacccgcaggggaattgatgatagaagtgcttttagaggtgattcaattgatagctcaaacaactgagaatcttatttatttttatcaaggtctgaatttgaataaagatccagtgaattttacccccacctattagcgaccaaattcacaagca

SEQ ID NO: 19815 - DNA, 443 bp, synthetic construct; identical to SEQ ID NO: 487
  source 1..443: mol_type = other DNA

SEQ ID NO: 19816 - DNA, 326 bp, synthetic construct
  source 1..326: mol_type = other DNA
cggcccctgaatgcggctaatcctaaccacggagcgtccaccaacaatccagttggcagggcgtcgtaacgggtaactctgtggcggaaccgactactttgggtgtccgtgtttccttttgatcctatttggctgcttatggtgacaacgataagttgttatcataaagcttttgggttggccacctggaaaaagttatcagtgtttgatattgttcggctctcacgcctaccaataaagcaagctttatacttgttagtctcattttatccctctaaagagattactgagtttcatttgcaacttctgcttacattatcagcaaa

SEQ ID NO: 19817 - DNA, 313 bp, synthetic construct
  source 1..313: mol_type = other DNA
ggctaatcctaaccacggagcgtccaccagcaaaccagctggcagggcgtcgtaacgggtaactctgtggcggaaccgactactttgggtgtccgtgtttccttttgatcctatattggctgcttatggtgacaacgataagttgttatcataaagctcttgggttggccacctggaagaagttgtcagtgtttgatattgtccggctttcacgcctaccaacaaaacaagctttatatttgttaatttcattttatccatccaaggatattactgaatttcatttacaactcttgcttacactatcgtcaag

SEQ ID NO: 19818 - DNA, 746 bp, synthetic construct; identical to SEQ ID NO: 1129
  source 1..746: mol_type = other DNA

SEQ ID NO: 19819 - DNA, 741 bp, synthetic construct
  source 1..741: mol_type = other DNA
ttaaaacagcctgtgggttgtccccacccacagggcccactgggcgctagcacactggtatcccggtacctttgtgcgcctgttttatataccctcccctcagtaacctagaagttcatcacaaatgatcaatagttagctcaacaaaccagttgagcctagatcaagcacttctgttaccccgggctgagtatcaataagctgttgacacggctgaaggagaaaacgcccgttacccgaccagctacttcggagaacctagtatcaccatagaggttgcgtagcgtttcgctccgcacaaccccagtgtagatcaggtcgatgagtcaccgcgttccccacaggcgactgtggcggtggctgcgttggcggcctgcccatggggttacccatgggacgcttcaatactgacatggtgtgaagagttgactgagctagctggtagtcctccggcccctgaatgcggctaatcctaactgtggagcaagtgcccacaacccagtgggtggcttgtcgtaatgggcaactctgcagcggaaccgactactttgggtgaccgtgtttctctttattcttatattggctgcttatggtgacaatctcagagttgttaccatatagctattggtttggccaaccagtgactaacagagcaattatatatcttttcattggatttatacctataaacaacaccagttataccactttgtgttacattattggcttgaactcgaaaag

SEQ ID NO: 19820 - DNA, 748 bp, synthetic construct; identical to SEQ ID NO: 1181
  source 1..748: mol_type = other DNA

SEQ ID NO: 19821 - DNA, 748 bp, synthetic construct
  source 1..748: mol_type = other DNA
ttaaaacagctctggggttgttcccaccccagaggcccacgtggcggccagtacaccggtatcacggtacccttgtacgcctgttttatactccctttccccgtaacttagaagcaataaaaccaagttcaatagaaagggggtacaaaccagtaccaccacgaacaagcacttctgtttccccggtgaggttgtataaactgtccccacggttgaaaacgactgatccgttatccgctcttgtacttcgagaagcctagtactaccttggaatcttcgatgcgttgcgctcagcactcaaccccggagtgtagcttaggctgatgagtctggacatcccccaccggcgacggtggtccaggctgcgttggcggcctacctgtggcccaaagccacgggacgctagttgtgaacaaggtgcgaagagcctattgagctacatgagagtcctccggcccctgaatgcggctaatcccaaccacggagcaggcgattgcaatccagtaattagcctgtcgtaacgcgtaagtctgtggcggaaccgactactttgggtgtccgtgtttccttttattcttacattggctgcttatggtgacaatcatagattgttatcataaagcgaattggattggccatccagtgagaattagatcgatcatctacctttttgttggatttacacctttgaaaccacacagcttgaatctcatcaaagttgtattgttgatacgacattattatcaca

SEQ ID NO: 19822 - DNA, 742 bp, synthetic construct
  source 1..742: mol_type = other DNA
ttaaaacagctctggggttgcacccaccccagaggcccacgtggcggctagtactccggtattgcggtacccttgtacgcctgttttatactcccttcccgtaacttagacgcacaaaaccaagttcaatagaagggggtacaaaccagtaccaccacgaacaagcacttctgtttccccggtgatgttgtatagactgctcgcgtggttgaaagcgacggatccgttacccgcttatgtacttcgagaagcccagtaccaccttggaatcttcgatgcgttgcgctcagcactcaaccccagagtgtagcttaggctgatgagtctggacatccctcaccggcgacggtggtccaggctgcgttggcggcctacctgtggctaacgccatgggacgctagttgtgaacaaggtgtgaagagcctattgagctacataagaatcctccggcccctgaatgcggctaatcccaacctcggagcaggtggtcacaaaccagtgattggcctgtcgtaacgcgcaagtccgtggcggaaccgactactttgggtgtccgtgtttccttttattttattgtggctgcttatggtgacaatcgcagattgttatcataaagcgaattggattggccatccggtgaaagtgagcttcattatctatctgtttgctggattcgctccattgagtgtgtttattctaagtacaatttcaacagttatttcaatcaggcaattgtatcata

SEQ ID NO: 19823 - DNA, 742 bp, synthetic construct
  source 1..742: mol_type = other DNA
ttaaaacagctctggggttgcacccaccccagaggcccacgtggcggctagtactccggtattgcggtacccttgtacgcctgttttatactcccttcccgtaacttagacgcacaaaaccaagttcaatagaagggggtacaaaccagtaccaccacgaacaagcacttctgtttccccggtgatgttgtatagactgctcgcgtggttgaaagcgacggatccgttatccgcttatgtacttcgagaagcccagtaccacctcggaatcttcgatgcgttgcgctcagcactcaaccccagagtgtagcttaggctgatgagtctggacatccctcaccggtgacggtggtccaggctgcgttggcggcctacctatggctaacgccatgggacgctagttgtgaacaaggtgtgaagagcctattgagctacataagaatcctccggcccctgaatgcggctaatcccaaccgcggagcaggcggtcacaaaccagtgattggcctgtcgtaacgcgcaagtccgtggcggaaccgactactttgggtgtccgtgtttccttttattttattgtggctgcttatggtgacaatcacagattgttatcataaagcgaattggattggccatccggtgaaagtgagattcattatctatctgtttgctggattcgccccattgagtgtgtttactctaagtacaatttcaacagttatttcaatcagacaattgtatcata

SEQ ID NO: 19824 - DNA, 747 bp, synthetic construct
  source 1..747: mol_type = other DNA
tttaaaacagctctggggttgttcccaccccagaggcccacgtggcggctagtacactggtattacggtacccttgtacgcctgttttacacccctttcccccgtaacttagaagctttaaatccaagttcaacagtcagtggtacaacccagtactaccacgaacaagcacttctgttaccccggtgagattgcataggccgtccccacggctaaaagcgattgatccgttatccgctcttgtacttcgagaagcctagtaagaccttgggatcctcgatgcgttgcgctcaacactcaaccccagagtgtagcttgggctgatgagtctggacattcctcaccggtgacggtggtccaggctgcgttggcggcctacctgtggcccaaagccacaggacgctagttgtgaacaaggtgtgaagagcctattgagctacaagagagtcctccggcccctgaatgcggctaatcccaaccacggagcaggcgattgcaatccagcaactagcctgtcgtaacgcgcaagtctgtggcggaaccgactactttgggtgtccgtgtttccttttattacataatggctgcttatggtgacaatcacagattgttgtcataaagcgaattggattggccatccggtgagaattaaaacaattatttacttatttgttggatttgttcctatacacacccaaacaccttgcttgattgaagtaattctgttgataagacaacactattaca

SEQ ID NO: 19825 - DNA, 745 bp, synthetic construct; identical to SEQ ID NO: 1093
  source 1..745: mol_type = other DNA

SEQ ID NO: 19826 - DNA, 747 bp, synthetic construct; identical to SEQ ID NO: 1157
  source 1..747: mol_type = other DNA

SEQ ID NO: 19827 - DNA, 743 bp, synthetic construct
  source 1..743: mol_type = other DNA
ttaaaacagtctgtgggttgttcccactcacagggcccacgtggcgctagcacaccggtatttcggtacccttgtgcgcctgttttatgcacccctagccccacgtaacttagaagggaagcaacaacgatcaacagcaggtgtggcattccagccacatcgtgatcaagcacttctgtctccccggactgagtatcaataagctgctcgcgcggctgaaggagaaaacgttcgttacccggccaattacttcgagaaacccagtaccaccatggaggttgcgcagtgtttcgttccgcacaaccccagtgtagatcaggtcgatgagtcaccgcatcccccacgggcgaccgtggcggtggctgcgttggcggcctgcccatggggtaacccatgggacgcttcaatactgacatggtgtgaagagtctattgagctaattggtagtcctccggcccctgaatgcggctaatcctaactgcggagcagatacccataaaccaatgggcagtctgtcgtaacgggcaactctgcagcggaaccgactactttgggtgtccgtgtttccttttattctttatttggctgcttatggtgacaattgagagattgttgccatatagctattggattggccatccggtgacaaacagagcgatcgtgtacttatttattggttttgtaccacgtgaatttaaagttttacaaaccctaaatctcattattggacttaatacagcaaa

SEQ ID NO: 19828 - DNA, 742 bp, synthetic construct
  source 1..742: mol_type = other DNA
ttaaaacagctctggggttgttcccacccacagggcccactgggcgccagcactctggtatcacggtacctttgtgcgcctgttttatacccccgtccccggttgtaacttagaagtaacactccacgaccgatagtaggtgtggcacgccagccatgtcttggtcaagcacttctgtttccccggattgagtatcaataggctgttcacacggccgaaggagaaaacatccgttatccggccaactacttcgagaaacctagtaccaccatgaaggttgcgcagtgtttcgctccgcacaaccccagtgtagatcaggccgatgagtcaccgctttccccacgggcgaccgtggcggtggctgcgttggcggcctgcccatggggaaatccatgggacgcttcaatactgacatggtgcgaagagtctattgagctagttggtattcctccggcccctgaatgcggctaatcctaactgcggagcagacacccacatgccagtgggcagtctgtcgtaacgggcaactctgcagcggaaccgactactttgggtgtccgtgtttccttttattcttatactggctgcttatggtgacaattgaaagattgttaccatatagctattggattggccatcctgtgactaacagagctattgtatacctatttgttggttttgtaccactgaattacaaggctttaaacaccctcaactttataatactactcaactcgttaaa

SEQ ID NO: 19829 - DNA, 742 bp, synthetic construct
  source 1..742: mol_type = other DNA
ttaaaacagctctggggttgttcccacccacagggcccaccgggcgccagcactctggtatcacggtacctttgtgcgcctgttttatactcccgtccccggttgtaacttagaagtaacactccacgaccgatagtaggtgtggcacgccagccatgtcttggtcaagcacttctgtttccccggattgagtatcaataggctgttcacacggccgaaggagaaaacattcgttatccggccaactacttcgagaaacctagtaccaccatgaaggttgcgcagtgtttcgctccgcacaaccccagtgtagatcaggccgatgagtcaccgctttccccacgggcgaccgtggcggtggctgcgttggcggcctgcccatggggaaatccatgggacgcttcaatactgacatggtgcgaagagtctattgagctagttggtattcctccggcccctgaatgcggctaatcctaactgcggagcagacacccacatgccagtgggcagtctgtcgtaacgggcaactctgcagcggaaccgactactttgggtgtccgtgtttccttttattcttatactggctgcttatggtgacaattgaaagattgttaccatatagctattggattggccatcctgtgactaacagagctattgtatacctatttgttggttttgtaccactgaattacaaggcattaaacaccctcaactttataatactactcaactcattaaa

SEQ ID NO: 19830 - DNA, 751 bp, synthetic construct
  source 1..751: mol_type = other DNA
gaaattaaaacagctctggggttgttcccaccccagaggcccacgtggcggctagtacactggtattacggtacccttgtacgcctgttttacacccctttcccccgtaacttagaagcttttaaattcaagttcaacagtgagtggtacaacccagtactactatgaacaagcacttctgttaccccggtgagattgcataagctgtccccacggctaaaagcgattgatccgttatccgctcttgtacttcgagaagcctagtaaaaccttgggatcctcgatgcgttgcgctcaacactcaaccccagagtgtagcttgggctgatgagtctgggcattcctcaccggcgacggtggtccaggctgcgttggcggcctacctgtggcccaaagccacaggacgctagttgtgaacaaggtgtgaagagcctattgagctacaagagagtcctccggcccctgaatgcggctaatcccaaccacggagcaggtgattgcaacccagcaactagcctgtcgtaacgcgcaagtctgtggcggaaccgactactttgggtgtccgtgtttccttttattacataatggctgcttatggtgacaatcatagattgttgtcataaagcgagttggattggccatccggtgagaattaaaacaattatttacttgtttgttggatttgttcctatacacacccatacaccttgcttgattgaagtaattctgttgataagacaacactattacg

SEQ ID NO: 19831 - DNA, 751 bp, synthetic construct
  source 1..751: mol_type = other DNA
gaaattaaaacagctctggggttgttcccaccccagaggcccacgtggcggttagtacactggtattacggtacccttgtacgcctgttttacacccctttcccccgtaacttagaagcttttaaattcaagttcaacagtgagtggtacaacccagtactactatgaacaagcacttctgttaccccggtgagattgcataagctgtccccacggctaaaagcgattgatccgttatccgctcttgtacttcgagaagcctagtaaaaccttgggatcctcgatgcgttgcgctcaacactcaaccccagagtgtagcttgggctgatgagtctgggcattcctcaccggcgacggtggtccaggctgcgttggcggcctacctgtggcccaaagccacaggacgctagttgtgaacaaggtgtgaagagcctattgagctacaagagagtcctccggcccctgaatgcggctaatcccaaccacggagcaggtgattgcaacccagcaactagcctgtcgtaacgcgcaagtctgtggcggaaccgactactttgggtgtccgtgtttccttttattacataatggctgcttatggtgacaatcatagattgttgtcataaagcgagttggattggccatccggtgagaattaaaacaattatttacttgtttgttggatttgttcctatacacacccatacaccttgcttgattgaagtaattctgttgataagacaacactattacg

SEQ ID NO: 19832 - DNA, 751 bp, synthetic construct
  source 1..751: mol_type = other DNA
gaaattaaaacagctctggggttgttcccaccccagaggcccacgtggcggctagtacactggtattacggtacccttgtacgcctgttttacacccctttcccccgtaacttagaagcttttaaattcaagttcaacagtgagtggtacaacccagtactactatgaacaagcacttctgttaccccggtgagattgcataagctgtccccacggctaaaaacgattgatccgttatccgctcttgtacttcgagaagcctagtaaaaccttgggatcctcgatgcgttgcgctcaacactcaaccccagagtgtagcttgggctgatgagtctgggcattcctcaccggcgacggtggtccaggctgcgttggcggcctacctgtggcccaaagccacaggacgctagttgtgaacaaggtgtgaagagcctattgagctacaagagagtcctccggcccctgaatgcggctaatcccaaccacggagcaggtgattgcaacccagcaactagcctgtcgtaacgcgcaagtctgtggcggaaccgactactttgggtgtccgtgtttccttttattacataatggctgcttatggtgacaatcatagattgttgtcataaagcgagttggattggccatccggtgagaattaaaacaattatttacttgtttgttggatttgttcctatacacacccatacaccttgcttgattgaagtaattctgttgataagacaacactattacg

SEQ ID NO: 19833 - DNA, 750 bp, synthetic construct
  source 1..750: mol_type = other DNA
gaaattaaaacagctctggggttgttcccaccccagaggcccacgtggcggctagtacactggtattacggtacccttgtacgcctgttttacacccctttcccccgtaacttagaagcttcaaatccaagttcaatagtgagtggtacaacccagtactactacgaacaagcacttctgttaccccggtgagattgcataggctgtccccacggctaaaagcgattgatccgttacccgctcttgtacttcgagaagcctagtaaggccttgggatcttcgatgcgttgcgctcaacactcaaccccagagtgtagcttgggctgatgagtctggacattcctcaccggtgacggtggtccaggctgcgttggcggcctacctgtggcccaaagccacaggacgctagttgtgaacaaggtgtgaagagcctattgagctacaagagagtcctccggcccctgaatgcggctaatcccaaccacggagcaggtgattgcaacccagcaactagcctgtcgtaacgcgcaagtctgtggcggaaccgactactttgggtgtccgtgtttccttttattacatgatggctgcttatggtgacaatcacagattgttgtcataaagcgaattggattggccatccggtgagaattaaaacaattatctacttgtttgttggatttcttcctataaacacccaaacaccttgcttgattgaagtaattctgttgataaggcaacactattaca

SEQ ID NO: 19834 - DNA, 750 bp, synthetic construct
  source 1..750: mol_type = other DNA
gaaattaaaacagctctggggttgttcccaccccagaggcccacgtggcggctagtacactggtattacggtacccttgtacgcctgttttacacccctttcccccgtaacttagaagcttcaaatccaagttcaatagtgagtggtacaacccagtactactacgaacaagcacttctgttaccccggtgagattgcataggctgtccccacggctaaaagcgattgatccgttacccgctcttgtacttcgagaagcctagtaagaccttgggatcttcgatgcgttgcgctcaacactcaaccccagagtgtagcttgggctgatgagtctggacattcctcaccggtgacggtggtccaggctgcgttggcggcctacctgtggcccaaagccacaggacgctagttgtgaacaaggtgtgaagagcctattgagctacaagagagtcctccggcccctgaatgcggctaatcccaaccacggagcaggtgattgcaacccagcaactagcctgtcgtaacgcgcaagtctgtggcggaaccgactactttgggtgtccgtgtttccttttattacatgacggctgcttatggtgacaatcacagattgttgtcataaagcgaattggattggccatccggtgagaattaaaacaattatctacttgtttgttggatttcttcctataaacacccaaacaccttgcttgattgaagtaattctgttgataaggcaacactattaca

SEQ ID NO: 19835 - DNA, 747 bp, synthetic construct; identical to SEQ ID NO: 1158
  source 1..747: mol_type = other DNA

SEQ ID NO: 19836 - DNA, 747 bp, synthetic construct
  source 1..747: mol_type = other DNA
ttaaaacagctctggggttgttcccaccccagaggcccacgtggcggctagtacaccggtatcacggtacccttgtacgcctgttttatacacccttccccgtaacttagaagtacaaaactcaagttcaacagaagggggtacaaaccagtaccaccacgaacaagcacttctgtttccccggtgaggttgcatagactgtccccacggttgaaggtgaccgatccgttatccgctcttgtacttcgagaagcccagtaccatcttggaatcttcgatgcgttgcgctcagcactcaaccccagagtgtagcttaggtcgatgagtctggacattccccaccggcgacggtggtccaggctgcgttggcggcctacctgtggcccaaagccacaggacgctagttgtgaacaaggtgtgaagagcctattgagctacaggagagtcctccggcccctgaatgcggctaatcccaaccacggagcaggtgacttcaagccagaggttggcctgtcgtaacgcgtgagtctgtggcggaaccgactactttgggtgtccgtgtttccttgtaatttttacattggctgcttatggtgacaatcatagattgttatcataaagcgaattggattggccatccggtgaagattagatcgattgtttatttgtttgttggatttactccattgtcacactattcagttgacttaatacgtattgtattaataattagaaatttataccata

SEQ ID NO: 19837 - DNA, 747 bp, synthetic construct
  source 1..747: mol_type = other DNA
ttaaaacagctctggggttgttcccaccccagaggcccacgtggcggccagtacaccggtatcgcggtacccttgtacgcctgttttatactcccttcccccgtaacttagaagcatataacacaagttcaatagaagggggtgcaaaccagcaccaccacgaacaagcacttctgtttccccggtgagatcacatagattgttcccacggtcgaaagtgatcaatccgttatccgctcttgtacttcgagaagcctagtatcttcttggaatcttcgatgcgttgcgctcagcactcaaacccagagtgtagcttaggccgatgagtctggacattccccaccggtgacggtggtccaggctgcgttggcggcctacctgtgacccaaagtcacaggacgctagttgtgaacaaggtgagaagagcctattgagctacaagagattcctccggcccctgaatgcggctaatcccaaccatggagcaggtggctgcaaaccagcagacggcctgtcgtaacgcgcaagtccgtggcggaaccgactactttgggtgtccgtgtttcctttattttttattgtggctgcttatggtgacaatcattgattgttatcataaagcgaattggattggccatccagcgataattaaccagatcatttactagtttgttggatttactccactgacattctacacacccaatcttatagaagtggtgaaattaattggacaatttaactaca

SEQ ID NO: 19838 - DNA, 750 bp, synthetic construct
  source 1..750: mol_type = other DNA
gaaattaaaacagctctggggttgttcccaccccagaggcccacgtggcggctagtacactggtattacggtacccttgtacgcctgttttacaccccttcccccgtaacttagaagctttaaaatccaagttcaatagtgagtggtacaacccagtactgctatgaacaagcacttctgttaccccggtgagattgcataagctgtccccacggctaaaagcggttgatccgttatccactcttgtacttcgagaagcctagtaagaccttgggatcctcgatgcgttgcgctcaacactctaccccagagtgtagcttgggctgatgagcctggacattcctcaccggtgacggtggtccaggctgcgttggcggcctacctgtggcccaaagccacaggacgctagttgtgaacaaggtgtgaagagcctattgagctacaagagagtcctccggcccctgaatgcggctaatcccaaccacggagcaggtgattgcaatccagcaactagcctgtcgtaacgcgcaagtctgtggcggaaccgactactttgggtgtccgtgtttccttttattacataatggctgcttatggtgacaatcacagattgttgtcataaagcgaattggattggccatccggtgagaattaaaacgattatttacttgtttgttaaatttgttcctatacacacccatacaccttgcttgattgaagtgattctgttgataagacaacactattacg

SEQ ID NO: 19839 - DNA, 750 bp, synthetic construct; identical to SEQ ID NO: 1204
  source 1..750: mol_type = other DNA

SEQ ID NO: 19840 - DNA, 746 bp, synthetic construct
  source 1..746: mol_type = other DNA
ttaaaacagctctggggttgttcccaccccagaggcccacgtggcggctagtacactggtattacggtacccttgtacgcctgttttataccccttccccccgtaacttagaagctttaaatccaagttcaacagtgagtggtacaacccagtactgctacgaacaagcacttctgttaccccggtgagattgcataggctgtccccacggctaaaagcgattgatccgttacccgctcttgtacttcgagaagcctagtaagaccttgggatcttcgatgcgttgcgctcaacactcaaccccagagtgtagcttaggctgatgagtctggacattcctcaccggcgacggtggtccaggctgcgttggcggcctacctgtggcccaaagccacaggacgctagttgtgaacaaggtgtgaagagcctattgagctacaagagagtcctccggcccctgaatgcggctaatcccaaccacggagcaggtgattgcaacccagcaactagcctgtcgtaacgcgcaagtctgtggcggaaccgactactttgggtgtccgtgtttccttttattacatgatggctgcttatggtgacaatcacagattgttgtcataaagcgaattggattggccatccggtgagaattaaaacaattatctacttgtttgttggatttgttcctataaacacccatacaccttgtttgattgaagtaattctattgataaggcaacactattaca

SEQ ID NO: 19841 - DNA, 749 bp, synthetic construct
  source 1..749: mol_type = other DNA
gaaattaaaacagctctggggttgttcccaccccagaggcccacgtggcggctagtacactggtattacggtacccttgtacgcctgttttacaccccttcccccgtaacttagaagctttaaatccaagttcaatagtgagtggtgcaacccagtactgctatgaacaagcacttctgttaccccggtgagatcgcataagctgtccccacggctaaaagcgattgattcgttatccactcttgtacttcgagaagcctagtaagaccttgggatcctcgatgcgttgcgctcaacactctaccccagagtgtagcttgggctgatgagtctggacattcctcaccggtgacggtggtccaggctgcgttggcggcctacctgtggcccaaagccacaggacgctagttgtgaacaaggtgtgaagagcctattgagctacaagagagtcctccggcccctgaatgcggctaatcccaaccacggagcaggtgattgcaatccagcaactagcctgtcgtaacgcgcaagtctgtggcggaaccgactactttgggtgtccgtgtttccttttattacataatggctgcttatggtgacaatcacagattgttgtcataaagcgaattggattggccatccggtgagaattaaaacgattatttacttgtttgttgaatttgttcctatacacacccatacaccttgtttgattgaagtaattctgttgataagacaacactgttacg

SEQ ID NO: 19842 - DNA, 722 bp, synthetic construct
  source 1..722: mol_type = other DNA
ttcccacccacagggcccattgggcgctagcacactggtattacggtacctttgtgcgcctgttttatgcaccctccccgaatgtaacttagaagctttaccaagatggtcaatagaaggtccagcacaccagttggatcccgaccaagcacttctgttaccccggactgagtatcaataggccgttcgcacggctgaaggagaaaacgttcgttacccggccaattacttcgagaaacccagtaacaccatgaaagttgcgcagcgtttcgctccgcacgaccccggtgtagatcaggtcgatgagtcaccgcgttccccacgggcgaccgtggcggtggctgcgctggcggcctgcccatggggcaacccatgggacgcttcaatactgacatggtgcgaagagtctattgagctaattggtagtcctccggcccctgaatgcggctaatcctaactgcggagcaggtaccctcaagccagagggcagtctgtcgtaacgggcaactctgcagcggaaccgactactttgggtgtccgtgtttccttttattcttgaactggctgcttatggtgacaattgaaagattgttaccatatagctattggattggccatccagtgacaaacagagtgattatatatttgtttgttggttttgttccattaagctacaaggttttaagcacacttaaatttatcttgttactcaactcagcaaa

SEQ ID NO: 19843 - DNA, 741 bp, synthetic construct
  source 1..741: mol_type = other DNA
taaaacagctctggggttgcacccaccccagaggcccacgtggcggctagtactccggtattgcggtacccttgtacgcctgttttatactcccttcccgtaacttagacgcacaaaaccaagttcaatagaagggggtacaaaccagtaccaccacgaacaagcacttctgtttccccggtgatgttgtatagactgcttgcgtggttgaaagcgacggatccgttatccgcttatgtacttcgagaagcccagtaccacctcggaatcttcgatgcgttgcgctcagcactcaaccccagagtgtagcttaggctgatgagtctggacatccctcaccggtgacggtggtccaggctgcgttggcggcctacctatggctaacgccatgggacgctagttgtgaacaaggtgtgaagagcctattgagctacataagaatcctccggcccctgaatgcggctaatcccaacctcggagcaggtggtcacaaaccagtgattggcctgtcgtaacgcgcaagtccgtggcggaaccgactactttgggtgtccgtgtttccttttattttattgtggctgcttatggtgacaatcacagattgttatcataaagcgaattggattggccatccggtgaaagtgagattcattatctatctgtttgctggattcgctccattgagtgtgtttactctaagtacaatttcaacagttatttcaatcagacaattgtatcata

SEQ ID NO: 19844 - DNA, 747 bp, synthetic construct
  source 1..747: mol_type = other DNA
ttaaaacagctctggggttgtacccaccccagaggcccacgtggcggctagcactccggtattacggtacccttgtgcgcctgttttatactcccctcccgcaacttagaagcacgaaaccaagttcaatagaagggggtacaaaccagtaccactacgaacaagcacttctgtttccccggtgacattgcatagactgctcacgcggttgaaagtgatcgatccgttacccgcttgtgtacttcgaaaagcctagtatcgccttggaatcttcgacgcgttgcgctcagcacccgaccccggggtgtagcttaggctgatgagtctggacattcctcaccggtgacggtggtccaggctgcgttggcggcctacctatggctaacgccataggacgttagaagtgaacaaggtgtgaagagcctattgagctacataagagtcctccggcccctgaatgcggctaatcctaaccacggagcaggcggtcgcgaaccagtgactggcttgtcgtaacgcgcaagtctgtggcggaaccgactactttgggtgtccgtgtttcctgttatttttatcatggctgcttatggtgacaatcagagattgttatcataaagcgaattggattggccatccggtgagtgttgtgtcaggtatacaactgtttgttggaaccactgcgttagctttacttctcatttaaccaattaatcaaaaacaatacgaggataaaacaacaatactaca

SEQ ID NO: 19845 - DNA, 747 bp, synthetic construct
  source 1..747: mol_type = other DNA
ttaaaacagctctggggttgtacccaccccagaggcccacgtggcggctagcactccggtattacggtacccttgtgcgcctgttttatactcccctcccgcaacttagaagcacgaaaccaagttcaatagaagggggtacaaaccagtaccactacgaacaagcacttctgtttccccggtgacattgcatagactgctcacgcggttgaaagtgatcgatccgttacccgcttgtgtacttcgaaaagcctagtatcgccttggaatcttcgacgcgttgcgctcagcacccgaccccggggtgtagcttaggctgatgagtctggacattcctcaccggtgacggtggtccaggctgcgttggcggcctacctatggctaacgccataggacgttagatgtgaacaaggtgtgaagagcctattgagctacataagagtcctccggcccctgaatgcggctaatcctaaccacggagcaggcggtcgcgaaccagtgactggcttgtcgtaacgcgcaagtctgtggcggaaccgactactttgggtgtccgtgtttcctgttatttttatcatggctgcttatggtgacaatcagagattgttatcataaagcgaattggattggccatccggtgagtgttgtgtcaggtatacaactgtttgttggaaccactgtgttagctttacttctcatttaaccaattaatcaaaaacaatacgaggataaaacaacaatactaca

SEQ ID NO: 19846 - DNA, 747 bp, synthetic construct
  source 1..747: mol_type = other DNA
ttaaaacagctctggggttgtacccaccccagaggcccacgtggcggctagcactccggtaccacggtacccttgtgcgcctgttttatactcccctcccgcaacttagaagcatgaaaccaagttcaatagaagggggtacaaaccagtaccaccacgaacaagcacttctgttcccccggtgacattgcatagactgctcacgcggttgaaagtgatcgatccgttatccgcttgtgtacttcgagaagcctagtatcaccttggaatcttcgatgcgttgcgctcagcacccgaccccggggtgtagcttaggctgatgagtctggacattcctcaccggtaacggtggtccaggctgcgttggcggcctacctatggctaacgccataggacgctagatgtgaacaaggtgtgaagagcctattgagctacataagagtcctccggcccctgaatgcggctaatcctaaccacggagcaggcggtcgcgaaccagcgattagcttgtcgtaatgcgcaagtctgtggcggaaccgactactttgggtgtccgtgtttcctgttattattatcatggctgcttatggtgacaatcagtgattgttatcataaagcgaattggattggccatccggtgagtgttgtgtcaggtgtacaactgtttattggaaccattgtgttagttttacttctcgttcaaccaattggtcaaaaacagtacgaggataagacaacaatactaca

SEQ ID NO: 19847 - DNA, 745 bp, synthetic construct
  source 1..745: mol_type = other DNA
ttaaaacagctctggggttgttcccaccccagaggcccacgtggcggccagtacactggtattacggtacccttgtacgcctgttttacaccccttcccccgtaacttagaagctttaaacccaagttcaatagtgggtagtacaacccagtactgctacgaacaagcacttctgttaccccggtgagattgcataagctgtccccacggctaaaagcgattgatccgttacccgctcttgtacttcgagaagcctagtaaaaccttggaatcttcgatgcgttgcgctcaacactcaaccccagagtgtagcttaggctgatgagtctggacattcctcaccggcgacggtggtccaggctgcgttggcggcctacctgtggcccaaagccacaggacgctagttgtgaacaaggtgtgaagagcctattgagctacaagggagtcctccggcccctgaatgcggctaatcccaaccacggagcaggtggttgcaacccagcaactggcctgtcgtaacgcgcaagtctgtggcggaaccgactactttgggtgtccgtgtttccttttattacataatggctgcttatggtgacaatcacagattgttgtcataaagcgaattggattggccatccagtgagagttaaagtaattatctacttgtttattggatttgttcctataaccgcccatacaccttgcttgattgaagtgatcctgtcaataagacatcactattaca

SEQ ID NO: 19848 - DNA, 748 bp, synthetic construct
  source 1..748: mol_type = other DNA
gaaattaaaacagctctggggttgttcccaccccagaggcccacgtggcggctagtacactggtattacggtacccttgtacgcctgttttacaccccttcccccgtaacttagaagctttaaatccaagttcaatagtgagtggtacaacccagtactgctatgaacaagcacttctgttaccccggtgagattgcataagctgtccccacggctaaaagcgattgatccgttatccactcttgtacttcgagaagcctagtaagaccttgggatcctcgatgcgttgcgctcaacactctaccccagagtgtagcttgggctgatgagtctggacattccccaccggtgacggtggtccaggctgcgttggcggcctacctgtggcccaagccacaggacgctagttgtgaacaaggtgtgaagagcctattgagctacaagagagtcctccggcccctgaatgcggctaatcccaaccacggagcaggtgattgcaatccagcaactagcctgtcgtaacgcgcaagtctgtggcggaaccgactactttgggtgtccgtgtttccttttattacataatggctgcttatggtgacaatcacagattgttgtcataaagcgaattggattggccatccggtgagaattaaaacgattatttacttgtttgttggatttgttcctatacacacccatacaccttgcttgattgaagtaattctgttaataagacaacactattgcg

SEQ ID NO: 19849 - DNA, 749 bp, synthetic construct
  source 1..749: mol_type = other DNA
gaaattaaaacagctctggggttgttcccaccccagaggcccacgtggcggctagtacactggtattacggtacccttgtacgcctgttttacaccccttcccccgtaacttagaagctttaaatccaagttcaatagtgagtggtacaacccagtactgctatgaacaagcacttctgttaccccggtgagattgcataagctgtccccacggctaaaagcgattgatccgttatccactcttgtacttcgagaagcctagtaagaccttgggatcctcgatgcgttgcgctcaacactctaccccagagtgtagcttgggctgatgagtctggacattcctcaccggtgacggtggtccaggctgcgttggcggcctacctgtggcccaaagccacaggacgctagttgtgaacaaggtgtgaagagcctattgagctacaagagagtcctccggcccctgaatgcggctaatcccaaccacggagcaggtgattgcgatccagcaactagcctgtcgtaacgcgcaagtctgtggcggaaccgactactttgggtgtccgtgtttccttttattacataatggctgcttatggtgacaatcacagattgttgtcataaagcgaattggattggccatccggtgagaattaaaacgattatttacttgtttgttggatttgttcctatacacacccatacaccttgcttgattgaagtaactctgttgataagacaacactattacg

SEQ ID NO: 19850 - DNA, 746 bp, synthetic construct
  source 1..746: mol_type = other DNA
ttaaaacagctctggggttgtacccaccccagaggcccacgtggcggctagcactccggtattacggtacccttgtgcgcctgttttatactcccctcccgcaacttagaagcacgaaaccaagttcaatagaagggggtacaaaccagtaccactatgaacaagcacttctgtttccccggtgacattgcataggctgctcacgcggctaaaagtgatcgatccgttacccgcttgtgtacttcgaaaagcctagtatcgccttggaatcttcgacgcgttgcgctcagcacccgaccccggggtgtagcttaggctgatgagtctggacattcctcaccggtgacggtggtccaggctgcgttggcggcctacctatggctaacgccataggacgctagatgtgaacaaggtgtgaagagcctattgagctacataagagtcctccggcccctgaatgcggctaatcctaaccacggagcaggcggtcacgaaccagtgactggcttgtcgtaacgcgcaagtctgtggcggaaccgactactttgggtgtccgtgtttcctgttatttttatcatggctgcttatggtgacaatcagagattgttatcataaagcgaattggattggccatccggtgagtgttgcatcaggtatacaactgtttgttggaaccactgtgttagctttgcttctcatttaaccaattaatcataacaatacgaggataaaacaacaatactgca

SEQ ID NO: 19851 - DNA, 745 bp, synthetic construct
  source 1..745: mol_type = other DNA
ttaaaacagctctggggttgttcccaccccagaggcccacgtggcggccagtactccggtattacggtacccttgtacgcctgttttatatccccttcccccgcaacttagaagttataaaccaagttcaatagaagggggtacaagccagtaccaccacgaacaagcacttctgtttccccggtgatgttgtatagactgctaacgcggttgaaaacagctgatccgttatccgcttgtgtacttcgagaagcctagtatcatcttggaatcttcgatgcgttgcgttcagcgctctaccccagagcgtagcttaggctgatgagtctgggcattccccaccggcgacggtggcccaggctgcgttggcggcctacctatggctaacgccataggacgctagttgtgaacaaggtgtgaagagcctattgagctacacaagagtcctccggcccctgaatgcggctaatcctaaccatggagcaagtgatcacaatccagtgatattcttgtcgtaacgcgcaagtccgtggcggaaccgactactttgggtgtccgtgtttccttttacttttatcatggctgcttatggtgacaatcattgattgttatcataaagcgaattggattggccatccggtgaaagtgagacttatcatctacttgtttgttggattcactccattgaacacattcactcccagtatcatttcaatagtaatcagaattagacagttgtatcaca

SEQ ID NO: 19852 - DNA, 747 bp, synthetic construct; identical to SEQ ID NO: 1161
  source 1..747: mol_type = other DNA

SEQ ID NO: 19853 - DNA, 745 bp, synthetic construct
  source 1..745: mol_type = other DNA
ttaaaacagctctggggttgttcccaccccagaggcccacgtggcggctagtacactggtattacggtacccttgtacgcctgttttataccccttcccccgtaacttagaagctttaaatccaagttcaacagtgagtggtacaacccagtactgctacgaacaagcacttctgttaccccggtgagattgcataggctgtccccacggctaaaagcgattgatccgttacccgctcttgtacttcgagaagcctagtaagaccttgggatcttcgatgcgttgcgctcaacactcaaccccagagtgtagcttaggctgatgagtctggacattcctcaccggtgacggtggtccaggctgcgttggcggcctacctgtggcccaaagccacaggacgctagttgtgaacaaggtgtgaagagcctattgagctacaagagagtcctccggcccctgaatgcggctaatcctaaccacggagcaggtgattgcaacccagcaactagcctgtcgtaacgcgcaagtctgtggcggaaccgactactttgggagtccgtgtttccttttattacatgatggctgcttatggtgacaatcacagattgttgtcataaagcgaattggattggccatccggtgagaattaaaacaattatctacttgtttgttggatttgttcctataaacacccatacaccttgcttgattgaagtaactctattgataaggcaacactatcaca

SEQ ID NO: 19854 - DNA, 747 bp, synthetic construct
  source 1..747: mol_type = other DNA
ttaaaacagctctggggttgttcccaccccagaggcccacgtggcggctagtacactggtattacggtacccttgtacgcctgttttacacccctttcccccgtaacttagaagcttttaaatccaagttcaacagtgagtggtacaacccagtactactatgaacaagcacttctgttaccccggtgagattgcataagctgtccccacggctgaaagcgattgatccgttatccgctcttgtacttcgagaagcctagtaaaaccttgggatcctcgatgcgttgcgctcaacactctaccccagagtgtagcttgggctgatgagtctggacattccccaccggtgacggtggtccaggctgcgttggcggcctacctgtggcccaaagccacaggacgctagttgtgaacaaggtgtgaagagcctattgagctacaagagagtcctccggcccctgaatgcggctaatcccaaccacggagcaggtgattgcaacccagcaactagcctgtcgtaacgcgcaagtctgtggcggaaccgactactttgggtgtccgtgtttccttttattacacaatggctgcttatggtgacaatcacagattgttgtcataaagcgagttggattggccatccggtgagaattaaaacaattatttacttgtttgttggacttgttcctatacacacccatacactttgcttgattgaagtaattctgtcaataagacaacactattacg

SEQ ID NO: 19855 - DNA, 742 bp, synthetic construct
  source 1..742: mol_type = other DNA
ttaaaacagcctgtgggttgttcccacccacagggcccacggggcgctagcactctggtatcgcggtacctttgtgcgcctgttttatacaccctcccccaacgtaacttagaagcttaatccgaatggtcaatagacgacccaacacgccagctgggccccgaccaggcacttctgttaccccggaccgagtatcaataagctgctcacgcggctgaaggagaaagcgttcgtcacccggccaattacttcgagaaacccagtaacaccatggaggttgcgcagcgtttcgctccgcacaaccccagtgtagatcaggtcgatgagtcaccgcataccccacgggcaaccgtggcggtggctgcgttggcggcctgcccatggggtaacccatgggacgcctcaatactgacatggtgcgaagagtctattgagctaattggtagtcctccggcccctgaatgcggctaatcctaactgcggagcaggtactcacaagccagtgagcggcctgtcgtaatgggcaactctgcagcggaaccgactactttgggtgtccgtgtttccttttattcttgacttggctgcttatggtgacaattcagagattgttaccatatagctattggattggccatccggtgacaaatagagcaattatctatttgtttgttggttttattccattaaattacaaagtattaaacacccttaattacattttaatacttaactcaacaaa

SEQ ID NO: 19856 - DNA, 744 bp, synthetic construct
  source 1..744: mol_type = other DNA
ttaaaacagcctgtgggttgttcccaccccagaggcccacgtggcggccagtactccggtattgcggtacccttgtacgcctgttttacactcccttccccgtaacttagacgcaataaaccaagttcactaggaggggtgcaaaccagcaccaccacgaacaagcacttctgtttccccggtgacattgtatagactgtatccacggttgaaaacgattgatccgttatccgctcttgtacttcgagaagcctagtatcatcttggaatcttcgacgcgttgcgctcagcattcaaccccagaatgtagcttaggtcgatgagtctggacattcctcaccggtgacggtggtccaggctgcgttggcggcctacctgtgacccaaagtcacaggacgctagttgtgaacaaggtgtgaagagcctattgagctacaagagagtcctccggcccctgaatgcggctaatcctaaccacggagcaagtgctcacgaaccagtgagtggcttgtcgtaacgagcaattctgtggcggaaccgactactttgggtgtccgtgtttcctttttaactttaaatggctgcttatggtgacaatcattgattgttatcataaagcgaattggattggccatccggtgaaaatcaagttgatcatttatttgtttgttggattcactccattaactcatttttcaattgacctaatacgtattgtattattagttagaaacatacatcaca

SEQ ID NO: 19857 - DNA, 746 bp, synthetic construct
  source 1..746: mol_type = other DNA
ttaaaacagcctgtgggttgttcccaccccagaggcccacgtggcggctagtactccggtattacggtacccttgtacgcctgttttatacccccttcccccagaaacttagacgttatgaaaccaagttcaataggagggggcacgaaccagtgtcaccacgaacaagcacctctgtttccccggtgattttacataagctgtacccacggctgaaagtgaatgatccgttatccgcttgggtacttcgagaagcctagtaccacctttggatcttcgacgcgttgcgctcagcactctaccccgagtgtagcttaggtcgatgagtctgggcataccccaccggtgacggtggcccaggctgcgttggcggcctacccatggttaacaccatgggacgctagtagtgaacaaggtgtgaagagcctattgagctactcaagagtcctccggcccctgaatgcggctaatcctaaccatggagcaggtgctttcaatccagaaagtggcctgtcgtaatgcgtaagtccgtggcggaaccgactactttgggtgtccgtgtttcctttttacttttgtatggctgcttatggtgacaatcacagattgttatcataaagcaaattggattggccatccggtgaaagttaagcacatcatttatctatttgttggattcactccaatcacttctaaaacacttcagttgatacgtgtggtgctactaatcaggcagctgtatcaca

SEQ ID NO: 19858 - DNA, 746 bp, synthetic construct
  source 1..746: mol_type = other DNA
ttaaaacagcctgtgggttggtcccaccccagaggcccacgtggcggctagtactccggtatcacggtacccttgtacgcctgttttatatccccttcccccagaaacttagacgttatgaaaccaagttcaataggaggggacacgaaccagtgtcaccacgaacaagcacttctgtaaccccggtgattttacataagctgtacccacggctgaaagtgaatgatccgttatccgcttgggtacttcgagaagcctagtaccacctttggatctccgacgcgttgcgctcagcactctaccccgagtgtagcttaggtcgatgagtctgggcatgccccaccggtgacggtggcccaggctgcgttggcggcctacccatggttaacaccatgggacgctagttgtgaacaaggtgtgaagagcctattgagctactcaagagtcctccggcccctgaatgcggctaatcccaaccatggagcaggtgctttcaatccagaaagtggcctgtcgtaatgcgtaagtccgtggcggaaccgactactttgggtgtccgtgtttcctttttacttttgtatggctgcttatggtgacaatcacagattgttatcataaagcgaattggattggccatccggtgaaagttaaacacatcatttatctatttgttggatttactccaatcacccctaagacacttcagttgatacgtgtagtgttactaatcaggcaactgtatcaca

SEQ ID NO: 19859 - DNA, 748 bp, synthetic construct
  source 1..748: mol_type = other DNA
tttaaaaagctctggggttgttcccaccccagaggcccacgtggcggctagtacactggtattacggtacccttgtacgcctgttttacaccccttttcccccgtaacttagaagcttttaaattcaagttcaacagtgagtggtacaacccagtactactatgaacaagcacttctgttaccccggtgagattgcataagctgtccccacggctaaaagcgattgatccgttatccgctcttgtacttcgagaagcctagtaaaaccttgggatcctcgatgcgttgcgctcaacactcaaccccagagtgtagcttgggctgatgagtctggacattcctcaccggtgacggtggtccaggctgcgttggcggcctacctgtggcccaaagccacaggacgctagttgtgaacaaggtgtgaagagcctattgagctacaagagagtcctccggcccctgaatgcggctaatcccaaccacggagcaggtgattgcaacccagcaactagcctgtcgtaacgcgcaagtctgtggcggaaccgactactttgggtgtccgtgtttccttttattacataatggctgcttatggtgacaatcacagattgttgtcataaagcgagttggattggccatccagtgagaattaaaacaattatctacttgtttgttggatttgttcctatacacacccatacaccttgcttgattgaagtaattctgtcgataagacaacactattacg

SEQ ID NO: 19860 - DNA, 745 bp, synthetic construct
  source 1..745: mol_type = other DNA
aaaacagctctggggttgtacccaccccagaggcccacgtggcggctagcactccggtattacggtacccttgtgcgcctgttttatactcccctcccgcaacttagaagcacgaaaccaagttcaatagaagggggtacaaaccagtaccactacgaacaagcacttctgtttccccggtgacattacatagactgctcacgcggttgaaagtgatcgatccgttacccgcttgtgtacttcgaaaagcctagtatcgccttggaatcttcgacgcgttgcgctcagcacccgaccccggggtgtagcttaggctgatgagtctggacattcctcaccggtgacggtggtccaggctgcgttggcggcctacctatggctaacgccataggacgctagatgtgaacaaggtgtgaagagcctattgagctacataagagtcctccggcccctgaatgcggctaatcctaaccacggagcaggcggtcgcgaaccagtgactggcttgtcgtaacgcgcaagtctgtggcggaaccgactactttgggtgtccgtgtttcctgttatttttatcatggctgcttatggtgacaatcagagattgttatcataaagcgaattggattggccatccggtgagtattgtgtcaggtatacaactgtttgttggaaccactgtgttagctttacttctcatttaaccaattaatcaaaaacaatacgaggataaaacaacaatactaca

SEQ ID NO: 19861 - DNA, 745 bp, synthetic construct
  source 1..745: mol_type = other DNA
aaaacagctctggggttgtacccaccccagaggcccacgtggcggctagcactccggtattacggtacccttgtgcgcctgttttatactcccctcccgcaacttagaagcacgaaaccaagttcaatagaagggggtacaaaccagtaccactacgaacaagcacttctgtttccccggtgacattgcatagactgctcacgcggttgaaagtgatcgatccgttacccgcttgtgtacttcgaaaagcctagtatcgccttggaatcttcgacgcgttgcgctcagcacccgaccccggggtgtagcttaggctgatgagtctggacattcctcaccggtgacggtggtccaggctgcgttggcggcctacctatggctaacgccataggacgttagatgtgaacaaggtgtgaagagcctattgagctacataagagtcctccggcccctgaatgcggctaatcctaaccacggagcaggcggtcgcgaaccagtgactggcttgtcgtaacgcgcaagtctgtggcggaaccgactactttgggtgtccgtgtttcctgttatttttatcatggctgcttatggtgacaatcagagattgttatcataaagcgaattggattggccatccggtgagtgttgtgtcaggtatacaactgtttgttggaaccactgtgttagctttacttctcatttaaccaattaatcaaaaacaatacgaggataaaacaacaatactaca

SEQ ID NO: 19862 - DNA, 747 bp, synthetic construct
  source 1..747: mol_type = other DNA
ttaaaacagctctggggttgtacccaccccagaggcccacgtggcggctagcactccggtattacggtacccttgtgcgcctgttttatactcccctcccgcaacttagaagcacgaaaccaagttcaatagaagggggtacaaaccagtaccactacgaacaagcacttctgtttccccggtgacattgcatagactgctcacgcggttgaaagtgatcgatccgttacccgcttgtgtacttcgaaaagcctagtatcgccttggaatcttcgacgcgttgcgctcagcacccgaccccggggtgtagcttaggctgatgagtctggacattcctcaccggtgacggtggtccaggctgcgttggcggcctacctatggctaacgccataggacgctagatgtgaacaaggtgtgaagagcctattgagctacataagagtcctccggcccctgaatgcggctaatcctaaccacggagcaggcggtcgcgaaccagtgactggcttgtcgtaacgcgcaagtctgtggcggaaccgactactttgggtgtccgtgtttcctgttatttttatcatggctgcttatggtgacaatcagagattgttatcataaagcgaattggattggccatccggtgagtgttgtgtcaggtatacaactgtctgttggaaccactgtgttagctttacttctcatttaaccaattaatcaaaaacaatacgaggataaaacaacaatactaca

SEQ ID NO: 19863 - DNA, 734 bp, synthetic construct
  source 1..734: mol_type = other DNA
ttaaaacagctctggggttgcacccaccccagaggcccacgtggcggctagtactccggtattgcggtacccttgtacgcctgttttatactcccttcccgtaacttagacgcacaaaaccaagttcaatagaagggggtacaaaccagtaccaccacgaacaagcacttctgtttccccggtgatgttgtatagactgcttgcgtggttgaaggcgacggatccgttatccgcttatgtacttcgagaagcccagtaccacctcggaatcttcgatgcgttgcgctcagcactcaaccccagagtgtagcttaggctgatgagtctggacatccctcaccggcgacggtggtccaggctgcgttggcggcctacctatggctaacgccatgggacgctagttgtgaacaaggtgtgaagagcctattgagctacataagaatcctccggcccctgaatgcggctaatcccaacctcggagcaggtggtcacaaaccagtgattggcctgtcgtaacgcgcaagtccgtggcggaaccgactactttgggtgtccgtgtttccttttattttattgtggctgcttatggtgacaatcacagattgttatcataaagcgaattggattggccatccggtgaaagtgagattcattatttatctgttttgctccattgagtgtgtttattttaagtacaatttcaacagttatttcaatcagacaattgtatcata

SEQ ID NO: 19864 - DNA, 745 bp, synthetic construct
  source 1..745: mol_type = other DNA
ttaaaacagctgtggggttgttcccaccccagaggcccacgtggcggctagtacactggtattacggtacccttgtacgcctgttttataccccttcccccgtaacttagaagctttaaatccaagttcaacagtgagtggtacaacccagtactgctacgaacaagcacttctgttaccccggtgagattgcataggctgtccccacggctaaaagcgattgatccgttacccgctcttgtacttcgaaaagcctagtaagaccttgggatcttcgatgcgttgcgctcaacactcaaccccagagtgtagcttaggctgatgagtctggacattcctcaccggtgacggtggtccaggctgcgttggcggcctacctgtggcccaaagccacaggacgctagttgtgaacaaggtgtgaagagcctattgagctacaagagagtcctccggcccctgaatgcggctaatcccaaccacggagcaggtgattgcaacccagcaactagcctgtcgtaacgcgcaagtctgtggcggaaccgactactttgggtgtccgtgtttccttttattacatgatggctgcttatggtgacaatcacagattgttgtcataaagcgaattggattggccatccggtgagaattaaaacaattatctacttgtttgttggatttgttcctataaacacccatacaccttgcttgattgaagtaattctattgataaggcaacactatcaca

SEQ ID NO: 19865 - DNA, 747 bp, synthetic construct
  source 1..747: mol_type = other DNA
ttaaaacagctctggggttgttcccaccccagaggcccacgtggcggctagtacactggtattacggtacccttgtacgcctgttttacaccccttttcccccgtaacttagaagctttgcaattgaagttctcagggggtggtacgaccctccactactatgaacaagcacttctgttaccccggtgagattgcataagctgtccccacggctaaaagcgattgatccgttatccgctcttgtacttcgagaagcctagtaaaaccttgggatcctcgatgcgttgcgctcaacactcaaccccagagtgtagcttgggctgatgagtctggacattcctcaccggtgacggtggtccaggctgcgttggcggcctacctgtggcccaaagccacaggacgctagttgtgaacaaggtgtgaagagcctattgagctacaagagagtcctccggcccctgaatgcggctaatcccaaccacggagcaggtgattgcaacccagcaactagcctgtcgtaacgcgcaagtctgtggcggaaccgactactttgggtgtccgtgtttccttttattacataatggctgcttatggtgacaatcacagattgttgtcataaagcgagttggattggccatccagtgagaattaaaacaattatctacttgtttgttggatttgttcctatacacacctatacaccttgcttgattgaagtaattctgtcgataagacaacactattacg

SEQ ID NO: 19866 - DNA, 746 bp, synthetic construct
  source 1..746: mol_type = other DNA
ttaaaacagctctggggttgttcccaccccagaggcccacgtggcggctagtacactggtattacggtacccttgtacgcctgttttacacccctttcccccgtaacttagaagctttaaatccaagttcaacagtgagtggtacaacccagtactactacgaacaagcacttctgttgccccggtgagattgcataggctgtccccacggctaaaagcgattgatccgttacccgctcttgtacttcgagaagcctagtaagaccttgggatcttcgatgcgttgcgctcagcactcaaccccagagtgtagcttgggctgatgagtctggacattcctcaccggtgacggtggtccaggctgcgttggcggcctacctgtggcccaaagccacaggacgctagttgtgaacaaggtgtgaagagcctattgagctacaagagagtcctccggcccctgaatgcggctaatcccaaccacggagcaggtgattgcaacccagcaactagcctgtcgtaacgcgcaagtctgtggcggaaccgactactttgggtgtccgtgtttccttttatcacataatggctgcttatggtgacaatcacagattgttgtcataaagcgaattggattggccatccggtgagaattaaaacaattatctacttgtttgttggatttgttcctataaacacccaaacaccttgcttgattgaagtaattctgttggtaagacaacactatcaca

SEQ ID NO: 19867 - DNA, 746 bp, synthetic construct
  source 1..746: mol_type = other DNA
ttaaaacagctctggggttgttcccacccgagaggcccacgtggcggctagtacactggtattacggtacccttgtacgcctgttttacacccctttcccccgtaacttagaagctttaaatccaagttcaacagtgagtggtacaacccagtactactacgaacaagcacttctgttgccccggtgagattgcataggctgtccccacggctaaaagcgattgatccgttacccgctcttgtacttcgagaagcctagtaagaccttgggatcttcgatgcgttgcgctcagcactcaaccccagagtgcagcttgggctgatgagtctggacattcctcaccggtgacggtggtccaggctgcgttggcggcctacctgtggcccaaagccacaggacgctagttgtgaacaaggtgtgaagagcctattgagctacaagagagtcctccggcccctgaatgcggctaatcccaaccacggagcaggtgattgcaacccagcaactagcctgtcgtaacgcgcaagtctgtggcggaaccgactactttgggtgtccgtgtttccttttatcacataatggctgcttatggtgacaatcacagattgttgtcataaagcgaattggattggccatccggtgagaattaaaacaattatatacttgtttgttggatttgttcctataaacacccaaacaccttgcttgattgaagtaattctgttggtaaggcaacactatcaca

SEQ ID NO: 19868 - DNA, 741 bp, synthetic construct
  source 1..741: mol_type = other DNA
ttaaaacagctctggggttgttcccaccccagaggcccacgtggcggctagtactccggtatcacggtacccttgtacgcctgttttatactccctgccccgtaacttagaagcaaaccaaacaagttcaataggagggggtgcaagcccgcaccaccacgaacaagtactcctgtctccccggtgaggttgtatagactgtacccacggttgaaaacgactgatccgttatccgctctagtacttcgggaagcctagtagcattttggaatcttcgatgcgttgcgctcagcactcaaccccggagtgtagcttaggtcgatgagtctggacatcccccaccggtgacggtggtccaggctgcgttggcggcctacctgtggtccaaagccacaggacgctagttgtgaacaaggtgtgaagagcctactgagctactagagagtcctccggcccctgaatgcggctaatcctaaccacggagcaggtagttgcaacccagcaaccagcctgtcgtaatgcgcaagtctgtggcggaaccgactactttgggtgaccgtgtttccttttattttcatatatggctgcttatggtgacaatcattgattgttatcatatagcgacttggattggccatccggtgagaattagaacgactgtttacccgtttgctgattttgataacactccacacacttaccatttgagaattgtactgttggcaagacagcaccattata

SEQ ID NO: 19869 - DNA, 754 bp, synthetic construct
  source 1..754: mol_type = other DNA
ttaaaacagctctggggttgttcccaccccagaggcccacgtggcggctagtactctggtatcacggtacccttgtacgcctgttttatatccccttcccctgtaacttagaagcaaacaacacaagttcaatagaagggggtacaaaccagtaccaccacgaacaagcacttctgttaccccggtgatattgcatagactgtccccacggtcaaaagcgattgatccgttatccgcttaagtacttcgagaagcctagtatcaccttggaatctccgatgcgttgcgctcatcactcgaccccggagtgtagcttaggtcgatgagtctggacgatcctcactggcgacagtggtccaggctgcgttggcggcctacctatggctcaaagccataggacgctagttgtgaacaaggtgtgaagagcctattgagctacttgagagtcctccggcccctgaatgcggctaatcccaaccacggatcaggtgattgcaatccagcagttggcctgtcgtaacgcgcaagtctgtggcggaaccgactactttgggtgtccgtgtttcctttttattttattgctggctgcttatggtgacaatcgtagattgttatcatagagcgaattggattggccatccggtgaaagtaagacacattatttacctttttgttggatttactacactatccacacacactccagatttaatttgtatagttcttttaattagaaggtcttatcattacaaca

SEQ ID NO: 19870 - DNA, 746 bp, synthetic construct
  source 1..746: mol_type = other DNA
taaaacagctctggggttgtacccaccccagaggcccacgtggcggctagcactccggtattacggtacccttgtgcgcctgttttatactcccctcccgcaacttagaagcacgaaaccaagttcaatagaagggggtacaaaccagtaccactacgaacaagcacttctgtttccccggtgacattgcatagactgctcacgcggttgaaagtgatcgatccgttacccgcttgtgtacttcgaaaagcctagtatcgccttggaatcttcgacgcgttgcgctcagcacccgaccccggggtgtagcttaggctgatgagtctggacattcctcaccggtgacggtggtccaggctgcgttggcggcctacctatggctaacgccataggacgctagatgtgaacaaggtgtgaagagcctattgagctacataagagtcctccggcccctgaatgcggctaatcctaaccacggagcaggcggtcgcgaaccagtgactggcttgtcgtaacgcgcaagtctgtggcggaaccgactactttgggtgtccgtgtttcctgttatttttatcatggctgcttatggtgacaatcagagattgttatcataaagcgaattggattggccatccggtgagtgttgtgtcaggtatacaactgtttgttggaaccactgtgttagctttacttctcatttaaccaattaatcaaaaacaatacgaggataaaacaacaatactaca

SEQ ID NO: 19871 - DNA, 746 bp, synthetic construct
  source 1..746: mol_type = other DNA
ttaaaacagcctgtgggttgttcccaccccagaggcccacgtggcggccagtacactggtattacggtacctttgtacgcctgttttatatcccctcccccgtgtaactttagaagcaattcaaacagttcaatagagggggtacaaaccagtaccaccacgaacaagcacttctgttcccccggtgaagctgtatagactgtttcccacggttgaaaatggctgatccgttatccgcttaagtacttcgagaagcctagtaccaccttggaatcttcgacgcgttgcgctcagcactctaccccgagtgtagcttaggctgatgagtctgggcattccccaccggcgacggtggcccaggctgcgttggcggcctacccatggccaacgccatgggacgctagttgtgaacaaggtgtgaagagcctattgagctacttgagagtcctccggcccctgaatgcggctaatcctaaccacggagcaagtgctcacaaaccagtgagtggcttgtcgtaacgcgcaagtctgtggcggaaccgactactttgggtgtccgtgtttccttttatttttatcatggctgcttatggtgacaatcatagattgttatcataaagcgaattggattggccatccggtgaaaatcaagcatattgtattcttgtttgttggatttacacctctcactcactttacatttggtttaataaatattgtattgttagttagacaatattactaca

SEQ ID NO: 19872 - DNA, 752 bp, synthetic construct
  source 1..752: mol_type = other DNA
ttaaaacagcctgtgggttgttcccaccccagaggcccacgtggcggctagtactccggtattacggtacccttgtacgcctgttttatatcccttccccgtaacttagaagcaagcaacacaagttcaatagaagggggtacaaaccagtaccaccacgaacaagcacttctgttaccccggtgatgttgcatagactgttcccacggtcaaaagcgattgatccgttatccgctcaagtacttcgagaagcctagtaccactttggaatcttcgatgcgttgcgctcaacactcgaccccggagtgtagcttaggtcgatgagtctggacgatcctcactggcgacagtggtccaggctgcgttggcggcctacctatggcccaaagccataggacgctagttgtgaacaaggtgtgaagagcctattgagctacttgagagtcctccggcccctgaatgcggctaatcccaaccacggatcaggtgattgcaatccagcagttggcctgtcgtaacgcgcaagtctgtggcggaaccgactactttgggtgtccgtgtttccttttattcttattactggctgcttatggtgacaatcgaagattgttatcataaagcgaattggattggccatccggtgaaagtaaaacacattatttacctttttgttggatttactacattatccacattcactccagacttaattcgcatagttcttttgattagaagattttactaacataaca

SEQ ID NO: 19873 - DNA, 745 bp, synthetic construct
  source 1..745: mol_type = other DNA
aaaacagctctggggttgtacccaccccagaggcccacgtggcggctagcactccggtattacggtacccttgtgcgcctgttttatactcccctcccgcaacttagaagcacgaaaccaagttcaatagaagggggtacaaaccagtaccactacgaacaagcacttctgtttccccggtgacattgcatagactgctcacgcggttgaaagcgatcgatccgttacccgcttgtgtacttcgaaaagcctagtatcgccttggaatcttcgacgcgttgcgctcagcacccgaccccggggtgtagcttaggctgatgagtctggacattcctcaccggtgacggtggtccaggctgcgttggcggcctacctatggctaacgccataggacgttagatgtgaacaaggtgtgaagagcctattgagctacataagagtcctccggcccctgaatgcggctaatcctaaccacggagcaggcggtcgcgaaccagtgactggcttgtcgtaacgcgcaagtctgtggcggaaccgactactttgggtgtccgtgtttcctgttatttttatcatggctgcttatggtgacaatcagagattgttatcataaagcgaattggattggccatccggtgagtgttgtgtcaggtatacaactgtttgttggaaccactgtgttagctttacttctcatttaaccaattaatcaaaaacaatacgaggataaaacaacaatactaca

SEQ ID NO: 19874 - DNA, 745 bp, synthetic construct
  source 1..745: mol_type = other DNA
aatacagctctggggttgtacccaccccagaggcccacgtggcggctagcactccggtattacggtacccttgtgcgcctgttttatactcccctcccgcaacttagaagcacgaaaccaagttcaatagaagggggtacaaaccagtaccactacgaacaagcacttctgtttccccggtgacattgcatagactgctcacgcggttgaaagtgatcgatccgttacccgcttgtgtacttcgaaaagcctagtatcgccttggaatcttcgacgcgttgcgctcagcacccgaccccggggtgtagcttaggctgatgagtctggacattcctcaccggtgacggtggtccaggctgcgttggcggcctacctatggctaacgccataggacgttagatgtgaacaaggtgtgaagagcctattgagctacataagagtcctccggcccctgaatgcggctaatcctaaccacggagcaggcggtcgcgaaccagtgactggcttgtcgtaacgcgcaagtctgtggcggaaccgactactttgggtgtccgtgtttcctgttatttttatcatggctgcttatggtgacaatcagagattgttatcataaagcgaattggattggccatccggtgagtgttgtgtcaggtatacaactgtttgttggaaccactgtgttagctttacttctcatttaaccaattaatcaaaaacaatacgaggataaaacaacaatactaca

SEQ ID NO: 19875 - DNA, 742 bp, synthetic construct
  source 1..742: mol_type = other DNA
ttaaaacagcctgtgggttgttcccacccacagggcccatggggcgcaagcacactggtattgcggtacctttgtgcgcctgttttatccacccttccccaatgaaacttagaagcttgactcaaacggtcaatagacagcccagtgcaccaactgggtctcgaccaggcactcctgtttccccggactgagtatcaataggctgcttgcgcggctgaaggagaaaacgttcgttacccggccaattacttcgagaaacctagtaccaccatggacgttgcgcagtgtttcgctccacacaaccccggtgtagatcaggtcgatgagtcaccgcaatccccacgggcgaccgtggcggtggctgcgctggtggcctgcccatggggcaacccatgggacgcttcaatactgacatggtgcgaagagtctattgagctaattggtagtcctccggcccctgaatgcggctaatcctaactgcggagcagatacccacataccagtgggcagtctgtcgtaacgggcaactctgcagcggaaccgactactttgggtgtccgtgtttccttttattcttatattggctgcttatggtgacaattgaaaggttgttaccatatagcttttggattggccatccagtgagcaacagagcgatcatactcctttttgttgggtttgtaccacttgattatagtagttacaacaccttgctatacgtcattcatttaaacacgagaaa

SEQ ID NO: 19876 - DNA, 743 bp, synthetic construct; identical to SEQ ID NO: 1034
  source 1..743: mol_type = other DNA

SEQ ID NO: 19877 - DNA, 737 bp, synthetic construct
  source 1..737: mol_type = other DNA
acagctctggggttgcacccaccccagaggcccacgtggcggctagtactccggtattgcggtacccttgtacgcctgttttatactcccttcccgtaacttagacgcacaaaaccaagttcaatagaagggggtacaaaccagtaccaccacgaacaagcacttctgtttccccggtgatgttgtatagactgcttgcgtggttgaaagcgacggatccgttatccgcttatgtacttcgagaagcccagtaccacctcggaatcttcgatgcgttgcgctcagcactcaaccccagagtgtagcttaggctgatgagtctggacatccctcaccggtgacggtggtccaggctgcgttggcggcctacctatggctaacgccatgggacgctagttgtgaacaaggtgtgaagagcctattgagctacataagaatcctccggcccctgaatgcggctaatcccaacctcggagcaggtggtcacaaaccagtgattggcctgtcgtaacgcgcaagtccgtggcggaaccgactactttgggtgtccgtgtttccttttattttattgtggctgcttatggtgacaatcacagattgttatcataaagcgaattggattggccatccggtgaaagtgagattcattatctatctgtttgctggattcgctccattgagtgtgtttactctaagtacaatttcaacagttatttcaatcaaacaattgtatcata

SEQ ID NO: 19878 - DNA, 739 bp, synthetic construct
  source 1..739: mol_type = other DNA
gctctggggttgtacccaccccagaggcccacgtggcggctagcactccggtattacggtacccttgtgcgcctgttttatactcccctcccgcaacttagaagcacgaaaccaagttcaatagaagggggtacaaaccagtaccactacgaacaagcacttctgtttccccggtgacattgcatagactgctcacgcggttgaaagtgatcgatccgttacccgcttgtgtacttcgaaaagcctagtatcgccttggaatcttcgacgcgttgcgctcagcacccgaccccggggtgtagcttaggctgatgagtctggacattcctcaccggtgacggtggtccaggctgcgttggcggcctacctatggctaacgccataggacgttagatgtgaacaaggtgtgaagagcctattgagctacataagagtcctccggcccctgaatgcggctaatcctaaccacggagcaggcggtcgcgaaccagtgactggcttgtcgtaacgcgcaagtctgtggcggaaccgactactttgggtgtccgtgtttcctgttatttttatcatggctgcttatggtgacaatcagagattgttatcataaagcgaattggattggccatccggtgagtgttgtgtcaggtatacaactgtttgttggaaccactgtgttagctttacttctcatttaaccaattaatcaaaaacaatacgaggataaaacaacaatactaca

SEQ ID NO: 19879 - DNA, 740 bp, synthetic construct
  source 1..740: mol_type = other DNA
ttaaaacagcctgtgggttgttcccacccacagggcccattgggcgctagcacactggtatcacggtacccttgtgcgcctgttttatccacccctccccatcgtaacctagaagcatgactccaacggtcaatagacagctcagtaaaccaattgagccttgaccaagcacttctgttaccccggactgagtatcaataggctgctcacgcggccgaaggagaaaatgttcgttacccggccaattacttcgagaaacctagtaccaccatgaaggttgcgcagtgtttcgcttagcacaaccccagtgtagatcaggccgatgagtcaccgcattccccacggtgaccgtggcggtggctgcgctggcggcctgcccatggggcaacccatgggacgcttcaatactgacatggtgtgaagagtctattgagctaattggatgtctccggcccctgaatacggctaatcctaatcgcggagcagatacccacgcaccagtgggcagtctgtcgtaacgggcaactctgcagcggaaccgactactttgggtgtccgtgtttccttttattcttgtactggctgcttatggtgacaattgagagattgttaccatatagctattggattggccatccagtgtcaaacagagcgattgtctacttgttcattggttttataccattgagttacaaggttctagccactcttaacttcattttaacactcaatacatcaaa

SEQ ID NO: 19880 - DNA, 743 bp, synthetic construct
  source 1..743: mol_type = other DNA
ttaaaacagtctgtgggttgttcccactcacagggcccacgtggcgctagcacaccggtatttcggtacccttgtgcgcctgttttatgcacccctagccccacgtaacttagaagggaagcaacaacgatcaacagcaggtgtggcattccagccacatcgtgatcaagcacttctgtctccccggactgagtatcaataagctgctcgcgcggctgaaggagaaaacgttcgttacccggccaattacttcgagaaacccagtaccaccatggaggttgcgcagtgtttcgttccgcacaaccccagtgtagatcaggtcgatgagtcaccgcatcccccacgggcgaccgtggcggtggctgcgttggcggcctgcccatggggtaacccatgggacgcttcaatactgacatggtgtgaagagtctattgagctaattggtagtcctccggcccctgaatgcggctaatcctaactgcggagcagatacccataaaccaatgggcagtctgtcgtaacgggtaacttcgcagcggaaccgactactttgggtgtccgtgtttccttttattcttatattggctgcttatggtgacaattgaaagattgttgccatatttctattggattggccatccggtgacaaatatagcaattgtgtacctatttgttggttttgtaccactgaattacaaagttttaaaaaccctcgatttcattgtcgaacttaacacagcaaa

SEQ ID NO: 19881 - DNA, 742 bp, synthetic construct
  source 1..742: mol_type = other DNA
acagctctggggttgtacccaccccagaggcccacgtggcggctagcactccggtattacggtacccttgtgcgcctgttttatactcccctcccgcaacttagaagcacgaaaccaagttcaatagaagggggtacaaaccagtaccactacgaacaagcacttctgtttccccggtgacattgcatagactgctcacgcggttgaaagtgatcgatccgttacccgcttgtgtacttcgaaaagcctagtatcgccttggaatcttcgacgcgttgcgctcagcacccgaccccggggtgtagcttaggctgatgagtctggacattcctcaccggtgacggtggtccaggctgcgttggcggcctacctatggctaacgccataggacgctagatgtgaacaaggtgtgaagagcctattgagctacataagagtcctccggcccctgaatgcggctaatcctaaccacggagcaggcggtcgcaaaccagtgactggcttgtcgtaacgcgcaagtctgtggcggaaccgactactttgggtgtccgtgtttcctgttatttttatcatggctgcttatggtgacaatcagagattgttatcataaagcgaattggattggccatccggtgagtgttgtgtcaggtatacaactgtttgttggaaccactgtgttagctttacttctcatttaaccaattaatcaaaaacaatacgaggataaaacaacaatactaca

SEQ ID NO: 19882 - DNA, 741 bp, synthetic construct
  source 1..741: mol_type = other DNA
ttaaaacagcctgtgggttgttcccacccacagggcccacagggcgcaagcacactggtatcacggtacctttgtgcgcctgttttatctaccccccccaaagtaacgtagaagcctgaacaaagtggtcactagtaagctcggtaagccaaccgaggttagaccaagcacttctgtctccccggactgagtatcaataggctgctaacgcggctgaaggagaaaacgttcgttacccgaccagctacttcgagaaacctagtaccaccatggatgttgcgcggcgtttcgttcaacacaaccccagtgtagatcaggtcgatgagtcaccgctctccccacgggcgaccgtggcggtggctgcgttggcggcctgcccatggggcaacccatgggacgcttcaatactgacatggtgcgaagagtctattgagctagctggtagtcctccggcccctgaatgcggctaatcctaactgtggagcaggcgctcgcaaaccagcgagtaacctgtcgtaacgggcaactccgcagcggaaccgactactttgggtgtccgtgtttccttttattcctaccttggctgcttatggtgacaattgagagattgttaccatatagctattggattggccatccggtaagcaacagagcagtaatttacttgttcgttggtttcataccacgtgactttaaagtcttacaaacactaaacctcatattatcatttaatagtgcaaa

SEQ ID NO: 19883 - DNA, 741 bp, synthetic construct
  source 1..741: mol_type = other DNA
cagctctggggttgtacccaccccagaggcccacgtggcggctagcactccggtattacggtacccttgtgcgcctgttttatactcccctcccgcaacttagaagcacgaaaccaagttcaatagaagggggtacaaaccagtaccactacgaacaagcacttctgtttccccggtgacattgcatagactgcttacgcggttgaaagtgatcgatccgttacccgcttgtgtacttcgaaaagcctagtatcgccttggaatcttcgacgcgttgcgctcagcacccgaccccggggtgtagcttaggctgatgagtctggacattcctcaccggtgacggtggtccaggctgcgttggcggcctacctatggctaacgccataggacgctagatgtgaacaaggtgtgaagagcctattgagctacataagagtcctccggcccctgaatgcggctaatcctaaccacggagcaggcggtcgcgaaccagtgactggcttgtcgtaacgcgcaagtctgtggcggaaccgactactttgggtgtccgtgtttcctgttatttttatcatggctgcttatggtgacaatcagagattgttatcataaagcgaattggattggccatccggtgagtgttgtgtcaggtatacaaccgtttgttggaaccactgtgttagctttacttctcatttaaccaattaataaaaaacaatactaggataaaacaacaatactaca

SEQ ID NO: 19884 - DNA, 741 bp, synthetic construct
  source 1..741: mol_type = other DNA
taagtttcaattgggggttgtacccacccacagggcccattgggcgctagcactctggtatcacggtacccttgtgcgcctgttttataacccccccccaattgaaacttagaagttgcacgcactgatcaatagcaaacatagcaacccagctatgtcaagatcaagcactcctgtctccccggaccgagtatcaatagactgctcacgcggtcgaaggagaaagtgttcgttacccggctaactacttcgaaaaacctagtaacaccatgaaagttgcgaagtgtttcgctccgcacttccccagtgtagatcaggccgatgagtcaccgagtaccccacgggcgaccgtgtcggtggctgcgttggcggcctgcctacggggcgacccgtaggacgcttcaatacagacatggtgcgaagagtctattgagctagttagtagtcctccggcccctgaatgcggctaatcctaactgcggagcacgtgctctcaagccagagagtggcgtgtcgtaacgggcaactctgcagcggaaccgactactttgggtgtccgtgtttcctttatttcttactctggctgcttatggtgacaattgagagattgttaccatatagctattggattggccatccggtgagcaacagagcgatcatataccaatttgttggcttcatcccacttgacctaaaagccctacagacgctaaattttattatcattttaaacaatacaaa

SEQ ID NO: 19885 - DNA, 743 bp, synthetic construct
  source 1..743: mol_type = other DNA
ttaaaacagctctggggttgtccccaccccagaggcccacgtggcggctagtactctggtatcgcggtacctttgtacgcctgttttatacccctaccccatgcaactttagaagcagttcaacaagttcaatagggggggtacaaaccagtaccaccacgaacaagcacttctgtaaccccggtgatcttgtataagctgtgcccacggccgaaagcgagtgatccgttacccgcttaggtacttcgagaagcctagtatcaccttggaatcatcgatgcgttgcgctcagcattctatcccgaatgtagcttaggctgatgagtctgggcgttccccaccggtgacggtggcccaggctgcgttggcggcctacccatggctaacgccatgggacgctaggtgtgaacaaggtgtgaagagcctattgagctacttaagagtcctccggcccctgaatgcggctaatcccaaccacggagcaggtgccttcgacccagagggtggcctgtcgtaacgcgcaagtctgtggcggaaccgactactttgggtgtccgtgtttccttttatcttttatatggctgcttatggtgacaatcatagattgttatcataaagcgacttggtttggccaaccggtaaatcacacgcgtattatctacttgtttgttggatttattccactcgcccaatttactccctgcataatatccattgtttgtcaacaagatattgctatcaca

SEQ ID NO: 19886 - DNA, 740 bp, synthetic construct
  source 1..740: mol_type = other DNA
aaaacagctctggggttgttcccaccccagaggcccacgtggcggctagtacactggtatcacggtacctttgtacgcctgttttatactccctcccccgcaacttagaagcatacaattcaagctcaataggagggggtgcaagccagcgcctccgtgggcaagcactactgtttccccggtgaggccgcatagactgttcccacggttgaaagtgtccgatccgttatccgctcatgtacttcgagaagcctagtatcgctctggaatcttcgacgcgttgcgctcagcactcaaccccggagtgtagcttgggccgatgagtctggacagtccccactggcgacagtggtccaggctgcgctggcggcccacctgtggcccaaagccacgggacgctagttgtgaacagggtgtgaagagcctattgagctacatgagagtcctccggcccctgaatgcggctaatcctaaccatggagcaggcagctgcaacccagcagccagcctgtcgtaacgcgcaagtccgtggcggaaccgactactttgggtgtccgtgtttccttttattcttgaatggctgcttatggtgacaatcatagattgttatcataaagcgagttggattggccatccagtgtgaatcagattaattactcccttgtttgttggatccactcccgaaacgttttactccttaacttattgaaattgtttgaagacaggatttcagtgtcaca

SEQ ID NO: 19887 - DNA, 746 bp, synthetic construct; identical to SEQ ID NO: 1133
  source 1..746: mol_type = other DNA

SEQ ID NO: 19888 - DNA, 744 bp, synthetic construct
  source 1..744: mol_type = other DNA
ttaaaaccagctgtgggttgttcccaccccagaggcccacgcggcggctagcactccggtattacggtacccttgtgcgcctgttttatactcccttcccccgcaatttagaagcatgaaaccaggttcaatagtaaggggtacaaaccagtaccactatgaacaagcacttctgtctccccggtgatattgcatagactgctcacgcggttgaaagcgattgatccgtcatccgcttgtgtacttcgagaagcctagtatcaccttcggaacttcgacgcgttgcgctcagcacccgaccccggggtgtagcttgggctgatgagtctggacgctcctcaccggcgacggtggtccaggctgcgttggcggcctacccgtggttaccaccgcgggacgctacaagtgaacaaggtgtgaagagcctattgagctacacaagagtcctccggcccctgaatgcggctaatcccaaccacggagcaggcggtcacgaacagtggctggcttgtcgtaacgcgcaagtctgtggcggaaccgactactttgggtgtccgtgtttcctgttatttttatcatggctgcttatggtgacaatcgttgattgttatcataaagcgaattggattggccgtccggaaagtgttgtgtcgcatatactgtttagtgaagctactacattaattcaatctctcactcggttagtcaaacagagctcagatagagtaaaacatcattaacgcg

SEQ ID NO: 19889 - DNA, 742 bp, synthetic construct
  source 1..742: mol_type = other DNA
tttaaaacagcctgtgggttgttcccacccacagggcccattgggcgctagcacactggtattacggtacctttgtgcgcctgttttatataccctccccgaatgtaacttagaagcttcacttaaatggtcaatagaaggtccagcacaccagttggattccgaccaagcacttctgttaccccggactgagtatcaataggccgttcgcacggctgaaggagaaaacgttcgttacccggccaattacttcgagaaacctagtaacaccatgaaagttgcgcagtgtttcgctccgcacgaccccggtgtagatcaggtcgatgagccaccgcgttccccacgggcgaccgtggcggtggctgcgctggcggcctgcccatggggcaacccatgggacgcttcaatactgacatggtgcgaagagtctattgagctaattggtagtcctccggcccctgaatgcggctaatcctaactgcggagcaggcaccctcaagccagagggcagtctgtcgtaacgggcaactctgcagcggaaccgactactttgggtgccgtgtttccttttattcttgaactggctgcttagggtgacattcgaaagattgttaccatatagctattggattggccatccagtgacaaacagagcgattatatatttgtttgttggttttgttccattaagctacaaggttttaaatacacttaaatttatcttactactcaactcagcaaa

SEQ ID NO: 19890 - DNA, 742 bp, synthetic construct
  source 1..742: mol_type = other DNA
ttaagacagctctggggttgttcccaccccagaggcccacgtggcggctagtacactggtatcacggtacctttgtacgcctgttttatactccctcccccgcaacttagaagcatacaattcaagctcaataggagggggtgcaagccagcgcctccgtgggcaagcactactgtttccccggtgaggccgcatagactgttcccacggttgaaagtgtccgatccgttatccgctcatgtacttcgagaagcctagtatcgctctggaatcttcgacgcgttgcgctcagcactcaaccccggagtgtagcttgggccgatgagtctggacagtccccactggcgacagtggtccaggctgcgctggcggcccacctgtggcccaaagccacgggacgctagttgtgaacagggtgtgaagagcctattgagctacatgagagtcctccggcccctgaatgcggctaatcctaaccatggagcaggcagctgcaacccagcagccagcctgtcgtaacgcgcaagtccgtggcggaaccgactactttgggtgtccgtgtttccttttattcttgaatggctgcttatggtgacaatcatagattgttatcataaagcgagttggattggccatccagtgtgaatcagattaattactcccttgcttgttggatccgctcccgaaacgttttactccttaacttattgaaattgtttgaagacaggatttcagtgtcaca

SEQ ID NO: 19891 - DNA, 742 bp, synthetic construct
  source 1..742: mol_type = other DNA
ttaaaacagctctggggttgttcccaccccagaggcccacgtggcggctagtacactggtatcacggtacctttgtacgcctgttttatactccctcccccgcaacttagaagcatacaattcaagctcaataggagggggtgcaagccagcgcctccgtgggcaagcactactgtttccccggtgaggccgcatagactgttcccacggttgaaagtgtccgatccgttatccgctcatgtacttcgagaagcctagtatcgctctggaatcttcgacgcgttgcgctcagcactcaaccccggagtgtagcttgggccgatgagtctggacagtccccactggcgacagtggtccaggctgcgctggcggcccacctgtggcccaaagccacgggacgctagttgtgaacagggtgtgaagagcctattgagctacatgagagtcctccggcccctgaatgcggctaatcctaaccatggagcaggcagctgcaacccagcagccagcctgtcgtaacgcgcaagtccgtggcggaaccgactactttgggtgtccgtgtttccttttattcttgaatggctgcttatggtgacaatcatagattgttatcataaagcgagttggattggccatccagtgtgaatcagattaattactcccttgtttgttggatccactcccgaaacgttttactccttaacttattgaaattgtttgaagacaggatttcagtgtcaca

SEQ ID NO: 19892 - DNA, 742 bp, synthetic construct
  source 1..742: mol_type = other DNA
ttaaaacagctctggggttgttcccaccccagaggcccacgtggcggctagtacactggtatcacggtacctttgtacgcctgttttatactccctcccccgcaacttagaagcatacaattcaagctcaataggagggggtgcaaaccagcgcctccgtgggcaagcactactgtttccccggtgaggccgcatagactgttcccacggttgaaagtgtccgatccgttatccgctcatgtacttcgagaagcctagtatcgctctggaatcttcgacgcgttgcgctcagcactcaaccccggagtgtagcttgggccgatgagtctggacagtccccactggcgacagtggtccaggctgcgctggcggcccacctgtggcccaaagccacgggacgctagttgtgaacagggtgtgaagagcctattgagctacatgagagtcctccggcccctgaatgcggctaatcctaaccatggagcaggcagctgcaacccagcagccagcctgtcgtaacgcgcaagtccgtggcggaaccgactactttgggtgtccgtgtttccttttattcttgaatggctgcttatggtgacaatcacagattgttatcataaagcgagttggattggccatccagtgtgaatcagattaattactcccttgtttgttggatccactcccgaaacgttttactccttaacttattgaaattgtttgaagacaggatttcagtgtcaca

SEQ ID NO: 19893 - DNA, 739 bp, synthetic construct
  source 1..739: mol_type = other DNA
aaacagctctggggttgttcccaccccagaggcccacgtggcggctagtacactggtatcacggtacctttgtacgcctgttttatactccctcccccgcaacttagaagcatacaattcaagctcaataggagggggtgcaagccagcgcctccgtgggcaagcactactgtttccccggtgaggccgcatagactgttcccacggttgaaagtgtccgatccgttatccgctcatgtacttcgagaagcctagtatcgctctggaatcttcgacgcgttgcgctcagcactcaaccccggagtgtagcttgggccgatgagtctggacagtccccactggcgacagtggtccaggctgcgctggcggcccacctgtggcccaaagccacgggacgctagttgtgaacagggtgtgaagagcctattgagctacatgagagtcctccggcccctgaatgcggctaatcctaaccatggagcaggcagctgcaacccagcagccagcctgtcgtaacgcgcaagtccgtggcggaaccgactactttgggtgtccgtgtttccttttattcttgaatggctgcttatggtgacaatcatagattgttaccataaagcgagttggattggccatccagtgtgaatcagattaattactcccttgtttgttggatccactcccgaaacgttttactccttaacttattgaaattgtttgaagacaggatttcagtgtcaca

SEQ ID NO: 19894 - DNA, 742 bp, synthetic construct
  source 1..742: mol_type = other DNA
tttaaaacagcctgtgggttgttcccacccacagggcccattgggcgctagcacactggtattacggtacctttgtgcgcctgttttatataccctccccgaatgtaacttagaagcttcacttaaatggtcaatagaaggtccagcacaccagttggattccgaccaagcacttctgttaccccggactgagtatcaataggccgttcgcacggctgaaggagaaaacgttcgttacccggccaattacttcgagaaacctagtaacaccatgaaagttgcgcagtgtttcgctccgcacgaccccggtgtagatcaggtcgatgagccaccgcgttccccacgggcgaccgtggcggtggctgcgctggcggcctgcccatggggcaacccatgggacgcttcaatactgacatggtgcgaagagtctattgagctaattggtagtcctccggcccctgaatgcggctaatcctaactgcggagcaggcaccctcaagccagagggcagtctgtcgtaacgggcaactctgcagcggaaccgactactttgggtgccgtgtttccttttattcttgaactggctgcttagggtgacattcgaaagattgttaccatatagctattggattggccatctggtgacaaatagagcgattatatatttatttgttggttttgttccattaaactacagagtcttaaacacacttaaatttgtcttactactcaactcagcaag

SEQ ID NO: 19895 - DNA, 741 bp, synthetic construct
  source 1..741: mol_type = other DNA
taaaacagctctggggttgttcccaccccagaggcccacgtggcggctagtacactggtatcacggtacctttgtacgcctgttttatactccctcccccgcaacttagaagcatacaactcaagctcaataggagggggtgcaagccagcgcctccgtgggcaagcactactgtttccccggtgaggccgcatagactgttcccacggttgaaagtgtccgatccgttatccgctcatgtacttcgagaagcctagtatcgctctggaatcttcgacgcgttgcgctcagcactcaaccccggagtgtagcttgggccgatgagtctggacagtccccactggcgacagtggtccaggctgcgctggcggcccacctgtggcccaaagccacgggacgctagttgtgaacagggtgtgaagagcctattgagctacatgagagtcctccggcccctgaatgcggctaatcctaaccatggagcaggcagctgcaacccagcagccagcctgtcgtaacgcgcaagtccgtggcggaaccgactactttgggtgtccgtgtttccttttattcttgaatggctgcttatggtgacaatcatagattgttatcataaagcgagttggattggccatccagtgtgaatcagattaattactcccttgtttgttggatccactcccgaaacgttttactccttaacttattgaaattgtttgaagacaggatttcagtgtcaca

SEQ ID NO: 19896 - DNA, 747 bp, synthetic construct
  source 1..747: mol_type = other DNA
ttaaaacagctctggggttgtacccaccccagaggcccacgtggcggctagcactccggtattacggtacccttgtgcgcctgttttatactcccctcccgcaacttagaagcacgaaaccaagttcaatagaagggggtacaaaccagtaccactacgaacaagcacttctgtttccccggtgacattgcatagactgctcacgcggttgaaagtgatcgatccgttacccgcttgtgtacttcgaaaagcctagtatcgccttggaatcttcgacgcgttgcgctcagcacccgaccccggggtgtagcttaggctgatgagtctggacattcctcaccggtgacggtggtccaggctgcgttggcggcctacctatggctaacgccataggacgctagatgtgaacaaggtgtgaagagcctattgagctacataagagtcctccggcccctgaatgcggctaatcctaaccacggagcaggcggtcgcgaaccagtgactggcttgtcgtaacgcgcaagtctgtggcggaaccgactactttgggtgtccgtgtttcctgttatttttatcatggctgcttatggtgacaatcagagattgttatcataaagcgaattggattggccatccggtgagtgttgtgtcaggtatacaactgtttgttggaaccactgtgttagctttacttctcatttaaccaattaatcaaaaacaatacgaggataaaacaacaatactaca

SEQ ID NO: 19897 - DNA, 743 bp, synthetic construct
  source 1..743: mol_type = other DNA
tttaaaacagcctgtgggttgttcccacccacagggcctattgggcgccagcacactggtatcacggtacctttgtgcgcctgttttaaacaccctccccgaatgtaacttagaagctttacctacatggtcaatagaaggtccagcacaccagttggactccgaccaagtacttctgttaccccggactgagtatccttatgctgtccacacggctgaaggagaaaacgttcgctacccggccaattacttcgagaaacctagtaacaccatggaagttgcccaccgtttcgctccgcacgaccccggtgtacatcaggtcgatgagccaccgcgttccccacgggcgaccgtggcggtggctgcgttggcggcctgcccatggggtaacccatgggacgcttcaatgctgacatggcgcgaagagtctattgagctaattgttagtcctccggcccctgaatgcggctaatcctaactgcggagcaggcaccctcaagccagagggcagcctgtcgtaacgggcaactctgcagcggaaccgactactttgggtgtccgtgtttccttttattcttgaactggctgcttatggtgacaataaaaggattgttaccatatagctattggattggccatccagtgacgaatagagcaattatatatctgtttgttggttttgttccattaaactataaagttttaaacacactcaaatttgtcttactactcaactcagcaaa

SEQ ID NO: 19898 - DNA, 734 bp, synthetic construct
  source 1..734: mol_type = other DNA
ttaaaacagctctggggttgcacccaccccagaggcccacgtggcggctagtactccggtattgcggtacccttgtacgcctgttttatactcccttcccgtaacttagacgcacaaaaccaagttcaatagaagggggtgcaaaccagtaccaccacgaacaagcacttctgtttccccggtgatgttgtatagactgcttgcgtggttgaaagcgacggatccgttatccgcttatgtacttcgagaagcccagtaccacctcggaatcttcgatgcgttgcgctcagcactcaaccccagagtgtagcttaggctgatgagtctggacatccctcaccggcgacggtggtccaggctgcgttggcggcctacctatggctaacgccatgggacgctagttgtgaacaaggtgtgaagagcctattgagctacataagaatcctccggcccctgaatgcggctaatcccaacctcggagcaggtgatcacaaaccagtgattggcctgtcgtaacgcgcaagtccgtggcggaaccgactactttgggtgtccgtgtttccttttattttattgtggctgcttatggtgacaatcacagattgttatcataaagcgaattggattggccatccggtgaaagtgagattcattatttatctgtttcgctccattgagtgtgtttattttaagtacaatttcaacagttattttaaccagacaattgtatcata

SEQ ID NO: 19899 - DNA, 746 bp, synthetic construct
  source 1..746: mol_type = other DNA
ttaaaacagctctggggttgttcccaccccagaggcccacgtggcggccagtacaccggtaccacggtacccttgtacgcctgttttatactcccctccccgtaaactagaagcacgaaacacaagttcaatagaagggggtacaaaccagtaccaccacgaacaagcacttctgttcccccggtgaggtcacatagactgtccccacggtcaaaagtgactgatccgttatccgctcacgtacttcggaaagcctagtaccaccttggaatctacgatgcgttgcgctcagcactcgaccccggagtgtagcttaggctgatgagtctggacgttccccactggtgacagtggtccaggctgcgttggcggcctacctgtggtccacaaccacaggacgctagtagtgaacaagatgtgaagagcccactgagctacctgagaatcctccggcccctgaatgcggctaatcccaaccacggagcaggtaatcgcaaaccagcggtcagcctgtcgtaacgcgtaagtctgtggcggaaccgactactttgggtgtccgtgtttccttttatttttatggtggctgcttatggtgacaatcatagattgttatcataaagcaaattggattggccatccggagtgagctaaactatctatttctctgagtgttggattcgtttcacccacattctgaacaatcagcctcattagtgttaccctgttaataagacgatatcatcacg

SEQ ID NO: 19900 - DNA, 703 bp, synthetic construct
  source 1..703: mol_type = other DNA
gtacaccggtatcacggtacccttgtacgcctgttttatactccctttcccctgcaacttagaagcaaataaaccaagttcaatagaaagggggtacaagccagtaccaccacgaacaagcacttctgtttccccggtgaggttgtataaactgtctccacggttgaaaacgactgatccgttacccgctcttgtacttcgagaagcctagtatcatcttggaatcttcgatgcgttgcgctcagcactcgaccccggagtgtagcttaggctgatgagtctggacgttccccaccggtgacggtggtccaggctgcgttggcggcctacctgtggtccaaagccacaggacgctagttgtgaacagggtgtgaagagcctattgagctacaagagagtcctccggcccctgaatgcggctaatcccaaccacggagcaggtggttgcaatccagcaactagcctgtcgtaacgcgcaagtctgtggcggaaccgactactttgggtgtccgtgtttccttttattcttacaatggctgcttatggtgacaatcatagattgttatcataaagcgaattggattggccatccggtgaaagtcagatcaactattcatttgtttgttggaaccactgtgttagctttacttctcatttaaccaattaatcaaaaacaatacgaggataaaacaacaatactaca

SEQ ID NO: 19901 - DNA, 753 bp, synthetic construct; identical to SEQ ID NO: 1212
  source 1..753: mol_type = other DNA

SEQ ID NO: 19902 - DNA, 753 bp, synthetic construct
  source 1..753: mol_type = other DNA
ttaaaacagctctggggttgttcccaccccagaggcccacgtggcggccagtacaccggtatcacggtacccttgtacgcctgttttatactccctctcccctgtaacttagaagcaaataaaccaagttcaatagaaagggggtacaaaccagtaccaccacgaacaaacacttctgtttccccggtgaggttgtataaactgtccccacggttgaaaacgactgatccgttacccgctcttgtacttcgagaagcctagtatcatcttggaatcttcgatgcgttgcgctcagcactcgaccccggagtgtagcttaggctgatgagtctggacgttccccaccggcgacggtggtccaggctgcgttggcggcctacctgtggcccaaagccacaggacgctagttgtgaacagggtgtgaagagcctattgagctacaagagagtcctccggcccctgaatgcggctaatcccaaccacggagcaggtggttgcaatccagcaactagcctgtcgtaacgcgcaagtctgtggcggaaccgactactttgggtgtccgtgtttccttttattcttacaatggctgcttatggtgacaatcatagattgttgtcataaagcgaattggattggccatccggtgaaagtcagatcaactatttatttgtttgttggagccattgtgttagctttacttctcatctaaccaattaatcaaaaacaatacgaggataaaacaacaacactaca

SEQ ID NO: 19903 - DNA, 747 bp, synthetic construct
  source 1..747: mol_type = other DNA
ttaaaacagctctggggttgtacccaccccagaggcccacgtggcggctagcactccggtattacggtacccttgtgcgcctgttttatactcccctcccgcaacttagaagcacgaaaccaagttcaatagaagggggtacaaaccagtaccactacgaacaagcacttctgtttccccggtgacattgcatagactgctcacgcggttgaaagtgatcgatccgttacccgcttatgtacttcgaaaagcctagtatcgccttggaatcttcgacgcgttgcgctcagcacccgaccccggggtgtagcttaggctgatgagtctggacattcctcaccggtgacggtggtccaggctgcgttggcggcctacctatggctaacgccataggacgttagatgtgaacaaggtgtgaagagcctattgagctacataagagtcctccggcccctgaatgcggctaatcctaaccacggagcaggcggtcgcgaaccagtgactggcttgtcgtaacgcgcaagtctgtggcggaaccgactactttgggtgtccgtgtttcctgttatttttatcatggctgcttatggtgacaatcagagattgttatcataaagcgaattggattggccatccggtgagtgttgtgtcaggtatacaactgtttgttggaaccactgtgttagctttacttctcatttaaccaattaatcaaaaacaatacgaggataaaacaacaatactaca

SEQ ID NO: 19904 - DNA, 746 bp, synthetic construct
  source 1..746: mol_type = other DNA
ttaaaacagctctggggttgttcccaccccagaggcccacgtggcggccagtactctggtactacggtacctttgtacgcctgttttataccccctcccccatgcaaccttagaagcaattcacaaagttcaatagagggggtacaaaccagtaccaacacgaacaagcacttctgtttccccggtgatctcgtataggctgtacccacggctgaaaacaagtgatccgttatccgcttaggtacttcgagaagcctagtaccaccttgggatcttcgacgcgttgcactcagcactctaccccgagtgtagcttaggctgatgagcctgggcattccccaccggtgacggtggcccaggctgcgttggcggcctacccatggctaacgccatgggacgctagttgtgaacaaggtgtgaagagcctattgagctacctaagagtcctccggcccctgaatgcggctaatcccaaccacggagcaagtgccttcaatccagagggtggcttgtcgtaacgcgcaagtctgtggcggaaccgactactttgggtgtccgtgtttccttttatttttattacggctgcttatggtgacaatcattgattgccatcataaagcgagttggattggccatccggtgaaagttgagtatctcgtccacttatctgttggatttcccctattaactcaactcacgcctgttttgatatctatagtgttattgatttggaaaaagctatcata

SEQ ID NO: 19905 - DNA, 746 bp, synthetic construct
  source 1..746: mol_type = other DNA
ttaaaacagctctggggttgttcccaccccagaggcccacgtggcggccagtactctggtactacggtacccttgtacgcctgttttatactccctcccctacgcaaccttagaagcaactcacaaagttcaatagagggggtacaaaccagtaccaacacgaacaagcacttctgtttccccggtgatctcgtataggctgtacccacggctgaaagcaagtgatccgttatccgcttaggtacttcgagaagcctagtaccaccttgggatcttcgacgcgttgcactcagcactctaccccgagtgtagcttaggctgatgagcctgggcataccccaccggtgacggtggcccaggctgcgttggcggcctacccatggctaacgccatgggacgctagttgtgaacaaggtgtgaagagcctattgagctacctaagagtcctccggcccctgaatgcggctaatcccaaccacggagcaagtaccttcaatccagggggtggcttgtcgtaacgcgcaagtctgtggcggaaccgactactttgggtgtccgtgtttccttttatttttattacggctgcttatggtgacaatcattgattgccatcataaagcgagttggattggccatccggtgaaagttgagtatctcgtccacttatctgctggatttcctccattaactcaactcacgcctgttttgatatctatagtgttattgatttggacaaagctatcata

SEQ ID NO: 19906 - DNA, 746 bp, synthetic construct
  source 1..746: mol_type = other DNA
ttaaaacagctctggggttgttcccaccccagaggcccacgtggcggccagtactctggtactacggtacccttgtacgcctgttttatactccctcccccaagcaaccttagaagcaattcacaaagttcaatagagggggtacaaaccagtaccaccacgaacaagcacttctgttcccccggtgatctcgtataggctgtacccacggctgaaaacaagtgatccgttacccgcttaggtacttcgagaagcctagtatcaccttgggatcttcgacgcgttgcactcagcactctaccccgagtgtagcttaggctgatgagtctgggcattccccaccggtgacggtggcccaggctgcgttggcggcctacccatggctaacgccatgggacgctagttgtgaacaaggtgtgaagagcctattgagctacctaagagtcctccggcccctgaatgcggctaatcccaaccacggagcaagtgccttcaatccagagggtggcttgtcgtaacgcgcaagtctgtggcggaaccgactactttgggtgtccgtgtttccgtttatttttactacggctgcttatggtgacaatcattgattgccatcataaagcgagttggattggccatccggtgaaagttaagtatttcgtccacttgtctgttggatttactccattgactcaactcacacctggttcgatatctatagtgttattgattgggaaaaagctatcagt

SEQ ID NO: 19907 - DNA, 746 bp, synthetic construct
  source 1..746: mol_type = other DNA
ttaaaacagctctggggttgttcccaccccagaggcccacgtggcggccagtactctggtactacggtacctttgtacgcctgttttataccccctcccccatgcaaccttagaagcaattcacaaagttcaatagagggggtacaaaccagtaccaccacgaacaagcacttctgtttccccggtgatcttgtataggctgtacccacggctgaaaacgagtgatccgttatccgcttaggtacttcgagaagcctagtatcaccttgggatcctcgacgcgttgcactcagcactctaccccgagtgtagcttaggctgatgagcctgggcattccccaccggtgacggtggcccaggctgcgttggcggcctacccatggctaacgccatgggacgctagttgtgaacaaggtgtgaagagcctattgagctacctaagagtcctccggcccctgaatgcggctaatcccaaccacggagcaagtgccttcaatccagagggtggcttgtcgtaacgcgcaagtctgtggcggaaccgactactttgggtgtccgtgtttccttttatttttattacggctgcttatggtgacaatcattgattgccatcatagagcgagttggattggccatccggtgaaagtcaagtatctcgtccactcatctgttggatttcctccattaacccaactcacgcctgttttgatatctatagtgttattgatttggaaaaagctatcata

SEQ ID NO: 19908 - DNA, 746 bp, synthetic construct
  source 1..746: mol_type = other DNA
ttaaaacagctctggggttgttcccaccccagaggcccacgtggcggccagtactctggtactacggtacctttgtacgcctgttttatactccctcccccatgcaaccttagaagcaattcacaaagttcaatagagggggtacaaaccagtaccaccacgaacaagcacttctgtttccccggtgatctcgtataggctgtacccacggctgaaaacaagtgatccgttatccgcttaggtacttcgagaagcctagtatcaccttgggatcttcgacgcgttgcactcagcactctaccccgagtgtagcttaggctgatgagtctgggcattccccaccggtgacggtggcccaggctgcgttggcggcctacccatggctaacgccatgggacgctagttgtgaacaaggtgtgaagagcctattgagctacctaagagtcctccggcccctgaatgcggctaatcccaaccacggagcaagtgccttcaatccagagggtggcttgtcgtaacgcgcaagtctgtggcggaaccgactactttgggtgtccgtgtttccttttatttttattacggctgcttatggtgacaatcattgattgccatcataaagcgagttggattggccatccggtgaaagttaagtatctcgtccacttatctgttggatttgctccattaactcaactcacgcctgattcgatatctatagtgttattgatttggaaaaagctatcata

SEQ ID NO: 19909 - DNA, 702 bp, synthetic construct
  source 1..702: mol_type = other DNA
gtacaccggtatcacggtacccttgtacgcctgttttatactccctttcccctgtaacttagaagcaaacaaaccaagttcaatagaagggggtacaaaccagtaccaccacgaacaagcacttctgtttccccggtgaggttgtataaactgtccccacggttgaaaacgactgatccgttacccgctcttgtacttcgagaagcctagtatcatcctggaatcttcgatgcgttgcgctcagcactcggccccggagtgtagcttaggctgatgagtctggacgttccccaccggcgacggtggtccaggctgcgttggcggcctacctgtggcccaaagccacaggacgctagttgtgaacagggtgtgaagagcctattgagctacaagagagtcctccggcccctgaatgcggctaatcccaaccacggagcaggtggttgcaatccagcaactagcctgtcgtaacgcgcaagtctgtggcggaaccgactactttgggtgtccgtgtttccttttattcttacaatggctgcttatggtgacaatcatagattgttatcataaagcgaattggattggccatccggtgaaagtcagatcagctatttatttgtttgttggaaccactgtgttagcttcacttctcatttaaccaattaattaaaaacagtacgaggattaaacaacaatactaca

SEQ ID NO: 19910 - DNA, 740 bp, synthetic construct
  source 1..740: mol_type = other DNA
taaaacagcctgtgggttgatcccacccacagggcccactgggcgccagcacactggtatcacggtacctttgtgcgcctgttttatccaccccgccccacgtaacttagaagtccaactcaaacggtcggtaggtggtccagtatgccaactgggccttgaccaagcacttctgttaccccggaccgagtatcaataggctgctcgcgcggctgaaggagaaaaagttcgttacccggccaattacttcgagaaacccagtaccgccatgaatgttgcgaggtgtttcgctcagcacacccccagtgtagatcaggtcgatgagtcaccgcattccccacgggcgaccgtggcggtggctgcgttggcggcctgcccatggggcaacccatgggacgcttcaacactgacatggtgcgaagagtctattgagctaattggtagtcctccggcccctgaatgcggctaatcccaactgcggagcagatgcccgcacgccagcgggtattctgtcgtaacgggtaactctgcagcggaaccgactactttgggtgtccgtgtttcctttttatcttttattggctgcatatggtgacaattgagagattgttaccatatagctattggattggccatccagtgacaaacagagcaattatttatttatttgttggttttgtaccgctgaactacaaagcactaaatactctcagttttataatatcacttaattcaataaa

SEQ ID NO: 19911 - DNA, 712 bp, synthetic construct
  source 1..712: mol_type = other DNA
ttaaaacagctctggggttgcacccaccccagaggcccacgtggcggctagtactccggtattgcggtacccttgtacgcctgttttatactcccttcccgtaacttagacgcacaaaaccaagttcaatagaagggggtacaaaccagtaccaccacgaacaagcacttctgtttccccggtgacgttgtatagactgcttgcgtggttgaaagcgacggatccgttatccgcttatgtacttcgagaagcccagtaccacctcggaatcttcgatgcgttgcgctcagcactcaaccccagagtgtagcttaggctgatgagtctggacatccctcaccggcgacggtggtccaggctgcgttggcggcctacctatggctaatgccatgggacgctagttgtgaacaaggtgtgaagagcctattgagctacataagaatcctccggcccctgaatgcggctaatcccaacctcggagcaggtggtcacaaaccagtgattggcctgtcgtaatgcgcaagtccgtggcggaaccgactactttgggtgtccgtgtttccttttattttattgtggctgcttatggtgacaatcacagattgttatcataaagcgaattggattggccatccggtgaaagtgagattcattatttatctgtttcgctccattgagtgtgtttatattttaatcggacaattgtatcata

SEQ ID NO: 19912 - DNA, 745 bp, synthetic construct
  source 1..745: mol_type = other DNA
ttaaaacagctctggggttgttcccaccccagaggcccacgtggcggccagtactctggtaccacggtacctttgtgcgcctgttttatactccctcccccatgcaaccttagaagcaattcacaaagttcaatagagggggtacaaaccagtatcaccacgaacaagcacttctgtctccccggtgatctcgtataggctgtgcccacggctgaaaacaagtgatccgttatccgcttaggtacttcgagaagcctagtatcaccctgggatctttgacgcgttgcgctcagcactctaccccgagtgtagcttaggctgatgagtctgggcattccccaccggtgacggtggcccaggctgcgttggcggcctacccatggctaacgccatgggacgctatttgtgaacaaggtgtgaagagcctattgagctacctaagagtcctccggcccctgaatgcggctaatcccaaccacggagcaagtgccttcaacccagagggtagcttgtcgtaacgcgcaagtctgtggcggaaccgactactttgggtgtccgtgtttccttttatttttattgtggctgcttatggtgacaatcattgattgccatcataaagcgagttggattggccatccggtgaaagtcaagaacctcgtccacttatcttttggatttgttccatcgactcaactcacgcctgatttgataaccatagtgttattgattagaaaaagctatcata

SEQ ID NO: 19913 - DNA, 744 bp, synthetic construct
  source 1..744: mol_type = other DNA
ttaaaacagctctggggttgttcccaccccagaggcccacgtggcggctagtactctggtatcgcggtacctttgtacgcctgttttatacccccaccccatgtaactttagaagcagttcaacaagttcaatagggggggtgcaaaccagcaccaccacgaacaagcacttctgtaaccccggtgaccttgtatatgctgtacccacggctgaaagcgagtgatccgttatccgcttaagtacttcgagaagcctagtaccaccttggaatcttcgatgcgttgcgctcagcactctatcccgagtgtagcttaggctgatgagtctgggcgttccccaccggcgacggtggcccaggctgcgttggcggcctacccatggctaacgccatgggacgctagatgtgaacaaggtgtgaagagcctattgagctacttaagagtcctccggcccctgaatgcggctaatcccaaccacggagcaggtgccttcaacccagagggcggcctgtcgtaacgcgcaagtctgtggcggaaccgactactttgggtgtccgtgtttccttttatctcttatatggctgcttatggtgacaatcatagattgttatcataaagcgacttggattggccatccggtgagatacaaacacatcacttacttgtttgttggattcactccactctcccaatttactcctagcataatatccattgttttgttaattagacattactatcaca

SEQ ID NO: 19914 - DNA, 744 bp, synthetic construct
  source 1..744: mol_type = other DNA
ttaaaacagctctggggttgttcccaccccagaggcccacgtggcggctagtactctggtatcgcggtacctttgtacgcctgttttatacccccaccccatgtaactttagaagcagttcaacaagttcaatagggggggtgcaaaccagcaccaccacgaacaagcacttctgtaaccccggtgaccttgtatatgctgtacccacggctgaaagcgagtgatccgttatccgcttaagtacttcgagaagcctagtaccaccttagaatcttcgatgcgttgcgctcagcactctatcccgagtgtagcttaggctgatgagtctgggcgttccccaccggcgacggtggcccaggctgcgttggcggcctacccatggctaacgccatgggacgctagatgtgaacaaggtgtgaagagcctattgagctacttaagagtcctccggcccctgaatgcggctaatcccaaccacggagcaggtgtcttcaacccagagggcggcctgtcgtaacgcgcaagtctgtggcggaaccgactactttgggtgtccgtgtttccttttatcttttatatggctgcttatggtgacaatcatagattgttatcataaagcgacttggattggccatccggtaagatacaaacacatcacttacttgtttgttggattcactccactctctcaatttactcctagcataatatccattgttttgttaattagacattactatcaca

SEQ ID NO: 19915 - DNA, 744 bp, synthetic construct
  source 1..744: mol_type = other DNA
ttaaaacagctctggggttgttcccaccccagaggcccacgtggcggctagtactctggtatcgcggtacctttgtacgcctgttttatacccccaccccatgtaactttagaagcagttcaacaagttcaatagggggggtgcaaaccagcaccaccacgaacaagcacttctgtaaccccggtgaccttgtatatgctgtacccacggctgaaagcgagtgatccgttatccgcttaagtacttcgagaagcctagtaccaccttagaatcttcgatgcgttgcgctcagcactctatcccgagtgtagcttaggccgatgagtctgggcgttccccaccggcgacggtggcccaggctgcgttggcggcctacccatggctaacgccatgggacgctagatgtgaacaaggtgtgaagagcctattgagctacttaagagtcctccggcccctgaatgcggctaatcccaaccacggagcaggtgccttcaacccagagggtggcctgtcgtaacgcgcaagtctgtggcggaaccgactactttgggtgtccgtgtttccttttatcttttatatggctgcttatggtgacaatcatagattgttatcataaagcgacttggattggccatccggtaaaatacaaacacatcacttacttgtttgttggatttactccactcccccaatttactcctagcataatatccgttgttttgttaacaagacattactatcaca

SEQ ID NO: 19916 - DNA, 744 bp, synthetic construct
  source 1..744: mol_type = other DNA
ttaaaacagctctggggttgttcccaccccagaggcccacgtggcggctagtactctggtatcgcggtacctttgtacgcctgttttatacccccaccccatgtaactttagaagcagttcaacaagttcaatagggggggtgcaaaccagcaccaccacgaacaagcacttctgtaaccccggtaaccttgtataagctgtacccacggctgaaagcgagtgatccgttatccgcttaagtacttcgagaagcctagtatcaccttagaatcttcgatgcgttgcgctcagcactctatcccgagtgtagcttaggctgatgagtctgggcgttcctcaccggcgacggtggcccaggctgcgttggcggcctacccatggctaacgccatgggacgctagatgtgaacaaggtgtgaagagcctattgagctacttaagagtcctccggcccctgaatgcggctaatcccaaccacggagcaggtgccttcaacccagagggtggcctgtcgtaacgcgcaagtctgtggcggaaccgactactttgggtgtccgtgtttccttttatcttttatatggctgcttatggtgacaatcatagattgttatcataaagcgacttggattggccatccggtaaaatacaaacacatcatttacttgtttgttggatttactccgctctcccaatttactcctagcataatatccattgttttgttaacaagacattactatcaca

SEQ ID NO: 19917 - DNA, 744 bp, synthetic construct
  source 1..744: mol_type = other DNA
ttaaaacagctctggggttgttcccaccccagaggcccacgtggcggctagtactctggtatcgcggtacctttgtacgcctgttttatacccccaccccatgtaactttagaagcagttcaacaagttcaatagggggggtgcaaaccagcaccaccacgaacaagcacttctgtaaccccggtgaccttgtataagctgtacccacggctgaaagcgagtgatccgttatccgcttaagtacttcgagaagcctagtatcaccttagaatcttcgatgcgttgcgctcagcactctatcccgagtgtagcttaggctgatgagtctgggcgttcctcaccggcgacggtggcccaggctgcgttggcggcctacccatggctaatgccatgggacgctagatgtgaacaaggtgtgaagagcctattgagctacttaagagtcctccggcccctgaatgcggctaatcccaaccacggagcaggtgccttcaacccagagggtggcctgtcgtaacgcgcaagtctgtggcggaaccgactactttgggtgtccgtgtttccttttatcttttatatggctgcttatggtgacaatcatagattgttatcataaagcgacttggattggccatccggtaaaatacaaacacatcatttacttgtttgttggatttactccactctcccaatttactcctagcataatatccattgttttgttaacaagacattactatcaca

SEQ ID NO: 19918 - DNA, 744 bp, synthetic construct
  source 1..744: mol_type = other DNA
ttaaaacagctctggggttgttcccaccccagaggcccacgtggcggctagtactctggtatcgcggtacctttgtacgcctgttttatacccccaccccatgtaactttagaagcagttcaacaagttcaatagggggggtgcaaaccagcaccaccacgaacaagcacttctgtaaccccggtaaccttgtataagctgtacccacggctgaaagcgagtgatccgttatccgcttaagtacttcgagaagcctagtatcaccttagaatcttcgatgcgttgcgctcagcactctatcccgagtgtagcttaggctgatgagtctgggcgttcctcaccggcgacggtggcccaggctgcgttggcggcctacccatggctaacgccatgggacgctagatgtgaacaaggtgtgaagagcctattgagctacttaagagtcctccggcccctgaatgcggctaatcccaaccacggagcaggtgccttcaacccagagggtggcctgtcgtaacgcgcaagtctgtggcggaaccgactactttgggtgtccgtgtttccttttatcttttatatggctgcttatggtgacaatcatagattgttatcataaagcgacttggattggccatccggtaaaatacaaacacatcatttacttgtttgttggatttactccactctcccaatttactcctagcataatatccattgttttgttaacaagacattactatcaca

SEQ ID NO: 19919 - DNA, 737 bp, synthetic construct
  source 1..737: mol_type = other DNA
acagctctggggttgttcccaccccagaggcccacgtggcggctagtacactggtatcacggtacctttgtacgcctgttttatactccctcccccgcaacttagaagcatacaattcaagctcaataggagggggtgcaagccagcgcctccgtgggcaagcactactgtttccccggtgaggccgcatagactgttcccacggttgaaagtgtccgatccgttatccgctcatgtacttcgagaagcctagtatcgctctggaatcttcgacgcgttgcgctcagcactcaaccccggagtgtagcttgggccgatgagtctggacagtccccactggcgacagtggtccaggctgcgctggcggcccacctgtggcccaaagccacgggacgctagttgtgaacagggtgtgaagagcctattgagctacatgagagtcctccggcccctgaatgcggctaatcctaaccatggagcaggcagctgcaacccagcagccagcctgtcgtaacgcgcaagtccgtggcggaaccgactactttgggtgtccgtgtttccttttattcttgaatggctgcttatggtgacaatcatagattgttatcataaagcgagttggattggccatccagtgtgaatcagattaattactcccttgtttgttggatccactcccgaaacgttttactccttaacttattgaaattgtttgaagacaggatttcagtgtcaca

SEQ ID NO: 19920 - DNA, 737 bp, synthetic construct
  source 1..737: mol_type = other DNA
acagctctggggttgttcccaccccagaggcccacgtggcggctagtacactggtatcacggtacctttgtacgcctgttttatactccctcccccgcaacttagaagcatacaattcaagctcaataggagggggtgcaagccagcgcctccgtgggcaagcactactgttcccccggtgaggccgcatagactgttcccacggttgaaagtgtccgatccgttatccgctcatgtacttcgagaagcctagtatcgctctggaatcttcgacgcgttgcgctcagcactcaaccccggagtgtagcttgggccgatgagtctggacagtccccactggcgacagtggtccaggctgcgctggcggcccacctgtggcccaaagccacgggacgctagttgtgaacagggtgtgaagagcctattgagctacatgagagtcctccggcccctgaatgcggctaatcctaaccatggagcaggcagctgcaacccagcagccagcctgtcgtaacgcgcaagtccgtggcggaaccgactactttgggtgtccgtgtttccttttattcttgaatggctgcttatggtgacaatcatagattgttatcataaagcgagttggattggccatccagtgtgaatcagattaattactcccttgtttgttggatccactcccgaaacgttttactccttaacttattgaaattgtttgaagacaggatttcagtgtcaca

SEQ ID NO: 19921 - DNA, 736 bp, synthetic construct
  source 1..736: mol_type = other DNA
cagctctggggttgttcccaccccagaggcccacgtggcggctagtacactggtatcacggtacctttgtacgcctgttttatactccctcccccgcaacttagaagcatacaattcaagctcaataggagggggtgcaagccagcgcctccgtgggcaagcactactgtttccccggtgaggccgcatagactgttcccacggttgaaagtgtccgatccgttatccgctcatgtacttcgagaagcctagtatcgctctggaatcttcgacgcgttgcgctcagcactcaaccccggagtgtagcttgggccgatgagtctggacagtccccactggcgacagtggtccaggctgcgctggcggcccacctgtggcccaaagccacgggacgctagttgtgaacagggtgtgaagagcctattgagctacatgagagtcctccggcccctgaatgcggctaatcctaaccatggagcaggcagctgcaacccagcagccagtctgtcgtaacgcgcaagtccgtggcggaaccgactactttgggtgtccgtgtttccttttattcttgaatggctgcttatggtgacaatcatagattgttatcataaagcgagttggattggccatccagtgtgaatcagattaattactcccttgtttgttggatccactcccgaaacgttttactccttaacttattgaaattgtttgaagacaggatttcagtgtcaca

SEQ ID NO: 19922 - DNA, 750 bp, synthetic construct; identical to SEQ ID NO: 1205
  source 1..750: mol_type = other DNA

SEQ ID NO: 19923 - DNA, 745 bp, synthetic construct
  source 1..745: mol_type = other DNA
ttaaaacagctctggggttgttcccaccccagaggcccacgtggcggctagcactctggtatcacggtacctttgtgcgcctgttttatgtccccgcccccatgtaactttagaagcaatacacggtgttcattaggaggggcacaagccagtgttcctatgaacaagcacttctgtttccccggtgacctcgtataggctgtgcccacggctaaaaacgagcgatccgttacccgcttgggtacttcgagaagcctagtaccaccttggaatcttcgacgcgttgcgctcagcactctaccccgagtgtagcttaggctgatgagtctgggcattccccactggtgacagtggcccaggctgcgttggcggcctacccatggctcgcgccatgggacgctagatgtgaacaaggtgtgaagagcctattgagctacctaagagtcctccggcccctgaatgcggccaatcctaaccacggagcaagcgccttcaacccagggggtggcttgtcgtaacgcgcaagtctgtggcggaaccgactactttgggtgtccgtgtttccctttatttttactatggctgcttatggtgacaatcattgattgccatcataaagcgaattggattggccatccggtggaagttatatacatcatctatctatttgttggatttgcttcactaacacagttcacaatcaacttggtatatataataatagtgattagagaaaaataccata

SEQ ID NO: 19924 - DNA, 745 bp, synthetic construct
  source 1..745: mol_type = other DNA
ttaaaacagctctggggttgttcccaccccagaggcccacgtggcggctagcactctggtatcacggtacctttgtgcgcctgttttatgtccccgcccccatgtaactttagaagcaatacacggtgttcattaggaggggcacaagccagtgttcctatgaacaagcacttctgttcccccggtgacctcgtataggctgtgcccacggctaaaaacgagcgatccgttacccgcttgggtacttcgagaagcctagtaccaccttggaatcttcgacgcgttgcgctcagcactctaccccgagtgtagcttaggctgatgagtctgggcattccccactggtgacagtggcccaggctgcgttggcggcctacccatggctcgcgccatgggacgctagatgtgaacaaggtgtgaagagcctattgagctacctaagagtcctccggcccctgaatgcggccaatcctaaccacggagcaagcgccttcaacccagggggtggcttgtcgtaacgcgcaagtctgtggcggaaccgactactttgggtgtccgtgtttccctttatttttactatggctgcttatggtgacaatcattgattgccatcataaagcgaattggattggccatccggtggaagttatatacatcatctatctatttgttggatttgcttcactaacacagttcacaatcaacttggtatatataataatagtgattagagaaaaataccata

SEQ ID NO: 19925 - DNA, 745 bp, synthetic construct
  source 1..745: mol_type = other DNA
ttaaaacagctctggggttgttcccaccccagaggcccacgtggcggctagcactctggtatcacggtacctttgtgcgcctgttttatgtccccgcccccatgtaactttagaagcaatacacggtgttcattaggaggggcacaagccagtgttcctatgaacaagcacttctgtttccccggtgacctcgtataggctgtgcccacggctaaaaacgagcgatccgttacccgcttgggtacttcgagaagcctagtaccaccttggaatcttcgacgcgttgcgctcagcactctaccccgagtgtagcttaggctgatgagtctgggcattccccactggtgacagtggcccaggctgcgttggcggcctacccatggctcgcgccatgggacgctagatgtgaacaaggtgtgaagagcctattgagctacctaagagtcctccggcccctgaatgcggccaatcctaaccacggagcaagcgccttcaacccagggggtggcttgtcgtaacgcgcaagtctgtggcggaaccgactactttgggtgtccgtgtttccctttatttttactatggctgcttatggtgacaatcattgattgccatcataaagcgaattggattggccatccggtggaagttatatacatcacctatctatttgttggatttgcttcactaacacagttcacaatcaacttggtatatataataatagtgattagagaaaaataccata

SEQ ID NO: 19926 - DNA, 745 bp, synthetic construct
  source 1..745: mol_type = other DNA
ttaaaacagctctggggttgttcccaccccagaggcccacgtggcggctagcactctggtatcacggtacctttgtgcgcctgttttatgtccccgcccccatgtaactttagaagcaatacacggtgttcattaggaggggcacaagccagtgttcctatgaacaagcacttctgtttccccggtgaccacgtataggctgtgcccacggctaaaaacgtgcgatccgttacccgcttgggtacttcgagaagcctagtaccaccttggaatcttcgacgcgttgcgctcagcactctaccccgagtgtagcttaggctgatgagtctgggcattccccactggtgacagtggcccaggctgcgttggcggcctacccatggctcgcgccatgggacgctagatgtgaacaaggtgtgaagagtctattgagctacctaagagtcctccggcccctgaatgcggccaatcctaaccacggagcaagcgccttcaacccagggggtggcttgtcgtaacgcgcaagtctgtggcggaaccgactactttgggtgtccgtgtttccctttatttttattatggctgcttatggtgacaatcattgattgccatcataaagcgaattggattggccatccggtggaagttacatacatcatctatctatttgttggatttgcttctctaacacagttcacaatcgacttggtatatataataatagtgattagagaaaaataccata

SEQ ID NO: 19927 - DNA, 745 bp, synthetic construct
  source 1..745: mol_type = other DNA
ttaaaacagctctggggttgttcccaccccagaggcccacgtggcggctagcactctggtatcatggtacctttgtgcgcctgttttatgtccccgcccccatgtaactttagaagctatacacggtgttcattaggaggggcacaagccagtgttcctatgaacaagcacttctgtttccccggtgacctcgtataggctgtgcccacggctaaaaacgagcgatccgttacccgcttgggtacttcgagaagcctagtaccaccttggaatcttcgacgcgttgcgctcagcactctaccccgagtgtagcttaggctgatgagtttgggcattccccactggtgacagtggcccaggctgcgttggcggcctacccatggctcgcgccatgggacgctagatgtgaacaaggtgtgaagagcctattgagctacctaagagtcctccggcccctgaatgcggccaatcctaaccacggagcaagcgccttcaacccagggggtggcttgtcgtaacgcgcaagtctgtggcggaaccgactactttgggtgtccgtgtttccctttatttttattatggctgcttatggtgacaatcattgattgccatcataaagcgaattggattggccatccggtggaagttatatacatcatctatctatttgttggatttgcttcaccaacacagttcacaatcaacttggtatattcaataatagtgattagagaaaaataccata

SEQ ID NO: 19928 - DNA, 745 bp, synthetic construct
  source 1..745: mol_type = other DNA
ttaaaacagctctggggttgttcccaccccagaggcccacgtggcggctagcactctggtatcacggtacctttgtgcgcctgttttatgtccccgcccccatgtaactttagaagcaatacacggtgttcattaggaggggcacaagccagtgttcctatgaacaagcacttctgtttccccggtgacctcgtataggctgtgcccacggctaaaaacgagcgatccgttacccgcttgggtacttcgagaagcctagtaccaccttggaatcttcgacgcgttgcgctcagcactctaccccgagtgtagcttaggctgatgagtctgggcattccccactggtgacagtggcccaggctgcgttggcggcctacccatggctcgcgccatgggacgctagatgtgaacaaggtgtgaagagcctattgagctacctaagagtcctccggcccctgaatgcggccaatcctaaccacggagcaagcgccttcaacccagggggtggcttgtcgtaacgcgcaagtctgtggcggaaccgactactttgggtgtccgtgtttccctttatttttattatggctgcttatggtgacaatcattgattgccatcataaagcgaattggattggccatccggtggaagttatatacatcatctatctatttgttggatttgcttcactaacacagttcacaatcaacttggtatatataataatagtgattagagaaaaataccata

SEQ ID NO: 19929 - DNA, 745 bp, synthetic construct
  source 1..745: mol_type = other DNA
ttaaaacagctctggggttgtacccaccccagaggcccacgtggcggctagcactctggtatcacggtacctttgtgcgcctgttttatgtccccgcccccatgtaactttagaagcaatacacggtgttcattaggaggggcacaagccagtgttcctatgaacaagcacttctgtttccccggtgatctcgtataggctgtgcccacggctaaaaacgagcgatccgttacccgcttgggtacttcgagaagcctagtaccaccttggaatcttcgacgcgttgcgctcagcactctaccccgagtgtagcttaggctgatgagtctgggcattccccactggtgacagtggcccaggctgcgttggcggcctacccatggctcgcgccatgggacgctagatgtgaacaaggtgtgaagagcctattgagctacctaagagtcctccggcccctgaatgcggccaatcctaaccacggagcaagcgccttcaacccagggggtggcttgtcgtaacgcgcaagtctgtggcggaaccgactactttgggtgtccgtgtttccctttatttttactatggctgcttatggtgacaatcattgattgccatcataaagcgaattggattggccatccggtggaagttatatacatcatctatctatttgttggatttgcttcactaacacagctcacaatcaacttggtatatataataatagtgattagagaaaaataccata

SEQ ID NO: 19930 - DNA, 745 bp, synthetic construct
  source 1..745: mol_type = other DNA
ttaaaacagctctggggttgttcccaccccagaggcccacgtggcggctagcactctggtatcacggtacctttgtgcgcctgttttatgtccccgcccccatgtaactttagaagcaatacacggtgttcattaggaggggcacaagccagtgttcctatgaacaagcacttctgtttccccggtgacctcgtataggctgtgcccacggctaaaaacgagcgatccgttacccgcttgggtacttcgagaagcctagtaccaccttggaatcttcgacgcgttgcgctcagcactctaccccgagtgtagcttaggctgatgagtctgggcattccccactggtgacagtggcccaggctgcgttggcggcctacccatggctcgcgccatgggacgctagatgtgaacaaggtgtgaagagcctattgagctacctaagagtcctccggcccctgaatgcggccaatcctaaccacggagcaagcgccttcaacccagggggtggcttgtcgtaacgcgcaagtctgtggcggaaccgactactttgggtgtccgtgtttccctttatttttactatggctgcttatggtgacaatcattgattgccatcataaagcgaattggattggccatccggtggaagttatatacatcacctatctatttgttggatttgcttcactaacacagttcacagtcaacttggtatatataataatagtgattatagaaaaataccata

SEQ ID NO: 19931 - DNA, 745 bp, synthetic construct
  source 1..745: mol_type = other DNA
ttaaaacagctctggggttgttcccaccccagaggcccacgtggcggctagcattctggtatcacggtacctttgtgcgcctgttttatgtccccgcccccatgtaactttagaagcaatacacggtgttcattaggaggggcacaagccagtgttcctatgaacaagcacttctgtttccccggtgacctcgtataggctgtgcccacggccaaaaacgagcgatccgttacccgcttgggtacttcgagaagcctagtaccaccttggaatcttcgacgcgttgcgctcagcactctaccccgagtgtagcttaggctgatgagtctgggcattccccactggtgacagtggcccaggctgcgttggcggcctacccatggctcgcgccatgggacgctagatgtgaacaaggtgtgaagagcctattgagctacctaagagtcctccggcccctgaatgcggccaatcctaaccacggagcaagcgccttcaacccagggggtggcttgtcgtaacgcgcaagtctgtggcggaaccgactactttgggtgtccgtgtttccctttacttttattatggctgcttatggtgacaatcattgattgccatcataaagcgaattggattggccatccggtggaagttatatacatcatctatctatttgttggatttgcttcactaacacagttcacaatcaacttggtatatataataatagtgattagagaaaaataccata

SEQ ID NO: 19932 - DNA, 745 bp, synthetic construct
  source 1..745: mol_type = other DNA
ttaaaacagctctggggttgttcccaccccagaggcccacgtggcggctagcactctggtatcacggtacctttgtgcgcctgttttatgtccccgcccccatgtaactttagaagcaatacacggtgttcattaggaggggcacaagccagtgttcctatgaacaagcacttctgtttccccggtgacctcgtataggctgtgcccacggctaaaaacgagcgatccgttacccgcttgggtacttcgagaagcctagtaccaccttgggatcttcgacgcgttgcgctcagcactctaccccgagtgtagcttaggctgatgagtctgggcattccccactggtgacagtggcccaggctgcgttggcggcctacccatggctcgcgccatgggacgctagatgtgaacaaggtgtgaagagcctattgagctacctaagagtcctccggcccctgaatgcggccaatcctaaccacggagcaagcgccttcaacccagggggtggcttgtcgtaacgcgcaagtctgtggcggaaccgactactttgggtgtccgtgtttccctttatttttattatggctgcttatggtgacaatcattgattgccatcataaagcgaattggattggccatccggtggaagttatatacatcatctatctatttgttggatttgcttcactaacacagttcacaatcaacttggtatatataataatagtgattagagaaaaataccata

SEQ ID NO: 19933 - DNA, 745 bp, synthetic construct
  source 1..745: mol_type = other DNA
ttaaaacagctctggggttgttcccaccccagaggcccacgtggcggctagcactctggtatcacggtacctttgtgcgcctgttttatgtccccgcccccatgtaactttagaagcaatacacggtgttcattaggaggggcacaagccagtgttcctatgaacaagcacttctgtttccccggtgacctcgtataggctgtgcccacggctaaaaacgagcgatccgttacccgcttgggtacttcgagaagcctagtaccaccttggaatcttcgacgcgttgcgctcagcactctaccccgagtgtagcttaggctgatgagtctgggcattccccactggtgacagtggcccaggctgcgttggcggcctacccatggctcgcgccatgggacgctagatgtgaacaaggtgtgaagagcctattgagctacctaagagtcctccggcccctgaatgcggccaatcctaaccacggagcaagcgccttcaacccagggggtggcttgtcgtaacgcgcaagtctgtggcggaaccgactactttgggtgtccgtgtttccctttatttctattatggctgcttatggtgacaatcattgattgccatcataaagcgaattggattggccatccggtggaagttatatacatcatctatctatttgttggatttgcttcactaacacagttcacaatcaacttggtatatataataatagtgattagagaaaaataccata

SEQ ID NO: 19934 - DNA, 745 bp, synthetic construct
  source 1..745: mol_type = other DNA
ttaaaacagctctggggttgttcccaccccagaggcccacgtggcggctagcactctggtatcacggtacctttgtgcgcctgttttatgtccccgcccccatgtaactttagaagcaatacacggtgttcattaggaggggcacaagccagtgttcctatgaacaagcacttctgtttccccggtgacctcgtataggctgtgcccacggctaaaaacgagcgatccgttacccgcttgggtacttcgagaagcctagtaccaccttggaatcttcgacgcattgcgctcagcactctaccccgagtgtagcttaggctgatgagtctgggcattccccactggtgacagtggcccaggctgcgttggcggcctacccatggcttgcgccatgggacgctagatgtgaacaaggtgtgaagagcctattgagctacctaagagtcctccggcccctgaatgcggccaatcctaaccacggagcaagcgccttcaacccaggaggtggcttgtcgtaacgcgcaagtctgtggcggaaccgactactttgggtgtccgtgtttccctttatttttattatggctgcttatggtgacaatcattgattgccatcataaagcgaattggattggccatccggtggaagttatatacatcatctatctatttgctgggtttgcttcactaacacagttcacaatcaacttggtatatataataatagtgattagagaaaaataccata

SEQ ID NO: 19935 - DNA, 745 bp, synthetic construct
  source 1..745: mol_type = other DNA
ttaaaacagctctggggttgttcccaccccagaggcccacgtggcggctagcactctggtatcacggtacctttgtgcgcctgttttatatccccgcccccatgtaactttagaagcaatacacggtgttcattaggaggggcacaagccagtgttcctatgaacaagcacttctgtttccccggtgacctcgtataggctgtgcccacggctaaaaacgagcgatccgttacccgcttgggtacttcgagaagcctagtaccaccttggaatcttcgacgcgttgcgctcagcactctaccccgagtgtagcttaggctgatgagtctgggcattccccactggtgacagtggcccaggctgcgttggcggcctacccatggctcgcgccatgggacgctagatgtgaacaaggtgtgaagagcctattgagctacctaagagtcctccggcccctgaatgcggccaatcctaaccacggagcaagcgccttcaacccagggggtggcttgtcgtaacgcgcaagtctgtggcggaaccgactactttgggtgtccgtgtttccctttatttttattatggctgcttatggtgacaatcattgattgccatcataaagcgaattggattggccatccggtggaagctatatacatcatctatctatttgttggatttgcttcactaacacagttcacaatcaacttggtatatataataatagtgattagagaaaaataccata

SEQ ID NO: 19936 - DNA, 745 bp, synthetic construct
  source 1..745: mol_type = other DNA
ttaaaacagctctggggttgttcccaccccagaggcccacgtggcggctagcactctggtatcacggtacctttgtgcgcctgttttatgtccccgcccccatgtaactttagaagcaatacacggtgttcattaggaggggcacaagccagtgttcctatgaacaagcacttctgtttccccggtgacctcgtataggctgtgcccacggctaaaaacgagcgatccgttacccgcttgggtacttcgagaagcctagtaccaccttggaatcttcgacgcgttgcgctcagcactctaccccgagtgtagcttaggctgatgagtctgggcattccccactggtgacagtggcccaggctgcgttggcggcctacccatggctcgtgccatgggacgctagatgtgaacaaggtgtgaagagcctattgagctacctaagagtcctccggcccctgaatgcggctaatcctaaccacggagcaagcgccttcaacccagggggtggcttgtcgtaacgcgcaagtctgtggcggaaccgactactttgggtgtccgtgtttccctttatttttattatggctgcttatggtgacaatcattgattgccatcataaagcgaattggattggccatccggtggaagttatatacatcatctatctatttgttggattcgcttcactaatacagttcacaatcaacttggtatatataataatagtgattagagaaaaataccata

SEQ ID NO: 19937 - DNA, 736 bp, synthetic construct
  source 1..736: mol_type = other DNA
cagctctggggttgttcccaccccagaggcccacgtggcggctagtacactggtatcacggtacctttgtacgcctgttttatactccctcccccgcaacttagaagcatacaattcaagctcaataggagggggtgcaagccagcgcctccgtgggcaagcactactgtttccccggtgaggccgcatagactgttcccacggttgaaagtgtccgatccgttatccgctcatgtacttcgagaagcctagtatcgctctggaatcttcgacgcgttgcgctcagcactcaaccccggagtgtagcttgggccgatgagtctggacagtccccactggcgacagtggtccaggctgcgctggcggcccacctgtggcccaaagccacgggacgctagttgtgaacagggtgtgaagagcctattgagctacatgagagtcctccggcccctgaatgcggctaatcctaaccatggagcaggcagctgcaacccagcagccagcctgtcgtaacgcgcaagtccgtggcggaaccgactactttgggtgtccgtgtttccttttattcttgaatggctgcttatggtgacaatcatagattgttatcataaagcgagttggattggccatccagtgtgaatcagattaattactcccttgtttgttggatccactcccgaaacgttttactccttaacttattgaaattgtttgaagacaggatttcagtgtcaca

SEQ ID NO: 19938 - DNA, 736 bp, synthetic construct
  source 1..736: mol_type = other DNA
cagctctggggttgttcccaccccagaggcccacgtggcggctagtacactggtatcacggtacctttgtacgcctgttttatactccctcccccgcaacttagaagcatacaattcaagctcaataggagggggtgcaagccagcgcctccgtgggcaagcactactgtttccccggtgaggccgcatagactgttcccacggttgaaagtgtccgatccgttatccgctcatgtacttcgagaagcctagtatcgctctggaatcttcgacgcgttgcgctcagcactcaaccccggagtgtagcttgggccgatgagtctggacagtccccactggcgacagtggtccaggctgcgctggcggcccacctgtggcccaaagccacgggacgctagttgtgaacagggtgtgaagagcctattgagctacatgagagtcctccggcccctgaatgcggctaatcctaaccatggagcaggcagctgcaacccagcagccagcctgtcgtaacgcgcaagtccgtggcggaaccgactactttgggtgtccgtgtttccttttattcttgaatggctgcttatggtgacaatcatagattgttatcataaagcgagttggattggccatccagtgtgaatcagattaattactcccttgtttgttggatccactcccgaaacgttttactccttaacttattgaaattgtttgaagacaggatttcagtgccaca

SEQ ID NO: 19939 - DNA, 744 bp, synthetic construct
  source 1..744: mol_type = other DNA
tttaaacagctctggggttgttcccaccccagaggcccacgtggcggctagtactctggtatcgcggtacctttgtacgcctgttttatacccctaccccatgtaactttagaagcagttcaacaagttcaatagggggggtgcaaaccagcaccaccacgaacaagcacttctgtaaccccggtgaccttgtataagctgtgcccacggctgaaagcgagtgatccgttatccgcttaagtacttcgagaagcttagtatcaccttggaatcttcgatgcgttgcgctcagcactctatcccgagtgtagcttaggctgatgagtctgggcgttccccaccggcgacggtggcccaggctgcgttggcggcctacccatggctaacgccatgggacgctagatgtgaacaaggtgtgaagagcctattgagctacttaagagtcctccggcccctgaatgcggctaatcccaaccacggagcaggtgccttcaacccagagggcggcctgtcgtaacgcgcaagtctgtggcggaaccgactactttgggtgtccgtgtttccttttatcttttatatggctgcttatggtgacaatcatagattgttatcataaagcgacttggattggccatccggtaaaatacaaacacatcatctacttgtttgttggatttactccactcacccaatttactcccagcataatatccattgttttgttaacaagacattgctatcacg

SEQ ID NO: 19940 - DNA, 742 bp, synthetic construct
  source 1..742: mol_type = other DNA
ttaaaacagctctggggttgcacccgccccagaggcccacgtggcggctagtactccggtattgcggtacccttgtacgcctgttttatactcccttcccgtaacttagacgcacaaaaccaagttcaatagaagggggtacaaaccagtaccaccacgaacaagcacttctgtttccccggtgatgttgtatagactgcttgcgtggttgaaagcgacggatccgttatccgcttatgtacttcgagaagcccagtaccacctcggaatcttcgatgcgttgcgctcagcactcaaccccagagtgtagcttaggctgatgagtctggacatccctcaccggtgacggtggtctaggctgcgttggcggcctacctatggctaacgccatgggacgctagttgtgaacaaggtgtgaagagcctattgagctacataagaatcctccggcccctgaatgcggctaatcccaacctcggggcaggtggtcacaaaccagtgattggcctgtcgtaacgcgcaagtccgtggcggaaccgactactttgggtgtccgtgtttccttttattttattgtggctgcttatggtgacaatcacagattgttatcataaagcgaattggattggccatccggtgaaagtgagattcattatctatctgtttgctggattcgctccattgagtgtgtttactctaagtacaatttcaacagttatttcaatcagacaattgtatcata

SEQ ID NO: 19941 - DNA, 743 bp, synthetic construct
  source 1..743: mol_type = other DNA
ttaaaacagctctggggttgttcccaccccagaggcccacgtggcggccagtactctggtatcacggtacctttgtacgcctgttttatactcccttcccgaaacttagacgcatgaaacccaagttcagtagaagggggtgcaagccagtaccaccacgaacaagcacttctgtttccccggtgatgttgtatagactgctcgcgtggttgaaagcgacggatccgttatccgcttgtgtacttcgagaagcccagtaccaccttggaatcttcgatgcgttgcgctcgacactcaatcccagagtgtagcttaggctgatgagtctggacattccccaccggtgacggtggtccaggctgcgttggcggcctacccatggccgacgccatgggacgctagttgtgaacaaggtgtgaagagcctattgagctacataagagtcctccggcccctgaatgcggctaatcccaacctcggagcaggtggtcacacaccagtgactggcctgtcgtaacgcgcaagtccgtggcggaaccgactactttgggtgtccgtgtttccttttattttatgctggctgcttatggtgacaatcacagattgttatcataaagcgaattggattggccatccggtgatagtgaaactcattacttgactgtttgctgaatttgctccattgtaagtgtttgccctgagtacaattttaatagttactttgattggacaattgtactata

SEQ ID NO: 19942 - DNA, 742 bp, synthetic construct
  source 1..742: mol_type = other DNA
ttaaaacagctctggggttgcacccaccccagaggcccacgtggcggctagtactccggtattgcggtacccttgtacgcctgttttatactcccttcccgtaacttagacgcacaaaaccaagttcaatagaagggggtacaaaccagtaccaccacgaacaagcacttctgtttccccggtgatgttgtatagactgcttgcgtggttgaaagcgacggatccgttatccgcttatgtacttcgagaagcccagtaccacctcggaatcttcgatgcgttgcgctcagcactcaaccccagagtgtagcttaggctgatgagtctggacattcctcaccggtgacggtggtccaggctgcgttggcggcctacctatggctaacgccatgggacgctagttgtgaacaaggtgtgaagagcctattgagctacataagaatcctccggcccctgaatgcggctaatcctaacctcggggcaggtggtcacaaaccagtgattaacctgtcgtaacgcgcaagcccgtggcggaaccgactactttgggtgtccgtgtttccttttattttatagtggctgcttatggtgacaatcacggattgttatcataaagcgaattggattggccatccggtgaaagtgagattcattatctatctgtttgctggattcgctccattgagtgtgtttactctaagtacaatttcaacggttatttcaatcagacaattgtatcata

SEQ ID NO: 19943 - DNA, 742 bp, synthetic construct
  source 1..742: mol_type = other DNA
ttaaaacagctctggggttgcacccaccccagaggcccacgtggcggctagtactccggtattgcggtacccttgtacgcctgttttatactcccttcccgtaacttagacgcacaaaaccaagttcaatagaagggggtacaaaccagtaccaccacgaacaagcacttctgtttccccggtgatgttgtatagactgcttgcgtggttgaaagcgacggatccgttatccgcttatgtacttcgagaagcccagtaccacctcggaatcttcgatgcgttgcgctcagcactcaaccccagagtgtagcttaggctgatgagtctggacatccctcaccggtgacggtggtccaggctgcgttggcggcctacctatggctaacgccatgggacgctagttgtgaacaaggtgtgaagagcctattgagctacataagaatcctccggcccctgaatgcggctaatcccaacctcggggcaggtggtcacaaaccagtgattggcctgtcgtaacgcgcaagtccgaggcggaaccgactactttgggtgtccgtgtttccttttattttattgtggctgcttatggtgacaatcacagattgttatcataaagcgaattggattggccatccggtgaaagtgagattcattatctatctgtttgctggattcgctccattgagtgtgtttactccaagtacaatttcaacagttatttcaatcagacaattgtattata

SEQ ID NO: 19944 - DNA, 742 bp, synthetic construct
  source 1..742: mol_type = other DNA
ttaaaacagctctggggttgtacccaccccagaggcccacgtggcggctagtactccggtattgcggtacccttgtacgcctgttttatactcccttcccgtaacttagacgcacaaaaccaagttcaatagaagggggtacaaaccagtaccaccacgaacaagcacttctgtttccccggtgatgttgtatagactgcttgcgtggttgaaagcgacggatccgttatccgcttatgtacttcgagaagcccagtaccacctcggaatcttcgatgcgttgcgctcagcactcaaccccagagtgtagcttaggctgatgagtctggacatccctcaccggtgacggtggtccaggctgcgttggcggcctacctatggctaacgccatgggacgctagttgtgaacaaggtgtgaagagcctattgagctacataagaatcctccggcccctgaatgcggctaatcccaacctcggagcaggtggtcacaaaccagtgattggcctgtcgtaacgcgcaagtccgtggcggaaccgactactttgggtgtccgtgtttccttttattttattgtggctgcttatggtgacaatcacagattgttatcataaagcgaattggattggccatccggtgaaagtgagattcgttatctatctgtttgctggatttgctccattgagtgtgtttactctaagtacaattccaacagctatttcaatcagacaattgtatcata

SEQ ID NO: 19945 - DNA, 742 bp, synthetic construct
  source 1..742: mol_type = other DNA
ttaaaacagctctggggttgcacccaccccagaggcccacgtggcggctagtactccggtattgcggtacccttgtacgcctgttttatactcccttcccgtaacttagaagcatgaaaccaagttcaatagaagggggtgcaaaccagtaccaccacgaacaagcacttctgtttccccggtgatgttgtatagactgcttgcgtggtcgaaagcgacggatccgtcatccgcttatgtacttcgagaagcccagtaccacctcggaatcttcgacgcgttgcgctcagcactcaaccccagagtgtagcttaggctgatgagtctggacgtccctcaccggtgacggtggtccaggctgcgttggcggcctacccatggcatacgccatgggacgctagttgtgaacaaggtgtgaagagcctattgagctacataagaatcctccggcccctgaatgcggctaatcccaacctcggagcaggtggtcacaaaccagtgattggcctgtcgtaacgcgcaagtccgtggcggaaccgactactttgggtgtccgtgtttccttttatattattatggctgcttatggtgacaatcacagattgttatcataaagcgatttggattggccatccggtgaaagtgagattcattatctatctgtttgctggattcgctccattgagtgtgtttactctaagtataatttcaacagttatttcaagcagacaattgtaccata

SEQ ID NO: 19946 - DNA, 742 bp, synthetic construct
  source 1..742: mol_type = other DNA
ttaaaacagctctggggttgcacccaccccagaggcccacgtggcggctagtactccggtattgcggtacccttgtacgcctgttttatactcccttcccgtaacttagacgcacgaaaccaagttcaatagaagggggtgcaaaccagtaccaccacgaacaagcacttctgtttccccggtgatgtcgtatagactgcttgcgtggtcgaaagcgacggatccgtcatccgcttatgtacttcgagaagcccagtaccacctcgggatcttcgacgcgttgcgctcagcactcaaccccagagtgtagcttaggctgatgagtctggacgtccctcaccggtgacggtggtccaggctgcgttggcggcctacccatggtttacgccatgggacgctagttgtgaacaaggtgtgaagagcctattgagctacataagaatcctccggcccctgaatgcggctaatcccaacctcggagcaggtggtcacaaaccagtgattggcctgtcgtaacgcgcaagtccgtggcggaaccgactactttgggtgtccgtgtttccttttattttattatggctgcttatggtgacaatcacagattgttatcataaagcgaattggattggccatccggtgaaagtgagattcattatctattagtttgctggattcgccccattgagtgtgtttactttaagtataatttcaacagttatttcaaacagacaattgtaccaca

SEQ ID NO: 19947 - DNA, 742 bp, synthetic construct
  source 1..742: mol_type = other DNA
ttaaaacagctctggggttgcacccaccccagaggcccacgtggcggctagtactccggtattgcggtacccttgtacgcctgttttatactcccttcccgtaacttagacgcacgaaaccaagttcaatagaagggggtgcaaaccagtaccaccacgaacaagcacttctgtttccccggtgatgttgtatagactgcttgcgtggtcgaaagcgacggatccgtcatccgcttatgtacttcgagaagcccagtaccacctcgggatcttcgacgcgttgcgctcagcactcaaccccagagtgtagcttaggctgatgagtctggacgtccctcaccggtgacggtggtccaggctgcgttggcggcctacctatggcttacgccatgggacgctagttgtgaacaaggtgtgaagagcctattgagctacataagaatcctccggcccctgaatgcggctaatcccaacctcggagcaggtggtcacaaaccagtgattggcctgtcgtaacgcgcaagtccgtggcggaaccgactactttgggtgtccgtgtttccttttattttattatggctgcttatggtgacaatcacagattgttatcataaagcgaattggattggccatccggtgaaagtgagattcattatctatctgtttgctggattcgctccattgagtgtgtttactttaagtataatttcaacagttatttcaaacagacaattgtaccaca

SEQ ID NO: 19948 - DNA, 742 bp, synthetic construct
  source 1..742: mol_type = other DNA
ttaaaacagctctggggttgcacccaccccagaggcccacgtggcggctagtactccggtattgcggtacccttgtacgcctgttttatactcccttcccgtaacttagacgcacaaaaccaagttcaatagaagggggtacaaaccagtaccaccacgaacaagcacttctgtttccccggtgatgttgtatagactgcttgcgtggttgaaagcgacggatccgttatccgcttatgtacttcgagaagcccagtaccacctcggaatcttcgatgcgttgcgctcagcactcaaccccagagtgtagcttaggctgatgagtctggacatccctcaccggtgacggtggtccaggctgcgttggcggcctacctatggctaacgccatgggacgctagttgtgaacaaggtgtgaagagcctattgagctacataagaatcctccggcccctgaatgcggctaatcccaacctcggggcaggtggtcacaaaccagtgattggcctgtcgtaacgcgcaagtccgtggcggaaccgactactttgggtgtccgtgtttccttttattttattgtggctgcttatggtgacaatcacagattgttatcataaagcgaattggattggccatccggtgaaagtgagattcattatctatctgtttgctggattcgctccattgagtgtgtttactctaagtacaatttcaacagttatttcaatcagacaattgtatcata

SEQ ID NO: 19949 - DNA, 734 bp, synthetic construct; identical to SEQ ID NO: 944
  source 1..734: mol_type = other DNA

SEQ ID NO: 19950 - DNA, 742 bp, synthetic construct
  source 1..742: mol_type = other DNA
ttaaaacagctctggggttgcacccaccccagaggcccacgtggcggctagtactccggtactgcggtacccttgtacgcctgttttatactcccttcccgtaacttagacgcacgaaaccaagttcaatagaagggggtgcaaaccagtaccaccacgaacaagcacttctgtttccccggtgatgttgtatagactgcttgcgtggtcgaaagcgacggatccgtcatccgcttatgtacttcgagaagcccagtaccacctcggaatcttcgacgcgttgcgctcagcactcaaccccagagtgtagcttaggctgatgagtctggacgtccctcaccggtgacggtggtccaggctgcgttggcggcctacctatggcttacgccatgggacgctagttgtgaacaaggtgtgaagagcctattgagctacataagaatcctccggcccctgaatgcggctaatcccaacctcggagcaggtggtcacaaaccagtgattggcctgtcgtaacgcgcaagtccgtggcggaaccgactactttgggtgtccgtgtttccttttattttactatggctgcttatggtgacaatcacagattgttatcataaagcgaattggattggccatccggtgaaagtgagatacattatctatctgtttgctggattctttccattgagtgtacttactctaagtataatttcaacagttatttcaaacagacaattgtaccata

SEQ ID NO: 19951 - DNA, 742 bp, synthetic construct
  source 1..742: mol_type = other DNA
ttaaaacagctctggggttgcacccaccccagaggcccacgtggcggctagtactccggtattgcggtacccttgtacgcctgttttatactcccttcccgtaacttagaagcatgaaaccaagttcaatagaagggggtgcaaaccagtaccaccacgaacaagcacttctgtttccccggtgatgttgtatagactgcttgcgtggtcgaaagcgacggatccgtcatccgcttatgtacttcgagaagcccagtaccacctcggaatcttcgacgcgttgcgctcagcactcaaccccagagtgtagcttaggctgatgagtctggacgtccctcaccggtgacggtggtccaggctgcgttggcggcctacccatggcttacgccatgggacgctagttgtgaacaaggtgtgaagagcctattgagctacataagaatcctccggcccctgaatgcggctaatcccaacctcggagcaggtggtcacaaaccagtgattggcctgtcgtaacgcgcaagtccgtggcggaaccgactactttgggtgtccgtgtttccttttatattattatggctgcttatggtgacaatcacagattgttatcataaagcgaattggattggccatccggtgaaagtgagattcattatctatctgtttgctggattcgctccattgagtgtgtttactctaagtataatttcaacagttatttcaaacagacaattgtaccata

SEQ ID NO: 19952 - DNA, 742 bp, synthetic construct
  source 1..742: mol_type = other DNA
ttaaaacagctctggggttgcacccaccccagaggcccacgtggcggctagtactccggtactgcggtacccttgtacgcctgttttatactcccttcccgtaacttagacgcacgaaaccaagttcaatagaagggggtgcaaaccagtaccaccacgaacaagcacttctgtttccccggtgatgttgtatagactgcttgcgtggtcgaaagcgacggatccgtcatccgcttatgtacttcgagaagcccagtaccacctcggaatcttcgacgcgttgcgctcagcactcaaccccagagtgtagcttaggctgatgagtctggacgttcctcaccggtgacggtggtccaggctgcgttggcggcctacctatggcttacgccatgggacgctagttgtgaacaaggtgtgaagagcctattgagctacataagaatcctccggcccctgaatgcggctaatcccaacctcggagcaggtggtcacaaaccagtgattggcctgtcgtaacgcgcaagtccgtggcggaaccgactactttgggtgtccgtgtttccttttattttactatggctgcttatggtgacaatcacagattgttgtcataaagcgaattggattggccatccggtgaaagtgagatacattatctatctgtttgctggattctttccattgagtgtacttactctaagtataatttcaacagttatttcaaacagacaattgtaccata

SEQ ID NO: 19953 - DNA, 742 bp, synthetic construct
  source 1..742: mol_type = other DNA
ttaaaacagctctggggttgcacccaccccagaggcccacgtggcggctagtactccggtactacggtacccttgtacgcctgttttatactcccttcccgtaacttagacgcacgaaaccaagttcaatagaagggggtgcaaaccagtaccaccacgaacaagcacttctgtttccccggtgatgttgtatagactgcttgcgtggtcgaaagcgacggatccgtcatccgcttatgtacttcgagaagcccagtaccacctcggaatcttcgacgcgttgcgctcagcactcaaccccagagtgtagcttaggctgatgagtctggacgtccctcaccggtgacggtggtccaggctgcgttggcggcctacccatggtttacgccatgggacgctagttgtgaacaaggtgtgaagagcctattgagctacataagaatcctccggcccctgaatgcggctaatcccaacctcggagcaggtggtcacaaaccagtgattggcctgtcgtaacgcgcaagtccgtggcggaaccgactactttgggtgtccgtgtttccttttattttattgtggctgcttatggtgacaatcacagattgttatcataaagcgaattggattggccatccggtgaaagtgagactcattatctacctgttcgctggattcgctccattgagtgtgtttaccctaagtacaatttcaacagttattttaatcagacaattgtaccata

SEQ ID NO: 19954 - DNA, 742 bp, synthetic construct
  source 1..742: mol_type = other DNA
ttaaaacagctctggggttgcacccaccccagaggcccacgtggcggctagtactccggtactgcggtacccttgtacgcctgttttatactcccttcccgtaacttagacgcacgaaaccaagttcaatagaagggggtgcaaaccagtaccaccacgaacaagcacttctgtttccccggtgatgttgtatagactgcttgcgtggtcgaaagcgacggatccgtcatccgcttatgtacttcgagaagcccagtaccacctcggaatcttcgatgcgttgcgctcagcactcaaccccagagtgtagcttaggctgatgagtctggacgtccctcaccggtgacggtggtccaggctgcgttggcggcctacctatggcttacgccatgggacgctagttgtgaacaaggtgtgaagagcctattgagctacataagaatcctccggcccctgaatgcggctaatcccaacctcggagcaggtggtcacaaaccagtgattggcctgtcgtaacgcgcaagtccgtggcggaaccgactactttgggtgtccgtgtttcctcttattttattatggctgcttatggtgacaatcacagattgttatcataaagcgaattggattggccatccggtgaaagtgagattcactatctatctgtttgctggattcgctccattgagtgtgtttactctaagtataatttcaacagttatttcaaacagacaattgtatcata

SEQ ID NO: 19955 - DNA, 742 bp, synthetic construct
  source 1..742: mol_type = other DNA
ttaaaacagctctggggttgtacccaccccagaggcccacgtggcggctagtactccggtattgcggtacccttgtacgcctgttttatactcccttcccgtaacttagacgcacgaaaccaagttcaatagaagggggtgcaaaccagtaccaccacgaacaagcacttctgtttccccggtgatgttgtatagactgcttgcgtggtcaaaagcgacggatccgtcatccgcttatgtacttcgagaagcccagtaccacctcgggatcttcgacgcgttgcgctcagcactcaaccccagagtgtagcttaggctgatgagtctggacgtccctcaccggtgacggtggtccaggctgcgttggcggcctacccatggcttacgccatgggacgctagttgtgaacaaggtgtgaagagcctattgagctacataagaatcctccggcccctgaatgcggctaatcccaacctcggagcaggtggtcacaaaccagtgattggcctgtcgtaacgcgcaagtccgtggcggaaccgactactttgggtgtccgtgtttccttttattttattatggctgcttatggtgacaatcacagattgttatcataaagcgaattggattggccatccggtgaaagtgagattcattatctatctatttgctggattcgctccgttgagtgtgtttactttaagtataatttcaacagttatttcaaacagacaattgtaccaca

SEQ ID NO: 19956 - DNA, 742 bp, synthetic construct
  source 1..742: mol_type = other DNA
ttaaaacagctctggggttgcacccaccccagaggcccacgtggcggctagtactccggtattgcggtacccttgtacgcctgttttatactcccttcccgtaacttagacgcacgaaaccaagttcaatagaagggggtgcaaaccagtaccaccacgaacgagcacttctgtttccccggtgatgttgtatagactgcttgcgtggtcgaaagcgacggatccgtcatccgcttatgtacttcgagaagcccagtaccacctcgggatcttcgacgcgttgcgctcagcactcaaccccagagtgtagcttaggctgatgagtctggacgtccctcaccggtgacggtggtccaggctgcgttggcggcctacctatggcttacgccatgggacgctagttgtgaacaaggtgtgaagagcctattgagctacataagaatcctccggcccctgaatgcggctaatcccaacctcggagcaggtggtcacaaaccagtgattggcctgtcgtaacgcgcaagtccgtggcggaaccgactactttgggtgtccgtgtttccttttattttattatggctgcttatggtgacaatcacagattgttatcataaagcgaattggattggccatccggtgaaagtgagattcattatctatctgtttgctggattcgccccattgagtgtgtttactttaagtatagtttcaacagttatttcaaacagacaattgtaccaca

SEQ ID NO: 19957 - DNA, 742 bp, synthetic construct
  source 1..742: mol_type = other DNA
ttaaaacagctctggggttgcacccaccccagaggcccacgtggcggctagtactccggtattgcggtacccttgtacgcctgttttatactcccttcccgtaacttagacgcacgaaaccaagttcaatagaagggggtgcaaaccagtaccaccacgaacaagcacttctgtttccccggtgatgttgtatagactgcttgcgtggtcgaaagcgacggatccgtcatccgcttatgtacttcgagaagcccagtaccacctcgggatcttcgacgcgttgcgctcagcactcaaccccagagtgtagcttaggctgatgagtctggacgtccctcaccggtgacggtggtccaggctgcgttggcggcctacctatggcttacgccatgggacgctagttgtgaacaaggtgtgaagagcctattgagctacataagaatcctccggcccctgaatgcggctaatcccaacctcggagcaggtggtcacaaaccagtgattggcctgtcgtaacgcgcaagtccgtggcggaaccgactactttgggtgtccgtgtttccttttattttattatggctgcttatggtgacaatcacagattgttatcataaagcgaattggattggccatccggtgaaagtgagattcattatctatctgtttgctggattcgccccattgagtgtgtttactttaagtatagtttcaacagttatttcaaacagacaattgtaccaca

SEQ ID NO: 19958 - DNA, 742 bp, synthetic construct
  source 1..742: mol_type = other DNA
ttaaaacagctctggggttgcacccaccccagaggcccacgtggcggctagtactccggtattgcggtacccttgtacgcctgttttatactcccttcccgtaacttagacgcacgaaaccaagttcaatagaagggggtgcaaaccagtaccaccacgaacaagcacttctgtttccccggtgatgttgtatagactgcttgcgtggtcgaaagcgacggatccgtcatccgcttatgtacttcgagaagcccagtaccacctcaggatcttcgacgcgttgcgctcagcactcaaccccagagtgtagcttgggctgatgagtctggatgtccctcaccggtgacggtggtccaggctgcgttggcggcctacctatggcttacgccatgggacgctagttgtgaacaaggtgtgaagagcctattgagctacataagaatcctccggcccctgaatgcggctaatcctaacctcggagcaggtggtcacaaaccagtgattggcctgtcgtaacgcgcaagtccgtggcggaaccgactactttgggtgtccgtgtttccttttattttattatggctgcttatggtgacaatcacagattgttatcataaagcgaattggattggccatccggtgaaagtgagattcattatctatctgcttgctggattcgccccattgagtgtgtttactttaagtataatttcaacagttatttcaaacagacaattgtaccaca

SEQ ID NO: 19959 - DNA, 742 bp, synthetic construct
  source 1..742: mol_type = other DNA
ttaaaacagctctggggttgcacccaccccagaggcccacgtggcggctagtactccggtattgcggtacccttgtacgcctgttttatactcccttcccgtaacttagacgcacgaaaccaagttcaatagaagggggtgcaaaccagtaccaccacgaacaagcacttctgtttccccggtgatgttgtatagactgcttgcgtggtcgaaagcgacggatccgtcatccgcttatgtacttcgagaagcccagtaccacctcaggatcttcgacgcgttgcgctcagcactcaaccccagagtgtagcttaggctgatgagtctggacgtccctcaccggtgacggtggtccaggctgcgttggcggcctacctatggcttacgccatgggacgctagttgtgaacaaggtgtgaagagcctattgagctacataagaatcctccggcccctgaatgcggctaatcctaacctcggagcaggtggtcacaaaccagtgattggcctgtcgtaacgcgcaagtccgtggcggaaccgactactttgggtgtccgtgtttccttttattttattatggctgcttatggtgacaatcacagattgttatcataaagcgaattggattggccatccggtgaaagtgagattcattatctatctgtttgctggattcgccccattgagtgtgtttactttaagtataatttcaacagttatttcaaacagacaattgtaccaca

SEQ ID NO: 19960 - DNA, 742 bp, synthetic construct
  source 1..742: mol_type = other DNA
ttaaaacagctctggggttgcacccaccccagaggcccacgtggcggctagtactccggtattgcggtacccttgtacgcctgttttatactcccttcccgtaacttagacgcacgaaaccaagttcaatagaagggggtgcaaaccagtaccaccacgaacaagcacttctgtttccccggtgatgttgtatagactgcttgcgtggtcgaaagcgacggatccgtcatccgcttatgtacttcgagaagcccagtaccacctcgggatcttcgacgcgttgcgctcagcactcaaccccagagtgtagcttaggctgatgagtctggacgtccctcaccggcgacggtggtccaggctgcgttggcggcctacctatggcttacgccatgggacgctagttgtgaacaaggtgtgaagagcctattgagctacataagaatcctccggcccctgaatgcggctaatcccaacctcggagcaggtggtcacaaaccagtgattggcctgtcgtaacgcgcaagtccgtggcggaaccgactactttgggtgtccgtgtttccttttattttattatggctgcttatggtgacaatcacagattgttatcataaagcgaattggattggccatccggtgaaagtgagattcattatctatctgtttgctggattcgctccattgagtgtgtttactttaagcataatttcaatagctatttcaaacagacaattgtaccaca

SEQ ID NO: 19961 - DNA, 742 bp, synthetic construct
  source 1..742: mol_type = other DNA
ttaaaacagctctggggttgcacccaccccagaggcccacgtggcggctagtactccggtattgcggtacccttgtacgcctgttttatactcccttcccgtaacttagacgcacgaaaccaagttcaatagaagggggtgcaaaccagtaccaccacgaacaagcacttctgtttccccggtgatgttgtatagactgcttgcgtggtcgaaagcgacggatccgtcatccgcttatgtacttcgagaagcccagtaccacctcgggatcttcgacgcgttgcgctcagcactcaaccccagagtgtagcttaggctgatgagtctggacgtccctcaccggtgacggtggtccaggctgcgttggcggcctacctatggcttacgccatgggacgctagttgtgaacaaggtgtgaagagcctattgagctacataagaatcctccggcccctgaatgcggctaatcccaacctcggagcaggtggtcacaaaccagtgattggcctgtcgtaacgcgcaagtccgtggcggaaccgactactttgggtgtccgtgtttccttttattttattatggctgcttatggtgacaatcacagattgttatcataaagcgaattggattggccatccggtgaaagagagattcattatctatttgtttgctggattcgccccattgagtgtgtttactttaagtataatttcaacagttatttcaaacagacaattgtaccaca

SEQ ID NO: 19962 - DNA, 742 bp, synthetic construct
  source 1..742: mol_type = other DNA
ttaaaacagctctggggttgcacccaccccagaggcccacgtggcggctagtactccggtattgcggtacccttgtacgcctgttttatactcccttcccgtaacttagacgcacgaaaccaagttcaatagaagggggtgcaaaccagtaccaccacgaacaagcacttctgtttccccggtgatgttgtatagactgcttgcgtggtcgaaagcgacggatccgtcatccgcttatgtacttcgagaagcccagtaccacctcgggatcttcgacgcgttgcgctcagcactcaaccccagagtgtagcttaggctgatgagtctggacgtccctcaccggtgacggtggtccaggctgcgttggcggcctacctatggcttacgccatgggacgctagttgtgaacaaggtgtgaagagcctattgagctacataagaatcctccggcccctgaatgcggctaatcccaacctcggagcaggtggtcacaaaccagtgattggcctgtcgtaacgcgcaagtccgtggcggaaccgactactttgggtgtccgtgtttccttttattttattatggctgcttatggtgacaatcacagattgttatcataaagcgaattggattggccatccggtgaaagtgagattcattatctatttgtttgctggattcgccccattgagtgtgtttactttaagtataatttcaacagttatttcaaacagacaattgtaccaca

SEQ ID NO: 19963 - DNA, 742 bp, synthetic construct
  source 1..742: mol_type = other DNA
ttaaaacagctctggggttgcacccaccccagaggcccacgtggcggctagtactccggtattgcggtacccttgtacgcctgttttatactcccttcccgtaacttagacgcacgaaaccaagttcaatagaagggggtgcaaaccagtaccaccacgaacaagcacttctgtttccccggtgatgttgtatagactgcttgcgtggtcgaaagcgacggatccgtcatccgcttatgtacttcgagaagcccagtaccacctcgggatcttcgacgcgttgcgctcagcactcaaccccagagtgtagcttaggctgatgagtctggacgtccctcaccggtgacggtggtccaggctgcgttggcggcctacctatggcttacgccatgggacgctagttgtgaacaaggtgtgaagagcctattgagctacataagaatcctccggcccctgaatgcggctaatcccaacctcggagcaggtggtcacaaaccagtgattggcctgtcgtaacgcgcaagtccgtggcggaaccgactactttgggtgtccgtgtttccttttattttattatggctgcttatggtgacaatcacagattgttatcataaagcgaattggattggccatccggtgaaagtgagattcattatctatctgtttgttggattcgctccattgagtgtgtttactttaagtataatttcaacagttatttcaaacagacaattgtaccaca

SEQ ID NO: 19964 - DNA, 742 bp, synthetic construct
  source 1..742: mol_type = other DNA
ttaaaacagctctggggttgcacccaccccagaggcccacgtggcggctagtactccggtattgcggtacccttgtacgcctgttttatactcccttcccgtaacttagacgcacgaaaccaagttcaatagaagggggtgcaaaccagtaccaccacgaacaagcacttctgtttccccggtgatgttgtatagactgcttgcgtggtcgaaagcgacggatccgtcatccgcttatgtacttcgagaagcccagtaccacctcgggatcttcgacgcgttgcgctcagcactcaaccccagagtgtagcttaggctgatgagtctggacgtccctcaccggcgacggtggtccaggctgcgttggcggcctacctatggcttacgccatgggacgctagttgtgaacaaggtgtgaagagcctattgagctacataagaatcctccggcccctgaatgcggctaatcccaacctcggagcaggtggtcacaaaccagtgattggcctgtcgtaacgcgcaagtccgtggcggaaccgactactttgggtgtccgtgtttccttttattttattatggctgcttatggtgacaatcacagattgttatcataaagcgaattggattggccatccggtgaaagtgagatacattatctatctgtttgctagattcgctccattgagtgtgtttactttaagtataatttcaatagttatttcaaacagacaattgtaccaca

SEQ ID NO: 19965 - DNA, 742 bp, synthetic construct
  source 1..742: mol_type = other DNA
ttaaaacagctctggggttgcacccaccccagaggcccacgtggcggctagtactccggtattgcggtacccttgtacgcctgttttatactcccttcccgtaacttagacgcacgaaaccaagttcaatagaagggggtgcaaaccagtaccaccacgaacaagcacttctgtttccccggtgatgttgtatagactgcttgcgtggtcgaaagcgacggatccgtcatccgcttatgtacttcgagaagcccagtaccacctcaggatcttcgacgcgttgcgctcagcactcaaccccagagtgtagcttaggctgatgagtctggacgtccctcaccggtgacggtggtccaggctgcgttggcggcctacctatggcttacgccatgggacgctagttgtgaacaaggtgtgaagagcctattgagctacataagaatcctccggcccctgaatgcggctaatcccaacctcggagcaggtggtcacaaaccagtgattggcctgtcgtaacgcgcaagtccgtggcggaaccgactactttgggtgtccgtgtttccttttattttattatggctgcttatggtgacaatcacagattgttatcataaagcgaattggattggccatccggtgaaagtgaggttcattatctatctgtttgctggattcgctccattgagtgtgtttactttaagtataatttcaacagttatttcaaacatacaattgtaccaca

SEQ ID NO: 19966 - DNA, 742 bp, synthetic construct
  source 1..742: mol_type = other DNA
ttaaaacagctctggggttgcacccaccccagaggcccacgtggcggctagtactccggtattgcggtacccttgtacgcctgttttatactcccttcccgtaacttagacgcacgaaaccaagttcaatagaagggggtgcaaaccagtaccaccacgaacaagcacttctgtttccccggtgatgttgtatagactgcttgcgtggtcgaaagcgacggatccgtcatccgcttatgtacttcgagaagcccagtaccacctcgggatcttcgacgcgttgcgctcagcactcaaccccagagtgtagcttaggctgatgagtctggacgtccctcaccggtgacggtggtccaggctgcgttggcggcctacctatggcttacgccatgggacgctagttgtgaacaaggtgtgaagagcctattgagctacataagaatcctccggcccctgaatgcggctaatcccaacctcggagcaggtggtcacaagccagtgattggcctgtcgtaacgcgcaagtccgtggcggaaccgactactttgggtgtccgtgtttccttttattttattatggctgcttatggtgacaatcacagattgttatcataaagcgaattggattggccatccggtgaaagtgagattcattatctatctgtttgctggattcgctccattgagtgtgtttactttaagtataatttcaacagttatttcaaacagacaattgtaccaca

SEQ ID NO: 19967 - DNA, 742 bp, synthetic construct
  source 1..742: mol_type = other DNA
ttaaaacagctctggggttgtacccaccccagaggcccacgtggcggctagtactccggtattgcggtacccttgtacgcctgttttatactcccttcccgtaacttagacgcacgaaaccaagttcaatagaagggggtgcaaaccagtgccaccacgaacaagcacttctgtttccccggtgatgttgtatagactgcttgcgtggtcgaaagcgacggatccgtcatccgcttatgtacttcgagaagcccagtaccacctcgggatcttcgacgcgttgcgctcagcactcaaccccagagtgtagcttaggctgatgagtctggacgtccctcaccggcgacggtggtccaggctgcgttggcggcctacctatggcttacgccatgggacgctagttgtgaacaaggtgtgaagagcctattgagctacataagaatcctccggcccctgaatgcggctaatcccaacctcggagcaggtggtcacaaaccagtgattggcctgtcgtaacgcgcaagtccgtggcggaaccgactactttgggtgtccgtgtttccttttattttattatggctgcttatggtgacaatcacagattgttatcataaagcgaattggattggccatccggtgaaagtgagattcattatctatctgtttgctggattcgctccattgagtgtgtttactttaagtataatttcaacagttatttcaaacagacaattgtaccaca

SEQ ID NO: 19968 - DNA, 742 bp, synthetic construct
  source 1..742: mol_type = other DNA
ttaaaacagctctggggttgtacccaccccagaggcccacgtggcggctagtactccggtattgcggtacccttgtacgcctgttttatactcccttcccgcaacttagaagcatgaaaccaagttcaatagaagggggtgcaaaccagtaccaccacgaacaagcacttctgtttccccggtgatgttgtatagactgcttgcgtggtcgaaagcgacggatccgtcatccgcttatgtacttcgagaagcccagtaccacctcggaatcttcgacgcgttgcgctcagcactcaaccccagagtgtagcttaggctgatgagtctggacgtcccccaccggtgacggtggtccaggctgcgttggcggcctacccatggcttacgccatgggacgctagttgtgaacaaggtgtgaagagcctattgagctacataagagtcctccggcccctgaatgcggctaatcccaacctcggagcaggtggtcacaaaccagtgattggcctgtcgtaacgcgcaagtccgtggcggaaccgactactttgggtgtccgtgtttccttttatattattatggctgcttatggtgacaatcacagattgttatcataaagcgaattggattggccatccggtgaaagtgagattcattatctatctgtttgctggactcgctccattgagtgtgtttactccaagtataatttcaacagttatatcaaacagacaattgcaccata

SEQ ID NO: 19969 - DNA, 742 bp, synthetic construct
  source 1..742: mol_type = other DNA
ttaaaacagctctggggttgcacccaccccagaggcccacgtggcggctagtactccggtactgcggtacccttgtacgcctgttttatactcccttcccgtaacttagacgcacgaaaccaagttcaatagaagggggtgcaaaccagtaccaccacgaacaagcacttctgtttccccggtgatgttgtatagactgcttgcgtggtcgaaagcgacggatccgtcatccgcttatgtacttcgagaagcccagtaccacctcggaatcttcgacgcgttgcgctcagcactcaaccccagagtgtagcttaggctgatgagtctggacgtccctcaccggtgacggtggtccaggctgcgttggcggcctacccatggcttacgccatgggacgctagttgtgaacaaggtgtgaagagcctattgagctacataagaatcctccggcccctgaatgcggctaatcccaacctcggagcaggtggtcacaaaccagtgattggcctgtcgtaacgcgcaagtccgtggcggaaccgactactttgggtgtccgtgtttccttttattttactatggctgcttatggtgacaatcacagattgttatcataaagcgaattggattggccatccggtgaaagtgagattcattatctatctgtttgcttgattctttccattgagtgtacttactccaagtataatttcaacagttatttcaaacagacaattgtaccata

SEQ ID NO: 19970 - DNA, 734 bp, synthetic construct
  source 1..734: mol_type = other DNA
ttaaaacagctctggggttgttcccaccccagaggcccacgtggcggctagtacaccggtattacggtacccttgtacgcctgttttatactccctcccccccgtaacttagaagtacaaaactcaagttcaataggagggggtacaaaccagtaccaccacgaacgagcacttctgtctccccggtgaggttacatagactgtccccgcggttgaaagtaaccgatccgttatccgctcttgtccttcgagaagcccagtaccatcttggaatcttcgatgcgttgcgctcaacactcaaccccagagtgtagcttaggtcgatgagtctggacactccccaccggcgacggtggtccaggctgcgttggcggcctacctgtggcccaaagccacaggacgctagttgtgaacaaggtgtgaagagcctattgagctacaagagagtcctccggcccctgaatgcggctaatcccaaccacggagcaggtgacttcaagccagaagttggcctgtcgtaacgcgtaagtctgtggcggaaccgactactttgggtgtccgtgtttccctttattcttacaatggctgcttatggtgacaatcatagattgttatcataaagcgaattggattggccatccggtgagaatcagatcagttacttacctgtttgttggattcactccgttgacactttacatactaacccttgtcaatacacctgtattatcata

SEQ ID NO: 19971 - DNA, 748 bp, synthetic construct
  source 1..748: mol_type = other DNA
ttaaaacagcctgtgggttgttcccaccccagaggcccacgtggcggctagtactctggtattgcggtacctttgtacgcctgttttatactcccttccccatgtaactttagaagcaattcaccaagttcaatagaggggggtacaagccagtaccaccacgaacaagcacttctgtttccccggtgattttacataagctgtgcccacggctgaaagtaaatgatccgttatccgcttgagtacttcgagaagcctagtatcaccttggaatcttcgacgcgttgcgctcaacactctaccccgagtgtagcttaggctgatgagcctgggcatcccccaccggcgacggtggcccaggctgcgttggcggcctacccatggccaacgccatgggacgctagttgtgaacaaggtgtgaagagcctattgagctacttaagagtcctccggcccctgaatgcggataatcccaaccatggagcaagtggccccaacccaggggatggcttgtcgtaatgcgcaagtccgtggcggaaccgactactttgggtgtccgtgtttccttttatttcatatatggctgcttatggtgcaatcacagattgttatcataaagcgaattggattggccatccggtgaaatataagcatattatctacatcttcgttggattcactctgttgacacattcttcaccaaagttgatttatacagtcttagtaattagaaattaccacttcagtt

SEQ ID NO: 19972 - DNA, 745 bp, synthetic construct
  source 1..745: mol_type = other DNA
ttaaaacagcctgtgggttgttcccaccccagaggcccacgtggcggctagtactctggtatcacggtacctttgtacgcctgttttatgccccctaccccatgtaactttagaagcaattcaacaagttcaatagagggggtacaaaccagtaccaccacgaacaagcacttctgttaccccggtgactttgcataagctgtgcccacggctgaaagcgaacgatccgttatccgcttgagtacttcgagaagcctagtatcaccttggaatcttcgacgcgttgcgctcagcactctaccccgagtgtagcttaggctgatgagtctgggcactccccaccggtgacggtggcccaggctgcgttggcggcctacccatggccaacgccatgggacgctagttgtgaacaaggtgtgaagagcctattgagctacttaagagtcctccggcccctgaatgcggctaatcccaaccacggagcaggtgccttcaacccagaaggtggcctgtcgtaacgcgtaagtctgtggcggaaccgactactttgggtgtccgtgtttccttttatctcttatgtggctgcttatggtgacaatcatagattgttatcataaagcgagttggattggccatccggtgaaatacaaacacattatttacttgtttgttggatttactccactcacccaattcacccccagtataataattattgttttattaataaggcatcaatatcaat

SEQ ID NO: 19973 - DNA, 745 bp, synthetic construct
  source 1..745: mol_type = other DNA
ttaaaacagcctgtgggttgttcccaccccagaggcccacgtggcggccagtactctggtatcgcggtacctttgtacgcctgttttataccccctaccccatgtaactttagaagtaattcaacaagttcaatagggggggtacgaaccagtaccaccgtgaacaagcacttctgttaccccggtgactttgcataagctgtgcccacggccgaaagcgaacgatccgttatccgcttgagtacttcgagaagtctagtaacaccttggaatcttcgacgcgttgcgctcagcactctaccccgagtgtagcttaggctgatgagtctgggcgctccccaccggtgacggtggcccaggctgcgttggcggcctacccatggctaacgccatgggacgctagttgtgaacaaggtgtgaagaacctattgagctacttaagattcctccggcccctgaatgcggctaatcccaaccacagagcaggtgccttcaaaccagaaggtggcctgtcgtaacgcgtaagtctgtggcggaaccgactactttgggtgtccgtgtttccttttatcttttatatggctgcttatggtgacaatcatagattgttatcataaagcgaattggattggccatccagtgaaatacaaacatattatctacttgtttgttggatttactccactcactcaattcacccccagtatattatctattgttttgttgttaagacactactatcgat

SEQ ID NO: 19974 - DNA, 745 bp, synthetic construct
  source 1..745: mol_type = other DNA
ttaaaacagcctgtgggttgttcccaccccagaggcccacgtggcggctagtactctggtatcacggtacctttgtgcgcctgttttataccccccaccccctgtaactttagaagcaactcaacaagttcaatagagggggtacaaaccagtaccaccacgaacaagcacttctgtgtccccggtgacttcgcataggctgtgcccacggctgaaagtgaacgatccgttatccgcttgagtacttcgagaagcctagtatcaccttggaatcttcgacgcgttgcgctcagcactctaccccgagtgtagcttaggctgatgagtctgggcgtcccccaccggcgacggtggcccaggctgcgttggcggcctacccatggctaacgccatgggacgctagttgtgaacaaggtgtgaagagcctattgagctactcaagagtcctccggcccctgaatgcggctaatcccaaccacggagcaggtgccttcaatccagagggtggcctgtcgtaacgcgcaagtctgtggcggaaccgactactttgggtgtccgtgtttctttttatcttttatatggctgcttatggtgacaatcacagattgttatcataaagcgaattggattagccatccggtgaaatacaaacatattatttacttatttgttggatttactccactcattcaatctactcccagtgtaatatctattgcattattgataagactacattatcaac

SEQ ID NO: 19975 - DNA, 745 bp, synthetic construct
  source 1..745: mol_type = other DNA
ttaaaacagcctgtgggttgttcccaccccagaggcccacgtggcggctagtactctggtatcacggtacctttgtacgcctgttttataccccttaccccatgcaactttagaagcaattcaataagttcaacagggggggtacaaaccagtaccaccacgaacaagcacttctgtttccccggtgatttcatataagctgtatccacggctgaaagtgaatgatccgttacccgcttgggtacttcgagaagcctagtaccaccttggaatcttcgatgcgttgcgttcagcactctaccccgagtgtagcttaggctgatgagtctgggcaccccccaccggtgacggtggcccaggctgcgttggcggcctacccatggctaacgccatgggacgctagtgtgaacaaggtgtgaagagcctattgagctactcaagagtcctccggcccctgaatgcggctaatcctaaccacggagcaggtgccctcaacccagagggtggcctgtcgtaacgcgcaagtctgtggcggaaccgactactttgggtgtccgtgtttccttttatctcttatatggctgcttatggtgacaatcacagattgttatcatagagcgaattggattggccatccggtgaaatataaacatatcatttatttgtttaattggatttaccccattcactcagtttactccaaatataatacatattgaattgttgatcagacatagctaccaca

SEQ ID NO: 19976 - DNA, 742 bp, synthetic construct
  source 1..742: mol_type = other DNA
ttaaaacagctctggggttgcgcccaccccagaggcccacgtggcggctagtactccggtattgcggtacccttgtacgcctgttttatactcccttcccgtaacttagacgcacaaaaccaagttcaataggagggggtacaaaccagtaccaccacgaacaagcacttctgtttccccggtgatgttgtatagactgcttgcgtggttgaaagcgacggatccgtcatccgcttatgtacttcgagaagcccagtaccacctcggaatcttcgatgcgttgcgctcagcactcaaccccagagtgtagcttaggctgatgagtctggacatccctcaccggtgacggtggtccaggctgcgttggcggcctacctatggctaacgccatgggacgctagttgtgaacaaggtgtgaagagcctattgagctacataagaatcctccggcccctgaatgcggctaatcccaacctcggagcaggtggtcacaaaccagtgattgacctgtcgtaacgcgcaagtccgtggcggaaccgactactttgggtgtccgtgtttccttttattttattgtggctgcttatggtgacaatcacagattgttatcataaagcgaattggattggccatccggtgaaagtgagatttattatctatctgtttactggactcgctccattgagtgtgtttattctaagaataatctcaacagttattccaatcagacagttgtatcata

SEQ ID NO: 19977 - DNA, 742 bp, synthetic construct
  source 1..742: mol_type = other DNA
ttaaaacagctctggggttgcacccaccccagaggcccacgtggcggctagtactccggtattgcggtacccttgtacgcctgttttatactcccttcccgtaacttagacgcacaaaaccaagttcaataggagggggtacaaaccagtaccaccacgaacaagcacttctgtttccccggtgatgttgtatagactgcttgcgtggttgaaagcgacggatccgttatccgcttatgtacttcgagaagcccagtaccacctcggaatcttcgatgcgttgcgctcagcactcaaccccagagtgtagcttaggctgatgagtctggacatccctcaccggtgacggtggtccaggctgcgttggcggcctacctatggctaacgccatgggacgctagttgtgaacaaggtgtgaagagcctattgagctacataagaatcctccggcccctgaatgcggctaatcccaacctcggagcaggtggtcacaaaccagtgattgacctgtcgtaacgcgcaagtccgtggcggaaccgactactttgggtgtccgtgtttccttttattttattgtggctgcttatggtgacaatcacagattgttatcataaagcgaattggattggccatccggtgaaagtgagatttattatctatctgtttactggactcgctccattgagtgtgtttattctaagaataatctcaacagttattccaatcagacagttgtatcata

SEQ ID NO: 19978 - DNA, 742 bp, synthetic construct
  source 1..742: mol_type = other DNA
ttaaaacagctctggggttgcacccaccccagaggcccacgtggcggctagtactccggtattgcggtacccttgtacgcctgttttatactcccttcccgtaacttagacgcacaaaaccaagttcaataggagggggtacaaaccagtaccaccacgaacaagcacttctgtttccccggtgatgttgcatagactgcttgcgtggttgaaagcgacggatccgtcatccgcttatgtacttcgagaagcccagtaccacctcggaatcttcgatgcgttgcgctcagcactcaaccccagagtgtagcttaggctgatgagtctggacatccctcaccggtgacggtggtccaggctgcgttggcggcctacccatggctaacgccatgggacgctagttgtgaacaaggtgtgaagagcctattgagctacataagaatcctccggcccctgaatgcggctaatcccaacctcggagcaggtggtcacaaaccagtgattgacctgtcgtaacgcgcaagtccgtggcggaaccgactactttgggtgtccgtgtttccttttatttcattgtggctgcttatggtgacaatcacagattgttatcataaagcgaattggattggccatccggtgaaagtgagatttattatctatctgtttactggactcgctccattgagtgtgtttattctaagaataatctcaacagttattccaatcagacagttgtatcata

SEQ ID NO: 19979 - DNA, 742 bp, synthetic construct
  source 1..742: mol_type = other DNA
ttaaaacagctctggggttgcacccaccccagaggcccacgtggcggctagtactccggtattgcggtacccttgtacgcctgttttatactcccttcccgtaacttagacgcacaaaaccaagttcaatagaagggggtacaaaccagtaccaccacgaacaagcacttctgtttccccggtgatgttgtatagactgcttgcgtggttgaaagcgacggatccgttatccgcttatgtacttcgagaagcccagtaccacctcggaatcttcgatgcgttgcgctcagcactcaaccccagagtgtagcttaggctgatgagtctggacatccctcaccggtgacggtggtccaggctgcgttggcggcctacctatggcaaacgccatgggacgctagttgtgaacaaggtgtgaagagcctattgagctacataagaatcctccggcccctgaatgcggctaatcccaaccacggggcaggtggtcacaaaccagtgattggcctgtcgtaacgcgcaagtccgtggcggaaccgactactttgggtgtccgtgtttccttttattttattgtggctgcttatggtgacaatcacagattgttatcataaagcgaattggattggccatccggtgaaagtgagattcattatctatctgtttgctggattcgctccattgagtgtgtttactctaagtacaatttcaatagttatttcaatcagtcaattgtatcata

SEQ ID NO: 19980 - DNA, 742 bp, synthetic construct
  source 1..742: mol_type = other DNA
ttaaaacagctctggggttgcacccaccccagaggcccacgtggcggctagtactccggtattgcggtacccttgtacgcctgttttatactcccttcccgtaacttagacgcacaaaaccaagttcaatagaagggggtacaaaccagtaccaccacgaacaagcacttctgtttccccggtgatgttgtatagactgcttgcgtggttgaaagcgacggatccgttatccgcttatgtacttcgagaagcccagtaccacctcggaatcttcgatgcgttgcgctcagcactcaaccccagagtgtagcttaggctgatgagtctggacatccctcaccggtgacggtggtccaggctgcgttggcggcctacctatggcaaacgccatgggacgctagttgtgaacaaggtgtgaagagcctattgagctacataagaatcctccggcccctgaatgcggctaatcccaaccacggggcaggtggtcacaaaccagtgattggcctgtcgtaacgcgcaagtccgtggcggaaccgactactttgggtgtccgtgtttccttttattttattgtggctgcttatggtgacaatcacagattgttatcataaagcgaattggattggccatccggtgaaagtgagattcattatctatctgtttgctggattcgctccattgagtgtgtttattctaagtacaatttcaatagttatttcaatcagtcaattgtatcata

SEQ ID NO: 19981 - DNA, 742 bp, synthetic construct
  source 1..742: mol_type = other DNA
ttaaaacagctctggggttgcacccaccccagaggcccacgtggcggctagtactccggtattgcggtacccttgtacgcctgttttatactcccttcccgtaacttagacgcacaaaaccaagttcaatagaagggggtacaaaccagtaccaccacgaacaagcacttctgtttccccggtgatgttgtatagactgcttgcgtggttgaaagcgacggatccgttatccgcttatgtacttcgagaagcccagtaccacctcggaatcttcgatgcgttgcgctcagcactcaaccccagagtgtagcttaggctgatgagtctggacatccctcaccggtgacggtggtccaggctgcgttggcggcctacctatggcaaacgccatgggacgctagttgtgaacaaggtgtgaagagcctattgagctacataagaatcctccggcccctgaatgcggctaatcccaaccacggggcaggtggtcacaaaccagtgattggcctgtcgtaacgcgcaagtccgtggcggaaccgactactttgggtgtccgtgtttccttttattttattgtggctgcttatggtgacaatcacagattgttatcataaagcgaattggattggccatccggtgaaagtgagattcattatctatctgtttgctggattcgctccattgagtgtgtttattctaagtacaatttcaatagttatttcaatcagtcaattgtattata

SEQ ID NO: 19982 - DNA, 742 bp, synthetic construct
  source 1..742: mol_type = other DNA
ttaaaacagctctggggttgtacccaccccagaggcccacgtggcggctagtactccggtattgcggtacccttgtacgcctgttttatactcccttcccgtaacttagacgcacaaaaccaagttcaatagaagggggtacaaaccagtaccaccacgaacaagcacttctgtttccccggtgatgttgtatagactgcttgcgtggttgaaagcgacggatccgttatccgcttatgtacttcgagaagcccagtaccacctcggaatcttcgatgcgttgcgctcagcactcaaccccagagtgtagcttaggctgatgagtctggacatccctcaccggtgacggtggtccaggctgcgttggcggcctacctatggcaaacgccatgggacgctagttgtgaacaaggtgtgaagagcctattgagctacataagaatcctccggcccctgaatgcggctaatcccaaccacggggcaggtggtcacaaaccagtgattggcctgtcgtaacgcgcaagtccgtggcggaaccgactactttgggtgtccgtgtttccttttattttattgtggctgcttatggtgacaatcacagattgttatcataaagcgaattggattggccatccggtgaaagtgagatttattatctatctgtttgctggattcgctccattgagtgtgtttactctaagtacaatttcaatagttatttcaatcagtcaattgtatcata

SEQ ID NO: 19983 - DNA, 742 bp, synthetic construct
  source 1..742: mol_type = other DNA
ttaaaacagctctggggttgcacccaccccagaggcccacgtggcggctagtactccggtattgcggtacccttgtacgcctgttttatactcccttcccgcaacttagacgcacaaaaccaagttcaatagaagggggtacaaaccagtaccaccacgaacaagcacttctgtttccccggtgatgttgtatagactgctcgcgtggttgaaagcgacggatccgttatccgcttatgtacttcgagaagcccagtaccacctcggaatcttcgatgcgttgcgctcagcactcaaccccagagtgtagcttaggctgatgagtctggacatccctcaccggagacggtggtccaggctgcgttggcggcctacccatggctagcgccatgggacgctagttgtgaacaaggtgtgaagagcctattgagctacataagagtcctccggcccctgaatgcggctaatcccaacctcggagcaggtggtcacaaaccagtgattggcctgtcgtaacgcgcaagtccgtggcggaaccgactactttgggtgtccgtgtttccttttattttattgtggctgcttatggtgacaatcacagattgttatcataaagcgaattggattggccatccggtgaaagtgagattcattacctatctgtttgctggatttgctccattgagtgtgtttactctaagtacaattttaacagttatttcaatcagacaattgtatcata

SEQ ID NO: 19984 - DNA, 742 bp, synthetic construct
  source 1..742: mol_type = other DNA
ttaaaacagctctggggttgcacccaccccagaggcccacgtggcggctagtactccggtattgcggtacccttgtacgcctgttttatactcccttcccgcaacttagacgcacaaaaccaagttcaatagaagggggtacaaaccagtaccaccacgaacaagcacttctgtttccccggtgatgttgtatagactgctcgcgtggttgaaagcgacggatccgttatccgcttatgtacttcgagaagcccagtaccacctcggaatcttcgatgcgttgcgctcagcactcaaccccagagtgtagcttaggctgatgagtctggacatccctcaccggagacggtggtccaggctgcgttggcggcctacccatggctagcgccatgggacgctagttgtgaacaaggtgtgaagagcctattgagctacataagagtcctccggcccctgaatgcggctaatcccaacctcggagcaggtggtcacaaaccagtgattggcctgtcgtaacgcgcaagtccgtggcggaaccgactactttgggtgtccgtgtttccttttattttattgtggctgcttatggtgacaatcacagattgttatcataaagcgaattggattggccatccggtgaaagtgagattcattacctatctgtttgctggatttgttccattgagtgtgtttactctaagtacaatttcaacagttatttcaatcagacaattgtatcata

SEQ ID NO: 19985 - DNA, 742 bp, synthetic construct
  source 1..742: mol_type = other DNA
ttaaaacagctctggggttgcacccaccccagaggcccacgtggcggctagtactccggtattgcggtacccttgtacgcctgttttatactcccttcccgcaacttagacgcacaaaaccaagttcaatagaagggggtacaaaccagtaccaccacgaacaagcacttctgtttccccggtgatgttgtatagactgctcgcgtggttgaaagcgacggatccgttatccgcttatgtacttcgagaagcccagtaccacctcggaaccttcgatgcgttgcgctcagcactcaaccccagagtgtagcttaggctgatgagtctggacatccctcaccggagacggtggtccaggctgcgttggcggcctacccatggctagcgccatgggacgctagttgtgaacaaggtgtgaagagcctattgagctacataagagtcctccggcccctgaatgcggctaatcccaacctcggagcaggtggtcacaaaccagtgattggcctgtcgtaacgcgcaagtccgtggcggaaccgactactttgggtgtccgtgtttccttttattttattatggctgcttatggtgacaatcacagattgttatcataaagcgaattggattggccatccggtgaaagtgagattcattacctatctgtttgccggatttgctccattgagtgtgtttactctaagtacaatttcaacagttatttcaatcagacaattgtatcata

SEQ ID NO: 19986 - DNA, 742 bp, synthetic construct
  source 1..742: mol_type = other DNA
ttaaaacagctctggggttgcacccaccccagaggcccacgtggcggctagtactccggtattgcggtacccttgtacgcctgttttatactcccttcccgcaacttagacgcacaaaaccaagttcaatagaagggggtacaaaccagtaccaccacgaacaagcacttctgtttccccggtgacgttgtatagactgctcgcgtggttgaaagcgacggatccgttatccgcttatgtacttcgagaagcccagtaccacctcggaatcttcgatgcgttgcgctcagcactcaaccccagagtgtagcttaggctgatgagtctggacatccctcaccggagacggtggtccaggctgcgttggcggcctacccatggctagcgccatgggacgctagttgtgaacaaggtgtgaagagcctattgagctacataagagtcctccggcccctgaatgcggctaatcccaacctcggagcaggtggtcacaaaccagtgattggcctgtcgtaacgcgcaagtccgtggcggaaccgactactttgggtgtccgtgtttccttttattttattgtggctgcttatggtgacaatcacagattgttatcataaagcgaattggattggccatccggtgaaagtgagattcattacctatctgtttgctggatttgctccattgagtgtgtttactccaagtacaatttcaacagttatttcaatcagacaattgtatcgta

SEQ ID NO: 19987 - DNA, 742 bp, synthetic construct
  source 1..742: mol_type = other DNA
ttaaaacagctctggggttgcacccaccccagaggcccacgtggcggctagtactccggtattgcggtacccttgtacgcctgttttatacccccttcccgcaacttagacgcacaaaaccaagttcaatagaagggggtacaaaccagtaccaccacgaacaagcacttctgtttccccggtgatgttgtatagactgcttgcgtggttgaaagcgacggatccgttatccgcttatgtacttcgagaagcccagtaccaccttggaatcttcgatgcgttgcgctcagcactcaaccccagagtgtagcttaggctgatgagtctggacatccctcaccggagacggtggtccaggctgcgttggcggcctacccatggctagcgccatgggacgctagttgtgaacaaggtgtgaagagcctattgagctacataagagtcctccggcccctgaatgcggctaatcccaacctcggagcaggtggtcacaaaccagtgactggcctgtcgtaacgcgcaagtccgtggcggaaccgactactttgggtgtccgtgtttccttttattttactgtggctgcttatggtgacaatcacagattgttatcataaagcgaattggattggccatccggtgaaagtgagatccattacctatctgtttgctggatttgctccattgagtgtgtttactctaagtacaatttcaacagttatttcaatcagacaattgtatcata

SEQ ID NO: 19988 - DNA, 742 bp, synthetic construct
  source 1..742: mol_type = other DNA
ttaaaacagctctggggttgcacccaccccagaggcccacgtggcggctagtactccggtattgcggtacccttgtacgcctgttttatactcccttcccgcaacttagacgcacaaaaccaagttcaatagaagggggtacaaaccagtaccaccacgaacaagcacttctgtttccccggtgacgttgtatagactgctcgcgtggttgaaagcgacggatccgttatccgcttatgtacttcgagaagcccagtaccacctcggaatcttcgatgcgttgcgctcagcactcaaccccagagtgtagcttaggctgatgagtctggacatccctcaccggagacggtggtccaggctgcgttggcggcctacccatggctagcgccatgggacgctagttgtgaacaaggtgtgaagagcctattgagctacataagagtcctccggcccctgaatgcggctaatcccaacctcggagcaggtggtcacaaaccagtgattggcctgtcgtaacgcgcaagtccgtggcggaaccgactactttgggtgtccgtgtttccttttattttattgtggctgcttatggtgacaatcacagattgttatcataaagcgaattggattggccatccggtgaaagtgagattcattacctatctgtttgctggatttgctccattgagtgtgtttactctaagtacaatttcaacagttatttcaatcagacaattgtatcata

SEQ ID NO: 19989 - DNA, 742 bp, synthetic construct
  source 1..742: mol_type = other DNA
ttaaaacagctctggggttgcacccaccccagaggcccacgtggcggctagtactccggtattgcggtacccttgtacgcctgttttatacccccttcccgcaacttagacgcacaaaaccaagttcaatagaagggggtacaaaccagtaccaccacgaacaagcacttctgtttccccggtgatgttgtatagactgcttgcgtggttgaaagcgacggatccgttatccgcttatgtacttcgagaagcccagtaccaccttggaatcttcgatgcgttgcgctcagcactcaaccccagagtgtagcttaggctgatgagtctggacatccctcaccggagacggtggtccaggctgcgttggcggcctacccatggctagcgccatgggacgctagttgtgaacaaggtgtgaagagcctattgagctacataagagtcctccggcccctgaatgcggctaatcccaacctcggagcaggtggtcacaaaccagtgattggcctgtcgtaacgcgcaagtccgtggcggaaccgactactttgggtgtccgtgtttccttttattttactgtggctgcttatggtgacaatcacagattgttatcataaagcgaattggattggccatccggtgaaagtgagatccattacctatctgtttgctggatttgctccattgagtgtgtttactctaagtacaatttcaacagttatttcaatcagacaattgtatcata

SEQ ID NO: 19990 - DNA, 742 bp, synthetic construct
  source 1..742: mol_type = other DNA
ttaaaacagctctggggttgcacccaccccagaggcccacgtggcggctagtactccggtattgcggtacccttgtacgcctgttttatactcccttcccgtaacttagacgcacaaaaccaagttcaatagaagggggtacaaaccagtaccaccacgaacaagcacttctgtttccccggtgatgttgtatagactgcttgcgtggttgaaagcgacggatccgttatccgcttatgtacttcgagaagcccagtaccacctcggaatcttcgatgcgttgcgctcagcactcaaccccagagtgtagcttaggctgatgagtctggacatccctcaccggtgacggtggtccaggctgcgttggcggcctacctatggctaacgccatgggacgctagttgtgaacaaggtgtgaagagcctattgagctacataagaatcctccggcccctgaatgcggctaatcccaacctcggagcaggtggtcacaaaccagtgattggcctgtcgtaacgcgcaagtccgtggcggaaccgactactttgggtgtccgtgtttccttttattttattgtggctgcttatggtgacaatcacagattgttatcataaagcgaattggattggccatccggtgaaagtgagattcattatctatctgtttgctggattcgctccattgagtgtgtttactctaagtacaatttcaacagttatttcaatcagacaattgtatcata

SEQ ID NO: 19991 - DNA, 847 bp, synthetic construct
  source 1..847: mol_type = other DNA
ttaaaacagcctgggggttgttcccacccccagggcccacgtggcgcaagtactctgcttcgttagaagccttgtacgcctgttttcccctccttaaacaaattaagattgccacttccgaggggagtagtccgactccgctccgatacgtcgctccagtgcgctagtacgcttagtactttctcacggggatagtggtatccctccctagtaatttagaagacttgaaaaaccgaccaataggcacctcgcatccagcggggtaaaggtcaagcacttctgtttccccgggtcgagtagcgatagactgtgcccacggtcgaaggtgaaacaacccgttatccgactttgtacttcgggaagcctagtaccaccaaagattatgcttggggtttcgctcagcacgaccctggtgtagatcaggccgatggatcaccgcattcctcacaggcgactgtggcggtggtcgcgtggcagcctgccgatggggcaacccatcggacgccaagcatatgacagggtgtgaagagcctactgagctacaaagtattcctccggcccctgaatgcggctaatcccaaccacggagcatttgctaccaaaccaggtagtggaatgtcgtaacgggtaactctgtggcggaaccgactactttgggtgtccgtgtttccttttaatttatcattctgtatatggtgacaactatagtgctatctcgatttgcattactattgttgagattaaaactttattacattgttgcattttaccctttgagtgagttttcacctgaacagattaatttactcatcctgtttatatattacaagcagaaatacttgcaaag

SEQ ID NO: 19992 - DNA, 742 bp, synthetic construct
  source 1..742: mol_type = other DNA
ttaaaacagctctggggttgtacccaccccagaggcccacgtggcggctagtactccggtattgcggtacccttgtacgcctgttttatactcccttcccgtaacttagacgcacaaaaccaagttcaatagaagggggtacaaaccagtaccaccacgaacaagcacttctgtttccccggtgatgtcgtatagactgcttgcgtggttgaaagcgacggatccgttatccgcttatgtacttcgagaagcccagtaccacctcggaatcttcgatgcgttgcgctcagcactcaaccccagagtgtagcttaggctgatgagtctggacatccctcaccggtgacggtggtccaggctgcgttggcggcctacctatggctaacgccatgggacgctagttgtgaacaaggtgtgaagagcctattgagctacataagaatcctccggcccctgaatgcggctaatcccaacctcggagcaggtggtcacaaaccagtgattggcctgtcgtaacgcgcaagtccgtggcggaaccgactactttgggtgtccgtgtttccttttattttattgtggctgcttatggtgacaatcacagattgttatcataaagcgaattggattggccatccggtgaaagtgagattcattatctatctgtttgctggattcgctccattgagtgtgtttactctaagtacaatttcaacagttatttcaatcagacaattgtatcata

SEQ ID NO: 19993 - DNA, 743 bp, synthetic construct
  source 1..743: mol_type = other DNA
taaaacagctctggggttgtccccaccccagaggcccacgtggcggctagtactctggtatcgcggtacctttgtacgcctgttttacacccctaccccatgcaactttagaagcaaatcaataagttcaataggggggggtacaaaccagtaccaccacgaacaagcacttctgtaaccccggtgatcttgtataagctgtgcccacggctgaaagcgagtgatccgttatccgcttaggtacttcgagaagcctagtatcaccttggaatcttcgatgcgttgcgctcagcactctatcccgagtgtagcttaggctgatgagtctgggcgttccccaccggcgacggtggcccaggctgcgttggcggcctacccatggctaacgccatgggacgctagatgtgaacaaggtgtgaagagcctattgagctacttaagagtcctccggcccctgaatgcggctaatcccaaccacggagcaggtgccttcaacccagagggtggcctgtcgtaacgcgcaagtctgtggcggaaccgactactttgggtgtccgtgtttccttttatcttttatatggctgcttatggtgacaatcatagattgttatcataaagtgacttggattggccatccggtaaaatacaaacacatcatctacttgtttgttggatttaccccactcacccaatttactcccagcataacatccattgtttgttaacaagatactgctaccaca

SEQ ID NO: 19994 - DNA, 743 bp, synthetic construct
  source 1..743: mol_type = other DNA
taaaacagctctggggttgttcccaccccagaggcccacgtggcggctagtactctggtatcgcggtacctttgtacgcctgttttatacccctaccccatgtaactttagaagcagttcaacaagttcaatagggggggtgcaaaccagcaccaccacgaacaagcacttctgtaaccccggtgaccttgtataagctgtacccacggctgaaagcgagtgatccgttatccgcttaagtacttcgagaagcctagtatcaccttagaatcttcgatgcgttgcgctcagcactctatcccgagtgtagcttaggctgatgagtctgggcgttcctcaccggcgacggtggcccaggctgcgttggcggcctacccatggctaacgccatgggacgctagatgtgaacaaggtgtgaagagcctattgagctacttaagagtcctccggcccctgaatgcggctaatcccaaccacggagcaggtgccttcaacccagagggtggcctgtcgtaacgcgcaagtctgtggcggaaccgactactttgggtgtccgtgtttccttttatcttttatatggctgcttatggtgacaatcatagattgttatcataaagcgacttggattggccatccggtaaaatacaaacacatcatttacttgtttgttggatttactccactctcccaatttactcctagcataatatccattgttttgttaacaagacattactatcaca

SEQ ID NO: 19995 - DNA, 743 bp, synthetic construct
  source 1..743: mol_type = other DNA
acaggcaactctggggttgttcccaccccagaggcccacgtggcggctagtactctggtatcgcggtacctttgtacgcctgttttatacccctaccccatgtaactttagaagcagttcaacaagttcaatagggggggtgcaaaccagcaccaccacgaacaagcacttctgtaaccccggtgaccttgtataagctgtacccacggctgaaagcgagtgatccgttatccgcttaagtacttcgagaagcctagtatcaccttagaatcttcgatgcgttgcgctcagcactctatcccgagtgtagcttaggctgatgagtctgggcgttcctcaccggcgacggtggcccaggctgcgttggcggcctacccatggctaacgccatgggacgctagatgtgaacaaggtgtgaagagcctattgagctacttaagagtcctccggcccctgaatgcggctaatcccaaccacggagcaggtgccttcaacccagagggtggcttgtcgtaacgcgcaagtctgtggcggaaccgactactttgggtgtccgtgtttccttttatcttttatatggctgcttatggtgacaatcatagattgttatcataaagcgacttggattggccatccggtgaaatacaagcacatcatctacttgtttgttgggtttactccactcacccaatttactcccagcataatatccattgttttgttaacaagacattgctatcaca

SEQ ID NO: 19996 - DNA, 746 bp, synthetic construct
  source 1..746: mol_type = other DNA
taaaacagctctggggttgtacccaccccagaggcccacgtggcggctagcactccggtattacggtacccttgtgcgcctgttttatactcccctcccgcaacttagaagcacgaaaccaagttcaatagaagggggtacaaaccagtaccactacgaacaagcacttctgtttccccggtgacattgcatagactgctcacgcggttgaaagtgatcgatccgttacccgcttgtgtacttcgaaaagcctagtatcgccttggaatcttcgacgcgttgcgctcagcacccgaccccggggtgtagcttaggctgatgagtctggacattcctcaccggtgacggtggtccaggctgcgttggcggcctacctatggctaacgccataggacgttagatgtgaacaaggtgtgaagagcctattgagctacataagagtcctccggcccctgaatgcggctaatcctaaccacggagcaggcggtcgcgaaccagtgactggcttgtcgtaacgcgcaagtctgtggcggaaccgactactttgggtgtccgtgtttcctgttatttttatcatggctgcttatggtgacaatcagagattgttatcataaagcgaattggattggccatccggtgagtgttgtgtcaggtatacaactgtttgttggaaccactgtgttagctttacttctcatttaaccaattaatcaaaaacaatacgagggtaaaacaacaatactaca

SEQ ID NO: 19997 - DNA, 746 bp, synthetic construct
  source 1..746: mol_type = other DNA
taaaacagctctggggttgtacccaccccagaggcccacgtggcggctagcactccggtattacggtacccttgtgcgcctgttttatactcccctcccgcaacttagaagcacgaaaccaagttcaatagaagggggtacaaaccagtaccactacgaacaagcacttctgtttccccggtgacattgcatagactgctcacgcggttgaaagtgatcgatccgttacccgcttgtgtacttcgaaaagcctagtatcgccttggaatcttcgacgcgttgcgctcagcacccgaccccggggtgtagcttaggctgatgagtctggacattcctcaccggtgacggtggtccaggctgcgttggcggcctacctatggctaacgccataggacgttagatgtgaacaaggtgtgaagagcctattgagctacataagagtcctccggcccctgaatgcggctaatcctaaccacggagcaggcggtcgcgaaccagtgactggcttgtcgtaacgcgcaagtctgtggcggaaccgactactttgggtgtccgtgtttcctgttatttttatcatggctgcttatggtgacaatcagagattgttatcataaagcgaattggattggccatccggtgagtgttgtgtcaggtatacaactgtttgttggaaccactgtgttagctttacttctcatttaaccaattaatcaaaaacaatacgaggataaaacaacaatactaca

SEQ ID NO: 19998 - DNA, 741 bp, synthetic construct
  source 1..741: mol_type = other DNA
ttaaaacagcctgtgggttgatcccacccacagggcccactgggcgccagcacactggtatttcggtacctttgtgcgcctgttttatccaccctaccccacgcaacttagaagttcaacttaagcggtcgataggtagtccggtgtaccaaccgggccgtgaccaagcacttctgttaccccggaccgagtatcaataggctgcttgcgcggctgaaggagaaaacgttcgttacccggccaattacttcgaaaaacctagtaccaccatggaggttgcgaggtgtttcgctccgcacaaccctagtgtagatcaggtcgatgagtcaccgcgttccccacgggcgaccgtggcggtggctgcgttggcggcctgcccatggggcaacccatgggacgcttcaatactgacatggtgcgaagagtctattgagctaattggtagtcctccggcccctgaatgcggctaatcctaactgcggagcagatgcccgcatgccagcgggtattctgtcgtaacgggcaactctgcagcggaaccgactactttgggtgtccgtgtttccttttatctttacattggctgcttatggtgacaattgagagattgttaccatatagctattggattggccatccggttacaaatagagcacttgtttatttatttgttggttttgtgccactgaactacaaagtactaaacactctcaactacattatattacttaattcagtgaa

SEQ ID NO: 19999 - DNA, 742 bp, synthetic construct
  source 1..742: mol_type = other DNA
ttaaaacagctctggggttgtacccaccccagaggcccacgtggcggctagtactccggtattgcggtacccttgtacgcctgttttatactcccttcccgtaacttagacgcacaaaaccaagttcaatagaagggggtacaaaccagtaccaccacgaacaagcacttctgtttccccggtgatgtcgtatagactgcttgcgtggttgaaagcgacggatccgttatccgcttatgtacttcgagaagcccagtaccacctcggaatcttcgatgcgttgcgctcagcactcaaccccagagtgtagcttaggctgatgagtctggacatccctcaccggtgacggtggtccaggctgcgttggcggcctacctatggctaacgccatgggacgctagttgtgaacaaggtgtgaagagcctattgagctacataagaatcctccggcccctgaatgcggctaatcccaacctcggagcaggtggtcacaaaccagtgattggcctgtcgtaacgcgcaagtccgtggcggaaccgactactttgggtgtccgtgtttccttttattttattgtggctgcttatggtgacaatcacagattgttatcataaagcgaattggattggccatccggtgaaagtgagactcattatctatctgtttgctggatccgctccattgagtgtgtttactctaagtacaatttcaacagttatttcaatcagacaattgtatcata

SEQ ID NO: 20000 - DNA, 747 bp, synthetic construct; identical to SEQ ID NO: 1166
  source 1..747: mol_type = other DNA

SEQ ID NO: 20001 - DNA, 742 bp, synthetic construct
  source 1..742: mol_type = other DNA
ttaaaacagctctggggttgtacccaccccagaggcccacgcggcggctagtactccggtattgcggtacccttgtacgcctgttttatactcccttcccgtaacttagacgcacaaaaccaagttcaatagaagggggtacaaaccagtaccaccacgaacaagcacttctgtttccccggtgatgttgtatagactgcttgcgtggttgaaagcgacggatccgttatccgcttatgtacttcgagaagcccagtaccacctcggaatcttcgatgcgttgcgctcagcactcaaccccagagtgtagcttaggctgatgagtctggacatccctcaccggtgacggtggtccaggctgcgttggcggcctacctatggctaacgccatgggacgctagttgtgaacaaggtgtgaagagcctattgagctacataagaatcctccggcccctgaatgcggctaatcccaacctcggagcaggtggtcacaaaccagtgattggcctgtcgtaacgcgcaagtccgtggcggaaccgactactttgggtgtccgtgtttccttttattttattgtggctgcttatggtgacaatcacagattgttatcataaagcgaattggattggccatccggtgaaagtgagattcgttatctatctgtttgctggatttgctccattgagtgtgtttactctaagtacaatttcaacagctatttcaatcagacaattgtatcata

SEQ ID NO: 20002 - DNA, 747 bp, synthetic construct
  source 1..747: mol_type = other DNA
ttaaaacagctctggggttgttcccaccccagaggcccacgtggcggccagtacactggtattgcggtacctttgtacgcctgttttatactcccttcccccgtaacttagaagcacaatgtccaagttcaataggagggggtacaaaccagtaccaccacgaacaagcacttctgttcccccggtgaggctgtataggctgtttccacggctaaaagcggctgatccgttatccgctcatgtacttcgagaagcctagtatcaccttggaatcttcgatgcgttgcgctcaacactcaaccccagagtgtagcttaggtcgatgagtctggacgttcctcaccggcgacggtggtccaggctgcgttggcggcctacctgtggcccaaagccacaggacgctagttgtgaacaaggtgtgaagagcctattgagctacctgagagtcctccggcccctgaatgcggctaatcctaaccacggagcaggcagtggcaatccagcgaccagcctgtcgtaacgcgcaagttcgtggcggaaccgactactttgggtgtccgtgtttccttttatttttacaatggctgcttatggtgacaatcattgattgttatcataaagcaaattggattggccatccggtgagaatttgattattaaattactctcttgttgggattgctcctttgaaatcctgtgcactcacacctattggaattacctcattgttaagatatcatcaccact

SEQ ID NO: 20003 - DNA, 742 bp, synthetic construct
  source 1..742: mol_type = other DNA
ttaaaacagctctggggttgcacccaccccagaggcccacgtggcggctagtactccggtattgcggtacccttgtacgcctgttttatactcccttcccgtaacttagatgcacaaaaccaagttcaataggagggggtacaaaccagtaccaccacgaacaagcacttctgtttccccggtgatgttgtatagactgcttgcgtggttgaaagcgacggatccgttatccgcttatgtacttcgagaagcccagtaccacctcggaatcttcgatgcgttgcactcagcactcaaccccagagtgtagcttaggctgatgagcctggacatccctcaccggtgacggtggtccaggctgcgttggcggcctacccatggctaacgccatgggacgctagttgtgaacaaggtgtgaagagcctattgagctacataagagtcctccggcccctgaatgcggctaatcccaacctcggagcaggtggtcacaaaccagtgattggcctgtcgtaacgcgcaagtccgtggcggaaccgactactttgggtgtccgtgtttccttttatcttattgtggctgcttatggtgacaatcacagattgttatcatagagcaaattggattggccatccggtgaaggtgaaattcattatctgtctgtttgctggattcgctccattgagtgtgtttactctaagtacaacttcaacagttatttcaatcagacaattgtatcaca

SEQ ID NO: 20004 - DNA, 742 bp, synthetic construct
  source 1..742: mol_type = other DNA
ttaaaacagctctggggttgcacccaccccagaggcccacgtggcggctagtactccggtattgcggtacccttgtacgcctgttttatactcccttcccgtaacttagatgcacaaaaccaagttcaataggagggggtacaaaccagtaccaccacgaacaagcacttctgtttccccggtgatgttgtatagactgcttgcgtggttgaaagcgacggatccgttatccgcttatgtacttcgagaagcccagtaccacctcggaatcttcgatgcgttgcgctcagcactcaaccccagagtgtagcttaggctgatgagtctggacatccctcaccggtgacggtggtccaggctgcgttggcggcctacccatggctaacgccatgggacgctagttgtgaacaaggtgtgaagagcctattgagctacataagaatcctccggcccctgaatgcggctaatcccaacctcggagcaggtggtcacaaaccagtgattggcctgtcgtaacgcgcaagtccgtggcggaaccgactactttgggtgtccgtgtttccttttatcttattgtggctgcttatggtgacaatcacagattgttatcataaagcaaattggattggccatccggtgaaggtgaaattcattatctgtctgtttgctggattcgctccactgagtgtgtttactctaattacaatttcaacagttatttcaatcagacaattgtatcaca

SEQ ID NO: 20005 - DNA, 742 bp, synthetic construct
  source 1..742: mol_type = other DNA
ttaaaacagctctggggttgcacccaccccagaggcccacgtggcggctagtactccggtattgcggtacccttgtacgcctgttttatactcccttcccgtaacttagatgcacaaaaccaagttcaataggagggggtacaaaccagtaccaccacgaacaagcacttctgtttccccggtgatgttgtatagactgcttgcgtggttgaaagcgacggatccgttatccgcttatgtacttcgagaagcccagtaccacctcggaatcttcgatgcgttgcgctcagcactcaaccccagagtgtagcttaggctgatgagtctggacatccctcaccggtgacggtggtccaggctgcgttggcggcctacccatggctaacgccatgggacgctagttgtgaacaaggtgtgaagagcctattgagctacataagaatcctccggcccctgaatgcggctaatcccaacctcggagcaggtggtcacaaaccagtgattggcctgtcgtaacgcgcaagtccgtggcggaaccgactactttgggtgtccgtgtttccttttatcttattgtggctgcttatggtgacaatcacagattgttatcataaagcaaattggattggccatccggtgaaggcgaaattcattatctgtctgtttactggattcgctccactgagtgtgtttactctaattacaatttcaacagttatctcaatcagacaattgtatcaca

SEQ ID NO: 20006 - DNA, 744 bp, synthetic construct
  source 1..744: mol_type = other DNA
ttaaaacagctctggggttgttcccaccccagaggcccacgtggcggctagtactctggtatcacggtacctttgtacgcctgttttacgtccctaccccatgtaactttagaagcaattcaacaagttcaatagagggggtacaaaccagtaccaccatgaacaagcacttctgttaccccggtgactttgcataagctgtacccacggctgaaagcgaacgatccgttatccgcttgagtacttcgagaagcctagtaccaccttggaatcttcgacgcgttgcgctcagcactctaccccgagtgtagcttaggctgatgagtctgggcattcctcaccggtgacggtggcccaggctgcgttggcggcctacccatggttaacaccatgggacgctagttgtgaacaaggtgtgaagagcctattgagctacttaagagtcctccggcccctgaatgcggctaatcccaaccacggagcaggtgccttcaatccagaaggtggcctgtcgtaacgcgtgagtctgtggcggaaccgactactttgggtgtccgtgtttccttttaccttttatgtggctgcttatggtgacaatcatagattgttatcataaagcgaattggattggccatccggtgaaatacaaacatcttatctacttgcttgttggatttactccactcactcaattcactcccagtataatatctacagttctgttagtaagacattatcatcgat

SEQ ID NO: 20007 - DNA, 747 bp, synthetic construct
  source 1..747: mol_type = other DNA
ttaaaacagctctggggttgtacccaccccagaggcccacgtggcggctagcactccggtattacggtacccttgtgcgcctgttttatactcccttcccgcaacttagaagcacgaaaccaagttcaatagaagggggtacaaaccagtaccactacgaacaagcacttctgtttccccggtgacattgcatagactgctcacgcggttgaaagtgatcgatccgttacccgcttgtgtacttcgaaaagcctagtatcgccttggaatcttcgacgcgttgcgctcagcacccgaccccggggtgtagcttaggctgatgagtctggacattcctcaccggtgacggtggtccaggctgcgttggcggcctacctatggctaacgccataggacgctagatgtgaacaaggtgtgaagagcctattgagctacataagagtcctccggcccctgaatgcggctaatcctaaccacggagcaggcggtcgcaaaccagcgactggcttgtcgtaacgcgcaagtctgtggcggaaccgactactttgggtgtccgtgtttcctgttatttttatcatggctgcttatggtgacaatcagagattgttatcataaagcgaattggattggccatccggtgagtgttgtgtcaggtatacagctgtttgttggaaccactgtgttagctttacttctcatttaaccaattaatcaaaaacaatacgaggataaaacaacaatactaca

SEQ ID NO: 20008 - DNA, 747 bp, synthetic construct
  source 1..747: mol_type = other DNA
ttaaaacagctctggggttgtacccaccccagaggcccacgtggcggctagcactccggtattacggtacccttgtgcgcctgttttatactcccctcccgcaacttagaagcacgaaaccaagttcaatagaagggggtacaaaccagtaccactacgaacaagcacttctgtttccccggtgacattgcatagactgctcacgcggttgaaagcgattgatccgttacccgcttgtgtacttcgaaaagcctagtatcgccttggaatcttcgacgcgttgcgctcagcacccgaccccggggtgtagcttaggctgatgagtctggacattcctcaccggtgacggtggtccaggctgcgttggcggcctacctatggctaacgccataggacgttagatgtgaacaaggtgtgaagagcctattgagctacataagagtcctccggcccctgaatgcggctaatcctaaccacggagcaggcggtcgcgaaccagtgactggcttgtcgtaacgcgcaagtctgtggcggaaccgactactttgggtgtccgtgtttcctgttatttttatcatggctgcttatggtgacaatcagagattgttatcataaggcgaattgggttggccatccggtgagtgttgtgtcaggtatacaactgtttgttggaaccactgtgttagctttacttctcatttaaccaattaatcaaaaacaatacgaggataaaacaacaatactaca

SEQ ID NO: 20009 - DNA, 747 bp, synthetic construct
  source 1..747: mol_type = other DNA
ttaaaacagctctggggttgtacccaccccagaggcccacgtggcggctagcactccggtattacggtacccttgtgcgcctgttttatactcccctcccgcaacttagaagcacgaaaccaagttcaatagaagggggtacaaaccagtaccactacgaacaagcacttctgtttccccggtgacattgcatagactgctcacgcggttgaaagtgatcgatccgttacccgcttgtgtacttcgaaaagcctagtatcaccttggaatcttcgacgcgttgcgctcaacacccgaccccggggtgtagcttaggctgatgagtctggacattcctcaccggtgacggtggtccaggctgcgttggcggcctacctatggctaacgccataggacgctagatgtgaacaaggtgtgaagagcctattgagctacataagagtcctccggcccctgaatgcggctaatcctaaccatggagcaggcggtcacgaaccagtgactggcttgtcgtaacgcgcaagtctgtggcggaaccgactactttgggtgtccgtgtttcctgttatttttatcatggctgcttatggtgacaatcagagattgttatcataaagcgtattggattggccatccggtgagtgttgtgtcaggtatacaactgtttgttggaaccactgtgttagctttacttctcatttaaccaattaatcaaaaacaatacgaggataaaacaacaatactaca

SEQ ID NO: 20010 - DNA, 747 bp, synthetic construct
  source 1..747: mol_type = other DNA
ttaaaacagctctggggttgtacccaccccagaggcccacgtggcggctagcactccggtattgcggtacccttgtgcgcctgttttatacccccctcccgcaacttagaagcacgaaaccaagttcaatagaaaggggtacaaaccagtaccactacgaacaagcacttctgtttccccggtgacattgcatagactgctcacgcggttgaaagtgatcgatccgttacccgcttgtgtacttcgaaaagcctagtatcgccttggaatcttcgacgcgttgcgctcagcacccgaccccggggtgtagcttaggctgatgagtctggacattcctcaccggtgacggtggtccaggctgcgttggcggcctacctatggctgacaccataggacgctagatgtgaacaaggtgtgaagagcctattgagctacacaagagtcctccggcccctgaatgcggctaatcctaaccacggagcaggcggtcgcgaaccagtgactggcttgtcgtaacgcgcaagtctgtggcggaaccgactactttgggtgtccgtgtttcctgttatttttatcatggctgcttatggtgacaatcagagattgttatcataaagcaaattggattggccatccggtgagtgttgtgtcaggtgtgcaactgtttgttggaaccactgtgttaactttacatctcatttaacctattaatcaaaaacaatacgaggataaaacaacaatactaca

SEQ ID NO: 20011 - DNA, 747 bp, synthetic construct
  source 1..747: mol_type = other DNA
ttaaaacagctctggggttgtacccaccccagaggcccacgtggcggctagcactccggtattacggtacccttgtgcgcctgttttatactcccctcccgcaacttagaagcacgaaaccaagttcaatagaagggggtacaaaccagtaccactacgaacaagcacttctgtttccccggtgacattgcataaactgctcacgcggttgaaagtgatcgatccgttacccgcttgtgtacttcgaaaagcctagtatcgccttggaatcttcgacgcgttgcgctcagcacccgaccccggggtgtagcttaggctgatgagtctggacattcctcactggtgacggtggtccaggctgcgttggcggcctacctatggctaacgccataggacgttagatgtgaacaaggtgtgaagagcctattgagctacataagagtcctccggcccctgaatgcggctaatcctaaccacggagcaggcggtcgcgaaccagtgactggcttgtcgtaacgtgcaagtctgtggcggaaccgactactttgggtgtccgtgtttcctgttatttttatcatggctgcttatggtgacaatcagagattgttattataaagcgaattggattggccatccggtgagtgttgtgtcaggtatacaactgtttgttggaaccactgtgttagctttacttctcatttaaccaattaatcaaaaacaatacgaggataaaacaacaatactaca

SEQ ID NO: 20012 - DNA, 747 bp, synthetic construct
  source 1..747: mol_type = other DNA
ttaaaacagctctggggttgtacccaccccagaggcccacgtggcggctagcactccggtattacggtacccttgtgcgcctgttttatactcccctcccgcaacttagaagcacgaaaccaagttcaatagaagggggtacaaaccagtaccactacgaacaagcacttctgtttccccggtgacattgcatagactgctcacgcggttgaaagtgatcgatccgttacccgcttgtgtacttcgaaaagcctagtatcaccttggaatcttcgacgcgttgcgctcagcacccgaccccggggtgtagcttaggctgatgagtctggacattcctcaccggtgacggtggtccaggctgcgttggcggcctacctatggctaacgccataggacgttagatgtgaacaaggtgtgaagagcctattgagctacataagagtcctccggcccctgaatgcggctaatcctaaccacggagcaggcggtcgcgaaccagtgactggcttgtcgtaacgcgcaagtctgtggcggaaccgactactttgggtgtccgtgtttcctgttatttttatcatggctgcttatggtgacaatcagagattgttatcataaagcgaattggattggccatccggtgagtgttgtgtcaggtatacaactgtttgttggaaccactgtgttagctttacttctcatttaaccaattaatcaaaaacaatacgaggataaaacaacaatactaca

SEQ ID NO: 20013 - DNA, 735 bp, synthetic construct
  source 1..735: mol_type = other DNA
agctctggggttgttcccaccccagaggcccacgtggcggctagtacactggtatcacggtacctttgtacgcctgttttatactccctcccccgcaacttagaagcatacaattcaagctcaataggagggggtgcaagccagcgcctccgtgggcaagcactactgtttccccggtgaggccgcatagactgttcccacggttgaaagtgtccgatccgttatccgctcatgtacttcgagaagcctagtatcgctctggaatcttcgacgcgttgcgctcagcactcaaccccggagtgtagcttgggccgatgagtctggacagtccccactggcgacagtggtccaggctgcgctggcggcccacctgtggcccaaagccacgggacgctagttgtgaacagggtgtgaagagcctattgagctacatgagagtcctccggcccctgaatgcggctaatcctaaccatggagcaggcagctgcaacccagcagccagcctgtcgtaacgcgcaagtccgtggcggaaccgactactttgggtgtccgtgtttccttttattcttgaatggctgcttatggtgacaatcatagattgttatcataaagcgagttggattggccatccagtgtgaatcagattaattactcccttgtttgttggatccactcccgaaacgttttactccttaacttattgaaattgtttgaagacaggatttcagtgtcaca

SEQ ID NO: 20014 - DNA, 742 bp, synthetic construct
  source 1..742: mol_type = other DNA
ttaaaacagctctggggttgttcccaccccagaggcccacgtggcggctagtacactggtatcacggtacctttgtacgcctgttttatactccctcccccgcaacttagaagcatacaattcaagctcaataggagggggtgcaagccagcgcctccgtgggcaagcactactgtttccccggtgaggccgcatagactgttcccacggttgaaagtgtccgatccgttatccgctcatgtacttcgagaagcctagtatcgctctggaatcttcgacgcgttgcgctcagcactcaaccccggagtgtagcttgggccgatgagtctggacagtccccactggcgacagtggtccaggctgcgctggcggcccacctgtggcccaaagccacgggacgctagttgtgaacagggtgtgaagagcctattgagctacatgagagtcctccggcccctgaatgcggctaatcctaaccatggagcaggcagctgcaacccagcagccagcctgtcgtaacgcgcaagtccgtggcggaaccgactactttgggtgtccgtgtttccttttattcttgaatggctgcttatggtgacaatcatagattgttatcataaagcgagttggattggccatccagtgtgaatcagattaattactcccttgttcgttggatccactcccgaaacgttttactccttaacttattgaaattgtttgaagacaggatttcagtgtcaca

SEQ ID NO: 20015 - DNA, 734 bp, synthetic construct
  source 1..734: mol_type = other DNA
gctctggggttgttcccaccccagaggcccacgtggcggctagtacactggtatcacggtacctttgtacgcctgttttatactccctcccccgcaacttagaagcatacaattcaagctcaataggagggggtgcaagccagtgcctccatgggcaagcactactgtttccccggtgaggccgcatagactgttcccacggttgaaagtgtccgatccgttacccgctcatgtacttcgagaagcctagtatcgctctggaatcttcgacgcgttgcgctcagcactcaaccccggagtgtagcttgggccgatgagtctggacagtccccactggcgacagtggtccaggctgcgctggcggcccacctgtggcccaaagccacgggacgctagttgtgaacagggtgtgaagagcctattgagctacatgagagtcctccggcccctgaatgcggctaattctaaccatggagcaggtagctgcaacccagcagccagcctgtcgtaacgcgcaagtccgtggcgaaaccgactactttgggtgtccgtgtttccttttattcttgaatggctgcttatggtgacaatcatagattgttatcataaagcgagttggattggccatccagtgtgaatcagattaattactcccttgtttgttggatccactcccgaaacgttttactcctcaacttattgaaattgtttgaagacaggatttcagtgtcaca

SEQ ID NO: 20016 - DNA, 747 bp, synthetic construct
  source 1..747: mol_type = other DNA
ttaaaacagctctggggttgtacccactccagaggcccacgtggcggctagcactccggtattacggtacctttgtgcgcctgttttatactcccctcccgcaacttagaagcacgaaaccaagttcaatagaagggggtacaaaccagtaccactacgaacaagcacttctgtttccccggtgacattgcatagactgctcacgcggttgaaagtgatcgatccgttacccgcttgtgtacttcgaaaagcctagtatcgccttggaatcttcgacgcgttgcgctcagcacccgaccccggggtgtggcttaggctgatgagtctggacattcctcaccggtgacggtggtctaggctgcgttggcggcctacctatggctaacgccataggacgttagatgtgaacaaggtgtgaagagcctattgagctacataagagtcctccggcccctgaatgcggctaatcctaaccacggaacaggcggtcgcgaaccagtgactggcttgtcgtaacgcgcaagtctgtggcggaaccgactactttgggtgtccgtgtttcctgttatttttatcatggctgcttatggtgacaatcagagattgttatcataaagcgaattggattggccatccggtgagtgttgtgtcaggtatacaactgtttgttggaaccactgtgttagctttacttctcatttaaccaattaatcaaaaacaatacgaggataaaacaacaatactaca

SEQ ID NO: 20017 - DNA, 747 bp, synthetic construct
  source 1..747: mol_type = other DNA
ttaaaacagctctggggttgtacccaccccagaggcccacgtggcggctagcactccggtattacggtacccttgtgcgcctgttttatactcccctcccgcaacttagaagcacgaaaccaagttcaatagaagggggtacaaaccagtaccactacgaacaagcacttctgtttccccggtgacattgcatagactgctcacgcggttgaaagtgatcgatccgttacccgcttgtgtacttcgaaaagcctagtatcgccttggaatcttcgacgcgttgcgctcagcacccgaccccggggtgtagcttaggctgatgagtctggacattcctcaccggtgacggtggtccaggctgcgttggcggcctacctatggctaacgccataggacgttagatgtgaacaaggtgtgaagagcctattgagctacataagagtcctccggcccctgaatgcggctaatcctaaccacggaacaggcggtcgcgaaccagtgactggcttgtcgtaacgcgcaagtctgtggcggaaccgactactttgggtgtccgtgtttcctgttatttttatcatggctgcttatggtgacaatcagagattgttatcataaagcgaattggattggccatccggtgagtgttgtgtcaggtatacaactgtttgttggaaccactgtgttagctttacttctcatttaaccaattaatcaaaaacaatacgaggataaaacaacaatactaca

SEQ ID NO: 20018 - DNA, 747 bp, synthetic construct
  source 1..747: mol_type = other DNA
ttaaaacagctctggggttgtacccaccccagaggcccacgtggcggctagcactccggtattacggtacccttgtgcgcctgttttatactcccctcccgcaacttagaagcacgaaaccaagttcaatagaagggggtacaaaccagtaccactacgaacaagcacttctgtttccccggtgacatcgcatagactgctcacgcggttgaaagtgatcgatccgttacccgcttgtgtacttcgaaaagcctagtatcgccttggaatcttcgacgcgttgcgctcagcacccgaccccggggtgtagcttaggctgatgagtctggacattcctcaccggtgacggtggtccaggctgcgttggcggcctacctatggctaacgccataggacgttagatgtgaacaaggtgtgaagagcctattgagctacataagagtcctccggcccctgaatgcggctaatcctaaccacggagcaggcggtcgcgaaccagtgactggcttgtcgtaacgcgcaagtctgtggcggaaccgactactttgggtgtccgtgtttcctgttatttttatcatggctgcttatggtgacaatcagagattgttatcataaagcgaattggattggccatccggtgagtgttgtgtcaggtatacaactgtttgttggaaccactgtgttagctttacttctcatttaaccaattaatcaaaaacaatacgaggataaaacaacaatactaca

SEQ ID NO: 20019 - DNA, 747 bp, synthetic construct
  source 1..747: mol_type = other DNA
ttaaaacagctctggggttgtacccaccccagaggcccacgtggcggctagcactccggtattacggtacccttgtgcgcctgttttatactcccctcccgcaacttagaagcacgaaaccaagttcaatagaagggggtacaaaccagtaccactacgaacaagcacttctgtttccccggtgacattgcatagactgctcacgcggttgaaagtgatcgatccgttacccgcttgtgtacttcgaaaagcctagtatcgccttggaatcttcgacgcgttgcgctcagcacccgaccccggggtgtagcttaggctgatgagtctggacattcctcaccggtgacggtggtccaggctgcgttggcggcctacctatggctaacgccataggacgttagatgtgaacaaggtgtgaagagcctattgagctacataagagtcctccggcccctgaatgcggctaatcctaaccacggagcaggcggtcgcgaaccagtgactggcttgtcgtaacgcgcaagtctgtggcggaaccgactactttgggtgtccgtgtttcctgttatttttatcatggctgcttatggtgacaatcagagattgttatcataaagcgaattggattggccatccggtgagtgttgtgtcaagtatacaactgtttgttggaaccactgtgttagctttacttctcatttaaccaattaatcaaaaacaatacgaggataaaacaacaatactaca

SEQ ID NO: 20020 - DNA, 747 bp, synthetic construct
  source 1..747: mol_type = other DNA
ttaaaacagctctggggttgtacccaccccagaggcccacgtggcggctagcactccggtattacggtacccttgtgcgcctgttttatactcccctcccgcaacttagaagcacgaaaccaagttcaatagaaaggggtacaaaccagtaccactacgaacaagcacttctgtttccccggtgacattgcatagactgctcacgcggttgaaagtgatcgatccgttacccgcttgtgtacttcgaaaagcctagtatcgccttggaatcttcgacgcgttgcgctcagcacccgaccccggggtgtagcttaggctgatgagtctggacattcctcaccggtgacggtggtccaggctgcgttggcggcctacctatggctaacgccataggacgctagatgtgaacaaggtgtgaagagcctattgagctacataagagtcctccggcccctgaatgcggctaatcctaaccacggagcaggcggtcgcgaaccagtgactggcttgtcgtaacgcgcaagtctgtggcggaaccgactactttgggtgtccgtgtttcctgttatttttatcatggctgcttatggtgacaatcagagattgttatcataaagcgaattggattggccatccggtgagtgttgtgtcaggtatacaactgtttgttggaaccactgtgttagctttacttctcatttaaccaattaatcaaaaacaatacgaggataaaacaacaatactaca

SEQ ID NO: 20021 - DNA, 747 bp, synthetic construct
  source 1..747: mol_type = other DNA
ttaaaacagctctggggttgtacccaccccagaggcccacgtggcggctagcactccggtattacggtacccttgtgcgcctgttttatactcccctcccgcaacttagaagcacgaaaccaagttcaatagaagggggtacaaaccagtaccactacgaacaagcacttctgtttccccggtgacattgcatagactgctcacgcggttgaaagtgatcgatccgttacccgcttgtgtacttcgaaaagcctagtatcaccttggaatcttcgacgcgttgcgctcagcacccgaccccggggtgtagcttaggctgatgagtctggacattcctcaccggtgacggtggtccaggctgcgttggcggcctacctatggctaacgccataggacgctagatgtgaacaaggtgtgaagagcctattgagctacataagagtcctccggcccctgaatgcggctaatcctaaccacggagcaggcggtcgcgaaccagtgactggcttgtcgtaacgcgcaagtctgtggcggaaccgactactttgggtgtccgtgtttcctgttatttttatcatggctgcttatggtgacaatcagagattgttatcataaagcaaattggattggccatccggtgagtattgtgtcaggtacacaactgttcgttggaaccactgtgttatctttacttctcatttaaccaattaatcaaaaacaacacgaggataaaacaacaatactaca

SEQ ID NO: 20022 - DNA, 747 bp, synthetic construct; identical to SEQ ID NO: 1170
  source 1..747: mol_type = other DNA

SEQ ID NO: 20023 - DNA, 747 bp, synthetic construct
  source 1..747: mol_type = other DNA
ttaaaacagctctggggttgtacccaccccagaggcccacgtggcggctagcactccggtattacggtacccttgtgcgcctgttttatactcccctcccgtaacttagaagcacgaaaccaagttcaatagaagggggtacaaaccagtaccaccacgaacaagcacttctgtttccccggtgacattgcatagactgctcacgcggttgaaagtgatcgatccgttacccgcttgtgtacttcgaaaagcctagtatcgccttggaatcttcgacgcgttgcgctcagcacccgaccccggggtgtagcttgggctgatgagtctggacattcctcaccggtgacggtggtccaggctgcgttggcggcctacctatggctaacgccataggacgctagatgtgaacaaggtgtgaagagcctattgagctacataagagtcctccggcccctgaatgcggctaatcctaaccacggagcaggcggtcgcgaaccagtgactggcttgtcgtaacgcgcaagtctgtggcggaaccgactactttgggtgtccgtgtttcctgttatttttatcatggctgcttatggtgacaatcagagattgttatcataaagcgaattggattggccatccggtgagtgttgtgtcaggtgtacaactgtttgttggaaccactgtgttagcttcacttctcattcaaccaattaatcaaaaacaatacgaggataaaacaacaatattaca

SEQ ID NO: 20024 - DNA, 747 bp, synthetic construct
  source 1..747: mol_type = other DNA
ttaaaacagctctggggttgtacccaccccagaggcccacgtggcggctagcactccggtattacggtacccttgtgcgcctgttttatactcccctcccgtaacttagaagcacgaaaccaagttcaatagaagggggtacaaaccagtaccaccacgaacaagcacttctgtttccccggtgacattgcatagactgctcacgcggttgaaagtgatcgatccgttacccgcttgtgtacttcgaaaagcctagtatcgccttggaatcttcgacgcgttgcgctcagcacccgaccccggggtgtagcttgggctgatgagtctggacattcctcaccggtgacggtggtccaggctgcgttggcggcctacctatggctaacgccataggacgctagatgtgaacaaggtgtgaagagcctattgagctacataagagtcctccggcccctgaatgcggctaatcctaaccacggagcaggcggtcgcgaaccagtgactggcttgtcgtaacgcgcaagtctgtggcggaaccgactactttgggtgtccgtgtttcctgttatttttatcatggctgcttatggtgacaatcagagattgttatcataaagcgaattggattggccatccggtgagtgttgtgtcaggtgtacaactgtttgttggaaccactgtgttagctttacttctcattcaatcaattaatcaaaaacaatacgaggataaaacaacaatattaca

SEQ ID NO: 20025 - DNA, 747 bp, synthetic construct
  source 1..747: mol_type = other DNA
ttaaaacagctctggggttgtacccaccccagaggcccacgtggcggctagcactccggtattacggtacccttgtgcgcctgttttatactccccccccgcaacttagaagcacgaaaccaagttcaatagaagggggtacaaaccagtaccaccacgaacaagcacttctgtttccccggtgacattgcatagactgctcacgcggttgaaagtgatcgatccgttacccgcttgtgtacttcgaaaagcctagtatcgccttggaatcttcgacgcgttgcgctcagcaccccaccccggggtgtagcttaggctgatgagtctggacattcctcaccggtgacggtggtccaggctgcgttggcggcctacctatggctaacgccataggacgctagatgtgaacaaggtgtgaagagcctattgagctacataagagtcctccggcccctgaatgcggctaatcctaaccacggagcaggcggtcgcgaaccagtgactggcttgtcgtaacgcgcaagtctgtggcggaaccgactactttgggtgtccgtgtttcctgttatttttatcatggctgcttatggtgacaatcagagattgttatcataaagcgaattggattggccatccggtgagtgtcgtgccaggtatacaactgtttgttggaaccactgtgttagctttacttctcattcaaccaattaatcaaaaacaatacgaggataaaacaacaatactaca

SEQ ID NO: 20026 - DNA, 747 bp, synthetic construct
  source 1..747: mol_type = other DNA
ttaaaacagctctggggttgtacccaccccagaggcccacgtggcggctagcactccggtattacggtacccttgtgcgcctgttttatacccccctcccgcaacttagaagcacgaaaccaagttcaatagaagggggtacaaaccagtaccaccaggaacaagcacttctgtttccccggtgacattgcatagactgctcacgcggttgaaagcgatcgatccgttacccgcttgtgtacttcgagaagcctagtatcgccttggaatcttcgacgcgttgcgctcagcacccgaccccggggtgtagcttaggctgatgagtctggacactcctcaccggcgacggtggtccaggctgcgttggcggcctacctatggctaatgccataggacgctagatgtgaacaaggtgtgaagagcctattgagctacataagagtcctccggcccctgaatgcggctaatcctaaccacggagcaggcggtcgcaaaccagtgactggcttgtcgtaccgcgcaagtctgtggcggaaccgactactttgggtgtccgtgtttcctgttatttttatcatggctgcttatggtgacaatcagagattgttatcataaagcgaattggattggccatccggtgagtgttgtgtcaggtatacaactgtttgttgtaaccattgtattagctttacttctcatttaaccaattaatcaaaaacaatacgaggataaaactacaatactaca

SEQ ID NO: 20027 - DNA, 747 bp, synthetic construct
  source 1..747: mol_type = other DNA
ttaaaacagctctggggttgtacccaccccagaggcccacgtggcggctagcactccggtatcacggtacccttgtgcgcctgttttatactcccttcccgtaacttagaagcacgaaaccaagttcaataggagggggtacaaaccagtaccaccacgaacaagcacttctgtttccccggtgacattgcatagactgctcacgcggttgaaagtgatcgatccgttacccgcttgtgtacttcgaaaagcttagtaccaccttggaatcttcgacgcgttgcgctcagcgcccgaccccggggcgtagcttaggctgatgagtctggacattcctcaccggtgacggtggtccaggctgcgttggcggcctacctatggctaacgccataggacgctagatgtgaacaaggtgtgaagagcctattgagctacataagagtcctccggcccctgaatgcggctaatcctaaccatggagcaggcggtcgcgaaccagtgactggcttgtcgtaacgcgcaagtccgtggcggaaccgactactttgggtgtccgtgtttcctgttatttttatcatggctgcttatggtgacaatcagagattgttaccatagagcgaattggattggccatccggtgagtgttgcgtcaggtatacaactgtttgttggaatcactgtgttaactttactttttatccaaccaaccagtcaaaaacaatacgagggtaaaacaacaatattaca

SEQ ID NO: 20028 - DNA, 746 bp, synthetic construct
  source 1..746: mol_type = other DNA
ttaaaacagcctgtgggttgttcccaccccagaggcccacgtggcggctagtactctggtatcacggtacctttgtacgcctgttttacatccccttcccatgcaactttagaagcaaatcactaagttcaatagggggggtacaaaccagtaccaccacgaacaagcacttctgttaccccggtgatttcacataagctgtgcccacggccgaaagtgaacgatccgttacccgcttgagtacttcgagaagcctagtatcaccttggaaccttcgatgcgttgcgttcagcactctaacccgagtgtagcttaggctgatgagtctgggcgatccccaccggcgacggtggcccaggctgcgttggcggcctacccatggccaacgccatgggacgctagttttgaacaaggtgtgaagagcctattgagctactcaagagtcctccggcccctgaatgcggctaatcccaaccacggagcaagtgtcctcaaaccagagggtggcttgtcgtaacgcgcaagtctgtggcggaaccgactactttgggtgtccgtgtttccttttatttcatattggctgcttatggtgataatcacggattgttatcataaagcgaattggattggccatccggtgagatacaagcacattatttacctttttatcggattcactccaatacaatattcttcaccaaggttgatccaaatagtcttagtgattagaaattattatttcagca

SEQ ID NO: 20029 - DNA, 746 bp, synthetic construct; identical to SEQ ID NO: 1137
  source 1..746: mol_type = other DNA

SEQ ID NO: 20030 - DNA, 747 bp, synthetic construct
  source 1..747: mol_type = other DNA
ttaaaacagctctggggttgtacccaccccagaggcccacgtggcggctagcactccggtattacggtacccttgtgcgcctgttttatactcccctcccgtaacttagaagcacgaaaccaagttcaatagaagggggtacaaaccagtaccaccacgaacaagcacttctgtttccccggtgacattgcatagactgctcacgcggttgaaagtgatcgatccgttacccgcttgtgtacttcgaaaagcctagtatcgccttggaatcttcgacgcgttgcgctcagcacccgaccccggggtgtagcttgggctgatgagtctggacattcctcaccggtgacggtggtccaggctgcgttggcggcctacctatggctaacgccataggacgctagatgtgaacaaggtgtgaagagcctattgagctacataagagtcctccggcccctgaatgcggctaatcctaaccacggagcaggcggtcgcgaaccagtgactggcttgtcgtaacgcgcaagtctgtggcggaaccgactactttgggtgtccgtgtttcctgttatttttatcatggctgcttatggtgacaatcagagattgttatcataaagcgaattggattggccatccggtgagtgttgtgtcaggtgtacaactgtttgttggaaccactgtgttagctttacttctcattcaaccaattaatcaaaaacaatacgaggataaaacaacaatattaca

SEQ ID NO: 20031 - DNA, 747 bp, synthetic construct
  source 1..747: mol_type = other DNA
ttaaaacagctctggggttgtatccaccccagaggcccacgtggcggctagcactccggtattacggtacccttgtgcgcctgttttatactcccctcccgcaacttagaagcacgaaaccaagttcaatagaagggggtacaaaccagtaccactacgaacaagcacttctgtttccccggtgacattgcatagactgctcacgcggttgaaagtgatcgatccgttacccgcttgtgtacttcgaaaagcctagtatcgccttggaatcttcgacgcgttgcgctcagcacccgaccccggggtgtagcttaggctgatgagtctggacattcctcaccggtgacggtggtccaggctgcgttggcggcctacctatggctaacgccataggacgctagatgtgaacaaggtgtgaagagcctattgagctacacaagagtcctccggcccctgaatgcggctaatcctaaccacggagcaggcggtcgcgaaccagtgactggcttgtcgtaacgcgcaagtctgtggcggaaccgactactttgggtgtccgtgtttcctgttatttttatcatggctgcttatggtgacaatcagagattgttatcataaagcgaattggattggccatccggtgagtgttgtgtcaggtatacaactgtttgttggaaccactgtgttagctttacttctcatttaaccaattaatcaaaaacaatacgaggataaaacaacaatactaca

SEQ ID NO: 20032 - DNA, 747 bp, synthetic construct
  source 1..747: mol_type = other DNA
ttaaaacagctctggggttgtacccaccccagaggcccacgtggcggctagcactccggtattacggtacccttgtgcgcctgttttatactcccctcccgcaacttagaagcacgaaaccaagttcaatagaagggggtacaaaccagtaccactacgaacaagcacttctgtttccccggtgacattgcatagactgctcacgcggttgaaagtgatcgatccgttacccgcttgtgtacttcgaaaagcctagtatcgccttggaatcttcgacgcgttgcgctcagcacccgaccccggggtgtagcttaggctgatgagtctggacattcctcaccggtgacggtggtccaggctgcgttggcggcctacctatggctaacgccataggacgctagatgtgaacaaggtgtgaagagcctattgagctacataagagtcctccggcccctgaatgcggctaatcctaaccacggagcaggcggtcgcaaaccagtgactggcttgtcgtaacgcgcaagtctgtggcggaaccgactactttgggtgtccgtgtttcctgttatttttatcatggctgcttatggtgacaatcagagattgttatcataaagcgaattggattggccatccggtgagtgttgtgtcaggtatacaactgtttgttggaaccactgtgttagctttacttctcatttaaccaattaatcaaaaacaatacgaggataaaacaacaatactaca

SEQ ID NO: 20033 - DNA, 747 bp, synthetic construct
  source 1..747: mol_type = other DNA
ttaaaacagctctggggttgtacccaccccagaggcccacgtggcggctagcactccggtattacggtacccttgtgcgcctgttttatactcccctcccgcaacttagaagcacgaaaccaagttcaatagaagggggtacaaaccagtaccaccacgaacaagcacttctgtttccccggtgacattgcatagactgctcacgcggttgaaagcgatcgatccgttacccgcttgtgtacttcgaaaagcctagtatcgccttggaatcttcgacgcgttgcgctcagcacccgaccccggggtgtagcttaggctgatgagtctggacattcctcaccggcgacggtggtccaggctgcgttggcggcctacctatggctaacgccataggacgctagatgtgaacaaggtgtgaagagcctattgagctacataagagtcctccggcccctgaatgcggctaatcctaaccacggagcaggcggtcacgaaccagtgactggcttgtcgtaacgcgcaagtctgtggcggaaccgactactttgggtgtccgtgtttcctgttatttttatcatggctgcttatggtgacaatcagagattgttatcataaagcgaattggattggccatccggtgagtgttgtgtcagatatacaactgtttgttggaaccactgtattagctttacttctcatttaaccaattaatcaaaaacaatacgaggataaaacaacaatactaca

SEQ ID NO: 20034 - DNA, 747 bp, synthetic construct
  source 1..747: mol_type = other DNA
ttaaaacagctctggggttgtacccaccccagaggcccacgtggcggctagcactccggtattacggtacccttgtgcgcctgttttatactcccctcccgcaacttagaagcacgaaaccaagttcaatagaagggggtacaaaccagtaccactacgaacaagcacttctgtttccccggtgacattgcatagactgctcacgcggttgaaagtgatcgatccgttacccgcttgtgtacttcgaaaagcctagtatcgccttggaatcttcgacgcgttgcgctcagcacccgaccccggggtgtagcttaggctgatgagtctggacattcctcaccggtgacggtggtccaggctgcgttggcggcctacctacggctaacgccataggacgctagatgtgaacaaggtgtgaagagcctattgagctacataagagtcctccggcccctgaatgcggctaatcctaaccacggagcaggcggtcgcgaaccagtgactggcttgtcgtaacgcgcaagtctgtggcggaaccgactactttgggtgtccgtgtttcctgttatttttatcatggctgcttatggtgacaatcagagattgttatcataaagcgaattggattggccatccggtgagtgttgtgtcagatatacaactgtttgttggaaccactgtgttagctttacttctcatttaaccaattaatcaaaaacaatacgaggataaaacaacaatactaca

SEQ ID NO: 20035 - DNA, 747 bp, synthetic construct
  source 1..747: mol_type = other DNA
ttaaaacagctctggggttgtacccaccccagaggcccacgtggcggctagcactccggtattacggtacccttgtgcgcctgttttatactcccctcccgcaacttagaagcacgaaaccaagttcaatagaaaggggtacaaaccagtaccactacgaacaagcacttctgtttccccggtgacattgcatagactgctcacgcggttgaaagtgatcgatccgttacccgcttgtgtacttcgaaaagcctagtatcgccttggaatcttcgacgcgttgcgctcagcacccgaccccggggtgtagcttaggctgatgagtctggacattcctcaccggtgacggtggtccaggctgcgttggcggcctacctatggctaacgccataggacgctagatgtgaacaaggtgtgaagagcctattgagctacacaagagtcctccggcccctgaatgcggctaatcctaaccacggagcaggcggtcgcgaaccagtgactggcttgtcgtaacgcgcaagtctgtggcggaaccgactactttgggtgtccgtgtttcctgttatttttatcatggctgcttatggtgacaatcagagattgttatcataaagcgaattggattggccatccggtgagtgttgtgtcaggtatacaactgtttattagaaccactgtgttagctttacttctcatttaaccaattaatcaaaaacaatacgaggataaaacaacaacactaca

SEQ ID NO: 20036 - DNA, 747 bp, synthetic construct
  source 1..747: mol_type = other DNA
ttaaaacagctctggggttgtacccaccccagaggcccacgtggcggctagcactccggtattacggtacccttgtgcgcctgttttatactcccctcccgcaacttagaagcacgaaaccaagttcaatagaagggggtacaaaccagtaccactacgaacaagcacttctgtttccccggtgacattgcatagactgctcacgcggttgaaagtgatcgatccgttacccgcttgtgtacttcgagaagcctagtatcgccttggaatcttcgatgcgttgcgctcagcacccgaccccggggtgtagcttaggctgatgagtctggacattcctcaccggtgacggtggtccaggctgcgttggcggcctacctatggctaacgccataggacgctagatgtgaacaaggtgtgaagagcctattgagctacataagagtcctccggcccctgaatgcggctaatcctaaccacggagcaggcggtcgcgaaccagtgactggcttgtcgtaacgcgcaagtctgtggcggaaccgactactttgggtgtccgtgtttcctgttatttttatcatggctgcttatggtgacaatcagagattgttatcataaagcgaattggattggccatccggtgagtgttgtgtcaggtatacaactgtttgttggaaccactgtgttagttttacttctcatttaaccaattaatcaaaaacaatacgaggataaaacaacaatactata

SEQ ID NO: 20037 - DNA, 747 bp, synthetic construct
  source 1..747: mol_type = other DNA
ttaaaacagctctggggttgtacccaccccagaggcccacgtggcggctagcactccggtattacggtacccttgtgcgcctgttttatactcccctcccgcaacttagaagcacgaaaccaagttcaatagaagggggtacaaaccagtaccactacgaacaagcacttctgtttccccggtgacattgcatagactgctcacgcggttgaaagtgatcgatccgttacccgcttgtgtacttcgaaaagcctagtatcgccttggaatcttcgacgcgttgcgctcagcacccgaccccggggtgtagcttaggctgatgagtctggacattcctcaccggtgacggtggtccaggctgcgttggcggcctacctatggctaacgccataggacgctagatgtgaacaaggtgtgaagagcctattgagctacataagagtcctccggcccctgaatgcggctaatcctaaccacggagcaggcggtcgcgaaccagtgactggcttgtcgtaacgcgcaagtctgtggcggaaccgactactttgggtgtccgtgtttcctgttatttttatcatggctgcttatggtgacaatcagagattgttatcataaagcgaattggattggccatccggtgagtgttgtgtcaggtgtacaactgttagttggaaccactgtgttagctttacttctcatttaaccaattaatcaaaaacaatacgaggataaaacaacaatactaca

SEQ ID NO: 20038 - DNA, 747 bp, synthetic construct
  source 1..747: mol_type = other DNA
ttaaaacagctctggggttgtacccaccccagaggcccacgtggcggctagcactccggtattacggtacctttgtgcgcctgttttatactcccctcccgcaacttagaagcacgaaaccaagttcaatagaagggggtacaaaccagtaccactacgaacaagcacttctgtttccccggtgacattgcatagactgctcacgcggttgaaagtgatcgatccgttacccgcttgtgtacttcgaaaagcctagtatcgccttggaatcttcgacgcgttgcgctcagcacccgaccccggggtgtagcttaggctgatgagtctggacattcctcaccggtgacggtggtccaggctgcgttggcggcctacctatggctaacgccataggacgctagatgtgaacaaggtgtgaagagcctattgagctacataagagtcctccggcccctgaatgcggctaatcctacccacggagcaggcggtcgcgaaccagtgactggcttgtcgtaatgcgcaagtctgtggtggaaccgactactttgggtgtccgtgtttcctgttatttttatcatggctgcttatggtgacaatcggagattgttatcataaagcgagttggattggccatccggtgagtgttgtgtcaggtatacaactgtttgttggaaccactgtgttagctttacctctcatttaaccaattaatcaaaaacaatacgaagataaaacaacaatactaca

SEQ ID NO: 20039 - DNA, 747 bp, synthetic construct
  source 1..747: mol_type = other DNA
ttaaaacagctctggggttgtacccaccccagaggcccacgtggcggctagcactccggtattacggtacccttgtgcgcctgttttatactcccctcccgcaacttagaagcacgaaaccaagttcaatagaagggggtacaaaccagtaccactacgaacaagcacttctgtttccccggtgacattgcatagactgctcacgcggttgaaagtgatcgatccgttacccgcttgtgtacttcgaaaagcctagtatcgccttggaatcttcgacgcgttgcgctcagcacccgaccccggggtgtagcttaggctgatgagtctggacattcctcaccggtgacggtggtccaggctgcgttggcggcctacctatggctaacgccataggacgctagatgtgaacaaggtgtgaagagcctattgagctacacaagagtcctccggcccctgaatgcggctaatcctaaccacggagcaggcggtcgcgaaccagtgactggcttgtcgtaacgcgcaagtctgtggcggaaccgactactttgggtgtccgtgtttcctgttatttttatcatggctgcttatggtgacaatcagagattgttatcataaagcgaattggattggccatccggtgagtgttgtgtcaggtatacaactgtttgttggaaccactgtgttagctttacttctcatttaaccaattaatcaaaaacaatacgaggataaaacaacaatactaca

SEQ ID NO: 20040 - DNA, 747 bp, synthetic construct
  source 1..747: mol_type = other DNA
ttaaaacagctctggggttgtacccaccccagaggcccacgtggcggctagcactccggtattacggtacccttgtgcgcctgttttatactcccctcccgcaacttagaagcacgaaaccaagttcaatagaagggggtacaaaccagtaccactacgaacaagcacttctgtttccccggtgacattgcatagactgctcacgcggttgaaagtgatcgatccgttacccgcttgtgtacttcgaaaagcctagtatcgccttggaatcttcgacgcgttgcgctcagcacccgaccccggggtgtagcttaggctgatgagtctggacattcctcaccggtgacggtggtccaggctgcgttggcggcctacctatggctaacgccataggacgctagatgtgaacaaggtgtgaagagcctattgagctacataagagtcctccggcccctgaatgcggctaatcctaaccacggagcaggcggtcgcgaaccagtgactggcttgtcgtaacgcgcaagtctgtggcggaaccgactactttgggtgtccgtgtttcctgttatttttatcatggctgcttatggtgacaatcagagattgttatcataaagcgaattggattggccatccggtgagtgttgtgtcaggtatacaactgtttgttggaaccactgtgttagctttacttctcatttaaccaattaatcaaaaacaatacgagggtaaaacaacaatactaca

SEQ ID NO: 20041 - DNA, 747 bp, synthetic construct
  source 1..747: mol_type = other DNA
ttaaaacagctctggggttgtacccaccccagaggcccacgtggcggctagcactccggtattacggtacccttgtgcgcctgttttatactcccctcccgcaacttagaagcacgaaaccaagttcaatagaagggggtacaaaccagtaccactacgaacaagcacttctgtttccccggtgacattacatagactgctcacgcggttgaaagtgatcgacccgttacccgcttgtgtacttcgaaaagcctagtatcgccttggaatcctcgacgcgttgcgctcagcacccgaccccggggtgtagcttaggctgatgagtctggacattcctcaccggtgacggtggtccaggctgcgttggcggcctacctatggctaacgccataggacgctagatgtgaacaaggtgtgaagagcctattgagctacataagagtcctccggcccctgaatgcggctaatcctaaccacggagcaggcggtcgcgaaccagtgactggcttgtcgtaacgcgcaagtctgtggcggaaccgactactttgggtgtccgtgtttcctgttatttttatcatggctgcttatggtgacaatcagagattgttatcataaagcgaattggattggccatccggtgagtgttgtgtcaggtatacaactgtttgttggaaccactgtgttggctttacttctcatttgaccaattaatcaaaaacaatacgaggataaaacaacaatactaca

SEQ ID NO: 20042 - DNA, 747 bp, synthetic construct
  source 1..747: mol_type = other DNA
ttaaaacagctctggggttgtacccaccccagaggcccacgtggcggccagcactccggtattacggtacccttgtgcgcctgttttatactcccctcccgcaacttagaagcacgaaaccaagttcaatagaagggggtacaaaccagtaccactacgaacaagcacttctgtttccccggtgacattgcatagactgctcacgcggtcaaaagtgatcgatccgttacccgcttgtgtacttcgaaaagcctagtatcgccttggaatcttcgacgcgttgcgctcagcacccgaccccggggtgtagcttaggctgatgagtctggacattcctcaccggtgacggtggtccaggctgcgttggcggcctacctatggctaacgccataggacgctagatgtgaacaaggtgtgaagagcctattgagctacataagagtcctccggcccctgaatgcggctaatcctaaccacggagcaggcggtcgcgaaccagcgactggcttgtcgtaacgcgcaagtctgtggcggaaccgactactttgggtgtccgtgtttcctgttattcttatcatggctgcttatggtgacaatcagagattgttatcataaagcgaattggattggccatccggtgagtgtagtgtcaagtatacaactgtttgttggaaccactgtgttagtattacttctcatttaaccaattaaacaaaaacaatacgaggataaaacaacaacactaca

SEQ ID NO: 20043 - DNA, 747 bp, synthetic construct
  source 1..747: mol_type = other DNA
ttaaaacagctctggggttgttcccaccccagaggcccacgtggcggctagtactccggtatcacggtacccttgtacgcctgttttatactcccttcccccgtaacttagaagaaacaaacaaagttcaatagaagggggtacaaaccagtaccaccacgaacaagcacttctgtctccccggtgacgttgtatagactgtacccacggtcgaaaacgattgatccgttatccgcttttgtacttcgagaagcctagtatcatcttggaatcttcgatgcgttgcgctcagcactcaatcccagagtgtagcttaggtcgatgagtctggacgttcctcaccggcgacggtggtccaggctgcgttggcggcctacctgtggcccaaagccacaggacgctagtcgtgaacaaggtgtgaagagcctattgagctacaaaagagtcctccggcccctgaatgcggctaatcctaaccacggagcaagggtgcgtgagccaacacataccttgtcgtaacgcgtaagttcgtggcggaaccgactactttgggtgtccgtgtttccttttattcttgtattggctgcttatggtgacaatcatagattgttatcataaagcgacttggattggccatccagtggaagtgaaatactttgtctacctgtctgttggttttactccatttgactaattcacttacaagcttattgctataatttttattgactaaacaacaataccaca

SEQ ID NO: 20044 - DNA, 747 bp, synthetic construct
  source 1..747: mol_type = other DNA
ttaaaacagctctggggttgtacccaccccagaggcccacgtggcggctagcactccggtattacggtacccttgtgcgcctgttttatactcccctcccgcaacttagaagcacgaacccaagttcaatagaaggtggtacaaaccagtaccactacgaacaagcacttctgtttccccggtgacattgcatagactgctcacgcggttgaaagtgatcgatccgttacccgcttgtgtacttcgaaaagcctagtatcgccttggaatcttcggcgcgttgcgctcagcacccgaccccggggtgtagcttaggctgatgagtctggacattcctcaccggagacggtggtccaggctgcgttggcggcctacctatggctaacgccataggacgctagatgtgaacaaggtgtgaagagcctattgagctacacaagagtcctccggcccctgaatgcggctaatcctaaccacggagcaggcggtcgcgaaccagtgactggcttgtcgtaacgcgcaagtctgtggcggaaccgactactttgggtgtccgtgtttcctgttatttttatcatggctgcttatggtgacaatcagagattgttatcataaagcgaattggattggccatccggtgagtgttgtgtcaggtatacaactgtttgttggaaccactgtgttagctttacttctcatttaaccaattaatcaaaaacaatacgaggataaaacaacaatattaca

SEQ ID NO: 20045 - DNA, 747 bp, synthetic construct
  source 1..747: mol_type = other DNA
ttaaaacagctctggggttgtacccaccccagaggcccacgtggcggctagcactccggtatcacggtacccttgtgcgcctgttttatattccccccccgcaacttagaagcacgaaaccaagttcaatagaagggggtacaaaccagtaccaccacgaacaagcacttctgtttccccggtgacattgcatagactgctcacgcggttgaaagtgatcgatccgttacccgcttgtgtacttcgaaaagcctagtattgccttggaatcttcgacgcgttgcgctcagcacccgaccccggggtgtagcttaggctgatgagtctggacattcctcaccggtgacggtggtccaggctgcgttggcggcctacctatggctaatgccataggacgctagatgtgaacaaggtgtgaagagcctattgagctacataagagtcctccggcccctgaatgcggctaatcctaaccacggagcaggcggtcgcaaaccagtgactagcttgtcgtaacgcgcaagtctgtggcggaaccgactactttgggtgtccgtgtttcctgttatttttattatggctgcttatggtgacaatcagagattgttatcataaagcgaattggattggccatccggtgagtgttgtgtcaggtatacaactgtttgttggaaccactgtgttagtttaacctctctttcaaccaattagtcaaaaacaatacgaagatagaacaacaatactaca

SEQ ID NO: 20046 - DNA, 745 bp, synthetic construct; identical to SEQ ID NO: 1104
  source 1..745: mol_type = other DNA

SEQ ID NO: 20047 - DNA, 747 bp, synthetic construct
  source 1..747: mol_type = other DNA
ttaaaacagctctggggttgtacccaccccagaggcccacgtggcggctagcactccggtattacggtacccttgtgcgcctgttttatactcccctcccgcaacttagaagcacgaaaccaagttcaatagaagggggtacaaaccagtaccactacgaacaagcacttctgtttccccggtgacattgcatagactgctcacgcggttgaaagtgatcgatccgttacccgcttgtgtacttcgaaaagcctagtatcgccttggaatcttcgacgcgttgcgctcagcacccgaccccggggtgtagcttaggctgatgagtctggacattcctcaccggtgacggtggtccaggctgcgttggcggcctacctatggctaacgccataggacgctagatgtgaacaaggtgtgaagagcctattgagctacataagagtcctccggcccctgaatgcggctaatcctaaccacggagcaggcggtcgcgaaccagtgactggcttgtcgtaacgcgcaagtctgtggcggaaccgactactttgggtgtccgtgtttcctgttatttttatcatggctgcttatggtgacaatcagagattgttatcataaagcgaattggattggccatccggtgagtgttgtgtcaggtatacaactgtttgttggaaccactgtgttagctttacttctcatttaaccaattaatcaaaaacaatacgaggataaaataacaatactaca

SEQ ID NO: 20048 - DNA, 747 bp, synthetic construct
  source 1..747: mol_type = other DNA
tttaaacagctctggggttgtacccaccccagaggcccacgtggcggctagcactccggtattacggtacccttgtgcgcctgttttatactcccctcccgtaacttagaagcacgaaaccaagttcaatagaagggggtacaaaccagtaccactacgaacaagcacttctgtttccccggtgacatcgcatagactgctcacgcggttgaaagtgatcgatccgttacccgcttgtgtacttcgaaaagcctagtatcgccttggaatcttcgacgcgttgcgctcagcacccgaccccggggtgtagcttaggctgatgagtctggacattcctcaccggtgacggtggtccaggctgcgttggcggcctacctatggctaacgccataggacgctagatgtgaacaaggtgtgaagagcctattgagctacataagagtcctccggcccctgaatgcggctaatcctaaccacggagcaggcggtcgcgaaccagtgactggcttgtcgtaacgcgcaagtctgtggcggaaccgactactttgggtgtccgtgtttcctgttatttttatcatggctgcttatggtgacaatcagagattgttatcataaagcgaattggattggccatccggtgagtgttgtgtcaggtatacaactgtttgttggaaccactgtgttagttttacttctcatttaaccaattaatcaaaaacaatacgaggataaaacaacaatactaca

SEQ ID NO: 20049 - DNA, 747 bp, synthetic construct
  source 1..747: mol_type = other DNA
ttaaaacagctctggggttgtacccaccccagaggcccacgtggcggctagcactccggtattacggtacccttgtgcgcctgttttatactcccctcccgtaacttagaagcacgaaaccaagttcaatagaagggggtacaaaccagtaccactacgaacaagcacttctgtttccccggtgacattgcatagactgctcacgcggttgaaagtgatcgatccgttacccgcttgtgtacttcgaaaagcctagtatcgccttggaatcttcgacgcgttgcgctcagcacccgaccccggggtgtagcttaggctgatgagtctggacattcctcaccggtgacggtggtccaggctgcgttggcggcctacctatggctaacgccataggacgctagatgtgaacaaggtgtgaagagcctattgagctacataagagtcctccggcccctgaatgcggctaatcctaaccacggagcaggcggtcgcgaaccagtgactggcttgtcgtaacgcgcaagtctgtggcggaaccgactactttgggtgtccgtgtttcctgttatttttatcatggctgcttatggtgacaatcagagattgttatcataaagcgaattggattggccatccggtgagtgttgtgtcaggtatacaactgtttgttggaaccactgtgttagttttacttctcatttaaccaattaatcaaaaacaatacgaggataaaacaacaatactaca

SEQ ID NO: 20050 - DNA, 747 bp, synthetic construct
  source 1..747: mol_type = other DNA
ttaaaacagctctggggttgtacccaccccagaggcccacgtggcggctagcactccggtattacggtacccttgtgcgcctgttttatactcccctcccgcaacttagaagcacgaaaccaagttcaatagaagggggtacaaaccagtaccactacgaacaagcacttctgtttccccggtgacatcgcatagactgctcacgcggttgaaagcgatcgatccgttacccgcttgtgtacttcgagaagcctagtatcgccttggaatcttcgacgcgttgcgctcagcacccgaccccggggtgtagcttaggctgatgagtctggacattcctcaccggtgacggtggtccaggctgcgttggcggcctacctatggctaacgccataggacgctagatgtgaacaaggtgtgaagagcctattgagctacacaagagtcctccggcccctgaatgcggctaatcctaaccacggagcaggcggtcgcgaaccagtgactggcttgtcgtaacgcgcaagtctgtggcggaaccgactactttgggtgtccgtgtttcctgttatttttatcatggctgcttatggtgacaatcagagattgttatcataaagcgaattggattggccatccggtgagtgttgtgtcaggtatacaactgtttgttggaaccactgtgttggttttacttctcatttaaccaattaatcaaaaacaatacgaggataaaacatcaatactaca

SEQ ID NO: 20051 - DNA, 747 bp, synthetic construct
  source 1..747: mol_type = other DNA
ttaaaacagctttggggttgtacccaccccagaggcccacgtggcggctagcactccggtattacggtacccttgtgcgcctgttttacactcccctcccgtaacttagaagcacgaaaccaagttcaatagaagggggtacaagccagtaccactacgaacaagcacttctgtttccccggtgacatcgcatagactgctcacgcggttgaaagtgatcgatccgttacccgcttgtgtacttcgaaaagcctagtatcgccttggaatcttcgacgcgttgcgctcagcacccgaccccggggtgtagcttaggctgatgagtctggacattcctcaccggtgacggtggtccaggctgcgttggcggcctacctatggctaacgccataggacgctagatgtgcacaaggtgtgaagagcctattgagctacataagagtcctccggcccctgaatgcggctaatcctaaccacggagcaggcggtcgcgaaccagtgactggcttgtcgtaacgcgcaagtctgtggcggaaccgactactttgggtgtccgtgtttcctgttatttttatcatggctgcttatggtgacaatcagagattgttatcataaagcgaattggattggccatccggtgagtgttgtgtcaggtatacaactgtttgttggaaccactgtgttagttttacttctcatttaaccaattaatcaaaaacaatacgaggataaaacatcaataatata

SEQ ID NO: 20052 - DNA, 747 bp, synthetic construct
  source 1..747: mol_type = other DNA
ttaaaacagctctggggttgtacccaccccagaggcccacgtggcggctagcactccggtattacggtacccttgtgcgcctgttttacactcccctcccgtaacttagaagtacgaaaccaagttcaatagaagggggtacaagccagtaccactacgaacaagcacttctgtttccccggtgacatcgcatagactgctcacgcggttgaaagtgatcgatccgttacccgcttgtgtacttcgaaaagcctagtatcgccttggaatcttcgacgcgttgcgctcagcacccgaccccggggtgtagcttaggctgatgagtctggacattcctcaccggtgacggtggtccaggctgcgttggcggcctacctatggctaacgccataggacgctagatgtgcacaaggtgtgaagagcctattgagctacataagagtcctccggcccctgaatgcggctaatcctaaccacggagcaggcggtcgcgaaccagtgactggcttgtcgtaacgcgcaagtctgtggcggaaccgactactttgggtgtccgtgtttcctgttatttttatcatggctgcttatggtgacaatcagagattgttatcataaagcgaattggattggccatccggtgagtgttgtgtcaggtatacaactgtttgttggaaccactgtgttagttttacttctcatttaaccaattaatcaaaaacaatacgaggataaaacatcaatactaca

SEQ ID NO: 20053 - DNA, 747 bp, synthetic construct
  source 1..747: mol_type = other DNA
ttaaaacagctctggggttgtacccaccccagaggcccacgtggcggctagcactccggtattacggtacccttgtgcgcctgttttatactcccctcccgcaacttagaagcacgaaaccaagttcaatagaagggggtacaaaccagtaccactacgaacaagcactcctgtttccccggtgacattgcatagactgctcacgcggttgaaagtgatcgatccgttacccgcttgtgtacttcgaaaagcctagtatcgccttggaatcttcgacgcgttgcgctcagcacccgaccccggggtgtagcttaggctgatgagtctggacattcctcaccggtgacggtggtccaggctgcgttggcggcctacctatggctaacgccataggacgttagatgtgaacaaggtgtgaagagcctattgagctacataagagtcctccggcccctgaatgcggctaatcctaaccacggagcaggcggtcgcgaaccagtgactggcttgtcgtaacgcgcaagtctgtggcggaaccgactactttgggtgtccgtgtttcctgttatttttatcatggctgcttatggtgacaatcagagattgttatcataaagcgaattggattggccatccggtgagtgttgtgtcaggtatacaactgcttgttggaaccactgtgttagctttacttctcatttaaccaattaatcaaaaacaatacgaggataaaacaacaatactaca

SEQ ID NO: 20054 - DNA, 747 bp, synthetic construct
  source 1..747: mol_type = other DNA
ttaaaacagctctggggttgtacccaccccagaggcccacgtggcggctagcactccggtattacggtacccttgtgcgcctgttttatactcccctcccgcaacttagaagcacaaaaccaagttcaatagaagggggtacaaaccagtaccactatgaacaagcacttctgtttccccggtgacattgcatagactgctcacgcggttgaaagcgatcgatccgttacccgcttgtgtacttcgagaagcctagtatcgccttggaatcttcgacgcgttgcgctcagcacccgaccccggggtgtagcttaggctgatgagtctggacattcctcaccggtgacggtggtccaggctgcgttggcggcctacctatggctaacgccatgggacgctagttgtgaacaaggtgtgaagagcctattgagctacataagagtcctccggcccctgaatgcggctaatcctaaccacggagcaggcggtcgcgaaccagtgactggcttgtcgtaacgcgcaagtctgtggcggaaccgactactttgggtgtccgtgtttcctgttatttttatcatggctgcttatggtgacaatcagagattgttatcataaagcgaattggattggccatccggtgagtgttgtgacaggtatataattgtttgttggaaccactgtgttagctttacttctcatttaaccaattaatcaaaaacaatacgaggataaaacaacaatactaca

SEQ ID NO: 20055 - DNA, 744 bp, synthetic construct
  source 1..744: mol_type = other DNA
tttaaaacagcctgtgggttgttcccacccacagggcccattgggcgccagcacactggtatttcggtacctttgtgcgcctgttttatccacccctcccccaaacgtaacttagaagctcaacacacatggtcagtaggtggcccagtaagccaaccgggtcttgaccaagcacttctgttaccccggaccgagtatcaataggctgctcacgcggctgaaggagaaagtgttcgttatccggccaattacttcgagaaacctagtaccaccatggaagttgcgcagcgtttcgctccgcacgaccccagtgtagatcaggccgatgagtcaccgcactcctcacgggcgaccgtggcggtggctgcgctggcggcctgcccatggggcaacccatgggacgcttcaatgctgacatggtgcgaagagtctattgagctaattggtaatcctccggcccctgaatgcggctaatcctaactgcggagcagatatccacacgccagtgggcagtctgtcgtaacgggcaactctgcagcggaaccgactactttgggtgtccgtgtttctctttattctttattggctgcttatggtgacaattgaaagattgttgccatatagctattggattggccatccagtgacaaacagagcgatcgtttatctatttgttggtttcataccattaaattttaaagttttgaaaactatcaacttgatcatactacttaatacagcaaa

SEQ ID NO: 20056 - DNA, 747 bp, synthetic construct
  source 1..747: mol_type = other DNA
ttaaaacagctctggggttgtacccaccccagaggcccacgtggcggctagcactccggtattacggtacccttgtgcgcctgttttatactcccctcccgcaacttagaagcacgaaaccaagttcaatagaagggggtacaaaccagtaccactacgaacaagcacttctgtttccccggtgacattgcatagactgctcacgcggttgaaagtgatcgatccgttacccgcttgtgtacttcgaaaagcctagtatcgccttggaatcttcgacgcgttgcgctcagcacccgaccccggggtgtagcttaggctgatgagtctggacattcctcaccggtgacggtggtccaggctgcgttggcggcctacctatggctaacgccataggacgttagatgtgaacaaggtgtgaagagcctattgagctacataagagtcctccggcccctgaatgcggctaatcctaaccacagagcaggcggtcgcgaaccagtgactggcttgtcgtaacgcgcaagtctgtggcggaaccgactactttgggtgtccgtgtttcctgttatttttatcatggctgcttatggtgacaatcagagattgttatcataaagcgaattggattggccatccggtgagtgttgtgtcaggtatacaactgtttgttggaaccactgtgttagctttacttctcatttaaccaattaatcaaaaacaatacgaggataaaacaacaatactaca

SEQ ID NO: 20057 - DNA, 742 bp, synthetic construct
  source 1..742: mol_type = other DNA
ttaaaacagcctgtgggttgttcccacccacagggcccaatgggcgctagcactctggtattacggtacccttgtgcgcctgttttattttcccttccccgactgaaacttagaagtaatacacaccgatcgacagtaagcatggcacaccagccatgttttgatcaagcacttctgtttccccggaccgagtatcaatagactgctcacgcggttgaaggagaaagtgttcgttaaccggctaactacttcgagaagcctagtaacgccatgaaagttgcggagtgtttcgctcagcacttccccagtgtagatcaggtcgatgagtcaccgcgttccccacgggcgaccgtggcggtggctgcgttggcggcctgcctgtggggcaacccacaggacgctctaatacggacatggtgcgaagagcctattgagctagtcagtagtcctccggcccctgaatgcggctaatcctaactgtggagcacatgcccctaacccaaggggtggtgtgtcgtaatgggtaactccgcagcggaaccgactactttgggtgtccgtgtttccttttattcttactttggctgcttatggtgacaattgagagattgttaccatatagttattggattggccacccggtgagtaatagagcaatcatttatttatttattggctacatacctttgaattttaaagccttcaacacactcaactacattttaaaactcaattcaataaa

SEQ ID NO: 20058 - DNA, 747 bp, synthetic construct
  source 1..747: mol_type = other DNA
ttaaaacagctctggggttgtacccaccccagaggcccacgtggcggctagcactccggtattacggtacccttgtgcgcctgttttatactcccctcccgcaacttagaagcacgaaaccaagttcaatagaagggggtacaaaccagtaccactacgaacaagcacttctgtttccccggtgacattgcatagactgctcacgcggttgaaagtgatcgatccgttacccgcttgtgtacttcgaaaagcctagtatcgccttggaatcttcgacgcgttgcgctcagcacccgaccccggggtgtagcttaggctgatgagtctggacattcctcaccggtgacggtggtccaggctgcgttggcggcctacctatggctaacgccataggacgttagatgtgaacaaggtgtgaagagcctattgagctacataagagtcctccggcccctgaatgcggctaattctaaccattgagcaggcagctgcaacccagcagccagcctgtcgtaacgcgcaagtcaatggcgaaaccgactactttgggtgtccgtgtttcctgttatttttatcatggctgcttatggtgacaatcagagattgttatcataaagcgaattggattggccatccggtgagtgttgtgtcaggtatacaactgtttgttggaaccactgtgttagctttacttctcatttaaccaattaatcaaaaacaatacgaggataaaacaacaatactaca

SEQ ID NO: 20059 - DNA, 747 bp, synthetic construct
  source 1..747: mol_type = other DNA
ttaaaacagctctggggttgtacccaccccagaggcccacgtggcggctagcactccggtattacggtacccttgtgcgcctgttttatactcccctcccgcaacttagaagcacgaaaccaagttcaatagaagggggtacaaaccagtaccaccacgaacaagtacttctgtttccccggtgacattgcatagactgctcacgcggttgaaagtgatcgatccgttacccgcttgtgtacttcgaaaagcctagtatcgccttggaatcttcgacgcgttgcgctcagcacccgaccccggggtgtagcttaggctgatgagtctggacattcctcaccggtgacggtggtccaggctgcgttggcggcctacctatggctagcgccataggacgctagatgtgaacaaggtgtgaagagcctattgagctacataagaatcctccggcccctgaatgcggctaatcctaaccacggagcaggcggtcgcgaaccagtgactggcttgtcgtaatgcgcaagtctgtggcggaaccgactactttgggtgtccgtgtttcctgttatttttatcatggctgcttatggtgacaatcagagattgttatcataaagcgaattggattggccatctggtgagtgttgtgtcgggtatacaactgtttgttggaaccactgtgttagctttacttctcatttaaccaattaatcaaaaacaatacgaggataaaacaacaatactaca

SEQ ID NO: 20060 - DNA, 745 bp, synthetic construct; identical to SEQ ID NO: 1105
  source 1..745: mol_type = other DNA

SEQ ID NO: 20061 - DNA, 745 bp, synthetic construct
  source 1..745: mol_type = other DNA
ttaaaacagcctgtgggttgttcccaccccagaggcccacgcggcggctagtactctggtgctgcggtacctttgtacgcctgttttatacccccgtccccgcaatttagaagcaagaaaacaaagttcaatagtaggtggtgcaatccagcatcgctatgaacaagcacttctgttgccccggtgaggttgcatagactgttcccacggtcgaaagtgaccaatccgttacccgcttttgtacttcgagaagcctagtatcaccttggaatcttcgacgcgttgcgttccgcactcaaccccagagtgtagcttaggtcgatgagtctgggcggaccccaccggcgacggtggcccaggctgcgttggcggcctacctgtggtccaaagccacaggacgctagttgtgaacaaggtgtgaagagcctattgagctacaaaagagtcctccggcccctgaatgcggctaatcctaaccacggagcaggtggtcgcaaaccagtgattaacctgtcgtaatgcgcaagtctgtggcggaaccgactactttgggtgtccgtgtttctctttattttactatggctgcttatggtgacaatcgaggattgttatcataaagcgaattggattggccatccggtgaaagtgaaatacattatctattcaattgttgaattcatccagaacacacccgcaacactacatctgattaaactcgttttgataaccagagaacattaccaca

SEQ ID NO: 20062 - DNA, 746 bp, synthetic construct
  source 1..746: mol_type = other DNA
ttaaaacagctctggggttgtacccactccagaggcccacgtggcggctagcactccggtattacggtacccttgtgcgcctgttttatacccccctcccgcaacttagaagcacgaaaccaagttcaatagaagggggtacaaaccagtacctctacgaacaagcacttctgtttccccggtgacattgcatagactgctcacgcggttgaaagcgatcgatccgttacccgcttgtgtacttcgaaaagcctagtatcgccttggaatcttcgacgcgttgcgctcagcacccgaccccggggtgtagcttaggctgatgagtctggacattcctcaccggcgacggtggtccaggctgcgttggcggcctacctatggctaacgccataggacgctagatgtgaacaaggtgtgaagagcctattgagctacataagagtcctccggcccctgaatgcggctaatcctaaccacggagcaggcggtcgcgaaccagcgactggcttgtcgtaacgcgtaagtctgtggcggaaccgactactttgggtgtccgtgtttcctgttatttttattatggctgcttatggtgacaatcagagattgttatcataaagcgaattggattggccatccggtgagtgttgtgtcaggtatacaactgtttgttggaaccactgtgttggctttacttctcatttaaccaattaatcaaaacaattcgaggataaaacaacaattccaca

SEQ ID NO: 20063 - DNA, 746 bp, synthetic construct
  source 1..746: mol_type = other DNA
ttaaaacagctctggggttgtacccactccagaggcccacgtggcggctagcactccggtattacggtacccttgtgcgcctgttttatacccccctcccgcaacttagaagcacgaaaccaagttcaatagaagggggtacaaaccagtacctctacgaacaagcacttctgtttccccggtgacattgcatagactgctcacgcggttgaaagtgatcgatccgttacccgcttgtgtacttcgaaaagcctagtatcgccttggaatcttcgacgcgttgcgctcagcacccgaccccggggtgtagcttaggctgatgagtctggacattcctcaccggcgacggtggtccaggctgcgttggcggcctacctatggctaacgccataggacgctagatgtgaacaaggtgtgaagagcctattgagctacataagagtcctccggcccctgaatgcggctaatcctaaccacggagcaggcggtcgcgaaccagcgactggcttgtcgtaacgcgtaagtctgtggcggaaccgactactttgggtgtccgtgtttcctgttatttttattatggctgcttatggtgacaatcaaagattgttatcataaagcgaattggattggccatccggtgagtgttgtgtcaggtatacaactgtttgttggaaccactgtgttggctttacttcttatttaaccaattaatcaaaacaattcgaggataaaacaacaattccaca

SEQ ID NO: 20064 - DNA, 746 bp, synthetic construct
  source 1..746: mol_type = other DNA
ttaaaacagctctggggttgtacccactccagaggcccacgtggcggctagcactccggtattacggtacccttgtgcgcctgttttatacccccctcccgcaacttagaagcacgaaaccaagttcaatagaagggggtacaaaccagtacctctacgaacaagcacttctgtttccccggtgacattgcatagactgctcacgcggttgaaagtgatcgatccgttatccgcttatgtacttcgaaaagcctagtatcgccttggaatcttcgacgcgttgcgctcagcacccgaccccggggtgtagcttaggctgatgagtctggacattcctcaccggcgacggtggtccaggctgcgttggcggcctacctatggctaacgccataggacgctagatgtgaacaaggtgtgaagagcctattgagctacataagagtcctccggcccctgaatgcggctaatcctaaccacggagcaggcggtcgcgaaccagcgactggcttgtcgtaacgcgcaagtctgtggcggaaccgactactttgggtgtccgtgtttcctgttatttttatcaaggccgcttatggtgacaatcaaagattgttatcataaagcgaattggattggccatccggtgagtgttgtgtcaggtatacaactgtttgttggaaccactgtgttggctttacttctcatttaaccaattaatcaaaacaattcgaggataaaacaacaattccaca

SEQ ID NO: 20065 - DNA, 746 bp, synthetic construct
  source 1..746: mol_type = other DNA
ttaaaacagctctggggttgtacccactccagaggcccacgtggcggctagcactccggtattacggtacccttgtgcgcctgttttatacccccctcccgcaacttagaagcacgaaaccaagttcaatagaagggggtacaaaccagtacctctacgaacaagcacttctgtttccccggtgacattgcatagactgctcacgcggttgaaagcgatcgatccgttacccgcttgtgtacttcgaaaagcctagtatcgccttggaatcttcgacgcgttgcgctcagcacccgaccccggggtgtagcttaggctgatgagtctggacattcctcaccggcgacggtggtccaggctgcgttggcggcctacctatggctaacgccataggacgctagatgtgaacaaggtgtgaagagcctattgagctacataagagtcctccggcccctgaatgcggctaatcctaaccacggagcaggcggtcgcgaaccagcgactggcttgtcgtaacgcgtaagtctgtggcggaaccgactactttgggtgtccgtgtttcctgttatttttatcatggctgcttatggtgacaatcagagattgttatcataaagcgaattggattggccatccggtgagtgttgtgtcaggtatacaactgtttgttggaaccactgtgttggctttacttctcatttaaccaattaatcaaaacaattcgaggataaaacaacaattccaca

SEQ ID NO: 20066 - DNA, 746 bp, synthetic construct
  source 1..746: mol_type = other DNA
ttaaaacagctctggggttgtacccactccagaggcccacgtggcggctagcactccggtattacggtacccttgtgcgcctgttttatacccccctcccgcaacttagaagcacgaaaccaagttcaatagaagggggtacaaaccagtacctctacgaacaagcacttctgtttccccggtgacattgcatagactgctcacgcggttgaaagtgatcgatccgttatccgcttatgtacttcgaaaagcctagtatcgccttggaatcttcgacgcgttgcgctcagcacccgaccccggggtgtagcttaggctgatgagtctggacattcctcaccggcgacggtggtccaggctgcgttggcggcctacctatggctaacgccataggacgctagatgtgaacaaggtgtgaagagcctattgagctacataagagtcctccggcccctgaatgcggctaatcctaaccacggagcaggcggtcgcgaaccagcgactggcttgtcgtaacgcgtaagtctgtggcggaaccgactactttgggtgtccgtgtttcctgttatttttatcatggctgcttatggtgacaatcaaagattgttatcataaagcgaattggattggccatccggtgagtgttgtgtcaggtatacaactgtttgttggaaccactgtgttggctttacttcttatttaaccaattaatcaaaaccattcgaggataaaacaacaattccaca

SEQ ID NO: 20067 - DNA, 746 bp, synthetic construct
  source 1..746: mol_type = other DNA
ttaaaacagctctggggttgtacccactccagaggcccacgtggcggctagcactccggtattacggtacccttgtgcgcctgttttatactcccctcccgcaacttagaagcacgaaaccaagttcaatagaagggggtacaaaccagtaccaccacgaacaagcacttctgtttccccggtgacattgcatagactgctcacgcggttgaaagcgatcgatccgttacccgcttgtgtacttcgaaaagcctagtatcgccttggaatcttcgacgcgttgcgctcagcacccgaccccggggtgtagcttaggctgatgagtctggacattcctcaccggcgacggtggtccaggctgcgttggcggcctacctatggctaacgccataggacgctagatgtgaacaaggtgtgaagagcctattgagctacataagagtcctccggcccctgaatgcggctaatcctaaccacggagcaggcggtcgcgaaccagcgactggcttgtcgtaacgcgtaagtctgtggcggaaccgactactttgggtgtccgtgtttcctgttatttttatcaaggccgcttatggtgacaatcagagattgttatcataaagcgaattggattggccatccggtgagtgttgtgtcaggtatacaactgtttgttggaaccactgtgttggctttacttctcatttaaccaattaatcaaaacaattcgaggataaaacaacaattccaca

SEQ ID NO: 20068 - DNA, 746 bp, synthetic construct
  source 1..746: mol_type = other DNA
ttaaaacagctctggggttgtacccactccagaggcccacgtggcggctagcactccggtattacggtacctttgtgcgcctgttttatactcccctcccgcaacttagaagcacgaaaccaagttcaatagaagggggtacaaaccagtacctctacgaacaagcacttctgtttccccggtgacattgcatagactgctcacgcggttgaaagcgatcgatccgttacccgcttgtgtacttcgaaaagcctagtatcgccttggaatcttcgacgcgttgcgctcagcacccgaccccggggtgtagcttaggctgatgagtctggacattcctcaccggcgacggtggtccaggctgcgttggcggcctacctatggctaacgccataggacgctagatgtgaacaaggtgtgaagagcctattgagctacataagagtcctccggcccctgaatgcggctaatcctaaccacggagcaggcggtcgcgaaccagcgactggcttgtcgtaacgcgtaagtctgtggcggaaccgactactttgggtgtccgtgtttcctgttatttttatcatggccgcttatggtgacaatcagagattgttatcataaagcgaattggattggccatccggtgagtgttgtgtcaggtatacaactgtttgttggaaccactgtgttggctttacttctcatttaaccaattaatcaaaacaattcgaggataaaacaacaattccaca

SEQ ID NO: 20069 - DNA, 746 bp, synthetic construct
  source 1..746: mol_type = other DNA
ttaaaacagctctggggttgtacccactccagaggcccacgtggcggctagcactccggtattacggtacccttgtgcgcctgttttatactcccctcccgcaacttagaagcacgaaaccaagttcaatagaagggggtacaaaccagtacctccacgaacaagcacttctgtttccccggtgacattgcatagactgctcacgcggttgaaagcgatcgatccgttacccgcttgtgtacttcgaaaagcctagtatcgccttggaatcttcgacgcgttgcgctcagcacccgaccccggggtgtagcttaggctgatgagtctggacattcctcaccggcgacggtggtccaggctgcgttggcggcctacctatggctaacgccataggacgctagatgtgaacaaggtgtgaagagcctattgagctacataagagtcctccggcccctgaatgcggctaatcctaaccacggagcaggcggtcgcgaaccagcgactggcttgtcgtaacgcgtaagtctgtggcggaaccgactactttgggtgtccgtgtttcctgttatttttatcatggccgcttatggtgacaatcagagattgttatcataaagcgaattggattggccatccggtgagtgttgtgtcaggtatacaactgtttgttggaaccactgtgttggctttacttctcatttaaccaattaatcaaaacaattcgaggataaaaccacaattccaca

SEQ ID NO: 20070 - DNA, 746 bp, synthetic construct
  source 1..746: mol_type = other DNA
ttaaaacagctctggggttgtacccactccagaggcccacgtggcggctagcactccggtattacggtacccttgtgcgcctgttttatacccccctcccgcaacttagaagcacgaaaccaagttcaatagaagggggtacaaaccagtacctcgacgaacaagcacttctgtttccccggtgacattgcatagactgctcacgcggttgaaagtgatcgatccgttacccgcttatgtacttcgaaaagcctagtatcgccttggaatcttcgacgcgttgcgctcagcacccgaccccggggtgtagcttaggctgatgagtctggacattcctcaccggcgacggtggtccaggctgcgttggcggcctacctatggctaacgccataggacgctagatgtgaacaaggtgtgaagagcctattgagctacataagagtcctccggcccctgaatgcggctaatcctaaccacggagcaggcggtcgcgaaccagcgactggcttgtcgtaacgcgtaagtctgtggcggaaccgactactttgggtgtccgtgtttcctgttatttttatcatggccgcttatggtgacaatcagagattgttatcataaagcgaattggattggccatccggtgagtgttgtgtcaggtatacaactgtttgttggaaccactgtgttggctttacttctcatttaaccaattaatcaaaacaattcgaggataaaaccacaattccaca

SEQ ID NO: 20071 - DNA, 746 bp, synthetic construct
  source 1..746: mol_type = other DNA
ttaaaacagctctggggttgtacccactccagaggcccacgtggcggctagcactccggtattacggtacccttgtgcgcctgttttatactcccctcccgcaacttagaagcacgaaaccaagttcaatagaagggggtacaaaccagtacctctacgaacaagcacttctgtttccccggtgacattgcatagactgctcacgcggttgaaagtgatcgatccgttacccgcttgtgtacttcgaaaagcctagtatcgccttggaatcttcgacgcgttgcgctcagcacccgaccccggggtgtagcttaggctgatgagtctggacattcctcaccggcgacggtggtccaggctgcgttggcggcctacctatggctaacgccataggacgctagatgtgaacaaggtgtgaagagcctattgagctacataagagtcctccggcccctgaatgcggctaatcctaaccacggagcaggcggtcgcgaaccagcgactggcttgtcgtaacgcgtaagtctgtggcggaaccgactactttgggtgtccgtgtttcctgttatttttatcatggctgcttatggtgacaatcagagattgttatcataaagcgaattggattggccatccggtgagtgttgtgtcaggtatacaactgtttgttggaaccactgtgttggctttacttctcatttaaccaattaatcaaaacaattcgaggataaaaccacaattccaca

SEQ ID NO: 20072 - DNA, 746 bp, synthetic construct
  source 1..746: mol_type = other DNA
ttaaaacagctctggggttgtacccactccagaggcccacgtggcggctagcactccggtattacggtacccttgtgcgcctgttttatactcccctcccgcaacttagaagcacgaaaccaagttcaatagaagggggtacaaaccagtacctctacgaacaagcacttctgtttccccggtgacattgcatagactgctcacgcggttgaaagtgatcgatccgttatccgcttatgtacttcgaaaagcctagtatcgccttggaatcttcgacgcgttgcgctcagcacccgaccccggggtgtagcttaggctgatgagtctggacattcctcaccggcgacggtggtccaggctgcgttggcggcctacctatggctaacgccataggacgctagatgtgaacaaggtgtgaagagcctattgagctacataagagtcctccggcccctgaatgcggctaatcctaaccacggagcaggcggtcgcgaaccagcgactggcttgtcgtaacgcgtaagtctgtggcggaaccgactactttgggtgtccgtgtttcctgttatttttatcaaggccgcttatggtgacaatcagagattgttatcataaagcgaattggattggccatccggtgagtgttgtgtcaggtatacaactgtttgttggaaccactgtgttagctttacttcttatttaaccaattaatcaaaacaattcgaggataaaaccacaattccaca

SEQ ID NO: 20073 - DNA, 746 bp, synthetic construct
  source 1..746: mol_type = other DNA
ttaaaacagctctggggttgtacccactccagaggcccacgtggcggctagcactccggtattacggtacccttgtgcgcctgttttatacccccctcccgcaacttagaagcacgaaaccaagttcaatagaagggggtacaaaccagtacctctacgaacaagcacttctgtttccccggtgacattgcatagactgctcacgcggttgaaagtgatcgatccgttacccgcttgtgtacttcgaaaagcctagtatcgccttggaatcttcgacgcgttgcgctcagcacccgaccccggggtgtagcttaggctgatgagtctggacattcctcaccggcgacggtggtccaggctgcgttggcggcctacctatggctaacgccataggacgctagatgtgaacaaggtgtgaagagcctattgagctacataagagtcctccggcccctgaatgcggctaatcctaaccacggagcaggcggtcgcgaaccagcgactggcttgtcgtaacgcgtaagtctgtggcggaaccgactactttgggtgtccgtgtttcctgttatttttatcaaggccgcttatggtgacaatcagagattgttatcataaagcgaattggattggccatccggtgagtgttgtgtcaggtatacaactgtttgttggaaccactgtgttagctttacttcttatttaaccaattaatcaaaacaattcgaggataaaaccacaattccaca

SEQ ID NO: 20074 - DNA, 746 bp, synthetic construct
  source 1..746: mol_type = other DNA
ttaaaacagctctggggttgtacccactccagaggcccacgtggcggctagcactccggtattacggtacccttgtgcgcctgttttatactcccctcccgcaacttagaagcacgaaaccaagttcaatagaagggggtacaaaccagtacctccacgaacaagcacttctgtttccccggtgacattgcatagactgctcacgcggttgaaagtgatcgatccgttacccgcttatgtacttcgaaaagcctagtatcgccttggaatcttcgacgcgttgcgctcagcacccgaccccggggtgtagcttaggctgatgagtctggacattcctcaccggcgacggtggtccaggctgcgttggcggcctacctatggctaacgccataggacgctagatgtgaacaaggtgtgaagagcctattgagctacataagagtcctccggcccctgaatgcggctaatcctaaccacggagcaggcggtcgcgaaccagcgactggcttgtcgtaacgcgtaagtctgtggcggaaccgactactttgggtgtccgtgtttcctgttatttttatcatggctgcttatggtgacaatcagagattgttatcataaagcgaattggattggccatccggtgagtgttgtgtcaggtatacaactgtttgttggaaccactgtgttggctttacttcttatttaaccaattaatcaaaacaatacgaggataaaacaacaataccaca

SEQ ID NO: 20075 - DNA, 746 bp, synthetic construct
  source 1..746: mol_type = other DNA
ttaaaacagctctggggttgtacccactccagaggcccacgtggcggctagcactccggtattacggtacccttgtgcgcctgttttatactcccctcccgcaacttagaagcacgaaaccaagttcaatagaagggggtacaaaccagtacctctacgaacaagcacttctgtttccccggtgacattgcatagactgctcacgcggttgaaagtgatcgatccgttacccgcttgtgtacttcgaaaagcctagtatcgccttggaatcttcgacgcgttgcgctcagcacccgaccccggggtgtagcttaggctgatgagtctggacattcctcaccggcgacggtggtccaggctgcgttggcggcctacctatggctaacgccataggacgctagatgtgaacaaggtgtgaagagcctattgagctacataagagtcctccggcccctgaatgcggctaatcctaaccacggagcaggcggtcgcgaaccagcgactggcttgtcgtaacgcgtaagtctgtggcggaaccgactactttgggtgtccgtgtttcctgttatttttatcatggccgcttatggtgacaatcaaagattgttatcataaagcgaattggattggccatccggtgagtgttgtgtcaggtatacaactgtttgttggaaccactgtgttggctttacttctcatttaaccaattaatcaaaacaattcgaggataaaacaacaattccaca

SEQ ID NO: 20076 - DNA, 746 bp, synthetic construct
  source 1..746: mol_type = other DNA
ttaaaacagctctggggttgtacccactccagaggcccacgtggcggctagcactccggtattacggtacccttgtgcgcctgttttatactcccctcccgcaacttagaagcacgaaaccaagttcaatagaagggggtacaaaccagtacctctacgaacaagcacttctgtttccccggtgacattgcatagactgctcacgcggttgaaagtgatcgatccgttatccgcttatgtacttcgaaaagcctagtatcgccttggaatcttcgacgcgttgcgctcagcacccgaccccggggtgtagcttaggctgatgagtctggacattcctcaccggcgacggtggtccaggctgcgttggcggcctacctatggctaacgccataggacgctagatgtgaacaaggtgtgaagagcctattgagctacataagagtcctccggcccctgaatgcggctaatcctaaccccggagcaggcggtcgcgaaccagcgacttgcttgtcgtaacgcgtaagtctgtggcggaaccgactactttgggtgtccgtgtttcctgttatttttatcaaggccgcttaaggtgacaatcagagattgttatcataaagcgaattggattggccatccggtgagtgttgtgtcaggtatacaactgtttgttggaaccactgtgttggctttacttctcatttaaccaattaatcaaaaccattcgaggataaaaccaccattccaca

SEQ ID NO: 20077 - DNA, 747 bp, synthetic construct
  source 1..747: mol_type = other DNA
ttaaaacagcctgtgggttgtacccaccccagaggcccacgtggcggctagcactccggtattacggtacccttgtgcgcctgttttatactcccctcccgcaacttagaagcacgaaaccaagttcaatagaagggggtacaaaccagtaccactacgaacaagcacttctgtttccccggtgacattgcatagactgctcacgcggttgaaagtgatcgatccgttacccgcttgtgtacttcgaaaagcctagtatcgccttggaatcttcgacgcgttgcgctcagcacccgaccccggggtgtagcttaggctgatgagtctggacattcctcaccggtgacggtggtccaggctgcgttggcggcctacctatggctaacgccataggacgttagatgtgaacaaggtgtgaagagcctattgagctacataagagtcctccggcccctgaatgcggctaatcctaaccacggagcaggcggtcgcgaaccagtgactggcttgtcgtaacgcgcaagtctgtggcggaaccgactactttgggtgtccgtgtttcctgttatttttatcatggctgcttatggtgacaatcagagattgttatcataaagcgaattggattggccatccggtgagtgttgtgtcaggtatacaactgtttgttggaaccactgtgttagctttacttctcatttaaccaattaatcaaaaacaatacgaggataaaacaacaatactaca

SEQ ID NO: 20078 - DNA, 740 bp, synthetic construct
  source 1..740: mol_type = other DNA
aaaacagctctggggttgcacccaccccagaggcccacgtggcggctagtactccggtattgcggtacccttgtacgcctgttttatactcccttcccgcaacttagacgcacaaaaccaagttcaatagaagggggtacaaaccagtaccaccacgaacaagcacttctgtttccccggtgatgttgtatagactgcttgcgtggttgaaagcgacggatccgttatccgcttatgtacttcgagaagcccagtaccacctcggaatcttcgatgcgttgcgctcagcactcaaccccagagtgtagcttaggctgatgagtctggacatccctcaccggtgacggtggtccaggctgcgttggcggcctacctatggctaacgccatgggacgctagttgtgaacaaggtgtgaagagcctattgagctacataagaatcctccggcccctgaatgcggctaatcccaaccacggggcaggtggtcacaaaccagtgattggcctgtcgtaacgcgcaagtccgtggcggaaccgactactttgggtgtccgtgtttccttttattttattgtggctgcttatggtgacaatcacagattgttatcataaagcgaattggattggccatccagtgaaagtgagattcattatctatctgtttgctggattcgctccattgagtgtgtttactctaagtacaatttcaacagttatttcaatcagacaattgtatcata

SEQ ID NO: 20079 - DNA, 745 bp, synthetic construct
  source 1..745: mol_type = other DNA
aaaacagctctggggttgtacccaccccagaggcccacgtggcggctagcactccggtattacggtacccttgtgcgcctgttttatactcccctcccgcaacttagaagcacgaaaccaagttcaatagaagggggtacaaaccagtaccactacgaacaagcacttctgtttccccggtgacgttgcatagactgctcacgcggttgaaagtgatcgatccgttacccgcttgtgtacttcgaaaagcctagtatcgccttggaatcttcgacgcgttgcgctcagcacccgaccccggggtgtagcttaggctgatgagtctggacattcctcaccggtgacggtggtccaggctgcgttggcggcctacctatggctaacgccataggacgttagatgtgaacaaggtgtgaagagcctattgagctacataagagtcctccggcccctgaatgcggctaatcctaaccacggagcaggcggtcgcgaaccagtgactggcttgtcgtaacgcgcaagtctgtggcggaaccgactactttgggtgtccgtgtttcctgttatttttatcatggctgcttatggtgacaatcagagattgttatcataaagcgaattggattggccatccggtgagtgttgtgtcaggtatacaactgtttgttggaaccgctgtgttagttttacttctcatttaaccaattaatcaaaaacaatacgaggataaaacaacaatactaca

SEQ ID NO: 20080 - DNA, 747 bp, synthetic construct
  source 1..747: mol_type = other DNA
ttaaaacagctctggggttgtacccaccccagaggcccacgtggcggctagcactccggtattacggtacccttgtgcgcctgttttatactcccctcccgcaacttagaagcacgaaaccaagttcaatagaagggggtacaaaccagtaccaccacgaacaagtacttctgtttccccggtgacattgcatagactgctcacgcggttgaaagtgatcgatccgttacccgcttgtgtacttcgaaaagcctagtatcgccttggaatcttcgacgcgttgcgctcagcacccgaccccggggtgtagcttaggctgatgagtctggacattcctcaccggtgacggtggtccaggctgcgttggcggcctacctatggctagcgccataggacgctagatgtgaacaaggtgtgaagagcctattgagctacataagaatcctccggcccctgaatgcggctaatcctaaccacggagcaggcggtcgcgaaccagcgactggcttgtcgtaatgcgcaagtctgtggcggaaccgactactttgggtgtccgtgtttcctgttatttttatcatggctgcttatggtgacaatcagagattgttatcataaagcgaattggattggccatctggtgagtgttgtgtcgggtatacaactgtttgttggaaccactgtgttagctttacttctcatttaaccaattaatcaaaaacaatacgaggataaaacaacaatactaca

SEQ ID NO: 20081 - DNA, 737 bp, synthetic construct
  source 1..737: mol_type = other DNA
acagctctggggttgcacccaccccagaggcccacgtggcggctagtactccggtattgcggtacccttgtacgcctgttttatactcccttcccgtaacttagacgcacaaaaccaagttcaatagaagggggtacaaaccagtaccaccacgaacaagcacttctgtttccccggtgatgttgtatagactgcttgcgtggttgaaagcgacggatccgttatccgcttatgtacttcgagaagcccagtaccacctcggaatcttcgatgcgttgcgctcagcactcaaccccagagtgtagcttaggctgatgagtctggacatccctcaccggtgacggtggtccaggctgcgttggcggcctacctatggctaacgccatgggacgctagttgtgaacaaggtgtgaagagcctattgagctacataagaatcctccggcccctgaatgcggctaatcccaacctcggagcaggtggtcacaaaccagtgattggcctgtcgtaacgcgcaagtccgtggcggaaccgactactttgggtgtccgtgtttccttttattttattgtggctgcttatggtgacaatcacagattgttatcataaagcgaattggattggccatccggtgaaagtgagattcattatctatctgtttgctggattcgctccattgagtgtgtttactctaagtacaatttcaacagttatttcaatcagacaattgtattata

SEQ ID NO: 20082 - DNA, 737 bp, synthetic construct
  source 1..737: mol_type = other DNA
acagctctggggttgcacccaccccagaggcccacgtggcggctagtactccggtattgcggtacccttgtacgcctgttttatactcccttcccgtaacttagacgcacaaaaccaagttcaatagaagggggtacaaaccagtaccaccacgaacaagcacttctgtttccccggtgatgttgtatagactgcttgcgtggttgaaagcgacggatccgttatccgcttatgtacttcgagaagcccagtaccacctcggaatcttcgatgcgttgcgctcagcactcaaccccagagtgtagcttaggctgatgagtctggacatccctcaccggtgacggtggtccaggctgcgttggcggcctacctatggctaacgccatgggacgctagttgtgaacaaggtgtgaagagcctattgagctacataagaatcctccggcccctgaatgcggctaatcccaacctcggagcaggtggtcacaaaccagtgattggcctgtcgtaacgcgcaagtccgtggcggaaccgactactttgggtgtccgtgtttccttttattttattgtggctgcttatggtgacaatcacagattgttatcataaagcgaattggattggccatccggtgaaagtgagatttattatctatctgtttgctggattcgctccattaagtgtgtttactctaagtataatttcaacagttatttcaatcagacaattgtatcata

SEQ ID NO: 20083 - DNA, 743 bp, synthetic construct
  source 1..743: mol_type = other DNA
aacagctctggggttgtacccaccccagaggcccacgtggcggctagcactccggtattacggtacccttgtgcgcctgttttatactcccctcccgcaacttagaagcacgaaaccaagttcaatagaagggggtacaaaccagtaccactacgaacaagcacttctgtttccccggtgacattgcatagactgctcacgcggttgaaagtgatcgatccgttacccgcttatgtacttcgaaaagcctagtatcgccttggaatcttcgacgcgttgcgctcagcacccgaccccggggtgtagcttaggctgatgagtctggacattcctcaccggtgacggtggtccaggctgcgttggcggcctacctatggctaacgccataggacgctagatgtgaacaaggtgtgaagagcctattgagctacataagagtcctccggcccctgaatgcggctaatcctaaccacggagcaggcggtcgcgaaccagtgactggcttgtcgtaacgcgcaagtctgtggcggaaccgactactttgggtgtccgtgtttcctgttatttttatcatggctgcttatggtgacaatcagagattgttatcataaagcgaattggattggccatccggtgagtgttgtgtcaggtatacaactgtttgttggaaccactgtgttagctttacttctcatttaaccaattaatcaaaaacaatacgaggataaaacaacaatactaca

SEQ ID NO: 20084 - DNA, 745 bp, synthetic construct
  source 1..745: mol_type = other DNA
ttaaaacagggtgtgggttattcccacccacagggcccactgggcgccagcacactggtatcacggtacccttgtgcgcctgttttatatacccctcccctaaaatgtaacttagaagcaaatccacaaagaccaacagcagacacagcgcgccagttgtgttacggtcaagcacttctgttaccccggaccgagtatcaataagctactcacgtggctgaaggagaaaacgttcgttacccgcccgattacttcgagaagcctagtaacgccatggaggttgcgcggcgtttcgctccgcacaatcccagtgtagatcaggtcgatgagccaccgcattccccacgggtgaccgtggcggtggctgcgctggcggcctgcccatggggcaacccatgggacgcttcaatactgacatggtgcgaagagcctattgagctaattgggagtcctccggcccctgaatgcggctaatcccaactgcggagcaggcgcccacgtgccagtgggtagtctgtcgtaacgggcaactctgcagcggaaccgactactttgggtgtccgtgtttccttttattcctacattggctgcttatggtgacaattgagagattgttaccatatagctattggattggccatccggcgacaaacagagcgattgtttatttgttcattggttttataccactaaactatacaactttaaacaccctcaattttattttaacgcttaacacagcaaa

SEQ ID NO: 20085 - DNA, 747 bp, synthetic construct
  source 1..747: mol_type = other DNA
ttaaaacagctctggggttgctcccaccccagaggcccacgtggcggccagtactctggtattgcggtacctttgtacgcctgttttatactccctccccccgtgcaactttagaagaaatccacaaagttcaatagagggggtgcaaaccagcaccaccacgaacaagcacttctgtttccccggtgatgtcgtataagctgtacccacggctgaaggcgacggatccgttatccgcttgagtacttcgagaagcctagtattaccttggaatcttcgacgcgttgcgctcagcactctaccccgagtgtagcttaggtcgatgagtctgggcacgccccaccggcgacggtggcccaggctgcgttggcggcctacccatggctatcaccatgggacgctagttgtgaacaaggtgtgaagagcctattgagctacccaagagtcctccggcccctgaatgcggctaatcctaaccacggagcaagtgtcctcaacccaggggatggcttgtcgtaacgcgaaagtctgtggcggaaccgactactttgggtgtccgtgtttccttttatttttatgtatggctgcttatggtgacaatcaaaggttgttaccataaagcaatttggattggccatccggtgagaatcaaacatattatctacctgtttgttgggttttcttcttttacttgaacaatacctctaataataactgctatattgtcaataagacattatcatcaca

SEQ ID NO: 20086 - DNA, 744 bp, synthetic construct
  source 1..744: mol_type = other DNA
ttaaaacagcctgtgggttgtacccaccccagaggcccacgtggcggctagtactccggtattacggtacccttgtacgcctgttttatactccctccctcgtaacttagaagcacaaaaccaagttcaatagaagggggtgcaaaccagtaccaccacgaacaagcatttctgtttccccggtgatgttgtatagactgcccgcgcggttgaaagcaacggatccgttacccgctcaagtacttcgagaagcctagtattaccttggaatcttcgatgcgttgcgttcagcactcgaccctggagtgtagcttaggctgatgagtctggacgtccctcaccggtgacggtggtccaggctgcgttggcggcctacctatggctaacgccataggacgctagttgtgaacaaggtgtgaagagcctattgagctacttgagagtcctccggcccctgaatgcggctaatcctaaccatggagcaggcggtcacagaccagtgactagcttgtcgtaatgcgcaagtctatggcggaaccgactactttgggtgtccgtgtttccttttatttttattatggctgcttatggtgacaatcattgattgttatcataaagcgaattggattggccatccggtgaaagcgagacttactatttacttacttgttggacttaccacacttaatacatttattctaggtgtcacttgtatagcaattagaatcaaacagttgcatcata

SEQ ID NO: 20087 - DNA, 742 bp, synthetic construct
  source 1..742: mol_type = other DNA
ttaaaacagctctggggttgcacccaccccagaggcccacgtggcggctagtactccggtattgcggtacccttgtacgcctgttttatactcccttcccgtaacttagacgcacaaaaccaagttcaatagaagggggtacaaaccagtaccaccacgaacaagcacttctgtttccccggtgatgttgtatagactgcttgcgtggttgaaagcgacggatccgttatccgcttatgtacttcgagaagcccagtaccacctcggaatcttcgatgcgttgcgctcagcactcaaccccagagtgtagcttaggctgatgagtctggacatccctcaccggtgacggtggtccaggctgcgttggcggcctacctatggctaacgccatgggacgctagttgtgaacaaggtgtgaagagcctattgagctacataaaaatcctccggcccctgaatgcggctaatcccaacctcggggcaggtggtcacaaaccagtgattggcctgtcgtaacgcgcaagcccgtggcggaaccgactactttgggtgtccgtgtttccttttattttattgtggctgcttatggtgacaatcacagattgttatcataaagcgaattggattggccatccggtgaaagtgagattcattatctatctgtttgctggattcgctccattgagtgtgtttactctaagtacaatttcaacagttatttcaatcagacaattgtatcata

SEQ ID NO: 20088 - DNA, 747 bp, synthetic construct
  source 1..747: mol_type = other DNA
ttaaaacagctctggggttgtacccaccccagaggcccacgtggcggctagcactccggtattacggtacccttgtgcgcctgttttatattcccctcccgcaacttagaagcacgaaaccaagttcaatagaagggggtacaaaccagtaccaccacgaacaagcacttctgtttccccggtgacattgcatagactgctcacgcggttgaaagtgatcgatccgttacccgcttgtgtacttcgaaaagcctagtatcgccttggaatcttcgacgcgttgcgctcagcacccggccccggggtgtagcttaggctgatgagtctggacattcctcaccggcgacggtggtccaggctgcgttggcggcctacctatggctaacgccataggacgctagatgtgaacaaggtgtgaagagcctattgagctacataagagtcctccggcccctgaatgcggctaatcctaaccacggagcaggcggtcgcgaaccagtgactggcttgtcgtaacgcgcaagtctgtggcggaaccgactactttgggtgtccgtgtttcctgttatttttatcatggctgcttatggtgacaatcagagattgttatcataaagcgaattggattggccatccggtgagtgttgtgtcaggtatacaactgtttgttgaaaccactgtgttagttttacttctcatttaaccaattaatcaaaaacaacacgaggataaaacaacaatactaca

SEQ ID NO: 20089 - DNA, 743 bp, synthetic construct
  source 1..743: mol_type = other DNA
aacagctctggggttgttcccaccccagaggcccacgtggcggctagtacactggtattacggtacccttgtacgcctgttttacaccccctttcccccgtaacttagaagttttaaattcaagttcaacagtcagtggtacaacccagtactactacgaacaagcacttctgttaccccggtgagattgcataggctgttcccacggctaaaagcgattgatccgttatccgctcttgtacttcgagaagcctagtaagaccttgggatcctcgacgcgttgcgttcaacactcaaccccagagtgtagcttgggctgatgagtctggacattccccaccggtgacggtggtccaggctgcgttggcggcctacctgtggcccaaagccacaggacgctagttgtgaacaaggtgtgaagagcctattgagctacaagtgagtcctccggcccctgaatgcggctaatcccaaccacggagcaggcgattgcaacccagcaactagcctgtcgtaacgcgcaagtctgtggcggaaccgactactttgggtgtccgtgtttccttttattacgtaatggctgcttatggtgacaatcacagattgttgtcataaagcgaattggattggccatccggtgagaattaaaacaatcatttatttatttgttggatttgttcctatacacacccaaacactttgctcgattgaagtaattctgttgataagacaacactattata

SEQ ID NO: 20090 - DNA, 743 bp, synthetic construct
  source 1..743: mol_type = other DNA
aacagctctggggttgttcccaccccagaggcccacgtggcggctagtacactggtattacggtacccttgtacgcctgttttacaccccctttcccccgtaacttagaagttttaaattcaagttcaacagtcagtggtacaacccagtactactacgaacaagcacttctgttaccccggtgagattgcataggctgttcccacggctaaaagcgattgatccgttatccgctcttgtacttcgagaagcctagtaagaccttgggatcctcgacgcgttgcgttcaacactcaaccccagagtgtagcttgggctgatgagtctggacattccccaccggtgacggtggtccaggctgcgttggcggcctacctgtggcccaaagccacaggacgctagttgtgaacaaggtgtgaagagcctattgagctacaagtgagtcctccggcccctgaatgcggctaatcccaaccacggagcaggcgattgcaacccagcaactagcctgtcgtaacgcgcaagtctgtggcggaaccgactactttgggtgtccgtgtttccttttattacataatggctgcttatggtgacaatcacagattgttgtcataaagcgaattggattggccatccggtgagaattaaaacaatcatttatttatttgttggatttgttcctatacacacccaaacactttgcttgattgaagtaactctgttgataagacaacactattata

SEQ ID NO: 20091 - DNA, 743 bp, synthetic construct
  source 1..743: mol_type = other DNA
aacagctctggggttgttcccaccccagaggcccacgtggcggctagtacactggtattacggtacccttgtacgcctgttttacaccccctttcccccgtaacttagaagttttaaattcaagttcaacagtcagtggtacaacccagtactactacgaacaagcacttctgttaccccggtgagattgcataggctgttcccacggctaaaagcgattgatccgttatccgctcttgtacttcgagaagcctagtaagaccttgggatcctcgacgcgttgcgttcaacactcaaccccagagtgtagcttgggctgatgagtctggacattccccaccggtgacggtggtccaggctgcgttggcggcctacctgtggcccaaagccacaggacgctagttgtgaacaaggtgtgaagagcctattgagctacaagtgagtcctccggcccctgaatgcggctaatcccaaccacggagcaggcgattgcaacccagcaactagcctgtcgtaacgcgcaagtctgtggcggaaccgactactttgggtgtccgtgtttccttttattacataatggctgcttatggtgacaatcacagattgttgtcataaagcgaattggattggccatccggtgagaattaaaacaatcatttatttatttgttggatttgttcctatacacacccaaacactttgcttgattgaagtaattctgttgataagacaacactattata

SEQ ID NO: 20092 - DNA, 745 bp, synthetic construct
  source 1..745: mol_type = other DNA
tttaaaacagcctgtgggttgttcccacccacagggcccactgggcgccagcactctggtattgcggtaccttagtgcgcctgttttatatacccatcccccaaacgtgatttagatgcatgttaacgaagaccaatagtaagcgcagcacaccagctgtgttccggtcaagcacttctgttaccccggactgagtatcaataagctactcacgtggctgaaggagaaaacgttcgttacccggccaattacttcgagaaacccagtaacaccatgaaggttgcgcagtgtttcgctccgcacaaccccagtgtagatcaggtcgatgagtcaccgcattccccacgggtgaccgtggcggtggctgcactggcggcctgcccatggggtaacccatgggacgcttcaatactgacatggtgcgaagagtctattgagctaattggtagtcctccggcccctgaatgcggctaatcctaactgcggagcagatactcacataccagtgggcggtctgtcgtaacgggcaactctgcagcggaaccgactactttgggtgtccgtgtttctctttatccttatactggctgcttatggtgacaattgggagattgttaccatatagctattggattggccatccagtgacaaatagagcaatcgtgtatttgtttgttggtttcgtaccattaaattacaaggtcataaacaccctcaatcttattatagcattcaatacaacaaa

SEQ ID NO: 20093 - DNA, 746 bp, synthetic construct; identical to SEQ ID NO: 1141
  source 1..746: mol_type = other DNA

SEQ ID NO: 20094 - DNA, 735 bp, synthetic construct
  source 1..735: mol_type = other DNA
tctggggttgttcccaccccagaggcccacgtggcggctagtactccggtattacggtacccttgtacgcctgttttatactcccctccctgtaacttagaagaaacataacaagttcaataggagggggtgcaaaccagcaccaccacgaacaagtacttctgtctccccggtgacattgcatagactgtccccacggttgaaagcgattgatccgttatccgctcttatacttcgagaagcctagtaccatcttggaatcatcgatgcgttgcgctccacactcaatcccagagtgtagcttaggctgatgagtctggacattcctcaccggcgacggtggtccaggctgcgttggcggcctacctgtggcccaaagccacaggacgctagttgtgaacaaggtgtgaagagcctattgagctataagagagtcctccggcccctgaatgcggctaatcctaaccacggatcaagggtgcacgaaccagtgtataccttgtcgtaacgcgcaagtctgtggcggaaccgactactttgggtgtccgtgtttccttttattgtttcaatggctgcttatggtgacaatcattgattgttatcataaagcgatttggattggccatccagtgaaagtgaaaaatattgtttgcctcctcgttgggtctactccaaccaacctctttacttacaaacttattaccacaattttattggttagaagtgtgtttcaca

SEQ ID NO: 20095 - DNA, 743 bp, synthetic construct
  source 1..743: mol_type = other DNA
aacagctctggggttgttcccaccccagaggcccacgtggcggctagtacactggtattacggtacccttgtacgcctgttttacaccccctttcccccgtaacttagaagttttaaattcaagttcaacagtcagtggtacaacccagtactactacgaacaagcacttctgttaccccggtgagattgcataggctgttcccacggctaaaagcgattgatccgttatccgctcttgtacttcgagaagcctagtaagaccttgggatcctcgacgcgttgcgttcaacactcaaccccagagtgtagcttgggctgatgagtctggacattccccaccggtgacggtggtccaggctgcgttggcggcctacctgtggcccaaagccacaggacgctagttgtgaacaaggtgtgaagagcctattgagctacaagtgagtcctccggcccctgaatgcggctaatcccaaccacggagcaggcgattgcaacccagcaactagcctgtcgtaacgcgcaagtctgtggcggaaccgactactttgggtgtccgtgtttccttttattacataatggctgcttatggtgacaatcacagattgttgtcataaagcgaattggattggccatccggtgagaattaaaacaatcatttatttatttgttggatttgttcctatacacacccaaacactttgcttgattgaagtaattctgttgataagacaacactattaca

SEQ ID NO: 20096 - DNA, 744 bp, synthetic construct; identical to SEQ ID NO: 123
  source 1..744: mol_type = other DNA

SEQ ID NO: 20097 - DNA, 747 bp, synthetic construct
  source 1..747: mol_type = other DNA
ttaaaacagctctggggttgttcccaccccagaggcccacgtggcggccagtacactggtatcgcggtacctttgtacgcctgttttatactcccttcccccgtaacttagaagcacaacgtccaagttcaatagaagggggtacaaaccagtaccaccacgaacaagcacttctgttcccccggtgaggctgtataggctgtttccacggctaaaagcggctgatccgttatccgctcatgtacttcgagaagcctagtatcaccttggaatcttcgatgcgttgcgctcaacactcaaccccagagtgtagcttaggtcgatgagtctggacgttcctcaccggcgacggtggtccaggctgcgttggcggcctacctgtggcccaaagccacaggacgctagttgtgaacaaggtgtgaagagcctattgagctacctgagagtcctccggcccctgaatgcggctaatcctaaccacggagcaggcagtggcaatccagcgaccagcctgtcgtaacgcgcaagttcgtggcggaaccgactactttgggtgtccgtgtttccttttatttttacaatggctgcttatggtgacaattattgatagttatcataaagcaaattggattggccatccggtgagaatttgattattaaattactctcttgttgggattgctcctttgaaatcctgtgcactcacacctattggaattacctcattgttgagatattattaccact

SEQ ID NO: 20098 - DNA, 735 bp, synthetic construct
  source 1..735: mol_type = other DNA
tggggttgtacccaccccagaggcccacgtggcggctagcactccggtattacggtacccttgtgcgcctgttttatactcccctcccgcaacttagaagcacgaaaccaagttcaatagaagggggtacaaaccagtaccactacgaacaagcacttctgtttccccggtgacattgcatagactgctcacgcggttgaaagtgatcgatccgttacccgcttgtgtacttcgaaaagcctagtatcgccttggaatcttcgacgcgttgcgctcagcacccgaccccggggtgtagcttaggctgatgagtctggacattcctcaccggtgacggtggtccaggctgcgttggcggcctacctatggctaacgccataggacgctagatgtgaacaaggtgtgaagagcctattgagctacataagagtcctccggcccctgaatgcggctaatcctaaccacggagcaggcggtcgcgaaccagtgactggcttgtcgtaacgcgcaagtctgtggcggaaccgactactttgggtgtccgggtttcctgttatttttatcatggctgcttatggtgacaatcagagattgttatcataaagcgaattggattggccatccggtgagtgttgtgtcaggtatacaactgtttattggaaccactgtgttagctttacttctcatttaaccaattaatcaaaaacaatacgaggataaaacaacaatactaca

SEQ ID NO: 20099 - DNA, 747 bp, synthetic construct
  source 1..747: mol_type = other DNA
ttaaaacagctctggggttgcacccgccccagaggcccacgtggcggctagcactccggtattacggtacccttgtgcgcctgttttatactcccctcccgcaacttagaagcacgaaaccaagttcaatagaagggggtacaaaccagtaccactacgaacaagcacttctgtttccccggtgacattgcatagactgctcacgcggttgaaagtgatcgatccgttacccgcttgtgtacttcgaaaagcctagtatcgccttggaatcttcgacgcgttgcgctcagcacccgaccccggggtgtagcttaggctgatgagtctggacattcctcaccggtgacggtggtccaggctgcgttggcggcctacctatggctaacgccataggacgttagatgtgaacaaggtgtgaagagcctattgagctacataagagtcctccggcccctgaatgcggctaatcctaaccacggagcaggcggtcgcgaaccagtgactggcttgtcgtaacgcgcaagtctgtggcggaaccgactactttgggtgtccgtgtttcctgttatttttatcatggctgcttatggtgacaatcagagattgttatcataaagcgaattggattggccatccggtgagtgttgtgtcaggtatacaactgtttgttggaaccactgtgttagctttacttctcatttaaccaattaatcaaaaacaatacgaggataaaacaacaatactaca

SEQ ID NO: 20100 - DNA, 742 bp, synthetic construct
  source 1..742: mol_type = other DNA
ttaaaacagctctggggttgttcccaccccagaggcccacgtggcggctagtacactggtatcacggtacctttgtacgcctgttttataccccctcccccgcaacttagaagcatacaattcaagctcaataggagggggtgcaagccagcgcctccgtgggcaagcactactgtttccccggtgaggccgcatagactgttcccacggttgaaagtgtccgatccgttatccgcccatgtacttcgagaagcctagtatcgctctggaatcttcgacgcgttgcgctcagcactcaaccccggagtgtagcttgggccgatgagtctggacagtccccactggcgacagtggtccaggctgcgctggcggcccacctgtggcccaaagccacaggacgctagttgtgaacagggtgtgaagagcctattgagctacatgggagtcctccggcccctgaatgcggctaatcctaaccatggagcaggcagctgcaacccagcagccagcctgtcgtaacgcgcaagtccgtggcggaaccgactactttgggtgtccgtgtttccttttattcttgaatggctgcttatggtgacaatcatagattgttatcataaagcgagttggattggccatccagtgtgaatcagattaattactcccttgtttgttggatccactccccaaacgttttattccttaacttattgaaattgtttgaagacaggatttcagtgtcaca

SEQ ID NO: 20101 - DNA, 742 bp, synthetic construct
  source 1..742: mol_type = other DNA
ttaaaacagcctgtgggttgttcccactcacagggcctactgggcgttagcacactggtattacggtacccttgtgcgcctgttttatccaccctaccccattgcaacttagaagctaaccaaacacggtcattaggcagctcagtatgccaactgagttttgaccaagcacttctgttaccccggactgagtatcaataggctgtttacacggctgaaggagaaaacgttcgttacccgaccagttacttcgagaagcccagtatcaccatgaaggttgcgcagtgtttcgctccgcacaaccccagtgtagatcaggccgatgagtcaccgcattccccacgggcgaccgtggcggtgactgcgctggcggcctgcccatgggccaacccatgggacgcttcaaaactgacatggtgtgaagagcctattgagctaattggtagtcctccggcccctgaatgcggctaatcctaactgcggagcagatacccacatgccagtgggcggtctgtcgtaacgggcaactctgcagcggaaccgactactttgggtgtccgtgtttccttttattcctatactggctgcttatggtgacaattgagagattgttaccatatagctactggattggccatccagtgacaaacagagcgattatttacctatttgttggttacataccattgaattttaaagttttaaaaaccctcaaccttgttttggcactcaacgctgcaaa

SEQ ID NO: 20102 - DNA, 697 bp, synthetic construct
  source 1..697: mol_type = other DNA
ttaaaacagctctggggttgtacccaccccagaggcccacgtggcggctagtactccggtattgcggtacccttgtacgcctgttttatactcccttcccgtaacttagacgcacaaaaccaagttcaatagaagggggtacaaaccagtaccaccacgaacaagcacttctgtttccccggtgatgtcgtatagactgcttgcgtggttgaaagcgacggatccgttatccgcttatgtacttcgagaagcccagtaccacctcggaatcttcgatgcgttggttagcactcaaccccagagtgtagcttaggctgatgagtctggacatccctcaccggtgacggtgttccaggctgcgttggcggcctacctatggctaacgcatgggacgctagttgtgaacaaggtgtgaagagcctattgagctacataagaatcctccggcccctgaatgcggctaatcccaacctcggagcaggtggttcacaaaccagtgattggcctgtcgtaacgcgcaagtccgtggcggaaccgactactttgggtgtccgtgtttccttttattttattgtggctgcttatggtgacaatcacagattgttatcataaagcgaattggattggccatccggtgaaagtgagactcattatctatctgtttgctggatccgctccattgagtgtgtttactcta

SEQ ID NO: 20103 - DNA, 744 bp, synthetic construct
  source 1..744: mol_type = other DNA
ttaaaacagcctgtgggttgttcccatccacagggcccactgggcgccagcactctggtattgcggtaccttagtgcgcctgttttatatacccaccccccaaatgtaatttagatgcatgtcaacaaagaccaatagtaagcgcagcacaccagctgtgttctggtcaagcacttctgttaccccggactgagtatcaataagctactcgcgtggctgaaggagaaaacgttcgttacccggccaattacttcgagaaacctagtaacaccatgaaggttgcgcagtgtttcgctccgcacaaccccagtgtagatcaggtcgatgagtcaccgcattccccacgggtgaccgtggcggtggctgcgctggcggcctgcccatggggtaacccatgggacgcttcaatactgacatggtgcgaagagtctattgagctaattggtagtcctccggcccctgaatgcggctaatcctaactgcggagcagatacccacacaccagtgggcagtctgtcgtaacgggcaactctgcagcggaaccgactactttgggtgtccgtgtttctctttatccttatactggctgcttatggtgacaattgagagattgttaccatatagctattggattggccatccggtgacgaatagagcaattgtgtatttgtttgttggttttataccattaaattacaaggttctaaacacccttaatcttattgtagtattcaatacaataaa

SEQ ID NO: 20104 - DNA, 744 bp, synthetic construct
  source 1..744: mol_type = other DNA
ttaaaacagcctgtgggttgctcccatccacagggcccactgggcgccagcactctggtattgcggtactttagtgcgcctgttttatatacccatcccccaaatgtaatttagatgcatgtcaacaaagaccaatagtaagcgcagcacaccagctgtgttctggtcaagcacttctgttaccccggactgagtatcaataagctactcacgtggctgaaggagaaaacgttcgttacccggccaattacttcgagaaacctagtaacaccatgaaggttgcgcagtgtttcgctccgcacaaccccagtgtagatcaggtcgatgagtcaccgcattccccacgggtgaccgtggcggtggctgcgctggcggcctgcccatggggtaacccatgggacgcttcaatactgacatggtgcgaagagtctattgagctaattggtagtcctccggcccctgaatgcggctaatcctaactgcagagcagatacccacacaccagtgggcagtctgtcgtaacgggcaactctgcagcggaaccgactactttgggtgtccgtgtttctttttatccttatactggctgcttatggtgacaattgagagattgttaccatatagctattggattggccatccggtgacaaatagagcaattgtgtatttgtttgttggcttcataccattaaattacaaggtcctaaacacccttgatcttattatagtattcaatacaataaa

SEQ ID NO: 20105 - DNA, 744 bp, synthetic construct
  source 1..744: mol_type = other DNA
ttaaaacagcctgtgggttgttcccatccacagggcccactgggcgccagcactctggtattgcggtaccttagtgcgcctgttttatatacccgtcccccaaacgtaacttagacgcatgtcaacgaagaccaatagtaagcgcagcacaccagctgtgttccggtcaagcacttctgttaccccggaccgagtatcaataagctactcacgtggctgaaggagaaaacgttcgttacccgaccaattacttcaagaaacctagtaacaccatgaaggttgcgcagtgtttcgctccgcacaaccccagtgtagatcaggtcgatgagtcaccgcattccccacgggtgaccgtggcggtggctgcgctggcggcctgcccatggggaaacccatgggacgcttcaatactgacatggtgcgaagagtctattgagctaattggtagtcctccggcccctgaatgcggctaatcctaactgcggagcagatacccacacaccagtgggcagtctgtcgtaacgggcaactctgcagcggaaccgactactttgggtgtccgtgtttctctttatccttatactggctgcttatggtgacaattgagagattgttaccatatagctattggattggccatccggtgacaaatagagcaattgtgtatttgtttgttggtttcgtgccattaaattacaaggttctaaacacccttaatcttattatagcattcaacacaacaaa

SEQ ID NO: 20106 - DNA, 734 bp, synthetic construct
  source 1..734: mol_type = other DNA
ttaaaacagctctggggttgcacccaccccagaggcccacgtggcggctagtactccggtattgcggtacccttgtacgcctgttttatactccctccccgtaacttagacgcacaaaaccaagttcaatagaagggggtacaaaccagtaccaccacgaacaagcacttctgtttccccggtgatgttgtatagactgcttgcgtggttgaaagcgacagatccgttatccgcttatgtacttcgagaagcccagtaccacctcggaatcttcgatgcgttgcgctcagcactcaaccccagagtgtagcttaggctgatgagtctggacatccctcaccggcgacggtggtccaggctgcgttggcggcctacctatggctaacgccatgggacgctagttgtgaacaaggtgtgaagagcctattgagctacataagaatcctccggcccctgaatgcggctaatcccaacctcggagcaggtggtcacaaaccagtgattggcctgtcgtaacgcgcaagtccgtggcggaaccgactactttgggtgtccgtgtttccttttattttattgtgactgcttatggtgacaatcacagattgttatcataaagcgaattggattggccatccggtgaaagtgagattcattatttatctgtttcgctccattgagtgtgtttattttaagtacaatttcaacagttatttcaatcagacaattgtatcata

SEQ ID NO: 20107 - DNA, 744 bp, synthetic construct; identical to SEQ ID NO: 1070
  source 1..744: mol_type = other DNA

SEQ ID NO: 20108 - DNA, 822 bp, synthetic construct; identical to SEQ ID NO: 1277
  source 1..822: mol_type = other DNA

SEQ ID NO: 20109 - DNA, 743 bp, synthetic construct
  source 1..743: mol_type = other DNA
ttaaaacagtctgtgggttgtaccccctcacagggcccacgtggcgctagcacaccggtatctcggtacccttgtgcgcctgttttatacaccctcacccccatgtaacttagaaggaaagcaacaatgatcaacagcaggtgtggcatcccagtcacatcgtgatcaagcacttctgtctccccggactgagtatcaatgggctgctcgcgcggctgaaggagaaaacgttcgttacccggccaattacttcgagaaacccagtaacaccatggaggttgcgcagtgtttcgctccacacaaccccagtgtagatcaggtcgatgagccaccgcattccccacgggcgaccgtggtggtggctgcgctggcggcctgcccatggggtaacccatgggacgcttcaatactgacatggtgtgaagagtctattgagctaattggtagtcctccggcccctgaatgcggctaatcctaactgcggagcagatactcacatgccagtgagcagtctgtcgtaacgggtgactctgcagcggaaccgactactttgggtgtccgtgtttccttttattccttatttggctgcttatggtgacaattgagagattgttgccatatagctattggattggccatccagtgacaaacagagctattgtgtacctgtttgttggttttgtaccactaaattttaaagtcttaagaaccatcaacttgatcatattactgaatacaagaaa

SEQ ID NO: 20110 - DNA, 743 bp, synthetic construct
  source 1..743: mol_type = other DNA
ttaaaacagcctgtgggttgttcccacccacagggcccaccgggcgtcagcacactggtattgcggtacctttgtgcgcctgttttatatatccctaccctaacgtaacctagaagcaaattaacgaggatcaatagtcagcacggcacaccagccgtgttttgatcaagcacttctgttaccccggaccgagtatcaataggctactcacgtggctgaaggagaaagtgttcgttacccggccaattacttcgagaaacccagtaacaccatgaaggttgcgcagcgtttcgctccgcacaaccccagtgtagatcaggtcgatgagtcaccgcattccccacgggcgaccgtggcggtggctgcgctggcggcctgcccatagggtgacctatgggacgcttcaatactgacatggtgcgaagagtctattgagctaattggtagtcctccggcccctgaatgcggctaatcctaactgcggagcaggtgcccacaaaccagtgggtagtctgtcgtaatgggcaactctgcagcggaaccgactactttgggtgtccgtgtttccttttattcttatactggctgcttatggtgacaattgaaaggttgttaccatatagctattggattggccatccggtgacaaacagagcgattatatacttgtttgttggtttcataccactaaatcacaagactttaaacacccttaatttcataatagcattaaatacagcaag

SEQ ID NO: 20111 - DNA, 742 bp, synthetic construct
  source 1..742: mol_type = other DNA
ttaaaacagctctggggttgttcccaccccagaggcccacgtggcggctagtacactggtatcacggtacctttgtacgcctgttttatactccctcccccgcaacttagaagcatacaattcaagctcaataggagggggtgcaagccagcgcctccgtgggcaagcactactgtttccccggtgaggccgcatagactgttcccacggttgaaagtgtccgatccgttatccgctcatgtacttcgagaagcctagtatcgctctggaatcttcgacgcgttgcgctcagcactcaaccccggagtgtagcttgggccgatgagtctggacagtccccactggcgacagtggtccaggctgcgctggcggcccacctgtggcccaaagccacgggacgctagttgtgaacagggtgtgaagagcctattgagctacatgagagtcctccggcccctgaatgcggctaattctaaccatggagcaggcagctgcaacccagcagccagcctgtcgtaacgcgcaagtccgtggcggaaccgactactttgggtgtccgtgtttccttttattcttgaatggctgcttatggtgacaatcatagattgttatcataaagcgagttggattggccatccagtgtgaatcagattaattactcccttgtttgttggatccactcccgaaacgttttactccttaacttattgaaattgtttgaagacaggatttcagtgtcaca

SEQ ID NO: 20112 - DNA, 741 bp, synthetic construct; identical to SEQ ID NO: 973
  source 1..741: mol_type = other DNA

SEQ ID NO: 20113 - DNA, 734 bp, synthetic construct
  source 1..734: mol_type = other DNA
ttaaaacagctctggggttgcacccaccccagaggcccacgtggcggctagtactccggtattgcggtacccttgtacgcctgttttatactccctccccgtaacttagacgcacaaaaccaagttcaatagaagggggtacaaaccagtaccaccacgaacaagcacttctgtttccccggtgatgttgtatagactgcttgcgtggttgaaagcgacagatccgttatccgcttatgtacttcgagaagcccagtaccacctcggaatcttcgatgcgttgcgctcagcactcaaccccagagtgtagcttaggctgatgagtctggacatccctcaccggcgacggtggtccaggctgcgttggcggcctacctatggctaacgctatgggacgctagttgtgaacaaggtgtgaagagcctattgagctacataagaatcctccggcccctgaatgcggctaatcccaacctcggagcaggtggtcacaaaccagtgattggcctgtcgtaacgcgcaagtccgtggcggaaccgactactttgggtgtccgtgtttccttttattttattgtggctgcttatggtgacaatcacagattgttatcataaagcgaattggattggccatccggtgaaagtgacattcattatttatctgtttcgccccattgagtgtgtttattttaagtacaatttcaacagttatttcaatcagacaattgtatcata

SEQ ID NO: 20114 - DNA, 734 bp, synthetic construct
  source 1..734: mol_type = other DNA
ttaaaacagctctggggttgcacccaccccagaggcccacgtggcggctagtactccggtattgcggtacccttgtacgcctgttttatactccctccccgtaacttagacgcacaaaaccaagttcaatagaagggggtacaaaccagtaccaccacgaacaagcacttctgtttccccggtgatgttgtatagactgcttgcgtggttgaaagcgacagatccgttatccgcttatgtacttcgagaagcccagtaccacctcggaatcttcgatgcgttgcgctcagcactcaaccccagagtgtagcttaggctgatgagtctggacatccctcaccggcgacggtggtccaggctgcgttggcggcctacctatggctaacgccatgggacgctagttgtgaacaaggtgtgaagagcctattgagctacataagaatcctccggcccctgaatgcggctaatcccaacctcggagcaggtggtcacaaaccagtgattggcctgtcgtaacgcgcaagtccgtggcggaaccgactactttgggtgtccgtgtttccttttattttattgtggctgcttatggtgacaatcacagattgttatcataaagcgaattggattggccatccggtgaaagtgagattcattatttatctgtttcgctccattgagtgtgtttattttaagtacaatttcaacagttatttcaatcagacaattgtatcata

SEQ ID NO: 20115 - DNA, 734 bp, synthetic construct
  source 1..734: mol_type = other DNA
ttaaaacagctctggggttgcacccgccccagaggcccacgtggcggctagtactccggtattgcggtacccttgtacgcctgttttatactcccttcccgtaacttagacgcacaaaaccaagttcaatagaagggggtacaaaccagtaccaccacgaacaagcacttctgtttccccggtgatgttgtatagactgcttgcgtggttgaaagcgacggatccgttatccgcttatgtacttcgagaagcccagtaccacctcggaatcttcgatgcgttgcgctcagcactcaaccccagagtgtagcttaggctgatgagtctggacatccctcaccggtgacggtggtccaggctgcgttggcggcctacctatggctaacgccatgggacgctagttgtgaacaaggtgtgaagagcctattgagctacataagaatcctccggcccctgaatgcggctaatcccaacctcggagcaggtggtcacaaaccagtgattggcctgtcgtaacgcgcaagtccgtggcggaaccgactactttgggtgtccgtgtttccttttattttattgtggctgcttatggtgacaatcacagattgttatcataaagcgaattggattggccatccggtaaaagtgagattcattatctatctcttttgctccattgagtgtgtttattctaagtacaatttcaacagctatttcaatcagacaattgtattata

SEQ ID NO: 20116 - DNA, 742 bp, synthetic construct
  source 1..742: mol_type = other DNA
ttaaaacagctctggggttgttcccaccccagaggcccacgtggcggctagtacactggtatcacggtacctttgtacgcctgttttatactcccttccccgcaacttagaagcatacaattcaagctcaataggagggggtgcaagccagcgcctccgtgggcaagcactactgtttccccggtgaggccacatagactgttcccacggttgaaagtgtccgatccgttatccgctcatgtacttcgagaagcctagtatcgctctggaatcttcgacgcgttgcgctcagcactcaaccccggagtgtagcttgggctgatgagtctggacagtccccactggcgacagtggtccaggctgcgctggcggcccacctgtggcccaaagccacaggacgctagttgtgaacagggtgtgaagagcctattgagctacatgagagtcctccggcccctgaatgcggctaatcctaaccatggagcaggcagctgcaacccagcagccagcctgtcgtaacgcgcaagtccgtggcggaaccgactactttgggtgtccgtgtttccttttattcttgaatggctgcttatggtgacaatcatagattgttatcataaagcgagttggattggccatccagtgtgaatcagattaattactcccttgtttgttggatccactcccgaaacgtcttactccttaactcattgaaattactcgaagacaggatttcagtgtcaca

SEQ ID NO: 20117 - DNA, 742 bp, synthetic construct
  source 1..742: mol_type = other DNA
ttaaaacagctctggggttgttcccaccccagaggcccacgtggcggctagtacactggtatcacggtacctttgtacgcctgttttatactcccttccccgcaacttagaagcatacaattcaagctcaataggagggggtgcaagccagcgcctccgtgggcaagcactactgtttccccggtgaggccacatagactgttcccacggttgaaagtgtctgatccgttatccgctcatgtacttcgagaagcctagtatcgctctggaatcttcgacgcgttgcgctcagcactcaaccccagagtgtagcttgggctgatgagtctggacagtccccactggcgacagtggtccaggctgcgctggcggcccacctgtggcccaaagccacgggacgctagttgtgaacagggtgtgaagagcctattgagctacatgagagtcctccggcccctgaatgcggctaatcctaaccatggagcaggcagctgcaacccagcagccagcctgtcgtaacgcgcaagtccgtggcggaaccgactactttgggtgtccgtgtttccttttattcttgaatggctgcttatggtgacaatcatagattgttatcataaagcgagttggattggccatccagtgtgaatcagattaattactcccttgtttgttggatccactcccgaaacgttttactccttaacttattgaaattactcgaagacaggatttcagtgtcaca

SEQ ID NO: 20118 - DNA, 742 bp, synthetic construct
  source 1..742: mol_type = other DNA
ttaaaacagctctggggttgttcccaccccagaggcccacgtggcggctagtacactggtatcacggtacctttgtacgcctgttttatactccctcccccgcaacttagaagcatacaattcaagctcaataggagggggtgcaagccagcgcctccgtgggcaagcactactgtttccccggtgaggccgcatagactgttcccacggttgaaagtgtccgatccgttatccgctcatgtacttcgagaagcctagtatcgctctggaatcttcgacgcgttgcgctcagcactcaaccccggagtgtagcttgggccgatgagtctggacagtccccactggcgacagtggtccaggctgcgctggcggcccacctgtggcccaaagccacgggacgctagttgtgaacagggtgtgaagagcctattgagctacatgagagtcctccggcccctgaatgcggctaatcctaaccatggagcaggcagctgcaacccagcagccagcctgtcgtaacgcgcaagtccgtggcggaaccgactactatgggtgtccgtgtttccttttattcttgaatggctgcttatggtgacaatcacagattgttatcataaagcgagttggattggccatccagtgtgaatcagattaattactcccttgtttgttggatccactcccgaaacgttttactccttaacttattgaaattgtttgaacacaggatttcagtgtcaca

SEQ ID NO: 20119 - DNA, 742 bp, synthetic construct
  source 1..742: mol_type = other DNA
ttaaaacagctctggggttgttcccaccccagaggcccacgtggcggctagtacactggtatcacggtacctttgtacgcctgttttatactccctcccccgcaacttagaagcatacaattcaagctcaataggagggggtgcaagccagcgcctccgtgggcaagcactactgtttccccggtgaggccgtatagactgttcccacggttgaaagtgtccgatccgttatccgctcatgtacttcgagaagcctagtatcgctctggaatcttcgacgcgttgcgctcagcactcaaccccggagtgtagcttgggccgatgagtctggacagtccccactggcgacagtggtccaggctgcgctggcggcccacctgtggcccaaagccacgggacgctagttgtgaacagggtgtgaagagcctattgagctacatgagagtcctccggcccctgaatgcggctaatcctaaccatggagcaggcagctgcaacccagcagccagcctgtcgtaacgcgcaagtccgtggcggaaccgactactttgggtgtccgtgtttccttttattcttgaatggctgcttatggtgacaatcatagattgttatcataaagcgagttggattggccatccagtgtgaatcagattaattactcccttgtttgttggatccactcccgaaacgttttactccttaacttattgaaattgtttgaagacaggatttcagtgtcaca

SEQ ID NO: 20120 - DNA, 742 bp, synthetic construct
  source 1..742: mol_type = other DNA
ttaaaacagctctggggttgttcccaccccagaggcccacgtggcggctagtacactggtatcacggtacctttgtacgcctgttttatactccctcccccgcaacttagaagcatacaattcaagctcaataggagggggtgcaagccagcgcctccgtgggcaagcactactgtttccccggtgaggccgcatagactgttcccacggttgaaagtgtccgatccgttatccgctcatgtacttcgagaagcctagtatcgctctggaatcttcgacgcgttgcgctcagcactcaaccccggagtgtagcttgggccgatgagtctggacagtccccactggcgacagtggtccaggctgcgctggcggcccacctgtggcccaaagccacgggacgctagttgtgaacagggtgtgaagagcctattgagctacatgagagtcctccggcccctgaatgcggctaatcctaaccatggagcaggcagctgcaacccagcagccagcctgtcgtaacgcgcaagtccgtggcggaaccgactactttgggtgtccgtgtttccttttattcttgaatggctgcttatggtgacaatcatagattgttatcataaagcgagttggattggccatccagtgtgaatcagattaattactcccttgtttgttggatccactcccgaaacgttttactccttaacttattgaaattgtttgaggacaggatttcagtgtcaca

SEQ ID NO: 20121 - DNA, 742 bp, synthetic construct
  source 1..742: mol_type = other DNA
ttaaaacagctctggggttgttcccaccccagaggcccacgtggcggctagtacactggtatcacggtacctttgtacgcctgttttatactccctcccccgcaacttagaagcatacaattcaagctcaataggagggggtgcaagccagcgcctccgtgggcaagcactactgtttccccggtgaggccgcatagactgttcccacggttgaaagtgtccgatccgttatccgctcatgtacttcgagaagcctagtatcgctctggaatcttcgacgcgttgcgctcagcactcaaccccggagtgtagcttgggccgatgagtctggacagtccccactggcgacagtggtccaggctgcgctggcggcccacctgtggcccaaagccacgggacgctagttgtgaacagggtgtgaagagcctattgagctacatgagagtcctccggcccctgaatgcggctaatcctaaccatggagcaggcagctgcaacccagcagccagcctgtcgtaacgcgcaagtccgtggcggaaccgactactttgggtgtccgtgtttccttttattcttgaatggctgcttatggtgacaatcatagattgttatcataaagcgagttggattggccatccagtgtgaatcggattaactactcccttgtttgttggatccactcccgaaacgttctactccttaacttattgaaattgtttgaagacaggatttcagtgtcaca

SEQ ID NO: 20122 - DNA, 742 bp, synthetic construct
  source 1..742: mol_type = other DNA
ttaaaacagctctggggttgttcccaccccagaggcccacgtggcggctagtacactggtatcacggtacctttgtacgcctgttttatactccctcccccgcaacttagaagcatacaattcaagctcaataggagggggtgcaagccagcgcctccgtgggcaagcactactgtttccccggtgaggccgcatagactgttcccacggttgaaagtgtccgatccgttatccgctcatgtacttcgagaagcctagtatcgctctggaatcttcgacgcgttgcgttcagcactcaaccccggagtgtagcttgggccgatgagtctggacagtccccactggcgacagtggtccaggctgcgctggcggctcacctgtggcccaaagccacgggacgctagttgtgaacagggtgtgaagagcctattgagctacatgagagtcctccggcccctgaatgcggctaatcctaaccatggagcaggcagctgcaacccagcagtcagcctgtcgtaacgcgcaagtccgtggcggaaccgactactttgggtgtccgtgtttccttttattcttgaatggctgcttatggtgacaatcatagattgttatcataaagcgagttggattggccatccagtgtgaatcagattaattactcccttgtttgttggatccactcccgaaacgttttactccttaacttattgaaattgtttgaagacaggatttcagtgtcaca

SEQ ID NO: 20123 - DNA, 742 bp, synthetic construct
  source 1..742: mol_type = other DNA
ttaaaacagctctggggttgttcccaccccagaggcccacgtggcggctagtacactggtatcacggtacctttgtacgcctgttttatactccttcccccgcaacttagaagcatacaattcaagctcaataggagggggtgcaagccagcgcctccgtgggcaagcactactgtttccccggtgaggccgcatagactgttcccacggttgaaagtgtccgatccgttatccgctcatgtacttcgagaagcctagtatcgctctggaatcttcgacgcgttgcgctcagcactcaaccccggagtgtagcttgggccgatgagtctggacagtccccactggcgacagtggtccaggctgcgctggcggcccacctgtggcccaaagccacgggacgctagttgtgaacagggtgtgaagagcctattgagctacatgagagtcctccggcccctgaatgcggctaatcctaaccatggagcaggcagctgcaacccagcagccagcctgtcgtaacgcgcaagtccgtggcggaaccgactactttgggtgtccgtgtttccttttattcttgaatggctgcttatggtgacaatcatagattgttatcataaagcgagttggattggccatccagtgtgaatcagattaattactcccttgtttgttggatccactcccgaaacgttttactccttaacttattgaaattgtttgaagacaggatttcagtgtcaca

SEQ ID NO: 20124 - DNA, 742 bp, synthetic construct
  source 1..742: mol_type = other DNA
ttaaaacagctctggggttgttcccaccccagaggcccacgtggcggctagtacactggtatcacggtacctttgtacgcctgttttatactccctcccccgcaacttagaagcatacaattcaagctcaataggagggggtgcaagccagcgcctccgtgggcaagcactactgtttccccggtgaggccgcatagactgttcccacggttgaaagtgtccgatccgttatccgctcatgtacttcgagaagcctagtatcgctctggaatcttcgatgcgttgcgctcagcactcaaccccggagtgtagcttgggccgatgagtctggacagtccccactggcgacagtggtccaggctgcgctggcggcccacctgtggcccaaagccacgggacgctagttgtgaacagggtgtgaagagcctattgagctacatgagagtcctccggcccctgaatgcggctaatcctaaccatggagcaggcagctgcaacccagcagccagcctgtcgtaacgcgcaagtccgtggcggaaccgactactttgggtgtccgtgtttccttttattcttgaatggctgcttatggtgacaatcatagattgttatcataaagcgagttggattggccatccagtgtgaatcagattaattactcccttgtttgttggatccactcccgaaacgttttactccttaacttattgaaattgtttaaagacaggatttcagtgtcaca

SEQ ID NO: 20125 - DNA, 742 bp, synthetic construct
  source 1..742: mol_type = other DNA
ttaaaacagctctggggttgttcccaccccagaggcccacgtggcggctagtacactggtatcacggtacctttgtacgcctgttttatactccctcccccgcaacttagaagcatacaattcaagctcaataggagggggtgcaagccagcgcctccgtgggcaagcactactgtttccccggtgaggccgcatagactgttcccacggttgaaagtgtccgatccgttatccgctcatgtacttcgagaagcctagtatcgctctggaatcttcgacgcgttgcgctcagcactcaaccccggagtgtagcttgggccgatgagtctggacagtccccactggcgacagtggtccaggctgcgctggcggcccacctgtggcccaaagccacgggacgctagttgtgaacagggtgtgaagagcctattgagctacatgagagtcctccggcccctgaatgcggctaatcctaaccatggagcaggcagctgcaacccagcagccagcctgtcgtaacgcgcaagtccgtggcggaaccgactactttgggtgtccgtgtttccttttattcttgaatggctgcttatggtgacaatcatagattgttatcataaagcgagttggattggccatccagtgtgaatcagattaattactcccttgtttgttggatctactcccgaaacgttttactccttaacttattgaaattgtttgaagacaggatttcagtgtcaca

SEQ ID NO: 20126 - DNA, 742 bp, synthetic construct
  source 1..742: mol_type = other DNA
ttaaaacagctctggggttgttcccaccccagaggcccacgtggcggctagtacactggtatcacggtacctttgtacgcctgttttatactccctcccccgcaacttagaagcatacaattcaagctcaataggagggggtgcaagccagcgcctccgtgggcaagcactactgtttccccggtgaggccgcatagactgttcccacggttgaaagtgtccgatccgttatccgctcatgtacttcgagaagcctagtatcgctctggaatcttcgacgcgttgcgctcagcactcaaccccggagtgtagcttgggccgatgagtctggacagcccccactggcgacagtggtccaggctgcgctggcggcccacctgtggcccaaagccacgggacgctagttgtgaacagggtgtgaagagcctattgagctacatgagagtcctccggcccctgaatgcggctaatcctaaccatggagcaggcagctgcaacccagcagccagcctgtcgtaacgcgcaagtccgtggcggaaccgactactttgggtgtccgtgtttccttttattcttgaatggctgcttatggtgacaatcatagattgttatcataaagcgagttggattggccatccagtgtgaatcagattaattactcccttgtttgttggatccactcccgaaacgttttactccttaacttattgaaattgtttgaagacaggatttcagtgtcaca

SEQ ID NO: 20127 - DNA, 693 bp, synthetic construct
  source 1..693: mol_type = other DNA
gtacactggtatcacggtacctttgtacgcctgttttatactccctccccccgcaacttagaagcacacaattcaagctcaataggagggggtgcaagccagcgcctccgtgggcaagtactactgtttccccggtgaggccgcatagactgttcccacggttgaaagtgtccgatccgttatccgctcacgtacttcgagaagcctagtatcactctggaatcttcgacgcgttgcgctcagcactcaaccccggagtgtagcttgggccgatgagtctggacagtccccactggcgacagtggtccaggctgcgctggcggcccacctgtggcccaaagccacgggacgctagttgtgaacagggtgtgaagagcctattgagctacatgagagtcctccggcccctgaatgcggctaatcctaaccatggagcaggcagctgcaacccagcagccagcctgtcgtaacgcgcaagtccgtggcggaaccgactactttgggtgtccgtgtttccttttattcttgaatggctgcttatggtgacaatcatagattgttatcataaagcgagttggattggccatccagtgtgaatcagactaattactcccttgtttgttggacccactcccgaaacgttttactccttaacttattgaaattggttgaagacaggatttcagtgtcaca

SEQ ID NO: 20128 - DNA, 744 bp, synthetic construct; identical to SEQ ID NO: 1071
  source 1..744: mol_type = other DNA

SEQ ID NO: 20129 - DNA, 744 bp, synthetic construct
  source 1..744: mol_type = other DNA
ttaaaacagcctgtgggttgctcccacccacagggcccactgggcgctagcacactggtatcccggtacctttgtgcgcctgttttatccatcccacccccagctgtaacttagaagttcgacacacatggtcaatagatggctcagtgcaccaactgggtttagaccaagcacttctgttaccccggaccgagtatcaataagctgctcgcgcggctgaaggagaaaacgttcgttacccggccaattacttcgagaaacctagtaccaccatggaggttgcgcagcgtttcgctccgcacagccccagtgtagatcaggccgatgagccaccgcattcctcacgggcgaccgtggcggtggctgcgctggcggcctgcccatggggcaacccatgggacgcttcaatactaacatggtgtgaagagtctattgagctaattggtagtcctccggcccctgaatgcggctaatcctaactgcggagcagatactcacatgccagtgggcagtctgtcgtaacgggcaactctgcagcggaaccgactactttgggtgtccgtgtttccttatattcttatactggctgcttatggtgacaattgagaaattgttaccatatagctattggattggccatccagtgacaaacagagcaattgtttacctatttgttggcttcataccgttgaattttagagttttgaagacccttaacttgattacactatttaactctgtaaa

SEQ ID NO: 20130 - DNA, 744 bp, synthetic construct
  source 1..744: mol_type = other DNA
taaaacagcctgtgggttgttcccacccacagggcccactgggcgccagcactctggtattatggtaccttagtgcgcctgttttatacaccccttccccaaatgtaatttagatgcatgtaaacaaaggccaatagcaggcgcagcataccagctgtgtctcggtcaagcacttctgttaccccggactgagtatcaataggctactcacgtggctgaaggagaaaacgttcgttatccggccaattacttcgagaaacctagtaataccatgaaggttgcgaagtgtttcgctcagcacaaccccagtgtagatcaggtcgatgagtcaccgcattccccacgggtgaccgtggcggtggctgcgctggcggcctgcccatgggattacccatgggacgcttcaatattgacatggtgtgaagagtctattgagctaattggtattcctccggcccctgaatgcggctaatcccaactgcggagcaggtacccacatgccagtgggcagcctgtcgtaatgggcaactctgcagcggaaccgactactttgggtgtccgtgtttctctttattcttatactggctgcttatggtgacaattgagaaattgttgccatatagctattggattggccatccggtgacaaatagagcaattgtgcatccatttgttggttttatactaactcaatctcaaggttttaactaccctcaatctcattatatcattcaatacagcaaa

SEQ ID NO: 20131 - DNA, 744 bp, synthetic construct
  source 1..744: mol_type = other DNA
ttaaaacagcctgtgggttgttcccacccacagggcccactgggcgccagcactctggtattgcggtaccttagtgcgcctgttttatacaccccttccctaaatgcaatttagatgcatgtaaataaagaccaatagcaggcgcagcacaccagctgtgtctcggtcaagcactcctgttaccccggactgagtatcaataggctactcacgtggctgaaggagaaaacgttcgttacccggccaattacttcgagaaacctagtaacaccatgaaggttgcgaagtgtttcgctccgcacaaccccagtgtagatcaggtcgatgagtcaccgcattccccacgggtgaccgtggcggtggctgcgttggcggcctgcccatgggattacccatgggacgcttcaatactgacatggtgtgaagagtctattgagctaattggtattcctccggcccctgaatgcggctaatcccaactgcggagcagatacccacacaccagtgggcagtctgtcgtaatgggcaactctgcagcggaaccgactactttgggtgtccgtgtttctctttattcttatactggctgcttatggtgacaattgagagattgttgccatatagctattggattggccatccggtgacaaatagagcaattgtgtatctatttgttggttttataccattaaattacaaagttttaagcacccttaatcttattatagcattcaatacagcaaa

SEQ ID NO: 20132 - DNA, 744 bp, synthetic construct
  source 1..744: mol_type = other DNA
ttaaaacagcctgtgggttgttcccacccacagggcccactgggcgccagcactctggtattgcggtaccttagtgcgcctgttttatacaccccttccctaaatgcaatttagatgcatgtaaacaaaggccaatagcaggcgcagcacaccagctgtgtctcggtcaagcacttctgttaccccggactgagtatcaataggctactcacgtggctgaaggagaaaacgttcgttatccggccaattacttcgagaaacctagtaataccatgaaggttgcgaagtgtttcgctcagcacaaccccagtgtagatcaggtcgatgagtcaccgcattccccacgggtgaccgtggcggtggctgcgttggcggcctgcccatgggattacccatgggacgcttcaatattgacatggtgtgaagagtctattgagctaattggtattcctccggcccctgaatgcggctaatcccaactgcggagcaggtacccacataccagtgggcagcctgtcgtaatgggcaactctgcagcggaaccgactactttgggtgtccgtgtttctctttattcttatactggctgcttatggtgacaattgagaaattgttgccatatagctattggattggccatccggtgacaaatagagcaattgtgcatccatttgttggttttatactattgtattacaaagttttaagtacccttaatcctattatatcattcaatacagcaaa

SEQ ID NO: 20133 - DNA, 743 bp, synthetic construct
  source 1..743: mol_type = other DNA
cttaaaacagctctggggttgttcccaccccagaggcccacgtggcggctagtacactggtatcacggtacctttgtacgcctgttttatactccctcccccgcaacttagaagcatacaattcaagctcaataggagggggtgcaagccagcgcctccgtgggcaagcactactgtttccccggtgaggccgcatagactgttcccacggttgaaagtgtccgatccgttatccgctcatgtacttcgagaagcctagtatcgctctggaatcttcgacgcgttgcgctcagcactcaaccccggagtgtagcttgggccgatgagtctggacagtccccactggcgacagtggtccaggctgcgctggcggcccacctgtggcccaaagccacgggacgctagttgtgaacagggtgtgaagagcctattgagctacatgagagtcctccggcccctgaatgcggctaatcctaaccatggagcaggcagctgcaacccagcagccagcctgtcgtaacgcgcaagtccgtggcggaaccgactactttgggtgtccgtgtttccttttattcttgaatggctgcttatggtgacaatcatagattgttatcataaagcgagttggattggccatccagtgtgaatcagattaattactcccttgtttgttggatccactcccgaaacgttttactccttaacttattgaaattgtttgaagacaggatttcagtgtcaca

SEQ ID NO: 20134 - DNA, 742 bp, synthetic construct; identical to SEQ ID NO: 118
  source 1..742: mol_type = other DNA

SEQ ID NO: 20135 - DNA, 742 bp, synthetic construct
  source 1..742: mol_type = other DNA
ttaaaacagctctggggttgttcccatcccagaggcccacgtggcggctagtacactggtatcacggtacctttgtacgcctgttttatactccctcccccgcaacttagaagcatacaattcaagctcaataggagggggtgcaagccagcgcctccgtgggcaagcactactgtttccccggtgaggccgcatagactgttcccacggttgaaagtgtccgatccgttatccgctcatgtacttcgagaagcctagtatcgctctggaatcttcgacgcgttgcgctcagcactcaaccccggagtgtagcttgggccgatgagtctggacagtccccactggcgacagtggtccaggctgcgctggcggcccacctgtggcccaaagccacgggacgctagttgtgaacagggtgtgaagagcctattgagctacatgagagtcctccggcccctgaatgcggctaattctaaccatggagcaggcagctgcaacccagcagccagcctgtcgtaacgcgcaagtccgtggcggaaccgactactttgggtgtccgtgtttccttttattcttgaatggctgcttatggtgacaatcatagattgttatcataaagcgagttggattggccatccagtgtgaatcagattaattactcccttgtttgttggatccactcccgaaacgttttactccttaacttattgaaattgtttgaagacaggatttcagtgtcaca

SEQ ID NO: 20136 - DNA, 752 bp, synthetic construct
  source 1..752: mol_type = other DNA
aaagcaggctttaaaacagctctggggttgttcccacccacagggcccactgggcgctagcactctggtatcacggtacctttgtgcgcctgtttttccacccctccccatacgcaacttagaagagagactcaaccggtcaatagacagcctagtacaccaactaggttctgaccaagaacttctgtttccccggaccgagtatcaataggctgcttacgcggctgaaggagaaaacgttcgttacccggccaattacttcgagaaacctagtatcaccatggaagttgcgcagtgtttcgctccgcacaaccccagtgtagatcaggtcgatgagtcaccgcattccccacaggcgactgtggcggtggctgcgttggcggcctgcccgtggggcaacccacgggacgcttcaataccgacatggtgcgaagagtctattgagctaattggtagtcctccggcccctgaatgcggctaatcctaactgtggagcagatacccacgcgccagtgggcagtctgtcgtaatgggcaactccgcagcggaaccgactactttgggtgtccgtgtttccttttatcctcataatggctgcttatggtgacaattgaaagattgttaccatatagctattggattggccatccggtgactaacagagcaattatttatttgtttgttgggtttgtaccattgaactacaaggtccttaatactctaaactacattataagtcttaatacagtgca

SEQ ID NO: 20137 - DNA, 742 bp, synthetic construct
  source 1..742: mol_type = other DNA
ttaaaacagctctggggttgttcccaccccagaggcccacgtggcggctagtacactggtatcacggtacctttgtacgcctgttttatactccctcccccgcaacttagaagcatacaattcaagctcaataggagggggtgcaagccagcgcctccgtgggcaagcactactgtttccccggtgaggccgcatagactgttcccacggttgaaagtggccgatccgttatccgctcatgtacttcgagaagcctagtatcgctctggaatcttcgacgcgttgcgctcagcactcaaccccggagtgtagcttgggccgatgagtctggacagtccccactggcgacagtggtccaggctgcgctggcggcccacctgtggcccaaagccacgggacgctagttgtgaacagggtgtgaagagcctattgagctacatgagagtcctccggcccctgaatgcggctaatcctaaccatggagcaggcagctgcaacccagcagccagcctgtcgtaacgcgcaagtccgtggcggaaccgactactttgggtgtccgtgtttccttttattcttgaatggctgcttatggtgacaatcatagattgttatcataaagcgagttggattggccatccagtgtgaatcagattaattactcccttgtttgttggatccactcccgaaacgttttactccttaacttattgaaattgtttgaagacaggatttcagtgtcaca

SEQ ID NO: 20138 - DNA, 742 bp, synthetic construct
  source 1..742: mol_type = other DNA
ttaaaacagggtgtgggttattcccacccacagggcccaccgggcgctagcacactggtatcacggtacctttgtgcgcctgttttatacaccctttcccaatgtaacttagaagcttagtacaaccggtcaatagattgcacagtaaaccaactgggcactgaccaagcacttctgttaccccggactgagtatcaataggctgctcacgcggctgaaggagaaaacgttcgttacccggccaattacttcgagaaacccagtaccatcatgaaggttgcgaagtgtttcgctccgcacaaccccagtgtagatcaggccgatgagtcaccgcactccccacgggcaaccgtggcggtggctgcgttggcggcctgcccatggggtaacccatgggacgcttcaatactgacatggtgcgaagagtctattaagctaattggtagtcctccggcccctgaatgcggctaatcctaactgcggacgagatacccacacgccagtgggcagtctgtcgtaatgggcaactctgcagcggaaccgactactttgggtgtccgtgtttccttttattcttatactggctgcttatggtgacaattgagagattgttgccatatagctattggattggccatccggtgacaaatagagcaattgtttacctatttgttggttttataccattaaatcacaaagttttaaaaaccctcaactacatcttagcacttaatacagcaag

SEQ ID NO: 20139 - DNA, 742 bp, synthetic construct
  source 1..742: mol_type = other DNA
ttaaaacagctctggggttgttcccaccccagaggcccacgtggcggctagtacactggtatcacggtacctttgtacgcctgttttatactccctcccccgcaacttagaagcatacaattcaagctcaataggagggggtgcaagccagcgcctccgtgggcaagcactactgtttccccggtgaggccgcatagactgttcccacggttgaaagtgtccgatccgttatccgctcatgtacttcgagaagcctagtatcgctctggaatcttcgacgcgttgcgctcagcactcaaccccggagtgtagcttgggccgatgagtctggacagtccccactggcgacagtggtccaggctgcgctggcggcccacctgtggcccaaagccacgggacgctagttgtgaacagggtgtgaagagcctattgagctacatgagagtcctccggcccctgaatgcggctaatcctaaccatggagcaggcagctgcaacccagcagccagcctgtcgtaacgcgcaagtccgtggcggaaccgactactttgggtgtccgtgtttccttttattcttgaatggctgcttatggtgacaatcatagattgttatcataaagcgagttggattggccatccagtgtgaatcagattaattactcccttgtttgttggatccactcccgaaacgttttactcctcaacttattgaaattgtttgaagacaggatttcagtgtcaca

SEQ ID NO: 20140 - DNA, 742 bp, synthetic construct
  source 1..742: mol_type = other DNA
ttaaaacagctctggggttgttcccaccccagaggcccacgtggcggctagtacactggtatcacggtacctttgtacgcctgttttatactccctcccccgcaacttagaagcatacaactcaagctcaataggagggggtgcaagccagcgcctccgtgggcaagcactactgtttccccggtgaggtcgcatagactgttcccacggttgaaagtgtccgatccgttatccgctcatgtacttcgagaagcctagtatcgctctggaatcttcgacgcgttgcgctcagcactcaaccccggagtgtagcttgggccgatgagtctggacagtccccactggcgacagtggtccaggctgcgctggcggcccacctgtggcccaaagccacgggacgctagttgtgaacagggtgtgaagagcctattgagctacatgagagtcctccggcccctgaatgcggctaatcctaaccatggagcaggcagctgcaacccagcagccagcctgtcgtaacgcgcaagtccgtggcggaaccgactactttgggtgtccgtgtttccttttattcttgaatggctgcttatggtgacaatcatagattgttatcataaagcgagttggattggccatccagtgtgaatcagattaattactcccttgtttgttggatccactcccgaaacgttttactccttaacttattgaaattgtttgaagacaggatttcagtgtcaca

SEQ ID NO: 20141 - DNA, 733 bp, synthetic construct
  source 1..733: mol_type = other DNA
tggggttgttcccaccccagaggcccacgtggcggctagtactccggtattacggtacccttgtacgcctgttttatactcccctccccgtaacttagatgaaacaaaacaagttcaataggagggggtacaaaccagtaccaccacgaacaagcacttctgtctccccggtgacattgcatagactgtccccacggttgaaagcaattgatccgttacccgctcttgtacttcgagaagcctagtaccatcttggaatcatcgatgcgttgcgctccacactcagtcccagagtgtagcttaggctgatgagtctggacattcctcaccggcgacggtggtccaggctgcgttggcggcctacctgtggcccaaagccacaggacgctagatgtgaacaaggtgtgaagagcctattgagctataagagagtcctccggcccctgaatgcggctaatcccaaccacggatcaagggtgcacgaaccagtgtataccttgtcgtaacgcgcaagtctgtggcggaaccgactactttgggtgaccgtgtttccttttattatttcaatggctgcttatggtgacaatcattgattgttatcataaagcgaattggattggccatccggtgaaagtgaaacatattgtttgcctcctcgttgggtctactccaaccaatctctttacttacaatcttaccactacagttttgctggttagaagtgtgtttcacg

SEQ ID NO: 20142 - DNA, 742 bp, synthetic construct
  source 1..742: mol_type = other DNA
taaaacagcctgtgggttgttcccacccacggggcccactgggcgctagcacactggtatcacggtacctttgtgcgcctgttttatccaccctcccccccacgtaacttagaagcaaaacctacccggtcaatagacaactcagtgagccaactgagcaatgaccaagcacttctgttaccccggaccaagtatcaatagactgctagcgcggttgaaggagaaaacgtccgttacccggccaattacttcgagaaacctagtaccaccatggaggttgcgcagtgtttcgctccgcacaaccccagtgtagatcaggccgatgagccaccgcattccccacgggcgaccgtggcggtggctgcgctggcggcctgcccacggggcaacccgtgggacgcttcaatactgacatggtgcgaagagtctattgagctaattggtagtcctccggcccctgaatgcggctaatcctaactgcggagcagatacccacgtaccagtgggcagtctgtcgtaacgggcaactctgcagcggaaccgactactttgggtgtccgtgtttccttttattcttacattggctgcttatggtgacaattgaaagattgttaccatatagctattggattggccatccggtgacaaatagagcgatcatttatttgtttgttggttttattccattgaacctcaaagttttgaacactcttaattttattatattgctcaacacaacaaa

SEQ ID NO: 20143 - DNA, 743 bp, synthetic construct
  source 1..743: mol_type = other DNA
ttaaaacagcctgtgggttgttcccacccacagggcccaccgggcgtcagcacactggtattgcggtacctttgtgcgcctgttttatatatccctacccgaacgtaacctagaagcaaattaatgaggatcgatagtcagcacggcacaccagccgtgttttgatcaagcacttctgttaccccggaccgagtatcaataggctactcacgtggccgaaggagaaagtgttcgttacccggccaattacttcgagaaacccagtaacaccatgaaggttgcgcagcgtttcgctccgcacaaccccagtgtagatcaggtcgatgagtcaccgcattccccacgggcgaccgtggcggtggctgcgctggcggcctgcccatagggtgacctatgggacgcttcaatactgacatggtgcgaagagtctattgagctaattggtagtcctccggcccctgaatgcggctaatcctaactgcggagcaggtgcccacaaaccagtgggtagtctgtcgtaatgggcaactctgcagcggaaccgactactttgggtgtccgtgtttccttttattcttatactggctgcttatggtgacaattgaaaggttgttaccatatagctattggattggccatccggtgacaaacagagcgattatatacttgtttgttggtttcataccactaaatcacaagactttaaacacccttaatttcataatagcattaaatacagcaag

SEQ ID NO: 20144 - DNA, 742 bp, synthetic construct
  source 1..742: mol_type = other DNA
ttaaaacagcctgtgggttgttcccacccacggggcccactgggcgctagcacactggtatcacggtacctttgtgtgcctgttttatccaccctccccccacgtaacttagaagcaaaacctacccggtcaatagacaactcagtgagccaactgagcaatgaccaagcacttctgttaccccggactaagtatcaatagactgctagcgcggttgaaggagaaaacgtccgttacccggccaattacttcgagaaacctagtaccaccatggaggttgcgcagtgtttcactccgcacaaccccagtgtagatcaggccgatgagccaccgcactccccacgggcgaccgtggcggtggctgcgctggcggcctgcccatggggcaacccatgggacgcttcaatactgacatggtgcgaagagtctattgagctaattggtagtcctccggcccctgaatgcggctaatcctaactgcggagcagatacccacgtaccagtgggcagtctgtcgtaacgggcaactctgcagtggaaccgactactttgggtgtccgtgtttccttttattcttacattggctgcttatggtgacaattgaaagattgttaccatatagctattggattggccatccggtgacaaatagagcgatcatttatttgtttgttggttttgttccattgaacctcaaagttttgaacactcttaactttattatatcactcaacacaacaaa

SEQ ID NO: 20145 - DNA, 743 bp, synthetic construct
  source 1..743: mol_type = other DNA
taaaacagcctgtgggttgttcccacccacagggcccactgggcgccagcactctggtattgcggtaccttagtgcgcctgttttatacaccccttccctaaatgcaatttagatgcatgtaaataaagaccaatagcaggcgcagcacaccagctgtgtctcggtcaagcactcctgttaccccggactgagtatcaataggctactcacgtggctgaaggagaaaacgttcgttacccggccaattacttcgagaaacctagtaacaccatgaaggttgcgaagtgtttcgctccgcacaaccccagtgtagatcaggtcgatgagtcaccgcattccccacgggtgaccgtggcggtggctgcgttggcggcctgcccatgggattacccatgggacgcttcaatactgacatggtgtgaagagtctattgagctaattggtattcctccggcccctgaatgcggctaatcccaactgcggagcagatacccacacaccagtgggcagtctgtcgtaatgggcaactctgcagcggaaccgactactttgggtgtccgtgtttctctttattcttatactggctgcttatggtgacaattgagagattgttgccatatagctattggattggccatccggtgacaaatagagcaattgtgtatctatttgttggttttataccattaaattacaaagttttaagcacccttaatcttattatagcattcaatacagcaaa

SEQ ID NO: 20146 - DNA, 743 bp, synthetic construct
  source 1..743: mol_type = other DNA
taaaacagcctgtgggttgttcccacccacagggcccactgggcgccagcactctggtattgtggtaccttagtgcgcctgttttatacaccccttccctaaatgtaatttagatgcatgtaaacaaaggccaatagcaggcgcagcacaccagctgtgtctcggtcaagcacttctgttaccccggactgagtatcaataggctactcacgtggctgaaggagaaaacgttcgttatccggccaattacttcgagaaacctagtaataccatgaaggttgcgaagtgtttcgctcagcacaaccccagtgtagatcaggtcgatgagtcaccgcattccccacgggtgaccgtggcggtggctgcgctggcggcctgcccatgggattacccatgggacgcttcaatattgacatggtgtgaagagtctattgagctaattggtattcctccggcccctgaatgcggctaatcctaactgcggagcaggtacccacataccagtgggcagcctgtcgtaatgggcaactctgcagcggaaccgactactttgggtgtccgtgtttctctttattcttatactggctgcttatggtgacaattgagaaattgttgccatatagctattggattggccatccggtgacaaatagagcaattgtgcatccatttgttggttttatactattgtattacaaagttttaagtacccttaatcctattatatcattcaatacagcaaa

SEQ ID NO: 20147 - DNA, 742 bp, synthetic construct
  source 1..742: mol_type = other DNA
ttaaaacagctctggggttgttcccaccccagaggcccacgtggcggctagtacactggtatcacggtacctttgtacgcctgttttatactccctcccccgcaacttagaagcatacaattcaagctcaataggagggggtgcaagccagcgcctccgtgggcaagcactactgtttccccggtgaggccgcatagactgttcccacggttgaaagtgtccgatccgttatccgctcatgtacttcgagaagcctagtatcgctctggaatcttcgacgcgttgcgctcagcactcaaccccggagtgtagcttgggctgatgagtctggacagtccccactggcgacagtggtccaggctgcgctggcggcccacctgtggcccaaagccacgggacgctagttgtgaacagggtgtgaagagcctattgagctacatgagagtcctccggcccctgaatgcggctaatcctaaccatggagcaggcagctgcaacccagcagccagcctgtcgtaacgcgcaagtccgtggcggaaccgactactttgggcgtccgtgtttccttttattcttgaatggctgcttatggtgacaatcatagattgttatcataaagcgagttggattggccatccagtgtgaatcagattaattacccccttgtttgttggatccactcccgaaacgttttactccttaacttattgaaattgtttgaagacaggatttcagtgtcaca

SEQ ID NO: 20148 - DNA, 738 bp, synthetic construct
  source 1..738: mol_type = other DNA
aacagctctggggttgttcccaccccagaggcccacgtggcggctagtacactggtatcacggtacctttgtacgcctgttttatactccctcccccgcaacctagaagcatacaattcaagctcaataggagggggtgcaagccagcacctccatgggcaagcactactgtttccccggtgaggccgcatagactgttcccacggttgaaagtgtccgatccgttatccgctcatgtacttcgagaagcctagtatcgctctggaatcttcgacgcgttgcgctcagcactcaaccccggagtgtagcttgggccgatgagtctggacagtccccactggcgacagtggtccaggctgcgctggcggcccacctgtggcccaaagccacgggacgctagttgtgaacagggtgtgaagagcctattgagctacatgagagtcctccggcccctgaatgcggctaatcctaaccatggagcaggcagctgcaacccagcagccagcctgtcgtaacgcgcaagtccgtggcggaaccgactactttgggtgtccgtgtttccttttattcttgaatggctgcttatggtgacaatcatagattgttatcataaagcgagttggattggccatccagtgtgaatcagattaattactcccttgtttgttggatccactcccgaagcgttttactccttaacttattgaaattgtttgaagacaggatttcagtgtcaca

SEQ ID NO: 20149 - DNA, 741 bp, synthetic construct
  source 1..741: mol_type = other DNA
taaaacagctctggggttgttcccaccccagaggcccacgtggcggctagtacactggtatcacggtacctttgtacgcctgttttatactccctcccccgcaacttagaagcatacaattcaagctcaataggagggggtgcaaaccagcgcctccgtgggcaagcactactgtttccccggtgaggccgcatagactgttcccacggttgaaagtgtccgatccgttatccgctcatgtacttcgagaagcctagtatcgctctggaatcttcgacgcgttgcgctcagcactcaaccccggagtgtagcttgggccgatgagtctggacagtccccactggcgacagtggtccaggctgcgctggcggcccacctgtggcccaaagccacgggacgctagttgtgaacagggtgtgaagagcctattgagctacatgagagtcctccggcccctgaatgcggctaatcctaaccatggagcaggcagctgcaacccagcagccagcctgtcgtaacgcgcaagtccgtggcggaaccgactactttgggtgtccgtgtttccttttattcttgaatggctgcttatggtgacaatcatagattgttatcataaagcgagttggattggccatccagtgtgaatcagattaattactcccttgtttgttgggtccactcccgaaacgttttactccttaacttattgaaattgtttgaagacaggatttcagtgtcaca

SEQ ID NO: 20150 - DNA, 745 bp, synthetic construct; identical to SEQ ID NO: 1109
  source 1..745: mol_type = other DNA

SEQ ID NO: 20151 - DNA, 732 bp, synthetic construct
  source 1..732: mol_type = other DNA
ggggttgttcccaccccagaggcccacgtggcggctagtactccggtattacggtacccttgtacgcctgttttatactcccctccccgtaacttagatgaaacaaaacaagttcaataggagggggtacaaaccagtaccaccacgaacaagcacttctgtctccccggtgacattgcatagactgtccccacggttgaaagcgattgatccgttacccgctcttgtacttcgagaagcctagtaccatcttggaatcatcgatgcgttgcgctccacactcagtcccagagtgtagcttaggctgatgagtctggacattcctcaccggcgacggtggtccaggctgcgttggcggcctacctgtggcccaaagccacaggacgctagatgtgaacaaggtgtgaagagcctattgagctataagagagtcctccggcccctgaatgcggctaatcccaaccacggatcaagggtgcacgaaccagtgtataccttgtcgtaacgcgcaagtctgtggcggaaccgactactttgggtgaccgtgtttccttttattatttcaatggctgcttatggtgacaatcattgattgttatcataaagcgaattggattggccacccggtgaaagtgaaacatatcgtttgcctcttcgttgggtctactccaaccaatctctttacttacaatcttaccactacagttttgctggttaaaagtgtgtttcacg

SEQ ID NO: 20152 - DNA, 741 bp, synthetic construct
  source 1..741: mol_type = other DNA
aaaacagcctgtgggttgttcccacccacagggcccaccgggcgtcagcacactggtattgcggtacctttgtgcgcctgttttatatatccctgcccgaacgtaacctagaagcaaattaacgaggatcgatagtcagcacggcacaccagccgtgttttgatcaagcacttctgttaccccggaccgagtatcaataggctactcacgtggccgaaggagaaagtgttcgttacccggccaattacttcgagaaacccagtaacaccatgaaggttacgcagcgtttcgctccgcacaaccccagtgtagatcaggtcgatgagtcaccgcattccccacgggcgaccgtggcggtggctgcgctggcggcctgcccatagggtgacctatgggacgcttcaatactgacatggtgcgaagagtctattgagctaattggtagtcctccggcccctgaatgcggctaatcctaactgcggagcaggtgcccacaaaccagtgggtagtctgtcgtaatgggcaactctgcagcggaaccgactactttgggtgtccgtgtttccttttattcttatactggctgcttatggtgacaatcgaaaggttgttaccatatagctattggattggccatccggtgacaaacagagcgattatatacttgtttgttggcttcataccactaaattacaagactttaaacacccttaatttcataatagcattaaatacagcaag

SEQ ID NO: 20153 - DNA, 741 bp, synthetic construct
  source 1..741: mol_type = other DNA
taaaacagcctgtgggttgttcccacccacggggcccactgggcgctagcacactggtatcacggtacctttgtgcgcctgttttattcaccctccccccacgtaacttagaagcaaaacctacccggtcaatagacaactcagtgagccaactgagcaatgaccaagcacttctgttaccccggaccaagtatcaatagactgctagcgcggttgaaggagaaaacgtccgttacccggccaattacttcgagaaacctagtaccaccatggaggttgcgcagtgtttcgctccgcacaaccccagtgtagatcaggccgatgagccaccgcattccccacgggcgaccgtggcggtggctgcgctggcggcctgcccacggggcaacccgtgggacgcttcaatactgacatggtgcgaagagtctattgagctaattggtagtcctccggcccctgaatgcggctaatcctaactgcggagcagatacccacgtaccagtgggcagtctgtcgtaacgggcaactctgcagcggaaccgactactttgggtgtccgtgtttccttttattcttacattggctgcttatggtgacaattgaaagattgttaccatatagctattggattggccatccggtgacaaatagagcgatcatctatttgtttgttggttttattccattgaacctcaaagttttgaacactctcaattttattatattgctcaacacaacaaa

SEQ ID NO: 20154 - DNA, 743 bp, synthetic construct
  source 1..743: mol_type = other DNA
taaaacagcctgtgggttgttcccacccacagggcccactgggcgccagcactctggtattgcggtaccttagtgcgcctgttttatacaccctttccctaaatgcaatttagatgcatgtaaataaagaccaatagcaggcgcagcacaccagctgtgtctcggtcaagcactcctgttaccccggactgagtatcaataggctactcacgtggctgaaggagaaaacgttcgttacccggccaattacttcgagaaacctagtaacaccatgaaggttgcgaagtgtttcgctccgcacaaccccagtgtagatcaggtcgatgagtcaccgcatcccccacgggtgaccgtggcggtggctgcgttggcggcctgcccatgggattacccatgggacgcttcaatactgacatggtgtgaagagtctattgagctaattggtattcctccggcccctgaatgcggctaatcccaactgcggagcagatacccacacaccagtgggcagtctgtcgtaatgggcaactctgcagcggaaccgactactttgggtgtccgtgtttctctttattcttatactggctgcttatggtgacaattgagagattgttgccatatagctattggattggccatccggtgacaaatagagcaattgtgtatctatttgttggttttataccattaaattacaaagctttaagcacccttaatcttattatagcattcaatacagcaaa

SEQ ID NO: 20155 - DNA, 739 bp, synthetic construct
  source 1..739: mol_type = other DNA
aaacagctctggggttgttcccaccccagaggcccacgtggcggctagtacactggtatcacggtacctttgtacgcctgttttatactccctcccccgcaacttagaagcatacaattcaagctcaataggagggggtgcaagccagcgcctccgtgggcaagcactactgtttccccggtgaggccgcatagactgttcccacggttgaaagtgtccgatccgttatccgctcatgtacttcgagaagcctagtatcgctctggaatcttcgacgcgttgcgctcagcactcaaccccggagtgtagcttgggccgatgagtctggacagtccccactggcgacagtggtccaggctgcgctggcggcccacccgtggcccaaagccacgggacgctagttgtgaacagggtgtgaagagcctattgagctacatgagagtcctccggcccctgaatgcggctaatcctaaccatggagcaggcagctgcaacccagcagccagcctgtcgtaacgcgcaagtccgtggcggaaccgactactttgggtgtccgtgtttccttttattcttgaatggctgcttatggtgacaatcatagattgttatcataaagcgagttggattggccatccagtgtgaatcagattaattactcccttgtttgttggatccactcccgaaacgttttactccttaacttattgaaattgtttgaagacaggatttcagtgtcaca

SEQ ID NO: 20156 - DNA, 741 bp, synthetic construct
  source 1..741: mol_type = other DNA
taatgcagctctggggttgttcccaccccagaggcccacgtggcggctagtacactggtatcacggtacctttgtacgcctgttttatactccctcccccgcaacttagaagcatacaattcaagctcaataggagggggtgcaagccagcgcctccgtgggcaagcactactgtttccccggtgaggccgcatagactgttcccacggttgaaagtgtccgatccgttatccgctcatgtacttcgagaagcctagtatcgctctggaatcttcgacgcgttgcgctcagcactcaaccccggagtgtagcttgggccgatgagtctggacagtccccactggcgacagtggtccaggctgcgctggcggcccacctgtggcccaaagccacgggacgctagttgtgaacagggtgtgaagagcctattgagctacatgagagtcctccggcccctgaatgcggctaatcctaaccatggagcaggcagctgcaacccagcagccagcctgtcgtaacgcgcaagtccgtggcggaaccgactactttgggtgtccgtgtttccttttattcttgaatggctgcttatggtgacaatcatagattgttatcataaagcgagttggattggccatccagtgtgaatcagattaattactcccttgtttgttggatccactcccgaaacgttttactccttaacttattgaaattgtttgaagacaggatttcagtgtcaca

SEQ ID NO: 20157 - DNA, 742 bp, synthetic construct
  source 1..742: mol_type = other DNA
ttaaaacagctctggggttgttcccaccccagaggcccacgtggcggctagtacactggtatcacggtacctttgtacgcctgttttatactccctcccccgcaacttagaaacatacaattcaagctcaataggagggggtgcaagccagcgcctccgtgagcaagcactactgtttccccggtgaggccgcatagactgttcccacggttgaaagtgtccgatccgttatccgctcatgtacttcgagaagcctagtatcgctctggaatcttcgacgcgttgcgctcagcactcaaccccggagtgtagcttgggccgatgagtctggacagtccccactggcgacagtggtccaggctgcgctggcggcccacctgtggcccaaagccacaggacgctagttgtgaacagggtgtgaagagcctattgagctacatgagagtcctccggcccctgaatgcggctaatcctaaccacggagcaggcagctgcaacccagcagccagcctgtcgtaacgcgcaagtccgtggcggaaccgactactttgggtgtccgtgtttccttttattcttgaatggctgcttatggtgacaatcacagattgttatcataaagcgagttggattggccatccagtgtgaatcagattaattactcccttgtttgttggatccactcccgaaacgttttactccttaacttattgaaattgtttgaagacaggatttcagtgtcaca

SEQ ID NO: 20158 - DNA, 742 bp, synthetic construct
  source 1..742: mol_type = other DNA
ttaaaacagctctggggttgttcccaccccagaggcccacgtggcggctagtacactggtatcacggtacctttgtacgcctgttttatactccctcccccgcaacttagaaacatacaattcaagctcaataggagggggtgcaagccagcgcctccgtgagcaagcactactgtttccccggtgagcccgcatagactgttcccacggttgaaagtgtccgatccgttatccgctcatgtacttcgagaagcctagtatcgctctggaatcttcgacgcgttgcgctcagcactcaaccccggagtgtagcttgggccgatgagtctggacagtccccactggcgacagtggtccaggctgcgctggcggcccacctgtggcccaaagccacaggacgctagttgtgaacagggtgtgaagagcctattgagctacatgagagtcctccggcccctgaatgcggctaatcctaaccacggagcaggcagctgcaacccagcagccagcctgtcgtaacgcgcaagtccgtggcggaaccgactactttgggtgtccgtgtttccttttattcttgaatggctgcttatggtgacaatcacagattgttatcataaagcgagttggattggccatccagtgtgaatcagattaattactcccttgtttgttggatccactcccgaaacgttttactccttaacttattgaaattgtttgaagacaggatttcagtgtcaca

SEQ ID NO: 20159 - DNA, 742 bp, synthetic construct
  source 1..742: mol_type = other DNA
ttaaaacagctctggggttgttcccaccccagaggcccacgtggcggctagtacactggtatcacggtacctttgtacgcctgttttatactccctcccccgcaacttagaaacatacaatttaagctcaataggagggggtgcaagccagcgcctccgtgagcaagcactactgtttccccggtgaggccgcatagactgttcccacggttgaaagtgtccgatccgttatccgctcatgtacttcgagaagcctagtatcgctctggaatcttcgacgcgttgcgctcagcactcaaccccggagtgtagcttgggccgatgagtctggacagtccccactggtgacagtggtccaggctgcgctggcggcccacctgtggcccaaagccacaggacgctagttgtgaacagggtgtgaagagcctattgagctacatgagagtcctccggcccctgaatgcggctaatcctaaccacggagcaggcagctgcaacccagcagccagcctgtcgtaacgcgcaagtccgtggcggaaccgactactttgggtgtccgtgtttccttttattcttgaatggctgcttatggtgacaatcacagattgttatcataaagcgagttggattggccatccagtgtgaatcagattaattactcccttgtttgttggatccactcccgaaacgttttactccttaacttattgaaattgtttgaagacaggatttcagtgtcaca

SEQ ID NO: 20160 - DNA, 747 bp, synthetic construct
  source 1..747: mol_type = other DNA
tttaaaacagtcctgtgggttgttacccacccacagggcccactgggcgccagcacactggtatcacggtacctttgtgcgcctgttttatatacccttcccctactaagtaacttagaagcaattaaacaaagaccaacagtaagcacagcgcaccagctgtgtttcggtcaagcacttctgttaccccggactgagtatcaataggctactcacgtggctgaaggagaaaacgttcgttacccgaccaattacttcgagaagcctagtaacaccatggaggttgcgcggcgtttcgctccacacaaccccagtgcagatcaggtcgatgagccaccgcattccccacgggcgaccgtggcggtggctgcgttggcggcctgcccatggggcaacccatgggacgcttcaatactgacatggtgcgaagagtctattgagctaattggtagtcctccggcccctgaatgcggctaatcccaactgcggagcagatacccacgcgccagtgggcagtctgtcgtaatgggcaactctgcagcggaaccgactactttgggtgtccgtgtttcctttattcttatactggctgcttatggtgacaattgagagattgttaccatatagctattggattggccatccggtgacgagcagagctattatttacctatttgttggttttataccattgaactataaagttttaaaaaccttaaacttcatcttagtactcaatacagcaaa

SEQ ID NO: 20161 - DNA, 743 bp, synthetic construct
  source 1..743: mol_type = other DNA
ttaaaacagcctgtgggttgttcccacccatagggcccactgggcgctagcacactggtattacggtacctttgtgcgcctgttttattcacccctctcccaaacgtaacttagaagctcaacacatgtggtcagtaggcagcccagtatgccaactgggtcttgaccaagcacttctgttaccccggactgagtatcaataggctgctcacgcggctgaaggagaaagtgttcgtcacccggccaattacttcgagaaacctagtatcaccatggaagttgcgcagcgtttcgctccgcacgaccccagtgtagatcaggccgatgagtcaccgcactcctcacgggcgaccgtggcggtggctgcgctggcggcctgcccatgaggcaactcatgggacgcttcaatactgacatggtgtgaagagtctattgagctaattggtagtcctccggcccctgaatgcggctaatcctaaccgcagagcagatacccacacgccagtgggcagtctgtcgtaacgggtaactctgcggcggaaccgactactttgggtgtccgtgtttctttttattctttattggctgcttatggtgacaattgaaagattgttgccatatagctattggattggccatccagtgacaaacagagcgactgtttatctatttgttggtttcataccattaaattttaaagtattaaagactatcaacttgatcatactacttaatacagcaaa

SEQ ID NO: 20162 - DNA, 742 bp, synthetic construct
  source 1..742: mol_type = other DNA
ttaaaacagcctgtgggttgttcccacccacagggcccactgggcgctagcactctggtatcacggtacccttgtgcgcctgttttatcccccccttcccagatgtaacttagaagctaaacctaatggtcaataggaaccccagcacaccagctgggtcttgaccaagcacctctgttaccccggactgagtatcaatagactgctcgcgcggttgaaggagaaaacgttcgttacccggccaactacttcgagaaacctagtaacaccatgaaagttgcgcagtgtttcgttccacacaaccccagtgtagatcaggtcgatgagtcaccgcgttccccacgggcgaccgtggcggtggctgcgttggcggcctgcccatggggtaacccatgggacgcttcaatactgacatggtgcaaagagtctattgagctagttggtagtcctccggcccctgaatgcggctaatcccaactgcggagcagacacccacatgccagtgggcagtctgtcgtaacgggcaactctgcagcggaaccgactactttgggtgtccgtgtttccttttattttcatactggctgcttatggtgacaattgaaagattgttaccatatagctattggattggccatccggtgacaaatagagcaattatttaccaatttgttggttttgtaccattaaattttaaagttttaaagactctcaaccttattatacgaatcaactcagcaaa

SEQ ID NO: 20163 - DNA, 737 bp, synthetic construct
  source 1..737: mol_type = other DNA
tggggttgttcccaccccagaggcccacgtggcggctagtactccggtattacggtacccttgtacgcctgttttatactcccttccccgcaacttagaagaattaaaccaagttcaatagaagggggtacaagccagtaccaccacgaacaagcacttctgtttccccggtgacgccgtatagactgtacccacggttgaaaacgactgatccgttatccgctttcgtacttcgagaagcctagtatcatcttgggatcatcgatgcgttgcgctcagcactcaaccccggagtgtagcttaggccgatgagtctggacattcctcaccggtgacggtggtccaggctgcgttggcggcctacctgtggcccaaagccacaggacgctagttgtgaacaaggtgtgaagagcctattgagctacgaaagattcctccggcccctgaatgcggctaatcccaaccacggagcaagtgctcgcacaccagtgagtagcttgtcgtaacgggtaactctgtggcggaaccgactactttgggtgtccgtgtttcctgctatttttatcatggctgcttatggtgacaatcagagattgttatcataaagcgaattggattggccatccggtgagtgttgtgtcaggtatacaactgtttgttggaaccactgtgttagctttacttctcatttaaccaattaatcacaaacaatacgaggacaaaacaacaatactaca

SEQ ID NO: 20164 - DNA, 742 bp, synthetic construct
  source 1..742: mol_type = other DNA
aaaacagcctgtgggttgttcccacccacagggcccactgggcgccagcactctggtattgcggtaccttagtgcgcctgttttatacaccccttccctaaatgtaatttagatgcatgtaaataaaggccaatagcaggcgcagcacaccagctgtgtctcggtcaagcactcctgttaccccggactgagtatcaataggctactcacgtggctgaaggagaaaacgttcgttacccggccaattacttcgagaaacctagtaataccatgaaggttgcgaagtgtttcgctcagcacaaccccagtgtagatcaggtcgatgagtcaccgcattccccacgggtgaccgtggcggtggctgcgttggcggcctgcccatgggattacccatgggacgcttcaatattgacatggtgtgaagagtctattgagctaattggtattcctccggcccctgaatgcggctaatcccaactgcggagcaggtacccacataccagtgggcagtctgtcgtaatgggcaactctgcagcggaaccgactactttgggtgtccgtgtttctctttattcttatactggctgcttatggtgacaattgagaaattgttgccatatagctattggattggccatccggtgacaaatagagcaattgtgcatccatttgttggttttataccattgaattacaaagttttaagtacccttaatcctattatatcattcaatacagcaaa

SEQ ID NO: 20165 - DNA, 743 bp, synthetic construct
  source 1..743: mol_type = other DNA
ttaaaacagcctgtgggttgtacccacccacagggcccactgggcgccagcactctggtattacggtacccttgtgcgcctgttttatatcccttccccaaggtaaacgttagaagcaatgcactcccgatcaatagaaggtgcgacgcgccagtcgtatctcgatcaagcacttctgtttccccggaccgagtatcaatagactgctagcgcggttgaaggagaaaacgttcgttacccgactaactacttcgagaagcccagtagcgccatgaaagttgcagagtgtttcgctcagcacttcccccgtgtagatcaggccgatgagtcaccgcaatccccacgggcgaccgtggcggtggctgcgttggcggcctgcctatggggaaacccataggacgctcaaatacagacatggtgcgaagagtctattgagctagttagtactcctccggcccctgaatgcggctaatcctaactgcggagcaagtactcacaatccagtgggcagcttgtcgtaacgggtaactctgcagcggaaccgactactttgggtgtccgtgtttccttttattcctacattggctgcttatggtgacaatcaaagagttgttaccatatagctattggattggccatccggtgactaataaagcaattatatttctttttgttgggtttgtaccccttaatacaaccagcttcaccacattgtgttacatcattagactgaacaaggcaaa

SEQ ID NO: 20166 - DNA, 743 bp, synthetic construct
  source 1..743: mol_type = other DNA
ttaaaacagcctgtgggttggacccacccatagggcccactgggcgctagcacactggtatcacggtacctttgtgcgcctgttttatccacccttccccgaacgaaacttagaagtttgacttaaacggtcaatagaaaacccagtacaccaactgggtcgtgaccaagcacttctgtgaccccggactgagtatcaataagctactcacgtggctgaaggaggaaacgttcgttacccggccaattacttcgagaaacttagtaccaccatgaaggttgcgtagcgtttcgctccacacgaccccagtgtagatcaggtcgatgagtcaccgcgttccccacgggtgaccgtggcggtggctgcgttggcggcctgcccttggggcaacccaagggacgcttcaatactgacatggtgcgaagagtctattgagctaattggtagtcctccggcccctgaatgcggctaatcccaactgcggagcagatacccacatgccagtgggcagtctgtcgtaacgggcaactctgcagcggaaccgactactttgggtgtccgtgtttccttttattcttatactggctgcttatggtgacaattgagagattgttaccatatagctattggattggccatccagtgtctaatagagcaatcatctacctttttgttggatttattccacttgactataaagcactcaaaacacttgaatacattgtaaatcttaacacaacaaa

SEQ ID NO: 20167 - DNA, 743 bp, synthetic construct
  source 1..743: mol_type = other DNA
ttaaaacagcctgtgggttgaacccacccacagggcccactgggcgctagcacactggtatcacggtacctttgtgcgcctgttttatccacccttccccgaacgaaacttagaagtttgacttaaacggtcaatagaaaacccagtacaccaactgggtcgtgaccaagcacttctgtgaccccggactgagtatcaataagctactcacgtggctgaaggagaaaacgttcgttacccggccaattacttcgagaaacttagtaccaccatgaaggttgcgtagcgtttcgctccgcacgaccccagtgtagatcaggtcgatgagtcaccgcgttccccacgggtgaccgtggcggtggctgcgttggcggcctgcccttggggcaacccaagggacgcttcaatactgacatggtgcgaagagtctattgagctaattggtagtcctccggcccctgaatgcggctaatcccaactgcggagcagatacccacatgccagtgggcagtctgtcgtaacgggcaactctgcagcggaaccgactactttgggtgtccgtgtttccttttattcttatactggctgcttatggtgacaattgagaaattgttaccatatagctattggattggccatccattgtctaatagagcaatcatctacctttttgttggttttattccacttgactacaaagcactcaaaacacttaaatacattgtaaatcttaacacaacaaa

SEQ ID NO: 20168 - DNA, 743 bp, synthetic construct
  source 1..743: mol_type = other DNA
ttaaaacagcctgtgggttgttcccacccacagggcccactgggcgttagcactctggtatcacggtacctttgtgcgcctgttttacccaccctccctaaaatgtaatttagaagcatgatccgaacggtcattaggtagctcagtgcaccaactgagcccagaccaagcacttctgttaccccggactgagtatcaataggctgctcgcgcggctgaaggagaaaacgttcgttatccggccaattacttcgagaaacccagtaccactatgaaagttgcgcagcgtttcgttccgcacaaccccagtgtagatcaggtcgatgagtcaccgcgttccccacgggcgaccgtggcggtggctgcgttggcggcctgctcatggggcaacccatgagacgcttcaatactgacatggtgcgaagagtctattgagctaattggtagtcctccggcccctgaatgcggctaatcccaactgcggagcagatacccacaaaccagtgggcagtctgtcgtaatgggtaactctgcagcggaaccgactactttgggtgtccgtgtttccttttgttcttacactggctgcttatggtgacaattgagagattgttgccatatagctattggattggccatccggtgactaacagagcaattgtttacttatttattggttttataccgttagattacaaagtcctaaacaccctgaatctcattataacacttaattcagcaaa

SEQ ID NO: 20169 - DNA, 743 bp, synthetic construct
  source 1..743: mol_type = other DNA
ttaaaacagcctgtgggttgttcccacccacagggcccactgggcgttagcactctggtatcacggtacctttgtgcgcctgttttatccaccctccctaaaatgtaatttagaagcatgatccgaacggtcattaggtagctcagtgcaccaactgagcccagaccaagcacttctgttaccccggactgagtatcaataggctgctcgcgcggctgaaggagaaaacgttcgttatccggccaattacttcgagaaacccagtaccactatgaaagttgcgcagcgtttcgttccgcacaaccccagtgtagatcaggtcgatgagtcaccgcgttccccacgggcgaccgtggcggtggctgcgttggcggcctgctcatggggcaacccatgagacgcttcaatactgacatggtgcgaagagtctattgagctaattggtagtcctccggcccctgaatgcggctaatcccaactgcggagcagatacccacaaaccagtgggcagtctgtcgtaatgggtaactctgcagcggaaccgactactttgggtgtccgtgtttccttttgctcttacactggctgcttatggtgacaattgagagattgttgccatatagctattggattggccatccggtgactaacagagcaattgtttacttatttattggttttataccgttagattacaaagtcctaaacaccctgaatctcattataacacttaattcagcaaa

SEQ ID NO: 20170 - DNA, 743 bp, synthetic construct
  source 1..743: mol_type = other DNA
ttaaaacagcctgtgggttgttcccacccacagggcccactgggcgttagcactctggtatcacggtacctttgtgcgcctgttttatccaccctccctaaaatgtaatttagaagcatgaaccgaacggtcattaggtagctcagtgcaccaactgagcccagaccaagcacttctgttaccccggactgagtatcaataggctgctcgcgcggctgaaggagaaaacgttcgttatccggccaattacttcgagaaacccagtaccactatgaaagttgcgcagcgtttcgttccgcactaccccagtgtagatcaggtcgatgagtcaccgcgttccccacgggcgaccgtggcggtggctgcgttggcggcctgcccatggggcaacccatgggacgcttcaatactgacatggtgcgaagagtctattgagctaattggtagtcctccggcccctgaatgcggctaatcccaactgcggagcagatacccacaaaccagtgggcagtctgtcgtaatgggtaactctgcagcggaaccgactactttgggtgtccgtgtttccttttgttcttacactggctgcttatggtgacaattgagaaattgttgccatatagctattggattggccatccggtgactaacagagcaattgtttacttatttattggttttataccgttagattacaaagtcctaaacaccctgaatctcattataacacttaattcagcaaa

SEQ ID NO: 20171 - DNA, 743 bp, synthetic construct
  source 1..743: mol_type = other DNA
ttaaaacagcctgtgggttgttcccacccacagggcccactgggcgttagcactctggtatcacggtacctttgtgcgcctgttttatccaccctccctaaaatgtaacttagaagcatgaaccgaacggtcattaggtagctcagtgcaccaactgagcccagaccaagcacttctgttaccccggactgagtatcaataggctgctcgcgcggctgaaggagaaaacgttcgttatccggccaattacttcgagaaacccagtaccactatgaaagttgcgcagcgtttcgttccgcactaccccagtgtagatcaggtcgatgagtcaccgcgttccccacgggcgaccgtggcggtggctgcgttggcggcctgcccatggggcaacccatgggacgcttcaatactgacatggtgcgaagagtctattgagctaattggtagtcctccggcccctgaatgcggctaatcccaactgcggagcagatacccacaaaccagtgggcagtctgtcgtaatgggtaactctgcagcggaaccgactactttgggtgtccgtgtttccttttgttcttacactggctgcttatggtgacaattgagaaattgttgccatatagctattggattggccatccggtgactaacagagcaattgtttacttatttattggttttataccgttagattacaaagtcctaaacaccctgaatctcattataacacttaattcagcaaa

SEQ ID NO: 20172 - DNA, 743 bp, synthetic construct
  source 1..743: mol_type = other DNA
ttaaaacagcctgtgggttgttcccacccacagggcccactgggcgttagcactctggtatcacggtacctttgtgcgcctgttttatccaccctccctaaaatgtaatttagaagcatgatccgaacggtcattaggtagctcagtgcaccaactgagcccagaccaagcacttctgttaccccggactgagtatcaataggctgctcgcgcggctgaaggagaaaacgttcgttatccggccaattacttcgagaaacccagtaccactatgaaagttgcgcagcgtttcgttccgcacaaccccagtgtagatcaggtcgatgagtcaccgcgttccccacgggcgaccgtggcggtggctgcgttggcggcctgctcatggggcaacccatgagacgcttcaatactgacatggtgcgaagagtctattgagctaattggtagtcctccggcccctgaatgcggctaatcccaactgcggagcagacacccacaaaccagtgggcagtctgtcgtaatgggtaactctgcagcggaaccgactactttgggtgtccgtgtttccttttgttcttacactggctgcttatggtgacaattgagagattgttgccatatagctattggattggccatccggtgactaacagagcaattgtttacttatttattggttttataccgttagattacaaagtcctaaacaccctgaatctcattataacacttaattcagcaaa

SEQ ID NO: 20173 - DNA, 743 bp, synthetic construct
  source 1..743: mol_type = other DNA
ttaaaacagcctgtgggttgttcccacccacagggcccactgggcgttagcactctggtatcacggtacctttgtgcgcctgttttatccaccctccctaaaatgtaatttagaagcatgatccgaacggtcattaggtagctcagtgcaccaactgagcccagaccaagcacttctgttaccccggactgagtatcaataggctgctcgcgcggctgaaggagaaaacgttcgttatccggccaattacttcgagaaacccagtaccactatgaaagttgcgcagcgtttcgttccgcacaaccccagtgtagatcaggtcgatgagtcaccgcgttccccacgggcgaccgtggcggtggctgcgttggcggcctgctcatggggcaacccatgagacgcttcaatactgacatggtgcgaagagtctattgagctaattggtagtcctccggcccctgaatgcggctaatcccaactgcggagcagatacccacaaaccagtgggcagtctgtcgtaatgggtaactctgcagcggaaccgactactttgggtgtccgtgtttccttttgttcttacactggctgcttatggtgacaattgagagattgttgccatatagctattggattggccatccggtgactaacagagcaattgtttacttatttattggttttataccgttagattacaaagtcctaaacaccctgaatctcattataacacttaattcagcaaa

SEQ ID NO: 20174 - DNA, 743 bp, synthetic construct
  source 1..743: mol_type = other DNA
ttaaaacagcctgtgggttgttcccacccacagggcccactgggcgttagcactctggtatcacggtacctttgtgcgcctgttttatccaccctccctaaaatgtaatttagaagcatgatccgaacggtcattaggtagctcagtgcaccaactgagcccagaccaagcacttctgttaccccggactgagtatcaataggctgctcgcgcggctgaaggagaaaacgttcgttatccggccaattacttcgagaaacccagtaccactatgaaagttgcgcagcgtttcgttccgcactaccccagtgtagatcaggtcgatgagtcaccgcgttccccacgggcgaccgtggcggtggctgcgttggcggcctgctcatggggcaacccatgagacgcttcaatactgacatggtgcgaagagtctattgagctaattggtagtcctccggcccctgaatgcggctaatcccaactgcggagcagatacccacaaaccagtgggcagtctgtcgtaatgggtaactctgcagcggaaccgactactttgggtgtccgtgtttccttttgttcttacactggctgcttatggtgacaattgagagattgttgccatatagctattggattggccatccggtgactaacagagcaattgtttacttatttattggttttataccgttagattacaaagtcctaaacaccctgaatctcattataacacttaattcagcaaa

SEQ ID NO: 20175 - DNA, 743 bp, synthetic construct
  source 1..743: mol_type = other DNA
ttaaaacagcctgtgggttgttcccacccacagggcccactgggcgttagcactctggtatcacggtacctttgtgcgcctgttttatccaccctccctaaaatgtaatttagaagcatgatccgaacggtcattaggtagctcagtgcaccaactgagcccagaccaagcacttctgttaccccggactgagtatcaataggctgctcgcgcggctgaaggagaaaacgttcgttatccggccaattacttcgagaaacccagtaccactatgaaagttgcgcagcgtttcgttccgcacaaccccagtgtagatcaggtcgatgagtcactgcgttccccacgggcgaccgtggcggtggctgcgttggcggcctgctcatggggcaacccatgagacgcttcaatactgacatggtgcgaagagtctattgagctaattggtagtcctccggcccctgaatgcggctaatcccaactgcggagcagatacccacaaaccagtgggcagtctgtcgtaatgggtaactctgcagcggaaccgactactttgggtgtccgtgtttccttttgttcttacactggctgcttatggtgacaattgagagattgttgccatatagctattggattggccatccggtgactaacagagcaattgtttacttatttattggttttataccgttagattacaaagtcctaaacaccctgaatctcattataacacttaattcagcaaa

SEQ ID NO: 20176 - DNA, 743 bp, synthetic construct
  source 1..743: mol_type = other DNA
ttaaaacagcctgtgggttgttcccacccatagggcccactgggcgctagcacactggtattgtggtacctttgtgcgcctgttttatctacccctcccccaaacgtgacttagaagctcaacacatgtggtcagcaggtggcccagtataccaactgggtcttgatcaagcacttctgttaccccggaccgagtatcaataggctgctcacgcggctgaaggagaaagtgttcgttatccggccaattactacgagaaacctagtaccaccatggaagttgcgcggcgtttcgctccgcacaaccccagtgtagatcaggccgatgagtcaccgcactcctcacgggcgaccgtggcggtggctgcgctggcggcctgcccatggggcaacccatgggacgcttcaataccgacatggtgtgaagagtctattgtgctaattggtaatcctccggcccctgaatgcggctaatcccaactgcggagcagatacccacatgccagtgggcagtctgtcgtaacgggtaactctgcagcggaaccgactactttgggtgtccgtgtttctttttattctttattggctgcttatggtgacaattgagagattgttgccatatagctattggattggccatccggtgacaaacagaacaatagtttatctatttgttggtttcataccattaaattttaaagtattaaagactatcaacttgatcatactacttaatacagcaaa

SEQ ID NO: 20177 - DNA, 730 bp, synthetic construct
  source 1..730: mol_type = other DNA
ggggttgttcccaccccagaggcccacgtggcggctagtactccggtattacggtacccttgtacgcctgttttatactcccctccccgtaacttagaagaaacaaaataagttcaataggagggggtacaaaccagtaccaccacgaacaagcacttctgtctccccggtgacattgcatagactgtccccacggttgaaagcaattgatccgttacccgctcttgtacttcgagaagcctagtaccatcttggaatcatcgatgcgttgcgctccacactcagtcccagagtgtagcttaggctgatgagtctggacattcctcaccggcgacggtggtccaggctgcgttggcggcctacctgtggcccaaagccacaggacgctagatgtgaacaaggtgtgaagagcctattgagctataagagagtcctccggcccctgaatgcggctaatcccaaccacggatcaagggtgcacgaaccagtgtataccttgtcgtaacgcgcaagtccgtggcggaaccgactactttgggtgaccgtgtttccttttattatttcaatggctgcttatggtgacaatcattgattgttatcataaagcgaattggactggccatccggtgaaagtgaaacatattgtttgcctcctcgttgggtctacttcaaccaatctttacttacaatcttaccactacagttttgctggttagaagtgtgtttcacg

SEQ ID NO: 20178 - DNA, 743 bp, synthetic construct
  source 1..743: mol_type = other DNA
ttaaaacagcctgtgggttgtacccacccacagggcccactgggcgccagcactctggtattacggtacccttgtgcgcctgttttatatcccttccccaaggtaaacgttagaagcaatgcactcccgatcaatagaaggtgcgacgcgccagtcgtatctcgatcaagcacttctgtttccccggaccgagtatcaatagactgctagcgcggttgaaggagaaaacgttcgttacccgactaactacttcgagaagcccagtagcgccatgaaagttgcagagtgtttcgctcagcacttcccccgtgtagatcaggccgatgagtcaccgcaatccccacgggcgaccgtggcggtggctgcgttggcggcctgcctatggggaaacccataggacgctcaaatacagacatggtgcgaagagtctattgagctagttagtactcctccggcccctgaatgcggctaatcctaactgcggagcaagtactcacaatccagtgggcagcttgtcgtaacgggtaactctgcagcggaaccgactactttgggtgtccgtgtttccttttattcctacattggctgcttatggtgacaatcaaagagttgttaccatatagctattggattggccatccggtgactaataaagcaattatatttctttttgttgggtttgtaccccttaatacaaccagcttcaccaccttgtgttacatcattagactgaacaaggcaaa

SEQ ID NO: 20179 - DNA, 741 bp, synthetic construct
  source 1..741: mol_type = other DNA
aaaacagcctgtgggttgttcccacccacagggcccaccgggcgtcagcacactggtattgcggtacctttgtgcgcctgttttatatatccctacccgaacgtaacctagaagcaaattaacgaggatcgatagtcagcacggcacaccagccgtgttttgatcaagcacttctgttaccccggaccgagtatcaataggctactcacgtggctgaaggagaaagtgttcgttacccggccaattacttcgagaaacccagtaacaccatgaaggttgcgcagcgtttcgctccgcacaaccccagtgtagatcaggtcgatgagtcaccgcattccccacgggcgaccgtggcggtggctgcgctggcggcctgcccatagggtgacctatgggacgcttcaatactgacatggtgcgaagagtctattgagctaattggtagtcctccggcccctgaatgcggctaatcctaactgcggagcaggtgcccacaagccagtgggtagtctgtcgtaatgggcaactctgcagcggaaccgactactttgggtgtccgtgtttccttttattcttatactggctgcttatggtgacaattgaaaggttgttaccatatagctattggattggccatccggtgacaaacagagcgattatatacttgtttgttggtttcataccactaaatcacaagactttaaacacccttaatttcataatagcattaaatacagcaag

SEQ ID NO: 20180 - DNA, 736 bp, synthetic construct
  source 1..736: mol_type = other DNA
ctggggttgtacccaccccagaggcccacgtggcggctagcactccggtattacggtacccttgtgcgcctgttttatactcccctcccgcaacttagaagcacgaaaccaagttcaatagaagggggtacaaaccagtaccactacgaacaagcacttctgtttccccggtgacattgcatagactgctcacgcggttgaaagtgatcgatccgttacccgcttgtgtacttcgaaaagcctagtatcgccttggaatcttcgacgcgttgcgctcagcacccgaccccggggtgtagcttaggccgatgagtctggacattcctcaccggtgacggtggtccaggctgcgttggcggcctacctatggctaacgccataggacgttagatgtgaacaaggtgtgaagagcctattgagctacataagagtcctccggcccctgaatgcggctaatcctaaccacggagcaggcggtcgcgaaccagtgactggcttgtcgtaacgcgcaagtctgtggcggaaccgactactttgggtgtccgtgtttcctgttatttttatcatggctgcttatggtgacaatcagagattgttatcataaagcgaattggattggccatccggtgagtgttgtgtcaggtatacaactgtttgttggaaccactgtgttagctttgcttctcatttaaccaattaatcaaaaacaatacgaggataaaacaacaatactaca

SEQ ID NO: 20181 - DNA, 745 bp, synthetic construct
  source 1..745: mol_type = other DNA
tttaaaacaagcctgtgggttgaacccacccacagggcccaatgggcgctagcacactggtatcacggtacctttgtgcgcctgttttatccacccttccccgaacgaaacttagaagtttgaattaaacggtcaataggaaacccagtacaccaactgggctgtgaccaagcacttctgtgaccccggaccgagtatcaataagctactcacgtggctgaaggagaaaacgttcgttacccggccaattacttcgagaaacttagtaccaccatgaaagttgcgcagcgtttcgctccgcacgaccccagtgtagatcaggccgatgagtcaccgcgtaccccacgggtgaccgtggcggtggctgcgttggcggcctgcccttggggcaacccaagggacgcttcaatactgacatggtgcgaagagtctattgagctaattggtagtcctccggcccctgaatgcggctaatcccaactgcggagcagatacccacataccagtgggcagtctgtcgtaatgggcaactctgcagcggaaccgactactttgggtgtccgtgtttcctttatttcttacactggctgcttatggtgacaattgagagattgttgccatatagctattggattggccatccggtgtctaatagagcaattatctacctttttgttggatttattccacttaactataaagcactcaaaacacttatatacattgtagatctcaacacagcaaa

SEQ ID NO: 20182 - DNA, 767 bp, synthetic construct
  source 1..767: mol_type = other DNA
ccgtgataccagtgtgctagcgcccagtaggccctgtgggttgttcccacccacagggcctactgggcgctagcacactggtatcacggtacctttgtgcgcctgttttatagtccctccccccggacgcaacttagaagctgaacctaaacggtcaacaggcggctcagaacaccatctgggtctcgaccaagcacttctgtttccccggactgagtatcaataagctgcccacgcggctgaaggaaaaaacgtccgttatccggccaattacttcaagaaacccagtaccaccatgaaggttgcgcagcgtttcgctccgcacaaccccagtgtagatcaggtcgatgagtcaccgcattccacacgggcgaccgtggcggtggctgcgctggcggcctgcccatggggcaacccatgggacgcttcaatactaacatggtgcgaagagtcaattgagctaattggtagtcctccggcccctgaatgcggctaatcctaactgtggagcagatgcccacgtgccagtgggtagtctgtcgtaacgggcaactccgcagcggaaccgactactttgggtgtccgtgtttctctttattcttatgttggctgcttatggtgacaattgagagattgttaccatttagctattggattggccatccggtgacaaatagagcgattgtatatctttttgttggattcgtaccattaaacaaaacaaattacaaaaccttgtgttacattattagattgaacacagcaaa

SEQ ID NO: 20183 - DNA, 742 bp, synthetic construct
  source 1..742: mol_type = other DNA
ttaaaacagcctgtgggttgatcccacccacagggcctattgggcgctagcacactggtatcacggtacctttgtgcgcctgttttacccacccttccccgaaagaaacttagaagctcaacttgtgtggtcaacagcaagctcagtacgccaactgggccacgaccaagcacttctgttaccccggactgagtatcaataagctgctcgcgtggctgaaggagaaaacgttcgttatccggccaattacttcaagaaacccagtaccaccatgaaagttgcgcggcgtttcgttccgcacaaccccagtgtagatcaggccgatgagccaccgcgttccccacgggcgaccgtggcggtggctgcgttggcggcctgcccatggggcaacccatgggacgcttcaatactgacatggtgcgaagagtctattgagctaattggtagtcctccggcccctgaatgcggctaatcctaaccgcggagcagatacccacatgccagtgggcagtctgtcgtaacgggcaacttcgcggcggaaccgactactttgggtgtccgtgtttccttttattttatactggctgcttatggtgacaattgagagattgttaccatatagctattggattggccaaccggtgtccaacagagcgatcgtttacttgtttgttggattcgtgcccttgaactacaaagcactcgtaacgcttaaatacattatagacctcaacacagcaaa

SEQ ID NO: 20184 - DNA, 742 bp, synthetic construct
  source 1..742: mol_type = other DNA
ttaaaacagcctgtgggttgatcccacccacagggcccattgggcgctagcacactggtatcacggtacctttgtgcgcctgttttacccacccttccccgaaagaaacttagaagctcaacttgtgtggtcaacagcaagctcagtacgccaactgggccacgaccaagcacttctgttaccccggactgagtatcaataagctgctcgcgtggctgaaggagaaaacgttcgttatccggccaattacttcgagaaacccagtaccaccatgaaagttgcgcggcgtttcgttccgcacagccccagtgtagatcaggccgatgagccaccgcgttccccacgggcgaccgtggcggtggctgcgttggcggcctgcccatggggcaacccatgggacgcttcaatactgacatggtgcgaagagtctattgagctaattggtagtcctccggcccctgaatgcggctaatcctaaccgcggagcagatacccacatgccagtgggcagtctgtcgtaacgggcaacttcgcggcggaaccgactactttgggtgtccgtgtttccttttattttatactggctgcttatggtgacaattgagagattgttaccatatagctattggattggccaaccggtgtccaacagagcgatcgtttacttgtttgttggattcgtgcccttgaactacaaagcactcgtaacgcttaaatacattatagacctcaacacagcaaa

SEQ ID NO: 20185 - DNA, 742 bp, synthetic construct
  source 1..742: mol_type = other DNA
ttaaaacagcctgtgggttgatcccacccacagggcctattgggcgctagcacactggtatcacggtacctttgtgcgcctgttttacccacccttccccgaaagaaacttagaagctcaacttgtgtggtcaacagcaagctcagtacgccaactgggccacgaccaagcacttctgttaccccggactgagtatcaataagctgctcgcgtggctgaaggagaaaacgttcgttatccggccaattacttcgagaaacccagtaccaccatgaaagttgcgcggcgtttcgttccgcacaaccccagtgtagatcaggccgatgagccaccgcgttccccacgggcgaccgtggcggtggctgcgttggcggcctgcccatggggcaacccatgggacgcttcaatactgacatggtgcgaagagtctattgagctaattggtagtcctccggcccctgaatgcggctaatcctaaccgcggagcagatacccacatgccagtgggcagtctgtcgtaacgggcaacttcgcggcggaaccgactactttgggtgtccgtgtttccttttattttatactggctgcttatggtgacaattgagagattgttaccatatagctattggattggccaaccggtgtccaacagagcgatcgtttacttgtttgttggattcgtgcccttgaactacaaagcactcgtaacgcttaaatacattatagacctcaacacagcaaa

SEQ ID NO: 20186 - DNA, 742 bp, synthetic construct
  source 1..742: mol_type = other DNA
ttaaaacagcctgtgggttgatcccacccacagggcctattgggcgctagcacactggtatcacggtacctttgtgcgcctgttttacccacccctccccgaaagaaacttagaagctcaacttgtgtggtcaacagcaagctcagtacgccaactgggccacgaccaagcacttctgttaccccggactgagtatcaataagctgctcgcgtggctgaaggagaaaacgttcgttatccggccaattacttcaagaaacccagtaccaccatgaaagttgcgcggcgtttcgttccgcacaaccccagtgtagatcaggccgatgagccaccgcgttccccacgggcgaccgtggcggtggctgcgttggcggcctgcccatggggcaacccatgggacgcttcaatactgacatggtgcgaagagtctattgagctaattggtagtcctccggcccctgaatgcggctaatcctaaccgcggagcagatacccacatgccagtgggcagtctgtcgtaacgggcaacttcgcggcggaaccgactactttgggtgtccgtgtttccttttattttatactggctgcttatggtgacaattgagagattgttaccatatagctattggattggccaaccggtgtccaacagagcgatcgtttacttgtttgttggattcgtgcccttgaactacaaagcactcgtaacgcttaaatacattatagacctcaacacagcaaa

SEQ ID NO: 20187 - DNA, 742 bp, synthetic construct
  source 1..742: mol_type = other DNA
ttaaaacagcctgtgggttgatcccacccacagggcccattgggcgtcagcaccctggtatcacggtacctttgtgcgcctgttttatatcccttcccccaattgtaacttagaagaaacacacaccgatcaacagcaagcgtggcacaccagccatgttttggtcaagcacttctgttaccccggactgagtatcaatagactgctcacgcggttgaaggagaaagcgtccgttatccggccagctacttcgagaaacctagtaacaccatggaagttgcggagtgtttcgctcagcactaccccagtgtagatcaggtcgatgagtcaccgctttccccacgggcgaccgtggcggtggctgcgttggcggcctgcctatgggggaacccataggacgctctaatacagacatggtgcgaagagtctattgagctagctggtattcctccggcccctgaatgcggctaatcctaactgtggagcacatgcccctaatccaaggggtagtgtgtcgtaatgagcaattccgcagcggaaccgactactttgggtgtccgtgtttcctcttattcttgtactggctgcttatggtgacaattgagagattgttaccatatagctattggattggccatccggtgactaatagagctattgtgtatctctttgttggatttgtaccacttaatttgaaagaaatcaggacactacgctacattttactattgaacaccgcaaa

SEQ ID NO: 20188 - DNA, 742 bp, synthetic construct
  source 1..742: mol_type = other DNA
ttaaaacagcctgtgggttgatcccacccacagggcccactgggcgctagcactctggtatcacggtacctttgtgcgcctgttttatacttcctcccccaactgcaacttagaagtaacacaaaccgatcaacagtcagcgtggcacaccagccacgttttgatcaaacacttctgttaccccggactgagtatcaatagactgctcacgcggttgaaggagaaaacgttcgttatccggccaactacttcgagaaacctagtaacgccatggaagttgtggagtgtttcgctcagcactaccccagtgtagatcaggttgatgagtcaccgcattccccacgggtgaccgtggcggtggctgcgttggcggcctgcccatggggaaacccatgggacgctcttatacagacatggtgcgaagagtctattgagctagttggtagtcctccggcccctgaatgcggctaatcccaactgcggagcatacactctcaagccagagggtagtgtgtcgtaatgggcaactctgcagcggaaccgactactttgggtgtccgtgtttcattttattcctatactggctgcttatggtgacaattgagagattgttaccatatagctattggattggccatccggtgactaacagagctattatatatctttttgttgggtttataccacttagcttgaaagaggttaaaactctacattacattttaatactgaacaccgcaaa

SEQ ID NO: 20189 - DNA, 742 bp, synthetic construct
  source 1..742: mol_type = other DNA
ttaaaacagcctgtgggttgtacccacccacagggcccattgggcgtcagcaccctggtatcacggtacctttgtgcgcctgttttatatcccttcccccaattgtaacttagaagaaacacacaccgatcaacagcaagcgtggcacaccagccatgttttggtcaagcacttctgttaccccggactgagtatcaatagactgctcacgcggttgaaggagaaagcgtccgttatccggccagctacttcgagaaacctagtaacaccatggaagttgcggagtgtttcgctcagcactaccccagtgtagatcaggtcgatgagtcaccgctttccccacgggcgaccgtggcggtggctgcgttggcggcctgcctatgggggaacccataggacgctctaatacagacatggtgcgaagagtctattgagctagctggtattcctccggcccctgaatgcggctaatcctaactgtggagcacatgcccctaatccaaggggtagtgtgtcgtaatgagcaattccgcagcggaaccgactactttgggtgtccgtgtttcctcttattcttgtactggctgcttatggtgacaattgagagattgttaccatatagctattggattggccatccggtgactaatagagctattgtgtatctctttgttggatttgtaccacttaatttgaaagaaatcaggacactacgctacattttactattgaacaccgcaaa

SEQ ID NO: 20190 - DNA, 745 bp, synthetic construct
  source 1..745: mol_type = other DNA
ttaaaacagcctgtgggttgcacccacccgcagggcccactgggcgctagtacactggtaccccggtacccttgtacgcctgttttatttctccctcccccaaccagtaacctagaagtaaagcaaacccgatcaatagcaggtgcgacacaccagtcgtatcttgatcaagcacttctgtaaccccgggccgagtatcaatagactgctcacgcggttgagggagaaaacgctcgttatccggctgactacttcgagaaacccagtaacaccatagaagttgcagagtgtttcgctcagcactttccccgtgtagatcaggtcgatgagtcaccgcattccccacgggtgaccgtggcggtggctgcgttggcggcctgcctatggggcaacccatgggacgctctaatacagacatggtgtgaagagtcaattgagctagtcagtattcctccggcccctgaatgcggctaatcctaactgcggagcacgtgcctccaatccagggggtggcgtgtcgtaacgggtaactctgcagcggaaccgactactttgggtgtccgtgtttccttttattcttatcttggctgcttatggtgacaattgaaggattgttaccatatagctattggattggccatccggtgactaacagagcaatcatataccaatttgttggttttataccattgaattacaaagttctaatcacccttaaattcattttaacacttaatacgtcaaa

SEQ ID NO: 20191 - DNA, 741 bp, synthetic construct
  source 1..741: mol_type = other DNA
ttaaaacagcctgtgggttgtacccacccacagggcccattgggcgctagcacactggtatcacggtacccttgtgcgcctgttttatccgcccctccccattgtaacttagaagataactaaacacggtcgttaggtggctcagtacgccaactgagtcttgaccaagcacttctgttaccccggactgagtatcaataggctgctcacgcggctgaaggagaaaacgttcgttatccggccaattacttcgagaaacctagtaccaccatggaggttgcgcagtgtttcgctccgcacaaccccagtgtagatcaggccgatgagtcaccgcattccccacgggcgaccgtggcggtggctgcgctggcggcccgcccatgggtaacccatgggacgcttcaatactgacatggtgtgaagagtctattgagctaattggtagtcctccggcccctgaatgcggctaatcccaactgcggagcagatacccacacaccagtgggcagtctgtcgtaacgggcaactctgcagcggaaccgactactttgggtgtccgtgtttccttttattccaatactggctgcttatggtgacaattgaaagattgttaccatatagctattggattggccatccggtgacaaacagagcgattgtttacctatttgtaggtttcataccattgaattttaaagttttaagaacccttaactttatattagcacttaacacaacaaa

SEQ ID NO: 20192 - DNA, 741 bp, synthetic construct
  source 1..741: mol_type = other DNA
ttaaaacagcctgtgggttgttcccacccgcagggcccactgggcgctagcacactggtattacggtacctttgtgcgcctgttttatttcccttccccaaaacgtaatttagaagcagcacttcacgaccaatagcaggcgtggcacaccagccatgtcttggtcaagcacttctgtaaccccggactgagtatcaataaactgctcacgcggtcgaaggagaaaacgtccgttacccggctaactacttcgagaaacttagtaacgccatgaaaattgcgaagtgtttcgctcagcacatccccagtgtagatcaggttgatgagtcaccgcattccccacaggtaactgtggcggtggctgcgttggcggcctgcccatggggtgacccatgggacgcttcaatacggacatggtgtgaagagtctattgagctagttagtagtcctccggcccctgaatgcggctaatcctaactgtggagcatgcgcccccactccagagggtagcgtgtcgtaatgggtaactccgcagcggaaccgactactttgggtgtccgtgtttcctcttattttatattggctgcttatggtgacaattgaaagattgttaccatatagctattggattggccatccggtgacaaacagagctataatttaccagtttgtgggatttgttccgttaagtttgaaagtctttgatacatttagtttaatattattacttaatagtgcaaa

SEQ ID NO: 20193 - DNA, 747 bp, synthetic construct
  source 1..747: mol_type = other DNA
ttaaaacagctctggggttgtacccaccccagaggcccacgtggcggctagcactccggtattacggtacccttgtgcgcctgttttatactcccctcccgcaacttagaagcacgaaaccaagttcaatagaagggggtacaaaccagtaccactacgaacaagcacttctgtttccccggtgacattgcatagactgctcacgcggttgaaagtgatcgatccgttacccgcttgtgtacttcgaaaagcctagtatcgccttggaatcttcgacgcgttgcgctcagcacccgaccccggggtgtagcttaggctgatgagtctggacattcctcaccggtgacggtggtccaggctgcgttggcggcctacctatggctaacgccataggacgttagatgtgaacaaggtgtgaagagcctattgagctacataagagtcctccggcccctgaatgcggctaatcctaaccacggagcaggcggtcgcgaaccagtgactggcttgtcgtaacgcgcaagtctgtggcggaaccgactactttgggtgtccgtgtttcctgttatttttatcatggctgcttatggtgacaatcagagattgttatcataaagcgaattggattggccatccggtgagtgttgtgtcaggtatacaactgtttgttggaaccactgtgttagctttacttctcatttaaccatttaatcaaaaacaatacgaggataaaacaacaatactaca

SEQ ID NO: 20194 - DNA, 747 bp, synthetic construct
  source 1..747: mol_type = other DNA
ttaaaacagctctggggttgtacccaccccagaggcccacgtggcggctagcactccggtattacggtacccttgtgcgcctgttttatactcccctcccgcaacttagaagcacgaaaccaagttcaatagaagggggtacaaaccagtaccactacgaacaagcacttctgtttccccggtgacattgcatagactgctcacgcggttgaaagtgatcgatccgttacccgcttgtgtacttcgaaaagcctagtatcgccttggaatcttcgacgcgttgcgctcagcacccgaccccggggtgtagcttaggctgatgagtctggacattcctcaccggtgacggtggtccaggctgcgttggcggcctacctatggctaacgccataggacgttagatgtgaacaaggtgtgaagagcctattgagctacataagagtcctccggcccctgaatgcggctaatcctaaccacggagcaggcggtcgcgaaccagtgactggcttgtcgtaacgcgcaagtctgtggcggaaccgactactttgggtgtccgtgtttcctgttatttttatcatggctgcttatggtgacaatcagagattgttatcataaagcgaattggattggccatccggtgagtgttgtgtcaggtatacaactgtttgttggaaccactgcgttagctttacttctcatttaaccaattaatcaaaaacaatacgaggacaaaacaacaatactaca

SEQ ID NO: 20195 - DNA, 734 bp, synthetic construct
  source 1..734: mol_type = other DNA
ctgtgggttgtacccacccacagggcccacgtggcgctagcacactggtattccggtacctttgtgcgcctgttttatccaccccatcccccactgtaacttagaagatatgcaaccctgatcaacagcaggtgtgacactccagtcacatcacgatcaagcacttctgttgccccggaccgagtatcaataagccactcgcgtggctgaaggagaaaacgttcgttatccgaccaactacttcgagaaacctagtaccaccctggaagttgcgtagcgtttcgctccacacaaccccagtgtagatcgggtcgatgagtcaccgcgttcctcacgggcgaccgtggcggtggctgcgttggcggcctgcccatggggcaacccatgggacgcttcaatactgacatggtgcgaagagtctattgagctagttggtagtcctccggcccctgaatgcggctaatcctaactgcggagcagatacccacatgccagtgggcgatctgtcgtaatgggtaactctgcagcggaaccgactactttgggtgtccgtgtttccttttattcttatattggctgcttatggtgacaattgagaagttgttaccatatagctattggattggccatccggtgacaaatagagcgattgtttatttgtttgttggatttataccactgaacttcaaggttttaaacaccctcaattttgtactagttcttaatacattaaa

SEQ ID NO: 20196 - DNA, 744 bp, synthetic construct
  source 1..744: mol_type = other DNA
ttaaaacagcctgtgggttgctcccacccgcagggcccactgggcgccagcactctggtattgcggtacctttgtgcgcctgttttatgtacccttccctcaaatgtaatttagatgcctgcgaacagggaccaacagtaaacgcagcacaccagttgcgtctcggtcaagcacttctgttaccccggactgagtaccaataggctactcacgtggctgaaggggaaaacgttcgttacccggccaattacttcgagaaacctagtaccaccatggaggttgcgcagcgtttcgttccgcacagccccagtgtagatcaggtcgatgagccaccgcattccccacgggtgaccgtggcggtggctgcgttggcggcctgcccatggggtaacccatgggacgcttcaatactgacatggtgcgaagagtctattgagctaattggtagtcctccggcccctgaatgcggctaatcctaactgcggagcagatacccacataccagtgggcagtctgtcgtaacgggcaactctgcagcggaaccgactactttgggtgtccgtgtttctttttgttcctatactggctgctaatggtgacaattgagagattgttaccatatagctattggattggccatccggtgacaaacagagcaattgtatatttgtttgttggttttataccactaaattataaggttttaaacacccttaactttgttatagcactcaatacagcaaa

SEQ ID NO: 20197 - DNA, 744 bp, synthetic construct
  source 1..744: mol_type = other DNA
ttaaaacagcctgtgggttgttcccacccgcagggcccactgggcgccagcactctggtattgcggtacctttgtgcgcctgttttatgtacccttcccttaaatgtaatttagatgcctgcgaacagggaccaacagtaaacgcagcacaccagttgcgtctcggtcaagcacttctgttaccccggactgagtaccaataggctactcacgtggctgaaggggaaaacgttcgttacccggccaattacttcgagaaacctagtaccaccatggaggttgcgcagcgtttcgttccgcacagccccagtgtagatcaggtcgatgagccaccgcattccccacgggtgaccgtggcggtggctgcgttggcggcctgcccatggggtaacccatgggacgcttcaatactgacatggtgcgaagagtctattgagctaattggtagtcctccggcccctgaatgcggctaatcctaactgcggagcagatacccacataccagtgggcagtctgtcgtaacgggtaactctgcagcggaaccgactactttgggtgtccgtgtttctttttgttcctatactggctgctaatggtgacaattgagagattgttaccatatagctattggattggccatccggtgacaaacagagcaattgtatatttgtttgttggttttataccactaaattataaggttttaaacacccttaactttgttatagcactcaatacagcaaa

SEQ ID NO: 20198 - DNA, 738 bp, synthetic construct
  source 1..738: mol_type = other DNA
aacagctctggggttgttcccaccccagaggcccacgtggcggctagtacactggtatcacggtacctttgtacgcctgttttatactccctcccccgcaacttagaagcatacaattcaagctcaataggagggggtgcaagccagcgcctccgtgggcaagcactactgtttccccggtgaggccgcatagactgttcccacggttgaaagtgtccgatccgttatccgctcatgtacttcgagaagcctagtatcgctctggaatcttcgacgcgttgcgctcagcactcaaccccggagtgtagcttgggccgatgagtctggacagtccccactggcgacagtggtccaggctgcgctggcggcccacctgtggcccaaagccacgggacgctagttgtgaacagggtgtgaagagcctattgagctacatgagagtcctccggcccctgaatgcggctaatcctaaccatggagcaggcagctgcaacccagcagccagcctgtcgtaacgcgcaagtccgtggcggaaccgactactttgggtgtccgtgtttccttttatccttgaatggctgcttatggtgacaatcatagattgttatcataaagcgagttggattggccatccagtgtgaatcagattaattactcccttgtttgttggatccactcccgaaacgttttactccttaacttattgaaattgtttgaagacaggatttcagtgtcaca

SEQ ID NO: 20199 - DNA, 738 bp, synthetic construct
  source 1..738: mol_type = other DNA
aacagctctggggttgttcccaccccagaggcccacgtggcggctagtacactggtatcacggtacctttgtacgcctgttttatactccctcccccgcaacttagaagcatacaattcaagctcaataggagggggtgcaagccagcgcctccgtgggcaagcactactgtttccccggtgaggccgcatagactgttcccacggttgaaagtgtccgatccgttatccgctcatgtacttcgagaagcctagtatcgctctggaatcttcgacgcgttgcgctcagcactcaaccccggagtgtagcttgggccgatgagtctggacagtccccactggcgacagtggtccaggctgcgctggcggcccacctgtggcccaaagccacgggacgctagttgtgaacagggtgtgaagagcctattgagctacatgagagtcctccggcccctgaatgcggctaatcctaaccatggagcaggcagctgcaacccagcagccagcctgtcgtaacgcgcaagtccgtggcggaaccgactactttgggtgtccgtgtttccttttattcttgaatggctgcttatggtgacaatcatagattgttatcataaagcgagttggattggccatccggtgtgaatcagattaattactcccttgtttgttggatccactcccgaaacgtcttactccttaacttattgaaattgtttgaagacaggatttcagtgtcaca

SEQ ID NO: 20200 - DNA, 741 bp, synthetic construct
  source 1..741: mol_type = other DNA
ttaaaacagcctgtgggttgttcccacccacagggcccactgggcgccagcacactggtatcttggtacctttgtgcgcctgttttatccaccctgccccatgcaacttagaagctcaacttaaacggtcaatagatagtccggtgcaccaaccgggccatgaccaggcacttctgttaccccggaccgagtatcaataggctgcttgcgtggctgaaggagaaaacgttcgttacccggccaattacttcgagaaacccagtaccaccatggaggttgcgaggtgtttcgctccacacaaccccagtgtagatcgggccgatgagtcaccgcgttccccacgggcgaccgtggcggtggctgcgttggcggcctgcccatggggcaacccatgggacgcttcaatactgacatggtgcgaagagtctattgagctaattggtagtcctccggcccctgaatgcggctaatcccaactgcggagcagatgcccgcacgccagcgggtattctgtcgtaatgggcaactctgcagcggaaccgactactttgggtgtccgtgtttccttttattactacattggctgcttatggtgacaattgagagattgttaccatatagctattggattggccatccggtaacaaatagagcacttgtttatttgtttgtgggttttgtaccattgaatcgcaaagtactaaacactctcaatttcattatattacttaactcagcgaa

SEQ ID NO: 20201 - DNA, 741 bp, synthetic construct
  source 1..741: mol_type = other DNA
taaaacagcctgtgggttgttcccacccacagggcccactgggcgccagcacactggtatcttggtacctttgtgcgcctgttttatctaccctgccccatgcaacttagaagttcaacttaaacggtcgacagatagtccagtacaccaactgggccgtgaccaagcacttctgttatcccggaccgagtatcaataggctgcttgcgcggctgaaggagaaagcgttcgttacccggccaattacttcgaaaaacccagtaccaccatggaggttgcgaggtgtttcgctccacacagccccagtgtagatcaggtcgatgagtcaccgcattccccacgggcgaccgtggcggtggctgcgttggcggcctgcccatggggcgacccatgggacgcttcaacactgacatggtgcgaagagtctattgagctaattggtagtcctccggcccctgaatgcggctaatcctaactgcggagcagatgcccacacaccagtgggtattctgtcgtaacgggcaactctgcagcggaaccgactactttgggtgtccgtgtttcctttttatctttacattggctgcttatggtgacaattgagagattgttaccatatagctattggattggccatccggtgtcaaatagagcactcgtttatctatttgttggttttgtgccactgaactgtaaagtactagatactcttaatctcattatattgcttaattcagtgaa

SEQ ID NO: 20202 - DNA, 741 bp, synthetic construct
  source 1..741: mol_type = other DNA
taaaacagcctgtgggttgttcccacccacagggcccactgggcgccagcacactggtatctcggtacctttgtgcgcctgttttatctaccctgccccatgcaacttagaagttcaacttaaacggtcgacagatagtccagtacaccaactgggccgtgaccaagcacttctgttatcccggaccgagtatcaataggctgcttgcgcggctgaaggagaaagcgttcgttacccggccaattacttcgaaaaacccagtaccaccatggaggttgcgaggtgtttcgctccacacagccccagtgtagatcaggtcgatgagtcaccgcattccccacgggcgaccgtggcggtggctgcgttggcggcctgcccatggggcgacccatgggacgcttcaacactgacatggtgcgaagagtctattgagctaattggtagtcctccggcccctgaatgcggctaatcctaactgcggagcagatgcccacacaccagtgggtattctgtcgtaacgggcaactctgcagcggaaccgactactttgggtgtccgtgtttcctttttatctttacattggctgcttatggtgacaattgagagattgttaccatatagctattggattggccatccggtgtcaaatagagcactcgtttatctatttgttggttttgtgccactgaactgtaaagtactagatactcttaatctcattatattgcttaattcagtgaa

SEQ ID NO: 20203 - DNA, 741 bp, synthetic construct
  source 1..741: mol_type = other DNA
ttaaaacagctctggggttgctcccacccacagggcccactgggcgccagcacactggtatttcggtacctttgtgcgcctgttttatccaccctgccccacgtaacttagaagttcaacttgagcggtcaataggcagtccggtgcaccaaccgggccatgaccaagcacttctgttaccccggaccgagtatcaataggctgcttgcgcggctgaaggagaaagcgttcgttatccggccaattacttcgaaaaacctagtaacaccatggaggttgcgaggcgtttcgctccacacaaccccagtgtagatcaggtcgatgagtcaccgcattccccacgggcgaccgtggcggtggctgcgttggcggcctgcccatggggcaacccatgggacgctttaatactgacatggtgcgaagagtctattgagctaattggtagtcctccggcccctgaatgcggctaatcctaactgcggagcagatgcccacatgccagtgggtattctgtcgtaacgggtaactctgcagcggaaccgactactttgggtgtccgtgtttccttttatctttatattggctgcttatggtgacaattgagagattgttaccatatagctattggattggccacccggtgtcaaatagagcacttatttatttgtttgtcggctttgtgccactgaattacaaagtattgaatactctcaattttattttactacttaacgcagtgaa

SEQ ID NO: 20204 - DNA, 744 bp, synthetic construct
  source 1..744: mol_type = other DNA
taaaacagcctgtgggttgttcccacccacagggcccactgggcgccagcactctggtattatggtaccttagtgcgcctgttttatacaccccttccccaaatgtaatttagatgcatgtaaacaaaggccaatagcaggcgcagcataccagctgtgtctcggtcaagcacttctgttaccccggactgagtatcaataggctactcacgtggctgaaggagaaaacgttcgttatccggccaattacttcgagaaacctagtaataccatgaaggttgcgaagtgtttcgctcagcacaaccccagtgtagatcaggtcgatgagtcaccgcattccccacgggtgaccgtggcggtggctgcgctggcggcctgcccatgggattacccatgggacgcttcaatattgacatggtgtgaagagtctattgagctaattggtattcctccggcccctgaatgcggctaatcccaactgcggagcaggtacccacatgccagtgggcagcctgtcgtaatgggcaactctgcagcggaaccgactactttgggtgtccgtgtttctctttattcttatactggctgcttatggtgacaattgagaaattgttgccatatagctattggattggccatccggtgacaaatagagcaattgtgcatccatttgttggttttatactaactcaatcttaaagttttaactaccctcaatctcattatatcattcaatacagcaaa

SEQ ID NO: 20205 - DNA, 744 bp, synthetic construct; identical to SEQ ID NO: 1075
  source 1..744: mol_type = other DNA

SEQ ID NO: 20206 - DNA, 743 bp, synthetic construct
  source 1..743: mol_type = other DNA
ttaaaaccgcactgtgggttggacccacccacagggcccaatgggcgctagcacactggtatcacggtacctttgtgcgcctgttttatccacccctccccgaacgaaacttagaagtttgagttaaacggtcaataggagacccagtacaccaactgggccgtgaccaagcacttctgtgaccccggaccgagtatcaataagctactcacgtggctgaaggagaaacgttcgttacccggccaattacttcgagaaacttagtaccaccatgaaggttgcgcagcgtttcgctccgcacaaccccagtgtagatcaggccgatgagtcaccgcgttccccacgggtgaccgtggcggtggctgcgttggcggcctgcccttggggcaacccaagggacgcttcaatactgacatggtgcgaagagtctattgagctaattggtagtcctccggcccctgaatgcggctaatcccaactgcggagcagatacccacataccagtgggcagtctgtcgtaatgggcaactctgcagcggaaccgactactttgggtgtccgtgtttcctttatttcttacactggctgcttatggtgacaattgagagattgttaccatatagctattggattggccatccggtgtctaatagagcaattatctacctttttgttggatttattccacttgactataaagcactcaaaacacttgaatacattgtggatcttaacacgacaaa

SEQ ID NO: 20207 - DNA, 734 bp, synthetic construct
  source 1..734: mol_type = other DNA
ctgtgggttgtacccacccacagggcccacgtggcgctagcacactggtattccggtacctttgtgcgcctgttttatccaccccatcccccactgtaacttagaagatatgcaaccctgatcaacagcaggtgtgacactccagtcacatcacgatcaagcacttctgttaccccggaccgagtatcaataagccactcgcgtggctgaaggagaaagcgttcgttatccgaccaactacttcgagaaacctagtaccaccctggaagttgcgtagcgtttcgctccacacaaccccagtgtagatcgggtcgatgagtcaccgcgttcctcacgggcgaccgtggcggtggctgcgttggcggcctgcccatggggcaacccatgggacgcttcaatactgacatggtgcgaagagtctattgagctagttggtagtcctccggcccctgaatgcggctaatcctaactgcggagcagatacccacatgccagtgggcgatctgtcgtaatgggtaactctgcagcggaaccgactactttgggtgtccgtgtttccttttattcttatattggctgcttatggtgacaattgaggagttgttaccatatagctattggattggccatccggtgacaaatagagcgattgtttatttgtttgttggatttataccactgagcttcaaggttttaaacaccctcaattttgtactagttcttaatacattaaa

SEQ ID NO: 20208 - DNA, 736 bp, synthetic construct
  source 1..736: mol_type = other DNA
cagctctggggttgttcccaccccagaggcccacgtggcggctagtacactggtatcacggtacctttgtacgcctgttttatactccctcccccgcaacttagaagcatacaattcaagctcaataggagggggtgcaagccagcgcctccgtgggcaagcactactgtttccccggtgaggccgcatagactgttcccacggttgaaagtgtccgatccgttatccgctcatgtacttcgagaagcctagtatcgctctggaatcttcgacgcgttgcgctcagcactcaaccccggagtgtagcttgggccgatgagtctggacagtccccactggcgacagtggtccaggctgcgctggcggcccacctgtggcccaaagccacgggacgctagttgtgaacagggtgtgaagagcctattgagctacatgagagtcctccggcccctgaatgcggctaatcctaaccatggagcaggcagctgcaacccagcagccagcctgtcgtaacgcgcaagtccgtggcggaaccgactactttgggtgtccgtgtttccttttattcttgaatggctgcttatggtgacaatcatagattgttatcataaagcgagttggattggccatccagtgtgaatcagattaatcactcccttgtttgttggatccactcccgaaacgttttactccttaacttattgaaattgtttgaagacaggatttcagtgtcaca

SEQ ID NO: 20209 - DNA, 734 bp, synthetic construct
  source 1..734: mol_type = other DNA
gctctggggttgttcccaccccagaggcccacgtggcggctagtacactggtatcacggtacctttgtacgcctgttttatactccctcccccgcaacttagaagcatacaattcaagctcaataggagggggtgcaagccagcgcctccgtgggcaagcactactgtttccccggtgaggccgcatagactgttcccacggttgaaagtgtccgatccgttatccgctcatgtacttcgagaagcctagtatcgctctggaatcttcgacgcgttgcgctcagcactcaaccccggagtgtagcttgggccgatgagtctggacagtccccactggcgacagtggtccaggctgcgctggcggcccacctgtggcccaaagccacgggacgctagttgtgaacagggtgtgaagagcctattgagctacatgagagtcctccggcccctgaatgcggctaatcctaaccatggagcaggcagctgcaacccagcagccagcctgtcgtaacgcgcaagtccgtggcggaaccgactactttgggtgtccgtgtttccttttattcttgaatggctgcttatggtgacaatcatagattgttatcataaagcgagttggattggccatccagtgtgaatcagattaattactcccttgtttgttggatccactcccgaaacgttttactccttaacttattgaaattgtttgaagacaggatttcagtgtcaca

SEQ ID NO: 20210 - DNA, 742 bp, synthetic construct
  source 1..742: mol_type = other DNA
tttaaaacagcctgtgggttgttcccacccacagggcccattgggcgctagcacactggtaatacggtatctttgtgcgcctgtttgcacatccgaatcgagtgtaacttagaagcttcacctagatggtcaataaaaggtccagcacaccagttggattccgaccaagcacttctgttaccccggactgagtatcaataggccgttcgcagggctgaaggagaaaacgatggttacccggccaattacttcgagaaacctagtatcatcatgaaagtcgcgcagtgtttcgctccgcacgaccccggtgtagatcaggtcgatgagccaccgcgttcccctcgggcgaccgtggtgtaggctgcgctggcggcctgcccatggggcaacccatgggacgcttcaatactgacatggtgcgaagagtctattgagctaattggtagtcctccggcccctgaatgcggttaatcctaactgcggagcaggctccctcaagccagagggcagcttgtcgtaacgggcaactctgcagcggaacagactactttgggcgtccgagttaccttttattcttgaactggctgcttatggtgacaattgaaagattgttaccatatagctattggattggccatccagtgacaaacagagcgattatatatttgtttgttggttttgttccattaaactgtaaagttttaaacacacttaaatttgtcttactactcaactcagcaaa

SEQ ID NO: 20211 - DNA, 734 bp, synthetic construct
  source 1..734: mol_type = other DNA
ctgtgggttgtacccacccacagggcccacgtggcgctagcacactggtattccggtacctttgtgcgcctgttttatccaccccatcccccactgtaacttagaagatatgcaaccctgatcaacagcaggtgtgacactccagtcacatcacgatcaagcacttctgttgccccggaccgagtatcaataagccactcgcgtggctgaaggagaaaacgttcgttatccgaccaactacttcgagaaacctagtaccaccctggaagttgcgtagcgtttcgctccacacaaccccagtgtagatcgggtcgatgagtcaccgcgttcctcacgggcgaccgtggcggtggctgcgttggcggcctgcccatggggcaacccatgggacgcttcaatactgacatggtgcgaagagtctattgagctagttggtagtcctccggcccctgaatgcggctaatcctaactgcggagcagatacccacatgccagtgggcgatctgtcgtaatgggtaactctgcagcggaaccgactactttgggtgtccgtgtttccttttattcttatattggctgcttatggtgacaattgagaagttgttaccatatagctattggattggccatccggtgacaaatagagcgattgtttatttgtttgttggatttgtaccactgaacttcaaggttttaaacaccctcaattttgtactagttcttaacacattaaa

SEQ ID NO: 20212 - DNA, 726 bp, synthetic construct
  source 1..726: mol_type = other DNA
ttgttcccaccccagaggcccacgtggcggctagtactccggtattacggtacccttgtacgcctgttttatactcccctccccgtaacttagaagaaacaaaataagttcaataggagggggtacaaaccagtaccaccacgaacaagcacttctgtctccccggtgacattgcatagactgtccccacggttgaaagcaattgatccgttacccgctcttgtacttcgagaagcctagtaccatcttggaatcatcgatgcgttgcgctccacactcagtcccagagtgtagcttaggctgatgagtctggacgttcctcaccggcgacggtggtccaggctgcgttggcggcctacctgtggcccaaagccacaggacgctagatgtgaacaaggtgtgaagagcctattgagctataagagagtcctccggcccctgaatgcggctaatcccaaccacggatcaagggtgcacgaaccagtgtataccttgtcgtaacgcgcaagtccgtggcggaaccgactactttgggtgaccgtgtttccttttattatttcaatggctgcttatggtgacaatcattgattgttatcataaagcgaattggactggccatccggtgaaagtgaaacatattgtttgcctcctcgttgggtctacttcaaccaatctctacttacaatcttaccactacagttttgctggttagaagtgtgcttcacg

SEQ ID NO: 20213 - DNA, 734 bp, synthetic construct
  source 1..734: mol_type = other DNA
gctctggggttgttcccaccccagaggcccacgtggcggctagtacactggtatcacggtacctttgtacgcctgttttatactccctcccccgcaacttagaagcatacaattcaagctcaataggagggggtgcaagccagcgcctccgtgggcaagcactactgtttccccggtgaggccacatagactgttcccacggttgaaagtgtccgatccgttatccgctcatgtacttcgagaagcctagtatcgctctggaatcttcgacgcgttgcgctcagcactcaaccccggagtgtagcttgggccgatgagtctggacagtccccactggcgacagtggtccaggctgcgctggcggcccacctgtggcccaaagccacgggacgctagttgtgaacagggtgtgaagagcctattgagctacatgagagtcctccggcccctgaatgcggctaatcctaaccatggagcaggcagctgcaacccagcagccagcctgtcgtaacgcgcaagtccgtggcggaaccgactactttgggtgtccgtgtttccttttattcttgaatggctgcttatggtgacaatcatagattgttatcataaagcgaattggattggccatccagtgtgaatcagattaattactcccttgtttgttggatccactcccgaaacgttttactccttaacttattgaaattgtttgaagacaggatttcagtgtcaca

SEQ ID NO: 20214 - DNA, 736 bp, synthetic construct; identical to SEQ ID NO: 952
  source 1..736: mol_type = other DNA

SEQ ID NO: 20215 - DNA, 743 bp, synthetic construct
  source 1..743: mol_type = other DNA
ttaaaacagcctgtgggttgttcccacccgcagggcccactgggcgctagcacactggtatcccggtacccttgtgcgcctgttttatataccctcccccttatgtaacttagaagtatgattcaaacggtcgacaggcggctcagtgcaccaactgagtcatgaccaagcacttctgttaccccggactgagtatcaataagctgttcacacggctgaaggagaaaacgttcgttacccggccaattacttcgagaaacctagtaccaccatgaaggttgcgcagtgtttcgctccacacaaccccagtgtagatcaggtcgatgagtcaccgcattccccacgggcgaccgtggcggtggctgcgttggcggcctgcccatggggcaacccatgggacgcttcaatactgacatggtgtgaagagtctattgagctaattggtagtcctccggcccctgaatgcggctaatcccaactgtggagcagatactcacaaaccagtgagcggtctgtcgtaacgggcaactccgcagcggaaccgactactttgggtgtccgtgtttctttttattcttacattggctgcttatggtgacaattgacaaattgttaccatatagctattggattggccatccggtgacaaacagagctattgtttacttgtttgttggtttcataccattaaattacaaggtcttagaaactctcaactttattttgacactcaatacagcaaa

SEQ ID NO: 20216 - DNA, 743 bp, synthetic construct
  source 1..743: mol_type = other DNA
ttaaaaccaggctgtgggttgttcccacccatagggcccactgggcgccagcactctggtattccggtacctttgtgcgcctgttttatccacccctcccccaaacgtaacttagaagctcaacacatgtggtcagtaggtagcccagtatgccaactgggtcttgaccaagcacttctgttaccccggaccaagtatcaataggctgctcacgcggctgaaggagaaagtgttcgttacccggccgattacttcgagaaacctagtaccaccatggaagttgcgcagcgtttcgctccgcacgaccccagtgtagatcaggccgatgagtcaccgcactcctcacgggcgaccgtggcggtggctgcgctggcggcctgcccatggggcaacccatgggacgcttcaatactgacatggtgtgaagagtctattgagctaattggtagtcctccggcccctgaatgcggctaatcctaaccgcggagcagatacccacacgccagtgggcagtctgtcgtaacgggcaactctgcggcggaaccgactactttgggtgtccgtgtttcattttattctttattggctgcttatggtgacaattgaaagattgttgccatatagctatggattggccatccagtgacaaacagagcgattgtttatctatttgttggtttcataccattaaattttaaagttttaagaactatcaacttgatcatactacttaatacaacaaa

SEQ ID NO: 20217 - DNA, 743 bp, synthetic construct
  source 1..743: mol_type = other DNA
ttaaaacagcctgtgggttgttcccacccacagggcccactgggcgctagcacactggtattacggtacctttgtgcgcctgttttatataccccccccaagtgcaacttagaagcaagacatgaccggtcagcaggtgattcagtaaaccaactgagtcttgaccaagcacttctgtttccccggaccgagtatcaataggctgcttacgcggctgaaggagaaagtgttcgttacccggccaattacttcgagaagcctagtaccaccatggaggttgcgcggcgtttcgctccgcacacccccagtgtagatcaggccgatgagccaccgcattccccacgggtgaccgtggcggtggctgcgttggcggcctgcccatggggtaacctatgggacgcttcaatactgacatggtgcgaagagcctattgagctaattggtagtcctccggcccctgaatgcggctaatcctaactgcggagcaggtacccacacaccagtgggcagcctgtcgtaacgggtaactctgcagcggaaccgactactttgggtgaccgtgtttccttttattttttccattggctgcttatggtgacaatcgaggaattgttgccatatagctattggattggccatccggtgtcaaatagagcgattatttacctgtttgttggatttgtaccactgaactttaaggcgcttatcactctcaactatattttatcccttaacgcaacaaa

SEQ ID NO: 20218 - DNA, 743 bp, synthetic construct
  source 1..743: mol_type = other DNA
ttaaaacagcctgtgggttgttcccacccacagggcccactgggcgctagcacactggtattacggtacctttgtgcgcctgttttatataccccccccaagtgcaacttagaagcaaaacatgaccggtcagcaggtgattcagtaaaccaactgagtcttgaccaagcacttctgtttccccggaccgagtatcaataggctgcttacgcggctgaaggaaaaagtgttcgttacccggccaattacttcgagaagcctagtaccaccatggaggttgcgcggcgtttcgctccgcacacccccagtgtagatcaggccgatgagccaccgcattccccacgggtgaccgtggcggtggctgcgttggcggcctgcccatggggtaacccatgggacgcttcaataccgacatggtgcgaagagcctattgagctaattggtagtcctccggcccctgaatgcggctaatcctaactgcggagcaggtacccacataccagtgggcagcctgtcgtaacgggtaactctgcagcggaaccgactactttgggtgaccgtgtttccttttatttttcccattggctgcttatggtgacaatcgaggaattgttgccatatagctattggattggccatccggtgtcaaatagagcgattatttacctgtttgttggatttgtaccactgaactttaaggcgctcatcactctcaactatattttatcccttaacgcaacaaa

SEQ ID NO: 20219 - DNA, 743 bp, synthetic construct
  source 1..743: mol_type = other DNA
ttaaaacagcctgtgggttgttcccacccacagggcccactgggcgctagcacactggtattacggtacctttgtgcgcctgttttatataccccccccaagtgcaacttagaagcaagacatgaccggtcagcaggtgattcagtaaaccaactgagtctcgaccaagcacttctgtttccccggaccgagtatcaataggctgcttacgcggctgaaggagaaagtgttcgttacccggccaattacttcgagaagcctagtaccaccatggaggttgcgcggcgtttcgctccgcacacccccagtgtagatcaggccgatgagccaccgcattccccacgggtgaccgtggcggtggctgcgttggcggcctgcccatggggtaacctatgggacgcttcaatactgacatggtgcgaagagcctattgagctaattggtagtcctccggcccctgaatgcggctaatcctaactgcggagcaggtacccacacaccagtgggcagcctgtcgtaacgggtaactctgcagcggaaccgactactttgggtgaccgtgtttccttttattttttccattggctgcttatggtgacaatcgaggaattgttgccatatagctattggattggccatccggtgtcaaatagagcgattatttacctgtttgttggatttgtaccactgaactttaaggcgcttatcactctcaactatattttatcccttaacgcaacaaa

SEQ ID NO: 20220 - DNA, 743 bp, synthetic construct
  source 1..743: mol_type = other DNA
ttaaaacagcctgtgggttgttcccacccacagggcccatagggcgccagcactctggtatcccggtacctttgtgcgcctgttttatccacccttccccaagcgtaacttagaagcccatcatacacggtcaataggtggttcagtatgccaactgagtcttgaccaagcacttctgttaccccggactgagtatcaataagctgctcacgcggctgaaggagaaaacgttcgttatccggccaattacttcgagaaacctagtaacaccatgaaggttgcgcagcgtttcgctccgcacaaccccagtgtagatcaggtcgatgagtcaccgcactccccacgggcgaccgtggcggtggctgcgttggcggcctgcccatggggcaacccatgggacgcttcaatactgacatggtgcgaagagtctattgagataattggtagtcctccggcccctgaatgcggctaatcctaactgcggagcagatacccacatgccagtgggcagtctgtcgtaacgggcaactctgcagcggaaccgactactttgggtgtccgtgtttccttttatttctatactggctgcttatggtgacaattgacagattgttaccatatagctattggattggccatccggtgacgaacagagcaattatttacttatttgttggttttataccattaaatttcaaagttttaaaaaccctcaacttagttttgtcactcaactcagcaaa

SEQ ID NO: 20221 - DNA, 724 bp, synthetic construct
  source 1..724: mol_type = other DNA
tgcacccaccccagaggcccacgtggcggctagtactccggtattgcggtacccttgtacgcctgttttatactcccttcccgtaacttagacgcacaaaaccaagttcaatagaagggggtacaaaccagtaccaccacgaacaagcacttctgtttccccggtgatgttgtatagactgcttgcgtggttgaaagcgacggatccgttatccgcttatgtacttcgagaagcccagtaccacctcggaatcttcgatgcgttgcgctcagcactcaaccccagagtgtagcttaggctgatgagtctggacatccctcaccggtgacggtggtccaggctgcgttggcggcctacctatggctaacgccatgggacgctagttgtgaacaaggtgtgaagagcctattgagctacataagaatcctccggcccctgaatgcggctaatcccaacctcggggcaggtggtcacaaaccagtgattggcctgtcgtaacgcgcaagtccgtggcggaaccgactactttgggtgtccgtgtttccttttattttattgtggctgcttatggtgacaatcacagattgttatcataaagcgaattggattggccatccggtgaaagtgagattcattatctatctgtttgctggattcgctccattgagtgtgtttactctaagtacaatttcaacagttatttcaatcagacaattgtatcata

SEQ ID NO: 20222 - DNA, 734 bp, synthetic construct
  source 1..734: mol_type = other DNA
ctgtgggttgtacccacccacagggcccacgtggcgctagcacactggtattccggtacctttgtgcgcctgttttatccaccccgtcccccactgcaacttagaagatatgcaaccctgatcaacagcaggtgtgacactccagtcacatcacgatcaagcacttctgttgccccggaccgagtatcaataagccactcgcgtggctgaaggagaaaacgttcgttatccgaccaactacttcgagaaacctagtaccaccctggaagttgcgtagcgtttcgctccacacaaccccagtgtagatcgggtcgatgagtcaccgcgttcctcacgggcgaccgtggcggtggctgcgttggcggcctgcccatggggcaacccatgggacgcttcaatactgacatggtgcgaagagtctattgagctagttggtggtcctccggcccctgaatgcggctaatcctaactgcggagcagatacccacatgccagtgggcgatctgtcgtaatgggtaactctgcagcggaaccgactactttgggtgtccgtgtttccttttattcttatattggctgcttatggtgacaattgagaagttgttaccatatagctattggattggccatccggtgacaaatagagcgattgtttatttgtttgttggatttataccactgaacttcaaggttttaaacaccctcaattttgtactagttcttaatacattaaa

SEQ ID NO: 20223 - DNA, 734 bp, synthetic construct
  source 1..734: mol_type = other DNA
ctgtgggttgtacccacccacagggcccacgtggcgctagcacactggtattccggtacctttgtgcgcctgttttatccaccccgtcccccactgtaacttagaagatatgcaaccctgatcaacagcaggtgtgacactccagtcacatcacgatcaagcacttctgttgccccggaccgagtatcaataagccactcgcgtggctgaaggagaaaacgttcgttatccgaccaactacttcgagaaacctagtaccaccctggaagttgcgtagcgtttcgctccacacaaccccagtgtagatcgggtcgatgagtcaccgcgttcctcacgggcgaccgtggcggtggctgcgttggcggcctgcccatggggcaacccatgggacgcttcaatactgacatggtgcgaagagtctattgagctagttggtggtcctccggcccctgaatgcggctaatcctaactgcggagcagatacccacatgccagtgggcgatctgtcgtaatgggtaactctgcagcggaaccgactactttgggtgtccgtgtttccttttattcttatattggctgcttatggtgacaattgagaagttgttaccatatagctattggattggccatccggtgacaaatagagcgattgtttatttgtttgttggatttataccactgaacttcaaggttttaaacaccctcaattttgtactagttcttaatacattaaa

SEQ ID NO: 20224 - DNA, 749 bp, synthetic construct
  source 1..749: mol_type = other DNA
ttaaaacaggcttgttgggttgttcccacccacaaggcccactgggcgctagcacactggtattccggtacctttgtgcgcctgttttataccccctcccccccccgtaacaaacttagaagcaaagtaaactcgatcaatagccggtgtgacaaaccagtcgcatcttgatcaagcacttctgtctccccggaccgagtatcaataaactgctcacgcggttgaaggagaaagcgttcgttacccgaccaattacttcgaaaaacctagtaccaccatgaaagttgcggggtgtttcgctcagcacaaccccagtgtagatcaggtcgatgagtcaccgcattccccacgggcgaccgtggcggtggctgcgctggcggcctgcctatggggcaacccataggatgctctaaaacggacatggtgcgaagagtctattgagctagttggtagtcctccggcccctgaatgcggctaatcctaactgcggagcaggcacctacaagccagtgggcagcctgtcgtaacgggcaactctgcagcggaaccgactactttgggtgtccgtgtttccttttacctcaattttggctgcttatggtgacaattgaaagattgttaccatatagctattggattggccatccggtgactaacagagctattgtgtaccttttcgttggttttataccactcaccctcgcggaggttaagattttactttatataatacacttgaacacattaaa

SEQ ID NO: 20225 - DNA, 743 bp, synthetic construct; identical to SEQ ID NO: 1043
  source 1..743: mol_type = other DNA

SEQ ID NO: 20226 - DNA, 742 bp, synthetic construct
  source 1..742: mol_type = other DNA
ttaaaacagcctgtgggttgttcccacccacagggcccaatgggcgccagcactctggtattacggtacctttgtgcgcctgttttatatcccctcccccaattgtaacttagaagcaacacgcaccgaccaacagtgggcgtggcacaccagccacgtcttggtcaagcacatctgtttccccggactgagtatcaatagactgctcacgcggtcgaaggagaaaacgttcgttatccggccaactacttcgagaagcccagtaacaccatgaatattgcgaagtgtttcgctcagcacactcccagtgtagatcaggtcgatgagtcaccgcattccccacgggcgaccgtggcggtggctgcgttggcggcctgcctatggggcaacccgtaggacgcttcaatatggacatggtgtgaagagtctattgagctagttggtagtcctccggcccctgaatgcggctaatcctaaccgcggagcaggcacccacaaaccagtgggcagcttgtcgtaacgggtaactctgcggcggaaccgactactttgggtgtccgtgtttccttttattcttatactggctgcttatggtgacaattgagagattgttgccatatagctattggattggccatccggtgacaaacagagcaattgtttatctatttgttggttttataccgttaagttttaaagtcctaaaaacccttaacttggtcatactactcaactcagcaaa

SEQ ID NO: 20227 - DNA, 742 bp, synthetic construct
  source 1..742: mol_type = other DNA
ttaaaacagcctgtgggttgttcccacccacagggcccactgggcgctagcacactggtattacggtacctttgtgcgcctgttttatataccccccccaagtgcaacttagaagcaagacatgaccggtcagcaggtgattcagtaaaccaactgaatcttgaccaagcacttctgtttccccggaccgagtatcaataggctgcttacgcggctgaaggagaaagtgttcgttacccggccaattacttcgagaagcctagtaccaccatggaggttgcgcggcgtttcgctccgcacacccccagtgtagatcaggccgatgagccaccgcattccccacgggtgaccgtggcggtggctgcgttggcggcctgcccatggggtaacctatgggacgcttcaatactgacatggtgcgaagagcctattgagctaattggtagtcctccggcccctgaatgcggctaatcctaactgcggagcaggtacccacataccagtgggcagcctgtcgtaacgggtaactctgcagcggaaccgactactttgggtgaccgtgtttccttttatttttccattggctgcttatggtgacaatcgaggaattgttgccatatagctattggattggccatccggtgtcaaatagagcgattatttacctgtttgttggatttgtaccactgaactttaaggcgctcatcactctcaactatattttatcccttaacgcaataaa

SEQ ID NO: 20228 - DNA, 730 bp, synthetic construct; identical to SEQ ID NO: 930
  source 1..730: mol_type = other DNA

SEQ ID NO: 20229 - DNA, 730 bp, synthetic construct
  source 1..730: mol_type = other DNA
ttgtacccaccccagaggcccacgtggcggctagcactccggtattacggtacccttgtgcgcctgttttatactcccctcccgcaacttagaagcacgaaaccaagttcaatagaagggggtacaaaccagtaccactacgaacaagcacttctgtttccccggtgacattgcatagactgctcacgcggttgaaagtgatcgatccgttacccgcttgtgtacttcgagaagcctagtatcgccttggaatcttcgacgcgttgcgctcagcacccgaccccggggtgtagcttaggctgatgagtctggacattcctcaccggtgacggtggtccaggctgcgttggcggcctacctatggctaacgccataggacgctagatgtgaacaaggtgtgaagagcctattgagctacataagagtcctccggcccctgaatgcggctaatcctaaccacggagcaggcggtcgcgaaccagtgactggcttgtcgtaacgcgcaagtctgtggcggaaccgactactttgggtgtccgtgtttcctgttatttttattatggctgcttatggtgacaatcagagattgttatcataaagcgaattggattggccatccggtgagtgttgtgtcaggtatacaactgtttgttggaaccactgtgttagttttacttctcatttaaccaattaaccaaaaacaatacgaggataaaacaacattactata

SEQ ID NO: 20230 - DNA, 730 bp, synthetic construct
  source 1..730: mol_type = other DNA
ttgttcccaccccagaggcccacgtggcggctagtactccggtatcacggtacccttgtacgcctgttttatactcccttcccccgtaacttagaagaaacaaacaaagttcaatagaagggggtacaaaccagtaccaccacgaacaagcacttctgtctccccggtgacgttgtatagactgtacccacggtcgaaaacgattgatccgttatccgcttttgtacttcgagaagcctagtatcatcttggaatcttcgatgcgttgcgctcagcactcaatcccagagtgtagcttaggtcgatgagtctggacgttcctcaccggcgacggtggtccaggctgcgttggcggcctacctgtggcccaaagccacaggacgctagtcgtgaacaaggtgtgaagagcctattgagctacaaaagagtcctccggcccctgaatgcggctaatcctaaccacggagcaagggtgcgtgagccaacacataccttgtcgtaacgcgtaagttcgtggcggaaccgactactttgggtgtccgtgtttccttttattcttgtattggctgcttatggtgacaatcatagattgttatcataaagcgacttggattggccatccagtggaagtgaaatactttgtctacctgtctgttggttttactccatttgactaattcacttacaagcttattgctataatttttattgactaaacaacaataccaca

SEQ ID NO: 20231 - DNA, 730 bp, synthetic construct
  source 1..730: mol_type = other DNA
ttgttcccaccccagaggcccacgtggcggctagtacactggtatcacggtacctttgtacgcctgttttatactccttcccccgcaatttagaagcatacaattcaagctcaataggagggggtgcaagccagcgcctccgtgggcaagcactactgtttccccggtgaggccacatagactgttcccacggttgaaagtgtccgatccgttatccgctcatgtacttcgagaagcctagtatcgctctggaatcttcgacgcgttgcgctcagcactcaaccccggagtgtagcttgggccgatgagtctggacagtccccactggcgacagtggtccaggctgcgctggcggcccacctgtggcccaaagccacgggacgctagttgtgaacagggtgtgaagagcctattgagctacatgagagtcctccggcccctgaatgcggctaatcctaaccatggagcaggcagccgcaatccagcagccagcctgtcgtaacgcgcaagtccgtggcggaaccgactactttgggtgtccgtgtttccttttattcttgaatggctgcttatggtgacaatcatagattgttatcataaagcgagttggattggccatccagtgtgaatcggattatttactcccttgtttgttggattcactcccgaaacgttttaccttaccccttaacttattgaaattgtttgaagacaggatttcagtgtcaca

SEQ ID NO: 20232 - DNA, 730 bp, synthetic construct
  source 1..730: mol_type = other DNA
tggggttgttcccaccccagaggcccacgtggcggctagtacactggtatcacggtacctttgtacgcctgttttatactccctcccccgcaacttagaagcatacaattcaagctcaataggagggggtgcaagccagcgcctccgtgggcaagcactactgtttccccggtgaggccgcatagactgttcccacggttgaaagcgtccgatccgttatccgctcatgtacttcgagaagcctagtatcgctctggaatcttcgacgcgttgcgctcagcactcaaccccggagtgtagcttgggccgatgagtctggacagtccccactggcgacagtggtccaggctgcgctggcggcccacctgtggcttaaagccacgggacgctagtagtgaacagggtgtgaagagcctattgagctacatgagagtcctccggcccctgaatgcggctaatcctaaccatggagcaggcagctgcaacccagcagccagcctgtcgtaacgcgcaagtccgtggcggaaccgactactttgggtgtccgtgtttccttttattcttgaatggctgcttatggtgacaatcatagattgttatcataaagcgagttggattggccatccagtgtgaatcaggttaattactcccttgtttgttggaaccactcccgaaacgtttttctccttaatttattgaaattgtttgaagacaggatttcagtgtcaca

SEQ ID NO: 20233 - DNA, 742 bp, synthetic construct
  source 1..742: mol_type = other DNA
ttaaaacagcctgtgggttgctcccacccacagggcccaatgggcgccagcacactagtattacggtacttttgtgcgcctgttttatccaccctccccccacgtaacatagaagcaaaacctacacggtcaataggtggctcagtaagccaactgagcggtgaccaagcacctctgttaccccggaccgagtatcaataggctgctcacgcggctgaaggagaaaacgttcgttacccggccaattacttcgagaaacccagtatcaccatgaagattgcgaagtgtttcgctccgcacaaccccagtgtagatcgggctgatgagtcaccgcattcctcacgggcgaccgtggcggtggctgcgctggcggcccgcctatggggcaacccatgggacgcttcaatattgacatggtgtgaagagtctattgagctaattggtagtcctccggcccctgaatgcggctaatcctaactgtggagcagatacccacgcaccagtgggcagtctgtcgtaacgggcaactctgcagcggaaccgactactttgggtgtccgtgtttccttttattcttatactggctgcttatggtgacaattgagagattgttaccatatagctattggattggccatccggtgacaaacagagcaattgtctacttattcattggtttcgtaccactaaattacacagcattaaacactctcaattttattttaacacttaatacattaaa

SEQ ID NO: 20234 - DNA, 742 bp, synthetic construct
  source 1..742: mol_type = other DNA
ttaaaacagcctgtgggttgctcccacccacagggcccaatgggcgctagcacactagtattacggtacttttgtgcgcctgttttatccaccctccccccacgtaacatagaagcaaaacctacccggtcaataggtggctcagtaagccaactgagcggtgaccaagcacctctgttaccccggaccgagtatcaataggctgctcacgcggctgaaggagaaaacgttcgttacccggccaattacttcgagaaacccagtatcaccatgaagattgcgaagtgtttcgctccgcacaaccccagtgtagatcaggctgatgagtcaccgcattcctcacgggcgaccgtggcggtggctgcgctggcggcctgcccatggggcaacccatgggacgcttcaatattgacatggtgtgaagagtctattgagctaattggtagtcctccggcccctgaatgcggctaatcctaactgtggagcagatacccacgcaccagtgggcagtctgtcgtaacgggcaactctgcagcggaaccgactactttgggtgtccgtgtttccttttgttcttatactggctgcttatggtgacaattgaaagattgttaccatatagctattggattggccatccggtgacaaacagagcaattgtctacttattcattggtttcgtaccactaaattacacagcattaaacactctcaattttattctaacacttaatacattaaa

SEQ ID NO: 20235 - DNA, 735 bp, synthetic construct
  source 1..735: mol_type = other DNA
gctcttggttgttcccacccacagggcccactgggcgccagcactctggtattgcggtaccttagtgcgcctgttttatacaccccttccctaaatgtaatttagatgcatgtaaacaaaggccaatagcaggcgcagcacaccagctgtgtctcggtcaagcactcctgttaccccggactgagtatcaataggctactcacgtggctgaaggagaaaacgttcgttacccggccaattacttcgagaaacctagtaataccatgaaggttgcgaagtgtttcgctcagcacaaccccagtgtagatcaggtcgatgagtcaccgcattccccacgggtgaccgtggcggtggctgcgttggcggcctgcccatgggattacccatgggacgcttcaatattgacatggtgtgaagagtctattgagctaattggtattcctccggcccctgaatgcggctaatcccaactgcggagcaggtacccacataccagtgggcagcctgtcgtaatgggcaactctgcagcggaaccgactactttgggtgtccgtgtttctctttattcttatactggctgcttatggtgacaattgagaaattgttgccatatagctattggattggccatccggtgacaaatagagcaattgtgcatccatttgttggttttataccattgaattacaaagttttaagtacccttaatcctattatatcattcaatacagcaaa

SEQ ID NO: 20236 - DNA, 740 bp, synthetic construct
  source 1..740: mol_type = other DNA
aacagcctgtgggttgtccccacccacagggcccactgggcgccagcactctggtattgcggtaccttagtgcgcctgttttatacaccccttccctaaatgtaatttagatgcatgtaaacaaaggccaatagcaggcgcagcacaccagctgtgtctcggtcaagcacttctgttaccccggactgagtatcaataggctactcacgtggctgaaggagaaaacgttcgttatccggccaattacttcgagaaacctagtaataccatgaaggttgcgaagtgtttcgctcagcacaaccccagtgtagatcaggtcgatgagtcaccgcattccccacgggtgaccgtggcggtggctgcgttggcggcctgcccatgggattacccatgggacgcttcaatattgacatggtgtgaagagtctattgagctaattggtattcctccggcccctgaatgcggctaatcccaactgcggagcaggtacccacataccagtgggcagcctgtcgtaatgggcaactctgcagcggaaccgactactttgggtgtccgtgtttctctttattcttatactggctgcttatggtgacaattgagaaattgttgccatatagctattggattggccatccggtgacaaatagagcaattgtgcatccatttgttggttttataccattgaattacaaagttttaagtacccttaatcctattatatcattcaatacagcaaa

SEQ ID NO: 20237 - DNA, 751 bp, synthetic construct
  source 1..751: mol_type = other DNA
ggggtttaaaacagctctggggttgttcccaccccagaggcccacgtggcggctagtacactggtattacggtacccttgtacgcctgttttacacccctttcccccgtaacttagaagctttaaatccaagttcaacagtcagtggtacaacccagtactactacgaacaagcacttctgtcaccccggtgagattgcataggccgtccccacggctaaaagcgattgatccgttatccgctcttgtacttcgagaagcctagtaagaccttgggatcctcgatgcgttgcgctcaacactcaaccccagagtgtagcttgggctgatgagtctggacattcctcaccggtgacggtggtccaggctgcgttggcggcctacctgtggcccaaagccacaggacgctagttgtgaacaaggtgtgaagagcctattgagctacaagagagtcctccggcccctgaatgcggctaatcccaaccacggagcaggcgattgcaacccagcaactagcctgtcgtaacgcgcaagtccgtggcggaaccgactactttgggtgtccgtgtttccttttattacataatggctgcttatggtgacaatcacagattgttgtcataaagcgaattggattggccatccggtgagaattaaaacaactatttacttatttgttggatttgttcctatacacacccaaacaccttgcttgattgaagtaattctgttgataagacaacactattaca

SEQ ID NO: 20238 - DNA, 744 bp, synthetic construct
  source 1..744: mol_type = other DNA
ttaaaacagcctgtgggttgttcccacccacagggcccacagggcgccagcacactggtatcacggtacctttgtgcgcctgttttatacaccctcacccccgatgtaacttagaagcacaactaaagcggtcaacagaaagctcagtaatccaactgagcgccgaccaagcacttctgttaccccggaccgagtatcaataagctgctcgcgcggctgaaggagaaaacgttcgttacccggccaattacttcgagaaacctagtaacaccatgaaagttgcgtagtgtttcgctccgcacaaccccagtgtagatcaggtcgatgagtcaccgcaatccccacgggcgaccgtggcggtggctgcgttggcggcctgcccatggggcaacccatgggacgcttcaatactgacatggtgtgaagagtctattgagctaattggtagtcctccggcccctgaatgcggctaatcccaactgcggagcagacgctcgcatgccagcgagtagtctgtcgtaacgggcaactctgcagcggaaccgactactttgggtgtccgtgtttccctttatttttatattggctacttatggtgacaattgaaagattgttaccatatagctattggattggccatccggtgacaaacagagcgatcatctactcttttgttgggttcgttccattgaatcacgaggtattgaacacactcaatttcattttaacccttaatacactaag

SEQ ID NO: 20239 - DNA, 744 bp, synthetic construct
  source 1..744: mol_type = other DNA
ttaaaacagtctgtgggttgttcccacccacagggcccacgtggcgccagcacactggtatctcggtacctttgtgcgcctgttttatccaccctaaaccccgttgtaacttagaagatgagcaacactgatcaatagtgggtgcaacatgccagttgcatcacgatcaagcacttctgtatccccggactgagtatcaataggctgctcacgcggctgaaggagaaaacgttcgttatccggccagttacttcgagaaacctagtaacatcatggaggttgcgcagtgtttcgctccgcacacccccagtgtagatcaggtcgatgagtcaccgcgttccccacgggcgaccgtggcggtggctgcgttggcggcctgcccatgggataacccatgggacgcttcaatactgacatggtgtgaagagtctattgagctaactggtagtcctccggcccctgaatgcggctaatcctaactgtggagcagacacccacatgccagtgggcagtctgtcgtaacgggcaactccgcagcggaaccgactactttgggtgtccgtgtttccttttattcctatattggctgcttatggtgacaattgaaagattgttaccatatagctattggattggccatccggtgtcaaacagagcaatcatttatttgtttgttggttttatacctctgaactttaaagtgctaaagactctcaattttatattatatctcaacaaatcagg

SEQ ID NO: 20240 - DNA, 729 bp, synthetic construct
  source 1..729: mol_type = other DNA
ttgttcccaccccagaggcccacgtggcggctagtacactggtatcacggtacctttgtacgcctgttttatactccctcccccgcaacttagaagcatacaattcaagctcaataggaggggtgcaagccagcgcctccgtgagcaagcactactgtttccccggtgaggccgcatagactgttcccacggttgaaagtgtccgatccgttatccgctcatgtacttcgagaagcctagtaccgctctggaatcttcgacgcgttgcgctctgcactcaaccccggagtgtagcttgggccgatgagtctggacagtccccactggcgacagtggtccaggctgcgctggcggcccacctgtggcccaaagccacgggacgctagttgtgaacagggtgtgaagagcctattgagctacatgagagtcctccggcccctgaatgcggctaatcctaaccatggagcaggcagctgcaacccagcagccagcctgtcgtaacgcgcaagtccgtggcggaaccgactactttgggtgtccgtgtttccttttattcttgaatggctgcttatggtgacaatcatagattgttatcataaagcgagttggattggccatccagtgtgaatcagattaattactcccttgtttgttggatccactcccgtcccgaaacgttttattccttaacttattgaaattgtttaaagacaggatttcagtgtcaca

SEQ ID NO: 20241 - DNA, 729 bp, synthetic construct
  source 1..729: mol_type = other DNA
ttgttcccaccccagaggcccaagtggcggctagtactccggtattacggtacccttgtacgcctgttttatactcccttcccccgtaacttagaaggaataaaccaagttcaatagaagggggtacaagccagtaccaccacgaacaagcacttctgtttccccggtgaagttgtatagactgtatccacggttgaaagcgactgatccgttatccgcttttgtacttcgagaagcctagtatcatcttggaatcttcgatgcgttgcgctcagcactcaaccccagagtgtagcttgggctgatgagtctggacactcctcaccggtgacggtggtccaggctgcgttggcggcctacctgcggcctaaagccacaggacgctagttgtgaacaaggtgtgaagagcctattgagctacaaaagagtcctccggcccctgaatgcggctaatcctaaccacggagcaagggtgtgcgaaccagtgcataccttgtcgtaacgcgcaagtctgtggcggaaccgactactttgggtgtccgtgtttctttttattcttgtaatggctgcttatggtgacaatcatagattgttatcataaagcgaattggattagccatccggagaaagcgaaatacattatttatccttttgttggatttactccattcacttccctttctttaaagttcatcactacaaccttgttgattagagacttatattata

SEQ ID NO: 20242 - DNA, 741 bp, synthetic construct
  source 1..741: mol_type = other DNA
ttaaaacagcctgtgggttgttcccacccacagggcccaatgggcgctagcacactagtattacggtacttttgtgcgcctgttttatccacccccccccacgtaacatagaagcaaaacctacacggtcaataggtgactcagtaagccaactgagcggtgaccaagcacctctgttaccccggaccgagtatcaataggctgctcacgcggctgaaggagaaaacgttcgttacccggccaattacttcgagaaacccagtatcaccatgaagattgcgaagtgtttcgctccgcacaaccccagtgtagatcaggctgatgagtcaccgcattcctcacgggcgaccgtggcggtggctgcgctggcggcctgcccatggggcaacccatgggacgcttcaatattgacatggtgtgaagagtctattgagctaattggtagtcctccggcccctgaatgcggctaatcctaactgtggagcagatacccacgcaccagtgggcagtctgtcgtaacgggcaactctgcagcggaaccgactactttgggtgtccgtgtttccttttattcttatactggctgcttatggtgacaattgaaagattgttaccatatagctattggattggccatccggtgacaaacagagcaattatctacttattcattggtttcgtaccactaaactacacagcattaaacactctcaattttatcttaacacttaatacattaaa

SEQ ID NO: 20243 - DNA, 741 bp, synthetic construct
  source 1..741: mol_type = other DNA
ttaaaacagcctgtgggttgctcccacccacagggcccaatgggcgctagcacactagtattacggtacttttgtgcgcctgttttatccacccccccccacgtaacatagaagcaaaacctactcggtcaataggtggctcagtaagccaactgagcggtgaccaagcacctctgttaccccggaccaagtatcaataggctgctcacgcggctgaaggagaaaacgttcgttacccggccaattacttcgagaaacccagtaccaccatgaagattgcgaagtgtttcgctccgcacaaccccagtgtagatcaggctgatgagtcaccgcattcctcacgggcgaccgtggcggtggctgcgctggcggcctgcccatggggcaacccatgggacgcttcaatattgacatggtgtgaagagtctattgagctaattggtagtcctccggcccctgaatgcggctaatcctaactgtggagcagatacccacgcaccagtgggcagtctgtcgtaatgggcaactctgcagcggaaccgactactttgggtgtccgtgtttccttttattcttatactggctgcttatggtgacaattgaaagattgttaccatatagctattggatcggccatccggtgacaaacagagcaattgtctacttattcattggtttcgtaccactaaattacatagcattaaacactctcaactttattttaacacttaatacattaaa

SEQ ID NO: 20244 - DNA, 744 bp, synthetic construct
  source 1..744: mol_type = other DNA
ttaaaacagcctgtgggttgtccccacccacagggcccacagggcgctagcacactggtattacggtacccttgtgcgcctgttttatctacccttccccttaaagtaacttagaagcacaacccaggcggtcaatagaaagctcagcaacccagctgagttctggccaagcacttctgttaccccggaccgagtatcaataggctgcttgcgcggctgaaggagaaaacgttcgttatccggccaattacttcgagaaacccagtatcaccatgaaggttgcgcagtgtttcgctccgcacaaccccagtgtagatcaggccgatgagtcaccgcattccccacgggcgaccgtggcggtggctgcgctggcggcctgcccatggggcaacccatgggacgcttcaatactgacatggtgtgaagagtctattgagctaattggtagtcctccggcccctgaatgcggctaatcctaactgcggagcagacgctcgcaagccagcgagtggtctgtcgtaatgggtaactctgcagcggaaccgactactttgggtgtccgtgtttccttttattcctatactggctgcttatggtgacaattgagagattgttaccatatagctattggattggccatccggtgacaaacagagcaattgtttttctattcgttggtttcataccattggattttaaggctttaagaactctcaacttgatcttactgtttaatacatcaaa

SEQ ID NO: 20245 - DNA, 744 bp, synthetic construct
  source 1..744: mol_type = other DNA
ttaaaacagggcctgtgggttgttcccactcacagggcccactgggcgttagcacactggtattacggtacccttgtgcgcctgttttattcaccctaccccattgcaacttagaagtcaaccaagcacggtcattaggcagctcagtatgccaactgagttctgaccaagcacttctgttaccccggactgagtatcaataggctgtttgcacggctgaaggagaaaacgttcgttacccgaccaattacttcgagaaacccagtatcaccatgaaggttgcgcagtgtttcgctccgcacaaccccagtgtagatcaggtcgatgagtcaccgcactcctcacgggcgaccgtggcggtggctgcgctggcggcctgcccatgggccaacccatgggacgcttcaaaactgacatggtgtgaagagtctattgagctaattggtagtcctccggcccctgaatgcggctaatcccaactgcggagcagatacccacatgccagtgggcggtctgtcgtaacgggcaactctgcagcggaaccgactactttgggtgtccgtgtttccttttattcttatactggctgcttatggtgacaattgagagattgttaccatatagctattggattggccatccggtgacaaacagggcgattgtttacctatttgttggtttcgtaccattgaattttaaagttttaaaaacccttaaccttattttagcacttaatacagcgaa

SEQ ID NO: 20246 - DNA, 739 bp, synthetic construct; identical to SEQ ID NO: 963
  source 1..739: mol_type = other DNA

SEQ ID NO: 20247 - DNA, 739 bp, synthetic construct
  source 1..739: mol_type = other DNA
ctgtgggttgttcccacccacagggcccactgggcgctagcacactggtattacggtacctttgtgcgcctgttttatattcctccccctcaatgtaacttagaagtttgtcacaagtggtcaatagaaagctcagcaatccagctgggtgcagaccaagcactcctgttaccccggaccgagtatcaataagctgctcacgcggctgaaggagaaaacgttcgttacccggcctactacttcgagaaacctagtaccaccatgaaagttgcgcagtgtttcgctccgcacaaccccagtgcagatcaggtcgatgagtcaccgcaatccccacgggcgaccgtggcggtggctgcgttggcggcctgcccatggggcaacccatgggacgcttcaatactgacatggtgtgaagagtctattgagctagttggtagtcctccggcccctgaatgcggctaatcccaactgcggagcagatgcccgtgcaccaacgggtggtctgtcgtaatgggcaactctgcagcggaaccgactactttgggtgtccgtgtttctctttattcttatattggctgcttatggtgacaattgaaagattgttaccatatagctattggattggccatccggtgactaatagagcaattattctctcttttgttggatttgttccattgaactactcggtactaaacacacttaatctcattttaacacttaacacaataaaaagaaa

SEQ ID NO: 20248 - DNA, 732 bp, synthetic construct
  source 1..732: mol_type = other DNA
tctggggttgttcccaccccagaggcccacgtggcggctagtacactggtatcacggtacctttgtacgcctgttttatactccctcccccgcaacttagaagcatacaattcaagctcaataggagggggtgcaagccagcgcctccgtgggcaagcactactgtttccccggtgaggccgcatagactgttcccacggttgaaagtgtccgatccgttatccgctcatgtacttcgagaagcctagtatcgctctggaatcttcgacgcgttgcgctcagcactcaaccccggagtgtagcttgggccgatgagtctggacagtccccactggcgacagtggtccaggctgcgctggcggcccacctgtggcccaaagccacgggacgctagttgtgaacagggtgtgaagagcctattgagctacatgagagtcctccggcccctgaatgcggctaatcctaaccatggagcaggcagctgcaacccagcagccagcctgtcgtaacgcgcaagtccgtggcggaaccgactactttgggtgtccgtgtttccttttattcttgaatggctgcttatggtgacaatcatagattgttatcataaagcgagttggattggccatccagtgtgaatcagagtaattactcccttgtttgttggatccactcccgaaacgttttactccttaacttattgaaattgtttgaagacaggatttcagtgtcaca

SEQ ID NO: 20249 - DNA, 727 bp, synthetic construct
  source 1..727: mol_type = other DNA
tacccaccccagaggcccacgtggcggctagcactccggtattacggtacccttgtgcgcctgttttatactcccctcccgcaacttagaagcacgaaaccaagttcaatagaagggggtacaaaccagtaccactacgaacaagcacttctgtctccccggtgacattgcatagactgctcacgcggttgaaagtgatcgatccgttacccgcttgtgtacttcgaaaagcctagtatcgccttggaaacttcaacgcgttgcgctcagcacccgaccccggggtgtagcttaggctgatgagtctggacagtcctcaccggtgacggtggtccaggctgcgttggcggcctacctatggctaacgccataggacgctagatgtgaacaaggtgtgaagagcctattgagctacataagagtcctccggcccctgaatgcggctaatcctaaccacggagcaggcggtcgcgaaccagtgactggcttgtcgtaacgcgcaagtctgtggcggaaccgactactttgggtgtccgtgtttcctgttatttttatcatggctgcttatggtgacaatcagagattgttatcataaagcgaattggattggccatccggtgagtgttgtgtcaggtatacaactgtttgttggaaccactgtgttagctttacttctcatttaaccaattactcaaaaacaatacgaggataaaacaacaatactaca

SEQ ID NO: 20250 - DNA, 742 bp, synthetic construct
  source 1..742: mol_type = other DNA
ttaaaacaggcctgtgggttgttcccacccacagggcctactgggcgccagcacactggtatcacggtacctttgtgcgcctgttttatcttcccttccccaatgcaacttagaagcataaattgaacggtcaataggtagcccagtgcgccaactgggtttggaccaagtacttctgttgccccggaccgagtatcaataagctgcccccgcggctgaaagagaaaacgttcgttacccggccaattacttcgagaaacccagtaccaccatgaaggttgcgcagtgtttcgctcagcacaatcccagtgtagatcaggtcgatgagtcaccgcaatccccacgggtgaccgtggcggtggctgcgttggcggcctgcccatggggcaacccatgggacgcttcaattccgacatggtgcgaagagtctattgagctaattggtagtcctccggcccctgaatgcggctaatcctaactgcggagcaaacacccacaaacagtgggcagtttgtcgtaacgggcaactctgcagcggaaccgactactttgggtgtccgtgtttccttttattcttacattggctgcttatggtgacaattgaaaggttgttaccatatagctattggattggccatccggtgacaaacagagctattatttacctttttgttggttttgtgccattaaatcttaaaatcttaaaaaccataaactttatcttaacacttaactcagcaaa

SEQ ID NO: 20251 - DNA, 742 bp, synthetic construct
  source 1..742: mol_type = other DNA
ttaaaacagcctgtgggttgttcccacccacagggcccactgggcgctagcacactggtattacggtacccttgtgcgcctgttttattcaccctaccccattgcaacttagaagctaaccaagtacggtcattaggcagctcagtaagccaactgagttttgaccaagcacttctgttaccccggactgagtatcaataggctgtttgcacggctgaaggagaaaacgttcgttacccgaccaattacttcgagaaacctagtatcaccatgaaggttgcgcagtgtttcgctccgcacaaccccagtgtagatcaggccgatgagtcaccgcactccccacgggcgaccgtggcggtggctgcgctggcggcctgcccatgggccaacccatgggacgcttcaaaactgacatggtgtgaagagtctattgagctaattggtagtcctccggcccctgaatgcggctaatcctaactgcggagcagatacctacatgccagtgggcggtctgtcgtaacgggcaactctgcagcggaaccgactactttgggtgtccgtgtttccttttattcctatactggctgcttatggtgacaattgagagattgttaccatatagctattggattggccatccggtgacaaacagagcgattgtttacctatttgttggtttcgtaccattgaattttaaagttttaaaaaccctcaatcttgttttagcacttaacgcagcaaa

SEQ ID NO: 20252 - DNA, 692 bp, synthetic construct
  source 1..692: mol_type = other DNA
cacactggtattacggtacccttgtgcgcctgttttattcaccctaccccattgcaacttagaagctaaccaagtacggtcattaggcagctcagtaagccaactgagttttgaccaagcacttctgttaccccggactgagtatcaataggctgtttgcacggctgaaggagaaaacgttcgttacccgaccaattacttcgagaaacctagtatcaccatgaaggttgcgcagtgtttcgctccgcacaaccccagtgtagatcaggccgatgagtcaccgcactccccacgggcgaccgtggcggtggctgcgctggcggcctgcccatgggccaacccatgggacgcttcaaaactgacatggtgtgaagagtctattgagctaattggtagtcctccggcccctgaatgcggctaatcctaactgcggagcagatacctacatgccagtgggcggtctgtcgtaacgggcaactctgcagcggaaccgactactttgggtgtccgtgtttccttttattcctatactggctgcttatggtgacaattgagagattgttaccatatagctattggattggccatccggtgacaaacagagcgattgtttacctatttgttggtttcgtaccattgaattttaaagttttaaaaaccctcaatcttgttttagcacttaacgcagcaaa

SEQ ID NO: 20253 - DNA, 742 bp, synthetic construct
  source 1..742: mol_type = other DNA
ttaaaacagcctgtgggttgttcccacccacagggcccactgggcgctagcacactggtattacggtacccttgtgcgcctgttttattcaccctaccccattgcaacttagaagctaaccaagtacggtcattaggcagctcagtaagccaactgggttttgaccaagcacttctgttaccccggactgagtatcaataggctgtttgcacggctgaaggagaaaacgttcgttacccgaccaattacttcgagaaacctagtatcaccatgaaggttgcgcagtgtttcgctccgcacaaccccagtgtagatcaggccgatgagtcaccgcactccccacgggcgaccgtggcggtggctgcgctggcggcctgcccatgggccaacccatgggacgcttcaaaactgacatggtgtgaagagtctattgagctaattggtagtcctccggcccctgaatgcggctaatcctaactgcggagcagatacctacatgccagtgggcggtctgtcgtaacgggcaactctgcagcggaaccgactactttgggtgtccgtgtttccttttattcctatactggctgcttatggtgacaattgagagattgttaccatatagctattggattggccatccggtgacaaacagagcgattgtttacctatttgttggtttcgtaccattgaattttaaagttttaaaaaccctcaatcttgttttagcacttaacgcagcaaa

SEQ ID NO: 20254 - DNA, 727 bp, synthetic construct
  source 1..727: mol_type = other DNA
tacccaccccagaggcccacgtggcggctagcactccggtattacggtacccttgtgcgcctgttttatactcccctcccgcaacttagaagcacgaaaccaagttcaatagaagggggtacaaaccagtaccactacgaacaagcacttctgtttccccggtgacattgcatagactgctcacgcggttgaaagtgatcgatccgttacccgcttgtgtacttcgaaaagcctagtatcgccttggaatcttcgacgcgttgcgctcagcacccgaccccggggtgtagcttaggctgatgagtctggacattcctcaccggtgacggtggtccaggctgcgttggcggcctacctatggctaacgccataggacgttagatgtgaacaaggtgtgaagagcctattgagctacataagagtcctccggcccctgaatgcggctaatcctaaccacggagcaggcggtcgcgaaccagtgactggcttgtcgtaacgcgcaagtctgtggcggaaccgactactttgggtgtccgtgtttcctgttatttttatcatggctgcttatggtgacaatcagagattgttatcataaagcgaattggattggccatccggtgagtgttgtgtcaggtatacaactgtttgttggaaccactgtgttagctttacttctcatttaaccaattaatcaaaaacaatacgaggataaaacaacaatactaca

SEQ ID NO: 20255 - DNA, 727 bp, synthetic construct
  source 1..727: mol_type = other DNA
tacccaccccagaggcccacgtggcggctagcactccggtattacggtacccttgtgcgcctgttttatactcccctcccgcaacttagaagcacgaaaccaagttcaatagaagggggtacaaaccagtaccactacgaacaagcacttctgtttccccggtgacattgcatagactgctcacgcggttgaaagtgatcgatccgttacccgcttgtgtacttcgaaaagcctagtatcgccttggaatcttcgacgcgttgcgctcagcacccgaccccggggtgtagcttaggctgatgagtctggacattcctcaccggtgacggtggtccaggctgcgttggcggcctacctatggctaacgccataggacgctagatgtgaacaaggtgtgaagagcctattgagctacataagagtcctccggcccctgaatgcggctaatcctaaccacggagcaggcggtcgcgaaccagtgactggcttgtcgtaacgcgcaagtctgtggcggaaccgactactttgggtgtccgtgtttcctgttatttttatcatggctgcttatggtgacaatcagagattgttatcataaagcgaattggattggccatccggtgagtgttgtgtcaggtatacaactgtttgttggaaccactgtgttagctttacttctcatttaaccaattaatcaaaaacaatacgaggataaaacaacaatactaca

SEQ ID NO: 20256 - DNA, 727 bp, synthetic construct
  source 1..727: mol_type = other DNA
tacccaccccagaggcccacgtggcggctagcactccggtattacggtacccttgtgcgcctgttttatactcccctcccgcaacttagaagcacgaaaccaagttcaatagaagggggtacaaaccagtaccaccacgaacaagcacttctgtttccccggtgacattgcatagactgctcacgcggttgaaagtgatcgatccgttacccgcttgtgtacttcgaaaagcctagtatcgccttggaatcttcgacgcgttgcgctcagcacccgaccccggggtgtagcttaggctgatgagtctggacattcctcaccggtgacggtggtccaggctgcgttggcggcctacctatggctaacgccataggacgctagatgtgaacaaggtgtgaagagcctattgagctacataagagtcctccggcccctgaatgcggctaatcctaaccacggagcaggcggtcgcgaaccagtgactggcttgtcgtaacgcgcaagtctgtggcggaaccgactactttgggtgtccgtgtttcctgttatttttatcatggctgcttatggtgacaatcagagattgttatcataaagcgaattggattggccatccggtgagtgttgtgtcaggtatacaactgtttgttggaaccactgtgttagctttacttctcatttaaccaattaatcaaaaacaatacgaggataaaacaacaatactaca

SEQ ID NO: 20257 - DNA, 727 bp, synthetic construct
  source 1..727: mol_type = other DNA
tacccaccccagaggcccacgtggcggctagcactccggtattacggtacccttgtgcgcctgttttatactcccctcccgcaacttagaagcacgaaaccaagttcaatagaagggggtacaatccagtaccactacgaacaagcacttctgtttccccggtgacattgcatagactgctcacgcggttgaaagtgatcgatccgttacccgcttgtgtacttcgaaaagcctagtatcgccttggaatcttcgacgcgttgcgctcagcacccgaccccggggtgtagcttaggctgatgagtctggacattcctcaccggcgacggtggtccaggctgcgttggcggcctacctatggctaacgccataggacgttagatgtgaacaaggtgtgaagagcctattgagctacataagagtcctccggcccctgaatgcggctaatcctaaccacggagcaggcggtcgcgaaccagtgactggcttgtcgtaacgcgcaagtctgtggcggaaccgactactttgggtgtccgtgtttcctgttatttttatcatggctgcttatggtgacaatcagagattgttatcataaagcgaattggattggccatccggtgagtgttgtgtcaggtatacaactgtttgttggaaccactgtgttagctttacttctcatttaaccaattaatcaaaaacaatacgaggataaaacaacaatactaca

SEQ ID NO: 20258 - DNA, 727 bp, synthetic construct
  source 1..727: mol_type = other DNA
tacccaccccagaggcccacgtggcggctagcactccggtattacggtacccttgtgcgcctgttttatactcccctcccgcaacttagaagcacgaaaccaagttcaatagaagggggtacaaaccagtaccactacgaacaagcacttctgtttccccggtgacattgcatagactgctcacgcggttgaaagtgatcgatccgttacccgcttgtgtacttcgaaaagcctagtatcgccttggaatcttcgacgcgttgcgctcagcacccgaccccggggtgtagcttaggctgatgagtctggacattcctcaccggtgacggtggtccaggctgcgttggcggcctacctatggctaacgccataggacgttagatgtgaacaaggtgtgaagagcctattgagctacataagagtcctccggcccctgaatgcggctaatcctaaccacggagcaggcggtcgcgaaccagtgactggcttgtcgtaacgcgcaagtctgtggcggaaccgactactttgggtgtccgtgtttcctgttatttttatcatggctgcttatggtgacaatcagagattgttatcataaagcgaattggattggccatccggtgagtgttgtgtcaggtatacaactgtttgttggaaccactgtgttagcttcacttctcatttaaccaattaatcaaaaacaatacgaggataaaacaacaataccaca

SEQ ID NO: 20259 - DNA, 732 bp, synthetic construct
  source 1..732: mol_type = other DNA
gtgggttgttcccacccacagggcccactgggcgccagcactctggtattgcggtaccttagtgcgcctgttttatacaccccttccctaaatgcaatttagatgcatgtaaataaagaccaatagcaggcgcagcacaccagctgtgtctcggtcaagcactcctgttaccccggactgagtatcaataggctactcacgtggctgaaggagaaaacgttcgttacccggccaattacttcgagaaacctagtaacaccatgaaggttgcgaagtgtttcgctccgcacaaccccagtgtagatcaggtcgatgagtcaccgcattccccacgggtgaccgtggcggtggctgcgttggcggcctgcccatgggattacccatgggacgcttcaatactgacatggtgtgaagagtctattgagctaattggtattcctccggcccctgaatgcggctaatcccaactgcggagcagatacccacacaccagtgggcagtctgtcgtaatgggcaactctgcagcggaaccgactactttgggtgtccgtgtttctctttattcttatactggctgcttatggtgacaattgagagattgttgccatatagctattggattggccatccggtgacaaatagagcaattgtgtatctatttgttggttttataccattaaattacaaagttttaagcacccttaatcttattatagcattcaatacagcaaa

SEQ ID NO: 20260 - DNA, 731 bp, synthetic construct
  source 1..731: mol_type = other DNA
ctggggttgttcccaccccagaggcccacgtggcggctagtacactggtatcacggtacctttgtacgcctgttttatactccctcccccgcaacttagaaacatacaattcaagctcaataggagggggtgcaagccagcgcctccgtgagcaagcactactgtttccccggtgaggccgcatagactgttcccacggttgaaagtgtccgatccgttatccgctcatgtacttcgagaagcctagtatcgctctggaatcttcgacgcgttgcgctcagcactcaaccccggagtgtagcttgggccgatgagtctggacagtccccactggcgacagtggtccaggctgcgctggcggcccacctgtggcccaaagccacaggacgctagttgtgaacagggtgtgaagagcctattgagctacatgagagtcctccggcccctgaatgcggctaatcctaaccacggagcaggcagctgcaacccagcagccagcctgtcgtaacgcgcaagtccgtggcggaaccgactactttgggtgtccgtgtttccttttattcttgaatggctgcttatggtgacaatcacagattgttatcataaagcgagttggattggccatccagtgtgaatcagattaattactcccttgtttgttggatccactcccgaaacgttttactccttaacttattgaaattgtttgaagacaggatttcagtgtcaca

SEQ ID NO: 20261 - DNA, 742 bp, synthetic construct
  source 1..742: mol_type = other DNA
ttaaaacagcctgtgggttgcccccacccgcagggcccattgggcgctagcacactggtatcacggtacctttgtgcgcctgttttatcctccctccccaagtgcaacgtagaagcaagacacaaaaggtcaacagatagcccagcacaccagttgggtttcgaccaagcacttctgtctccccggaccgagtatcaataagctgctcacgcggctgaaggagaaagtgttcgttacccggctagttacttcgagaaacctagtaccaccatgaaggttgcgcagcgtttcgctccgcacaaccccagtgtagatcaggtcgatgagtcaccgcgttccccacgggcgaccgtggcggtggctgcgttggcggcctgcccatggggcaacccatgggacgcttcaatactgacatggtgcgaagagtctattgagctaactagtagtcctccggcccctgaatgcggataatcttaactgcggagcaggtgctcacaatccagtgggtggcctgtcgtaacgggcaactctgcagcggaaccgactactttgggtgtccgtgtttccttttatctctttgttggctgcttatggtgacaattgaacgattgttgccatatagctattggattggccatccggtgagcagcagatccattatttaccagtttgttggatttgtaccacttgatcacatagtctttagaacacttgtctttattctaaatcttaacaaggcaag

SEQ ID NO: 20262 - DNA, 727 bp, synthetic construct
  source 1..727: mol_type = other DNA
tacccaccccagaggcccacgtggcggctagcactccggtattacggtacccttgtgcgcctgttttatactcccttcccgcaacttagaagcacgaaaccaagttcaatagaagggggtacaaaccagtaccactacgaacaagcacttctgtttccccggtgacatcgcatagactgctcacgcggttgaaagtgatcgatccgttacccgcttgtgtacttcgaaaagcctagtatcgccttggaatcttcgatgcgttgcgctcagcacccgaccccggggtgtagcttaggctgatgagtctggacattcctcaccggtgacggtggtccaggctgcgttggcggcctacctatggctaacgccataggacgctagatgtgaacaaggtgtgaagagcctattgagctacataagagtcctccggcccctgaatgcggctaatcctaaccacggagcaggcggtcacgaaccagtgactggcttgtcgtaacgcgcaagtctgtggcggaaccgactactttgggtgtccgtgtttcctgttatttttatcatggctgcttatggtgacaatcagagattgttatcataaagcgaattggattggccatccggtgagtgttgtgtcaggtgtacaactgtttgttggaaccactgtgttagctttacttctcatttaaccaattaatcaaaaacaacacgaggataaaacaacaatactaca

SEQ ID NO: 20263 - DNA, 742 bp, synthetic construct
  source 1..742: mol_type = other DNA
ttaaaacagcctgtgggttgttcccacccacagggcctactgggcgttagcacactggtattacggtacccttgtgcgcctgttttattcaccctaccccattgcaacttagaagctaaccaagcacggtcattaggcagctcagtatgccaactgagttttgaccaagcacttctgttaccccggactgagtatcaataggctgtttgcacggccgaaggagaaaacgttcgttacccgaccaattacttcgagaaacccagtatcaccatgaaggttgcgcagtgtttcgctccgcacaaccccagtgtagatcaggccgatgagtcaccgcattccccacgggcgaccgtggcggtggctgcgctggcggcctgcccatgggccaacccatgggacgcttcaaaactgacatggtgtgaagagtctattgagctaattggtagtcctccggcccctgaatgcggctaatcctaactgcggagcagatacccacatgccagtgggcggtctgtcgtaacgggcaactctgcagcggaaccgactactttgggtgtccgtgtttccttttattcctttactggctgcttatggtgacaattgagagattgttaccatatagctattggattggccatccggtgacaaacagagcaattatttacctatttgttggttacgtaccattgaattttaaagttttaaaaacccttaacattgttttaacacttaacgcagcaaa

SEQ ID NO: 20264 - DNA, 721 bp, synthetic construct
  source 1..721: mol_type = other DNA
cccaccccagaggcccacgtggcggctagtactccggtattacggtacccttgtacgcctgttttatactcccctccccgtaacttagaagacacaaaataagttcaataggagggggtacaaaccagtaccaccacgaacaagcacttctgtctccccggtgacattgcatagactgtccccacggttgaaagcaattgatccgttacccgctcttgtacttcgagaagcctagtaccatcttggaatcatcgatgcgttgcgctccacactcagtcccagagtgtagcttaggctgatgagtctggacattcctcaccggcgacggtggtccaggctgcgttggcggcctacctgtggtccaaagccacaggacgctagatgtgaacaaggtgtgaagagcctattgagctataagagagtcctccggcccctgaatgcggctaatcccaaccacggatcaagggtgcacgaaccagtgtataccttgtcgtaacgcgcaagtccgtggcggaaccgactactttgggtgaccgtgtttccttttattatctcaatggctgcttatggtgacaatcattgattgttatcataaagcgaattggactggccgtccggtgaaagtgaaacatattgtttgcctccttgttgggtctactccaaccaatctttacttacaatcttaccactacagttttgctggttagaagtgtgtttcacg

SEQ ID NO: 20265 - DNA, 726 bp, synthetic construct
  source 1..726: mol_type = other DNA
ttcccaccccagaggcccacgtggcggccagtactctggtattacggtacctttgtacgcctgttttatactccctcccccgtaacttagaagaaacaaatcaagttcaacaggagggggtacgaaccagtaccaccacgaacaagcacttctgtctccccggtgacgttgcatagactgtacccacggtcgaaagcgattgatccgttatccgctcttgtacttcgagaagcctagtatcatcttggaatcttcgatgcgttgcgctcagcactcaaccccagagtgtagcttaggtcgatgagtctggacgttcctcaccggcgacggtggtccaggctgcgttggcggcctacctgtggcccaaaaccacaggacgctagttgtgaacaaggtgtgaagagcctattgagctacaggagagtcctccggcccctgaatgcggctaatcccaaccacggagcaggggtgcataaaccaatgcacaccttgtcgtaacgcgcaagtctgtggcggaaccgactactttgggtgtccgtgtttccttttatttttacattggctgcttatggtgacaatcatagattgttatcataaagcgacttggattggccatccggtgagagtgaaatacattgtttacttgttcattggatttactccactcaactctttcgcttacaaactcattacaataacactgttaattaaaacaacaatattaca

SEQ ID NO: 20266 - DNA, 741 bp, synthetic construct
  source 1..741: mol_type = other DNA
ttaaaacagcctgtgggttgcccccacccgcagggccattgggcgctagcacactggtatcacggtacctttgtgcgcctgttttatcctccctccccaagtgcaacgtagaagcaagacacaaaaggtcaacagatagcccagcacaccagttgggtttcgaccaagcacttctgtctccccggaccgagtatcaataagctgctcacgcggctgaaggagaaagcgttcgttacccggctagttacttcgagaaacccagtaccaccatgaaggttgcgcagcgtttcgctccgcacaaccccagtgtagatcaggtcgatgagtcaccgcgttccccacgggcgaccgtggcggtggctgcgttggcggcctgcctatggggcaacccatgggacgcttcaatactgacatggtgcgaagagtctattgagctaactagtagtcttccggcccctgaatgcggctaatcttaactgcggagcaggtgctcacaatccagtgggtggcctgtcgtaacgggcaactctgcagcggaaccgactactttgggtgtccgtgtttccttttatctctttgttggctgcttatggtgacaattgaatgattgttgccatatagctattggattggccatccggtgagcagcagatccattatttaccagtttgttggatttgtaccacttgatcacatagtctttagaacacttgtctttattctaaatcttaacaaggcaag

SEQ ID NO: 20267 - DNA, 726 bp, synthetic construct
  source 1..726: mol_type = other DNA
gttgttcccacccgcagggcccactgggcgccagcacactggtattacggtacccttgtgcgcctgttttacatacccctccccaccgcaacgtagaagtacaatacaagaggtctatagggggctcagtacaccaactgagtcatgaccaagcacttctgttaccccggaccgagtatcaataagctgctcgcgcggctgaaggagaaagcgttcgttacccggccacttacttcgagaaacccagtaacaccatggaggttgcgcggcgtttcgttccacacgaccccggtgtagatcaggccgatgagtcaccgcactcctcacgggcgaccgtggcggtggctgcgctggcggcctgcccatggggtaacccatgggacgcttcaatactgacatggtgtgaagagtctattgagctaagtggtagtcctccggcccctgaatgcggctaatcctaactgcggagcagatacctgcaaaccagtgggcagtctgtcgtaatgggtaactctgcagcggaaccgactactttgggtgaccgtgtttctttttattcttatattggctgcttatggtgacaattgagagattgttgccatatagctattggattggccatccggtgtctaatagagcaattatataccaatttgttggttttgtacccctaaacctcaaagtaataagaacactgaattttgtgttactgttaaatacactaaa

SEQ ID NO: 20268 - DNA, 741 bp, synthetic construct
  source 1..741: mol_type = other DNA
ttaaaacagctctggggttgctcccacccacagggcccaatgggcgctagcacactagtattgaggtacttttgtgcgcctgttttatccaccctctccccacgtaacttagaagcaaaactcattcggtcaatagacagcccagtaagccaactgggcaatgaccaagcacttctgttccccggactgagtatcaatagactgctcacgcggttgaaggagaaatcgttcgttacccggccaattacttcgagaaacctagtaccaccatggagattgcgaagtgtttcgctccgcacaaccccagtgtagatcaggctgatgagtcaccgcattcctcacgggcgaccgtggcggtggctgcgctggcggcctgcccatggggcaacccatgggacgcttcaatattaacatggtgtgaagagtctattgagctaattggtagtcctccggcccctgaatgcggctaatcctaactgcggagcagacacccacacgccagtgggcagtctgtcgtaacgggaaactctgcagcggaaccgactactttgggtgtccgtgtttccttttattcttatattggctgcttatggtgacaattgaaagattgttaccatatagctattggattggccatccagtgacaaatcgagcgatcatttacttgtttgttggtttcgtcccgctaaactttaaagttgtgaatactcttaactttattatagcacagaacacatcact

SEQ ID NO: 20269 - DNA, 741 bp, synthetic construct
  source 1..741: mol_type = other DNA
ttaaaacagctctggggttgctcccacccacagggcccaatgggcgctagcacactagtattgaggtacttttgtgcgcctgttttatccaccctctccccacgtaacttagaagcaaaactcattcggtcaatagacagcccagtaagccaactgggcaatgaccaagcacttctgttccccggactgagtatcaatagactgctcacgcggttgaaggagaaatcgttcgttacccggccaattacttcgagaaacctagtaccaccatggagattgcgaagtgtttcgctccgcacaaccccagtgtagatcaggctgatgagtcaccgcattcctcacgggcgaccgtggcggtggctgcgctggcggcctgcccatggggcaacccatgggacgcttcaatattaacatggtgtgaagagtctattgagctaattggtagtcctccggcccctgaatgcggctaatcctaactgcggagcagacacccacacgccagtgggcagtctgtcgtaacgggaaactctgcagcggaaccgactactttgggtgtccgtgtttccttttattcttatactggctgcttatggtgacaattgaaagattgttaccatatagctattggattggccatccagtgacaaatcgagcgatcatttacttgtttgttggtttcgttccgctaaactttaaagttgtgaatactcttaactttattatagcacagaacacatcact

SEQ ID NO: 20270 - DNA, 822 bp, synthetic construct
  source 1..822: mol_type = other DNA
tttaaaacagcctgggggttgtacccacccctggggcccacgcggcgccagtactctggtacgctagtacctttgtacgcctgttttcccctcccttaaataaattaagattaccactactgaggggagtggtccgactccgctccggcactgccgcaccagtagactggtacgtctagtacccttctacggagtagatggtaccccccccctgaaacttagaagtatgcaaacaaaccgaccaataggcgcgtggcatccagtcacgttacggtcaagcacttctgtctccccggtccgaaaggatcgttacccgcccgacccactacgaaaagcctagtagtccgccaagtgtctgcgaagttgcgatcaaccacaaccccagtggtagctctggaagatggggctcgcgtttcccccgtggtaacacggtcgcctgcccgcgcgcgcttccgggttcggtcttgtgccgatcacttcaatgtcacgcaactgacgaagagcctattgtgctgggacggttttcctccggggccgtgaatgctgctaatcccaacctccgagcgtgtgcgcacaatccagtgttgctacgtcgtaacgcgtaagttggaggcggaacagactactttcggaaccccgtgtttcttattttacactttatcaatatatggtgacaattgctgaaatttgcgatctagcgactttaccactgaatattgcactgtactacttgattgcatttcacaaaacctctgacatccctagctcttatattgaacttttggtttatttgaatctgaaatataacttagaaagaacaaa

SEQ ID NO: 20271 - DNA, 725 bp, synthetic construct
  source 1..725: mol_type = other DNA
ttgttcccaccccagaggcccacgtggcggctagtacactggtatcacggtacctttgtacgcctgttttatactccctcccccgcaacttagaagcatacaattcaagctcaataggagggggtgcaagccagcacctccgtgggcaagcactactgtttccccggtgaggccgtatagactgttcccacggttgaaagcgtccgatccgttatccgctcatgtacttcgagaagcctagtatcgctctggaatcttcgacgcgttgcactcagcactcaaccccggagtgtagcttgggccgatgagtctggacagtccccactggcgacagtggtccaggctgcgctggcggcccacctgtggcctaaagccacgggacgctagtagtgaacagggtgtgaagagcctattgagctacatgagagtcctccggcccctgaatgcggctaatcctaaccatggagcaggcagctgcaacccagcagccagcctgtcgtaacgcgcaagtccgtggcggaaccgactactttgggtgtccgtgtttccttttattcttgaatggctgcttatggtgacaatcatagattgttatcataaagcgagttggattggccatccagtgtgaatcagattaattactcccttgtttgttggatccaatcccgaaacgttttactctttaacttattgaaattgtttgaagacaggatttcagtgtcaca

SEQ ID NO: 20272 - DNA, 730 bp, synthetic construct
  source 1..730: mol_type = other DNA
gggttgttcccacccacagggcccactgggcgccagcactctggtattgtggtaccttagtgcgcctgttttatacaccccttccctaaatgtaatttagatgcatgtaaacaaaggccaatagcaggcgcagcacaccagctgtgtctcggtcaagcacttctgttaccccggactgagtatcaataggctactcacgtggctgaaggagaaaacgttcgttatccggccaattacttcgagaaacctagtaataccatgaaggttgcgaagtgtttcgctcagcacaaccccagtgtagatcaggtcgatgagtcaccgcattccccacgggtgaccgtggcggtggctgcgctggcggcctgcccatgggattacccatgggacgcttcaatattgacatggtgtgaagagtctattgagctaattggtattcctccggcccctgaatgcggctaatcccaactgcggagcaggtacccacataccagtgggcagcctgtcgtaatgggcaactctgcagcggaaccgactactttgggtgtccgtgtttctctttattcttatactggctgcttatggtgacaattgagaaattgttgccatatagctattggattggccatccggtgacaaatagagcaattgtgcatccatttgttggttttatactattgtattacaaagttttaagtacccttaatcctattatatcattcaatacagcaaa

SEQ ID NO: 20273 - DNA, 743 bp, synthetic construct
  source 1..743: mol_type = other DNA
ttaaaacagccctgtgggttgtacccacccacagggcccaccgggcgctagcacactggtatctaggtacccttgtgcgcctgttttattcgccccaccccatcgtaacttagaagttgatcaataatggtcgttaggtagcccagcacgccagctgggtcttgaccaagcacttctgttaccccggaccgagtatcaatacgctgctcacgcggctgaaggagaaaacgttcgttacccggccaattacttcgagaagcctagtaccaccatgaaggttgcgcagcgtttcgctccgcacaaccccagtgtagatcaggccgatgagtcaccgcactcctcacgggcgaccgtggcggtgactgcgttggcggcctgcccatggggtgacccatgggacgcttcaatactgacatggtgcgaagagcctattgagctaattggtagtcctccggcccctgaatgcggctaatcctaactgcggagcagatacccacacaccagtgggcagtctgtcgtaacgggcaactctgcagcggaaccgactactttgggtgtccgtgtttccttttattctaatattggctgcttatggtgacaattgaaaaattgttaccatatagctattggattggccatccggtgacaaatagagcgattgtttacctgtttgttggtttcataccattaaatcttaaagtcttaaaaacccttgattttatactagcactcaattcagcaaa

SEQ ID NO: 20274 - DNA, 725 bp, synthetic construct
  source 1..725: mol_type = other DNA
ttgatcccacccacagggcccatagggcgttagcactctggtattgcggtacctttgtgcgcctgttttatattcccacccccaatcgcaacttagaagcagtacttcacgaccaacagtgggcgtgacacaccagccacgtctcggtcaagcacttctgtctccccggactgagtatcaataagctgctcacgcggctgaaggagaaaacgtccgttatccggccaattacttcgagaaacctagtaccgccatgaaagttgcgcagcgtttcgatccgcacaaccccagtgtagatcaggtcgatgagtcaccgcgttccccacgggtgaccgtggcggtggctgcgttggcggcctgcccatgggagaacccatgggacgcttcaatactgacatggtgtgaagagtctattgagctaattggtagccctccggcccctgaatgcggctaatcctaactgcggagcagattcccgcatgccagcgggtggtctgtcgtaacgggcaactctgcagcggaaccgactactttgggtgtccgtgtttccttttattcctgtatcggctgcttatggtgacaattgagagattgttaccatatagctattggattggccatccggtgacaaacagagcaattatttaccaatttattggttttgtaccattgaattttaacgtattcaaaactcttaaccttattttggctcttaatacagcaaa

SEQ ID NO: 20275 - DNA, 725 bp, synthetic construct
  source 1..725: mol_type = other DNA
ttgatcccacccacagggcccatagggcgttagcactctggtatcacggtacctttgtgcgcctgttttatattcccacccccaatcgcaacttagaagcagtacttcacgaccaacagtgggcgtgacacaccagccacgtctcggtcaagcacttctgtctccccggactgagtatcaataagctgctcacgcggctgaaggaaaaaacgtccgttatccggccaattacttcgagaaacctagtaccgccatgaaagttgcgcagcgtttcgatccgcacaaccccagtgtagatcaggccgatgagtcaccgcgttccccacgggtgaccgtggcggtggctgcgttggcggcctgcccatgggggaacccatgggacgcttcaatactgacatggtgtgaagagtctattgagctaattggtagccctccggcccctgaatgcggctaatcctaactgcggagcagattcccgcatgccagcgggtggtctgtcgtaacgggcaactctgcagcggaaccgactactttgggtgtccgtgtttccttttattcctatatcggctgcttatggtgacaattgagagattgttaccatatagctattggattggccatccggtgacaaacagagcaattatttaccaatttattggttttgtaccattgaattttaacgtattcaaaactcttaaccttattttggctcttaatacagcaaa

SEQ ID NO: 20276 - DNA, 725 bp, synthetic construct
  source 1..725: mol_type = other DNA
ttgatcccacccacagggcccatagggcgctagcactctggtattgcggtacctttgtgcgcctgttttatattcccacccccaatcgcaacttagaagcagtacttcacgaccaacagtgggcgtgacaaaccagccacgtctcggtcaagcacttctgtctccccggactgagtatcaataagctgctcacgcggctgagggagaaaacgtccgttatccggccaattacttcgagaaacccagtaccaccacgaaagttgcgcagcgtttcgatccgcacaaccccagtgtagatcaggtcgatgagtcaccgcgttccccacgggtgaccgtggcggtggctgcgttggcggcctgcccatgggggaacccatgggacgcttcaatactgacatggtgtgaagagtctattgagctaattggtagtcctccggcccctgaatgcggctaatcctaactgtggagcagattcccgcatgccagcgggtggtctgtcgtaacgggcaactctgcagcggaaccgactactttgggtgtccgtgtttccctttaatcctatattggctgcttatggtgacaattgagagattgttaccatatagctattggattggccatccggtgacaaacagagcaattatttaccaatttattggttttgtaccattgaatttcaacgcattcaaaactcttaaccttattttgactcttaatacagcaaa

SEQ ID NO: 20277 - DNA, 732 bp, synthetic construct
  source 1..732: mol_type = other DNA
gggttgttcccaccccagaggcccacgtggcggctagtactccggtatcacggtacccttgtacgcctgttttatactcccttccccgtaacttagaagtatacaagccaagttcaatagaagggggtacaaaccagtaccaccacgaacaagcacttctgtttccccggtgaagttgcatagattgttcccacggtcgaaagcgactgatccgttacccgctcatgtacttcgggaagcctagtatcaccttcggatcttcgatgcgttgcgctcagcactcaaccccagagtgtagcttaggtcgatgagtctggacaaacctcactggcgacagtggtccaggctgcgttggcggcctacctgtggcccaaagccacaggacgctagttgtgaacaaggtgtgaagagcctactgagctacatgagagtcctccggcccctgaatgcggctaatctcaaccacggagcaggtggtcacaaaccagtgatttgcctgtcgtaacgcgaaagtctgtggcggaaccgactactttgggtgtccgtgtttccttttactctcattatggctgcttatggtgacaatcctagattgttatcataaagcgagttggattggccatccggtgaaaatcaagcacatcatatatttgtttgttgggtttaaccctctgattgcacgcactcttggcttggttaggattattgtgtggaaaaggcaccatagttaca

SEQ ID NO: 20278 - DNA, 727 bp, synthetic construct
  source 1..727: mol_type = other DNA
tacccaccccagaggcccacgtggcggctagcactccggtattacggtacccttgtgcgcctgttttatactcccctcccgcaacttagaagcacgaaaccaagttcaatagaagggggtacaaaccagtaccactacgaacaagcacttctgtttccccggtgacattgcatagactgctcacgcggttgaaagtgatcgatccgttacccgcttgtgtacttcgagaagcctagtatcgccttggaatcttcgacgcgttgcgctcagcacccgaccccggggtgtagcttaggctgatgagtctggacattcctcaccggtgacggtggtccaggctgcgttggcggcctacctatggctaacgccataggacgttagatgtgaacaaggtgtgaagagcctattgagctacataagagtcctccggcccctgaatgcggctaatcctaaccacggagcaggcggtcgcgaaccagtgactggcttgtcgtaacgcgcaagtctgtggcggaaccgactactttgggtgtccgtgtttcctgttatttttatcatggctgcttatggtgacaatcagagattgttatcataaagcgaattggattggccatccggtgagtgttgtgtcaggtatacaactgtttgttggaaccactgtgttagctttacttctcatttaaccaattaatcaaaagcaacacgaggataaaacaacaatactaca

SEQ ID NO: 20279 - DNA, 724 bp, synthetic construct; identical to SEQ ID NO: 908
  source 1..724: mol_type = other DNA

SEQ ID NO: 20280 - DNA, 742 bp, synthetic construct
  source 1..742: mol_type = other DNA
ttaaaacagcctgtgggttgtacccacccacagggcccattgggcgctagcacactggtattccggtacccttgtgcgcctgttttatctacccttccctactgcaacttagaagttaaacagtcacggtcgataggcggttcagtaaaccaactggatcttgaccaagcacttctgttaccccggactgagtatcaataagctgcttacgtggctgaaggagaaaacgttcgttacccggccaattacttcgagaaacctagtaccaccatgaaggttgcgcagcgtttcgctccgcacaaccccagtgtagatcaggtcgatgagtcaccgcactcctcacgggcgaccgtggcggtggctgcgctggcggcctgcccatggggcaacccatgggacgcttcaatactgacatggtgcgaagagtctattgagctaattggtaatcctccggcccctgaatgcggctaatcccaactgcggagcaggtacccacacaccagtgggcagcctgtcgtaacgggcaactctgcagcggaaccgactactttgggtgtccgtgtttccttttattcctatactggctgcttatggtgacaattgaaagattgttaccatatagctattggattggccatccagtgacaaacagagcaattgtctatctatttgtcggttttgtaccaataaatttcaaagtcctaaaaaccctcaatttcatattgttacttaacacaacaag

SEQ ID NO: 20281 - DNA, 716 bp, synthetic construct
  source 1..716: mol_type = other DNA
ccccagaggcccacgtggcggctagtactccggtattgcggtacccttgtacgcctgttttatactcccttcccgtaacttagacgcacaaaaccaagttcaataggagggggtacaaaccagtaccaccacgaacaagcacttctgtttccccggtgatgttgtatagactgcttgcgtggttgaaagcgacggatccgtcatccgcttatgtacttcgagaagcccagtaccacctcggaatcttcgatgcgttgcgctcagcactcaaccccagagtgtagcttaggctgatgagtctggacatccctcaccggtgacggtggtccaggctgcgttggcggcctacctatggctaacgccatgggacgctagttgtgaacaaggtgtgaagagcctattgagctacataagaatcctccggcccctgaatgcggctaatcccaacctcggagcaggcggtcacaaaccagtgattggcctgtcgtaacgcgcaagtccgtggcggaaccgactactttgggtgtccgtgtttccttttattttattgtggctgcttatggtgacaatcacagattgttatcataaagcgaattggattggccatccggtgaaagtgagatttattatctatctgtttactggactcgctccattgagtgtgttcattctaagaataatctcaacagttattccaatcagacagttgtatcata

SEQ ID NO: 20282 - DNA, 716 bp, synthetic construct
  source 1..716: mol_type = other DNA
ccccagaggcccacgtggcggctagtactccggtattgcggtacccttgtacgcctgttttatactcccttcccgtaacttagacgcacaaaaccaagttcaataggagggggtacaaaccagtaccaccacgaacaagcacttctgtttccccggtgatgttgtatagactgcttgcgtggttgaaagcgacggatccgtcatccgcttatgtacttcgagaagcccagtaccacctcggaatcttcgatgcgttgcgctcagcactcaaccccagagtgtagcttaggctgatgagtctggacatccctcaccggtgacggtggtccaggctgcgttggcggcctacctatggctaacgccatgggacgctagttgtgaacaaggtgtgaagagcctattgagctacataagaatcctccggcccctgaatgcggctaatcccaacctcggagcaggcggtcacaaaccagtgattgacctgtcgtaacgcgcaagtccgtggcggaaccgactactttgggtgtccgtgtttccttttattttattgtggctgcttatggtgacaatcacagattgttatcataaagcgaattggattggccatccggtgaaagtgagatttattatctatctgtttactggactcgctccattgagtgtgttcattctaagaacaatctcaacagttattccagtcagacagttgtatcata

SEQ ID NO: 20283 - DNA, 716 bp, synthetic construct
  source 1..716: mol_type = other DNA
ccccagaggcccacgtggcggctagtactccggtattgcggtacccttgtacgcctgttttatactcccttcccgtaacttagacgcacaaaaccaagttcaataggagggggtacaaaccagtaccaccacgaacaagcacttctgtttccccggtgatgttgtatagactgcttgcgtggttgaaagcgacggatccgtcatccgcttatgtacttcgagaagcccagtaccacctcggaatcttcgatgcgttgcgctcagcactcaaccccagagtgtagcttaggctgatgagtctggacatccctcaccggtgacggtggtccaggctgcgttggcggcctacctatggctaacgccatgggacgctagttgtgaacaaggtgtgaagagcctattgagctacataagaatcctccggcccctgaatgcggctaatcccaacctcggagcaggcggtcacaaaccagtgattgacctgtcgtaacgcgcaagtccgtggcggaaccgactactttgggtgtccgtgtttccttttattttattgtggctgcttatggtgacaatcacagattgttatcataaagcgaattggattggccatccggtgaaagtgagatttattatctatctgtttactggactcgctccattgagtgtgttcattctaagaataatctcaacagttattccaatcagacagttgtatcata

SEQ ID NO: 20284 - DNA, 716 bp, synthetic construct
  source 1..716: mol_type = other DNA
ccccagaggcccacgtggcggctagtactccggtattgcggtacccttgtacgcctgttttatactcccttcccgtaacttagacgcacaaaaccaagttcaataggagggggtacaaaccagtaccaccacgaacaagcacttctgtttccccggtgatgttgtatagactgcttgcgtggttgaaagcgacggatccgtcatccgcttatgtacttcgagaagcccagtaccacctcggaatcttcgatgcgttgcgctcagcactcaaccccagagtgtagcttaggctgatgagtctggacatccctcaccggtgacggtggtccaggctgcgttggcggcctacctatggctaacgccatgggacgctagttgtgaacaaggtgtgaagagcctattgagctacataagaatcctccggcccctgaatgcggctaatcccaacctcggagcaggtggtcacaaaccagtgattgacctgtcgtaacgcgcaagtccgtggcggaaccgactactttgggtgtccgtgtttccttttattttattgtggctgcttatggtgacaatcacagattgttatcataaagcgaattggattggccatccggtgaaagtgagatttattatctatctgtttactggactcgctccattgagtgtgtttattctaagaataatctcaacagttattccaatcagacagttgtatcata

SEQ ID NO: 20285 - DNA, 716 bp, synthetic construct
  source 1..716: mol_type = other DNA
ccccagaggcccacgtggcggctagtactccggtattgcggtacccttgtacgcctgttttatactcccttcccgtaacttagacgcacaaaaccaagttcaataggagggggtacaaaccagtaccaccacgaacaagcacttctgtttccccggtgatgttgtatagactgcttgcgtggttgaaagcgacggatccgttatccgcttatgtacttcgagaagcccagtaccacctcggaatcttcgatgcgttgcgctcagcactcaaccccagagtgtagcttaggctgatgagtctggacatccctcaccggtgacggtggtccaggctgcgttggcggcctacctatggctaacgccatgggacgctagttgtgaacaaggtgtgaagagcctattgagctacataagaatcctccggcccctgaatgcggctaatcccaacctcggagcaggtggtcacaaaccagtgattgacctgtcgtaacgcgcaagtccgtggcggaaccgactactttgggtgtccgtgtttccttttattttattgtggctgcttatggtgacaatcacagattgttatcataaagcgaattggattggccatccggtgaaagtgagatttattatctatctgtttactggactcgctccattgagtgtgtttattctaagaataatctcaacagttattccaatcagacagttgtatcata

SEQ ID NO: 20286 - DNA, 716 bp, synthetic construct
  source 1..716: mol_type = other DNA
ccccagaggcccacgtggcggctagtactccggtattgcggtacccttgtacgcctgttttatactcccttcccgtaacttagacgcacaaaaccaagttcaataggagggggtacaaaccagtaccaccacgaacaagcacttctgtttccccggtgatgttgtatagactgcttgcgtggttgaaagcgacggatccgttatccgcttatgtacttcgagaagcccagtaccacctcggaatcttcgatgcgttgcgctcagcactcaaccccagagtgtagcttaggctgatgagtctggacatccctcaccggtgacggtggtccaggctgcgttggcggcctacctatggctaacgccatgggacgctagttgtgaacaaggtgtgaagagcctattgagctacataagaatcctccggcccctgaatgcggctaatcccaacctcggagcaggtggtcacaaaccagtgattgacctgtcgtaacgcgcaagtccgtggcggaaccgactactttgggtgtccgtgtttccttttattttattgtggctgcttatggtgacaatcacagattgttatcataaagcgaattggattggccatccggtgaaagtgagatttattatctatctgtttactggactcgctccattgagtgtgtttattctaagaatactctcaacagttattccaatcagacagttgtatcata

SEQ ID NO: 20287 - DNA, 716 bp, synthetic construct
  source 1..716: mol_type = other DNA
ccccagaggcccacgtggcggctagtactccggtattgcggtacccttgtacgcctgttttatactcccttcccgtaacttagacgcataaaaccaagttcaataggagggggtacaaaccagtaccaccacgaacaagcacttctgtttccccggtgatgttgtatagactgcttgcgtggttgaaagcgacggatccgtcatccgcttatgtacttcgagaagcccagtaccacctcggaatcttcgatgcgttgcgctcagcactcaaccccagagtgtagcttaggctgatgagtctggacatccctcaccggtgacggtggtccaggctgcgttggcggcctacctatggctaacgccatgggacgctagttgtgaacaaggtgtgaagagcctattgagctacataagaatcctccggcccctgaatgcggctaatcccaacctcggagcaggtggtcacaaaccagtgattgacctgtcgtaacgcgcaagtccgtggcggaaccgactactttgggtgtccgtgtttccttttattttattgtggctgcttatggtgacaatcacagattgttatcataaagcgaattggattggccatccggtgaaagtgagatttattatctatctgtttactggactcgctccattgagtgtgtttattctaagaataatctcaacagttattccaatcagacagttgtatcata

SEQ ID NO: 20288 - DNA, 716 bp, synthetic construct
  source 1..716: mol_type = other DNA
ccccagaggcccacgtggcggctagtactccggtattgcggtacccttgtacgcctgttttatactcccttcccgtaacttagacgcataaaaccaagttcaataggagggggtacaaaccagtaccaccacgaacaagcacttctgtttccccggtgatgttgtatagactgcttgcgtggttgaaagcgacggatccgtcatccgcttatgtacttcgagaagcccagtaccacctcggaatcttcgatgcgttgcgctcaacactcaaccccagagtgtagcttaggctgatgagtctggacatccctcaccggtgacggtggtccaggctgcgttggcggcctacctatggctaacgccatgggacgctagttgtgaacaaggtgtgaagagcctattgagctacataagaatcctccggcccctgaatgcggctaatcccaacctcggagcaggtggtcacaaaccagtgattgacctgtcgtaacgcgcaagtccgtggcggaaccgactactttgggtgtccgtgtttccttttattttattgtggctgcttatggtgacaatcacagattgttatcataaagcgaattggattggccatccggtgaaagtgagatttattatctatctgtttactggactctctccattgagtgtgtttattctaagaataatctcaacagttgttccaatcagacagttgtattaca

SEQ ID NO: 20289 - DNA, 742 bp, synthetic construct
  source 1..742: mol_type = other DNA
ttaaaacagcctgtgggttgatcccacccacagggcccattgggcgctagcactctggtatcacggtacctttgtgcgcctgttttataccccctcccccaactgtaacttagaagtaacacacgccgatcaacagtcagcgtggcacaccagccacgttttgatcaagcacttctgttaccccggactgagtatcaatagactgctcacgcggttgaaggagaaagcgttcgttatccggccaactacttcgaaaaacctagtaacaccgtggaagttgcagagtgtttcgctcagcactaccccagtgtagatcaggtcgatgagtcaccgcattccccacgggcgaccgtggcggtggctgcgttggcggcctgcccatggggaaacccatgggacgctctaatacagacatggtgcgaagagtctattgagctagttggtagtcctccggcccctgaatgcggctaatcctaactgcggagcacacaccctcaagccagagggcagtgtgtcgtaacgggcaaccctgcagcggaaccgactactttgggtgtccgtgtttcattttattcctgtactggccgcttatggtgacaattgagagattgttaccatatagctattggattggccatccggtgaccaatagagctattatatatctctttgttgggtttataccacttagcttgaaagaggttaaaacattacaattcattgttaagttgaatacagcaaa

SEQ ID NO: 20290 - DNA, 742 bp, synthetic construct
  source 1..742: mol_type = other DNA
ttaaaacagcctgtgggttgatcccacccacagggcccattgggcgctagcactctggtatcacggtacctttgtgcgcctgttttataccccctcccccaactgtaacttagaagtaacacacaccgatcaacagtcagcgtggcacaccagccacgttttgatcaagcacttctgttaccccggactgagtatcaatagactgctcacgcggttgaaggagaaagcgttcgttatccggccaactacttcgaaaaacctagtaacaccgtggaagttgcagagtgtttcgctcagcactaccccagtgtagatcaggtcgatgagtcaccgcattccccacgggcgaccgtggcggtggctgcgttggcggcctgcccatggggaaacccatgggacgctctaatacagacatggtgcgaagagtctattgagctagttggtagtcctccggcccctgaatgcggctaatcttaactgcggagcacacaccctcaagccagagggcagagtgtcgtaacgggcaactctgcagcggaaccgactactttgggtgtccgtgtttcattttattcctatactggctgcttatggtgacaattgagagattgttaccatatagctattggattggccatccggtgaccaatagagctattatatatctctttgttgggtttataccacttagcttgaaagaggttaaaacattacaattcattgttaagttgaatacagcaaa

SEQ ID NO: 20291 - DNA, 727 bp, synthetic construct
  source 1..727: mol_type = other DNA
ttcccaccccagaggcccacgtggcggctagtacactggtattacggtacccttgtacgcctgttttacaccccctttcccccgtaacttagaagttttaaattcaagttcaacagtcagtggtacaacccagtactactacgaacaagcacttctgttaccccggtgagattgcataggctgttcccacggctaaaagcgattgatccgttatccgctcttgtacttcgagaagcctagtaagaccttgggatcctcgatgcgttgcgttcaacactcaaccccagagtgtagcttgggctgatgagtctggacattccccaccggtgacggtggtccaggctgcgttggcggcctacctgtggcccaaagccacaggacgctagttgtgaacaaggtgtgaagagcctattgagctacaagagagtcctccggcccctgaatgcggctaatcccaaccacggagcaggcgattgcaacccagcaactagcctgtcgtaacgcgcaagtctgtggcggaaccgactactttgggtgtccgtgtttccttttattacataatggctgcttatggtgacaatcacagattgttgtcataaagcgaattggattggccatccggtgagaattaaaacaatcatttatttatttgttggatttgttcctatacacacccaaacactttgcttgattgaagtaattctgttgataagacaacactattata

SEQ ID NO: 20292 - DNA, 727 bp, synthetic construct
  source 1..727: mol_type = other DNA
ttcccaccccagaggcccacgtggcggctagtacactggtatcacggtacccttgtacgcctgttttacaccccctttcccccgtaacttagaagttttaaattcaagttcaacagtcagtggtacaacccagtactattacgaacaagcacttctgttaccccggtgagattgcataggctgtccccacggctaaaagcgattgatccgttatccgctcttgtacttcgagaagcctagtaagaccttgggatcctcgatgcgttgcgttcaacactcaaccccagagtgtagcttgggctgatgagtctggacattccccaccggtgacggtggtccaggctgcgttggcggcctacctgtggcccaaagccacaggacgctagttgtgaacaaggtgtgaagagcctattgagctacaagagagtcctccggcccctgaatgcggctaatcccaaccacggagcaggcgattgcaacccagcaactagcctgtcgtaacgcgcaagtctgtggcggaaccgactactttgggtgtccgtgtttccttttattacataatggctgcttatggtgacaatcacagattgttgtcataaagcgaattggattggccatccggtgagaattaaaacaatcatttatttatttgttggatttgttcctatacacacccaaacactttgcttgattgaagtaattctgttgataagacaacactattata

SEQ ID NO: 20293 - DNA, 727 bp, synthetic construct
  source 1..727: mol_type = other DNA
ttcccaccccagaggcccacgtggcggctagtacactggtatcacggtacccttgtacgcctgttttacaccccctttcccccgtaacttagaagttttaaattcaagttcaacagtcagtggtacaacccagtactactacgaacaagcacttctgttaccccggtgagattgcataggctgtccccacggctaaaagcgattgatccgttatccgctcttgtacttcgagaagcctagtaagaccttgggatcctcgatgcgttgcgttcaacactcaaccccagagtgtagcttgggctgatgagtctggacattccccaccggtgacggtggtccaggctgcgttggcggcctacctgtggcccaaagccacaggacgctagttgtgaacaaggtgtgaagagcctattgagctacaagagagtcctccggcccctgaatgcggctaatcccaaccacggagcaggcgattgcaacccagcaactagcctgtcgtaacgcgcaagtctgtggcggaaccgactactttgggtgtccgtgtttccttttattacataatggctgcttatggtgacaatcacagattgttgtcataaagcgaattggattggccatccggtgagaattaaaacaatcatttatttatttgttggatttgttcctatacacacccaaacactttgcttgattgaagtaattctgttgataagacaacactattata

SEQ ID NO: 20294 - DNA, 722 bp, synthetic construct
  source 1..722: mol_type = other DNA
ttcccaccccagaggcccacgtggcggctagtacactggtatcacggtacctttgtacgcctgttttataccccctcccccgcaacttagaagcatacaattcaagctcaataggagggggtgcaagccagcgcctccgtgggcaagcactactgtttccccggtgaggccgcatagactgttcccacggttgaaagtgtccgatccgttatccgcccatgtacttcgagaagcctagtatcgctctggaatcttcgacgcgttgcgctcagcactcaaccccggagtgtagcttgggccgatgagtctggacagtccccactggcgacagtggtccaggctgcgctggcggcccacctgtggcccaaagccacaggacgctagttgtgaacagggtgtgaagagcctattgagctacatgggagtcctccggcccctgaatgcggctaatcctaaccatggagcaggcagctgcaacccagcagccagcctgtcgtaacgcgcaagtccgtggcggaaccgactactttgggtgtccgtgtttccttttattcttgaatggctgcttatggtgacaatcatagattgttatcataaagcgagttggattggccatccagtgtgaatcagattaattactcccttgtttgttggatccactccccaaacgttttattccttaacttattgaaattgtttgaagacaggatttcagtgtcaca

SEQ ID NO: 20295 - DNA, 722 bp, synthetic construct
  source 1..722: mol_type = other DNA
ttcccaccccagaggcccacgtggcggctagtacactggtatcacggtacctttgtacgcctgttttatactccctcccccgcaacttagaagcaaacaattcaagctcaataggagggggtgcaagccagcgcctccgtgggcaagtactactgtttccccggtgaggccgcatagactgttcccacggttgaaagtgtccgatccgttatccgctcatgtacttcgagaagcctagtatcgctctggaatcttcgacgcgttgcgctcagcactcaaccccggagtgtagcttgggccgatgagtctggacagtccccactggcgacagtggtccaggctgcgctggcggcccacctgtggcccaaagccacgggacgctagttgtgaacagggtgtgaagagcctattgagctacatgagagtcctccggcccctgaatgcggctaatcctaaccatggagcaggcagctgcaacccagcaaccagcctgtcgtaacgcgcaagtccgtggcggaaccgactactttgggtgtccgtgtttccttttattcttgaatggctgcttatggtgacaatcatagattgttatcataaagcgaattggattggccatccagtgtgaatcagattaattactcccctgtttgttggatccactcccgaaacgttttactccttaacttattgaaattgtttgaagacaggatttcagtgtcaca

SEQ ID NO: 20296 - DNA, 722 bp, synthetic construct
  source 1..722: mol_type = other DNA
ttcccaccccagaggcctacgtggcggctagtacactggtatcacggtacctttgtacgcctgttttatactccctcccccgcaacttagaagcatacaattcaagctcaataggagggggtgcaagccagcgcctccgtgggcaagcactactgtttccccggtgaggccgcatagactgttcccacggttgaaagtgtccgatccgttatccgctcatgtacttcgagaagcctagtatcgctctggaatcttcgacgcgttgcgctcagcactcaaccccggagtgtagcttgggccgatgagtctggacagtccccactggcgacagtggtccaggctgcgctggcggcccacctgtggcccaaagccacgggacgctagttgtgaacagggtgtgaagagcctattgagctacatgagagtcctccggcccctgaatgcggctaatcctaaccatggagcaggcagctgcaacccagcagccagcctgtcgtaacgcgcaagtccgtggcggaaccgactactttgggtgtccgtgtttccttttattcttgaatggctgcttatggtgacaatcatagattgttatcataaagcgagttggattggccatccagtgtgaatcagattaattactcccttgtttgttggatccactcccgaaacgttttactccttaacttattgaaattgtttgaagacaggatttcagtgtcaca

SEQ ID NO: 20297 - DNA, 743 bp, synthetic construct
  source 1..743: mol_type = other DNA
ttataacagcctgtgggttgtacccacccagagggcccaccgggcgctagcagggtggtatctcggtacctttgtgcgcctgttttatccgcccttctcccatttaatttagaagcacgcgccaagacggtcaatagggagcccagtaagccaattgggccatgaccaagcacttctgtaaccccgggccgagtatcaataagctgctcgcgcggctgaaggagaaaaagctcgttacccggccaattacttcgagaagcccagtagcatcatgaaagttgcgcagtgtttcgctccgcacaaccccagtgtagatcaggccgatgagtcaccgcgttccccacgggtgaccgtggcggtggctgcgctggcggcctgcccatggggccacccatgggacgcttcaatactgacatggtgtgaagagtctattgagctaattggtagtcctccggcccctgaatgcggctaatcctaactgcggagcagatgcccacgcaccagtgggaagtctgtcgtaatgggtaactctgcagcggaaccgactactttgggtgtccgtgtttccttttatttctactctggctgcttatggtgacaattgaaaggttgttaccatatagctattggattggccatccggtgacaaatagagcgattatttacttgtttgttgggtttgtgccactgaactacaaagctttaaacactcttaactacattttaatccttaactcattaaa

SEQ ID NO: 20298 - DNA, 821 bp, synthetic construct; identical to SEQ ID NO: 1274
  source 1..821: mol_type = other DNA

SEQ ID NO: 20299 - DNA, 743 bp, synthetic construct
  source 1..743: mol_type = other DNA
ttataacagcctgtgggttgtacccacccacagggcccaccgggcgctagcacactggtatctcggtacctttgtgcgcctgttttatccgcccttctcccatttaatttagaagcacgcgccaagacggtcaatagggagcccagtaagccaattgggccatgaccaagcacttctgtaaccccgggccgagtatcaataagctgctcgcgcggctgaaggagaaaaagctcgttacccggccaattacttcgagaagcccagtagcatcatgaaagttgcgcagtgtttcgctccgcacaaccccagtgtagatcaggccgatgagtcaccgcgttccccacgggtgaccgtggcggtggctgcgctggcggcctgcccatggggccacccatgggacgcttcaatactgacatggtgtgaagagtctattgagctaattggtagtcctccggcccctgaatgcggctaatcctaactgcggagcagatgcccacgcaccagtgggaagtctgtcgtaatgggtaactctgcagcggaaccgactactttgggtgtccgtgtttccttttatttctactctggctgcttatggtgacaattgaaaggttgttaccatatagctattggattggccatccggtgacaaatagagcgattatttacttgtttgttgggtttgtgccactgaactacaaagctttaaacactcttaactacattttaatccttaactcattaaa

SEQ ID NO: 20300 - DNA, 743 bp, synthetic construct
  source 1..743: mol_type = other DNA
ttataacagcctgtgggttgtacccacccagagggcccaccgggcgctagcacactggtatctcggtacctttgtgcgcctgttttatccacccttctcccatttaatttagaagcacgcgccaagacggtcaatagggagcccagtaagccaattgggccatgaccaagcacttctgtaaccccgggccgagtatcaataagctgctcgcgcggctgaaggagaaaaagctcgttacccggccaattacttcgagaagcccagtagcatcatgaaagttgcgcagtgtttcgctccgcacaaccccagtgtagatcaggccgatgagtcaccgcgttccccacgggtgaccgtggcggtggctgcgctggcggcctgcccatggggccacccatgggacgcttcaatactgacatggtgtgaagagtctattgagctaattggtagtcctccggcccctgaatgcggctaatcctaactgcggagcagatgcccacgcaccagtgggaagtctgtcgtaatgggtaactctgcagcggaaccgactactttgggtgtccgtgtttccttttatttctactctggctgcttatggtgacaattgaaaggttgttaccatatagctattggattggccatccggtgacaaatagagtgattatttacttgtttgttgggtttgtaccattgaactacaaagctttaaacacttttaactacattttaatccttaactcattaaa

SEQ ID NO: 20301 - DNA, 743 bp, synthetic construct
  source 1..743: mol_type = other DNA
ttataacagcctgtgggttgtacccacccagagggcccaccgggcgctagcacactggtatctcggtacctttgtgcgcctgttttatccgcccttctcccatttaatttagaagcacgcgccaagacggtcaatagggagcccagtaagccaattgggccatgaccaagcacttctgtaaccccgggccgagtatcaataagctgctcgcgcggctgaaggagaaaaagctcgttacccggccaattacttcgagaaacccagtagcaccatgaaagttgcgcagtgtttcgctccacacaaccccagtgtagatcaggccgatgagtcaccgcgttccccacgggtgaccgtggcggtggctgcgctggcggcctgcccatggggccacccatgggacgcttcaatactgacatggtgtgaagagtctattgagctaattggtagtcctccggcccctgaatgcggctaatcctaactgcggagcagatgcccacgcaccagtgggaagtctgtcgtaacgggtaactctgcagcggaaccgactactttgggtgtccgtgtttccttttatttctactctggctgcttatggtgacaattgaaaggttgttaccatatagctattggattggccatccggtgacaaatagagcgattatttacttgtttgttgggtttgtaccactgaactacaaagctttgaacactctttactacattttaatccttaactcattgaa

SEQ ID NO: 20302 - DNA, 743 bp, synthetic construct
  source 1..743: mol_type = other DNA
ttataacagcctgtgggttgtacccacccacagggcccaccgggcgctagcacactggtatctcggtacctttgtgcgcctgttttatccacccttctcccatttaatttagaagcacgcgccaagacggtcaatagggagcccagtaagccaattgggccatgaccaagcacttctgtaaccccgggccgagtatcaataagctgctcgcgcggctgaaggagaaaaagctcgttacccggccaattacttcgagaagcccagtagcatcatgaaagttgcgcagtgtttcgctccgcacaaccccagtgtagatcaggccgatgagtcaccgcgttccccacgggtgaccgtggcggtggctgcgctggcggcctgcccatggggccacccatgggacgcttcaatactgacatggtgtgaagagtctattgagctaattggtagtcctccggcccctgaatgcggctaatcctaactgcggagcagatgcccacgcaccagtgggaagtctgtcgtaatgggtaactctgcagcggaaccgactactttgggtgtccgtgtttccttttatttctactctggctgcttatggtgacaattgaaaggttgttaccatatagctattggattggccatccggtgacaaatagagcgattatttacttgtttgttgggtttgtaccactgaactacaaagctttaaacactcttaactacattttaatccttaactcgttaaa

SEQ ID NO: 20303 - DNA, 743 bp, synthetic construct; identical to SEQ ID NO: 1046
  source 1..743: mol_type = other DNA

SEQ ID NO: 20304 - DNA, 743 bp, synthetic construct
  source 1..743: mol_type = other DNA
ttaaaacagcttgtgggttgttcccacccacagggcccactgggcgctagcacactggtatctcggtacctttgtgcgcctgttttatccacccttttcccatttaacttagaagcacgcgccaagacggtcaatagggagcccagtaagccaattgggctatgaccaagcacttctgtaaccccgggccgagtatcaataagctgctcgcgcggctgaaggagaaaaagctcgttacccggccaattacttcgagaaacctagtagcatcatgaaagttgcgcagtgtttcgctccacacaaccccagtgtagatcaggccgatgagttaccgcgttccccacgggtgaccgtggcggtggctgcgctggcggcctgcccatggggccacccatgggacgcttcaatactgacatggtgtgaagagtctattgagctaattggtagtcctccggcccctgaatgcggctaatcctaactgcggagcagatgcccacgtaccagtgggaagtctgtcgtaacgggtaactctgcagcggaaccgactactttgggtgtccgtgtttccttttatttctactctggctgcttatggtgacaattgaaaggttgttaccatatagctattggattggccatccggtgtcaaatagagcgattatttacttgtttgttgggtttgtaccactggactacaaagctttaaacactcttgactacattttaatccttaactcattaaa

SEQ ID NO: 20305 - DNA, 743 bp, synthetic construct
  source 1..743: mol_type = other DNA
ttataacagcctgtgggttgttcccacccacagggcccaccgggcgctagcacaccggtatctcggtacctttgtgcgcctgttttatccacccttttcccatttaacttagaagcacgcgccaagacggtcaatagggagcccagtaaaccaattgggctatgaccaagcacttctgtaaccccgggccgagtatcaataagctgctcacgcggctgaaggagaaaaagctcgttacccggccaattacttcgagaaacccagtagcatcatgaaagttgcgcagcgtttcgctccacacaaccccagtgtagatcaggccgatgagccaccgcgttccccacgggtgaccgtggcggtggctgcgctggcggcctgcccatggggccacccatgggacgcttcaatactgacatggtgtgaagagtctattgagctaattggtagtcctccggcccctgaatgcggctaatcctaactgcggagcagatgcccacgcaccagtgggaagtctgtcgtaacgggtaactctgcagcggaaccgactactttgggtgtccgtgtttccttttatttttactctggctgcttatggtgacaattgaaaggttgttaccatatagctattggattggccatccggtgtcaaatagagcgattatttacttgtttgttgggtttgtgccactgaactacaaagttttgaacactcttaactacattctaatccttaacttattaaa

SEQ ID NO: 20306 - DNA, 743 bp, synthetic construct
  source 1..743: mol_type = other DNA
ttataacagcctgtgggttgttcccactcacagggcccaccgggcgctagcacaccggtatctcggtacctttgtgcgcctgttttatccacccttttcccatttaacttagaagcacgcgccaagacggtcaatagggagcccagtaaaccaattgggctatgaccaagcacttctgtaaccccgggccgagtatcaataagctgctcacgcggctgaaggagaaaaagctcgttacccggccaattacttcgagaaacccagtagcatcatgaaagttgcgcagcgtttcgctccacacaaccccagtgtagatcaggccgatgagccaccgcgttccccacgggtgaccgtggcggtggctgcgctggcggcctgcccatggggccacccatgggacgcttcaatactgacatggtgtgaagagtctattgagctaattggtagtcctccggcccctgaatgcggctaatcctaactgcggagcagatgcccacgcaccagtgggaagtctgtcgtaacgggtaactctgcagcggaaccgactactttgggtgtccgtgtttccttttatttttactctggctgcttatggtgacaattgaaaggttgttaccatatagctattggattggccatccggtgtcaaatagagcgattatttacttgtttgttgggtttgtgccactgaactacaaagttttgaacactcttaactacattctaatccttaacttattaaa

SEQ ID NO: 20307 - DNA, 742 bp, synthetic construct
  source 1..742: mol_type = other DNA
ttaaaacagcctgtgggttgttcccacccacagggcccactgggcgccagcacactggtatcacggtacctttgtgcgcctgttttatccacccttccccaatgtaacttagaagtaaaactagaaagatcaatagcaagcacagtatgccaactgtgttatgatcaagcacttctgttaccccggactgagtatcaataagctgctaaagcggctgaaggagaaaacgttcgttacccggccaactacttcgagaaacccagtaccaccatgaaggttgcgcagtgtttcgctccacacaatcccagtgtagatcaggtcgatgagtcaccgcgttccccacgggcgaccgtggcggtggctgcgttggcggcctgcccatgggatgacccatgggacgcttcaatactgacatggtgcgaagagtctattgagctagttggtagtcctccggcccctgaatgcggctaatcctaactgcggagcagatacccacacaccagtgggcagtctgtcgtaacgggtaactctgcagcggaaccgactactttgggtgtccgtgtttctttttatcctcaaattggctgcttatggtgacaattgataagttgttaccatatagctattggattggccatccggtgtctaacagagctattgtttatttatttgttggtttcgtgccactaaattacaaagtttttgaaactctcaacttcattttgacactcaataaagcaaa

SEQ ID NO: 20308 - DNA, 742 bp, synthetic construct; identical to SEQ ID NO: 1013
  source 1..742: mol_type = other DNA

SEQ ID NO: 20309 - DNA, 743 bp, synthetic construct
  source 1..743: mol_type = other DNA
ttaaaacagcctgtgggttgtccccatccacagggcccaccgggcgctagcacactggtatctcggtacctttgtgcgcctgttttatccacccttttcccatccaacttagaagcacgcaccaaaacggtcaataggaagcctagtaagccaactgggttttgaccaagcacttctgtttccccggaccgagtatcaataggctgctcgcgcggctgaaggagaaaacgttcgttacccggccaattacttcgagaaacccagtagcaccatgaaggttgcgcagtgtttcgctccgcacatccccagtgcagatcaggccgatgagccaccgcgtcccccacgggcgaccgtggcggtggctgcgttggcggcctgcccatgggaccacccatgggacgcttcaatactgacatggtgtgaagagtctattgagctaattggtagtcctccggcccctgaatgcggctaatcctaactgcggagcagatgcccacacaccagtgggaagtctgtcgtaatgggtaactctgcagcggaaccgactactttgggtgtccgtgtttccttttattcttactctggctgcttatggtgacaattgaaaggttgttaccatatagctattggattggccacccggtgacaagtaaagcgattatttatttgtttgttgggtttgtaccactgaactataaggctttaaacactcttaacttcattctaatccttaattcactaaa

SEQ ID NO: 20310 - DNA, 820 bp, synthetic construct
  source 1..820: mol_type = other DNA
ttaaaacagcctgggggttgtacccacccctggggcccacgtggcgccagtactctggttcgcttagaacctttgtacgcctgttttcccctcccttaaacaaattaagatctctgccaatgtggggagtagcccgactccgcaccgatacgtcgcaccagcagactggttcgcttagaacctttctgcggattggtatgaggcccccccccgaaacttagaagtaagtacaaaccgaccaataggtgcgcggcagccagccgtgtaaaggtcaagcacttctgtttccccggccagaaatggtcgttacccgccctacccactacgagaagcctagtaactacccaaacaagtgaggagttgcgttcatccacaaccccagtggtagctctgagagatggggctcgcatcttccccccgtggtaacacggttgcttgcccgcgcgtgctctcgggttcagcccaatggctgttcactccgatcttgatgtaacctagccaagagcctattgtgctgggaaggttttcctccggagccgtgaatgctgctaatcccaacctccgagcgcgtgcgcacaatccagtgttgctgcgtcgtaatgcgtaagttggaggcggaacagactactttcggtactccgtgtttccttttattcatttattgattttatggtgacattgacagatattgttcagtttgctcgattaccactgaatattgctttgtattacctcgtagcattcaacaggaccacagaactcacccttgagctcattgacttcgctgtttatttgaatcaaatacataaatcctgtaaac

SEQ ID NO: 20311 - DNA, 737 bp, synthetic construct
  source 1..737: mol_type = other DNA
cagcctgggggttgtacccacccacagggcccactgggcgctagcacaccggtatcacggtacccttgtgcgcctgttttatccacccctccccaacgtaacctagaagcataactcaaacggtcaacagttagctcagtaagccaactgagctctgaccaagcacttctgttaccccggactgagtatcaataagctgctcacgcggccgaaggagaaaacgttcgttacccggccaattacttcgagaaacctagtaccaccatgaaggttgcgcaacgtttcgctcagcacaaccccagtgtagatcaggtcgatgagtcaccgcgttccccacgggcgaccgtggcggtggctgcgctggcggcctgctcatggggcaacccatgagacgcttcaatactgacatggtgcgaagagtctattgagctaattggtagtcctccggcccctgaatgcggctaatcccaactgcggagcagatacccacgcaccagtgggcagtctgtcgtaacgggcaactctgcagcggaaccgactactttgggtgtccgtgtttctttttatccttatatttggctgcttatggtgacaattgagagattgttgccatatagctattggattggccatccggtgacgaacagagctattgtttacctgttcatcggttttataccattgaattataaagttttaaacactctaaattttatcttactactaaatacatcaaa

SEQ ID NO: 20312 - DNA, 744 bp, synthetic construct
  source 1..744: mol_type = other DNA
ttaaaacagcctgtgggttgtacccacctacagggcccactgggcgtcagcacactggtatcccggtacctttgtgcgcctgttttatattccccaccccacgttgtaacttagaagcaatgcaatttcggtcagtagtagacgcggcaacccagtcgtgtttcgaccaagcacttctgtaaccccggaccgagtatcaataagctgctcgcgcggctgaaggagaaaccgttcgttacccggctaactacttcgagaagcctactaacaccatgaacgttgcagagtgtttcactcagcacttcccccgtgtagatcaggtcgatgagtcaccgcgatccccacgggcgaccgtggcggtggctgcgttggcggcctgcctgtggggcaacccacaggacgctctaatacagacatggtgcgaagagcctattgagctagttagtagtcctccggcccctgaatgcggctaatcctaactgcggagcacatgcccacaaaccagtgggtggtgtgtcgtaacgggcaactctgcagcggaaccgactactttgggtgtccgtgtttctttttattctcatactggctgcttatggtgacaattgaaagattgttgccatatagctattggattagccatccggtgtcaaacagagcaattatttacctattcgttggttttgcacccttgaattttaaggttcttaaaacacttaatctcatattaaaactcaattcagcaaa

SEQ ID NO: 20313 - DNA, 819 bp, synthetic construct
  source 1..819: mol_type = other DNA
ttaaaacagcctgggggttgtacccacccccggggcccacgcggcgctagtactctggttcgtttagaacccttgtacgcctgtttttccccccttaaataaattaagatctctgccaatgtggggagtagtccgactccgcaccgatacgtcgcaccagcagaccggttcgcctaggacccttatgcggattggtatgagtcccccccccgaaacttagaagcacattacaaactggccaataggagcgtggtatccaaccgcgttgcggtcaagcacttctgtttccccggtcagaaatgatcgttacccgccctccccactacgagaagcctattaaccactgaaagtgatgatgagttgcgctcagccacaaccccggtggtagctctgagagatggggctcgcaccacccccgtggtgacacggttgcttgcccgcgtgtgctctcgggttcagtcgcgagactgttcactctgactcattgtaggtggccaagagcctattgtgctggggaggttttcctccggagccgtgaatgctgctaatcccaacctccgagcgtgtgcgcacaatccagtgttgctacgtcgtaacgcgtaagttggaggcggaacagactactttcggtactccgtgtttccttaattttattgttcaaatttatggtgacattgtctgacatttgtgaattcgctcgcctgccacttaatatcgctttatatcatctgatagcattccataagactacagaactcactttggaactcatcgactttgctgttttcctgaatactgttcacaaccaaacaaaacaaa

SEQ ID NO: 20314 - DNA, 724 bp, synthetic construct
  source 1..724: mol_type = other DNA
tgttcccacccacggggtccactgggcgctagcacactggtatcacggtacctttgtgcgcctgttttatccaccctccccccacgtaacttagaagcaaaacctacccggtcaacagacaactcagtgagccaactgagcaatgaccaagcacttctgttaccccggaccaagtatcaatagactgctggcgcggttgaaggagaaaacgtccgttacccggccaattacttcgagaaacctagtaccaccatggaggttgcgcagtgtttcgctccgcacatccccagtgtagatctggccgatgagccaccgcactccccacgggtgaccgtggcggtggctgcgctggcggcctgcccatggggcaacccatgggacgcttcaatactgacatggtgcgaagagtctattgagctaattggtaatcctccggcccctgaatgcggctaatcctaactgcggagcagatacccacgtgccagtgggcagtctgtcgtaacgggcaactctgcagcggaaccgactactttgggtgtccgtgtttccttttattcttacattggctgcttatggtgacaattgaaagattgttaccatatagctattggattggccatccggtgacaaatagagcgatcatttatttgtttgttggctttgttccattgaacctcaaagttttgaacactcttaactttattatatcactcaacacaacaaa

SEQ ID NO: 20315 - DNA, 741 bp, synthetic construct
  source 1..741: mol_type = other DNA
ttaaaacagcctgtgggttgctcccacccacagggcccaatgggcgctagcacactagtattacggtacttttgtgcgcctgttttatccctcacccccgatgtaacttagaagcataattaaagcggtcaatagaaagctcagtaatccaactgagtgccgaccaagcacttctgttaccccggaccgagtatcaataagctgttcgcgcggctgaaggagaaaacgttcgttacccggccaattacttcgagaaacctagtaacaccatgaaagttgcgtagtgtttcgctccgcacaaccccagtgtagatcaggtcgatgagtcaccgcaatccccacgggcgaccgtggcggtggctgcgttggcggcctgcccatggggcaacccatgggacgcttcaatactgacatggtgtgaagagtctattgagctaattggtagtcctccggcccctgaatgcggctaatcccaactgcggagcagacgctcgcatgccagcgagtagtctgtcgtaacgggcaactctgcagcggaaccgactactttgggtgtccgtgtttccctttatttttatattggctgcttatggtgacaattgaaagattgttaccatatagctattggattggccatccggtgacaaacagagcgatcatctactcttttgttgggttcgttccattgaatcacaaggtattgaacacactcaatttcattttaacccttaatacactaag

SEQ ID NO: 20316 - DNA, 717 bp, synthetic construct
  source 1..717: mol_type = other DNA
cacccacagggcccactgggcgctagcacactggtattacggtacctttgtgcgcctgttttatacacccttaccctacgtaacatagaagcaaaacaacaaggtcaatagagagcccagtgagccaactgggtcgagaccaagcacttctgtttccccggaccgagtatcaataggctgcttacgcggctgaaggagaaaacgttcgttacccggctaactacttcgaaaaacctagtaacgccatggaagttgcgaaccgtttcgctcggcacttccccagtgtagatcaggtcgatgagtcaccgcattccccacgggcgaccgtggcggtggctgcgttggcggcctgcctatggggcaacccataggacgcttcaatatggacatggtgtgaagagtctattgagctagttagtagtcctccggcccctgaatgcggctaatcctaactgcggagcacatgcccccaacccaggaggtggtgtgtcgtaatgggtaactctgcagcggaaccgactactttgggtgtccgtgtttccttttatcccaatgttggctgcttatggtgacgattgaaaggttgttaccatatagctattggattggccatccggtgactaacagagcaattgtatacctattcattggttacattccattaaatctcaaggaattaacgactctcaattacattttgctcttgaattctgcaaa

SEQ ID NO: 20317 - DNA, 742 bp, synthetic construct
  source 1..742: mol_type = other DNA
taaaacagcctgtgggttgttcccacccacagggcccacagggcgccagcacactggtatcacggtacctttgtgcgcctgttttatgcaccctcaccctcaatgtaacttagaagtacagccaagcggtcaatagaagcttagtaatccaactgagctctgaccaagcacttctgttgccccggaccgagtatcaataagctgctcgcgcggctgaaggagaaaacgttcgttatccggccaattacttcgagaaacctagtaacgccatgaaagttgcgcagtgtttcgctccgcacaaccccagtgtagatcaggtcgatgagtcaccgcaaaccccacgggcgaccgtggcggtggctgcgttggcggcctgcccatggggcaacccatgggacgcttcaatactgacatggtgtgaagagtctattgagctagttggtagtcctccggcccctgaatgcggctaatcctaactgcggagcagacgcttgcataccagcgagtagtctgtcgtaacgggcaactctgcagcggaaccgactactttgggtgtccgtgtttccttttatcttttacattggctgcttatggtgacaattgaaagattgttgccatatagctattggattggccatccggtgacaaacagagcgatcatctattctttcgttgggttcgttccattgaatcacgaggtattgaatacactcaacctcattctaacccttaatacactaaa

SEQ ID NO: 20318 - DNA, 744 bp, synthetic construct
  source 1..744: mol_type = other DNA
ttaaaacagcctgtgggttgtacccacccacagggcccactgggcgctagcacactggtatcacggtacctttgtgcgcctgttttataccccctaccccaactttaaacttagaagcaaagcaaacccgatcaatagcagatgtagcaagccagttgcatcttgatcaagtacttctgtctccccggactgagtatcaatagactgctcacgcggttgaaggagaaaacgttcgttacccgaccaactacttcgagaaacctagtaacaccatgaaagtagcagggtgtttcgatcagcacaaccccagtgtagatcaggctgatgagtcaccgcatcccccacgggcgaccgtggcggtggctgcgctggcggcctgcccatggggcaacccatgggacgctctaatatggacatggtgtgaagagtctattgagctagttggtagtcctccggcccctgaatgcggctaatcctaactgcggagcacataccccaaagccaaggggcagtgtgtcgtaacgggcaactctgcagcggaaccgactactttgggtgtccgtgtttccttttattctcaaactggctgcttatggtgacaatctcagagttgttaccatatagctattggattggccatccggtgagcaacagagcaattgtctaccaatttgttggatttattccactcaatctagcggttttcagaacattgaattatattctaaccctcaacaagacgaa

SEQ ID NO: 20319 - DNA, 742 bp, synthetic construct
  source 1..742: mol_type = other DNA
ttaaaacagcctgtgggttgttcccacccacagggcccactgggcgctagcacactggtattacggtacctttgcgcgcctgttttatctaccctccccctacgtaacttagaagtataagcccaaaggtcaacaggtaactcagcacgccagctgagttgtgaccaagcacttctgtaaccccggaccgagtatcaataagctgctcacgcggctgaaggagaaaacgttcgttacccgaccaattacttcgagaaacccagtaccaccatgaaagttgcgcggcgtttcgctccgcacaaccccagtgcagatcaggccgatgagtcaccgcactcctcacgggtgaccgtggcggtggctgcgctggcggcctgcccatggggtaacccatgggacgcttcaatactgacatggtgcgaagagtctattgagctaattggtagtcctccggcccctgaatgcggctaatcctaaccgcggagcaggcactcacacgccagtgagcagtctgtcgtaatgggcaactctgcggcggaaccgactactttgggtgaccgtgtttccttttattcttacattggctgcttatggtgacaattgataaattgttaccatatagctattggattggccatccggtgacaaacagagcaataatttactcgtttgttggctttgtaccactaaactataaagtgttaaatactctcaactttatcctaaaactcaacaaagcaaa

SEQ ID NO: 20320 - DNA, 742 bp, synthetic construct
  source 1..742: mol_type = other DNA
ttaaaacagcctgtgggttgttcccacccacagggcccactgggcgctagcacactggtattacggtacccttgtgcgcctgttttatccaccctccccctacgcaacttagaagtatgagcctagaggtcaacaggtaactcagcacgccagctgggttgtggccaagcacttctgtaaccccggaccgagtatcaataagctgttcacacggctgaaggagaaaacgttcgttacccggccaattacttcgagaaacccagtaccaccatgaaagttgcgcggcgtttcgctccgcacaaccccagtgtagatcaggccgatgagtcaccgcactcctcacgggtgaccgtggcggtggctgcgctggcggcctgcccatggggtaacccatgggacgcttcaatactgacatggtgcgaagagtctattgagctaattggtagtcctccggcccctgaatgcggctaatcctaaccgcagagcagatactcacacgccagtgagcagtctgtcgtaatgggcaactctgcggcggaaccgactactttgggtgaccgtgtttccttttattcttgcattggctgcttatggtgacaattgataaattgttaccatatagctattggattggccatccggtgacaaacagagcaataatttactcgtttgttggctttgtaccactaaactataaagtgttaaatactctcaactttatcctaaaacttaacaaagcaaa

SEQ ID NO: 20321 - DNA, 743 bp, synthetic construct
  source 1..743: mol_type = other DNA
ttaaaacagcctgtgggttgttcccacccacagggcccactgggcgctagcacactggtattctggtacctttgtgcgcctgttttatacacccttccccaatcgtaacttagaagctcaccacatacggtcaataggtgactcagtatgccaattgggtcttgaccaagcacttctgttaccccggactgagtatcaataggccgctcacgtggctgaaggagaaaacgttcgttaaccggccaattacttcgagaaacctagtaacaccatggaggttgcgcagcgtttcgctccgcacaaccccagtgtagatcaggccgatgagtcaccgcactcctcacgggcgaccgtggcggtggctgcgctggcggcctgcccatggggcaacccatgggacgcttcaatactgacatggtgtgaagagtctattgagctaattggtagtcctccggcccctgaatgcggctaatcctaactgcggagcagatacccacacgccagtgggcagtctgtcgtaatgggtaactctgcagcggaaccgactactttgggtgtccgtgtttccttttattcttatactggctgcttatggtgacaattgagagattgttaccatatagctattggattggccatccggtgacaaatagagcaattgtttatttatttgtcggttttgtgccattaaattttaaagttctaaaaactctcaacttggtcatattgtttaattcagcaaa

SEQ ID NO: 20322 - DNA, 743 bp, synthetic construct
  source 1..743: mol_type = other DNA
ttaaaacagcctgtgggttgttcccacccacagggcccactgggcgctagcacactggtatcttggtacctttgtgcgcctgttttatacacccttccccaatcgtaacttagaagctcaccacatacggtcaataggtgactcagtatgccaattgggttttgaccaagcacttctgttaccccggactgagtatcaataggctgctcacgtggctgaaggagaaaacgttcgttaaccggccaattacttcgagaaacctagtaacaccatggaggttgcgcagcgtttcgctccgcacaaccccagtgtagatcaggccgatgagtcaccgcactcctcacgggcgaccgtggcggtggctgcgctggcggcctgcccatggggcaacccatgggacgcttcaatactgacatggtgcgaagagtctattgagctaattggtagtcctccggcccctgaatgcggctaatcctaactgcggagcagatacccacacgccagtgggcagtctgtcgtaatgggtaactctgcagcggaaccgactactttgggtgtccgtgtttccttttattcttatactggctgcttatggtgacgattgagagattgttaccatatagctattggattggccatccggtgacaaatagagcaattgtttacttatttgtcggttttgtaccattaaattttaaagttctaaagactctcaacttggttatattgtttaattcagcaaa

SEQ ID NO: 20323 - DNA, 743 bp, synthetic construct
  source 1..743: mol_type = other DNA
ttaaaacagcctgtgggttgttcccacccacagggcccactgggcgctagcacactggtatcttggtacctttgtgcgcctgttttatacacccttccccaatcgtaacttagaagctcaccacatacggtcaataggtgactcagtatgccaattgggtcttgaccaagcacttctgttaccccggactgagtatcaataggctgctcacgtggctgaaggagaaaacgttcgttaaccggccaattacttcgagaaacctagtaacaccatggaggttgcgcagcgtttcgctccgcacaaccccagtgtagatcaggccgatgagtcaccgcactcctcacgggcgaccgtggcggtggctgcgctggcggcctgcccatggggcaacccatgggacgcttcaatactgacatggtgcgaagagtctattgagctaattggtagtcctccggcccctgaatgcggctaatcctaactgcggagcagatacccacacgccagtgggcagtctgtcgtaatgggtaactctgcagcggaaccgactactttgggtgtccgtgtttccttttattcttatactggctgcttatggtgacgattgagagattgttaccatatagctattggattggccatccggtgacaaatagagcaattgtttacttatttgtcggttttgtaccattaaattttaaagttctaaagactctcaacttggttatattgtttaaatcagcaaa

SEQ ID NO: 20324 - DNA, 743 bp, synthetic construct
  source 1..743: mol_type = other DNA
ttaaaacagcctgtgggttgttcccacccacagggcccactgggcgctagcacactggtatcctggtacctttgtgcgcctgttttatacacccttccccaatcgtaatttagaagctcaccacatacggtcaataggtgactcagtatgccaattgggtcttgaccaagcacttctgttaccccggactgagtatcaataggctgctcacgtggctgaaggagaaaacgttcgttaaccggccaattacttcgagaaacctagtaacaccatggaggttgcgcagcgtttcgctccgcacaaccccagtgtagatcaggccgatgagtcaccgcactcctcacgggcgaccgtggcggtggctgcgctggcggcctgcccatggggcaacccatgggacgcttcaatactgacatggtgcgaagagtctattgagctaattggtagtcctccggcccctgaatgcggctaatcctaactgcggagcagatacccacacgccagtgggcagtctgtcgtaatgggtaactctgcagcggaaccgactactttgggtgtccgtgtttccttttattcttatactggctgcttatggtgacaattgagagattgttaccatatagctattggattggccacccggtgacaaatagagcaattgtttacttatttgtcggctttgtgccattaaattttaaagttctaaaaactctcaacttggttatattgtttaattcagcaaa

SEQ ID NO: 20325 - DNA, 818 bp, synthetic construct
  source 1..818: mol_type = other DNA
ttaaaacagcctgggggttgtaccacccctagggcccacgtggcgccagtactctggttcgcgtagaacctttgtacgcctgttttcccccccttaaataaattaagatctctgccaatgtggggagtagtccgactccgcaccgatacgtcgcaccagcagaccagttcgtttagaactcttctgcggattggcacgagcacccaccccgtaacttagaagcattacacaaaccggccaataggagcgcggcaaccagccgcgtagcggtcaagcacttctgtctccccggtcagtaatgatcgttatccgccctctccactacgagaagcccattaactgccgaaagtgatgatgagttgcgctcaaccgcacccccagcggtagctctgagagatggggctcgcagcctcccccgtggtaacacggatgcttgcccgcgcgtgctctcgggtttggtccttgaccattcactcagattcgccgtacgcagccaagagcctattgtgctggagaggttttcctccggagccgtgaatgctgctaatcctaacctccgagcgtgtgcgcacaatccagtgttgctacgtcgtaacgcgtaagttggaggcggaacagactactttcggtactccgtgtttccactattaaaaacatttttaatttatggtgacgttgactgatattgttgagcttgctcgtttgcccttgaacatcgctttgtattatattgttggattccataagacttccctactcactgttgaatttattgattttgttgttttatttgaatagcattcataagcataatcaac

SEQ ID NO: 20326 - DNA, 732 bp, synthetic construct
  source 1..732: mol_type = other DNA
tgtgggttgtacccacccacagggcccactgggcgccagcactctggtattacggtacctttgtgcgcctgttttatgtccccctcccccacttgaaacttagaagcaaaacacactgatcagcagttggcgtggcaaaccagtcatgtcttgatcaagcacttctgtttccccggaccgagtatcaatagactgcccacgcggttgaaggagaaagcgttcgttatccgatcagctacttcgagaaacctagtaacaccatgaaagttgcggagtgtttcgctcagcacatccccagtgtagatcaggtcgatgagtcaccgcgttccccacgggcgaccgtggcggtggctgcgttggcggcctgcctgtggggcaacccacaggacgctctaatacagacatggtgcgaagagtctattgagctagttggtattcctccggcccctgaatgcggctaatcctaactgcggagcacgtgcctccaatccagggggtggcgtgtcgtaacgggtaactctgcagcggaaccgactactttgggtgtccgtgtttccttttattcttatattgactgcttatggtgacaattgaaagattgttaccatatagctattggattggtcatccggtgtcgcacagagctattatatatctctttgttggatacattccgttgaattataaggaattaagaaccctcaattacatcttggctttaaactccgcaaa

SEQ ID NO: 20327 - DNA, 743 bp, synthetic construct
  source 1..743: mol_type = other DNA
ttaaaacagcctgtgggttgttcccacccatagggcccattgggcgctagcacactggcatcacggtacctttgtgcgcctgttttatccaccccctccccaatgtaacgtagaagcacgaaccaagtggtcaataggtggctcagtaaaccaactgggcttagaccaagcacttctgttaccccggactgagtatcaataggctgctcacgcggctgaaggagaaaacgttcgttacccggccaactacttcgagaagcccagtaccaccatgaaggatgcgcagtgtttcgttcagcacaaccccagtgtagatcaggtcgatgagtcaccgcaatccccacgggtgaccgtggcggtggctgcgctggcggcctgcccatggggcaacccatgggacgcttcaatttcgacatggtgcgaagagtctattgagctagttggtagtcctccggcccctgaatgcggctaatcccaactgcggagcagacacccacaaaccagtgggcagtttgtcgtaacgggcaactctgcagcggaaccgactactttgggtgtccgtgtttccttttatttctacgttggctgcttatggtgacaattgagagattgttaccatatagctattggattggccatccggtaacaaacagagctattatttatcttcttgttggcttcgtgccgttgaatttcgaagttataacaactataaacttcatcttgacactcaatacagcaaa

SEQ ID NO: 20328 - DNA, 720 bp, synthetic construct
  source 1..720: mol_type = other DNA
ttcccacccacagggcccactgggcgcttgcacactggtatcacggtacctttgtgcgcctgttttatccaccccccctgcgtaacttagaagtggaactcacacggtcaatagacaactcggtaagccaaccgggcaatgaccaagcactactgttaccccggaccaagtatcaataaactgctagcgcggttgaaggagaaaacgtccgttacccggccaattacttcgagaaacctagtatcaccatggatgttgcgcagtgtttcgctccgcacaaccccagtgtagatcaggccgatgagccaccgcattccccacgggcgaccgtggcggtggctgcgctggcggcctgcccatggggcaacccatgggacgcttcaatactgacatggtgcgaagagtctattgagctaattggtagtcctccggcccctgaatgcggctaatcctaactgcggagcagatacccacatgccagtgggcagtctgtcgtaacgggcaactctgcagcggaaccgactactttgggtgtccgtgtttccttttaatcttatattggctgcttatggtgacaattgaaagattgttgccatatagctattggattggccatccggtgacaaacagagcaatcatttatttgttcgttggttttattccattgaaccttaaagttttgaacactctaaactttatcatttcactcaacacaacaaa

SEQ ID NO: 20329 - DNA, 715 bp, synthetic construct; identical to SEQ ID NO: 882
  source 1..715: mol_type = other DNA

SEQ ID NO: 20330 - DNA, 744 bp, synthetic construct
  source 1..744: mol_type = other DNA
ttaaaacaaggcctgtgggttgttcccacccacagggcctactgggcgttagcacactggtatcacggtacccttgtgcgcctgttttattcaccctaccctattgcaacttagaagttaaccaagtacggtcattaggcagctcagcatgccagctgggttttgaccaagcacttctgttaccccggactgagtatccttaggctgcttgcgcggctgaaggagaaaacgttcgttacccgaccaattacttcgagaaacctagtatcaccatgaaagttgcgcagtgtttcgctccgcacaaccccagtgtatatcaggccgatgagtcaccgcattccccacgggcgaccgtggcggtggctgcgctggcggcctgcccatgggttaacccatgggacgcttcaaaactgacatggtgtgaagagtctattgagctaattggtactcctccggcccctgaatgcggctaatcctaactgcggagcagatactcacacgccagtgggtggtctgtcgtaacgggcaactctgcagcggaaccgactactttgggtgtccgtgtttcctattattcatatactggctgcttatggtgacaattgagagattgttgccatatagctattggattggccatccggtgacaaacagagcgattgtatacctatttgttggtttactaccattgaattttaaagtttcataaactctcaaccttgttttaacacttaacgcagcaag

SEQ ID NO: 20331 - DNA, 744 bp, synthetic construct
  source 1..744: mol_type = other DNA
ttaaaacaaggcctgtgggttgttcccacccacagggcctactgggcgttagcacactggtatcacggtacccttgtgcgcctgttttattcaccctaccctattgcaacttagaagttaaccaagtacggtcattaggcagatcagcatgccagctgggttttgaccaagcacttctgttaccccggactgagtatcaataggctgcttgcgcggctgaaggagaaaacgttcgttacccgaccaattacttcgagaaacctagtatcaccatgaaagttgcgcagtgtttcgctccgcacaaccccagtgtagatcaggccgatgagtcaccgcattccccacgggcgaccgtggcggtggctgcgctggcggcctgcccatgggttaacccatgggacgcttcaaaactgacatggtgtgaagagtctattgagctaattggtagtcctccggcccctgaatgcggctaatcctaactgcggagcagatactcacacgccagtgggtggtctgtcgtaacgggcaactctgcagcggaaccgactactttgggtgtccgtgtttcctattattcatatactggctgcttatggtgacaattgagagattgttgccatatagctattggattggccatccggtgacaaacagagcgattgtatacctatttgttggtttcgtaccattgaattttaaagttttaaaaaccctcaaccttgttttaacacttaacgcagcaag

SEQ ID NO: 20332 - DNA, 742 bp, synthetic construct
  source 1..742: mol_type = other DNA
ttaaaacagcctgtgggttgatcccacccacagggcccactgggcgctagcacactggtatcacggtacccttgtgcgcctgttttatcttcccctccccactgtaacttagaagaatgacataaacggtcaacagatagctcagtacaccaactgagccccgaccaagcacttctgttaccccggaccgagtaacaataggctgctcgcgcggctgaaggtgaaaacgttcgttacccggccaattacttcgagaaacctagtaccaccatgaaggttgcgcagcgtttcgctccgcacaaccccagtgtagatcaggtcgatgagtcaccgcactccccacgggcgaccgtggcggtggctgcgctggcggcctgcctatggggcaacccatgggacgcttcaatactgacatggtgcgaagagtctattgagctaattggtagtcctccggcccctgaatgcggctaatcctaactgcggggcaagtgcccacaaaccagtgggtggcttgtcgtaacgggtaaccctgcagcggaaccgactactttgggtgtccgtgtttccttttattcttattctggctgcttatggtgacaattgagagattgttaccatatagctattggattggccatctggtgagtaacagagcaatcatattcctctttgttggatttataccacttgattccactagttacaacactctgctacatattatttgcttaaatacaagaag

SEQ ID NO: 20333 - DNA, 716 bp, synthetic construct
  source 1..716: mol_type = other DNA
ttaaaacagcctgggggttgttcccacccctagggtccaatggacgctagtacaccggtatcacggtacccttgtacgcctgttttataatccccttcccccgtaacgttagaagcacaaaagcaaccgctcaatagacaccatacatccagtgtggttacgagcaagcacttctgtctccccggttgcgccctatatgctgtgtgaacggcaaaaaggggcaatatcgttacccgcttgactactacgggaaacccagtatcatctgcgattgatttgagagttgcgctcagcgcctgacccccggcgtagctcaggctgatgaggctccgaacaccccacaggtgactgtgtcggagcctgcgttggcggcctgcccataccccgtggtatgggacgctcacttcatgacatggtgcgaagagtctactgtgctagtcaagattcctccggcccctgaatgtggataatcctaaccaccgatcctatgttcgcaatccagcgttcggtaggtcgtaacgcgcaagtcggtggcggaaccaactactttgggtgtccgtgtttcctttatttcctactgaatgcttatggtgacaattgtttgatcagttgttgccattactcgcattcagtgtgcaattacgaaaacaaaactatcagttgttatcatccctcacgttcagtgtacaatcacaaaaacgagtttttctgtcata

SEQ ID NO: 20334 - DNA, 742 bp, synthetic construct
  source 1..742: mol_type = other DNA
ataaaacagcctgtgggttgtacccacccacagggcccactgggcgctagcactctggtattacggtacccttgtgcgcctgttttatcttcccttccctcagtgcaacttagaagtaaatcttaatgatcagtaggtggctcagcatgccagctgggtcttgatcaagcacttctgttaccccggactgagtatcaataagctgctcgcgcggctgaaggagaaagcgttcgttacccggccaattacttcgagaaacctagtaccaccatggaagttgcgcggcgtttcgctccgcacaatcccagtgtagatcaggtcgatgagtcaccgcattccccacgggcgaccgtggcggtggctgcgttggcggcctgcccatggggcaacccatgggacgcttcaatactgacatggtgcgaagagtctattgagctaattggtagtcctccggcccctgaatgcggctaatcctaactgcggagcagatacccacaagccagtgggcgatctgtcgtaacgggcaactctgcagcggaaccgactactttgggtgtccgtgtttctttttattcctatactggctgcttatggtgacaattgagaaattgttaccatatagctattggattggccatccggtgactaacagagcaattgtatacctgtttgttggttttgtgccattgaacttcaaagttttaaaaacactcaatttaataattctacttaatacaacaag

SEQ ID NO: 20335 - DNA, 744 bp, synthetic construct
  source 1..744: mol_type = other DNA
tttaaaacagcctgtgggttgttcccacccacagggcccactgggcgctagcactctggtattacggtacctttgtgcgcctgttttacatccctcccccagatgcaacttagaagcagtacaccaagaccaatagtaggcatggcataccagccatgtgtcggtcaagcacttctgttcccccgggctgagtatcaataaactgctcacgtggttgaaggagaaagcgcccgttacccggctaactacttcgagaagcctattaacaccatgaaagttgcggagtgtttcgctcagcacgatcccggtgtagatcaggccgatgagtcaccgcgttccccacaggtgactgtggcggtggctgcgttggcggcctgcccatggggcaacccatgggacgcttcaatatggacatggtgtgaagagcccattgagctagttagtagtcctccggcccctgaatgcggctaatcccaactgcggagcacgcgtcccccgctccagggggtagcgtgtcgtaacgggcaactctgcagcggaaccgactactttgggtgtccgtgtttccctttttccttttcattggctgcttatggtgacaattgaaagattgttaccatatagctattggattggccatccagtgtcaagcagagctataatttaccaatttatagggtttgtcccgttggatctgaaagctttaaaaacccttaacttggtactactattaaacagtgtaaa

SEQ ID NO: 20336 - DNA, 719 bp, synthetic construct
  source 1..719: mol_type = other DNA
cacccacagggcccactgggcgctagtacactggtatcacggtacctttgtgcgcctgtttgaccctccctccccaaacgcaacttagaagcacaacataaatggtcattagacggctcagtatgccaactgagtctcgatcaagcacttctgttaccccggactgagtaccaataggctgctcacgcggctgaaggggaaaccgttcgttacccgaccaactacttcgagaaacctagtaccaccatgaaagttgcgcagcgtttcgctccgcacaaccccagtgtagatcaggccgatgagtcaccgcaaaccccacgggcgactgtggcggtggctgcgctggcggcctgcccatgggacaactcatgggacgctacaatactgacatggtgcgaagagtctattgagctagttggtagtcctccggcccctgaatgcggctaatcctaactgtggagcagatacccacgcaccagtgggcagtctgtcgtaatgggcaactccgcagcggaaccgactactttgggtgtccgtgtttctttttattcctacgctggctacttatggtgacaattgagagactgtaaccatattgctatcgggttggccacctggtgaagaatagaacagttgctcacttgtttgtcagtcttgcaccgttgtaccataaagccttaactgcccctcaacaccgtcataacacttaacacgctgaa

SEQ ID NO: 20337 - DNA, 717 bp, synthetic construct
  source 1..717: mol_type = other DNA
cccacgtggcggccagtacaccggtatcacggtacccttgtacgcctgttttatactccctttcccctgtaacttagaagcaaacaaaccaagttcaatagaagggggtacaaaccagtaccaccacgaacaagcacttctgtttccccggtgaggttgtataaactgtccccacggttgaaaacgactgatccgttacccgctcttgtacttcgagaagcctagtatcatcctggaatcttcgatgcgttgcgctcagcactcgaccccggagtgtagcttaggctgatgagtctggacgttccccaccggcgacggtggtccaggctgcgttggcggcctacctgtggcccaaagccacaggacgctagttgtgaacagggtgtgaagagcctattgagctacaagagagtcctccggcccctgaatgcggctaatcccaaccacggagcaggtggttgcaatccagcaactagcctgtcgtaacgcgcaagtctgtggcggaaccgactactttgggtgtccgtgtttccttttattcttacaatggctgcttatggtgacaatcatagattgttatcataaagcgaattggattggccatccggtgaaagtcagatcaactatttatttgtttgttggaaccactgtgttagcttcacttctcacttaaccaattaatcaaaaacagtacgaggattaaacaacaatactaca

SEQ ID NO: 20338 - DNA, 717 bp, synthetic construct
  source 1..717: mol_type = other DNA
cccacgtggcggccagtacaccggtatcacggtacccttgtacgcctgttttatactccctttcccctgtaacttagaagcaaacaaaccaagttcaatagaagggggtacaaaccagtaccaccacgaacaagcacttctgtttccccggtgaggttgtataaactgtccccacggttgaaaacgactgatccgttacccgctcttgtacttcgagaagcctagtatcatcctggaatcttcgatgcgttgcgctcagcactcggccccggagtgtagcttaggctgatgagtctggacgttccccaccggcgacggtggtccaggctgcgttggcggcctacctgtggcccaaagccacaggacgctagttgtgaacagggtgtgaagagcctattgagctacaagagagtcctccggcccctgaatgcggctaatcccaaccacggagcaggtggttgcaatccagcaactagcctgtcgtaacgcgcaagtctgtggcggaaccgactactttgggtgtccgtgtttccttttattcttacaatggctgcttatggtgacaatcatagattgttatcataaagcgaattggattggccatccggtgaaagtcagatcagctatttatttgtttgttggaaccactgtgttagcttcacttctcatttaaccaattaattaaaaacagtacgaggattaaacaacaatactaca

SEQ ID NO: 20339 - DNA, 717 bp, synthetic construct
  source 1..717: mol_type = other DNA
ttaaaacagcttgggggttgttcccacccccagggtccaacggacgctagtacaccggtatcacggtacccttgtacgcctgttttataatccccttcccccgtaacattagaagcacaaaagcaaccgctcaatagacaccatacatccagtgtggttacgagcaagcacttctgtctccccggttgtgccctatatgctgtgcgaacggcaaaaaggggcaatatcgttacccgcttgactactacgggaaacccagtatcatcttcgattgatttgagagttgcgttcagcgccttacccccggcgtagctcaggctgatgaggctccgaacaccccacaggcgactgtgtcggagcctgcgttggcggcctgcccataccctgcggtatgggacgctcacttcatgacatggtgcgaagagtctactgtgctagtcaagattcctccggcccctgaatgtggataatcccaaccactgatcctacgttcgcaatccagcgttcagtaggtcgtaacgcgcaagtcggtggcggaaccaactactttgggtgtccgtgtttcctttatttcctactgaatgcttatggtgacaattgttttgatcagttgttgccattactcgcgttcagtgtgtaattacaaaaacaagattatcagttattacaatccctcacgttcagtgcacaattacgaaaacgagattttctgtcata

SEQ ID NO: 20340 - DNA, 717 bp, synthetic construct
  source 1..717: mol_type = other DNA
ttaaaacagcttgggggttgttcccacccccagggtccaatggacgctagtacaccggtatcacggtacccttgtacgcctgttttataatccccttcccccgcaacattagaagcacaaaaacaaccgctcaatagacaccatacatccagtgtggttacgagcaagcacttctgtctccccggttgcgccctatatgctgtgcgaacggcaaaaaggggcaatatcgttacccgcttgactactacgggaaacccagtatcatcttcgattgatttgagagttgcgttcagcgccttacccccggcgtagctcaggccgatgaggctccgaacaccccacaggcgactgtgtcggagcctgcgttggcggcctgcccataccctacggtatgggacgctcacttcatgacatggtgcgaagagtctactgtgctagtcaagattcctccggcccctgaatgtggataatcccaaccactgatcctacgttcgcaatccagcgttcagtaggtcgtaacgcgcaagtcggtggcggaaccaactactttgggtgtccgtgtttcctttatttcctactgaatgcttatggtgacaattgttttgatcagttgttgccattactcgcgttcagtgtgcaattacaaaaacaagattatcagttattacaatccctcacgttcagtgcacaattacgaaaacgagattttctgtcata

SEQ ID NO: 20341 - DNA, 717 bp, synthetic construct
  source 1..717: mol_type = other DNA
ttaaaacagcttgggggttgttcccacccccagggtccaatggacgctagtacaccggtatcacggtacccttgtacgcctgttttataatccccttcccccgtaacattagaagcacaaaagcaaccgctcaatagacaccatacatccagtgtggttacgagcaagcacttctgtctccccggttgcgccctatatgctgtgcgaacggcaaaaaggggcaatatcgttacccgcttgactactacgggaaacccagtatcatcttcgattgatttgagagttgcgttcagcgccttacccccggcgtagctcaggctgatgaggctccgaacaccccacaggcgactgtgtcggagcctgcgttggcggcctgcccataccctgcggtatgggacgctcacttcatgacatggtgcgaagagtctactgtgctagtcaagattcctccggcccctgaatgtggataatcccaaccactgatcctacgttcgcaatccagcgttcagtaggtcgtaacgcgcaagtcggtggcggaaccaactactttgggtgtccgtgtttcctttatttcctactgaatgcttatggtgacaattgttttgatcagttgttgccattactcgcgttcagtgtgtaattacaaaaacaagattatcagttattaccatccctcacgttcagtgcacaattacaaaaacgagattttctgtcata

SEQ ID NO: 20342 - DNA, 717 bp, synthetic construct
  source 1..717: mol_type = other DNA
ttaaaacagcttgggggttgttcccacccccagggtccaatggacgctagtacaccggtatcacggtacccttgtacgcctgttttataatccccttcccccgtaacattagaagcacaaaagcaaccgctcaatagacaccatacatccagtgtggttacgagcaagcacttctgtctccccggttgcgccctatatgctgtgcgaacggcaaaaaggggcaatatcgttacccgcttgactactacgggaaacccagtatcatcttcgattgatttgagagttgcgttcagcgccttacccccggcgtagctcaggctgatgaggctccgaacaccccacaggcgactgtgtcggagcctgcgttggcggcctgcccataccctgcggtatgggacgctcacttcatgacatggtgcgaagagtctactgtgctagtcaagaatcctccggcccctgaatgtggataatcccaaccactgatcctacgttcgcaatccagcgttcagtaggtcgtaacgcgcaagtcggtggcggaaccaactactttgggtgtccgtgtttcctttatttcctactgaatgcttatggtgacaattgttttgatcagttgttgccattactcgcgttcagtgtgtaattacaaaaacaagattatcagttatcaccatccctcacgttcagtgcacaattacaaaaacgagattttctgtcata

SEQ ID NO: 20343 - DNA, 717 bp, synthetic construct
  source 1..717: mol_type = other DNA
ttaaaacagcttgggggttgttcccacccccagggtccaatggacgctagtacaccggtatcacggtacccttgtacgcctgttttataatccccttcccccgtaacattagaagcacaaaagcaaccgctcaatagacaccatacatccagtgtggttacgagcaagcacttctgtctccccggttgcgccctatatgctgtgcgaacggcaaaaaggggcaatatcgttacccgcttgactactacgggaaacccagtatcatcttcgattgatttgagagttgcgttcagcgccctacccccggcgtagctcaggctgatgaggctccgaacaccccacaggcgactgtgtcggagcctgcgttggcggcctgcccataccctgcggtatgggacgctcacttcatgacatggtgcgaagagtctactgtgctagtcaagattcctccggcccctgaatgtggataatcccaaccactgatcctacgttcgcaatccagcgttcagtaggtcgtaacgcgcaagtcggtggcggaaccaactactttgggtgtccgtgtttcctttatttcctactgaatgcttatggtgacaattgttttgatcagttgttgccattactcgcgttcagtgtgtaattacaaaaacaagattatcagttactacaatccctcacgttcagtgcacaattacgaaaacgagattttctgtcata

SEQ ID NO: 20344 - DNA, 717 bp, synthetic construct
  source 1..717: mol_type = other DNA
ttaaaacagcttgggggttgttcccacccccagggtccaatggacgctagtacaccggtatcacggtacccttgtacgcctgttttataatccccttcccccgtaacattagaagcacaaaagcaaccgctcaatagacaccatacatccagtgtggttacgagcaagcacttctgtctccccggttgcgccctatatgctgtgcgaacggcaaaaaggggcaatatcgttacccgcttgactactacgggaaacccagtatcatcttcgattgatttgagagttgcgttcagcgccttacccccggcgtagctcaggctgatgaggctccgaacaccccacaggcgactgtgtcggagcctgcgttggcggcctgcccataccctgcggtatgggacgctcacttcatgacatggtgcgaagagtctactgtgctagtcaagaatcctccggcccctgaatgtggataatcccaaccactgatcctacgttcgcaatccagcgttcagtaggtcgtaacgcgcaagtcggtggcggaaccaactactttgggtgtccgtgtttcctttatttcctactgaatgcttatggtgacaattgttttgatcagttgttgccattactcgcgttcagtgtgtaattacaaaaacaagattatcagttattaccatccctcacgttcagtgcacaattacaaaaacgagattttctgtcata

SEQ ID NO: 20345 - DNA, 722 bp, synthetic construct
  source 1..722: mol_type = other DNA
ttcccacccacagggcccactgggcgctagcacactggtatcacggtacctttgtgcgcctgttttatccaccctcccccaatgtaacttagaagcacaccaaacgcggtcaataggcggctcagtacaccaactgagtctcgaccaagcacttctgttaccccggactgagtatcaataggctgctcacgcggctgaaggagaaaacgttcgttacccggccaattacttcgagaaacctagtaccaccatgaaggttgcgcggcgtttcgctccacacaaccccagtgtagatcaggtcgatgagccaccgcattccccacgggcgaccgtggcggtggctgcgctggcggcctgcccatggggcaacccatgggacgcttcaatactgacatggtgtgaagagtctattgagctaattggtagtcctccggcccctgaatgcggctaatcctaactgcggagcagacacccacatgccagtgggcagtctgtcgtaacgggtaactctgcagcggaaccgactactttgggtgtccgtgtttccttttattctcatactggctgcttatggtgacaattgaaagattgttgccatatagctattggattggccatccggtgacaaacagagcggttgtttacctatttgtcggttttataccattgaattacaaggttctgaaaaccctcaatttcattttagcacttaataccacaaa

SEQ ID NO: 20346 - DNA, 724 bp, synthetic construct
  source 1..724: mol_type = other DNA
tgatcccacccacagggcccatagggcgttagcactctggtatcacggtacctttgtgcgcctgttttatattcccacccccaatcgcaacttagaagcagtacttcacgaccaacagtgggcgtgacacaccagccacgtctcggtcaagcacttctgtctccccggactgagtatcaataagctgctcacgcggctgaaggaaaaaacgtccgttatccggccaattacttcgagaaacctagtaccgccatgaaagttgcgcagcgtttcgatccgcacaaccccagtgtagatcaggccgatgagtcaccgcgttccccacgggtgaccgtggcggtggctgcgttggcggcctgcccatgggggaacccatgggacgcttcaatactgacatggtgtgaagagtctattgagctaattggtagccctccggcccctgaatgcggctaatcctaactgcggagcagattcccgcatgccagcgggtggtctgtcgtaacgggcaactctgcagcggaaccgactactttgggtgtccgtgtttccttttattcctatatcggctgcttatggtgacaattgagagattgttaccatatagctattggattggccatccggtgacaaacagagcaattatttaccaatttattggttttgtaccattgaattttaacgtattcaaaactcttaaccttattttggctcttaatacagcaaa

SEQ ID NO: 20347 - DNA, 743 bp, synthetic construct
  source 1..743: mol_type = other DNA
ttaaaacagcctgtgggttgtacccacccacaggacccattgggtgctagcactctggtatcacggtacctttgtgcgcctgttttacatccccctcccctaattgcaacttagaagctgcacacaccgatcaatagcgggcatagcaaaccagctatgtcttgatcaagcactcctgtatccccggaccgagtatcaatagactgctcacgcggttgaaggagaaaacgttcgtcacccggctaactacttcgagaaacccagtagtatcatgaaagttgcgaggcgtttcgctcagcacattcccagtgtagatcaggtcgatgagtcaccgcgttccccacgggcgaccgtggcggtggctgcgttggcggcctgcctacggggcgactcgtaggacgccttaatacagacatggtgcgaagagtcgattgagctagttagtattcctccggcccctgaatgcggctaatcctaactgcggagcacatgccctcaacccagggggtattgtgtcgtaacgggcaactctgcagcggaaccgactactttgggtgtccgtgtttccttttattcttacattggctgcttatggtgacaattgaaaagttgttgccatatagctattgggttggccatccagtgtctaatagagctatcatatacctctttgttggattcataccacttaatttaaaagaagttaagacactacaactcattgtacaactgaatacagcaag

SEQ ID NO: 20348 - DNA, 743 bp, synthetic construct
  source 1..743: mol_type = other DNA
tttaaaacagcctgtgggttgttcccacccacagggcccactgggcgctagcactctggtattacggtacctttgtgcgcctgttttacatccctcccccagatgcaacttagaagcagtacaccaagaccaatagtaggcatggcataccagccatgtgtcggtcaagcacttctgttcccccgggctgagtatcaataaactgctcacgtggttgaaggagaaagcgcccgttacccggctaactacttcgagaagcctattaacaccatgaaagttgcggagtgtttcgctcagcacgatcccggtgtagatcaggccgatgagtcaccgcgttccccacaggtgactgtggcggtggctgcgttggcggcctgcccacggggcaacccatgggacgcttcaatatggacatggtgtgaagagcccattgagctagttagtagtcctccggcccctgaatgcggctaatcccaactgcggagcacgcgcccccgctccagggggtagtgtgtcgtaacgggcaactctgcagcggaaccgactactttgggtgtccgtgtttccttttttccttttcattggctgcttatggtgacaattgaaagattgttaccatatagctattggattggccatccagtgtcaagcagagctataatttaccaatttatagggtttgtcccgttggatctgaaagctttaaaaacccttaacttggtactactattaaacagtgtaaa

SEQ ID NO: 20349 - DNA, 743 bp, synthetic construct
  source 1..743: mol_type = other DNA
tttaaaacagcctgtgggttgttcccacccacagggcccactgggcgctagcactctggtattacggtacctttgtgcgcctgttttacatccctcccccagatgcaacttagaagcagtacaccaagaccaatagtaggcatggcataccagccatgtgtcggtcaagcacttctgttcccccgggctgagtatcaataaactgctcacgtggttgaaggagaaagcgcccgttacccggctaactacttcgagaagcctattaacaccatgaaagttgcggagtgtttcgctcagcacgatcccggtgtagatcaggccgatgagtcaccgcgttccccacaggtgactgtggcggtggctgcgttggcggcctgcccatggggcaacccatgggacgcttcaatatggacatggtgtgaagagcccattgagctagttagtagtcctccggcccctgaatgcggctaatcccaactgcggagcacgcgcccccgctccagggggtagcgtgtcgtaacgggcaactctgcagcggaaccgactactttgggtgtccgtgtttccttttttccttttcattggctgcttatggtgacaattgaaagattgttaccatatagctattggattggccatccagtgtcaagcagagctataatttaccaatttatagggtttgtcccgttggatctgaaagctttaaaaacccttaacttggtactactattaaacagtgtaaa

SEQ ID NO: 20350 - DNA, 743 bp, synthetic construct
  source 1..743: mol_type = other DNA
tttaaaacagcctgtgggttgttcccacccacagggcccactgggcgctagcactctggtattacggtacctttgtgcgcctgttttacatccctcccccaggtgcaacttagaagcagtacaccaagaccaatagtaggcatggcataccagccatgtgtcggtcaagcacttctgttcccccgggctgagtatcaataaactgctcacgtggttgaaggagaaagcgcccgttacccggctaactacttcgagaagcctattaacaccatgaaagttgcggagtgtttcgctcagcacgatcccggtgtagatcaggccgatgagtcaccgcgttccccacaggtgactgtggcggtggctgcgttggcggcctgcccatggggcaacccatgggacgcttcaatatggacatggtgtgaagagcccattgagctagttagtagtcctccggcccctgaatgcggctaatcccaactgcggagcacgcgcccccactccagggggtagcgtgtcgtaacgggcaactctgcagcggaaccgactactttgggtgtccgtgtttcctttttaccttttcattggctgcttatggtgacaattgaaagattgttaccatatagctattggattggccatccagtgtcaagcagagctataatttaccaatttatagggtttatcccgttggatctgaaagctttaaaaacccttaacttggtactactattaaacagcgtaaa

SEQ ID NO: 20351 - DNA, 743 bp, synthetic construct
  source 1..743: mol_type = other DNA
tttaaaacagcctgtgggttgttcccacccacagggcccactgggcgctagcactctggtattacggtacccttgtgcgcctgttttacatccctcccccaaatgcaacttagaagcagtacaccgagaccaatagtaggcatggcataccagccatgtatcggtcaagcatttctgttcccccgggctgagtaccaataaactgctcacgtggttgaaggggaaagcgcccgttacccggctaactacttcgagaagcctattaacaccatgaaagttgcggagtgtttcgctcagcacgatcccggtgtagatcaggccgatgagtcaccgcgttccccacaggtgactgtggcggtggctgcgttggcggcctgcccatggggcaacccatgggacgcttcaatatggacatggtgtgaagagcctattgagctagttagtagtcctccggcccctgaatgcggctaatcccaactgcggagcacgcgcccccgcaccagagggtagcgtgtcgtaacgggcaactctgcagcggaaccgactactttgggtgtccgtgtttccttttttccttttcattggctgcttatggtgacaattgaaagattgttaccatatagctattggattggccatccagtgtcaagcagagctataatttaccaatttatagggtttgtcccgttggatctgaaaactttaaaaacccttaacttggtactactattaaacagtgtaaa

SEQ ID NO: 20352 - DNA, 717 bp, synthetic construct
  source 1..717: mol_type = other DNA
ttaaaacagcttgggggttgttcccacccccagggtccaatggacgctagtacaccggtatcacggtacccttgtacgcctgttttataacccccttcctccgtaacattagaagcacaaaggcaaccgctcaatagacaccatacatccagtgtggttacgagcaagcacttctgtctccccggttgcgccctatatgctgtgtgaacggcaaaaaggggcaatatcgttacccgcttgactactacgggaaacccagtatcatcttcgattgatttgagagttgcgttcagcgcctgacccccggcgtagctcaggccgatgaggctccgaacaccccacaggcgactgtgtcggagcctgcgttggcggcctgcccataccctgcggtatgggacgctcacttcatgacatggtgcgaagagtctactgtgctagtcaagattcctccggcccctgaatgtggataatcctaaccactgatcctacgttcgcaatccagcgttcggtaggtcgtaacgcgcaagtcggtggcggaaccaactactttgggtgtccgtgtttcctttatttcctactgaatgcttatggtgacaattgttttgatcagttgttgccattgctcgcgttcagtgtgtaattacaaaaacaagactatcagttgttaccaccccccacgttcagtgcataatcacaaaaacgagattttctgtcata

SEQ ID NO: 20353 - DNA, 747 bp, synthetic construct
  source 1..747: mol_type = other DNA
cgattttaaaacagcctgtgggttgttccctcccacagggcccaatgggcgccagcacactggtatcatggtacctttgtgcgcctgttttattcaccccctcccaatgtaacgtagaagcataagctaagaggtcaatagatggctcagtacaccaactgggtttagaccaagcacttctgttaccccggaccgagtatcaataggctgctcacgcggctgaaggagaaaacgttcgttacccggccaactacttcgagaagcccagtaccaccatgaaggatgcgcagtgtttcgttcagcacaaccccagtgtagatcaggccgatgagtcaccgcaatccccacgggtgaccgtggcggtggctgcgctggcggcctgcccatgggataacccatgggacgcttcaattccgacatggtgcgaagagtctattgagctagttggtagtcctccggcccctgaatgcggctaatcctaactgcggagcagacgcccacaaaccagtgggctgtttgtcgtaacgggcaactctgcagcggaaccgactactttgggtgtccgtgtttccttttattcttatattggctgcttatggtgacaattgaaagattgttgccatatagctattggattggccatccggtaacaaacagagctattatttacctttttgttggctttgtgccgttgaatttcaaagtcataaaaaccataaacttcattttgacattcaatacagcaaa

SEQ ID NO: 20354 - DNA, 742 bp, synthetic construct
  source 1..742: mol_type = other DNA
ataaaacagcctgtgggttgttcccacccacagggcccactgggcgtttgcacactggtatcgcggtacctttgtgcgcctgttttatccaccctcccctaattgaatttagaagtcaagcacaaccggtcaacagatagcccagcataccagctgggtttcgaccaagcacttctgtttacccgggctgagtatcaataggctgctcacgcggctgaaggagaaaacgttcgttacccggccaattacttcgagaaacctagtaccgccatggacgttgcgcagcgtttcgttccacacaaccccagtgtagatcaggtcgatgagtcaccgcatcccccacgggtgaccgtggcggtggctgcgctggcggcctgcccatggggtaacccatgggacgcttcaatgctgacatggtgcgaagagtctattgagctaattggtagtcctccggcccctgaatgcggctaatcctaactgcggagcagacacccacacgccagtgggcagtctgtcgtaacgggcaactccgcagcggaaccgactactttgggtgtccgtgtttccttttattctttcattggctgcttatggtgacaattgagaggttgttaccatatagctattggattggccatccggtgagcaacagagcaattatatttctttttgttggatatataccacttgactctaataactacaataccctgctttatattctccaattgaatacgaaaag

SEQ ID NO: 20355 - DNA, 742 bp, synthetic construct
  source 1..742: mol_type = other DNA
ataaaacagcctgtgggttgttcccacccacagggcccactgggcgcttgcacactggtatcacggtacctttgtgcgcctgttttatccacccccccctaatcgagtttagaagtcaagcacaactggtcgacaggaagcccagcacaccagctgggttctgaccaagcacttctgtttacccggaccgagtatcaataggctgctcgcgcggctgaaggagaaaacgttcgttacccggccaattacttcgagaaacctagtaccgctatgaacgctgcgcggcgtttcgttccgcacaaccctagtgcagatcaggtcgatgagtcaccgcgttccccacgggtgaccgtggcggtggctgcgctggcggcctgcccatggggtaacccatgggacgcttcaatgctgacatggtgcgaagagtctattgagctaattggtagtcctccggcccctgaatgcggctaatcctaactgcggagcagacactcacacgccagtgggcagtctgtcgtaacgggcaactccgcagcggaaccgactactttgggtgtccgtgtttccttttattcttgcactggctgcttatggtgacaattgaaaggttgttaccatatagctattggattggccatccggtgagcaacagagcaattatatttctatttgttggatatataccatttgattttattaactacaatactctgctttatattctccaattgaatacgaaaag

SEQ ID NO: 20356 - DNA, 742 bp, synthetic construct
  source 1..742: mol_type = other DNA
ataaaacagcctgtgggttgttcccacccacagggcccactgggcgcttgcacactggtatcacggtacctttgtgcgcctgttttatccacccccccctaatcgagtttagaagtcaagcacaactggtcgacaggtagcccagcacaccagctgggttctgaccaagcacttctgtttacccggactgagtatcaataggctgctcgcgcggctgaaggagaaaacgttcgttacccggccaattacttcgagaaacctagtaccgccatgaacgctgcgcggcgtttcgttccgcacaaccctagtgtagatcaggtcgatgagtcaccgcgttccccacgggtgaccgtggcggtggctgcgctggcggcctgcccatggggtaacccatgggacgcttcaatgctgacatggtgcgaagagtctattgagctaattggtagtcctccggcccctgaatgcggctaatcctaactgcggagcagacactcacacgccagtgggcagtctgtcgtaacgggcaactctgcagcggaaccgactactttgggtgtccgtgtttccttttattcttgcactggctgcttatggtgacaattgaaaggttgttaccatatagctattggattggccatccggtgagcaacagagcaattatatttctattcgttggatatataccatttgattttattaactacaatactctgctttatattctccaattgaatacgaaaag

SEQ ID NO: 20357 - DNA, 742 bp, synthetic construct
  source 1..742: mol_type = other DNA
ataaaacagcctgtgggttgttcccacccacagggcccactgggcgcttgcacactggtatcacggtacctttgtgcgcctgttttatccacccccccctaatcgagtttagaagtcaagcacaactggtcgacaggtagcccagcacaccagctgggttctgaccaagcacttctgtttacccggactgagtatcaataggctgcttgcgcggctgaaggagaaaacgttcgttacccggccaattacttcgagaaacctagtaccgccatgaacgctgcgcggcgtttcgttccgcacaaccctagtgtagatcaggtcgatgagtcaccgcgttccccacgggtgaccgtggcggtggctgcgctggcggcctgcccatggggtaacccatgggacgcttcaacgctgacatggtgcgaagagtctattgagctaattggtagtcctccggcccctgaatgcggctaatcctaactgcggagcagacactcacatgccagtgggcagtctgtcgtaacgggcaactccgcagcggaaccgactactttgggtgtccgtgtttccttttattcttgcactggctgcttatggtgacaattgaaaggttgttaccatatagctattggattggccatccggtgagcaacagagcaattatatttctatttgttggatatataccatttggttttattaactacaatactctgctttatattctccaattgaatacgaaaag

SEQ ID NO: 20358 - DNA, 742 bp, synthetic construct
  source 1..742: mol_type = other DNA
ataaaacagcctgtgggttgttcccacccacagggcccactgggcgcttgcacactggtatcacggtacctttgtgcgcctgttttatccacccccccctaatcgagtttagaagtcaagcacaactggtcgacaggtagcccagcacaccagctgggttctgaccaagcacttctgtttacccggactgagtatcaataggctgctcgcgcggctgaaggagaaaacgttcgttacccggccaattacttcgagaaacctagtaccgccatgaacgctgcgcggcgtttcgttccgcacaaccctagtgtagatcaggtcgatgagtcaccgcgttccccacgggtgaccgtggcggtggctgcgctggcggcctgcccatggggtaacccatgggacgcttcaatgctgacatggtgcgaagagtctattgagctaattggtagtcctccggcccctgaatgcggctaatcctaactgcggagcagacactcacacgccagtgggcagtctgtcgtaacgggcaactccgcagcggaaccgactactttgggtgtccgtgtttccttttattcttgcactggctgcttatggtgacaattgaaaggttgttaccatatagctattggattggccatccggtgagcaacagagcaattatatttctatttgttggatatataccatttgattttattaactacaatactctgctttatattctccaattgaatacgaaaag

SEQ ID NO: 20359 - DNA, 742 bp, synthetic construct
  source 1..742: mol_type = other DNA
ataaaacagcctgtgggttgttcccactcacagggcccactgggcgcttgcacactggtatcacggtacctttgtgcgcctgttttatccacccccccctaatcgagtttagaagtcaagcacaactggtcgacaggtagcccagcacaccagctgggttctgaccaagcacttctgtttacccggactgagtatcaataggctgctcgcgcggctgaaggagaaaacgttcgttacccggccaattacttcgagaaacctagtaccgccatgaacgctgcgcggcgtttcgttccgcacaaccctagtgtagatcaggtcgatgagtcaccgcgttccccacgggtgaccgtggcggtggctgcgctggcggcctgcccatggggtaacccatgggacgcttcaatgctgacatggtgcgaagagtctattgagctaattggtagtcctccggcccctgaatgcggctaatcctaactgcggagcagacactcacacgccagtgggcagtctgtcgtaacgggcaactccgcagcggaaccgactactttgggtgtccgtgtttccttttatccttgcactggctgcttatggtgacaattgaaaggttgttaccatatagctattggattggccatccggtgagcaacagagcaattatatttctatttgttggatatataccatttgattttattaactacaatactctgctttatattctccaattgaatacgaaaag

SEQ ID NO: 20360 - DNA, 731 bp, synthetic construct
  source 1..731: mol_type = other DNA
tgtgggttgctcccacctacagggcccactgggcgccagcacactggtattacggtacctttgtgcgcctgttttatccacccctccccactgcaaattagaagataatcacacgcggtcaataggtgacccaacacgccaattgggtcgtgaccaagcacttctgttgccccggaccgagtatcaataagctgctcgcgcggctgaaggagaaaacgttcgttacccggccaattacttcgagaaacctagtaccaccatggaggttgcgcagcgtttcgttccgcacaaccccagtgtagatcaggtcgatgagtcaccgcaatccccacaggcgactgtggcggtggctgcgttggcggcctgcccatggggaaacccatgggacgcttcaatatcgacatggtgcgaagagtctattgagctaattggtagtcctccggcccctgaatgcggctaatcctaactgcggagcagatacccacactccagtgggcagtctgtcgtaatgggtaactctgcagcggaaccgactactttgggtgtccgtgtttccttttattcctatactggctgcttatggtgacaattaacagattgttaccatatagctactggattggccatccggtgacaaacagagcgatcgtttacttatttgttggtttcgtaccactcaattacaaagttttaaacactcttaattttattataaccctaaacacgttaaa

SEQ ID NO: 20361 - DNA, 711 bp, synthetic construct
  source 1..711: mol_type = other DNA
agggcccattgggcgccagcacactggtatcacggtacctttgtgcgcctgttttatacaccctccccgaatgtaacttagaagctttacctagatggtcaatagaaggtccagcacaccagttggattctgaccaagtacttctgttaccccggactgagtatcaataggctgttcacacggctgaaggagaaaacgttcgttacccggccaattacttcgagaaacctagtaacaccatggaagttgcgtagtgtttcgctccgcacaaccccggtgtagatcaggtcgatgagccaccgcgttccccacgggcgaccgtggcggtggctgcgctggcggcctgcccatggggcaacccatgggacgcttcaatactgacatggtgcgaagagtctattgagctaattggtagtcctccggcccctgaatgcggctaatcctaactgcggagcaggcacccgcaagccagtgggcagtctgtcgtaacgggcaactctgcagcggaaccgactactttgggtgtccgtgtttccttttattcttgaactggctgcttatggtgacaattgaaagattgttaccatatagctattggattggccatccagtgacaagtagagcaattatatatctgtttgttggttttgttccattaaactataaagttttaaacacacttgaatttgtcttgctactcaactcaacaaa

SEQ ID NO: 20362 - DNA, 742 bp, synthetic construct
  source 1..742: mol_type = other DNA
tttaaaacagcctgtgggttgttcccacccacagggcccactgggcgctagcactctggtattacggtacctttgtgcgcctgttttacatccctcccccagatgcaacttagaagcagtacaccaagaccaatagtaggcatggcataccagccatgtgtcggtcaagcacttctgtttccccgggctgagtatcaataaactgctcacgtggttgaaggagaaaacgcccgttacccggctaactacttcgagaagcctattaacaccatgaaagttgcggagtgtttcgctcagcacgatcccggtgtagatcaggccgatgagtcaccgcgttccccacaggtgactgtggcggtggctgcgttggcggcctgcccatggtgcaacccatgggacgcttcaatatggacatggtgtgaagagcccattgagctagttagtagtcctccggcccctgaatgcggctaatcccaactgcggagcacgcgcccccgctccagggggtagtgtgtcgtaacgggcaactctgcagcggaaccgactactttgggtgtccgtgtttcctttttccttttcattggctgcttatggtgacaattgaaagattgttaccatatagctattggattggccatccagtgtcaagcagagctataatttaccaatttatagggtttgtcccgttggatctgaaagctttaaaaacccttaacttggtactactattaaacagtgtaaa

SEQ ID NO: 20363 - DNA, 742 bp, synthetic construct
  source 1..742: mol_type = other DNA
tttaaaacagcctgtgggttgttcccacccacagggcctactgggcgccagcactctggtattacggtacctttgtgcgcctgttttacatccctcccccgaatgcaacttagaagcagtacaccaagaccaatagtaggcatggcataccagccatgtgtcggtcaagcacttctgttcccccgggctgagtatcaataaactgctcacgtggttgaaggagaaagcgcccgttacccggctaactacttcgagaagcctattaacaccatgaaagttgcggagtgtttcgctcagcacgatcccggtgtagatcaggccgatgagtcaccgcgttccccacaggtgactgtggcggtggctgcgttggcggcctgcccatggggcaacccatgggacgcttcaatatggacatggtgtgaagagcccattgagctagttagtagtcctccggcccctgaatgcggctaatcccaactgcggagcacgcgcccccgctccagggggtagcgtgtcgtaacgggcaactctgcagcggaaccgactactttgggtgtccgtgtttcctttttccttttcattggctgcttatggtgacaattgaaagattgttaccatatagctattggattggccatccagtgacaagcagagctataacttaccaatttatagggtttgtcccgttggatctgaaagctttaaaaacccttaacttggtactactattgaacagcgtaaa

SEQ ID NO: 20364 - DNA, 742 bp, synthetic construct
  source 1..742: mol_type = other DNA
tttaaaacagcctgtgggttgttcccgctcacagggcccactgggcgctagcactctggtattacggtacctttgtgcgcctgttttacatccctcccccagatacaacttagaagcagtacaccaagaccaatagtaggcatggcaaaccagccatgtatcggtcaagcacttctgttcccccgggctgagtatcaataaactgctcacgtggttgaaggagaaagcgcccgttacccggctaactacttcgagaagcctattaacaccatgaaagttgcggagtgtttcgttcagcacgatcccggtgtagatcaggccgatgagtcaccgcgttccccacaggtgactgtggcggtggctgcgttggcggcctgcccatggggcaacccatgggacgcttcaatatggacatggtgtgaagagcccattgagctagttagtagtcctccggcccctgaatgcggctaatcccaactgcggagcatgcgcccccactccagggggtagcgtgtcgtaacgggcaactctgcagcggaaccgactactttgggtgtccgtgtttccattttccttttcattggctgcttatggtgacaattgaaagattgttaccatatagctattggattggccatccagtgtcaagcagagctataatttaccaatttatagggtttgtcccgttggatctgagagctttaaaaacccttaatttggtactactattaaacagtgtaaa

SEQ ID NO: 20365 - DNA, 714 bp, synthetic construct
  source 1..714: mol_type = other DNA
ttaaaacagcctgtgggttgttcccaccccagaggcccacgtggcggctagtactctggtatcacggtacctttgtacgcctgttttatatcccttccccccgcaactttagaagcttaacaaaagttcaacagcaggggtgcaaaccagtacctctacgaacaagcacttctgtttccccggtgaaattacatagactgtacccacggtcaaaagtgattgatccgttatccgcttgagtacttcgagaagcctagtatcaccttggaatcttcgacgcgttgcgctcaacactctaccccgggtgtagcttaggctgatgagcctgggcactccccaccggtgacggtggcccaggctgcgttggcggcctacccatggctaatgccatgggacgctagttgtgaacaaggtgtgaagagcctattgagctactcaagaatcctccggcccctgaatgcggctaatcctaaccacggagcaatcgctcacgacccagtgagtaggttgtcgtaatgcgcaagtccgtggcggaaccgactactttgggtgtccgtgtttccctttttattcatactggctgcttatggtgacaatttacagattgttaccatatagctattggattggccatccagtattgtgttacacatattaaaatacttttctacaagcaacaacaacattgtgtttgaaccacaatagccattacaa

SEQ ID NO: 20366 - DNA, 718 bp, synthetic construct
  source 1..718: mol_type = other DNA
cccacgtggcggccagtacaccggtatcacggtacccttgtacgcctgttttatactccctttcccctgcaacttagaagcaaataaaccaagttcaatagaaagggggtacaaaccagtaccaccacgaacaagcacttctgtttccccggtgaggttgtataaactgtctccacggttgaaaacgactgatccgttacccgctcttgtacttcgagaagcctagtatcatcttggaatcttcgatgcgttgcgctcagcactcgaccccggagtgtagcttaggctgatgagtctggacgttccccgccggcgacggtggtccaggctgcgttggcggcctacctgtggcccaaagccacaggacgctagttgtgaacagggtgagaagagcctattgagctacaagagagtcctccggcccctgaatgcggctaatcccaaccacggagcaggtggttgcaatccagcaactagcctgtcgtaacgcgcaagtctgtggcggaaccgactactttgggtgtccgtgtttccttttattcttacaatggctgcttatggtgacaatcatagattgttatcataaagcgaattggattggccatccggtgaaagtcagatcaactattcatttgtttgttggaaccactgtgttagctttacttctcatttaaccaattaatcaaaaacaatacgaggataaaacaacaatactaca

SEQ ID NO: 20367 - DNA, 743 bp, synthetic construct
  source 1..743: mol_type = other DNA
tttaaaacagcctgtgggttgttcccacccatagggcccactgggcgttagcacactggtattacggtacccttgtgcgcctgttttattcaccctaccccattgtaacctagaagctgatcaagtacggtcattaggcagctcagtatgccaactgagtcttgaccaagcacttctgttaccccggactgagtatcaataggctgcttgcgcggctgaaggagaaaacgttcgttatccgaccaattacttcgagaaacctagtaccaccatgaaagttgcgcagtgtttcgctccgcacaaccccagtgtagatcaggccgatgagccaccgcattccccacgggcgaccgtggcggtggctgcgttggcggcctgcccatgggtcaacccatgggacgcttcaaaactgacatggtgtgaagagtctattgagctaattggtagtcctccggcccctgaatgcggctaatcctaactgcggagcagatacccacatgccagtgggcagtctgtcgtaacgggcaactctgcagcggaaccgactactttgggtgtccgtgtttccttttatttctatactggctgcttatggtgacaattgagagattgttaccatatagctattggactggccatctggtgacaaacagagcgattgtttacctatttgttggtttcgtaccattgaattttaaagttttaaaaaccctcaaccttgttttagcatttaacgcagcaaa

SEQ ID NO: 20368 - DNA, 743 bp, synthetic construct
  source 1..743: mol_type = other DNA
ttaaaacagcctgtgggttgtacccacccacagggcccactgggcgttagtacactggtatcccggtacctttgtgcgcctgttttgtgttcccttccccatgttgtaacttagaagcgatacaattttggtcgacagttagcgcaacaaaccagttgcgttttgaccaagcacctctgtgatcccggaccgagtatcaataagctgcttgcgcggctgaaggagaaaccgtccgttacccggctaactacttcgagaaacctagtaacaccatgaacgttgcggagtgtttcgctcagcacaacccccgtgtagatcaggccgatgagtcaccgcattccccacgggcgaccgtggcggtggctgcgttggcggcctgcctgtggggcaacccacaggacgctctaatacagacatggtgcgaagagtctattgagctagttagtagtcctccggcccctgaatgcggctaatcctaactgcggagcacatgcccacgaaccagtgggtggtgtgtcgtaacgggtaactctgcagcggaaccgactactttgggtgtccgtgtttcctttatttctatactggctgcttatggtgacaattgagagattgttgccatatagctattggactggccatctggtgtcaaatagagcaattatttacttgtttgctggctttataccctcaaaccttaaagttttcaaaactctcagtctcattttaaaacttaactcagtaaa

SEQ ID NO: 20369 - DNA, 743 bp, synthetic construct
  source 1..743: mol_type = other DNA
ttaaaacagcttgtgggttgttcccacccacagggcccactgggcgctagtacactggtattacggtacctttgtgcgcctgtttgacccaccttccccaaacgcaacttagaagcacaacttaaatggtcattagacggctcagtatgccaactgagtctcgatcaagcacttctgttaccccggactgagtaccaataggctgctcacgcggctgaaggggaaaccgttcgttacccgaccaactacttcgagaaacctagtaccaccatgaaagttgcgcagcgtttcgctccgcacaaccccagtgtagatcaggccgatgagtcaccgcaaaccccacgggcgactgtggcggtggctgcgctggcggcctgcccatgggacaactcatgggacgctacaatactgacatggtgcgaagagtctattgagctagttggtagtcctccggcccctgaatgcggctaatcctaactgtggagcagatacccacgcaccagtgggcagtctgtcgtaatgggcaactccgcagcggaaccgactactttgggtgtccgtgtttctttttattcctacgctggctacttatggtgacaattgagagactgtaaccatattgctatcgggttggccacctggtgaagaatagaacagttgctcacttgtttgtcagtcttgcaccgttgtaccataaagccttaactgcccctcaacaccgtcataacacttaacacgctgaa

SEQ ID NO: 20370 - DNA, 715 bp, synthetic construct; identical to SEQ ID NO: 883
  source 1..715: mol_type = other DNA

SEQ ID NO: 20371 - DNA, 713 bp, synthetic construct
  source 1..713: mol_type = other DNA
ttaaaacagctctggggttgttcccaccccagaggcccacgtggcggctagtactctggtattacggtacctttgtacgcctgttttgtatcccttcccccgtaactttagaagcttatcaaaagttcaatagcaggggtacaaaccagtacctctacgaacaagcacttctgtttccccggtgatatcacatagactgtacccacggtcaaaagtgattgatccgttatccgcttgagtacttcgagaagcctagtatcaccttggaatcttcgatgcgttgcgctcaacactctgccccgagtgtagcttaggctgatgagtctgggcactccccaccggcgacggtggcccaggctgcgttggcggcctacccatggctgatgccgtgggacgctagttgtgaacaaggtgtgaagagcctattgagctactcaagagtcctccggcccctgaatgcggctaatcctaaccacggagcaaccgctcacaacccagtgagtaggttgtcgtaatgcgtaagtctgtggcggaaccgactactttgggtgtccgtgtttccctttatattcatactggctgcttatggtgacaatttacaaattgttaccatatagctattggattggccacccagtattgtgcaatatatttgagtgtttctttcataagccttattaacatcacatttttaatcacaataaacagtgcaa

SEQ ID NO: 20372 - DNA, 718 bp, synthetic construct
  source 1..718: mol_type = other DNA
acccacagggcccactgggcgctagtacactggtatcacggtacctttgtgcgcctgtttgacccaccttccccaaacgcaacttagaagcacaacttaaatggtcattagacggctcagtatgccaactgagtctcgatcaagcacttctgttaccccggactgagtaccaataggctgctcacgcggctgaaggggaaaccgttcgttacccgaccaactacttcgagaaacctagtaccaccatgaaagttgcgcagcgtttcgctccgcacaaccccagtgtagatcaggccgatgagtcaccgcaaaccccacgggcgactgtggcggtggctgcgctggcggcctgcccatgggacaactcatgggacgctacaatactgacatggtgcgaagagtctattgagctagttggtagtcctccggcccctgaatgcggctaatcctaactgtggagcagatacccacgcaccagtgggcagtctgtcgtaatgggcaactccgcagcggaaccgactactttgggtgtccgtgtttctttttattcctacgctggctacttatggtgacaattgagagactgtaaccatattgctatcgggttggccacctggtgaagaatagaacagttgctcacttgtttgtcagtcttgcaccgttgtaccataaagccttaactgcccctcaacaccgtcataacacttaacacgctgaa

SEQ ID NO: 20373 - DNA, 743 bp, synthetic construct
  source 1..743: mol_type = other DNA
ttaaaacaggcctgtgggttgttcccacccacagggcccactgggcgttagcacactggtatcacggtacccttgtgcgcctgttttatctaccctaccctattgtaacttagaagctaaccaagtacggtcattaggcagctcagtatgccaactgagttttgaccaagcacctctgttaccccggactgagtatcaataggctgcttgcgcggctgaaggagaaaacgttcgttacccgaccaattacttcgagaaacccagtatcaccatggaagttgcgcagtgtttcgctccacacaaccccagtgtagatcaggccgatgagtcaccgcattccccacgggcgaccgtggcggtggctgcgctggcggcctgcccatgggtcaacccatgggacgcttcaaaactgacatggtgtgaagagtctattgagctaattggtagtcctccggcccctgaatgcggctaatcctaactgcggagcagatacccacacgccagtgggcggtctgtcgtaacgggcaactctgcagcggaaccgactactttgggtgtccgtgtttccttttatccctatactggctgcttatggtgacaattgagagattgttaccatatagctattggattggccatccggtgacaaacagagcgattatttacctatttgttggttttgtaccattaaattttaaagttttgaaaactctcaaccttgttttggaatttaacgcagcaag

SEQ ID NO: 20374 - DNA, 713 bp, synthetic construct
  source 1..713: mol_type = other DNA
ttaaaacagcctgtgggttgttcccaccccagaggcccacgtggcggctagtactctggtattacggtacctttgtacgcctgttttgtatcccttcccccgtaactttagaagcttatcaaaagttcaatagcaggggtacaaaccagtacctctacgaacaagcacttctgtttccccggtgatatcacatagactgtacccacggtcaaaagtgattgatccgttatccgcttgagtacttcgagaagcctagtatcaccttggaatcttcgatgcgttgcgctcaacactctgccccgagtgtagcttaggctgatgagtctgggcactccccaccggcgacggtggcccaggctgcgttggcggcctacccatggctgatgccgtgggacgctagttgtgaacaaggtgtgaagagcctattgagctactcaagagtcctccggcccctgaatgcggctaatcctaaccacggagcaaccgctcacaacccagtgagtaggttgtcgtaatgcgtaagtctgtggcggaaccgactactttgggtgtccgtgtttccctttatattcatactggctgcttatggtgacaatttacaaattgttaccatatagctattggattggccacccagtattgtgcaatatatttgagtgtttctttcataagccttattaacatcacatttttaatcacaataaacagtgcaa

SEQ ID NO: 20375 - DNA, 712 bp, synthetic construct
  source 1..712: mol_type = other DNA
ttaaaacagcctgtgggttgttcccaccccagaggcccacgtggcggctagtactctggtatcacggtacctttgtacgcctgttttatatcccttcccccgcaactttagaagcttaacaaaagttcaacagcaggggtacaaaccagtgcctctacgaacaagcacttctgtctccccggtgagaacacatagactgtacccacggtcaaaagtgattgatccgttatccgcttgagtacttcgagaagcctagtatcaccttggaatcttcgacgcgttgcgctcaacactctaccccgggtgtagcttaggctgatgagtctgggtactccccaccggtgacggtgacccaggctgcgttggcggcctacccatggctaatgccatgggacgctagttgtgaacaaggtgtgaagagcctattgagctactcaagaatcctccggcccctgaatgcggctaatcttaaccacggagcaatcgctcacgacccagtgagtaggttgtcgtaatgcgtaagtccgtggcggaaccgactactttgggtgtccgtgtttcctttttattcatattggctgcttatggtgacaatttacagattgttaccatatagctattggattggccatccagtattgtgttacacatattaaaatacttttctacaagcaataacaacattgtatttgaaccacaatagccattacaa

SEQ ID NO: 20376 - DNA, 712 bp, synthetic construct
  source 1..712: mol_type = other DNA
ttaaaacagcctgtgggttgttcccgccccagaggcccacgtggcggctagtactctggtatcacggtacctttgtacgcctgttttatatcccttccccgcaactttagaagcttaacaaaagttcaacagcaggggtacaaaccagtgcctctacgaacaagcacttctgtttccccggtgaaatcacatagactgtacccacggtcaaaagtgattgacccgttatccgcttgagtacttcgagaagcctagtatcaccttggaatcttcgacgcgttgcgctcaacactctaccccgagtgtagcttaggctgatgagtctgggcactccccaccggtgacggtggcccaggctgcgttggcggcctacccatggctaatgccatgggacgctagttgtgaacaaggtgtgaagagcctattgagctactcaagagtcctccggcccctgaatgcggctaatcctaaccacagagcaatcgctcacgacccagtgagtaggttgtcgtaatgcgtaagtccgtggcggaaccgactactttgggtgtccgtgtttccttttttattcatactggctgcttatggtgacaatttacagattgttaccatatagctattggattggccatccagtactgtgttatatacatcagaatacttttctacaagtaacatcaacattgtatttgaaccacaatagccattacaa

SEQ ID NO: 20377 - DNA, 732 bp, synthetic construct
  source 1..732: mol_type = other DNA
cctgtgggttgatcccacccacagggcccattgggcgctagcacactggtatcacggtacctttgtgcgcctgttttatctacccttcccaatgcaacttagaagcatgcaacaaacggtcaataggcggttcagtgaaccaactgagcctcgaccaagtacttctgttaccccggactgagtatcaataggctgctcacgtggctgatggagaaaacgtccgttacccggccaattacttcgagaaacctagtaccaccatgaaggttgcgcagcgtttcgctccgcacaaccccagtgtagatcaggtcgatgagtcactgcgctccccacgggcgaccgtggcggtgactgcgttggcggcctgcccatggggcatcccatgggacgcttcaatactgacatggtgtgaagagtctattgagctaattggtagtcctccggcccctgaatgcggctaatcctaactgcggagcagatacccacgcaccagtgggcagtctgtcgtaacgggcaactctgcagcggaaccgactactttgggtgaccgtgtttccttttattctaatgctggctgcttatggtgacaattgaaagattgttaccatatagctattggattggccatccggtaacaaacagagcaattatttacctgtttattggttttatacctctcaactacaaggttataaatactcttaactttattttagcacttaacacagcaaa

SEQ ID NO: 20378 - DNA, 722 bp, synthetic construct
  source 1..722: mol_type = other DNA
ttcccacccacagggcccattgggcgccagcacactggtatcacggtacctttgtgcgcctgttttatacaccctccccgaatgcaacttagaagctttacctagatggtcaatagaaggtccagcacaccagttggattccgaccaagcacttctgttaccccggactgagtatcaataggccgtttgcacggctgaaggagaaaacgttcgttacccggccaattacttcgagaaacctagtaacaccattaaagttgcgcagtgtttcgctccacacgaccccggtgtagatcaggtcgatgagtcaccgcgttccccacgggcgaccgtggcggtggctgcgctggcggcctgcccatggggcaacccatgggacgcttcaatactgacatggtgcgaagagtctattgagctaattggtaatcctccggcccctgaatgcggctaatcctaactgcggagcaggcaccctcaagccagagggcagtctgtcgtaacgggcaactctgcagcggaaccgactactttgggtgtccgtgtttccttttattcttgaactggctgcttatggtgacaattggaagattgttaccatatagctattggattggccatccagtgacaaacagagcgattatatatttgtttgttggctttgttccattaaactataaagctttaaacacacttaaatttgtcttactactcaactcagcaaa

SEQ ID NO: 20379 - DNA, 713 bp, synthetic construct
  source 1..713: mol_type = other DNA
ttaaaacagctctggggttgttcccaccccagaggcccacgtggcggctagtactctggtatcacggtacctttgtacgcctgttttatatcccttcccccgtaactttagaagtttaacaaaagttcaatagcaggggtgcaaaccagtacctccacgaacaagcacttctgtctccccggtgaagtcacatagactgtacccacggtcaaaagtgattgatccgttatccgcttgagtacttcgagaagcctagtaccaccttgggatcttcgatgcgttgcgctcaacactataccccgagtgtagcttaggctgatgagtctgggcgtcccccaccggtgacggtggcccaggctgcgttggcggcctacccatggctaacgccacgggacgctagttgtgaacaaggtgtgaagagcctattgagctactcaagagtcctccggcccctgaatgcggctaatcccaaccacggagcaatcgctcacgacccagtgagtaggttgtcgtaatgcgcaagtccgtggcggaaccgactactttgggtgtccgtgtttccctttttacttatactggctgcttatggtgacaatttacagattgttaccatatagctattggattggccatccagtattgtgttacatatattaaaatactttactacaagcaacaacaacattgtgtttgaaccacaatagctactaaga

SEQ ID NO: 20380 - DNA, 742 bp, synthetic construct
  source 1..742: mol_type = other DNA
ttaaaacaccctgtgggttgttcccacccacagggcccatagggcgctagcacactggtattgcggtacctttgtgcgcctgttttattcatccttccccaatggaacttagaagcttaactcaaccggtcaatagacagcccagtacaccaactgggttacgaccaggcactcctgtttccccggactgagtatcaataagctgctcacgcggctgaaggagaaaacgttcgttacccggccaattacttcgagaaacctagtaccgccatggacgttgcgcagtgtttcgctccgcacaaccccagtgtagatcaggtcgatgagtcaccgcgatcctcacgggcgaccgtggcggtggctgcgctggcggcctgcccatggggcaacccatgggacgcttcaatactgacatggtgtgaagagtctatcgagctaattggtagtcctccggcccctgaatgcggctaatcctaactgcggggcagatacccacacgccagtgggcagtctgtcgtaacgggcaactccgcagcggaaccgactactttgggtgtccgtgtttccttttattcttatattggctgcttatggtgacaattgaaagattgttgccatatagctattggattggccatccagtcagtaatagagcaattatatttctttttgttgggtttgtaccacttgatattaacaattataacaccttactatacatcgtccatttgaacacaagaaa

SEQ ID NO: 20381 - DNA, 713 bp, synthetic construct
  source 1..713: mol_type = other DNA
ttaaaacagctctggggttgttcccaccccagaggcccacgtggcggctagtactctggtatcacggtacctttgtacgcctgttttatatcccttcccccgcaactttagaagcttaacaaaagttcaatagcaggggtgcaagccagtacctctatgaacaagcacttctgtctccccggtgaaattacatagactgtacccacggtcaaaagtaattgatccgttatccgcttgagtacttcgagaagcctagtatcaccttggaatcttcgacgcgttgcgctcaacactctaccccgggtgtagcttaggctgatgagtctgggcaccccccaccggtgacggtggcccaggctgcgttggcggcctacccatggctaacgccatgggacgctagttgtgaacaaggtgtgaagagcctattgagctactcaagagtcctccggcccctgaatgcggctaatcccaaccacggagcaattgctcacgatccagtgagtaggttgtcgtaatgcgcaagttcgtggcggaaccgactactttgggtgtccgtgtttccctttttacttatactggctgcttatggtgacaatttacagattgttaccatatagctattggattggccatccagtattgtgttacacatattaaaatacttttctacaagcatcaacaacattgtgtttggaccacaataatcactacaa

SEQ ID NO: 20382 - DNA, 731 bp, synthetic construct
  source 1..731: mol_type = other DNA
tgtgggttgtacccacccacagggcccattgggcgtcagcaccctggtatcacggtacctttgtgcgcctgttttatatcccttcccccaattgtaacttagaagaaacacacaccgatcaacagcaagcgtggcacaccagccatgttttggtcaagcacttctgttaccccggactgagtatcaatagactgctcacgcggttgaaggagaaagcgtccgttatccggccagctacttcgagaaacctagtaacaccatggaagttgcggagtgtttcgctcagcactaccccagtgtagatcaggtcgatgagtcaccgctttccccacgggcgaccgtggcggtggctgcgttggcggcctgcctatgggggaacccataggacgctctaatacagacatggtgcgaagagtctattgagctagctggtattcctccggcccctgaatgcggctaatcctaactgtggagcacatgcccctaatccaaggggtagtgtgtcgtaatgagcaattccgcagcggaaccgactactttgggtgtccgtgtttcctcttattcttgtactggctgcttatggtgacaattgagagattgttaccatatagctattggattggccatccggtgactaatagagctattgtgtatctctttgttggatttgtaccacttaatttgaaagaaatcaggacactacgctacattttactattgaacaccgcaaa

SEQ ID NO: 20383 - DNA, 726 bp, synthetic construct
  source 1..726: mol_type = other DNA
tttgatcccacccacagggcccatagggcgctagcactctggtattgcggtacctttgtgcgcctgttttatattcccacccccaatcgcaacttagaagcagtacttcacgaccaacagtgggcgtgacaaaccagccacgtctcggtcaagcacttctgtctccccggactgagtatcaataagctgctcacgcggctgagggagaaaacgtccgttatccggccgattacttcgagaaacccagtaccaccacgaaagttgcgcagcgtttcgatccgcacaaccccagtgtagatcaggtcgatgagtcaccgcgttccccacgggtgaccgtggcggtggctgcgttggcggcctgcccatgggggaacccatgggacgcttcaatactgacatggtgtgaagagtctattgagctaattggtagtcctccggcccctgaatgcggctaatcctaactgtggagcagattcccgcatgccagcgggtggtctgtcgtaacgggcaactctgcagcggaaccgactactttgggtgtccgtgtttccctttaatcctatattggctgcttatggtgacaattgagagattgttaccatatagctattggattggccatccggtgacaaacagagcaattatttaccaatttattggttttgtgccattgaatttcaacgcattcaaaactcttaaccttattttgactcttaatacagcaaa

SEQ ID NO: 20384 - DNA, 720 bp, synthetic construct
  source 1..720: mol_type = other DNA
ccactcacagggcccactgggcgttagctcactggtattgcggtacctttgtgcgcctgttttatacaccctctccccatattaacttagaagtacattttatatgatcaataggcggctcagtatgccaactgagtctcgatcaagcacttctgttgtcccggaccgagtatcaataagctactcacgtggctgaaggagaaaacgttcgttacccggccagctacttcgagaaacctagtaccaccatgaatgttgcgcggcgtttcgctccgcactaccccagtgtagatcaggtcgatgagtcaccgcactcctcacgggcgaccgtggcggtggctgcgctggcggcctgcccgtggggcaacccatgggacgcttcaatacagacatggtgtgaagagtctattgagctagttggtagtcctccggcccctgaatgcggctaatcctaactgcggagcagatccccacaagccagtgggcagtctgtcgtaatgggcaactctgcagcggaaccgactactttgggtgtccgtgtttccttttattcttatactggctgcttatggtgacaattgaaggattgttgccatatagctattggattggccatccggtgtctaacagagcaataatttatctttttgttggattcgtcccacttaaccacagagcacttgcaacgctcaattacatcatagatctcaacacaacaaa

SEQ ID NO: 20385 - DNA, 812 bp, synthetic construct
  source 1..812: mol_type = other DNA
ttaaaacagcctgggggttgtacccacccctggggcccacgtggcgctagtactctggtttgcttaaaacctttgtacgcctgttttcccctcccttaaataaattaagatctctgccaatgtggggagtagtccgactccgcaccgatacgtcgcaccagcagaccggttcgcataggacccttctgcggattggtatgagtacccccccgaaacttagaagttattacacaccgaccaatagcggcgttgcagccggcagcgcaacggtcaagcacttctgtttccccggcgccaagcgtcgttacccgcccagcctactacgggaagcctagtatggtcccaatcaattgcgcagttgcgttcagccacaaccccagtggtagctctgaggaatggggctcgcctcccccccacagtaatgtggtggcctgcccgcgcgtgtcctcgggttcactcctagagtgttcactgcaattttgagtaagatccgaagagcctactgtgctaggttggttttcctccggagccgtgaatgctgctaatcccaacctccgagcgtgtgcgcacaatccagtgttgctacgtcgtaacgcgtaagttggaggcggaacagactactttcggtactccgtgtttccttattttatttacttattttatggtgacactgactgatatttgtgagtttgctcggctgcccttgaatattgctttgtactatttaatagcatttcacagaactactcagctttcaattgagcttattgacttcgctgtctttcttaatcagatacacaaaaccacacata

SEQ ID NO: 20386 - DNA, 711 bp, synthetic construct
  source 1..711: mol_type = other DNA
ttaaaacagcctgtgggttgttcccaccccagaggcccacgtggcggctagtactctggtatcacggtacctttgtacgcctgttttatatcccctcccccgcaactttagaagcttaataaaagttcaacagcaggggtacaaaccagtgcctctacgaacaagcacttctgtttccccggtgaaatcacatagactgtacccacggtcaaaagtgatcgatccgttatccgcttgagtacttcgagaagcctagtatcaccttggaatcttcgacgcgttgcgctcaacactctaccccgagtgtagcttaggctgatgagtctgggcactccccaccggtgacggtggcccaggctgcgttggcggcctacccacggctaatgccgtgggacgctagttgtgaacaaggtgtgaagagcctattgagctgctcaagagtcctccggcccctgaatgcggctaatcctaaccatggagcaatcgctcacgacccagtgagtaggttgtcgtaatgcgtaagtccgtggcggaaccgactactttgggtgtccgtgtttccctttttattcatactggctgcttatggtgacaacttacagattgttaccatatagctattggattggccatccagtattgtgttatatatcagaatacttttctataagtaacaccaacattgtatttggaccacaataatcattacaa

SEQ ID NO: 20387 - DNA, 722 bp, synthetic construct
  source 1..722: mol_type = other DNA
ttcccacccacggggcccattgggcgccagcacactggtatcacggtacctttgtgcgcctgttttatacaccctccccgaatgtaacttagaagctttacccagatggtcaatagaaagtccagcacaccagttggattctgaccaagcacttctgttaccccggactgagtatcaataggctgttcacacggctgaaggagaaaacgttcgttacccggccaattacttcgagaaacctagtaacaccatgggagttgcgcagtgtttcgctccgcacaaccccagtgtagatcaggtcgatgagccaccgcgttccccacgggcgaccgtggcggtggctgcgctggcggcctgcccatggggcaacccatgggacgcttcaatactgacatggtgcgaagagtctattgagctaattggtagtcctccggcccctgaatgcggctaatcctaactgcggagcaggcacccgcaagccagtgggcagtctgtcgtaacgggcaactctgcagcggaaccgactactttgggtgtccgtgtttccttttattcttgaactggctgcttatggtgacaattgaaggattgttaccatatagctattggattggccatccagtgacaaatagagcaattatatatctgtttgttggttttgttccattaaactataaagttttgaacacacttgaatttgttatactactcaactcaacaaa

SEQ ID NO: 20388 - DNA, 722 bp, synthetic construct
  source 1..722: mol_type = other DNA
ttcccacccacagggcccattgggcgctagcacactggtattacggtacctttgtgcgcctgttttatacaccctccccgaatgtaacttagaagctttacctagatggtcaatagaaggtccagcacaccagctggattccgaccaagcacttctgttaccccggactgagtatcaataggctgtttgcacggctgaaggagaaaacgttcgttacccggccaattacttcgagaaacctagtaacaccatggaagttgcgcagtgtttcgttccgcacgaccccggtgtagatcaggccgatgagccaccgcgttccccacgggcgaccgtggcggtggctgcgctggcggcctgcccatggggcaacccatgggacgcttcaatactgacatggtgcgaagagtctattgagctaattggtagtcctccggcccctgaatgcggctaatcccaactgcggagcaggcaccctcaagccagagggcagtctgtcgtaacgggcaactctgcagcggaaccgactactttgggtgtccgtgtttccttttatccttgaactggctgcttatggtgacaattgaaagattgttaccatatagctattggattggccatccagtgacaaatagagcaattatatatctgtttgttggttttgtgccattaaactataaagttttaaacacgcttaaatttgtcttactactcaactcagcaaa

SEQ ID NO: 20389 - DNA, 743 bp, synthetic construct
  source 1..743: mol_type = other DNA
tttaaaacagcctgtgggttgttcccacccacagggcccaatgggcgctagcacactggtatcatggtacctttgtgcgcctgttttattcacccccacccaatgtaacgtagaagcataagccaagaggtcaatagatggctcagtacaccaactgggtttagaccaagcacttctgttaccccggaccgagtatcaataggctgctcacgcggctgaaggagaaaacgttcgttacccggccaactacttcgagaagcccagtaccaccatgaaggatgcgcagtgtttcgttcagcacaaccccagtgtagatcaggccgatgagccaccgtaatccccacgggcgaccgtggcggtggctgcgctggcggcctgcccatggggcaacccatgggacgcttcaattccgacatggtgcgaagagtctattgagctagttggtagtcctccggcccctgaatgcggctaatcctaactgcggagcagacacccacaaaccagtgggctgtttgtcgtaacgggcaactccgcagcggaaccgactactttgggtgtccgtgtttccttttattcttatattggctgcttatggtgacaattgaaagattgttgccatatagctattggattggccatccggtaacaaacagagctattatttacctttttgttggctttgtgccgttgaatttcaaagttataaaaaccataaacttcattttgacactcaatacagcaaa

SEQ ID NO: 20390 - DNA, 744 bp, synthetic construct
  source 1..744: mol_type = other DNA
ttaaaacagccccgtgggttgttcccacccacagggcccaccgggcgctagcacactggtatctcggtacctttgtgcgcctgttttatccacccttttcccatttaatttagaagcacgcgccaagacggtcaatagggagcccagtaagccaattgggctatgaccaagcacttctgtaaccccgggctgagtatcaataagctgctcgcgtggctgaaggagaaaaagctcgttacccggccaattacttcgagaaacccagtagcatcatgaaagttgcgcagtgtttcgctccacacaaccccagtgtagatcaggccgatgagtcaccgcgttccccacgggtgaccgtggcggtggctgcgctggcggcctgcccatggggccacccatgggacgcttcaatactgacatggtgtgaagagtctattgagctaattggtagtcctccggcccctgaatgcggctaatcctaactgcggagcagatgcccacgcaccagtggggagtctgtcgtaacgggtaactctgcagcggaaccgactactttgggtgtccgtgtttccttttatttctactctggctgcttatggtgacaattgaaaggttgttaccatatagctattggattggccatccggtgacaaatagagcgattatttacttgtttgttgggtttgtgccactgaactacaaagctttaaacactcttaactacattttaatccttaactcattaaa

SEQ ID NO: 20391 - DNA, 716 bp, synthetic construct
  source 1..716: mol_type = other DNA
ccacagggcccaccgggcgtcagcacactggtattgcggtacctttgtgcgcctgttttatatatccctacccgaacgtaacctagaagcaaattaatgaggatcgatagtcagcacggcacaccagccgtgttttgatcaagcacttctgttaccccggaccgagtatcaataggctactcacgtggccgaaggagaaagtgttcgttacccggccaattacttcgagaaacccagtaacaccatgaaggttgcgcagcgtttcgctccgcacaaccccagtgtagatcaggtcgatgagtcaccgcattccccacgggcgaccgtggcggtggctgcgctggcggcctgcccatagggtgacctatgggacgcttcaatactgacatggtgcgaagagtctattgagctaattggtagtcctccggcccctgaatgcggctaatcctaactgcggagcaggtgcccacaaaccagtgggtagtctgtcgtaatgggcaactctgcagcggaaccgactactttgggtgtccgtgtttccttttattcttatactggctgcttatggtgacaattgaaaggttgttaccatatagctattggattggccatccggtgacaaacagagcgattatatacttgtttgttggtttcataccactaaatcacaagactttaaacacccttaatttcataatagcattaaatacagcaag

SEQ ID NO: 20392 - DNA, 726 bp, synthetic construct
  source 1..726: mol_type = other DNA
ttcccacccacagggcccactgggcgctagcacactggtatcacggtacctttgtgcgcctgttttaggcttcctcccccactatagtaaattagaagcttgaactacacggccaacagacaacccggtacaccaaccgggccccggccaagcacttctgtatccccggactgagtatcagtaggctgctcgcgcggctgaaggagaaaacgttcgttacccggccacttacttcgagaaacctagtaacgccatgaaagttgcgtagcgtttcgctccgcacaaacccagtgtagatcaggtcgatgagtcaccgcatcccccacgggcgaccgtggcggtggctgcgttggcggcctgcccatggggtaacccatgggacgcttcaatactgacatggtgcgaagagtctattgagctaagtggtaatcctccggcccctgaatgcggctaatcctaactgcggagcagatacccacactccagtgggcagtctgtcgtaacgggtaactctgcagcggaaccgactactttgggtgtccgtgtttccttttgtcttttatactggctgcttatggtgacaattgaaagattgttaccatatagctattggattggccatccggtgtcaaacagagcaattatttacttgtttgttggttatatacctctcgacaccaaggttctaaaaacactcaactacatcttgttattgaatacgttgaa

SEQ ID NO: 20393 - DNA, 743 bp, synthetic construct
  source 1..743: mol_type = other DNA
ttaaaacagcctgtgggttgctcccacccacagggcctactgggcgctagcacactggtatcacggtacctttgtgcgcctgttttatctacccttccccagagaaacttagaagcttaacttgaacggtcaacaggaaacccagcataccagctgggtcgtgaccaagcacttctgtaaccccggaccgagtatcaataagctgctcacgcggctgaaggagaaaacgttcgttacccggccaattacttcgagaaacccagtaccaccatgaacgttgcgcagtgtttcgctccgcacaaccccagtgtagatcaggccgatgagtcaccgcattccccacgggcgaccgtggcggtggctgcgctggcggcctgcccatggggcaacccatgggacgcttcaatactgacatggtgtgaagagtctattgagctaattggtagtcctccggcccctgaatgcggctaatcccaactgcggagcagatacccgcatgccagcgggcagtctgtcgtaacgggcaactctgcagcggaaccgactactttgggtgtccgtgtttcctattattttttacactggctgcttatggtgacaattgagagattgttaccatatagctattggattggccatccggtatctaacagagcaatcatttatctgtttgttggattcatacccttaaattttaaagttctcaaaacattacaattcattatacaactgaatacagcaaa

SEQ ID NO: 20394 - DNA, 742 bp, synthetic construct
  source 1..742: mol_type = other DNA
ttaaaacagcctgtgggttgatcccacccacagggcccactgggcgctagcacactggtattacggtacctttgtgcgcctgttttatctacccttgcccaatgcaacatagaagcttagtccaaaaggtcaataggcagcccagtgcaccaactgggtccagaccaagcacttctgttaccccggaccaagtatcagtaggctgctcacgcggtgaaggagaaaacgttcgttacccggccaactacttcgagaaacctagtagcaccatgaaggttgcgcagtgtttcgctccgcacagccccagtgtagatcaggtcgatgagccaccgcattccccacggggtgaccgtggcgggtggctgcgttggcggcctgcccatggggtaacccatgggacgcttcaatactgacatggtgtgaagagtctattgagctagttggtagtcctccggcccctgaatgcggctaatcctaactgcggagcgtgcgcttgcaacccagtgagtagcacgtcgtaatgggtaactctgcagcggaaccgactactttgggtgtccgtgtttcctttattccttgtctggctgcttatggtgacaattgagagattgttgccatatagctattggattggccatccggtatctaacagggcgatcatttacctgtttgttggtttcatacccttgaatcttgaggtttataataccctcactcttataataaaactcaatacatcaag

SEQ ID NO: 20395 - DNA, 745 bp, synthetic construct
  source 1..745: mol_type = other DNA
ttaaaacagcctgtgggttgttcccacccacagggcccactgggcgctagcacactggtatcccggtacctttgtgcgcctgttttatctacccctccccccaatcgtaacttagaagttcatcacacgtggtcaataggtggctcagtatgccaactgggttctgaccaagcacttctgttaccccggaccaagtatcaataggctgctcacgcggctgaaggagaaaacgttcgttatccggccaattacttcgagaaacctagtaccaccatggaggttgcgcagcgtttcgctccgcacaaccccagtgtagatcaggccgatgagtcaccgcactcctcacgggcgaccgtggcggtgactgcgttggcggcctgcccatggggcaacccatgggacgcttcaatactgacatggtgcgaagagtctattgagctaattggtattcctccggcccctgaatgcggctaatcctaactgcggagcagatacccacatgccagtgggcagtctgtcgtaacgggtaactctgcagcggaaccgactactttgggtgtccgtgtttccttttattcttatattggctgcttatggtgacgattgagagattgttaccatatagctattggattggccatccggtgacaaacagagcaattgtttatctatttgttggtttcataccattaaattttaaagtcttgagaaccattaacttgattatactattcaattcagcaaa

SEQ ID NO: 20396 - DNA, 743 bp, synthetic construct
  source 1..743: mol_type = other DNA
ttaaaacagcctgtgggttgtacccacccacagggcccactgggcgctaccacactggtatcccggtacctttgtgcgcctgttttatccacccccaccctgaggcaacatagaagcataccactaaaggtcaataggcgatccagtactccaactgggtttggaccaagcacttctgttaccccggaccgagtaccaataagctgctcgcgtggctgaaggggaaagtgttcgttacccgaccaattacttcgaaaaacctagtaccaccatgaaagttgcgcagcgtttcgctccgcacaaccccagtgtagatcaggctgatgagtccccgcattccccacgggcgaccgtggcggtggctgcgttggcggcctgcccatggggcaacccgtgggacgcttcaacactgacatggtgtgaagagtctattgagctaattggtagtcctccggcccctgaatgcggctaatcctaactgcggagcagatacccacacgccagtgggcagtctgtcgtaacgggcaactctgcagcggaaccgactactttgggtgtccgtgtttcctttttattttacactggctgcttatggtgacaattgagagattgttaccatatagctattggattggccatccggtgacaagtagagcaattatctacctgtttgttggttttgttccattaaattttaaagttctaagaacccttaactttatcttagtactcaatacggcaaa

SEQ ID NO: 20397 - DNA, 738 bp, synthetic construct
  source 1..738: mol_type = other DNA
aacagcctgtgggttgttcccacccacagggcccactgggcgcttgcacactggtatcacggtacctttgtgcgcctgttttatccacccccccctaatcgagtttagaagtcaagcacaactggtcgacaggtagcccagcacaccagctgggttctgaccaagcacttctgtttacccggactgagtatcaataggctgctcgcgcggctgaaggagaaaacgttcgttacccggccaattacttcgagaaacctagtaccgccatgaacgctgcgcggcgtttcgttccgcacaaccctagtgtagatcaggtcgatgagtcaccgcgttccccacgggtgaccgtggcggtggctgcgctggcggcctgcccatggggtaacccatgggacgcttcaatgctgacatggtgcgaagagtctattgagctaattggtagtcctccggcccctgaatgcggctaatcctaactgcggagcagacactcacacgccagtgggcagtctgtcgtaacgggcaactccgcagcggaaccgactactttgggtgtccgtgtttccttttattcttgcactggctgcttatggtgacaattgaaaggttgttaccatttagctattggattggccatccggtgagcaacagagcaattatatttctatttgttggatatataccatttgattttattaactacaatactctgctttatattctccaattgaatacgaaaag

SEQ ID NO: 20398 - DNA, 725 bp, synthetic construct
  source 1..725: mol_type = other DNA
gttcccacccacagggcctactgggcgctagcacactggtatcacggtacctttgtgcgcctgttttataatccctccccccggacgcaacttagaagctgaacctaagcggtcaacaggcggctcagaacaccatctgggtctcgaccaagcacttctgtttccccggactgagtatcaataagctgcctacgcggctgaaggaaaaaacgtccgttatccggccaattacttcaagaaacccagtaccaccatgaaggttgcgcagcgtttcgctccgcacaaccccagtgtagatcaggtcgatgagtcaccgcattcctcacgggcgaccgtggcggtggctgcgctggcggcctgcccatggggcaacccatgggacgcttcaatactgacatggtgcgaagagtcaattgagctaattggtagtcctccggcccctgaatgcggctaatcctaactgtggagcagatgcccacgtaccagtgggtagtctgtcgtaacgggcaactccgcagcggaaccgactactttgggtgtccgtgtttctctttattcttatgttggctgcttatggtgacaattgagagattgttaccatatagctattggattggccatccagtgacgaatagagcgattgtatatctttttgttggattcgtaccattaaacaaaacaaattacaaaaccttgtgttacattattagattaaacacagcaaa

SEQ ID NO: 20399 - DNA, 742 bp, synthetic construct
  source 1..742: mol_type = other DNA
ttaaaacagctctggggtggttcccaccccagaggcccacgtggcggccagtactccggtattgcggtacccttgtacgcctgttttatactcccttcccccgtaacttagaagaaataaaccaagttcactaggagggggtacaaaccagtaccaccacgaacaagcacttctgtttccccggtgacattgcatagactgtacccacggttgaaagcgactgatccgttacccgctactgtacttcgagaagcctagtaccatcttggaatcttcgatgcgttgcgctcagcactcaaccccagagtgtagcttaggtcgatgagtctggacaatccccaccggtgacggtggtccaggctgcgttggcggcctacctgtggcccaaagccacaggacgctagttgtgaacaaggtgtgaagagcctattgagcttcagtagagtcctccggcccctgaatgcggctaatcccaaccacggagcaggtggtcataatccaatgactggcctgtcgtaacgcgcaagtctgtggcggaaccgactactttgggtgtccgtgtttccttttattttgtcaatggctgcttatggtgacaatctaagattgccatcatatagcttttggattggccatccggtattattttgagttatttgatttgttgtccacagctctttacagtatcacttaactattattgtttgtattttgctccttggatcacaaccaggtaatcaga

SEQ ID NO: 20400 - DNA, 743 bp, synthetic construct; identical to SEQ ID NO: 1049
  source 1..743: mol_type = other DNA

SEQ ID NO: 20401 - DNA, 744 bp, synthetic construct
  source 1..744: mol_type = other DNA
ttaaaacagtctgtgggttgttcccacccacagggcccacgtggcgctagcacaccggtattccggtacccttgtgcgcctgttttatacacccttgcccccatgtaacttagaaggaaagcaacaacgatcaacagcaggtgtggcatcccagtcacatcatgatcaagcacttctgtctccccggactgagtatcaacaagctgctcgcgcggctgaaggagaaaacgttcgttacccggccaattacttcgagaaacccagtaacgccatggaggttgcgcagtgtttcgctccacacaaccccagtgtagatcaggtcgatgagtcaccgcattcccccacgggtgaccgtggcggtggctgcgctggcggcctgcccatggggtaacccatgggacgcttcaatactgacatggtgtgaagagtctattgagctaattggtagtcctccggcccctgaatgcggctaatcctaactgcggagcagatactcacatgccagtgagcagtctgtcgtaacgggtaactctgcagcggaaccgactactttgggtgtccgtgtttccttttattccttatttggctgcttatggtgacaattgagagattgttgccatatagctattggattggccatccagtgacaaacagagcaattgtgtatctatttgttggttttgtaccactaaattacaataactacaacaccttactctacattgtccacttaaacacgcagaa

SEQ ID NO: 20402 - DNA, 743 bp, synthetic construct
  source 1..743: mol_type = other DNA
ttaaaacagcctgtgggttgatcccacccacagggcccactgggcgctagcacactggtattgcggtacctttgtgcgcctgttttatccacccccccccaacagtaacttagaagcacgaataatgtggtcaacaggaagctcagtaaaccaactgggtcttgaccaagcacctctgttaccccggactgagtatcaataagctgctcgcgtggctgaaggagaaaacgtccgttacccggccaattacttcgagaaacccagtaccaccatggaggttgcgcagcgtttcgctccgcacaaccccagtgtagatcaggtcgatgagtcaccgcaatcctcacgggtgaccgtggcggtggctgcgctggcggcctgcccatggggcaacctatgggacgcttcaatactgacatggtgcgaagagtctattgagctaattggtagtcctccggcccctgaatgcggctaatcctaactgcggagcagacatccacacaccagtggacagtctgtcgtaatgagcaattctgcagcggaaccgactactttgggtgtccgtgtttccttttatccttttattggctgcttatggtgacaattgagagattgttaccatatagctattggattggccatccggtgagcaacagagcaattgtatttctctttgtaggatttgtaccgttgaattacaacaactacaacaccttactctacattatccacttgaacacgcggaa

SEQ ID NO: 20403 - DNA, 743 bp, synthetic construct
  source 1..743: mol_type = other DNA
ttaaaacagcctgtgggttgttcccacccacagggcccattgggcgccagcacactggtattacggtacctttgtgcgcctgttttatccaccccctccccaatgtaacgtagaagcacaaaccaagtggtcaatagatggctcagtacaccaactgggcttagaccaagcacttctgttaccccggactgagtatcaataagctgctcacgcggctgaaggagaaaacgttcgttacccggccaactacttcgagaagcccagtaccaccatgaaggatgcgcagtgtttcgttcagcacaaccccagtgtagatcaggccgatgagtcaccgcaatccccacgggtgaccgtggcggtggctgcgctggcggcctgcccatggggcaacctatgggacgcttcaatttcgacatggtgcgaagagtctattgagctagttggtagtcctccggcccctgaatgcggctaatcccaactgcggagcagacacccacaaaccagtgggcggtttgtcgtaacgggcaactctgcagcggaaccgactactttgggtgtccgtgtttctttttattcctacattggctgcttatggtgacaattgagagattgttgccatatagctattggattggccatccggtaacaaacagagctattatttacctttttgttggcttcgtgccgttgaattttaaagttataaaaactataaacttcatcttgacgctcaacacagcaaa

SEQ ID NO: 20404 - DNA, 743 bp, synthetic construct
  source 1..743: mol_type = other DNA
ttaaaacagcctgtgggttgttcccacccacagggcccattgggcgccagcacactggtattacggtacctttgtgcgcctgttttatccaccccctccccaatgtaacgtagaagcacaaaccaagtggtcaatagatggctcagtacaccaactgggcttagaccaagcacttctgttaccccggactgagtatcaataggctgctcacgcggctgaaggagaaaacgttcgttacccgaccaactacttcgagaagcctagtaccatcatgaaggatgcgcagtgtttcgttcagcacaaccccagtgtagatcaggccgatgagtcaccgcaatccccacgggtgaccgtggcggtggctgcgctggcggcctgcccatggggcaacctatgggacgcttcaatttcgacatggtgcgaagagcctattgagctagttggtagtcctccggcccctgaatgcggctaatcccaactgcggagcagacacccacaaaccagtgggcagtttgtcgtaacgggcaactctgcagcggaaccgactactttgggtgtccgtgtttccttttatccctatattggctgcttatggtgacaattgagggattgttgccatatagctattggattggccatccggtaacaaacagagctattatttacctttttgttggcttcgtgccgttgaactttaaagttattaaaaccatatacttcatcttgacactcaacacagcaaa

SEQ ID NO: 20405 - DNA, 744 bp, synthetic construct
  source 1..744: mol_type = other DNA
ttttaaaacaggccctgtgggttgctcccacccgcagggcccactgggcgctagcacactggtattgcggtacctttgtgcgcctgttttatccacccccccaacagtaatttagaagcacgaacaatgtggccaacaggaagcccagtacaccaactgggttatggccaagcacttctgttaccccggactgagtatcaataagctgctcgcgtggctgaaggagaaaacgtccgttacccggccagttacttcgagaaacttagtatcatcatgaaggttgcgaggcgtttcgctccgcacaaccccagtgtagatcaggtcgatgagtcaccgcaatcctcacgggtgaccgtggcggtggctgcgctggcggcctgcccatggggcaacccatgggacgcttcaatactgacatggtgtgaagagtctattgagctaattggtagtcctccggcccctgaatgcggctaatcctaactgcggagcagatacccacacaccagtgggcagtctgtcgtaatgggcaactctgcagcggaaccgactactttgggtgtccgtgtttccttttatcttttattggctgcttatggtgacaattgagagattgttaccatatagctattggattggccatccggtgagtaacagagcaattgtgttcctctttgtcggatttgtgccattaaattacaataactataacaccttgctttacattatccacttaaactcgcagaa

SEQ ID NO: 20406 - DNA, 743 bp, synthetic construct
  source 1..743: mol_type = other DNA
ttaaaacagcctgtgggttgatcccacccacagggcccactgggcgctagcacactggtattgcggtacctttgtgcgcctgttttatccaccctcccccaacagtaacttagaagcacgaacaatgtggtcaacaggaagctcagtaaaccaactgggtctcgaccaagcacttctgttaccccggactgagtatcaaaaagctgctcgcgtggctgaaggagaaaacgtccgttacccggccaattacttcgagaaacccagtatcaccatggaggttgcgcagcgtttcgctccgcacaaccccagtgtagatcaggtcgatgagtcaccgcaatcctcacgggtgaccgtggcggtggctgcgctggcggcctgcccatggggcaacccatgggacgcttcaatactgacatggtgcgaagagtctattgagctaattggtagtcctccggcccctgaatgcggctaatcctaactgcggagcagatatccacacaccagtggacagtctgtcgtaatgggcaactctgcagcggaaccgactactttgggtgtccgtgtttccttttatccttttattggctgcttatggtgacaattgagagattgttaccatatagctattggattggccatccggtgagcaacagagcaattgtatttctctttgtaggatttgtaccgttgaattacaacaactacaacaccttactttacattatccacttaaacacgcggaa

SEQ ID NO: 20407 - DNA, 743 bp, synthetic construct; identical to SEQ ID NO: 1050
  source 1..743: mol_type = other DNA

SEQ ID NO: 20408 - DNA, 743 bp, synthetic construct
  source 1..743: mol_type = other DNA
ttaaaacagcctgtgggttgttcccacccacagggcccattgggcgctagcacactggtatcacggtacctttgtgctcctgttttattcaccccctccccaatgtaacgtagaagcgtaagccaagtggtcaatagatggctcagtacaccaactgggtttagaccaagcacttctgttaccccggaccgagtatcaataggctgctcacgcggctgaaggagaaaacgttcgttacccggccaactacttcgagaagcccagtaccaccatgaaggatgcgcagtgtttcgttcagcacaaccccagtgtagatcaggccgatgagtcaccgcaatccccacgggtgaccgtggcggtggctgcgctggcggcctgcccatggggagacccatgggacgcttcaattccgacatggtgcgaagagcctattgagctagttggtagtcctccggcccctgaatgcggctaatcccaactgcggagcagacacccacaagccagtgggctgtttgtcgtaacgggcaactctgcagcggaaccgactactttgggtgtccgtgtttccttttattcctacattggctgcttatggtgacagttgaaagattgttgccatatagctattggattggccatccggtaacaaacagagctattatttacctttttgttggctttgtgccgttgaatttcaaagttataaaaaccataaacttcatcttgacactcaatacagcaaa

SEQ ID NO: 20409 - DNA, 739 bp, synthetic construct
  source 1..739: mol_type = other DNA
ttaaaacaggctgtgggttggccatccggtgagcccactgggcgctagcacactggtatcacggtacctttgtgcgcctgttttacttcccttccctatatgtaacttagaagcagcactctacgaccaatagtaggcgtggcacaccagccatgtcttggtcaagcacttctgtaaccccggaccgagtatcaatagactgctcacgcggtcgaaggagaaaacgtccgttacccgaccaactacttcgagaaacctagtaacgccatgaaaattgcgaggtgtttcgctcagcacgcccccagtgtagatcaggtcgatgagtcaccgcgttccccacaggtgactgtggcggtggctgcgttggcggcctgcccatggggtgacccatgggacgcttcaatacggacatggtgtgaagagtctattgagctagttggtagtcctccggcccctgaatgcggctaatcctaactgtggagcacgcgcccccgctccagagggtagcgtgtcgtaacgggtaactccgcagcggaaccgactactttgggtgtccgtgtttccttttattcttatactggctgcttatggtgacaattgaaagattgttaccatatagctattggattggccacccggtgacaaacagagcaataatttatcaatttgtagggtttgttccaataaatttgaaagtcttgaagacacttaatttaatattactactcaatagtgcaaa

SEQ ID NO: 20410 - DNA, 747 bp, synthetic construct
  source 1..747: mol_type = other DNA
ttaaaacagctctggggttgttcccaccccagaggcccacgtggcggccagtactccggtattacggtacccttgtacgcctgttttatactcccttcccctgtaacttagaagcatacaaaccaagttcaatagaagggggtacaaaccagtaccaccacgaacaagcactcctgtttccccggtgacattgcatagactgtacccacggctgaaagcgatcgatccgttacccgctcctgtacttcgagaagcctagtatcatcttggaatcttcgatgcgttgcgctcagcactcaaccccagagtgtagcttaggctgatgagtctggacgtcccccaccggcgacggtggtccaggctgcgttggcggcctacctgtggcccaaagccacaggacgctagttgtgaacaaggtgtgaagagcctattgagctacaagagagtcctccggcccctgaatgcggctaatcctaaccacggagcaggcagttgcaaaccagcaaccggcctgtcgtaacgcgcaagtctgtggcggaaccgactactttgggtgtccgtgtttccttttatttttacaatggctgcttatggtgacaatcatagattgttatcataaagcgacttggattggccatccggtgaaagtaaaacacattgtttacttgtttgttggattcactccaattaactcttttacttacaaactcattacaacaactctattaattagagataagcatcaca

SEQ ID NO: 20411 - DNA, 713 bp, synthetic construct
  source 1..713: mol_type = other DNA
cagaggcccacgtggcggctagtacactggtatcacggtacctttgtacgcctgttttatactccctcccccgcaacttagaagcatacaattcaagctcaataggagggggtgcaagccagcgcctccgtgggcaagcactactgtttccccggtgaggccgcatagactgttcccacggttgaaagtgtccgatccgttatccgctcatgtacttcgagaagcctagtatcgctctggaatcttcgacgcgttgcgctcagcactcaaccccggagtgtagcttgggccgatgagtctggacagtccccactggcgacagtggtccaggctgcgctggcggcccacttgtggcccaaagccacgggacgctagttgtgaacagggtgtgaagagcctattgagctacatgagagtcctccggcccctgaatgcggctaattctaaccatggagcaggcagctgcaacccagcagccagcctgtcgtaacgcgcaagtccgtggcggaaccgactactttgggtgtccgtgtttccttttattcttgaatggctgcttatggtgacaatcatagattgttatcataaagcgagttggattggccatccagtgtgaatcagattaattactcccttgtttgttggatccactcccgaaacgttttactccttaacttattgaaattgtttgaagacaggatttcagtgtcaca

SEQ ID NO: 20412 - DNA, 713 bp, synthetic construct
  source 1..713: mol_type = other DNA
cagaggcccacgtggcggctagtacactggtatcacggtacctttgtacgcctgttttatactccctcccccgcaacttagaagcatacaattcacgctcaataggagggggtgcaagccagcgcctccgtgggcaagcactactgtttccccggtgaggccgcatagactgttcccacggttgaaagtgtccgatccgttatccgctcatgtacttcgagaagcctagtatcgctctggaatcttcgacgcgttgcgctcagcactcaaccccggagtgtagcttgggccgatgagtctggacagtccccactggcgacagtggtccaggctgcgctggcggcccacttgtggcccaaagccacgggacgctagttgtgaacagggtgtgaagagcctattgagctacatgagagtcctccggcccctgaatgcggctaattctaaccatggagcatgcagctgcaacccagcagccagcctgtcgtaacgcgcaagtccgtggcggaaccgactactttgggtgtccgtgtttccttttattcttgaatggctgcttatggtgacaatcatagattgttatcataaagcgagttggattggccatccagtgtgaatcagattaattactcccttgtttgttggatccactcccgaaacgttttactccttaacttattgaaattgtttgaagacaggatttcagtgtcaca

SEQ ID NO: 20413 - DNA, 715 bp, synthetic construct
  source 1..715: mol_type = other DNA
aggcccacgtggcggctagcactccggtattacggtacccttgtgcgcctgttttatactcccctcccgtaacttagaagcacgtaaccatgttcaacaggaggtggtacaaaccagtaccactacgaacaagcacttctgtttccccggtgacgttgcatagactgcttacgcggttgaaagcgatcgatccgttacccgcttgtgtacttcgaaaagcctagtatcgccttggaatcttcgacgcgttgcgctcaacacccgaccccggggtgtagcttaggctgatgagtctggacattcctcaccggtgacggtggtccaggctgcgttggcggcctacctatggctaacgccataggacgctagatgtgaacaaggtgtgaagagcctattgagctacatgagagtcctccggcccctgaatgcggctaatcctaaccacggagcaggcggtcgcgaaccagtgactggcttgtcgtaacgcgcaagtctgtggcggaaccgactactttgggtgtccgtgtttcctgttatttttatcatggctgcttatggtgacaatcagagattgttatcataaagcgaattggattggccatccggtgagtgttgtgtcacacatacaactgtttgttggaaccactgtgttagctttacttcccatttaaccaattgattaaaagcaatacaaggataaaacgacaatactaca

SEQ ID NO: 20414 - DNA, 729 bp, synthetic construct
  source 1..729: mol_type = other DNA
gtgggttgttcccacccacagggcccactgggcgccagcacactggtatcacggtacctttgtgcgcctgttttatccaccccgccccacgtaacttagaagtccaactcaaacggtcggtaggtggtccagtatgccaactgggccttgaccaagcacttctgttaccccggaccgagtatcaataggctgctcgcgcggctgaaggagaaaaagttcgttacccggccaattacttcgagaaacccagtaccgccatgaatgttgcgaggtgtttcgctcagcacacccccagtgtagatcaggtcgatgagtcaccgcattccccacgggcgaccgtggcggtggctgcgttggcggcctgcccatggggcaacccatgggacgcttcaacactgacatggtgcgaagagtctattgagctaattggtagtcctccggcccctgaatgcggctaatcctaactgcggagcagatgcccgcacgccagcgggtattctgtcgtaacgggtaactctgcagcggaaccgactactttgggtgtccgtgtttcctttttatcttttattggctgcatatggtgacaattgagagattgttaccatatagctattggattggccatccagtgacaaacagagcaattatttatttatttgttggttttgtaccgctgaactacaaagcactaaatactctcagttttataatatcacttaattcaataaa

SEQ ID NO: 20415 - DNA, 725 bp, synthetic construct
  source 1..725: mol_type = other DNA
tgttcccacccacggggcctactgggcgccagcacactggtatcacggtacctttgtgcgcctgttttataacccctcccccgaatgtaacgtagaagctgaacctaagtggtcaataggcggctcagaacaccatctgggtcttgaccaagcacttctgttaccccggactgagtatcaataagctgctcacgcggctgaaggagaaaacgtccgttacccggccaattacttcaagaaacccagtaccaccatgaaggttgcgcagcgtttcgctccgcacaaccccagtgtagatcaggtcgatgagtcaccgcattcctcacgggcgaccgtggcggtggctgcgctggcggcctgcccatggggcaacccatgggacgcttcaatactgacatggtgcgaagagtcaattgagctaattggtagtcctccggcccctgaatgcggctaatcctaactgcggagcagacgcccaagctccagtgggtagtctgtcgtaacgggtaactctgcagcggaaccgactactttgggtgtccgtgtttccttttattcttacattggctgcttatggtgacaattgagagattgttaccatatagctattggattggccatccggtgacaaatagagcaattgtatatctttttgttggattcataccactcggcaaaacaaatttcagaaccttgtgttatattattagattaaatacagcaaa

SEQ ID NO: 20416 - DNA, 711 bp, synthetic construct
  source 1..711: mol_type = other DNA
ttaaaacagctctggggttgctcccaccccagaggcccacgtggcggctagtaatctggtatcaggtacctttgtacgcctgttttatatcccttcccccgtaactttagaagcttatcaaaagttcaatagcaggggtacaagccagtacctctacgaacaagcacttctgtttccccggtgaaatcatatagactgtacccacggtcaaaagtgattgatccgttatccgcttgagtacttcgagaagcctagtatcgccttggaatcttcgacgcgttgcgctcaacactctgccccgagtgtagcttaggctgatgagtctgggcactccccaccggcgacggtggcccaggctgcgttggcggcctacccatggctgatgccgtgggacgctagttgtgaacaaggtgtgaagagcctattgagctactcaagagtcctccggcccctgaatgcggctaatcctaaccacggagcaatcgctcacgacccagtgagtaggttgtcgtaatgcgtaagtctgtggcggaaccgactactttgggtgtccgtgtttccctttatattcatactggctgcttatggtgacaatttacgaattgttaccatatagctattggattggccacccagtgctgtgcaatatatttgagtgcttctttcataggtgttaccaacatcacatttaaaccacaatagtcagtgcaa

SEQ ID NO: 20417 - DNA, 743 bp, synthetic construct
  source 1..743: mol_type = other DNA
ttaaaacagcctgtgggttgttcccacccacagggcccactgggcgctagtacactggtatcacggtacctttgtgcgcctgtttgacttaccctccccaaacgcaacttagaagcacaacttaaatggtcaatagacggctcagtatgccaactgagtctcgatcaagcacttctgttaccccggactgagtaccaataggctgctcacgcggctgaaggggaaaccgttcgttacccgactaactacttcgagaaacctagtaccaccatgaaagttgcgcagcgtttcgctccgcacaaccccagtgtagatcaggccgatgagtcaccgcaaaccccacgggcgaccgtggcggtggctgcgctggcggcctgcccatggggtaactcatgggatgcttcaatactgacatggtgcgaagagtctattgagctagttggtagtcctccggcccctgaatgcggctaatcctaactgcggagcagatacccacgcaccagtgggcagtctgtcgtaatgggcaactctgcagcggaaccgactactttgggtgtccgtgtttccttttattcttacactggctacttatggtgacaattgagagatcgtaaccatattgctattggattggccacccggtgacgaatagaacagttgcttacctgtttgttagtctcgtatcactgaactacaaagccttaaacacccattaatttcatcataacgctcaatacgttaaa

SEQ ID NO: 20418 - DNA, 743 bp, synthetic construct
  source 1..743: mol_type = other DNA
ttaaaacagcctgtgggttgttcccacccacagggcccactgggcgctagcacactggtatcacggtacctttgtgcgcctgtttgacttaccctccccaaacgcaacttagaagcacaacttaaatggtcaataggcggctcagtatgccaactgagtctcgatcaagcacttctgttaccccggactgagtaccaataggctgctcacgcggctgaaggggaaaccgttcgttacccgactaactacttcgagaaacctagtaccaccatgaaagttgcgcagcgtttcgctccgcacaaccccagtgtagatcaggccgatgagtcaccgcaaaccccacgggcgaccgtggcggtggctgcgctggcggcctgcccatggggcaactcatgggacgcttcaatactgacatggtgcgaagagtctattgagctagttggtagtcctccggcccctgaatgcggctaatcctaactgcggagcagatacccacgcaccagtgggcagtctgtcgtaatgggcaactctgcagcggaaccgactactttgggtgtccgtgtttccttttattcttatactggctacttatggttacaattgagagattgtaaccatattgctattagattggccatccggcgacgaatagaatagttgcttacctgtttgttagcctcgtatcactgaactacaaagccttgaacaccctttaatttcatcataacgctcaatacgttaaa

SEQ ID NO: 20419 - DNA, 742 bp, synthetic construct
  source 1..742: mol_type = other DNA
ttaaaacagcctgtgggttgatcccacccacagggcctactgggcgccagcatactggtatcatggtacctttatgtgcctgttttatccaccctcccccaacgtaacctagaagataatcgtagatgatcaatagggggctcagtatgccaactgagtctggatcaagcacttctgttaccccggaccgagtatcaataagctgctcacgcggctgaaggagaaaacgttcgttacccggccaattacttcgagaaacccagtaccaccatgaaggttgcgcagcgtttcgctccgcacaaccccagtgtagatcaggtcgatgagtcaccgcgttccccacgggcgaccgtggcggtggctgcgttggcggcctgcccatggggtaacccatgggacgcttcaatactgacatggtgtgaagagtctattgagctaattggtagtcctccggcccctgaatgcggctaatcctaactgcggagcagatgtccacaaaccagtgggtggtctgtcgtaacgggtaactctgcagcggaaccgactactttgggtgtccgtgtttccttttatacttacactggctgcttatggtgacaattgggagattgttgccatatagctattggattggccatccggtgacaaatagagcgattatctacttatttgttggctttgttccattaaacttcaaagttctaaaaaccctagattttatcttagaactcaatactgcaaa

SEQ ID NO: 20420 - DNA, 742 bp, synthetic construct
  source 1..742: mol_type = other DNA
ttaaaacagcctgtgggttgttcccacccacagggcccaatgagcgctagcacactggtatcatggtacgtttgtgcgcctgtcttattcaccggttcccaatgtaacgtagaagcataagctaagaggtcaatagatggcccagtacaccaactgggtttagaccaagcacttctgttaccccggaccgagtatcaataggctgctcacgcggctgaaggagaaaacgttcgttacccggccaactacttcgagaagcccagtaccaccatgaaggatgcgcagtgtttcgttcagcacaaccccagtgtagatcaggccgatgagtcaccgcaatccccacgggtgaccgtggcggtggctgcgctggcggcctgcccatggggtaacccatgggacgcttcaattccgacatggtgcgaagagtctattgagctagttggtagtcctccggcccctgaatgcggctaatcctaactgcggagcagacacccacaaaccagtgggctgtttgtcgtaacgggcaactctgcagcggaaccgactactttgggtgtccgtgtttccttttattcttatattggctgcttatggtgacaattgaaagattgttgccatatagctattggattggccatccggtaacaaacagagctattatttacctttttgttggctttgtgccgttgaatttcaaagttataaaaaccataaacttcattttgacactcaatacagcaaa

SEQ ID NO: 20421 - DNA, 742 bp, synthetic construct
  source 1..742: mol_type = other DNA
ttaaaacagcctgtgggttgatcccacccacagggcccactgggcgctagcacactggtattgcggtacccttgtgcgcctgttttatccaccccaaccccaaggcaacatagaagcataccacaaaaggtcaataggcgacccagtactccaactgggttttgaccaagcacttctgttaccccggaccgagtaccaataggctgctcgcgcggctgaaggggaaaacgttcgttacccggccaattacttcgagaaacctagtaccgccatgaaggttgcgcagcgtttcgctccgcacaaccccagtgtagatcaggccgatgagccaccgcattccccacgggcgaccgtggcggtggctgcgctggcggcctgcctatggggcaacccatgggacgcttcaatactgacatggtgtgaagagtctattgagctaattggtaatcctccggcccctgaatgcggctaatcctaactgcggagcagatacccacataccagtgggcagtctgtcgtaatgggcaactctgcagcggaaccgactactttgggtgtccgtgtttccttttattttacactggctgcttatggtgacaattgagagattgttaccatatagctattggattggccatccggtgacaagtagagcaattgtctacctatttgttggttttgttccattgaattttaaagttctaaaaactcttgaccttatcttagtactcaatacggcaaa

SEQ ID NO: 20422 - DNA, 743 bp, synthetic construct
  source 1..743: mol_type = other DNA
ttaaaacagcctgtgggttgttcccacccgcagggcccactgggcgctagcacactggtatcacggtacctttgtgcgcctgttttatccaccccctcccaaatgtaacgtagaagcacaaaccaagtggtcaatagatggctcagtacaccaactgggtttagaccaagtacttctgttaccccggactgagtatcaataggctgctcacgcggctgaaggagaaaacgttcgttacccggccaactacttcgagaagcccagtaccaccatgaaggttgcgcagtgtttcgttcagcacaaccccagtgtagatcaggccgatgagtcaccgcaatccccacgggtgaccgtggcggtggctgcgctggcggcctgcccatggggtaacccatgggacgcttcaattccgacatggtgtgaagagtctattgagctagttggtagtcctccggcccctgaatgcggctaatcctaactgcggagcaaacacccacaaaccagtgggcagtttgtcgtaacgggcaactctgcagcggaaccgactactttgggtgtccgtgtttcctttcattcctacattggctgcttatggtgacaattgaaagattgttgccatatagctattggattggccatccggtaacaaacagagctattatttacctttttgttggctttgtgccattgaatttcaaagttataaaaaccataaactttatcttgacactcaacacagcaaa

SEQ ID NO: 20423 - DNA, 743 bp, synthetic construct
  source 1..743: mol_type = other DNA
ttaaaacagcctgtgggtgggaacaacccacagggcccattgggcgctagcacactggtattacggtacctttgtgcgcctgttttatccaccccctccccaatgtaacgtagaagcacaaaccaagtggtcaatagatggctcagtgcaccaactgggcttagaccaagcacttctgttaccccggactgagtatcaataggctgctcacgcggctgaaggagaaaacgttcgttacccggccaactacttcgagaagcccagtaccaccatgaaggatgcgcagtgtttcgttcagcacaaccccagtgtagatcaggccgatgagtcaccgcaatccccacgggtgaccgtggcggtggctgcgctggcggcctgcccatggggcaacctatgggacgcttcaattccgacatggtgcgaagagtctattgagctagttggtagtcctccggcccctgaatgcggctaatcccaactgcggagcagacacccacaaaccagtgggcagtttgtcgtaacgggcaactctgcagcggaaccgactactttgggtgtccgtgtttccttttattcctacattggctgcttatggtgacaattgagagattgttgccatatagctattggattggccatccggtaacaaacagagctattatttatctttttgttggcttcgtgccgttgagttttaaagttataaaaactataaacttcatcttgacacttaatacagcaaa

SEQ ID NO: 20424 - DNA, 742 bp, synthetic construct
  source 1..742: mol_type = other DNA
ttaaaacagcctgtgggttgttcccacccacagggcccactgggcgctagcacactggtattgcggtacctttgtgcgcctgttttatccaccctccccaacagtaacttagaagcacgaataatgtggtcaacaggaagctcagtaaaccaactgggtctcgaccaagcacttctgttaccccggactgagtatcaagaagctgctcgcgtggctgaaggagaaaacgtccgttacccgaccaattacttcgagaaacccagtatcaccatgaaggttgcgcagcgtttcgctccacacaaccccagtgtagatcaggtcgatgagtcaccgcaatcctcacgggtgaccgtggcggtggctgcgctggcggcctgcccatggggcaacccatgggacgctccaatactgacatggtgcgaagagtctattgagctaattggtagtcctccggcccctgaatgcggctaatcctaactgcggagcagatatccacacaccagtggacagtctgtcgtaatgggcaactctgcagcggaaccgactactttgggtgtccgtgtttccttttatccttttattggctgcttatggtgacaattgagagattgttaccatatagctattggattggccatccggtgagtaacagagcaattgtatttctctttgtaggatttgtaccgtcgaattacaacaactataacaccttactctacattatccacttaaacacgcggaa

SEQ ID NO: 20425 - DNA, 743 bp, synthetic construct
  source 1..743: mol_type = other DNA
ttaaaacagcctgtgggttgttcccacccacagggcccactgggcgctagcacactggtatcacggtacctttgtgcgcctgtttgacttaccctccccaaacgcaacttagaagcacaacttaaatggtcaataggcggctcagtatgccaactgagtctcgatcaagcacttctgttaccccggactgagtaccaataggctgctcacgcggctgaaggggaaaccgttcgttacccgactaactacttcgagaaacctagtaccaccatgaaagttgcgcagcgtttcgctccgcacaaccccagtgtagatcaggtcgatgagtcaccgcaaaccccacgggcgaccgtggcggtggctgcgctggcggcctgcccatggggcaactcatgggacgcttcaatactgacatggtgcgaagagtctattgagctagttggtagtcctccggcccctgaatgcggctaatcctaactgcggagcagatacccacgcaccagtgggcagtctgtcgtaatgggcaactctgcagcggaaccgactactttgggtgtccgtgtttccttttgttcttatactggctacttatggtgacaattgagagattgtaaccatattgctattggattggccacccggcgacgaatagaacagttgcttacctgtttgttagtctcgtatcactgaactacaaatccttaaacaccctttaatttcgtcataacgctcaatacgttaaa

SEQ ID NO: 20426 - DNA, 730 bp, synthetic construct
  source 1..730: mol_type = other DNA
tgggttgtccccactcacagggcccactgggcgccagcacactggtatcaaggtacctttgtgcgcctgttttatagccccttccccgaatgtaacgtagaagctgaacccaagcggtcaacaggcggctcagaacaccatctgggtcttgaccaagcacttctgttaccccggactgagtatcaataagctgctcacgcggctgaaggagaaaatgttcgttatccggccaattacttcgagagacctagtaccaccatgaaggttgcgcagcgtttcgctccgcacaatcccagtgtagatcaggtcgatgagtcaccgcattcctcacgggcgaccgtggcggtggctgcgctggcggcctgcccatggggcaacccatgggacgcttcaatactgacatggtgcgaagagttaattgagctaattggtagtcctccggcccctgaatgcggctaatcctaactgcggagcagatgcccaagctccagtgggtagtctgtcgtaacgggtaactctgcagcggaaccgactactttgggtgtccgtgtttccttttattcttacattggctgcttatggtgacaattgagagattgttaccatatagctattggattggccatccggtgacgaatagagcaattgtgtatctttttgttggattcataccactagacaatacaaacttcaaaaccttgtgttacatcattagattaaacacagcaag

SEQ ID NO: 20427 - DNA, 725 bp, synthetic construct
  source 1..725: mol_type = other DNA
ttgatcccacccacagggcccatagggcgctagcactctggtattgcggtacctttgtgcgcctgttttatattcccacccccaattgcaacttagaagcagtacttaacgaccaacagtgggcgtgacacaccagccacgtctcggtcaagcacttctgtctccccggactgagtatcaaaaagctgctcacgcggctgaaggagaaaacgtccgttatccggccaattacttcgagaaacctagtaccgccatgaaagttgcgcagcgtttcgatccgcacaaccccagtgtagatcaggtcgatgagtcaccgcgttccccacgggtgaccgtggcggtgactgcgttggcggcctgcccatgggagaacccatgggacgcttcaatactgacatggtgtgaagagtctattgagctaattggtagtcctccggcccctgaatgcggctaatcctaactgcggagcagattcccgcatgccagcgggtggtctgtcgtaacgggcaactctgcagcggaaccgactactttgggtgtccgtgtttccttttattcttatattggctgcttatggtgacaattgagagattgttaccatatagctattggattggccatccggtaacaaacagagcaattatttaccaatttattggtttcgtaccattgaattttaacacattcaaaactcttaaccttatcttggctcttaatacagcaaa

SEQ ID NO: 20428 - DNA, 742 bp, synthetic construct
  source 1..742: mol_type = other DNA
ttaaaacagcctgtgggttgttcccacccacagggcccactgggcgctagcacactggtatcacggtacctttgtgcgcctgtttgacttaccctccccaaacgcaacttagaagcacaacttaaatggtcaataggcggctcagtatgccaactgagtctcgatcaagcacttctgttaccccggactgagtaccaataggctgctcacgcggctgaaggggaaaccgttcgttacccgactaactacttcgagaaacctagtaccaccatgaaagttgcgcacgtttcgctccgcacaaccccagtgtagatcaggtcgatgagtcaccgcaaaccccacgggcgaccgtggcggtggctgcgctggcggcctgcccatggggcaactcatgggacgcttcaatactgacatggtgcgaagagtctattgagctagttggtagtcctccggcccctgaatgcggctaatcctaactgcggagcagatacccacgcaccagtgggcagtctgtcgtaatgggcaactctgcagcggaaccgactactttgggtgtccgtgtttccttttgttcttatactggctacttatggtgacaattgagagattgtaaccatattgctattggattggccacccggcgacgaatagaacagttgcttacctgtttgttagtctcgtatcactgaactacaaatccttaaacaccctttaatttcgtcataacgctcaatacgttaaa

SEQ ID NO: 20429 - DNA, 742 bp, synthetic construct
  source 1..742: mol_type = other DNA
ttaaaacagcctgtgggttgatcccacccacagggcctattgggcgctagcactctggtatcacggtacctttgtgcgcctgttttatatcccctcccccaactgtaacttagaagtaacacactccgatcaacagtcagcgtggcacaccagccatgttttgatcaagcacttctgttaccccggactgagtatcaatagactgctcacgcggttgaaggagaaagcgttcgttatccggccaactacttcgaaaaacccagtaacaccatagaggttgcagagtgtttcgctcagcactaccccagtgtagaccaggccgatgagtcaccgcattccccacgggcgaccgtggcggtggctgcgttggcggcctgcctatggggaaacccataggacgctctaatacagacatggtgcgaagagtctattgagctagttggtaatcctccggcccctgaatgcggctaatcctaactgcggacagcacaccctcaaaccagagggcagtgtgtcgtaacgggcaactctgcagcggaaccgactactttgggtgtccgtgtttcattttattcctatactggctgcttatggtgacaattgagagattgttaccatatagctattggattggccatccggtgtctaatagagctattatatatctctttgttggatttataccacttagcttgagagaggttaaaacattacaattcattgttaaattgaatacaacaaa

SEQ ID NO: 20430 - DNA, 742 bp, synthetic construct
  source 1..742: mol_type = other DNA
ttaaaacagcctgtgggttgttcccacccgcagggcccactgggcgccagcactctggtatcacggtacctttgtgcgcctgttttaaaaccctctccccaatttgaaacttagaagcaatacacctcgatcaatagtaggcatgacacgccagccatgtcttgatcaagcacttctgtttccccggactgagtatcaataaactgcttgcgcggtcgaaggagaaaacgtccgttacccgactaactacttcgagaaacccagtaacaccatggaaattgcggagtgtttcactcagcacattcccagtgtagatcaggtcgatgagtcaccgcattccccacgggtgaccgtggcggtggctgcgctggcggcctgcccatggggcaacccatgggacgcttcaatatggacatggtgtgaagagtctattgagctagttagtagtcctccggcccctgaatgcggctaatcctaactgcggagcacgtgcctccattccagggggtggcgtgtcgtaacgggcaactctgcagcggaaccgactactttgggtgtccgtgtttcttttaattttatactggctgcttatggtgacaattgaaagattgttgccatatagctattggattggccatccggtatccaacagagcaattgtgtacctttttgttggatttgtaccacttaccagaacaagttttcatacactgtgttacattattagactaaacacagaaaa

SEQ ID NO: 20431 - DNA, 742 bp, synthetic construct
  source 1..742: mol_type = other DNA
ttaaaacagcctgtgggttgatcccacccacagggcccattgggcgctagcactctggtatcacggtacctttgtgcgcctgttttataccccctcccccaactgtaacttacaagcaacacacaccgatcaacagtcagcgtggcacaccagccacgttttgatcaagcacttctgttaccccggactgagtatcaatagactgctcacgcggttgaaggagaaagcgttcgttatccggccaactacttcgaaaaacctagtaacactgtggaagttgcagagtgtttcgctcagcactaccccagtgtagatcaggtcgatgagtcaccgcattccccacgggcgaccgtggcggtggctgcgttggcggcctgcccatggggaaacccatgggacgctctaatacagacatggtgcgaagagtctattgagctagttggtagtcctccggcccctgaatgcggctaatcctaactgcggagcacacaccctcaagccagagggcagtgtgtcgtaacgggcaactctgcagcggaaccgactactttgggtgtccgtgtttcattttattcctatactggctgcttatggtgacaattgagagattgttaccatatagttattggattggccatccggtgaccaatagagctattatatatctctttgttgggtttataccacttagcttgaaagaggttaaaacattacaattcattgttaagttgaatacagcaaa

SEQ ID NO: 20432 - DNA, 742 bp, synthetic construct
  source 1..742: mol_type = other DNA
ttaaaacagcctgtgggttgatcccacccacagggcccattgggcgctagcactctggtatcacggtacctttgtgcgcctgttttataccccctcccccaactgtaacttagaagtaacacacaccgatcaacagtcagcgtggcacaccagccacgttttgatcaagcacttctgttaccccggactgagtatcaatagactgctcacgcggttgaaggagaaagcgttcgttatccggccaactacttcgaaaaacctagtaacaccgtggaagttgcagagtgtttcgctcagcactaccccagtgtagatcaggtcgatgagtcaccgcattccccacgggcgaccgtggcggtggctgcgttggcggcctgcccatggggaaacccatgggacgctccaatacagacatggtgcgaagagtctattgagctagttggtagtcctccggcccctgaatgcggctaatcctaactgcggagcacacaccctcaagccagagggcagtgtgtcgtaacgggcaactctgcagcggaaccgactactttgggtgtccgtgtttcattttattcctatactggctgcttatggtgacaattgagagatcgttaccatatagctattggattggccatccggtgaccaatagagctattatatatctctttgttgggtttataccacttagcttgaaagaggttaaaacattacaattcattgttaagttgaatacagcaaa

SEQ ID NO: 20433 - DNA, 742 bp, synthetic construct
  source 1..742: mol_type = other DNA
ttaaaacagcctgtgggttgatcccacccacagggcccattgggcgctagcactctggtatcacggtacctttgtgcgcctgttttataccccctcccccaactgtaacttagaagcaacacacaccgatcaacagtcagcgtggcacaccagccacgttttgatcaagcacttctgttaccccggactgagtatcaatagactgctcacgcggttgaaggagaaagcgttcgttatccggccaactatttcgaaaaacctagtaacaccgtggaagttgcagagtgtttcgctcagcactaccccagtgtagatcaggtcgatgagtcaccgcattccccacgggcgaccgtggcggtggctgcgttggcggcctgcccatggggaaacccatgggacgctctaatacagacatggtgcgaagagtctattgagctagttggtagtcctccggcccctgaatgcggctaatcctaactgcggagcacacaccctcaagccagagggcagtgtgtcgtaacgggcaactctgcagcggaaccgactactttgggtgtccgtgtttcattttattcctatactggctgcttatggtgacaattgagagatcgttaccatatagctattggattggccatccggtgaccaatagagctattatatatctctttgttgggtttataccacttagcttgaaagaggttaaaacattacaattcattgttaagttgaatacagcaaa

SEQ ID NO: 20434 - DNA, 743 bp, synthetic construct; identical to SEQ ID NO: 1052
  source 1..743: mol_type = other DNA

SEQ ID NO: 20435 - DNA, 742 bp, synthetic construct
  source 1..742: mol_type = other DNA
ttaaaacagcctgtgggttgatcccacccacagggcccattgggcgctagcactctggtatcacggtacctttgtgcgcctgttttataccccctcccccaactgtaacttagaagtaacacacaccgatcaacagtcagcgtggcacaccagccacgttttgatcaagcacttctgttaccccggactgagtatcaatagactgctcacgcggttgaaggagaaagcgttcgctatccggccaactacttcgaaaaacctagtaacaccgtggaagttgcagagtgtttcgctcagcactaccccagtgtagatcaggtcgatgagtcaccgcattccccacgggcgaccgtggcggtggctgcgttggcggcctgcccatggggaaacccatgggacgctctaatacagacatggtgcgaagagtctattgagctagttggtagtcctccggcccctgaatgcggctaatcctaactgcggagcacacaccctcaagccagagggcagtgtgtcgtaacgggcaactctgcagcggaaccgactactttgggtgtccgtgtttcattttattcctatactggctgcttatggtgataattgagagattgttaccatatagctattggattggccatccggtgaccaatagagctattatatatctctttgttgggtttataccacttagcttgaaagaggttaaaacattacaattcattgttaagttgaatacagcaaa

SEQ ID NO: 20436 - DNA, 742 bp, synthetic construct
  source 1..742: mol_type = other DNA
ttaaaacagcctgtgggttgtacccacccacagggcccactgggcgctagcacactggtattacggtacccttgtgcgcctgttttatttacccctcccccacgcaacctagaagcatgacttaagcggtcaatagatggctcagtatgccaactgagttatgaccaagcacttctgttaccccggaccgagtatcaataggctgctcacgcggctgaaggagaaagtgttcgttacccggccagttacttcgagaaacctagtatcatcatgaaggttgcgaggcgtttcgctccacacgaccccggtgtagatcaggctgatgagtcaccgcattccccacgggcgaccgtggcggtggctgcgctggcggcctgcccatggggcaacccatgggacgcttcaatattgacatggtgcgaagagtctattgagctaactggtagtcctccggcccctgaatgcggctaatcctaactgcggagcagacacccacatgccagtgggcagtctgtcgtaacgggcaactctgcagcggaaccgactactttgggtgtccgtgtttccttttattcttatattggctgcttatggtgacaattgaaagattgttgccatatagctattggattggccatccagtgactaacagagcaattgtctacctgttcgttggttacgtaccactaaattataaagttttgaacacacttaattttattatagcacttaacaccttaaa

SEQ ID NO: 20437 - DNA, 742 bp, synthetic construct
  source 1..742: mol_type = other DNA
ttaaaacagcctgtgggttgatcccacccatagggcccattgggcgctagcactctggtatcacggtacctttgtgcgcctgttttataccccctcccccaactgtaacttagaagtaacacacaccgatcaacagtcaacgtggcacaccagccacgttttgatcaagcacttctgttaccccggactgagtatcaatagactgctcacgcggttgaaggagaaagcgttcgttatccggccaactacttcgaaaaacctagtaacaccgtggaagttgcagagtgtttcgctcagcactaccccagtgtagatcaggtcgatgagtcaccgcattccccacgggcgactgtggcggtggctgcgttggcggcctgcccatggggaaacccatgggacgctctaatacagacatggtgcgaagagtctattgagctagttggtagtcctccggcccctgaatgcggctaatcctaactgcggagcacacaccctcaagccagagggcagtgtgtcgtaacgggcaactctgcagcggaaccgactactttgggtgtccgtgtttcattttattcctatactggctgcttatggtgacaattgagagattgttaccatatagctattggattggccatccggtgaccaatagagctattatatatctctttgttgggtttataccacttagcttgaaagaggttaaaacattacaattcattgttaagttgaatacagcaaa

SEQ ID NO: 20438 - DNA, 742 bp, synthetic construct
  source 1..742: mol_type = other DNA
taaaacagcctgtgggttgttcccacccacagggcccactgggcgctagcacactggtatcacggtacctttgtgcgcctgttttatccaccccctccccaatgtaacgtagaagcacaaaccaaatggtcaatagatggctcagtacaccaactgggtttagaccaagcacttctgttaccccggactgagtatcaataggctgctcacgcggctgaaggagaaaacgttcgttacccggccaactacttcgagaagcccagtaccaccatgaaggttgcgcagtgtttcgttcagcacaaccccagtgtagatcaggccgatgagtcaccgcaatccccacgggtgaccgtggcggtggctgcgctggcggcctgcccatggggcaacccatgggacgcttcaattccgacatggtgcgaagagtctattgagctagttggtagtcctccggcccctgaatgcggctaatcccaactgcggagcagacacccacaaaccagtgggcagtttgtcgtaacgggcaactctgcagcggaaccgactactttgggtgtccgtgtttccttttattcctacattggctgcttatggtgacaattgaaagattgttgccatatagctattggattggccatccggtgacaaacagagctattatttacctttttgttggctttgtgccattgaatttcaaagttataaaaaccataaactttatcttgacactcaacacagcaaa

SEQ ID NO: 20439 - DNA, 743 bp, synthetic construct; identical to SEQ ID NO: 1053
  source 1..743: mol_type = other DNA

SEQ ID NO: 20440 - DNA, 743 bp, synthetic construct
  source 1..743: mol_type = other DNA
ttaaaacagcctgtgggttgctcccacccatagggcccatagggcgctagcactctggtatcacggtacctttgtgcgcctgttttatacaccctccccctaatgtaacttagaagcttaacctaaatggccaatagacaacccaacacaccagttgggtctcggccaagcacttctgttaccccggaccgagtatcaataggctgcccacgcggccgaaggagaaaacgttcgttacccggccaattacttcgaaaaacctagtaacaccatgaaagttgcgcagtgtttcgttcagcactaccccagtgtagatcaggtcgatgagtcaccgcatccctcacgggcgaccgtggcggtggctgcgttggcggcctgcccatggggcaacccatgggacgcttcaatactgacatggtgcgaagagtctattgagctaattggtagtcctccggcccctgaatgcggctaatcctaactgcggagcaggcactcacaaaccagtgagcagtctgtcgtaacgggcaactctgcagcggaaccgactactttgggtgtccgtgtttccttttattcttgacttggctgcttatggtgacaattgagagattgttaccatatagctattggattggccatccggtgacaaacagagcaattatctatttgtttgtaggttttattccattaaactacaaagttttaaacaccctcagattcatcattgtacttaactcgtcaaa

SEQ ID NO: 20441 - DNA, 743 bp, synthetic construct
  source 1..743: mol_type = other DNA
ttaaaacagcctgtgggttgctcccacccatagggcccatagggcgctagcactctggtatcacggtacctttgtgcgcctgttttatacaccctccccctaatgtaacttagaagcttaacccaaatggccaatagataacccaacacaccagttgggtctcggccaagcacttctgttaccccggaccgagtatcaataggctgcccacgcggccgaaggagaaaacgttcgttacccggccaattacttcgaaaaacctagtaacaccatgaaagttgcgcagtgtttcgttcagcactaccccagtgtagatcaggtcgatgagtcaccgcatcccccacgggcgaccgtggcggtggctgcgttggcggcctgcccatggggcaacccatgggacgcttcaatactgacatggtgcgaagagtctattgagctaattggtagtcctccggcccctgaatgcggctaatcctaactgcggagcaggcactcacaaaccagtgagcagcctgtcgtaacgggcaactctgcagcggaaccgactactttgggtgtccgtgtttccttttattcttgacttggctgcttatggtgacaattgagagattgttaccatatagctattggattggccatccggtgacaaacagagcaattatctatttgtttgtaggttttatcccattaaactacaaagttttaaacaccctcagattcatcattgtgcttaactcgtcaaa

SEQ ID NO: 20442 - DNA, 743 bp, synthetic construct
  source 1..743: mol_type = other DNA
ttaaaacagcctgtgggttgctcccacccatagggcccatagggcgctagcactctggtatcacggtacctttgtgcgcctgttttatacaccctccccctaatgtaacttagaagcttaacccaaatggccaatagataacccaacacaccagttgggtctcggccaagcacttctgttaccccggactgagtatcaataggctgcctacgcggccgaaggagaaaaagttcgttacccggccaattacttcgaaaaacctagtaacaccatgaaagttgcgcagtgtttcgttcagcactaccccagtgtagatcaggtcgatgagtcaccgcatcccccacgggcgaccgtggcggtggctgcgttggcggcctgcccatggggcaacccatgggacgcttcaatactaacatggtgcgaagagtctattgagctaattggtagtcctccggcccctgaatgcggctaatcctaactgcggagcaggcactcacaaaccagtgagcagcttgtcgtaacgggcaactctgcagcggaaccgactactttgggtgtccgtgtttccttttattcttgacttggctgcttatggtgacaattgagagattgttgccatatagctattggattggccatccggtgacaaacagagcaattatctatttgtttgtaggttttatcccattaaactacaaagttttaaacaccctcagatacatcattgtgcttaactcgtcaaa

SEQ ID NO: 20443 - DNA, 743 bp, synthetic construct
  source 1..743: mol_type = other DNA
ttaaaacagcctgtgggttgctcccacccatagggcccatagggcgctagcactctggtatcacggtacctttgtgcgcctgttttatacaccctccccctaatgtaacttagaagcttaacccaaatggccaatagacaacccaacacaccagttgggtctcggccaagtacttctgttaccccggaccgagtatcaataggctgcctacgcggccgaaggagaaaacgttcgttacccggccaattacttcgaaaaacctagtaacaccatgaaagttgcgcagtgtttcgttcagcactaccccagtgtagatcaggtcgatgagtcaccgcatccctcacgggcgaccgtggcggtggctgcgttggcggcctgcccatggggcaacccatgggacgcttcaatactgacatggtgcgaagagtctattgagctaattggtagtcctccggcccctgaatgcggctaatcctaactgcggagcaggcactcacaaaccagtgagcagtctgtcgtaacgggcaactctgcagcggaaccgactactttgggtgtccgtgtttccttttattcttgacttggctgcttatggtgacaattgagagattgttaccatatagctattggattggccatccggtgacaaacagagcaattatctatttgtttgtaggttttatcccattaaactacaaagttttaaacaccctcagattcatcatcgtgcttaactcgtcaaa

SEQ ID NO: 20444 - DNA, 743 bp, synthetic construct
  source 1..743: mol_type = other DNA
ttaaaacagcctgtgggttgctcccacccatagggcccatagggcgctagcactctggtatcacggtacctttgtgcgcctgttttatacaccctccccctaatgtaacttagaagcttaacccaaatggccaatagacaacccaacacaccagttgggtctcggccaagtacttctgttaccccggaccgagtatcaataggctgcctacgcggccgaaggagaaaacgttcgttacccggccaattacttcgaaaaacctagtaacaccatgaaagttgcgcagtgtttcgttcagcactaccccagtgtagatcaggtcgatgagtcaccgcatccctcacgggcgaccgtggcggtggctgcgttggcggcctgcccatggggcaacccatgggacgcttcaatactgacatggtgcgaagagtctattgagctaattggtagtcctccggcccctgaatgcggctaatcctaactgcggagcaggcactcacaaaccagtgagcagtctgtcgtaacgggcaactctgcagcggaaccgactactttgggtgtccgtgtttccttttatccttgacttggctgcttatggtgacaattgagagattgttaccatatagctattggattggccatccggtgacaaacagagcaattatctatttgtttgtaggttttatcccattaaactacaaagttttaaacaccctcagattcatcatcgtgcttaactcgtcaaa

SEQ ID NO: 20445 - DNA, 743 bp, synthetic construct
  source 1..743: mol_type = other DNA
ttaaaacagcctgtgggttgctcccacccatagggcccatagggcgctagcactctggtatcacggtacctttgtgcgcctgttttatacaccctccccctaatgtaacttagaagcttaacctaaatggccaatagacaacccaacacaccagttgggtctcggccaagtacttctgttaccccggaccgagtatcaataggctgcccacgcggccgaaggagaaaacgttcgttacccggccaattacttcgaaaaacctagtaacaccatgaaagttgcgcagtgtttcgttcagcactaccccagtgtagatcaggtcgatgagtcaccgcatccctcacgggcgaccgtggcggtggctgcgttggcggcctgcccatggggcaacccatgggacgcttcaatactgacatggtgcgaagagtctattgagctaattggtagtcctccggcccctgaatgcggctaatcctaactgcggagcaggcactcacaaaccagtgagcagtctgtcgtaacgggcaactctgcagcggaaccgactactttgggtgtccgtgtttccttttattcttgacttggctgcttatggtgacaattgagagattgttaccatatagctattggattggccatccggtgacaaacagagcaattatctatttgtttgtaggttttatcccattaaactacaaagttttaaacaccctcagattcatcattgtgcttaactcgtcaaa

SEQ ID NO: 20446 - DNA, 743 bp, synthetic construct
  source 1..743: mol_type = other DNA
ttaaaacagcctgtgggttgctcccacccatagggcccatagggcgctagcactctggtatcacggtacctttgtgcgcctgttttatacaccctccccctaatgtaacttagaagcttaacccaaatggccaatagataacccaacacaccagttgggtctcggccaagcacttctgttaccccggaccgagtatcaataggctgcttacgcggccgaaggagaaaacgttcgttacccggccaattacttcgaaaaacctagtaacaccatgaaagttgcgcagtgtttcgttcagcactaccccagtgtagatcaggtcgatgagtcaccgcatcccccacgggcgaccgtggcggtggctgcgttggcggcctgcccatggggcaacccgtgggacgcttcaatactgacatggtgcgaagagtctattgagctaattggtagtcctccggcccctgaatgcggctaatcctaactgcggagcaggcactcacaaaccagtgagcggtctgtcgtaacgggcaactctgcagcggaaccgactactttgggtgtccgtgtttccttttattcttgacttggctgcttatggtgacaattgagagattgttaccatatagctattggattggccatccggtgacaaacagagcaattatctacttgtttgtaggttttatcccattgaactacaaagttttaaacaccctcagattcatcattgtgcttaattcgtcaaa

SEQ ID NO: 20447 - DNA, 743 bp, synthetic construct
  source 1..743: mol_type = other DNA
ttaaaacagcctgtgggttgctcccacccatagggcccatagggcgctagcactctggtatcacggtacctttgtgcgcctgttttatacaccctccccctaatgtaacttagaagcttaacccaaatggccaatagacaacccaacacaccagttgggtctcggccaagtacttctgttaccccggaccgagtatcaataggctgcctacgcggccgaaggagaaaacgttcgttacccggccaattacttcgaaaaacctagtaacaccatgaaagttgcgcagtgtttcgttcagcactaccccagtgtagatcaggtcgatgagtcaccgcatccctcacgggcgaccgtggcggtggctgcgttggcggcctgcccatggggcaacccatgggacgcttcaatactgacatggtgcgaagagtctattgagctaattggtagtcctccggcccctgaatgcggctaatcctaactgcggagcaggcactcacaaaccagtgagcagtctgtcgtaatgggcaactctgcagcggaaccgactactttgggtgtccgtgtttccttttattcttgacttggctgcttatggtgacaattgagagattgttaccatatagctattggattggccatccggtgacaaacagagcaattatctatttgtttgtaggttttatcccattaaactacagagttttaaacaccctcagattcatcattgtgcttaactcgtcaaa

SEQ ID NO: 20448 - DNA, 743 bp, synthetic construct
  source 1..743: mol_type = other DNA
ttaaaacagcctgtgggttgctcccacccatagggcccatagggcgctagcactctggtatcacggtacctttgtgcgcctgttttatacaccctccccctaatgtaacttagaagcttaacccaaatggccaatagacaacccaacacaccagttgggtctcggccaagtacttctgttaccccggaccgagtatcaataggctgcctacgcggccgaaggagaaaacgttcgttacccggccaattacttcgaaaaacctagtaacaccatgaaagttgcgcagtgtttcgttcagcactaccccagtgtagatcaggtcgatgagtcaccgcatccctcacgggcgaccgtggcggtggctgcgttggcggcctgcccatggggcaacccatgggacgcttcaatactgacatggtgcgaagagtctattgagctaattggtagtcctccggcccctgaatgcggctaatcctaactgcggagcaggcactcacaaaccagtgagcagtctgtcgtaacgggcaactctgcagcggaaccgactactttgggtgtccgtgtttccttttattcttgacttggctgcttatggtgacaattgagagattgttaccatatagctattggattggccatccggtgacaaacagagcaattatctatttgtttgtaggttttattccattaaactacaaagttttaaacaccctcagattcatcattgtacttaactcgtcaaa

SEQ ID NO: 20449 - DNA, 743 bp, synthetic construct
  source 1..743: mol_type = other DNA
ttaaaacagcctgtgggttgctcccacccatagggcccatagggcgctagcactctggtatcacggtacctttgtgcgcctgttttatacaccctccccctaatgtaacttagaagcttaacccaaatggccaatagacaacccaacacaccagttgggtctcggccaagtacttctgttaccccggaccgagtatcaataggctgcctacgcggccgaaggagaaaacgttcgttacccggccaattacttcgaaaaacttagtaacaccatgaaagttgcgcagtgtttcgttcagcactaccccagtgtagatcaggtcgatgagtcaccgcatccctcacgggcgaccgtggcggtggctgcgttggcggcctgcccatggggcaacccatgggacgcttcaatactgacatggtgcgaagagtctattgagctaattggtagtcctccggcccctgaatgcggctaatcctaactgcggagcaggcactcacaaaccagtgagcagtctgtcgtaacgggcaactctgcagcggaaccgactactttgggtgtccgtgtttccttttattcttgacttggctgcttatggtgacaattgagagattgttaccatatagctattggattggccatccggtgacaaacagagcaattatctatttgtttgtaggttttatcccattaaactacagagttttaaacaccctcagattcatcatcgtgcttaactcgtcaaa

SEQ ID NO: 20450 - DNA, 743 bp, synthetic construct
  source 1..743: mol_type = other DNA
ttaaaacagcctgggggttgttcccacccacagggcccactgggcgctagcacactggtatcacggtacctttgtgcgcctgttttatccaccctaaccccaaggcaacatagaagcataccacaaaaggtcaataggtgacccagtactccaactgggttttgaccaagcacttctgttaccccggactgagtaccaataggctgcccgcgcggctgaaggggaaaacgttcgttacccggccaattacttcgagaaacctagtaccaccatgaaggttgcgcagcgtttcgctccgcacaaccccagtgtagatcaggctgatgagccaccgcattccccacgggcgaccgtggcggtggctgcgctggcggcctgcccatggggcaacccatgggacgcttcaatactgacatggtgtgaagagtctattgagctaattggtagtcctccggcccctgaatgcggctaatcctaactgcggagcagatacccacacaccagtgggcagtctgtcgtaatgggcaactctgcagcggaaccgactactttgggtgtccgtgtttccttttattcttacactggctgcttatggtgacaattgagagattgttaccatatagctattggattggccatctggtgacaaatagagcaattgtctacctatttgttggttttattccattgaatttcaaagttctaaaaacccttgactttatcttagcactcaacgcggcaaa

SEQ ID NO: 20451 - DNA, 721 bp, synthetic construct
  source 1..721: mol_type = other DNA
tcccacccacagggcccatagggcgctagcactctggtattgcggtacctttgtgcgcctgttttatattcccacccccaatcgcaacttagaagcagtacttcacgaccaacagtgggcgtgacacaccagccacgtctcggtcaagcacctctgtctccccggactgagtatcaataagctgctcacgcggctgagggagaaaacgtccgttacccggccaattacttcgagaaacctagtaccaccacgaaagttgcgcagcgtttcgatccgcacaaccccagtgtagatcaggtcgatgagtcaccgcattccccacgggcgaccgtggcggtggctgcgttggcggcctgcccatgggagaacccgtgggacgcttcaatactgacatggtgtgaagagtctattgagctaattggtagtcctccggcccctgaatgcggctaatcctaactgtggagcagattcccgcatgccagcgggtggtctgtcgtaacgggcaactctgcagcggaaccgactactttgggtgtccgtgtttccttttattcctatattggctgcttatggtgacaattgagagattgttaccatatagctattggattggccatccggtgacaaacagagcaattatctaccaatttgttggttttgtaccattgaatttcaacgcattcaaaactcttaactttattttgactcttaatacagcaaa

SEQ ID NO: 20452 - DNA, 742 bp, synthetic construct
  source 1..742: mol_type = other DNA
ttaaaacagcctgtgggttgttcccacccacagggcccactgggcgctagcacactggtattgcggtacctttgtgcgcctgttttatccaccctccccaaccgtaatttagaagcacgaacaatgtggtcaacaggcaacccagtgcaccaactgggtcttgaccaagcacttctgttacccccggactgagtatcaataagctgctcgcgtggctgaaagagaaaacgttcgttacccggccaattacttcgagaaacctagtatcaccatggaagttgcgcagtgtttcgctccgcacaaccccagtgtagatcaggtcgatgagtcaccgcaaccctcacgggtgaccgtggcggtggctgcgctggcggcctgcccgtggggcaacccatgggacgcttcaatactgacatggtgtgaagagtctattgagctaattggtagtcctccggcccctgaatgcggctaatcctaactgcggagcagatatccacacaccagtggacagtctgtcgtaatgggcaactctgcagcggaaccgactactttgggtgtccgtgtttccttttatcttttattggctgcttatggtgacaattgagagattgttaccatatagctattggattggccatccggtgagcaacagagcagttgtattcctctttgttggatttgtaccattaaactataataactacaacaccctactttacattatccacttaaacacacggaa

SEQ ID NO: 20453 - DNA, 741 bp, synthetic construct
  source 1..741: mol_type = other DNA
ttaaaacagcctgtgggttgatcccacccacaggcccattgggcgctagcactctggtatcacggtacctttgtgcgcctgttttataccccctcccccaactgtaacttagaagtaacacacaccgatcaacagtcagcgtggcacaccagccacgttttgatcaagcacttctgttaccccggactgagtatcaatagactgctcacgcggttgaaggagaaagcgttcgttatccggccaactacttcgaaaaacctagtaacaccgtggaagttgcagagtgtttcgctcagcactaccccagtgtagatcaggtcgatgagtcaccgcattccccacgggcgaccgtggcggtggctgcgttggcggcctgcccatggggaaacccatgggacgctctaatacagacatggtgcgaagagtctattgagctagttggtagtcctccggcccctgaatgcggctaatcctaactgcggagcacacaccctcaagccagagggcagtgtgtcgtaacgggcaactctgcagcggaaccgactactttgggtgtccgtgtttcattttattcctatactggctgcttatggtgacaattgagagatcgttaccatatagctattggattggccatccggtgactaatagagctattatatatccctttgttgggtttataccacttagcttgaaagaggttaaaacattacaattcattgttaagttgaatacagcaaa

SEQ ID NO: 20454 - DNA, 741 bp, synthetic construct
  source 1..741: mol_type = other DNA
ttaaaacagcctgtgggttgatcccacccacagggcccactgggcgctagcacactggtattgcggtacctttgtgcgcctgttttatccaccctccccaacagtaacttagaagcagaacaatgtggtcaacaggaagctcagtaaaccaactgggtctcgaccaagcacttctgttaccccggactgagtatcaaaaagctgctcgcgtggctgaaggagaaaacgtccgttacccggccaattacttcgagaaacccagtatcaccatggaggttgcgcagcgtttcgctccgcacaaccccagtgtagatcaggtcgatgagtcaccgcaatcctcacgggtgaccgtggcggtggctgcgctggcggcctgcccatggggcaacccatgggacgcttcaatactgacatggtgcgaagagtctattgagctaattggtagtcctccggcccctgaatgcggctaatcctaactgcggagcagatatccacataccagtggacagtctgtcgtaatgggcaactctgcagcggaaccgactactttgggtgtccgtgtttccttttatccttttattggctgcttatggtgacaattgagagattgttaccatatagctattggattggccatccggtgagcaacagagcaattgtatttctctttgtaggatttgtaccgttgaattacaacaattacaacaccttactttacattatccacttaaacacgcggaa

SEQ ID NO: 20455 - DNA, 742 bp, synthetic construct
  source 1..742: mol_type = other DNA
ttaaaacagcctgtgggttgatcccacccacagggcccattgggcgctagcactctggtatcacggtacctttgtgcgcctgttttataccccctcccccaactgtaacttagaagtaacacacaccgatcaacagtcagcgtggcacaccagccacgttttgatcaagcacttctgttaccccggactgagtatcaatagactgctcacgcggttgaaggagaaagcgttcgttatccggccaactacttcgaaaaacctagtaacaccgtggaagttgcagagtgtttcgctcagcactaccccagtgtagatcaggtcgatgagtcaccgcattccccacgggcgaccgtggcggtggctgcgttggcggcctgcccatggggaaacccatgggacgctctaatgcagacatggtgcgaagagtctattgagctagttggtagtcctccggcccctgaatgcggctaatcctaactgcggagcacacaccctcaagccagagggcagtgtgtcgtaacgggcaactctgcagcggaaccgactactttgggtgtccgtgtttcattttattcctatattggctgcttatggtgacaattgagagattgttaccatatagctattggattggccatccggtgaccaatagagctattatatatctctttgttgggtttataccacttagcttgaaagaggttaaaacattacaattcattgttaagttgaatacagcaaa

SEQ ID NO: 20456 - DNA, 743 bp, synthetic construct
  source 1..743: mol_type = other DNA
ttaaaacagcctgtgggttgttcccacccacagggcccactgggcgctagcacactggtatcacggtacctttgtgcgcctgttttatccaccccctccccaatgtaacgtagaagcacaaaccaagtggtcaatagatggctcagtacaccaactgggtttagaccaagtacttctgttaccccggactgagtatcaataggctgctcacgcggctgaaggagaaaacgttcgttacccggccaactacttcgagaagcccagtaccgccatggaggatgcgcagtgtttcgttcagcacaaccccagtgtagatcaggccgatgagtcaccgctaaccccacgggtgaccgtggcggtggctgcgctggcggcctgcccatggggtaacccatgggacgcttcaattccgacatggtgcgaagagcctattgagctagttggtagtcctccggcccctgaatgcggctaatcccaactgcggagcagacacccacaaaccagtgggcagtttgtcgtaacgggcaactctgcagcggaaccgactactttgggtgtccgtgtttccttttattcctacattgactgcttatggtgacaattgaaagattgttaccatatagctattggattggtcatccggtgacaaacagagctattatttacctttttattggctttgtgccattgaatttcaaagttataaaaaccataaactttatcttgattcttaacacagcaaa

SEQ ID NO: 20457 - DNA, 742 bp, synthetic construct
  source 1..742: mol_type = other DNA
ttaaaacagcctgtgggttgatcccacccacagggcccattgggcgctagcactctggtatcacggtacctttgtgcgcctgttttataccccctctcccaactgtaacttagaagtaacacacaccgatcaacagtcagcgtggcacaccagccacgttttgatcaagcacttctgttaccccggactgagtatcaatagactgctcacgcggttgaaggagaaagcgttcgttatccggccaactacttcgaaaaacctagtaacaccgtggaagttgcagagtgtttcgctcagcactaccccagtgtagatcaggtcgatgagtcaccgcattccccacgggcgaccgtggcggtggctgcgttggcggcctgcccatggggaaacccatgggacgctctaatacagacatggtgcgaagagtctattgagctagttggtagtcctccggcccctgaatgcggctaatcctaactgcggagcacacaccctcaagccagagggcagtgtgtcgtaacgggcaactctgcagcggaaccgactactttgggtgtccgtgtttcattttattcctatactggctgcttatggtgacaattgagagattgttaccatatagctattggattggccatccggtgactaatagagctattatatatccctttgttgggtttataccacttagcttgaaagaggttaaaacattacaattcattgttaagttgaatacagcaaa

SEQ ID NO: 20458 - DNA, 741 bp, synthetic construct
  source 1..741: mol_type = other DNA
ttaaaacagcctgtgggttgatcccacccacagggcccactgggcgctagcacactggtattgcggtacctttgtgcgcctgttttatccaccctccccaacagtaacttagaagcagaacaatgtggtcaacaggaagctcagtaaaccaactgggtctcgaccaagcacctctgttaccccggactgagtatcaaaaagctgctcgcgtggctgaaggagaaaacgtccgttacccggccaattacttcgagaaacccagtaccaccatggaggttgcgcagcgtttcgctccgcacaaccccagtgtagatcaggtcgatgagtcaccgcaatcctcacgggtgaccgtggcggtggctgcgctggcggcctgcccatggggcaacccatgggacgcttcaatactgacatggtgcgaagagtctattgagctaattggtagtcctccggcccctgaatgcggctaatcctaactgcggagcagatatccacacaccagtggacagtctgtcgtaatgggcaactctgcagcggaaccgactactttgggtgtccgtgtttccttttatccttctattggctgcttatggtgacaattgagagattgttaccatatagctattggattggccatccggtgagcaacagagcaattgtattcctctttgtaggatttgtaccgttgaattacaacaactacaacaccttactctacattatccacttaaacacgcggaa

SEQ ID NO: 20459 - DNA, 742 bp, synthetic construct
  source 1..742: mol_type = other DNA
ttaaaacagcctgtgggttgctcccacccatagggcccattgggcgctagcactctggtattacggtacccttgtgcgcctgttttatacatccacccccacttgtaaattagaagcaacacttcacgaccaacagcaggcgtggcgtgccagccacgtcttggtcaagcacttctgtttccccggaccgagtatcaataggctgtccacacggctgaaggagaaaacgtccgttacccggccaattacttcgagaaacccagtaccaccatgaaggttgcgcagtgtttcgctccgcacaatcccagtgtagatcaggctgatgagtcaccgcattccccacgggcgaccgtggcggtggctgcgctggcggcctgcccatggggcaacccatgggacgctacaatactaacatggtgtgaagagtctattgagctaattggtagtcctccggcccctgaatgcggctaatcctaactgtggagcagatacccacatgccagtgggcagtctgtcgtaacgggcaactccgcagcggaaccgactactttgggtgtccgtgtttccttttattcttatattggctgcttatggtgacaattgagagattgttaccatatagctattggattggccatccagtgagcaacagagcaattgtatatctctttgctggatttgttcctcttaacttcaacagttacaaaactctgctttacattattcatttaaacacaagaag

SEQ ID NO: 20460 - DNA, 742 bp, synthetic construct
  source 1..742: mol_type = other DNA
ttaaaacagcctgtgggttgctcccacccatagggcccattgggcgctagcactctggtattacggtacccttgtgcgcctgttttatacatccaccctcacttgtaaattagaagcaacaattcacgaccaatagcaggcgtggcgtgccagccacgtctcggtcaagcacttctgtttccccggattgagtatcaataagctgttcacacggctgaaggagaaaacgtccgttacccggccaattacttcgagaaacccagtaccaccatggaggttgcgcagtgtttcgctccgcacaatcccagtgtagatcaggccgatgagtcaccgcgttccccacgggcgaccgtggcggtggctgcgctggcggcctgcccatggggcaacccatgggacgctacaatactgacatggtgcgaagagtctattgagctaattggtagtcctccggcccctgaatgcggctaatcctaactgtggagcagatacccacgtgccagtgggcagtctgtcgtaatgggcaactccgcagcggaaccgactactttgggtgtccgtgtttccttttattcttatattggctgcttatggtgacaattgagagattgttaccatatagctattggattggccatccggtgagcaatagagctattgtatatctctttgttggatttgttcctcttaacttcaacagttacaaaaccctgctttacatagttcacttgaatacaagaag

SEQ ID NO: 20461 - DNA, 742 bp, synthetic construct
  source 1..742: mol_type = other DNA
ttaaaacagcctgtgggttgctcccacccatagggcccattgggcgctagcactctggtattacggtacccttgtgcgcctgttttatacatccacccctactcgtaaattagaagcaacaaatcacgaccaatagtaggcgtggcgcgccagccacgtctcggtcaagcacttctgtttccccggatcgagtatcaataagctgtccacacggctgaaggagaaaacatccgttacccggccaattacttcgagaaacccagtaacaccatggaggttgcgcagtgtttcgctccgcacaatcccagtgtagatcaggctgatgagtcaccgcgttccccacgggcgaccgtggcggtggctgcgctggcggcctgcccatggggcaacccatgggacgctacaatgctgacatggtgcgaagagtctattgagctaattggtagtcctccggcccctgaatgcggctaatcctaactgtggagcagatacccacataccagtgggcagtctgtcgtaacgggcaactccgcagcggaaccgactactttgggtgtccgtgtttccttttgttcttgtattggctgcttatggtgacaattgaaagattgttaccatatagctattggattggccatccagtgagcaacagagcaattgtatatctctttgccggatttgttcctcttaacttcgacagttacacaaccctgctttacataattcacttaaatacaagaag

SEQ ID NO: 20462 - DNA, 744 bp, synthetic construct
  source 1..744: mol_type = other DNA
ttaaaacagccctgtgggttgttcccacccacagggcccaccgggcgctagcacactggtatctcggtacctttgtgcgcctgttttatccacccttttcccatttaatttagaagcacgcgccaagacggtcaatagggagcccagtaagccaattgggttatgaccaagcacttctgtatccccgggctgagtatcaataagctgctcgcgtggctgaaggagaaaaagctcgttacccggccaattacttcgagaaacccagtagcatcatgaaagttgcgcagtgtttcgctccacaccaccccagtgtagatcaggccgatgagtcaccgcgttccccacgggtgaccgtggcggtggctgcgctggcggcctgcccatggggccacccatgggacgcttcaatactgacgtggtgtgaagagtctattgagctaattggtagtcctccggcccctgaatgcggctaatcctaactgcggagcagatgcccacgcaccagtggggagtctgtcgtaacgggtaactctgcagcggaaccgactactttgggtgtccgtgtttccttttatttctactctggctgcttatggtgacaattgaaaggttgttaccatatagctattggattggccatccggtgacaaatagagcgattatttacttgtttgttgggtttgtgccactgaactacaaagctttacacactcttaactacattttaatccttagctcattaaa

SEQ ID NO: 20463 - DNA, 742 bp, synthetic construct
  source 1..742: mol_type = other DNA
ttaaaacagcctgtgggttgatcccacccacagggcccaacgggcgctagcacactggtattacggtacctttgtgcgcctgttttatccacccctccccaacgcaacttagaagcaaaggaatgatgatcaacaggaagctcagtatgccaactgagtgatgatcaagcacttctgttaccccggaccgagtatcaataagctgctcgcgcggctgaaggagaaaacgttcgttacccggccagctacttcgagaagcccagtaccaccatgaaagttgcgcggcgtttcgctccgcacaaccctagtgtagatcaggtcgatgagtcaccgcgttccccacgggcgaccgtggcggtggctgcgttggcggcctgcccatggggtaacccatgggacgcttcaatactgacatggtgcgaagagtctattgagctagttggtagtcctccggcccctgaatgcggctaatcctaactgcggagcagatacccacgaaccagtgggcagtctgtcgtaatgggcaactctgcagcggaaccgactactttgggtgtccgtgtttccttttattcatttattggctgcttatggtgacaattgagagattgttaccatatagctattggattggccatccggtgacaaacagagcaattgtttacctatttgtgggattcataccactagatcacaaagttctaaacaccctcaattacattcttgtacttaataaattaaa

SEQ ID NO: 20464 - DNA, 741 bp, synthetic construct
  source 1..741: mol_type = other DNA
ttaaaacagctctggggttgctcccacccatagggcccactgggcgctagcacactggtattgcggtacctttgtgcgcctgttttatccaccccccccaacggtaatttagaagcacgaacaatgtggccaacaggaagcccagtaaaccaactgggttatggtcaagcacttctgttaccccggactgagtatcaataagctgctcgcgtggctgaaggagaaaacgtccgttacccggccagttacttcgagaaacttagtaccaccatgaaagttgcgaggcgtttcgctccgcacaaccccagtgtagatcaggtcgatgagtcactgcaatccacacgggtgaccgtggcggtggctgcgctggcggcctgcccgtggggcaacccatgggacgcttcaatactgacatggtgtgaagagtctattgagctaattggtagtcctccggcccctgaatgcggctaatcctaactgcggagcagatatccacacaccagtggacagtctgtcgtaatgggcaactccgcagcggaaccgactactttgggtgtccgtgtttccttttatcttttattggctgcttatggtgacaattgagagattgttgccatatagctattggattggccatccggtaagcaacagagcaattgttttcctctttgttggatttataccattaaatttcaacacttataacactttactttacattatccacttaaactcgcagaa

SEQ ID NO: 20465 - DNA, 741 bp, synthetic construct
  source 1..741: mol_type = other DNA
ttaaaacagctctggggttgctcccacccatagggcccactgggcgctagcacactggtattgcggtacctttgtgcgcctgttttatccaccccccccaacggtaatttagaagcacgaacaatgtggccaacaggaagcccagtaaaccaactgggttatggtcaagcacttctgttaccccggactgagtatcaataagctgctcgcgtggctgaaggagaaaacgtccgttacccggccagttacttcgagaaacttagtaccaccatgaaagttgcgaggcgtttcgctccgcacaaccccagtgtagatcaggtcgatgagtcactgcaatccacacgggtgaccgtggcagtggctgcgctggcggcctgcccgtggggcaacccatgggacgcttcaatactgacatggtgtgaagagtctattgagctaattggtagtcctccggcccctgaatgcggctaatcctaactgcggagcagatatccacacaccagtggacagtctgtcgtaatgggcaactccgcagcggaaccgactactttgggtgtccgtgtttccttttatcttttattggctgcttatggtgacaattgagagattgttgccatatagctattggattggccatccggtaagcaacagagcaattgttttcctctttgttggatttataccattaaatttcaacacttataacactttactttacattatccacttaaactcgcagaa

SEQ ID NO: 20466 - DNA, 726 bp, synthetic construct
  source 1..726: mol_type = other DNA
ttcccacccacagggcccactgggcgctagcacactggtatcacggtacctttgtgcgcctgttttatgcttcctcccccactatagtaatttagaagcttgaaccacacggccaacagacaacccggtacaccaaccgggccccggccaagcacttctgtatccccggactgagtatcagtaggctgctcgcgcggctgaaggagaaaacgttcgttacccggccacttacttcgagaaacctagtaacgccatgaaagttgcgcagcgtttcgctccgcacaaacccagtgtagatcaggtcgatgagtcaccgcatcccccacgggcgaccgtggcggtggctgcgttggcggcctgcccatggggtaacccatgggacgcttcaatactgacatggtgcgaagagtctattgagctaagtggtagtcctccggcccctgaatgcggataatcctaactgcggagcagatacccacactccagtgggcagtctgtcgtaacgggcaactctgcagcggaaccgactactttgggtgtccgtgtttccttttgtcttttacactggctgcttatggtgacaattgaaagattgttaccatatagctattggattggccatccggtatcaaacagagcaattatttacttgtttgttggttatatacctctcgataccaaggttctaaaaacactcaactacatcttgttattgaatacgttgaa

SEQ ID NO: 20467 - DNA, 743 bp, synthetic construct
  source 1..743: mol_type = other DNA
ttaaaacagcctgtgggttgtacccacccacagggcccactgggcgctagcactctggtattgcggtacctttgtgcgcctgttttacccaccctcccccaacgtaacttagaagcctgacatatacggtcacaagccagcccagtacgccaactgggtaccgaccaagcacttctgttaccccggactgagtatcaataagctgccaaagcggctgaaggagaaaacgttcgttacccggccaattacttcgagaaacccagtaacaccatgaaagttgcgtagcgtttcattcagcacaatcccagtgtagatcaggtcgatgagtcaccgcattccccacaggcgactgtggcggtggctgcgttggcggccctgcccatggggcaacccatgggacgcttcaatactgacatggtgcgaagagtctattgagctaattggtagtcctccggcccctgaatgcggctaatcctaactgcggagcaggcactcgcagaccagcgagcagcttgtcgtaatgggcaactccgcagcggaaccgactactttgggtgtccgtgtttcctatttcctttacactggctgcttatggtgacaattgagaaattgttaccatatagctattggagtggccatccggtgactaacagagcaataatatatttgtttgttggctttgtgccacttaatttgaaggttgttaagacgctcaatctgatactacttctaaataaagcaaa

SEQ ID NO: 20468 - DNA, 732 bp, synthetic construct
  source 1..732: mol_type = other DNA
gggttgttcccaccccagaggcctacgtggcggctagtactccggtatcacggtacccttgtacgcctgttttatactcccttccccgtaacttagaagtaaacaagccaagttcaatagaagggggtacaaaccagtaccaccacgaacaagcacttctgtttccccggtgaagttgcatagattgttcccacggtcgaaagcgactgatccgttacccgctcatgtacttcgggaagcctagtatcaccttcggatcttcgatgcgttgcgctcagcactcaaccccagagtgtagcttaggtcgatgagtctggacaaacctcactggcgacagtggtccaggctgcgttggcggcctacctgtggcccaaagtcacaggacgctagttgtgaacaaggtgtgaagagcctactgagctacatgagagtcctccggcccctgaatgcggctaatctcaaccacggagcaggtagtcacaaaccagtgacttgcctgtcgtaacgcgaaagtctgtggcggaaccgactactttgggtgtccgtgtttccttttattctcattatggctgcttatggtgacaatcctagattgttatcataaagcgagttggattggccatccggtgaaaatcaagcacatcatatacttgtttgttgggtataaccctctgattgcacgcactcttggcttggttaggattattgtgtggaaaaggcaccatagttaca

SEQ ID NO: 20469 - DNA, 706 bp, synthetic construct
  source 1..706: mol_type = other DNA
tggtggctagcactccggtattacggtacccttgtgcgcctgttttatactcccctcccgcaacttagaagcacgaaaccaagttcaatagaagggggtacaaaccagtaccactacgaacaagcacttctgtttccccggtgacattgcatagactgctcacgcggttgaaagtgatcgatccgttacccgcttgtgtacttcgaaaagcctagtatcgccttggaatcttcgacgcgttgcgctcagcacccgaccccggggtgtagcttaggctgatgagtctggacattcctcaccggtgacggtggtccaggctgcgttggcggcctacctatggctaacgccataggacgttagatgtgaacaaggtgtgaagagcctattgagctacataagagtcctccggcccctgaatgcggctaatcctaaccacggagcaggcggtcgcgaaccagtgactggcttgtcgtaacgcgcaagtctgtggcggaaccgactactttgggtgtccgtgtttcctgttatttttatcatggctgcttatggtgacaatcagagattgttatcataaagcgaattggattggccatccggtgagtgttgtgtcaggtatacaactgtttgttggaaccactgtgttagctttacttctcatttaaccaattaatcaaaaacaatacgaggataaaacaacaatactaca

SEQ ID NO: 20470 - DNA, 744 bp, synthetic construct; identical to SEQ ID NO: 1080
  source 1..744: mol_type = other DNA

SEQ ID NO: 20471 - DNA, 742 bp, synthetic construct
  source 1..742: mol_type = other DNA
ttaaaacagcctgtgggttgttcccacccacagggcccaatgggcgctagcacactggtattacggtacctttgtgcgcctgttttatccaccccaccccaaagtaacttagaagcaaagagataacgatcaacagaaagctcagtatgccaactgggtggtgatcaagcacttctgttaccccggaccgagtatcaataagctgctcgcgcggctgaaggagaaaacgttcgttacccggccaactacttcgagaaacccagtaccaccatgaaagttgcgcggcgtttcgctccgcacaaccccagtgtagatcaggtcgatgagtcaccgcattccccacgggcgaccgtggcggtggctgcgttggcggcctgcccatggggcaacccatgggacgcttcaatactgacatggtgcgaagagtctattgagctagttggtagtcctccggcccctgaatgcggctaatcctaactgcggagcagatacccacgaaccagcgggcagtctgtcgtaacgggcaactctgcagcggaaccgactactttgggtgtccgtgtttccttttattcatttattggctgcttatggtgacaattgagagattgttaccatatagcttttggattggccatccggtgacaaacagagcgattgtttatctatttgtgggtttcgtaccattaaactacaaagttctaaacaccctcaattacattctcgtacttaataaattaaa

SEQ ID NO: 20472 - DNA, 719 bp, synthetic construct
  source 1..719: mol_type = other DNA
ccacccacagggcccatcgggcgcatgcacactggtatcacggtacctttgtgcgcctgttttatacaccccttcccgatgtaacgtagaatcacaacacaaagggtcaataggaggctcagtacgccaactgggtcacgaccaagcacttctgtcaccccggaccgagtatcaataagctgctcgcgcggctgaaggagaaagcgttcgttacccggccatttacttcgagaaacctagtagcaccatggaggttgcgcggcgtttcgctccacacgaccccggtgtagatcaggccgatgagtcaccgcactcctcacgggcgaccgtggcggtggctgcgctggcggcctgcccatggggtaacccatgggacgcttcaagactgacatggtgcgaagagtctattgagctgaatggtagtcctccggcccctgaatgcggctaatcctaactgcggagcagatacccaccagccagtgggcagtctgtcgtaatgggcaactctgcagcggaaccgactactttgggtgtccgtgtttctttttattttcatattggctgcttatggtgacaattgatagattgttgccatatagctattggattggccatccggtgtctaatagagcaattatattccaatttgttggatttgtaccccttaaccttaaagtcataagaacacttagttttgtgttactattgaacacattaaa

SEQ ID NO: 20473 - DNA, 813 bp, synthetic construct
  source 1..813: mol_type = other DNA
ttaaaacagcctgtggggttgttgcccacccacagggcccactgggcgccagtacacaggatatgcctaacctcggtattacggtaccgttgtttacagtacccttgtacgcctgttttatatccctcccccatatgtaaccttagaagtttaatcaaataaagaccaacaggagtccaacatccagttggattatggtcaagcacttctgtttccccggacttagtagtgataggctgtacccacggccgaagatgaacccgtccgttatccggccagctacttcgagaagcttagtaacatcaaagatctgtcttggcgtttcgctcagcgtgttccccccgcgtagatcgggctgatgggtctccgcataccccacgggcgaccgtggcggaggccgcgtggcggcccgcctatggcgaaagccataggacgccatttcagtgacagggtgtgaagagcctattgagctagttggtagtcctccggcccctgaatgcggctaatcctaaccacggagcgtccaccagcaaaccagctggaagggcgtcgtaacgggtaactctgtggcggaaccgactactttgggtgtccgtgtttccttttgatcctattttggctgcttatggtgacaacgataagttgttatcataaagcttttgggttggccacctggaaaaagttatcagtgtttgatattgttcggctctcacgcctaccaataaaacaagccttatattttcttattgcattttatccagcaagtgaaatttcagagttccacctaaacctcctgatatcattgaaatcaag

SEQ ID NO: 20474 - DNA, 744 bp, synthetic construct
  source 1..744: mol_type = other DNA
ttaaaacagcctgtgggttgtacccacccacagggcccactgggcgttagcacactggtatcccggtacctttgtgcgcctgttttatatccccttccccatgttgtaacttagaagcaatacaatttcggtcagtagctgacgcgacaaaccagttgcgttttgaccaagcacctctgtgaccccggaccgagtatcaataagctgcttgcgcggctgaaggagaaaccgttcgttacccggctaactacttcgaaaaccctagtaacaccatgaacgttgcggagtgtttcgctcagcacttcccccgtgtagttcaggtcgatgagtcaccgcgttctccacgggtgaccgtggcggtggctgcgttggcggcctgcctgtggggcaacccacaggacgctctaatacagacatggtgcgaagagtctattgagctagttagtagtcctccggcccctgaatgcggctaatcctaactgcggagcacatgcccacaaaccagtgggtggtgtgtcgtaacgggtaactctgcagcggaaccgactactttgggtgtccgtgtttctatttattcctatactggctgcttatggtgacaattgagagattgttgccatatagctattggattggccatccggtgtcgaatagagcaattatttacctatttgttggtttcatacccttaaaccttaaagtttttaagactcttagtcttatactacaatttaactcagtaaa

SEQ ID NO: 20475 - DNA, 742 bp, synthetic construct
  source 1..742: mol_type = other DNA
ttaaaacagcctgtgggttgtacccacccacagggcccactgggcgctagcactctggtattgcggtacctttgtgcgcctgttttacccaccctcccccaacgtaacttagaagcctgacatatacggtcacaagccagcccagtacgccaactgggtaccgaccaagcacttctgttaccccggactgagtatcaataagctgccaaagcggctgaaggagaaaacgttcgttacccggccaattacttcgagaaacccagtaacaccatgaaagttgcgtagcgtttcattcagcacaatcccagtgtagatcaggtcgatgagccaccgcattccccacaggcgactgtggcggtggctgcgttggcggcctgcccatggggcaacccatgggacgcttcaatactgacatggtgcgaagagtctattgagctaattggtagtcctccggcccctgaatgcggctaatcctaactgcggagcaggcactcgcagaccagcgagcagcttgtcgtaatgggcaactccgcagcggaaccgactactttgggtgtccgtgtttcctatttcctttacactggctgcttatggtgacaattgagaaattgttaccatatagctattggagtggccatccggtgactaacagagcaataatatatttgtttgttggctttgtgccacttaatttgaaggttgttaagacgctcaatctgatactacttctaaataaagcaaa

SEQ ID NO: 20476 - DNA, 744 bp, synthetic construct
  source 1..744: mol_type = other DNA
ttaaaacagcctgtgggttgtacccacccacagggcccactgggcgttagcacactggtatcccggtacctttgtgcgcctgttttatatccccttccccatgttgtaacttagaagcaatacaatttcggtcagtagctgacgcgacaaaccagttgcgttttgaccaagcacctctgtgaccccggaccgagtatcaataagctgcttgcgcggctgaaggagaaaccgttcgttacccggctaactacttcgaaaaacctagtaacaccatgaacgttgcggagtgtttcgctcagcacttcccccgtgtagatcaggtcgatgagtcaccgcgttcctcacgggtgaccgtggcggtggctgcgttggcggcctgcctgtggggcaacccacaggacgctctaatacagacatggtgcgaagagtctattgagctagttagtagtcctccggcccctgaatgcggctaatcctaactgcggagcacatgcccacaaaccagtgggtggtgtgtcgtaacgggtaactctgcagcggaaccgactactttgggtgtccgtgtttctatttattcctatactggctgcttatggtgacaattgagagattgttgccatatagctattggattggccatccggtgtcgaatagagcaattatttacctatttgttggtttcatacccttaaaccttaaagtttttaagactcttagtcttatactacaatttaactcagtaaa

SEQ ID NO: 20477 - DNA, 742 bp, synthetic construct
  source 1..742: mol_type = other DNA
ttaaaacagcctgtgggttgctcccacccgcagggcccactgggcgctagcacactggtattgcggtacctttgtacgcctgttttatccaccccccccaacagtaatttagaagcacgaacaatgtggtcaacaggaagctcagtacaccaactgggtctcgaccaagcacttctgttacccccggactgagtatcaataagctgctcgagaggctgaaggagaaaacgtccgttatccggccagttacttcgagaaacttagtaccaccatggaagttgcgcagcgtttcgctccgcacaacccctgtgtagatcaggtcgatgagtcaccgcaatcctcacgggtgaccgtggcggtggctgcgctggcggcctgcccatggggcgacccatgggacgcttcaatactgacatggtgtgaagagtctattgagctaattggtagtcctccggcccctgaatgcggctaatcctaactgcggagcagatatccacacaccagtggacagtctgtcgtaatgggcaactctgcagcggaaccgactactttgggtgtccgtgtttccttttatcttttattggctgctcatggtgacaattgagagattgttaccatatagctattggattggccatccggtgagcaacagggcaattgtatttctctttgttggatttgtaccattaaactacactaactacaataccttactctacattatccacttaaacacgcagaa

SEQ ID NO: 20478 - DNA, 738 bp, synthetic construct
  source 1..738: mol_type = other DNA
acagcctgtgggttgttcccacccacagggcccattgggcgctagcacactggtattacggtacctttgtgcgcctgttttatccaccccctccccgatgtaacgtagaagcacaaaccaagtggtcaatagacggctcagtacgccaactgggcttagaccaagcacttctgttaccccggactgagtatcaataggctgctcacgcggctgaaggggaaaacgttcgttacccggccaactacttcgagaagcccagtaccaccatgaaggatgcgcagtgtttcgttcagcacaaccccagtgtagatcaggccgatgagtcaccgcaatccccacgggtgaccgtggcggtggctgcgctggcggcctgcccatggggcaacctatgggacgcttcaatttcgacatggtgcgaagagtttattgagctagttggtagtcctccggcccctgaatgcggctaatcccaactgcggagcagacacccacaaaccagtgggcagtttgtcgtaacgggcaactctgcagcggaaccgactactttgggtgtccgtgtttccttttattcctacattggctgcttatggtgacaattgagagattgttgccatatagctattggattggccatccggtgacaaacagagctattatttacctttttgttggtttcgtgccgttgaattttaaagttataaaaactataaacttcatcttgacactcaatacagcaaa

SEQ ID NO: 20479 - DNA, 708 bp, synthetic construct
  source 1..708: mol_type = other DNA
cccacgtggcggctagtacactggtatcacggtacctttgtacgcctgttttatactccctccccccgcaacttagaagcacacaattcaagctcaataggagggggtgcaagccagcgcctccgtgggcaagtactactgtttccccggtgaggccgcatagactgttcccacggttgaaagtgtccgatccgttatccgctcacgtacttcgagaagcctagtatcactctggaatcttcgacgcgttgcgctcagcactcaaccccggagtgtagcttgggccgatgagtctggacagtccccactggcgacagtggtccaggctgcgctggcggcccacctgtggcccaaagccacgggacgctagttgtgaacagggtgtgaagagcctattgagctacatgagagtcctccggcccctgaatgcggctaatcctaaccatggagcaggcagctgcaacccagcagccagcctgtcgtaacgcgcaagtccgtggcggaaccgactactttgggtgtccgtgtttccttttattcttgaatggctgcttatggtgacaatcatagattgttatcataaagcgagttggattggccatccagtgtgaatcagactaattactcccttgattgttggacccactcccgaaacgttttactccttaacttattgaaattgtttgaagacaggatttcagtgtcaca

SEQ ID NO: 20480 - DNA, 708 bp, synthetic construct
  source 1..708: mol_type = other DNA
cccacgtggcggctagtacactggtatcacggtacctttgtacgcctgttttatactccctccccccgcaacttagaagcacacaattcaagctcaataggagggggtgcaagccagcgcctccgtgggcaagtactactgtttccccggtgaggccgcatagactgttcccacggttgaaagtgtccgatccgttatccgctcatgtacttcgagaagcctagtatcactctggaatcttcgacgcgttgcgctcagcactcaaccccggagtgtagcttgggccgatgagtctggacagtccccactggcgacagtggtccaggctgcgctggcggcccacctgtggcccaaagccacgggacgctagttgtgaacagggtgtgaagagcctattgagctacatgagagtcctccggcccctgaatgcggctaatcctaaccatggagcaggcagctgcaacccagcagccagcctgtcgtaacgcgcaagtccgtggcggaaccgactactttgggtgtccgtgtttccttttattcttgaatggctgcttatggtgacaatcatagattgttatcataaagcgagttggattggccatccagtgtgaatcagactaattactcccttgtttgttggatccactcccgaaacgttttattccttaacttattgaaattgtttgaagacaggatttcagtgtcaca

SEQ ID NO: 20481 - DNA, 708 bp, synthetic construct
  source 1..708: mol_type = other DNA
cccacgcggcggctagtacactggtatcacggtacctttgtacgcctgttttatactccctccccccgcaacttagaagcacacaattcatgctcaataggagggggtgcaagccagcgcctctgtgggcaagcactactgtttccccggtgaggccgcatagactgttcccacggttgaaagtgtccgatccgttatccgctcatgtacttcgagaagcctagtatcactctggaatcttcgatgcgttgcgctcagcactcaaccccggagtgtagcttgggccgatgagtctggacagtccccactggcgacagtggtccaggctgcgctggcggcccacctgtggcccaaagccacgggacgctagttgtgaacagggtgtgaagagcctattgagctacatgagagtcctccggcccctgaatgcggctaatcccaaccatggagcaggcagctgcaacccagcagccagcctgtcgtaacgcgcaagtccgtggcggaaccgactactttgggtgtccgtgtttccttttattcttgaatggctgcttatggtgacaatcatagattgttatcataaagcgagttggattggccatccagtgtgaatcagactaattactcccttgtttgttggatccactcccgaaacgttttactccctaacttattgaaattgtttgaagacaggatttcagtgtcaca

SEQ ID NO: 20482 - DNA, 708 bp, synthetic construct
  source 1..708: mol_type = other DNA
cccacgtggcggctagtacactggtatcacggtacctttgtacgcctgttttatactccctccccccgcaacttagaagcacacaattcaagctcaataggagggggtgcaagccagcgcctccgtgggcaagtactactgtttccccggtgaggccgcatagactgttcccacggttgaaagtgtccgatccgttatccgctcatgtacttcgagaagcctagtatcactctggaatcttcgacgcgttgcgctcagcactcaaccccggagtgtagcttgggccgatgagtctggacagtccccactggcgacagtggtccaggctgcgctggcggcccacctgtggcccaaagccacgggacgctagttgtgaacagggtgtgaagagcctattgagctacatgagagtcctccggcccctgaatgcggctaatcctaaccatggagcaggcagctgcaatccagcagccagcctgtcgtaacgcgcaagtccgtggcggaaccgactactttgggtgtccgtgtttccttttatttttgaatggctgcttatggtgacaatcatagattgttatcataaagcgagttggattggccatccagtgtgaatcagactaattactcccttgtttgttggatccactcccggaacgttttattccttaacttattgaaattgtttgaagacaggatttcagtgtcaca

SEQ ID NO: 20483 - DNA, 708 bp, synthetic construct
  source 1..708: mol_type = other DNA
cccacgtggcggctagtacactggtatcacggtacctttgtacgcctgttttacactccctccccccgcaacttagaagcacacaattcaagctcaataggagggggtgcaagccagcgcctccgtgggcaagtactactgtttccccggtgaggccgcatagactgttcccacggttgaaagtgtccgatccgttatccgctcacgtacttcgagaagcctagtatcactctggaatcttcgacgcgttgcgctcagcactcaaccccggagtgtagcttgggccgatgagtctggacagtccccactggcgacagtggtccaggctgcgctggcggcccacctgtggcccaaagccacgggacgctagttgtgaacagggtgtgaagagcctattgagctacatgagagtcctccggcccctgaatgcggctaatcctaaccatggagcaggcagctgcaacccagcagccagcctgtcgtaacgcgcaagtccgtggcggaaccgactactttgggtgtccgtgtttccttttattcttgaatggctgcttatggtgacaatcatagattgttatcataaagcgagttggattggccatccagtgtgaatcagactaattactcccttgtctgttggacccactcccgaaacgtttcactccttaacttattgaaattgtttgaagacaggatttcagtgtcaca

SEQ ID NO: 20484 - DNA, 708 bp, synthetic construct
  source 1..708: mol_type = other DNA
cccacgtggcggctagtacactggtatcacggtacctttgtacgcctgttttatactccctccccccgcaactaagaagcatacaatccaagctcaataggagggggtgcaagccagcgcctccgtgggcaagcactactgtttccccggtgaggccgcatagactgttcccacggttgaaagtgtccgatccgttatccgctcatgtacttcgagaagcctagtatcgctctggaatcttcgacgcgttgcgctcagcactcaaccccggagtgtagcttgggccgatgagtctggacagtccccactggcgacagtggtccaggctgcgttggcggcccacctgtggcccaaagccacgggacgctagttgtgaacagggtgtgaagagcctattgagctacatgagagtcctccggcccctgaatgcggctaatcctaaccatggagcaggcagctgcaacccagcagccagcctgtcgtaacgcgcaagtccgtggcggaaccgactactttgggtgtccgtgtttccttttattcttgaatggctgcttatggtgacaatcatagattgttatcataaagcgagttggattggccatccagtgtgaatcagattaattactcccttgttagttggatccactcccgaaacgttttactccttaacttgttgaaattgtttgaagacaggatttcagtgtcaca

SEQ ID NO: 20485 - DNA, 711 bp, synthetic construct
  source 1..711: mol_type = other DNA
ttaaaacagctctggggttgttcccaccccagaggcccacgtggcggctagtacactggtatcacggtacctttgtacgcctgttttatatcccctcccccatgcaactttagaagtaattcaaatagttcaatagagggggtacaaaccagtaccaccacgaacaagcacttctgtttccccggtgaggctatatagactgttcccacggtcgaaggtggctgatccgttatccgcttgagtacttcgagaagcctagtaccacctttggatcttcgatgcgttgcgctcagcactctaccccgagtgtagcttaggctgatgagtctgggcataccccaccggcgacggtggcccaggctgcgttggcggcctacccgtggctaacgccatgggacgctagttgtgaacaaggtgtgaagagcctattgagctacttaagagtcctccggcccctgaatgcggctaatcccaaccacggagcaagtgctcacaaaccagtgggtggcttgtcgtaacgcgcaagtctgtggcggaaccgactactttgggtgtccgtgtttccctttatttttatcatggctgcttatggtgacaatctaagattgttatcatatagcgtttggattggccatccggtgactttgaaagcgatatatttgactcattgtcttactgaatttacctatttattgcacttgtataacaata

SEQ ID NO: 20486 - DNA, 742 bp, synthetic construct
  source 1..742: mol_type = other DNA
ttaaaacagcctgtgggttgtacccacccacagggcccactgggcgctagcactctggtattgcggtacctttgtgcgcctgttttacccaccctcccccaacgtaacttagaagcctgacatatacggtcacaagccagcccagtacgccaactgggtaccgaccaagcacttctgttaccccggactgagtatcaataagctgccaaagcggctgaaggagaaaacgttcgttacccggccaattacttcgagaaacccagtaacaccatgaaagttgcgtagcgtttcattcagcacaatcccagtgtagatcaggtcgatgagtcaccgcattccccacaggcgactgtggcggtggctgcgttggcggcctgcccatggggcaacccatgggacgcttcaatactgacatggtgcgaagagtctattgagctaattggtagtcctccggcccctgaatgcggctaatcctaactgcggagcaggcactcgcagaccagcgagcagcttgtcgtaatgggcaactccgcagcggaaccgactactttgggtgtccgtgtttcctatttcctttacactggctgcttatggtgacaattgagaaattgttaccatatagctattggagtggccatccggtgactaacagagcaataatatatttgtttgttggctttgtgccacttaatttgaaggttgttaagacgctcaatctgatactacttctaaataaagcaaa

SEQ ID NO: 20487 - DNA, 812 bp, synthetic construct
  source 1..812: mol_type = other DNA
ttaaaacagcctgtgggttgttcccacccacagggcccactgggcgctagtacactggtatgccttacctcggtattgcggtaccgttgtatacagtacctttgtacgcctgttttaaaatcccttccccaaatgtaaccttagaagctttagttgacaaagaccaataggagtccaacatccagttggattgcggtcaagcacttctgtctccccggacctagtagtgataggctgtacccacggccgaagatgaacccgtccgttatccggccagctacttcgagaagcctagtaacatcaaagatctgtcttggcgtttcgctcagcgcgtttccccccgcgtagatcgggctgatgggtctccgcacaccccacgggcgaccgtggcggaggccgcgtggcggcccgcctatggcgaaagccataggacgccatttcagtgacagggtgtgaagagcctattgagctagttggtagtcctccggcccctgaatgcggctaatcccaaccacggagcactcgccaacaagccagttggtagggtgtcgtaatgggtaactctgtggcggaaccgactactttgggtgtccgtgtttccttttgatcccattttggctgcttatggtgacaacaataagttgttatcataaagcttttgggttggccacctggaaaaagttatcagtgtttgatattgtacggctttcacgcctgccaataagacaagctttgtatttgctgatttcattttattcagtgagagacattacagacgcacacctaaaccttttgctcgcactgtcagcagg

SEQ ID NO: 20488 - DNA, 720 bp, synthetic construct
  source 1..720: mol_type = other DNA
ccacccacagggcccactgggcgccagcactctggtatcacggtacctttgtgcgcctgttttatgtccccctcccccacttgaaacttagaagcgaaacacactgatcagcagttggcgtggcaaaccagtcatgtcttgatcaaacacttctgtttccccggaccgagtatcaatagactgcccacgcggttgaaggagaaagcgttcgttatccgaccagctacttcgagaaacctagtaacaccatgaaagttgcggagtgtttcgctcagcacatccccagtgtagatcaggtcgatgagtcaccgcgttccccacgggcgaccgtggcggtggctgcgttggcggcctgcctgtggggcaacccacaggacgctctaatacagacatggtgcgaagagtctattgagctagttggtattcctccggcccctgaatgcggctaatcctaactgcggagcacgtgcctccaatccagggggtggcgtgtcgtaacgggtaactctgcagcggaaccgactactttgggtgtccgtgtttccttttattcttatattgactgcttatggtgacaattgaaagattgttaccatatagctattggattggtcatccggtgtcgcacagagcaattatatatctctttgttggatacattccgttgaattataaggaattaagaaccctcaattatatcttggctttaaattccgcaaa

SEQ ID NO: 20489 - DNA, 737 bp, synthetic construct
  source 1..737: mol_type = other DNA
cagcctgtgggttgttcccacccacagggcccaccgggcgctagcacactggtatctcggtacccttgtgcgcctgttttatccacccttttcccatttaacttagaagcacgcgccaagacggtcaaaagggagcccagtaagccaattgggctatgaccaagcactcctgtaaccccgggccgagtatcaataagctgctcgcgcggctgaaggagaaaaagctcgttacccggccaattacttcgagaaacccagtagcatcatgaaagttgcgcagcgtttcgctccacacaaccccagtgtagatcaggtcgatgagtcaccgcgttccccacgggtgaccgtggcggtggctgcgctggcggcctgcccatggggccacccatgggacgcttcaatactgacatggtgtgaagagtctattgagctaattggtagtcctccggcccctgaatgcggctaatcctaactgcggagcagatgcccacacaccagtgggaagtctgtcgtaacgggtaactctgcagcggaaccgactactttgggtgtccgtgtttccttttatttctactctggctgcttatggtgacaattgaaaggttgttaccatatagctattggattggccatccggtgtcacatagagcgattatttacttgtttgttgggtttataccactgaactataaagttttaaatactcttaactacattttaatccttaactcattaaa

SEQ ID NO: 20490 - DNA, 740 bp, synthetic construct
  source 1..740: mol_type = other DNA
ttaaaacagcctgtgggttgatcccacccacaggcccattgggcgctagcactctggtatcacggtacctttgtgcgcctgttttataccccctcccccaactgtaacttagaagtaacacacaccgatcaacagtcagcgtggcacaccagccacgttttgatcaagcacttctgttaccccggactgagtatcaatagactgctcacgcggttgaaggagaaagcgttcgttatccggccaactacttcgaaaaacctagtaacaccgtgaagttgcagagtgtttcgctcagcactaccccagtgtagatcaggtcgatgagtcaccgcattccccacgggcgaccgtggcggtggctgcgttggcggcctgcccatggggaaacccatgggacgctctaatacagacatggtgcgaagagtctattgagctagttggtagtcctccggcccctgaatgcggctaatcctaactgcggagcacacaccctcaagccagagggcagtgtgtcgtaacgggcaactctgcagcggaaccgactactttgggtgtccgtgtttcattttattcctatactggctgcttatggtgacaattgagagattgttaccatatagctattggattggccatccggtgaccaatagagctattatatatctctttgttgggtttataccacttagcttgaaagaggttaaaacattacaattcattgttaagttgaatacagcaaa

SEQ ID NO: 20491 - DNA, 811 bp, synthetic construct
  source 1..811: mol_type = other DNA
ttaaaacagcctgtgggttgttcccacccacagggcctactgggcgccagtacactggtatgccttacctcggtattacggtaccgttgtatatagtacctttgtacgcctgttttaaatcccctcccccaaatgtaaccttagaagtttaagtaaactcagaccaataggagtccaacacccagttggattgcggtcaagcacttctgtctccccggacctagtagtgataggctgtgcccacggccgaagatgaacccgtccgttatccggccagctacttcgagaagcctagtagcatcaaagatctgtcttggcgtttcgctcagcgcgttccccccgcgtagatcgggctgatgggtctccgcattccccacgggcgaccgtggcggaggccgcgtggcggcccgcctatggcgaaagccataggacgccatttcagtgacagggtgtgaagagcctattgagctagttggtagtcctccggcccctgaatgcggctaatcctaaccacggagcgtccgccaacaatccagttggcagggcgtcgtaacgggtaactctgtggcggaaccgactactttgggtgtccgtgtttccttttgatcctattttggctgcttatggtgacaacgataagttgttatcataaagcttttgggttggccgcctggaaaaagatatcagtgtttgatattgttcggctttcacgcctaccaacaaaacaagctctatatttgttgatttcattttatccattggaggatattaccgaatttcatctacaacttttgctcaccttatcagcaaa

SEQ ID NO: 20492 - DNA, 728 bp, synthetic construct
  source 1..728: mol_type = other DNA
tgttcccacccacagggcccactgggcgctagcacactggtatcacggtacctttgtgcgcctgttttatgcttcctcccccactatagtaatttagaagcttgaactacacggccaacagacaacccggtacaccaaccgggccccggccaagcacttctgtatccccggactgagtatcagtaggctgctcgcgcggctgaaggagaaaacgttcgttacccggccacttacttcgagaaacctagtaacgccatgaaagttgcgcagcgtttcgctccgcacaaacccagtgtagatcaggtcgatgagtcaccgcattccccacgggcgaccgtggcggtggctgcgttggcggcctgcccatggggtaacccatgggacgcttcaatactgacatggtgcgaagagtctattgagctaagtggtagtcctccggcccctgaatgcggctaatcctaactgcggagcagatacccacactccagtgggcagtctgtcgtaacgggcaactctgcagcggaaccgactactttgggtgtccgtgtttccttttgtcttttacactggctgcttatggtgacaattgaaaaattgttaccatatagctattggattggccatccgatatcaaacagagcaattatttacttgtttgttggttatatacctctcgataccaaggttctaaaaacactcaactacatcttgttattgaatacgttgaa

SEQ ID NO: 20493 - DNA, 721 bp, synthetic construct
  source 1..721: mol_type = other DNA
ttcccacccacagggcccactgggcgcctgcacactggtatcccggtacctttgtgtgcctgttttattcaccctaccccattgtaacctagaagctaatcaaatatggtcattaggtagcccagtgcgccaactgggtcttgaccaagcacttctgttaccccggactgagtatcaataggctgcttacgcggccgaaggagaaaacgttcgttacccggccaattacttcgagaaacccagtaccaccatgaaggttgcgcagcgtttcgctccgcacaaccccagtgtagatcaggtcgatgggtcaccgcatccctcacgggcgaccgtggcggtggccgcgttggcggcctgcccatggggtgtcccatgggacgcttcaatactgacatggtgcgaagagtctattgagctaattggtagtcctccggcccctgaatgcggctaatcctaactgcggagcagatacccacataccagtgggcagtctgtcgtaatgggcaactctgcagcggaaccgactactttgggcgtccgtgtttctttttattcctatttggctgcttatggtgacaattgaagaattgttaccatatagctattggattggccatccggtgactaatagagccattgtgtacctctttgttggttttgtaccactgaatcacatagttctaaatactctaaatttgattttagtgttcaacacatcaaa

SEQ ID NO: 20494 - DNA, 744 bp, synthetic construct
  source 1..744: mol_type = other DNA
tttaaaacagctctggggttgttcccacctacagggcccattgggcgctagcactctggtatcacggtacccttgtgcgcctgttttacagcccctcccccgaacatgaacttagaagcaccacacaccgatcaacagcgggcgtagcataccagctacgtcttgatcaagcacttctgtttccccggactgagtatcaatagactactaacgtggtcgaaggagaaaacgttcgttacccggccagctacttcgaaaagcctagtatcaccatggaaattgcggagtgtttcgctcagcgcacccccagcgtagatcaggccgatgagtcaccgcgtccctcacgggcgaccgtggcggtggctgcgttggcggcctgcctacggggcaacccgtaggacgcttcaatatggacatggtgcgaagagcccattgagctagttggtagtcctccggcccctgaatgcggctaatcctaactgcggagcgctcgcctccaaaccagggggttgtgcgtcgtaatgggtaactctgcagcggaaccgactactttgggtgtccgtgtttccttttatttttatcatggctgcttatggtgacaattgaaaggttgttaccatatagctattggattggccatccagtgtctaacagagcaattatatacctctttgttggatttgtaccgctaaacaagacaaattatcaaactttgtgccttattgttaaattaaacacaacaag

SEQ ID NO: 20495 - DNA, 744 bp, synthetic construct
  source 1..744: mol_type = other DNA
tttaaaacagctctggggttgttcccacccacagggcccattgggcgctagcactctggtatcacggtacctttgtgcgcctgttttacagcccctcccccaaacaagaacttagaagcaccacacaccgatcaatagcgggcgtagcataccagctacgtcttgatcaagcacttctgtttccccggaccgagtatcaatagactactaacgtggtcgaaggagaaaacgttcgttacccggccagctacttcgaaaagcctagtaacaccatggaaattgcggagtgtttcgctcagcgcacccccagcgtagatcaggccgatgagtcaccgcgtccctcacgggcgaccgtggcggtggctgcgttggcggcctgcctacggggcaacccgtaggacgcttcaatatggacatggtgcgaagagcccattgagctagttggtagtcctccggcccctgaatgcggctaatcctaactgcggagcgctcgcctccaaaccagggggttgtgcgtcgtaatgggtaactctgcagcggaaccgactactttgggtgtccgtgtttccttttatttttatcatggctgcttatggtgacaattgaaagattgttaccatatagctattggattggccatccagtgtctaacagagcaattatatacctctttgttggatttgtgccgctaaacaagacaaattaccaaactttgtgccttattgttaaattaaacacaacgag

SEQ ID NO: 20496 - DNA, 737 bp, synthetic construct
  source 1..737: mol_type = other DNA
acagcctgtgggttgtacccacccacagggcccattgggcgccagcacactggtattacggtacccttgtgcgcctgttttatctacccctccccaacgtaacgtagaagcacaaatcaagtggtcaatagatggctcagtatgccaactgagtttggaccaagcacttctgttaccccggactgagtatcaataagctgctcacgcggctgaaggagaaaacgttcgttacccggccaactacttcgagaagcctagtaccaccatgaaggatgcgcagtgtttcgttcagcacaatcccagtgtagatcaggtcgatgagtcaccgcaatccccacgggcgaccgtggcggtggctgcgctggcggcctgcccatggggttacccatgggacgcttcaattccgacatggtgcgaagagtctattgagctagttggtagtcctccggcccctgaatgcggctaatcccaactgcggagcaagcacccacaaaccagtgggctgtttgtcgtaatgggtaactctgcagcggaaccgactactttgggtgtccgtgtttccttttattcctacactggctgcatatggtgacaattgaaagattgttgccatatagctattgtattggccatccggtgacaaacagagctattatctacttatttgtcggctttgtaccgttgaatttcaaagttgtaaaaaccctaatctttatcttaacactcaacacagcaaa

SEQ ID NO: 20497 - DNA, 743 bp, synthetic construct
  source 1..743: mol_type = other DNA
ttaaaacagcctgtgggttgtacccacccacagggcccaatgggcgctagcacactggtattccggtacctttgtgcgcctgttttataacccccccccagttcgcaacttagaagcaaagaaacaatggtcaattactgacgcagcaacccagctgtgttttggccaagtacttctgtgtccccggactgagtatcaataagctgcttgcgcggctgaaggagaaaccgttcgttacccggccaactacttcgagaagcctagtaacgccatgaacgttgaggagtgtttcgctcagcacttcccccgtgtagttcaggtcgatgagtcaccgcgttccccacgggtgaccgtggcggtggctgcgttggcggcctgcctgtggggcaacccgcaggacgctctgatacagacatggtgtgaagagcctattgagctagttggtagtcctccggcccctgaatgcggctaatcctaactgcggagcacacgttcgcaagccagcgagtggtgtgtcgtaacgggcaactctgcagcggaaccgagtactttgggtgtccgtgtttccttttattcttaccttggctgcttatggtgacaattgaaagattgttaccatatagctattggattggccatccagtgtcaaatagagcaatcatatatctgtttgttggtttcgttcccttggactacagaaatcttaaaactctttatttcatattgagactcaatacgataaa

SEQ ID NO: 20498 - DNA, 743 bp, synthetic construct
  source 1..743: mol_type = other DNA
ttaaaacagcctgtgggttgtacccacccacagggcccaatgggcgctagcacactggtattccggtacctttgtgcgcctgttttataacccccccccagttcgcaacttagaagcaaagaaacaatggtcaatagctgacgcagcaacccagctgtgttttggccaagcacttctgtgtccccggactgagtatcaataagctgcttgcgcggctgaaggagaaaccgttcgttacccggccaactacttcgagaagcctagtaacgccatgaacgttgaggagtgtttcgctcagcacttcccccgtgtagttcaggtcgatgagtcaccgcgttccccacgggtgaccgtggcggtggctgcgttggcggcctgcctgtggggcaacccgcaggacgctctgatacagacatggtgtgaagagcctattgagctagttggtagtcctccggcccctgaatgcggctaatcctaactgcggagcacacgttcgcaagccagcgagtggtgtgtcgtaacgggcaactctgcagcggaaccgactactttgggtgtccgtgtttccttttattcttaccttggctgcttatggtgacaattgaaagattgttaccatatagctattggattggccatccagtgtcaaatagagcaatcatatatctgtttgttggtttcgttcccttggactacagaaatcttaaaactctttatttcatattgagactcaatacgataaa

SEQ ID NO: 20499 - DNA, 731 bp, synthetic construct
  source 1..731: mol_type = other DNA
gtgggttgttcccacccacagggcccactgggcgccagtacactggtatcacggtacctttgtgcgcctgtttgactcaccttccccaaacgcaacttagaagcataacttaaatggtcattaggcggctcagtatgccaactgagtctcgatcaagcacttctgttaccccggactgagtaccaataggctgctcacgcggctgaaagggaaaccgttcgttacccgaccaactacttcgagaaacctagtaccaccatgaaagttgcgcggcgtttcgctccgcacaaccccagtgtagatcaggccgatgagtcaccgcaaaccccacgggcgaccgtggcggtggctgcgctggcggcctgcccatgggacaacccatgggacgccacaatactgacatgatgcgaagagtctattgagctagttggtagtcctccggcccctgaatgcggctaatcccaactgtggagcagatacccacgcaccagtgggcagtctgtcgtaatgggcaactctacagcggaaccgactactttgggtgtccgtgtttctttttattcctacgctggctacttatggtgacaattgagagactgtaactatattgctatcgggttggccacctggtgaagaataaaacagttgctcacttgtttgtcagtcttgcaccgtcgtgccacaaagtcttaactgcccctcaacatcgtcataacactaaacacgctgaa

SEQ ID NO: 20500 - DNA, 744 bp, synthetic construct
  source 1..744: mol_type = other DNA
ttaaaacaaggcctgtgggttgttcccacccacagggcctactgggcgttagcacactggtatcacggtacccttgtgcgcctgttttattcaccctaccccattgcaacttagaagttaaccaagtacggtcattaggcagctcagcatgccagctgagttttgaccaagcacttctgttaccccggactgagtatcaataggctgcttgcgcggccgaaggagaaaacgttcgttacccgaccaattacttcgagaaacctagtatcaccatgaaagttgcgcagtgtttcgctccgcacaaccccagtgtagatcaggccgatgagtcaccgcattccccacgggcgaccgtggcggtggctgcgctggcggcctgcccatgggctaacccatgggacgcttcaaaactgacatggtgtgaagagtctattgagctaattggtagtcctccggcccctgaatgcggctaatcctaactgcggagcagatactcacacgccagtgggcggtctgtcgtaacgggcaactctgcagcggaaccgactactttgggtgtccgtgtttcctattattcctatactggctgcttatggtgacaattgagggattgttaccatatagctattggattggccatccggtgacaaacagagcgattgtttacctatttgttggtttcgtaccattgaattttaaagttttaaaaaccctcaaccttgttttagcacttaacgcagcaaa

SEQ ID NO: 20501 - DNA, 744 bp, synthetic construct
  source 1..744: mol_type = other DNA
ttaaaacagcctgtgggttgttcccacccgcagggcccacggggcgctagcacactggtattaaggtacccttgtgcgcctgttttatacacccctccccctaatgtaacttagaagcatgacttaagtggtcaatagatagctcagtaatccaactgagttccgaccaagtacttctgttaccccggaccgagtatcaataagctgttcacgcggctgaaggagaaagcgttcgttatccggccaattacttcgagaaacccagtatcaccatgaaagttgcgcagtgtttcgctccgcacaaccccagtgtagatcaggtcgatgagtcaccacagtcctcacgggcgaccgtggtggtggctgcgttggcggcctgcccatggggcaacccatgggacgcttcaatactgacatggtgtgaagagtctattgagctggatggtatccctccggcccctgaatgcggctaatcctagctgcggagcagacgctcgcatgccaacgggtagtctgtcgtaccgggtaactctgcagcggaaccgactactttgggtgtccgtgtttccttttatccttatatcggctgcttatggtgtcaattgaaagattgttaccatatagctaatggattggccatccgataacaaatagagtgattatctagttttttgttggatttgttccattgaactacaaggtattgaacacccttaatttcattttaacactcaacacaacaaa

SEQ ID NO: 20502 - DNA, 738 bp, synthetic construct
  source 1..738: mol_type = other DNA
ctctggggttgttcccaccccagaggcccacgtggcggccagtactccggtattacggtacccttgtacgcctgttttatactcccttcccctgtaacttagaagcatacaaaccaagttcaatagaagggggtacaaaccagtaccaccacgaacaagcactcctgtttccccggtgacattgcatagactgtacccacggttgaaagcgatcgatccgttacccgctcctgtacttcgagaagcctagtatcatcttggaatcttcgatgcgttgcgctcagcactcaaccccagagtgtagcttaggctgatgagtctggacgtcccccaccggcgacggtggtccaggctgcgttggcggcctacctgtggcccaaaaccacaggacgctagttgtgaacaaggtgtgaagagcctattgagctacaagagagtcctccggcccctgaatgcggctaatcctaaccacggagcaggcagttgcaaaccagcaaccggcctgtcgtaacgcgcaagtctgtggcggaaccgactactttgggtgtccgtgtttccttttatttttacaatggctgcttatggtgacaatcatagattgttatcataaagcgacttggattggccatccggtgaaagtgaaacacattgtttacttgtttgttggattcactccaatcaactcttttacttacaaactcatcacaacaactctattaattagagataagcatcaca

SEQ ID NO: 20503 - DNA, 690 bp, synthetic construct
  source 1..690: mol_type = other DNA
ggtattacggtacccttgtgcgcctgttttatactcccctcccgcaacttagaagcacgaaaccaagttcaatagaagggggtacaaaccagtaccactacgaacaagcacttctgtttccccggtgacattgcatagactgctcacgcggttgaaagtgatcgatccgttacccgcttgtgtacttcgaaaagcctagtatcgccttggaatcttcgacgcgttgcgctcagcacccgaccccggggtgtagcttaggctgatgagtctggacattcctcaccggtgacggtggtccaggctgcgttggcggcctacctatggctaacgccataggacgttagatgtgaacaaggtgtgaagagcctattgagctacataagagtcctccggcccctgaatgcggctaatcctaaccacggaacaggcggtcgcgaaccagtgactggcttgtcgtaacgcgcaagtctgtggcggaaccgactactttgggtgtccgtgtttcctgttatttttatcatggctgcttatggtgacaatcagagattgttatcataaagcgaattggattggccatccggtgagtgttgtgtcaggtatacaactgtttgttggaaccactgtgttagctttacttctcatttaaccaattaatcaaaaacaatacgaggataaaacaacaatactaca

SEQ ID NO: 20504 - DNA, 744 bp, synthetic construct
  source 1..744: mol_type = other DNA
ttaaaacagcctgtgggttgttcccacccacggggcccattgggcgctagcacactggtatcacggtacccttgtgcgcctgttttatccaccccctccccaatgcaacgtagaagcacaaactaagtggtcaatagacggctcagtgcaccaactgggtttagaccaagcacttctgttaccccggactgagtatcaataggctgctcacgcggctgaaggagaaaacgttcgttacccggccaactacttcgagaagcccagtaccaccatgaaggttgcgcagtgtttcgttcagcacaaccccagtgtagatcaggtcgatgagtcaccgcaatccccacgggcgaccgtggcggtggctgcgctggcggcctgcccatggggtgacccatgggacgcttcaattccgacatggtgcgaagagcctattgagctagttggtagtcctccggcccctgaatgcggctaatcccaactgcggagcaagcacccacaaaccagtgggctgtttgtcgtaacgggcaactctgcagcggaaccgactactttgggtgtccgtgtttccttttattcctacactggctgcttatggtgacaattgaaagattgttgccatatagctattggattggccatccggtaacaaacagagctattaatttacttatttgttggctttgtgccgttgaatttcaaagttataaaaaccataaccttcatcttgacactcaacacagcaaa

SEQ ID NO: 20505 - DNA, 715 bp, synthetic construct
  source 1..715: mol_type = other DNA
ccacagggcccactgggcgctagcactctggtatcacggtacctttgtgcgcctgtttttccacccctccccatacgcaacttagaagagagactcaaccggtcaatagacagcctagtacaccaactaggttctgaccaagaacttctgtttccccggaccgagtatcaataggctgcttacgcggctgaaggagaaaacgttcgttacccggccaattacttcgagaaacctagtatcaccatggaagttgcgcagtgtttcgctccgcacaaccccagtgtagatcaggtcgatgagtcaccgcattccccacaggcgactgtggcggtggctgcgttggcggcctgcccgtggggcaacccacgggacgcttcaataccgacatggtgcgaagagtctattgagctaattggtagtcctccggcccctgaatgcggctaatcctaactgtggagcagatacccacgcgccagtgggcagtctgtcgtaatgggcaactccgcagcggaaccgactactttgggtgtccgtgtttccttttatcctcataatggctgcttatggtgacaattgaaagattgttaccatatagctattggattggccatccggtgactaacagagcaattatttatttgtttgttgggtttgtaccattgaactacaaggtccttaatactctaaactacattataagtctcaatacagtgca

SEQ ID NO: 20506 - DNA, 742 bp, synthetic construct
  source 1..742: mol_type = other DNA
ttaaaacagcctgtgggttgatcccacccacagggcccattgggcgctagcactctggtatcacggtacccttgtgcgcctgttttatgtcccttccctcaactgtaacttagaagtaacgcacaccgatcaacagtcagcgtggcacaccagccatgttttgatcaagcacttctgttaccccggaccgagtatcaacagactgctcacgcggttgaaggagaaagtgttcgttatccggccaactacttcgaaaaacctagtaacaccatggaagttgcagagtgtttcgctcagcactaccccagtgtagatcaggtcgatgagtcaccgcatcccccacgggcgaccgtggcggtggctgcgttggcggcctgcctatgggggaacccataggacgctctaatacagacatggtgcgaagagtccattgagctagttggtagtcctccggcccctgaatgcggctaatcctaactgcggagcacacaccttcaagccagagggcagtgtgtcgtaacgggcaactctgcagcggaaccgactactttgggtgtccgtgtttcattttattcttatactggctgcttatggtgacaattgagagattgttaccatatagctattggattggccatccagtgactagcagagctattatatacctctttgttgggtttataccacctaatttgaaagaagttaaaacattagaattcattattaaattgaatacatttaa

SEQ ID NO: 20507 - DNA, 742 bp, synthetic construct
  source 1..742: mol_type = other DNA
ttaaaacagcctgtgggttgcacccacccacagggcccattgggcgctagcaccctggtattacggtacctttgtgcgcctgttttatacccccatccccaatcgaaacttagaagcattacacactgatcaataggaggcgcggcacgccagccatgccaagatcaagcacttctgtctccccggaccgagtatcaatagactgcttgcgcggttgaaggagaaaacgttcgttacccggccaactacttcgagaaacctagtaccaccatgaaagttgcggagtgtttcgctcagcactaccccagtgtagatcaggccgatgagtcaccgcgttccccacgggtgaccgtggcggtggctgcgctggcggcctgcctatggggcaacccataggacgctctaatacagacatggtgtgaagagtctattgagctagttggtgatcctccggcccctgaatgcggctaatcctaactgcggagcacacgctcacaagccagtgagtggtgtgtcgtaatgggtaactccgcagcggaaccgactactttgggtgtccgtgtttccttttaacttcattttggctgcttatggtgacaattaagaaattgttaccatatagctattggattggccatccggtgactagtagagctattatatacttgtttgttggctttgtaccactaaactataaagtccttagaactcttgattttatactaattttgaataaggcaaa

SEQ ID NO: 20508 - DNA, 741 bp, synthetic construct
  source 1..741: mol_type = other DNA
ttaaaacaccctgtgggttgttcccacccacagggcccactgggcgctagcacactggtatcacggtacctttgtgcgcctgttttatttcccttccccagacgtaacttagaagcagcactccgcgaccaatagcaggcgtggcacaccagccatgtcttggtcaagtacttctgtaatcccggactgagtatcaataaactgctcacgcggtcgaaggagaaaacgtccgttacccggctaactacttcgagaaacctagtagcgccatgaaagttgcgaggtgtttcgctcagcacatccccagtgtagatcaggtcgatgagtcaccgtattccccacaggtaactgtggcggtggctgcgttggcggcctgcccatggggcgacccatgggacgcttcaatacggacatggtgcgaagagtctattgagctagttagtattcctccggcccctgaatgcggctaatcctaactgtggagcatgcgcccccactccagagggtagcgtgtcgtaacgggaaactccgcagcggaaccgactactttgggtgtccgtgtttccttttattcttatattggctgcttatggtgacaattgaaaggttgttaccatatagctattggattggccacccagtgacaaatagagcaataatttaccaatttgtgggatttgttccaataagtttgaaagtcttaaagacacttaatttaatactactactcaatattgcaaa

SEQ ID NO: 20509 - DNA, 742 bp, synthetic construct
  source 1..742: mol_type = other DNA
tttaaaacagcctgtgggttgttcccacccacagggcccactgggcgtaagcacactggtatcacggtacctttgtgcgctgttttatccacccctccccaatgtaacttagaagcactaaatgaatggtcaacagggggcccagcacaccagttgagtcctgaccaagcacttctgtcaccccggactgagtatcaataagctactcacgtggctgaaggagaaaacgttcgttacccggccaattacttcgagaaacttagtaccaccatgaaggttgcgcagcgtttcgctccacacaaccccagtgtagatcaggccgatgagtcaccgcattccccacgggcgaccgtggcggtggctgcgctggcggcctgcccgaggggcaaccctcgggacgcttcaataccgacatggtgcgaagagtctattgagctaattggtagtcctccggcccctgaatgcggctaatcctaactgcggagcagatacccacacgccagtgggcagtctgtcgtaatgggtaactctgcagcggaaccgactactttgggtgtccgtgtttccttttattcttacactggctgcttatggtgacaattgagagattgttaccatatagctattggattggccatccggttagtaacagagcgattgtttacttgtttgttggttttatacccttgaacctcagagtacttgaaacacttgattttataataaaattgaacacaacaaa

SEQ ID NO: 20510 - DNA, 822 bp, synthetic construct; identical to SEQ ID NO: 1281
  source 1..822: mol_type = other DNA

SEQ ID NO: 20511 - DNA, 694 bp, synthetic construct
  source 1..694: mol_type = other DNA
tagtactccggtattgcggtacccttgtacgcctgttttatactcccttcccgtaacttagacgcacaaaaccaagttcaatagaagggggtacaaaccagtaccaccacgaacaagcacttctgtttccccggtgatgttgtatagactgcttgcgtggttgaaagcgacggatccgttatccgcttatgtacttcgagaagcccagtaccacctcggaatcttcgatgcgttgcgctcagcactcaaccccagagtgtagcttaggctgatgagtctggacatccctcaccggtgacggtggtccaggctgcgttggcggcctacctatggctaacgccatgggacgctagttgtgaacaaggtgtgaagagcctattgagctacataagaatcctccggcccctgaatgcggctaatcccaaccacggggcaggtggtcacaaaccagtgattggcctgtcgtaacgcgcaagtccgtggcggaaccgactactttgggtgtccgtgtttccttttattttattgtggctgcttatggtgacaatcacagattgttatcataaagcgaattggattggccatccggtgaaagtgagattcattatctatctgtttgctggattcgctccattgagtgtgtttactctaagtacaatttcaacagttatttcaattagacaattgtatcata

SEQ ID NO: 20512 - DNA, 694 bp, synthetic construct
  source 1..694: mol_type = other DNA
tagtactccggtattgcggtacccttgtacgcctgttttatactcccttcccgtaacttagacgcacaaaaccaagttcaatagaagggggtacaaaccagtaccaccacgaacaagcacttctgtttccccggtgatgttgtatagactgcttgcgtggttgaaagcgacggatccgttatccgcttatgtacttcgagaagcccagtaccacctcggaatcttcgatgcgttgcgctcagcactcaaccccagagtgtagcttaggctgatgagtctggacatccctcaccggtgacggtggtccaggctgcgttggcggcctacctatggctaacgccatgggacgctagttgtgaacaaggtgtgaagagcctattgagctacataagaatcctccggcccctgaatgcggctaatcccaacctcggagcaggtggtcacaaaccagtgattggcctgtcgtaacgcgcaagtccgtggcggaaccgactactttgggtgtccgtgtttccttttattttattgtggctgcttatggtgacaatcacagattgttatcataaagcgaattggattggccatccggtgaaagtgagattcattatctatctgtttgctggattcgctccattgagtgtgtttactctaagtacaatttcaacagttatttcaatcagacaattgtatcata

SEQ ID NO: 20513 - DNA, 694 bp, synthetic construct
  source 1..694: mol_type = other DNA
tagtactccggtattgcggtacccttgtacgcctgttttatactcccttcccgtaacttagacgcacaaaaccaagttcaatagaagggggtacaaaccagtaccaccacgaacaagcacttctgtttccccggtgatgttgtatagactgcttgcgtggttgaaagcgacggatccgttatccgcttatgtacttcgagaagcccagtaccacctcggaatcttcgatgcgttgcgctcagcactcaaccccagagtgtagcttaggctgatgagtctggacatccctcaccggtgacggtggtccaggctgcgttggcggcctacccatggctaacgccatgggacgctagttgtgaacaaggtgtgaagagcctattgagctacataagaatcctccggcccctgaatgcggctaatcccaaccacggagcaggtggtcacaaaccagtgattggcctgtcgtaacgcgcaagtccgtggcggaaccgactactttgggtgtccgtgtttccttttattttattgtggctgcttatggtgacaatcacagattgttatcataaagcgaattggattggccatccggtgaaagtgagattcattatctatctgtttgctggattcgctccattgagtgtgtttactctaagtacaatttcaacagttatttcaattagacaattgtatcata

SEQ ID NO: 20514 - DNA, 694 bp, synthetic construct
  source 1..694: mol_type = other DNA
tagtactccggtattgcggtacccttgtacgcctgttttatactcccttcccgtaacttagacgcacaaaaccaagttcaatagaagggggtacaaaccagtaccaccacgaacaagcacttctgtttccccggtgatgttgtatagactgcttgcgtggttgaaagcgacggatccgttatccgcttatgtacttcgagaagcccagtaccacctcggaatcttcgatgcgttgcgctcagcactcaaccccagagtgtagcttaggccgatgagtctggatatccctcaccggtgacggtggtccaggctgcgttggcggcctacctatggctaacgccatgggacgctagttgtgaacaaggtgtgaagagcctattgagctacataagaatcctccggcccctgaatgcggctaatcccaacctcggagcaggtggtcacaaaccagtgattggcctgtcgtaacgcgcaagtccgtggcggaaccgactactttgggtgtccgtgtttccttttattttattgtggctgcttatggtgacaatcacagattgttatcataaagcgaattggattggccatccggtgaaagtgagattcattatctatctgtttgctggattcgctccattgagtgtgtttactctaagtacaatttcaacagttatttcaatcagacaattgtatcata

SEQ ID NO: 20515 - DNA, 694 bp, synthetic construct
  source 1..694: mol_type = other DNA
tagtactccggtattgcggtacccttgtacgcctgttttatactcccttcccgtaacttagacgcacaaaaccaagttcaatagaagggggtacaaaccagtaccaccacgaacaagcacttctgtttccccggtgatgttgtatagactgcttgcgtggttgaaagcgacggatccgttatccgcttatgtacttcgagaagcccagtaccacctcggaatcttcgatgcgttgcgctcagcactcaaccccagagtgtagcttaggctgatgagtctggacatccctcaccggtgacggtggtccaggctgcgttggcggcctacctatggctaacgccatgggacgctagttgtgaacaaggtgtgaagagcctattgagctacataagagtcctccggcccctgaatgcggctaatcccaacctcggagcaggtggtcacaaaccagtgattggcctgtcgtaacgcgcaagtccgtggcggaaccgactactttgggtgtccgtgtttccttttattttattgtggctgcttatggtgacaatcacagattgttatcataaagcgaattggattggccatccggtgaaagtgagattcattatctatctgtttgctggattcgctccattgagtgtgtttactctaagtacaatttcaacagttatttcaatcagataattgtatcata

SEQ ID NO: 20516 - DNA, 694 bp, synthetic construct
  source 1..694: mol_type = other DNA
tagtactccggtattgcggtacccttgtacgcctgttttatactcccttcccgtaacttagacgcacaaaaccaagttcaatagaagggggtacaaaccagtaccaccacgaacaagcacttctgtttccccggtgatgttgtatagactgcttgcgtggttgaaagcgacggatccgttatccgcttatgtacttcgagaagcccagtaccacctcggaatcttcgatgcgttgcgctcagcactcaaccccagagtgtagcttaggctgatgagtctggacatccctcaccggtgacggtggtccaggctgcgttggcggcctacccatggctaacgccatgggacgctagttgtgaacaaggtgtgaagagcctattgagctacataagaatcctccggcccctgaatgcggctaatcccaaccacggagcaggtggtcacaagccagtgattggcctgtcgtaacgcgcaagtccgtggcggaaccgactactttgggtgtccgtgtttccttttattttattgtggctgcttatggtgacaatcacagattgttatcataaagcgaattggattggccatccggtgaaagtgagattcattatctatctgtttgctggattcgctccattgagtgtgtttactctaagtacaatttcaacagttatttcaattagataattgtatcata

SEQ ID NO: 20517 - DNA, 694 bp, synthetic construct
  source 1..694: mol_type = other DNA
tagtactccggtattgcggtacccttgtacgcctgttttatactcccttcccgtaacttagacgcacaaaaccaagttcaatagaagggggtacaaaccagtaccaccacgaacaagcacttctgtttccccggtgatgttgtatagactgcttgcgtggttgaaagcgacggatccgttatccgcttatgtacttcgagaagcccagtaccacctcggaatcttcgatgcgttgcgctcagcactcaaccccagagtgtagcttaggctgatgagtctggacatccctcaccggtaacggtggtccaggctgcgttggcggcctacccatggctaacgccatgggacgctagttgtgaacaaggtgtgaagagcctattgagctacataagaatcctccggcccctgaatgcggctaatcccaaccacggagcaggtggtcacaaaccagtgattggcctgtcgtaacgcgcaagtccgtggcggaaccgactactttgggtgtccgtgtttccttttattttattgtggctgcttatggtgacaatcacagattgttatcataaagcgaattggattggccatccggtgaaagtgagattcattatctatctgtttgctggattcgctccattgagtgtgtttactctaagtacaatttcaacagttatttcaattagacaattgtatcata

SEQ ID NO: 20518 - DNA, 694 bp, synthetic construct
  source 1..694: mol_type = other DNA
tagtactccggtattgcggtacccttgtacgcctgttttatactcccttcccgtaacttagacgcacaaaaccaagttcaatagaagggggtacaaaccagtaccaccacgaacaagcacttctgtttccccggtgatgttgtatagactgcttgcgtggttgaaagcgacggatccgttatccgcttatgtacttcgagaagcccagtaccacctcggaatcttcgatgcgttgcgctcagcactcaaccccagagtgtagcttaggctgatgagtctggacatccctcaccggtgacggtggtccaggctgcgttggcggcctacccatggctaacgccatgggacgctagttgtgaacaaggtgtgaagagcctattgagctacataagaatcctccggcccctgaatgcggctaatcccaaccacggagcaggtggtcacaaaccagtgaatggcctgtcgtaacgcgcaagtctgtggcggaaccgactactttgggtgtccgtgtttccttttattttattgtggctgcttatggtgacaatcacagattgttatcataaagcgaattggattggccatccggtgaaagtgagattcattatctatctgtttgctggattcgctccattgagtgtgtttactctaagtacaatttcaatagttacttcaattagacaattgtatcata

SEQ ID NO: 20519 - DNA, 694 bp, synthetic construct
  source 1..694: mol_type = other DNA
tagtactccggtattgcggtacccttgtacgcctgttttatactcccttcccgtaacttagacgcacaaaaccaagttcaatagaagggggtacaaaccagtaccaccacgaacaagcacttctgtttccccggtgatgttgtatagactgcttacgtggttgaaagcgacggatccgttatccgcttatgtacttcgagaagcccagtaccacctcggaatcttcgatgcgttgcgctcagcactcaaccccagagtgtagcttaggctgatgagtctggacatccctcaccggtgacggtggtccaggctgcgttggcggcctacccatggctaacgccatgggacgctagttgtgaacaaggtgtgaagagcctattgagctacataagaatcctccggcccctgaatgcggctaatcccaaccacggagcaggtggtcacaaaccagtgattggcctgtcgtaacgtgcaagtctgtggcggaaccgactactttgggtgtccgtgtttccttttattttattgtggctgcttatggtgacaatcacagattgttatcataaagcgaattggattggccatccggtgaaagtgagattcattatctatctgtttgctggattcgctccattgagtgtgtttactctaagtacaatttcaatagttatttcaattagacaattgtatcata

SEQ ID NO: 20520 - DNA, 694 bp, synthetic construct
  source 1..694: mol_type = other DNA
tagtactccggtattgcggtacccttgtacgcctgttttatactcccttcccgtaacttagacgcacaaaaccaagttcaatagaagggggtacaaaccagtaccaccacgaacaagcacttctgtttccccggtgatgttgtatagactgcttacgtggttgaaagcgacggatccgttatccgcttatgtacttcgagaagcccagtaccacctcggaatcttcgatgcgttgcgctcagcactcaaccccagagtgtagcttaggctgatgagtctggacatccctcaccggtgacggtggtccaggctgcgttggcggcctacccatggctaacgccatgggacgctagttgtgaacaaggtgtgaagagcctattgagctacataagaatcctccggcccctgaatgcggctaatcccaaccacggagcaggtggtcacaaaccagtgattggcctgtcgtaacgcgcaagtctgtggcggaaccgactactttgggtgtccgtgtttccttttattttattgtggctgcttatggtgacaatcacagattgttatcataaagcgaattggattggccatccggtgaaagtgagattcattatctatctgtttgctggactcgctccattgagtgtgtttactctaagtacaatttcaatagttatttcaattagacaattgtatcata

SEQ ID NO: 20521 - DNA, 811 bp, synthetic construct
  source 1..811: mol_type = other DNA
ttaaaacagcctgtgggttgttcccacccacagggcccactgggcgctagtacactggtatgccttacctcggtatcacggtaccgttgtatacagtacctttgtacgcctgttttaaatcccctccccccaatgtaactttagaagtttaagcaaacaaagaccaataggagtccaacaaccagttggattgcggtcaagcacttctgtctccccggacctagtagtgataggctgtacccacggccgaagatgaaaccgtccgttacccggccagctacttcgagaagcctagtaacatcaaagatctgtcttggcgtttcgctcagcgcgttccccccgcgtagatcgggctgatgggtctccgcataccccacgggcgaccgtggcggaggccgcgtggcggcccgcctatggcgaaagccataggacgccatttcagtgacagggtgtgaagagcctattgagctagttggtagtcctccggcccctgaatgcggctaatcctaaccacggagcgtccaccagcaaaccagctggcagggcgtcgtaacgggtaactctgtggcggaaccgactactttgggtgtccgtgtttccttttgatcctatattggctgcttatggtgacaacgataagttgttatcataaagcttttgggttggccacctggaaaaagttatcagtgtttgatattgttcggctttcacgcctaccaataaaacaatccttatattatttgatttccttttatccacaagaggaaatttctgagtttcatctccagttgctcttaaccttatcagcaag

SEQ ID NO: 20522 - DNA, 741 bp, synthetic construct
  source 1..741: mol_type = other DNA
ttaaaacagcctgcgggttgttcccacccgcagggcccactgggcgctagcacactggtatcacggtacctttgtgcgcctgttttatttcccttcccccagatgcaacttagaagcagcacctcacgaccaatagcaggcgtggcacaccagccatgtcttggtcaagcacttctgtaaccccggactgagtatcaataaactgctcacgcggtcgaaggagaaaacgtccgttatccggctaactacttcgagaaacctagtaacgccatgaaaattgcgaggtgtttcgctcagcacatccccagtgtagatcaggtcgatgagtcaccgcattccccacaggtgactgtggcggtggctgcgttggcggcctgcccatggggtgacccatgggacgcttcaatacggacatggtgtgaagagtctattgagctagttagtagtcctccggcccctgaatgcggctaatcctaactgtggagcatgcgcccccactccagagggtagcgtgtcgtaatgggtaactccgcagcggaaccgactactttgggtgtccgtgtttctttttactttatattggctgcttatggtgacaattgaaagattgttaccatatagctattggattggccacccggtaacaaacagagctataatttaccaatttgtgggatttgttccattgagtttaaaagtcttgaatacacttaatttaatattactactcaatagtgcaaa

SEQ ID NO: 20523 - DNA, 741 bp, synthetic construct
  source 1..741: mol_type = other DNA
ttaaaacagcctgtgggttgttcccacccacagggcccactgggcgctagcacactggtatcatggtacctttgtgcgcctgttttgtttcccttccccagatgcaacttagaagcagcactccacgaccaatagcaggcgtggcacaccagccatgtcttggtcaggcacttctgtaaccccggactgagtatcaataaactgctcacgcggtcgaaggagaaaacgtccgttacccggctaactacttcgagaaacctagtaacgccatgaaaattgcgaggtgtttcgctcagcacatccccagtgtagatcaggccgatgagtcaccgcattccccacaggtaactgtggcggtggctgcgttggcggcctgcccatggggtgacccatgggacgcttcaatacggacatggtgtgaagagtctattgagctagttggtagtcctccggcccctgaatgcggctaatcctaactgtggagcatgcgcccccactccagagggtagcgtgtcgtaacgggtaactccgcagcggaaccgactactttgggtgtccgtgtttccttttatccttatattggctgcttatggtgacaattgaaaggttgttaccatatagctattggattggccacccagtgacaaacagagcaataatttaccaatttgtgggatttgtcccaataagtttgaaagtcttgaagacacttaatttaatactactactcaatagcgcaaa

SEQ ID NO: 20524 - DNA, 730 bp, synthetic construct
  source 1..730: mol_type = other DNA
gtgggttgttcccacccacagggcccactgggcgcttgcacactggtatcacggtacctttgtgcgcctgttttatccacccccccctaatcgagtttagaagtcaagcacaactggtcgacaggtagcccagcacaccagctgggttctgaccaagcacttctgtttacccggactgagtatcaataggctgctcgcgcggctgaaggagaaaacgttcgttacccggccaattacttcgagaaacctagtaccgccatgaacgctgcgcggcgtttcgttccgcacaaccctagtgtagatcaggtcgatgagtcaccgcgttccccacgggtgaccgtggcggtggctgcgctggcggcctgcccatggggtaacccatgggacgcttcaatgctgacatggtgcgaagagtctattgagctaattggtagtcctccggcccctgaatgcggctaatcctaactgcggagcagacactcacatgccagtgggcagtctgtcgtaacgggcaactccgcagcggaaccgactactttgggtgtccgtgtttccttttattcttgcactggctgcttatggtgacaattgaaaggttgttaccatatagctattggattggccatccggtgagcaacagagcaattatatttctatttgttggatatataccatttgattttattaactacaatactctgctttatattctccaattgaatacgaaaag

SEQ ID NO: 20525 - DNA, 742 bp, synthetic construct
  source 1..742: mol_type = other DNA
ttaaaacagcctgtgggttgttcccacccgcagggcccactgggcgtttgtacactggtatcacggtacccttgtacgcctgttttatacaccctaccccattgcaacctagaagttaatcaaatacggtcatcaggcagctcagcatgccagctgggttttgaccaagcacttctgttaccccggactgagtatcaataggctgcttgcgcggctgaaggagaaaacgttcgttacccgaccaattacttcgagaaacctagtatcaccatgaaagttgcgcagtgtttcgctccgcacaaccccagtgtagatcaggtcgatgagtcaccgcatcccccacgggcgaccgtggcggtggctgcgctggcggcctgcccatgggctaacccatgggacgcttcaaaactgacatggtgtgaagagtctattgagctaattggtggtcctccggcccctgaatgcggctaatcctaactgcggagcagatacccacatgccagtgggcggtctgtcgtaacgggcaactctgcagcggaaccgactactttgggtgtccgtgtttcctattattcctatactggctgcttatggtgacaattgagagattgttaccatatagctattggattggccatccggtgacaaacagagcgattatttacctatttgttggattcataccgttgaactttaaagttttaaaaacccttgaccttgttttagcactcaacacggcaaa

SEQ ID NO: 20526 - DNA, 742 bp, synthetic construct
  source 1..742: mol_type = other DNA
ttaaaacagcctgtgggttgttcccacccgcagggcccattgggcgtttgtacactggtatcacggtacccttgtacgcctgttttatacaccctaccccattgcaacttagaagttaatcaaatacggtcatcaggcagctcagcatgccagctgggttttgaccaagcacttctgtcaccccggactgagtatcaataggctgcttgcgcggctgaaggagaaaacgttcgttacccgaccaatcacttcgagaaacctagtatcaccatgaaagttgcgcagtgtttcgctccgcacaaccccagtgtagatcaggtcgatgagtcaccgcatcccccacgggcgaccgtggcggtggctgcgctggcggcctgcccatgggctaacccatgggacgcttcaaaactgacatggtgtgaagagtctattgagctgattggtagtcctccggcccctgaatgcggctaatcctaactgcggagcagatacccacatgccagtgggcggtctgtcgtaacgggcaactctgcagcggaaccgactactttgggtgtccgtgtttcccattattcctatactggctgcttatggtgacaattgagagattgttaccatatagctattggattggccatccggtgacaaacagagcgattgtttacctatttgttggattcataccgttgaactttaaagttttaaaaacccttgaccttgttttagcacttaatacggcaaa

SEQ ID NO: 20527 - DNA, 743 bp, synthetic construct
  source 1..743: mol_type = other DNA
ttaaaacagcctgtgggttgttcccacccacagggcccacgtggcgttagcacactggtatcccggtacctttgtgcgcctgttttatacaccccaaaccccaatgtaacttagaagaaaataacaccgatcaatagtgggtgtggcacaccagccacatcatgatcaagcactactgttcccccggactgagtatcaataagctgctcgcgcggctgaaggagaaaacgttcgttatccggccaattacttcgagaaacctagtaccaccatgaaggttgcgcagtgttttgctccacacaaccccagtgtagatcaggtcgatgagtcaccgcattccccacaggcgactgtggcggtggctgcgctggcggcctgcccatggggtgacccatgggacgcttcaatactgacatggtgtgaagagtctattgagctaattggtagtcctccggcccctgaatgcggctaatcctaactgcggagcagatacccacgcaccagtgggcagtctgtcgtaacgggtaactctgcagcggaaccgactactttgggtgtccgtgtttccttttattctcacattggctgcttatggtgacaattgaaagattgttaccatatagctactggattggccatccggtgacaaacagagcaattgtgttcctcttcgttgggttcatacctctcaacaagatcagctttcgaactttgtgctacatcatcaagctaaacacaacaaa

SEQ ID NO: 20528 - DNA, 722 bp, synthetic construct
  source 1..722: mol_type = other DNA
tccccacccacagggcccactgggcgctagcacaccggtattgcggtacctttgtgcgcctgttttatctacccttcccctacgtaacttagaagtacagcccatatggtcaatagacagctcagtaaaccaactgggctatgaccaagcacttctgttaccccggactgagtatcaataggctgctcacgcggctgaaggagaaaacgttcgttacccggccaattacttcgaaaagcttagtaccaccatggaggttgcgcagtgtttcgctccgcacaaccccagtgtagatcaggccgatgagtcaccgcgaccctcacgggcgaccgtggcggtggctgcgctggcggcctgcccatggggcaacccgtgggacgcttcaatactgacatggtgcgaagagcctattgagctaattggtattcctccggcccctgaatgcggctaatcccaactgcggagcagatacccacacaccagtgggcagtctgtcgtaacgggcgactctgcagcggaaccgactactttgggtgtccgtgtttccttttattcatttactggctgcttatggtgacaattgagaaattgttaccatatagctattggattggccatccggtgagcaacagagcgattatatacctctttgttggattcatatcacttaactttaacaattataacaccctactttacattatttgtttgaacacgaaaag

SEQ ID NO: 20529 - DNA, 809 bp, synthetic construct
  source 1..809: mol_type = other DNA
ttaaaacagcctgcgggttgttcccacccgcagggcccactgggcgctagtgcactggtatgctagtaccttggtattacggtaccattgtacgttagtacctttgcacgcctgttttaaatcccctcccccatgcaacattagaagtctatctattaaggaccaataggagtccaacagccagttggattgtggtcaagtacttctgtctccccggacttagtagtgataggctgtacccacggccgaagatgaacctgtccgttatccggccagctacttcgagaagcctagtagcaccaaagatctgtcttggcgtttcgctcagcgcgtccccccgcgtagatcgggctgatgggtctccgcatcccccacgggtgaccgtggcggaggccgcgtggcggcccgcctatggcgaaagccataggacgccatttcagtgacagggtgtgaagagcctattgagctagttggtagtcctccggcccctgaatgcggctaatcctaaccacggagcgtccaccggcaaaccagctgggagggcgtcgtaacgggtaactctgtggcggaaccgactactttgggtgtccgtgtttccttttgatcctattgtggctgcttatggtgacaacttacagttgttatcataaagcttttggattggccatccggaaagagttaacagtttgttcgctcattgctctctcaaagtttccattaaggaaagcaatttaccttcttatttcattttacaggcttgacaagatttcaagcgctcatatagatctgcttattcagctacatcaaac

SEQ ID NO: 20530 - DNA, 742 bp, synthetic construct
  source 1..742: mol_type = other DNA
ttaaaacagcctgtgggttgttcccacccacagggcccactgggcgctagcacactggtattgcggtacctttgtgcgcctgttttatccgccctccccagcagtaacctagaagcatgaataatgtggtcaataggaagctcagtaaaccaactgggtcttgaccaaacacttctgttaccccggactgagtatcaagaagctgctcgcgtggctgaaggagaaaacgttcgttacccggccaattacttcgagaaacccagtaccaccatggaagttgcgcagcgtttcgctccgcacaaccccagtgtagatcaggtcgatgagtcaccgcaatcctcacgggtgaccgtggcggtggctgcgctggcggcctgcccatggggcaacccatgggacgcttcaatactgacatggtgcgaagagtctattgagctaattggtagtcctccggcccctgaatgcggctaatcctaactgcggagcagatatccacacaccagtggacagtctgtcgtaatgggcaactctgcagcggaaccgactactttgggtgtccgtgtttccttttatctttatattggctgcttatggtgacaattgagagattgttaccatatagctattggattggccatccggtgagcaacagagcaattgtattcctctttgtaggatttgtgccgttgaattacaacaactacaacaccttactctacatcatccacttaaacacgcggaa

SEQ ID NO: 20531 - DNA, 731 bp, synthetic construct
  source 1..731: mol_type = other DNA
ggtgggttgttcccacccacagggcccactgggcgtttgcacactggtatcgcggtacctttgtgcgcctgttttatccaccctcccctaattgaatttagaagtcaagcacaaccggtcaacagatagcccagcataccagctgggtttcgaccaagcacttctgtttacccgggctgagtatcaataggctgctcacgcggctgaaggagaaaacgttcgttacccggccaattacttcgagaaacctagtaccgccatggacgttgcgcagcgtttcgttccacgcaaccccagtgtagatcaggtcgatgagtcaccgcatcccccacgggcgaccgtggcggtggctgcgctggcggcctgcccatggggtaacccatgggacgcttcaatgctgacatggtgcgaagagtctattgagctaattggtagtcctccggcccctgaatgcggctaatcctaactgcggagcagacacccacacgccagtgggcagtctgtcgtaacgggcaactccgcagcggaaccgactactttgggtgtccgtgtttctttttattctttcattggctgcttatggtgacaattgagaggttgttaccatatagctattggattggccatccggtgagcaacagagcaattatatttctttttgttggatatataccacttgactctaataactacaataccctgctttatattctccaattgaatacgaaaag

SEQ ID NO: 20532 - DNA, 742 bp, synthetic construct
  source 1..742: mol_type = other DNA
ttaaaacagcctgggggttgttcccacccacagggcccactgggcgctggcacactggtattacggtacctttgtgcgcctgttttatttacccttccccaatgcaacttagaagtataactcaaacggtcaacagataactcagtatgccagctgagcctagaccaagcacttctgttaccccggaccgagtatcaataagctgctcgcgcggctgaaggagaaaaagttcgttacccggccaattacttcgagaaacttagtaccaccatggaggttgcgcagtgtttcgctccacacacccccagtgtagatcaggccgatgagtcaccgcgttccccacgggcgaccgtggcggtggctgcgttggcggcctgcccatggggcaacccatgggacgcttcaatactgacatggtgcgaagagtctattgagctaattggtagtcctccggcccctgaatgcggctaatcctaactgcggagcagatacccacgcgccagtgggcagtctgtcgtaatgggcaactctgcagcggaaccgactactttgggtgtccgtgtttccttttattcttgtattggctgcttatggtgacaattgagagattgttaccatatagctattggattggccatccggtgacaaacagggcgatcatctatttgtttgttggttttataccattgaactacaaagtcctagatactcttaaccttatattaaaatttaacacattaaa

SEQ ID NO: 20533 - DNA, 727 bp, synthetic construct
  source 1..727: mol_type = other DNA
ttaaaacagctctggggttgttcccaccccagaggcccacgtggcggctagtactccggtaccccggtacccttgtacgcctgttttatactccctttcccaagtaactttagaagaaataaactaatgttcaacaggagggggtacaaaccagtaccaccacgaacacacacttctgtttccccggtgaagttgcatagactgtacccacggttgaaagcgatgaatccgttacccgcttaggtacttcgagaagcctagtatcatcttggaatcttcgatgcgttgcgatcagcactctaccccgagtgtagcttgggtcgatgagtctggacaccccacaccggcgacggtggtccaggctgcgttggcggcctacccatggctagcaccatgggacgctagttgtgaacaaggtgcgaagagcctattgagctacctgagagtcctccggcccctgaatgcggctaatcccaaccacggagcaaatgctcacaatccagtgagtggtttgtcgtaatgcgcaagtctgtggcggaaccgactactttgggtgtccgtgtttccttttatttttattatggctgcttatggtgacaatctgagattgttatcatatagctattggattagccatccggtgatatcttgaaattttgccataactttttcacaaatcctacaacattacactacactttctcttgaataattgagacaactcata

SEQ ID NO: 20534 - DNA, 731 bp, synthetic construct
  source 1..731: mol_type = other DNA
gtgggttgttcccacccacagggcccaccgggcgctagcacactggtatctcggtacccttgtgcgcctgttttatccacccttttcccatttaacttagaagcacgcgccaagacggtcaaaagggagcccagtaagccaattgggctatgaccaagcactcctgtaaccccgggccgagtatcaataagctgctcgcgcggctgaaggagaaaaagctcgttacccggccaattacttcgagaaacccagtagcattatgaaagttgcgcagcgtttcgctccacacaaccccagtgtagatcaggtcgatgagtcaccgcgttccccacgggtgaccgtggcggtggctgcgctggcggcctgcccatggggccacccatgggacgcttcaatactgacatggtgtgaagagtctattgagctaattggtagtcctccggcccctgaatgcggctaatcctaactgcggagcagatgcccacacaccagtgggaagtctgtcgtaacgggtaactctgcagcggaaccgactactttgggtgtccgtgtttccttttatttctactctggctgcttatggtgacaattgaaaggttgttaccatatagctattggattggccatccggtgtcacatagagcgattatttacttgtttgttgggtttataccactgaactataaagttttaaatactcttaactacattttaatccttaactcattaaa

SEQ ID NO: 20535 - DNA, 726 bp, synthetic construct
  source 1..726: mol_type = other DNA
ttaaaacagctctggggttgttcccaccccagaggcccacgtggcggctagtactccggtaccccggtacccttgtacgcctgttttatactccctttcccaagtaactttagaagaaataaactaatgttcaacaggagggggtacaaaccagtaccaccacgaacacacacttctgtttccccggtgaagttgcatagactgtacccacggttgaaagcgatgaatccgttacccgcttaggtacttcgagaagcctagtatcatcttggaatcttcgatgcgttgcgatcagcactctaccccgagtgtagcttgggtcgatgagtctggacaccccacaccggcgacgtggtccaggctgcgttggcggcctacccatggctagcaccatgggacgctagttgtgaacaaggtgcgaagagcctattgagctacctgagagtcctccggcccctgaatgcggctaatcccaaccacggagcaaatgctcacaatccagtgagtggtttgtcgtaatgcgcaagtctgtggcggaaccgactactttgggtgtccgtgtttccttttatttttattatggctgcttatggtgacaatctgagattgttatcatatagctattggattagccatccggtgatatcttgaaattttgccataactttttcacaaatcctacaacattacactacactttctcttgaataattgagacaactcata

SEQ ID NO: 20536 - DNA, 818 bp, synthetic construct
  source 1..818: mol_type = other DNA
ttaaaacagcctgggggttgtacccacccctagggcccacgtggcgttagtaccctggtacgctagtacctttgtacgcctgtttttccctcccttaaataaattaagattaccactactgaggggagtagaccgactccgctccagcactgctgcaccagtgaactggtacgctagtacctttgcacggagtagatggtacacccaccccgtaacttagaagtactgaacacaaccgaccaatagcggcgtgacagccagttacgcaacggtcaagcacttctgtttccccggtccgtatggatcgttacccgcccaagctactacaagaagcctattaactactgaaactgttgaaaggttgcgctcaaccacatccccagtggtagctccgagtgatggggctcgcgattcccccgtggtaacacggtcgcttgcccgcgcgcgcactcgggtccggtctttgaccgttcaccttgagacaacgtaagtagccaagagcctattgtgctggtttggttatcctccggagccgtgaatgctgctaatcctaacccccaagcgtgtgcgcacaaaccagtgttgctacgtcgtaacgcgtaagttggaggcggaacagactactttcggtactccgtgtttcctttatctcatttttaaaaactttatggtgacaattgttgtgatttgtgaactttacatctagctcttgcataacgccttgtttcatctagtcgccttccatataatatctaaagctttcaacccttgagttaactcactagcaattttgagctcaaataacctagatatagata

SEQ ID NO: 20537 - DNA, 811 bp, synthetic construct
  source 1..811: mol_type = other DNA
ttaaaacagcctgtgggttgttcccactcatagggcctactgggcgctagtacactggtatacctagcctcggtatcgcggtaccgttgcttacagtacctttgtacgcctgttttaaatccccttccccgcacgtgtctttagaagtttaagcaaataaagaccaataggggtccaacaaccagttggattgcggtcaagcacttctgtctccccggacctagtagtgataggctgtacccacggccgaagatgaacccgtccgttatccggccagctacttcgagaagcctagtagcatcaaagatctgtcttggcgtttcgctcagcgcgtttcccccgcgtagatcgggctgatgggtctccgcacaccccacgggcgaccgtggcggaggccgcgtggcggcccgcctatggcgaaagccataggacgccatttcagtgacagggtgtgaagagcctattgagctagttggtagtcctccggcccctgaatgcggctaatcctaaccacggagcgttcaccagcaaaccagctgggagggcgtcgtaacgggcaactctgtggcggaaccgactactttgggtgtccgtgtttctttttgatcctatattggctgcttatggtgacaacgataagttgttatcataaagcttttgggttggccacctggaaaaggttatcagtgtttaatattgttcgactttcacgcctaccaataaaacaagctttgtattatttagtctctttttatcctaaagaggaaattactgaatttcatttgcaattgttattatcattgtcgacaag

SEQ ID NO: 20538 - DNA, 811 bp, synthetic construct; identical to SEQ ID NO: 1251
  source 1..811: mol_type = other DNA

SEQ ID NO: 20539 - DNA, 744 bp, synthetic construct; identical to SEQ ID NO: 1083
  source 1..744: mol_type = other DNA

SEQ ID NO: 20540 - DNA, 718 bp, synthetic construct
  source 1..718: mol_type = other DNA
cacccacagggcccattgggcgtcagcaccctggtatcacggtacctttgtgcgcctgttttatatcccttcccccaattgtaacttagaagaaacacacaccgatcaacagcaagcgtggcacaccagccatgttttggtcaagcacttctgttaccccggactgagtatcaatagactgctcacgcggttgaaggagaaagcgtccgttatccggccagctacttcgagaaacctagtaacaccatggaagttgcggagtgtttcgctcagcactaccccagtgtagatcaggtcgatgagtcaccgctttccccacgggcgaccgtggcggtggctgcgttggcggcctgcctatgggggaacccataggacgctctaatacagacatggtgcgaagagtctattgagctagctggtattcctccggcccctgaatgcggctaatcctaactgtggagcacatgcccctaatccaaggggtagtgtgtcgtaatgagcaattccgcagcggaaccgactactttgggtgtccgtgtttcctcttattcttgtactggctgcttatggtgacaattgagagattgttaccatatagctattggattggccatccggtgactaatagagctattgtgtatctctttgttggatttgtaccacttaatttgaaagaaatcaggacactacgctacattttactattgaacaccgcaaa

SEQ ID NO: 20541 - DNA, 726 bp, synthetic construct
  source 1..726: mol_type = other DNA
ttaaaacagctctggggttgttcccaccccagaggcccacgtggcggctagtactccggtactccggtacccttgtacgcctgttttatactcccctccccaagcaactttagaagatataaactaatgttcaacaggagggggtacaaaccagtaccaccacgaacagacacttctgtttccccggtgaagttgcatagactgtacccacggttgaaagcgatgaatccgttatccgcttaggtacttcgagaagcctagtatcgtcttggaatcttcgatgcgttgcgctcagcactctaccccgagtgtagcttaggtcgatgagcctggacaccccacaccggcgacggtggtccaggctgcgttggcggcctacccatggctaacaccatgggacgctagttgtgaacaaggtgtgaagagcctattgagctacctaagagtcctccggcccctgaatgcggctaatcccaaccacggagcaaatgctcacaatccagtgagtggtttgtcgtaacgcgcaagtctgtggcggaaccgactactttgggtgtccgtgtttccttttatttttattatggctgcttatggtgacaatctgagattgttattatatagctattggattggccatccggtgatatcttgaaattttgctataattttccacaaattttacaacatcacactacaccttcttttaaacaattgagacaactcata

SEQ ID NO: 20542 - DNA, 742 bp, synthetic construct
  source 1..742: mol_type = other DNA
taatacagcctgtgggttgttcccacccacagggcccaccgggcgctagcacactggtatctcggtacccttgtgcgcctgttttatccacccttttcccatttaacttagaagcacgcgccaagacggtcaaaagggagcccagtaagccaattgggctatgaccaagcactcctgtaaccccgggccgagtatcaataagctgctcgcgcggctgaaggagaaaaagctcgttacccggccaattacttcgagaaacccagtagcatcatgaaagttgcgcagcgtttcgctccacacaaccccagtgtagatcaggtcgatgagtcaccgcgttccccacgggtgaccgtggcggtggctgcgctggcggcctgcccatggggccacccatgggacgcttcaatactgacatggtgtgaagagtctattgagctaattggtagtcctccggcccctgaatgcggctaatcctaactgcggagcagatgcccacacaccagtgggaagtctgtcgtaacgggtaactctgcagcggaaccgactactttgggtgtccgtgtttccttttatttctactctggctgcttatggtgacaattgaaaggttgttaccatatagctattggattggccatccggtgtcacatagagcgattatttacttgtttgttgggtttataccactgaactataaagttttaaatactcttaactacattttaatccttaactcattaaa

SEQ ID NO: 20543 - DNA, 742 bp, synthetic construct
  source 1..742: mol_type = other DNA
taaaacagcctgtgggttgttcccacccacagggcccaccgggcgctagcacactggtatctcggtacccttgtgcgcctgttttatccacccttttcccatttaacttagaagcacgcgccaagacggtcaaaagggagcccagtaagccaattgggctatgaccaagcactcctgtaaccccgggccgagtatcaataagctgctcgcgcggctgaaggagaaaaagctcgttacccggccaattacttcgagaaacccagtagcatcatgaaagttgcgcagcgtttcgctccacacaaccccagtgtagatcaggtcgatgagtcaccgcgttccccacgggtgaccgtggcggtggctgcgctggcggcctgcccatggggccacccatgggacgcttcaatactgacatggtgtgaagagtctattgagctaattggtagtcctccggcccctgaatgcggctaatcctaactgcggagcagatgcccacacaccagtgggaagtctgtcgtaacgggtaactctgcagcggaaccgactactttgggtgtccgtgtttccttttatttctactctggctgcttatggtgacaattgaaaggttgttaccatatagctattggattggccatccggtgtcacatagagcgattatttacttgtttgttgggtttataccactgaactataaagttttaaatactcttaactacattttaatccttaactcattaaa

SEQ ID NO: 20544 - DNA, 741 bp, synthetic construct
  source 1..741: mol_type = other DNA
ttaaaacagcctgtgggttgttcccacccacaggcccattgggcgctagcactctggtatcacggtacctttgtgcgcctgttttacatcccctccccaaattgtaatttagaagtttcacacaccgatcattagcaagcgtggcacaccagccatgttttgatcaagcacttctgttaccccggactgagtatcaatagaccgctaacgcggttgaaggagaaaacgttcgttacccggccaactacttcgaaaaacctagtaacaccatggaagttgcggagtgtttcgctcagcactaccccagtgtagatcaggtcgatgagtcaccgcgttccccacgggcgaccgtggcggtggctgcgttggcggcctgcctacggggaaacccgtaggacgctctaatacagacatggtgcgaagagtctattgagctagttggtaatcctccggcccctgaatgcggctaatcctaactgcggagcacataccctcaaaccagggggcagtgtgtcgtaacgggcaactctgcagcggaaccgactactttgggtgtccgtgtttcattttattcctatactggctgcttatggtgacaattgacaggttgttaccatatagttattggattggccatccggtgactaacagagcaattatatatctctttgttgggtttataccacttagcttgaaagaggttaaaacactacatctcatcattaaactaaatacaacaaa

SEQ ID NO: 20545 - DNA, 818 bp, synthetic construct
  source 1..818: mol_type = other DNA
ttcaaacagcctgggggttgtacccacccctggggcccacgcggcgctagtactctggtacgttagtacctttgtacgcctgttttcccctcccttaaataaattaagattaccactactgaggggagtagtccgactccgctccgacaatgtcgcaccagtgcactggtacgctagtaccttttcacggagtagctggtattccctcccgaaacttagaagcacttaaatcaaccgaccaataggcgcgcggtagccagccgcgttacggtcaagcactcctgtttccccggtccacaaggatcgttacccgcccgacccactgcgagaaacctagtagttggccaagtggtaacgaggttgcgctcagccacaaccccagtggtagctccggaagatggggctcgcaccacccccgcggtaacgcggttgcttgcccgcgcgtgcttccgggtccggtctcgtaccgttcacctcaataccacgtaaccagcaaagagtctattgcgctgggacggttttcctccggggccgtgaatgctgctaatcccaacctccgagcgtgtgcgcacaatccagtgttgctacgtcgtaacgcgtaagttggaggcggaacagactactttcggtaccccgtgtttccctatcattccatttcattttatggtgacaattgctgagatctgtgatttggcgaccttaccactgaatattgccttatattacttggttgcattccacaaaacctctgacatacctgcttcctatatcgacctacttgttttcctcaatttaaagtatagactacaaatagcaga

SEQ ID NO: 20546 - DNA, 723 bp, synthetic construct
  source 1..723: mol_type = other DNA
ttcccacccacagggcccactgggcgccagtacactggtatcacggtacctttgtgcgcctgtttgactcaccttccccaaacgcaacttagaagcataacttaaatggtcattaggcggctcagtatgccaactgggtctcgatcaagcacttctgttaccccggactgagtaccaataggctgctcacgcggctgaaagggaaaccgttcgttacccgaccaactacttcgagaaacctagtaccaccatgaaagttgcgcggcgtttcgctccgcacaaccccagtgtagatcaggccgatgagtcaccgcaaaccccacgggcgaccgtggcggtggctgcgctggcggcctgcccatgggacaacccatgggacgccacaattctgacatgatgcgaagagtctattgagctagttggtagtcctccggcccctgaatgcggctaatcccaactgtggagcagatacccacgcaccagtgggcagtctgtcgtaatgggcaactctacagcggaaccgactactttgggtgtccgtgtttctttttattcctacgctggctacttatggtgacaattgagagactgtaactatattgctatcgggttggccacctggtgaagaataaaacagttgctcacttgtttgtcagtcttgcaccgtcgtgccacaaagtcttaactgcccctcaacatcgtcgtaatactaaacacgctgaa

SEQ ID NO: 20547 - DNA, 737 bp, synthetic construct
  source 1..737: mol_type = other DNA
acagcctgtgggttgttcccacccacagggcccactgggcgtttgcacactggtatcgcggtacctttgtgcgcctgttttatccaccctcccctaattgaatttagaagtcaagcacaaccggtcaacagatagcccagcataccagctgggtttcgaccaagcacttctgtttacccgggctgagtatcaataggctgctcacgcggctgaaggagaaaacgttcgttacccggccaattacttcgagaaacctagtaccgccatggacgttgcgcagcgtttcgttccacgcaaccccagtgtagatcaggtcgatgagtcaccgcatcccccacgggtgaccgtggcggtggctgcgctggcggcctgcccatggggtaacccatgggacgcttcaatgctgacatggtgcgaagagtctattgagctaattggtagtcctccggcccctgaatgcggctaatcctaactgcggagcagacacccacacgccagtgggcagtctgtcgtaacgggcaactccgcagcggaaccgactactttgggtgtccgtgtttccttttattctttcattggctgcttatggtgacaattgagaggttgttaccatatagctattggattggccatccggtgagcaacagagcaattatatttctttttgttggatatataccacttgactctaataactacaataccctgctttatattctccaattgaatacgaaaag

SEQ ID NO: 20548 - DNA, 715 bp, synthetic construct
  source 1..715: mol_type = other DNA
ccacagggcccatagggcgctagcactctggtattgcggtacctttgtgcgcctgttttatgttcccacccccaatcgcaacttagaagcggtacttcacgaccaacagtgggcgtgacacaccagccacgtctcggtcaagcacttctgtctccccggactgagtatcaataggctgctcacgcggctgaaggagaaaacgtccgttatccggccaattacttcgagaaacctagtaccgccatgaaagttgcgcagcgtttcgatccgcacaaccccagtgtagatcaggtcgatgagtcaccgcgttccccacgggtgaccgtggcggtggctgcgttggcggcctgcccatggggtaacccatgggacgcttcaatactgacatggtgtgaagagtctattgagctaattggtagtcctccggcccctgaatgcggctaatcctaactgcggagcagattcccgcatgccagcgggtggtctgtcgtaacgggcaactctgcagcggaaccgactactttgggtgtccgtgtttccttttattcctatattggctgcttatggtgacaattgagagattgttaccatatagctattggattggccatccggtgacaaacagagcgattatttaccaatttattggttttgtaccgttgaattttaacacattcagaactcttaaccttattttggctcttaatacagcaaa

SEQ ID NO: 20549 - DNA, 682 bp, synthetic construct
  source 1..682: mol_type = other DNA
gggaacaaccccagagctgttttaaacccctttcccccgtaacttagaagctttaaatccaagttcaacagtcagtggtacaacccagtactaccacgaacaagcacttctgttaccccggtgagattgcataggccgtccccacggctaaaagcgattgatccgttatccgctcttgtacttcgagaagcctagtaagaccttgggatcctcgatgcgttgcgctcaacactcaaccccagagtgtagcttgggctgatgagtctggacattcctcaccggtgacggtggtccaggctgcgttggcggcctacctgtggcccaaagccacaggacgctagttgtgaacaaggtgtgaagagcctattgagctacaagagagtcctccggcccctgaatgcggctaatcccaaccacggagcaggcgattgcaacccagcaactagcctgtcgtaacgcgcaagtctgtggcggaaccgactactttgggtgtccgtgtttccttttattacataatggctgcttatggtgacaatcacagattgttgtcataaagcgaattggattggccatccggtgagaattaaaacaattatttacttatttgttggatttgttcctatacacacccaaacaccttgcttgattgaagtaattctgttgataagacaacactattaca

SEQ ID NO: 20550 - DNA, 729 bp, synthetic construct
  source 1..729: mol_type = other DNA
gggttgttcccacccacagggcccaccgggcgctagcacactggtatctcggtacccttgtgcgcctgttttatccacccttttcccatttaacttagaagcacgcgccaagacggtcaaaagggagcccagtaagccaattgggctatgaccaagcactcctgtaaccccgggccgagtatcaataagctgctcgcgcggctgaaggagaaaaagctcgttacccggccaattacttcgagaaacccagtagcatcatgaaagttgcgcagcgtttcgctccacacaaccccagtgtagatcaggtcgatgagtcaccgcgttccccacgggtgaccgtggcggtggctgcgctggcggcctgcccatggggccacccatgggacgcttcaatactgacatggtgtgaagagtctattgagctaattggtagtcctccggcccctgaatgcggctaatcctaactgcggagcagatgcccacacaccagtgggaagtctgtcgtaacgggtaactctgcagcggaaccgactactttgggtgtccgtgtttccttttatttctactctggctgcttatggtgacaattgaaaggttgttaccatatagctattggattggccatccggtgtcacatagagcgattatttacttgtttgttgggtttataccactgaactataaagttttaaatactcttaactacattttaatccttaactcattaaa

SEQ ID NO: 20551 - DNA, 713 bp, synthetic construct
  source 1..713: mol_type = other DNA
cagaggcccacgtggcggctagtactccggtattgcggtacccttgtacgcctgttttatactcccttcccgtaacttagacgcacaaaaccaagttcaatagaagggggtacaaaccagtaccaccacgaacaagcacttctgtttccccggtgatgttgtatagactgcttgcgtggttgaaagcgacggatccgttatccgcttatgtacttcgagaagcccagtaccacctcggaatcttcgatgcgttgcgctcagcactcaaccccagagtgtagcttaggctgatgagtctggacatccctcaccggtgacggtggtccaggctgcgttggcggcctacctatggctaacgccatgggacgctagttgtgaacaaggtgtgaagagcctattgagctacataagaatcctccggcccctgaatgcggctaatcccaacctcggggcaggtggtcacaaaccagtgattggcctgtcgtaacgcgcaagtccgtggcggaaccgactactttgggtgtccgtgtttccttttattttaatgtggctgcttatggtgacaatcacagattgttatcataaagcgaattggattggccatccggtgaaagtgagattcattatctatctgtttgctggattcgctccattgagtgtgtttactctaagtacaatttcaacagttatttcaatcagacaattgtatcata

SEQ ID NO: 20552 - DNA, 713 bp, synthetic construct
  source 1..713: mol_type = other DNA
cagaggcccacgtggcggctagtactccggtattgcggtacccttgtacgcctgttttatactcccttcccgtaacttagacgcacaaaaccaagttcaatagaagggggtacaaaccagtaccaccacgaacaagcacttctgtttccccggtgatgttgtatagactgcttgcgtggttgaaagcgacggatccgttatccgcttatgtacttcgagaagcccagtaccacctcggaatcttcgatgcgttgcgctcagcactcaaccccagagtgtagcttaggctgatgagtctggacatccctcaccggtgacggtggtccaggctgcgttggcggcctacctatggctaacgccatgggacgctagttgtgaacaaggtgtgaagagcctattgagctacataagaatcctccggcccctgaatgcggctaatcccaacctcggagcaggtggtcacaaaccagtgattggcctgtcgtaacgcgcaagtccgtggcggaaccgactactttgggtgtccgtgtttccttttattttattgtggctgcttatggtgacaatcacagattgttatcataaagcgaattggattggccatccggtgaaagtgagattcattatctatctgtttgctggattcgctccattgagtgtgtttactctaagtacaatttcaacagttatttcaatcagacaattgtatcata

SEQ ID NO: 20553 - DNA, 713 bp, synthetic construct
  source 1..713: mol_type = other DNA
cagagacccacgtggcggctagtactccggtattgcggtacccttgtacgcctgttttatactcccttcccgtaacttagacacacaaaaccaagttcaatagaagggggtacaaaccagtaccaccacgaacaagcacttctgtttccccggtgatgttgtatagactgcttgcgtggttgaaagcgacggatccgttatccgcttatgtacttcgagaagcccagtaccacctcggaatcttcgatgcgttgcgctcagcactcaaccccagagtgtagcttaggctgatgagtctggacatccctcaccggtgacggtggtccaggctgcgttggcggcctacctatggctaacgccatgggacgctagttgtgaacaaggtgtgaagagcctattgagctacataagaatcctccggcccctgaatgcggctaatcccaacctcggggcaggtggtcacaaaccagtgattggcctgtcgtaacgcgcaagtccgtggcggaaccgactactttgggtgtccgtgtttccttttattttattgtggctgcttatggtgacaatcacagattgttatcataaagcgaattggattggccatccggtgaaagtgagattcattatctatctgtttgctggattcgctccattgagtgtgtttactctaagtacaatttcaacagttatttcaatcagacaattgtatcata

SEQ ID NO: 20554 - DNA, 713 bp, synthetic construct
  source 1..713: mol_type = other DNA
cagagacccacgtggcggctagtactccggtattgcggtacccttgtacgcctgttttatactcccttcccgtaacttagacgcacaaaaccaagttcaatagaagggggtacaaaccagtaccaccacgaacaagcacttctgtttccccggtgatgttgtatagactgcttgcgtggttgaaagcgacggatccgttatccgcttatgtacttcgagaagcccagtaccacctcggaatcttcgatgcgttgcgctcagcactcaaccccagagtgtagcttaggctgatgagtctggacatccctcaccggtgacggtggtccaggctgcgttggcggcctacctatggctaacgccatgggacgctagttgtgaacaaggtgtgaagagcctattgagctacataagaatcctccggcccctgaatgcggctaatcccaacctcggggcaggtggtcacaaaccagtgattggcctgtcgtaacgcgcaagtccgtggcggaaccgactactttgggtgtccgtgtttccttttattttattgtggctgcttatggtgacaatcacagattgttatcataaagcgaattggattggccatccggtgaaagtgagattcattatctatctgtttgctggattcgctccattgagtgtgtttactctaagtacaatttcaacagttatttcaatcagacaattgtatcata

SEQ ID NO: 20555 - DNA, 713 bp, synthetic construct
  source 1..713: mol_type = other DNA
cagaggcccacgtggcggctagtactccggtattgcggtacccttgtacgcctgttttatactcccttcccgtaacttagacgcacaaaaccaagttcaatagaagggggtacaaaccagtaccaccacgaacaagcacttctgtttccccggtgatgttgtatagactgcttgcgtggttgaaagcgacggatccgttatccgcttatgtacttcgagaagcccagtaccacctcggaatcttcgatgcgttgcgctcagcactcaaccccagagtgtagcttaggctgatgagtctggacatccctcaccggtgacggtggtccaggctgcgttggcggcctacctatggctaacgccatgggacgctagttgtgaacaaggtgtgaagagcctattgagctacataagaatcctccggcccctgaatgcggctaatcccaacctcggggcaggtggtcacaaaccagtgattggcctgtcgtaacgcgcaagtccgtggcggaaccgactactttgggtgtccgtgtttccttttattttattgtggctgcttatggtgacaatcacagattgttatcataaagcgaattggattggccatccggtgaaagtgagattcattatctatctgtttgctggattcgctccattgagtgtgtttactctaagtacaatttcaacagttatttcaatcagacaattgtatcata

SEQ ID NO: 20556 - DNA, 713 bp, synthetic construct
  source 1..713: mol_type = other DNA
cagaggcccacgtggcggctagtactccggtattgcggtacccttgtacgcctgttttatactcccttcccgtaacttagacgcacaaaaccaagttcaatagaagggggtacaaaccagtaccaccacgaacaagcacttctgtttccccggtgatgttgcatagactgcttgcgtggttgaaagcgacggatccgttatccgcttatgtacttcgagaagcccagtaccacctcggaatcttcgatgcgttgcgctcagcactcaaccccagagtgtagcttaggctgatgagtctggacatccctcaccggtgacggtggtccaggctgcgttggcggcctacctatggctaacgccatgggacgctagttgtgaacaaggtgtgaagagcctattgagctacataagaatcctccggcccctgaatgcggctaatcccaacctcggggcaggtggtcacaaaccagtgattggcctgtcgtaacgcgcaagtccgtggcggaaccgactactttgggtgtccgtgtttccttttattttattgtggctgcttatggtgacaatcacagattgttatcataaagcgaattggattggccatccggtgaaagtgagattcattatctatctgtttgctggattcgctccattgagtgtgtttactctaagtacaatttcaacagttatttcaatcagacaattgtatcata

SEQ ID NO: 20557 - DNA, 713 bp, synthetic construct
  source 1..713: mol_type = other DNA
cagagacccacgtggcggctagtactccggtattgcggtacccttgtacgcctgttttatactcccttcccgtaacttagacgcacaaaaccaagttcaatagaagggggtacaaaccagtaccaccacgaacaagcacttctgtttccccggtgatgttgtatagactgcttgcgtggttgaaagcgacggatccgttatccgcttatgtacttcgagaagcccagtaccacctcggaatcttcgatgcgttgcgctcagcactcaaccccagagtgtagcttaggctgatgagtctggacatccctcaccggtgacggtggtccaggctgcgttggcggcctacctatggctaacgccatgggacgctagttgtgaacaaggtgtgaagagcctattgagctacataagaatcctccggcccctgaatgcggctaatcccaacctcggggcaggtggtcacaaaccagtgattggcctgtcgtaacgcgcaagtccgtggcggaaccgactactttgggtgtccgtgtttccttttattttattgtggctgcttatggtgacaatcacagattgttatcataaagcgaattggattggccatccggtgaaagtgagatccattatctatctgtttgctggattcgctccattgagtgtgtttactctaagtacaatttcaacagttatttcaatcagacaattgtatcata

SEQ ID NO: 20558 - DNA, 713 bp, synthetic construct
  source 1..713: mol_type = other DNA
cagagacccacgtggcggctagtactccggtattgcggtacccttgtacgcctgttttatactcccttcccgtaacttagacgcacaaaaccaagttcaatagaagggggtacaaaccagtaccaccacgaacaagcacttctgtttccccggtgatgttgtatagactgcttgcgtggttgaaagcgacggatccgttatccgcttatgtacttcgagaagcccagtaccacctcggaatcttcgatgcgttgcgctcagcactcaaccccagagtgtagcttaggctgatgagtctggacatccctcaccggtgacggtggtccaggctgcgttggcggcctacctatggctaacgccatgggacgctagttgtgaacaaggtgtgaagagcctattgagctacataagaatcctccggcccctgaatgcggctaatcccaacctcggggcaggtgatcacaaaccagtgattggcctgtcgtaacgcgcaagtccgtggcggaaccgactactttgggtgtccgtgtttccttttattttattgtggctgcttatggtgacaatcacagattgttatcataaagcgaattggattggccatccggtgaaagtgagattcattatctatctgtttgctggattcgctccattgagtgtgtttactctaagtacaatttcaacagttatttcaatcagacaattgtatcata

SEQ ID NO: 20559 - DNA, 713 bp, synthetic construct
  source 1..713: mol_type = other DNA
cagagacccacgtggcggctagtactccggtattgcggtacccttgtacgcctgttttatactcccttcccgtaacttagacgcacaaaaccaagttcaatagaagggggtacaaaccagtaccaccacgaacaagcacttctgtttccccggtgatgttgtatagaccgcttgcgtggttgaaagcgacggatccgttatccgcttatgtacttcgagaagcccagtaccacctcggaatcttcgatgcgttgcgctcagcactcaaccccagagtgtagcttaggctgatgagtctggacatccctcaccggtgacggtggtccaggctgcgttggcggcctacctatggctaacgccatgggacgctagttgtgaacaaggtgtgaagagcctattgagctacataagaatcctccggcccctgaatgcggctaatcccaacctcggggcaggtggtcacaaaccagtgattggcctgtcgtaacgcgcaagtccgtggcggaaccgactactttgggtgtccgtgtttccttttattttattgtggctgcttatggtgacaatcacagattgttatcataaagcgaattggattggccatccggtgaaagtgagattcattatctatctgtttgctggattcgctccattgagtgtgtttactctaagtacaatttcaacagttatttcaatcagacaattgtatcata

SEQ ID NO: 20560 - DNA, 713 bp, synthetic construct
  source 1..713: mol_type = other DNA
cagaggcccacgtggcggctagtactccggtattgcggtacccttgtacgcctgttttatactcccttcccgtaacttagacgcacaaaaccaagttcaatagaagggggtacaaaccagtaccaccacgaacaagcacttctgtttccccggtgatgttgtatagactgcttgcgtggttgaaagcgacggatccgttatccgcttatgtacttcgagaagcccagtaccacctcggaatcttcgatgcgttgcgctcagcactcaaccccagagtgtagcttaggctgatgagtctggacatccctcaccggtgacggtggtccaggctgcgttggcggcctacctatggctaacgccatgggacgctagttgtgaacaaggtgtgaagagcctattgagctacataagaatcctccggcccctgaatgcggctaatcccaacctcggggcaggtggtcacaaaccagtgattggcctgtcgtaacgcgcaagcccgtggcggaaccgactactttgggtgtccgtgtttccttttattttattgtggctgcttatggtgacaatcacagattgttatcataaagcgaattggattggccatccggtgaaagtgagattcattatctatctgtttgctggattcgctccattgagtgtgtttactctaagtacaatttcaacagttatttcaatcagacaattgtatcata

SEQ ID NO: 20561 - DNA, 713 bp, synthetic construct
  source 1..713: mol_type = other DNA
cagaggcccacgtggcggctagtactccggtattgcggtacccttgtacgcctgttttatactcccttcccgtaacttagacgcacaaaaccaagttcaatagaagggggtacaaaccagtaccaccacgaacaagcacttctgtttccccggtgatgttgtatagactgcttgcgtggttgaaagcgacggatccgttatccgcttatgtacttcgagaagcccagtaccacctcggaatcttcgatgcgttgcgctcagcactcaaccccagagtgtagcttaggctgatgagtctggacatccctcaccggtgacggtggtccaggctgcgttggcggcctacctatggctaacgccatgggacgctagttgtgaacaaggtgtgaagagcctattgagctacataagaatcctccggcccctgaatgcggctaatcccaacctcggggcaggtggtcacaaaccagtgattggcctgtcgtaacgcgcaagtccgtggcggaaccgactactttgggtgtccgtgtttccttttattttattgtggctgcttatggtgacaatcacagattgttatcataaagtgaattggattggccatccggtgaaagtgagattcattatctatctgtttgctggattcgctccattgagtgtgtttactctaagtacaatttcaacagttatttcaatcagacaattgtatcata

SEQ ID NO: 20562 - DNA, 713 bp, synthetic construct
  source 1..713: mol_type = other DNA
cagagacccacgtggcggctagtactccggtattgcggtacccttgtacgcctgttttatactcccttcccgtaacttagacgcacaaaaccaagttcaatagaagggggtacaaaccagtaccaccacgaacaagctcttctgtttccccggtgatgttgtatagactgcttgcgtggttgaaagcgacggatccgttatccgcttatgtacttcgagaagcccagtaccacctcggaatcttcgatgcgttgcgctcagcactcaaccccagagtgtagcttaggctgatgagtctggacatccctcaccggtgacggtggtccaggctgcgttggcggcctacctatggctaacgccatgggacgctagttgtgaacaaggtgtgaagagcctattgagctacataagaatcctccggcccctgaatgcggctaatcccaacctcggggcaggtggtcacaaaccagtgattggcctgtcgtaacgcgcaagtccgtggcggaaccgactactttgggtgtccgtgtttccttttattttattgtggctgcttatggtgacaatcacagattgttatcataaagcgaattggattggccatccggtgaaagtgagattcattatctatctgtttgctggattcgctccattgagtgtgtttactctaagtacaatttcaacagttatttcaatcagacaattgtatcata

SEQ ID NO: 20563 - DNA, 713 bp, synthetic construct
  source 1..713: mol_type = other DNA
cagaggcccacgtggcggctagtactccggtattgcggtacccttgtacgcctgttttatactcccttcccgtaacttagacgcacaaaaccaagttcaatagaagggggtacaaaccagtaccaccacgaacaagcacttctgtttccccggtgatgttgtatagactgcttgcgtggttgaaagcgacggatccgttatccgcttatgtacttcgagaagcccagtaccacctcggaatcttcgatgcgttgcgctcagcactcaaccccagagtgtagcttgggctgatgagtctggacatccctcaccggtgacggtggtccaggctgcgttggcggcctacctatggctaacgccatgggacgctagttgtgaacaaggtgtgaagagcctattgagctacataagaatcctccggcccctgaatgcggctaatcccaacctcggggcaggtggtcacaaaccagtgattggcctgtcgtaacgcgcaagtccgtggcggaaccgactactttgggtgtccgtgtttccttttattttattgtggctgcttatggtgacaatcacagattgttatcataaagcgaattggattggccatccggtgaaagtgagattcattatctatctgtttgctggattcgctccattgagtgtgtttactctaagtacaatttcaacagttatttcaatcagacaattgtatcata

SEQ ID NO: 20564 - DNA, 713 bp, synthetic construct
  source 1..713: mol_type = other DNA
cagaggcccacgtggcggctagtactccggtattgcggtacccttgtacgcctgttttatactcccttcccgtaacttagacgcacaaaaccaagttcaatagaagggggtacaaaccagtaccaccacgaacaagcacttctgtttccccggtgatgttgtatagactgcttgcgtggttgaaagcgacggatccgttatccgcttatgtacttcgagaagcccagtaccacctcggaatcttcgatgcgttgcgctcagcactcaaccccagagtgtagcttaggctgatgagtctggacatccctcaccggtgacggtggttcaggctgcgttggcggcctacctatggctaacgccatgggacgctagttgtgaacaaggtgtgaagagcctattgagctacataagaatcctccggcccctgaatgcggctaatcccaacctcggggcaggtggtcacaaaccagtgattggcctgtcgtaacgcgcaagtccgtggcggaaccgactactttgggtgtccgtgtttccttttattttattgtggctgcttatggtgacaatcacagattgttatcataaagcgaattggattggccatccggtgaaagtgagattcatcatctatctgtttgctggattcgctccattgagtgtgtttactctaagtacaatttcaacagttatttcaatcagacaattgtatcata

SEQ ID NO: 20565 - DNA, 713 bp, synthetic construct
  source 1..713: mol_type = other DNA
cagaggcccacgtggcggctagtactccggtattgcggtacccttgtacgcctgttttatactcccttcccgtaacttagacgcacaaaaccaagttcaatagaagggggtacaaaccagtaccaccacgaacaagcacttctgtttccccggtgatgttgtatagactgcttgcgtggttgaaagcgacggatccgttatccgcttatgtacttcgagaagcccagtaccacctcggaatcttcgatgcgttgcgctcagcactcaaccccagagtgtagcttaggctgatgagtctggacatccctcaccggtgacggtggtccaggctgcgttggcggcctacctatggctaacgccatgggacgctagttgtgaacaaggtgtgaagagcctattgagctacataagaatcctccggcccctgaatgcggctaatcccaaccacggggcaggtggtcacaaaccagtgattggcctgtcgtaacgcgcaagtccgtggcggaaccgactactttgggtgtccgtgtttccttttattttattgtggctgcttatggtgacaatcacagattgttatcataaagcgaattggattggccatccggtgaaagtgagattcattatctatctgtttgctggattcgctccattgagtgtgtttactctaagtacaatttcaacagttatttcaatcagacaattgtatcata

SEQ ID NO: 20566 - DNA, 713 bp, synthetic construct
  source 1..713: mol_type = other DNA
cagaggcccacgtggcggctagtactccggtattgcggtacccttgtacgcctgttttatactcccttcccgtaacttagacgcacaaaaccaagttcaatagaagggggtacaaaccagtaccaccacgaacaagcacttctgtttccccggtgatgttgtatagactgcttgcgtggttgaaagcgacggatccgttatccgcttatgtacttcgagaagcccagtaccacctcggaatcttcgatgcgttgcgctcagcactcaaccccagagtgtagcttaggctgatgagtctggacatccctcaccggtgacggtggtccaggctgcgttggcggcctacctatggctaacgccatgggacgctagttgtgaacaaggtgtgaagagcctattgagctacataagaatcctccggcccctgaatgcggctaatcccaacctcggggcaggtggtcacaaaccagtgattggcctgtcgtaacgcgcaagtccgtggcggaaccgactactttgggtgtccgtgtttccttttattttattgtggctgcttatggtgacaatcacagattgttatcataaagcgaattggattggccatccggtgaaagtgagattcattatctatctgtttgctggattcgctccattgagtgtgtttactctaagtacaatttcaacagttatttcaatcagacaattgtaccata

SEQ ID NO: 20567 - DNA, 713 bp, synthetic construct
  source 1..713: mol_type = other DNA
cagagacccacgtggcggctagtactccggtattgcggtacccttgtacgcctgttttatactcccttcccgtaacttagacgcacaaaaccaagttcaatagaagggggtacaaaccagtaccaccacgaacaagcacttctgtttccccggtgatgttgtatagactgcttgcgtggttgaaagcgacggatccgttatccgcttatgtacttcgagaagcccagtaccacctcggaatcttcgatgcgttgcgctcagcactcaaccccagagtgtagcttaggctgatgagcctggacatccctcaccggtgacggtggtccaggctgcgttggcggcctacctatggctaacgccatgggacgctagttgtgaacaaggtgtgaagagcctattgagctacataagaatcctccggcccctgaatgcggctaatcccaacctcggggcaggtggtcacaaaccagtgattggcctgtcgtaacgcgcaagtccgtggcggaaccgactactttgggtgtccgtgtttccttttattttattgtggctgcttatggtgacaatcacagattgttatcataaagcgaattggattggccatccggtgaaagtgagattcattatctatctgtttgctggattcgctccattgagtgtgtttactctaagtacaatttcaacagttatttcaatcagacaattgtatcata

SEQ ID NO: 20568 - DNA, 713 bp, synthetic construct
  source 1..713: mol_type = other DNA
cagaggcccacgtggcggctagtactccggtattgcggtacccttgtacgcctgttttatactcccttcccgtaacttagacgcacaaaaccaagttcaatagaagggggtacaaaccagtaccaccacgaacaagcacttctgtttccccggtgatgttgtatagactgcttgcgtggttgaaagcgacggatccgttatccgcttatgtacttcgagaagcccagtaccacctcggaatcttcgatgcgttgcgctcagcactcaaccccagagtgtagcttaggctgatgagtctggacatccctcaccggtgacggtggtccaggctgcgttggcggcctacctatggctaacgccatgggacgctagttgtgaacaaggtgtgaagagcctattgagctacataagaatcctccggcccctgaatgcggctaatcccaacctcggggcaggtggtcacaaaccagtgattggcctgtcgtaacgcgcaagtccgtggcggaaccgactactttgggtgtccgtgtttccttttattttattgtggatgcttatggtgacaatcacagattgttatcataaagcgaattggattggccatccggtgaaagtgagattcattatctatctgtttgctggattcgctccattgagtgtgtttactctaagtacaatttcaacagttatttcaatcagacaattgtatcata

SEQ ID NO: 20569 - DNA, 713 bp, synthetic construct
  source 1..713: mol_type = other DNA
cagagacccacgtggcggctagtactccggtattgcggtacccttgtacgcctgttttatactcccttcccgtaacttagacgcacaaaaccaagttcaatagaagggggtacaaaccagtaccaccacgaacaagcacttctgtttccccggtgatgttgtatagactgcttgcgtggttgaaagcgacggatccgttatccgcttatgtacttcgagaagcccagtaccacctcggaatcttcgatgcgttgcgctcagcactcaaccccagagtgtagcttaggccgatgagtctggacatccctcaccggtgacggtggtccaggctgcgttggcggcctacctatggctaacgccatgggacgctagttgtgaacaaggtgtgaagagcctattgagctacataagaatcctccggcccctgaatgcggctaatcccaacctcggggcaggtggtcacaaaccagtgattggcctgtcgtaacgcgcaagtccgtggcggaaccgactactttgggtgtccgtgtttccttttattttattgtggctgcttatggtgacaatcacagattgttatcataaagcgaattggattggccatccggtgaaagtgagattcattatctatctgtttgctggattcgctccattgagtgtgtttactctaagtacaatttcaacagttatttcaatcagacaattgtatcata

SEQ ID NO: 20570 - DNA, 713 bp, synthetic construct
  source 1..713: mol_type = other DNA
cagagacccacgtggcggctagtactccggtattgcggtacccttgtacgcctgttttatactcccttcccgtaacttagacgcacaaaaccaagttcaatagaagggggtacaaaccagtaccaccacgaacaagcacttctgtttccccggtgatgttgtatagactgcttgcgtggttgaaagcgacggatccgttatccgcttatgtacttcgagaagcccagtaccacctcggaatcttcgatgcgttgcgctcagcactcaaccccagagtgtagcttaggctgatgagtctggacatccctcaccggtgacggtggtccaggctgcgttggcggcctacctatggctaacgccatgggacgctagttgtgaacaaggtgtgaagagcctattgagctacataagaatcctccggcccctgaatgcggctaatcccaacctcggggcaggtggtcacaaaccagtgattggcctgtcgtaacgcgcaagtccgtggcggaaccgactactttgggtgtccgtgtttccttttattttattgtggctgcttatggtgacaatcacagattgttatcataaagcgaattggattggccatccggtgaaagtgagattcattatctatctgtttgctggattcgctccattgagtgtgcttactctaagtacaatttcaacagttatttcaatcagacaattgtatcata

SEQ ID NO: 20571 - DNA, 713 bp, synthetic construct
  source 1..713: mol_type = other DNA
cagagacccacgtggcggctagtactccggtattgcggtacccttgtacgcctgttttatactcccttcccgtaacttagacgcacaaaaccaagttcaatagaagggggtacaaaccagtaccaccacgaacaagcacttctgtttccccggtgatgttgtatagactgcttgcgtggttgaaagcgacggatccgttatccgcttatgtacttcgagaagcccagtaccacctcggaatcttcgatgcgttgcgctcagcactcaaccccagagtgtagcttaggctgatgagtctggacatccctcaccggtgacggtggtccaggctgcgttggcggcctacctatggctaacgccatgggacgctagttgtgaacaaggtgtgaagagcctattgagctacataagaatcctccggcccctgaatgcggctaatcccaacctcggggcaggtggtcacaaaccagtgattggcctgtcgtaacgcgcaagtccgtggcggaaccgactactttgggtgtccgtgtttccttttattttattgtggctgcttatggtgacaatcacagattgttatcataaagcgaattggattggccatccggtgaaagtgagattcattatctatctgtttgctggattcgctccattgagtgtgtttactctaagtacaacttcaacagttatttcaatcagacaattgtatcata

SEQ ID NO: 20572 - DNA, 713 bp, synthetic construct
  source 1..713: mol_type = other DNA
cagagacccacgtggcggctagtactccggtattgcggtacccttgtacgcctgttttatactcccttcccgtaacttagacgcacaaaaccaagttcaatagaagggggtacaaaccagtaccaccacgaacaagcacttctgtttccccggtgatgttgtatagactgcttgcgtggttgaaagcgacggatccgttatccgcttatgtacttcgagaagcccagtaccacctcggaatcttcgatgcgttgcgctcagcactcaaccccagagtgtagcttaggctgatgagtctggacatccctcaccggtgacggtggtccaggctgcgttggcggcctacctatggctaacgccatgggacgctagttgtgaacaaggtgtgaagagcctattgagctacataagaatcctccggcccctgaatgcggctaatcccaacctcggggcaggtggtcacaaaccagtgattggcctgtcgtaacgcgcaagcccgtggcggaaccgactactttgggtgtccgtgtttccttttattttattgtggctgcttatggtgacaatcacagattgttatcataaagcgaattggattggccatccggtgaaagtgagattcattatctatctgtttgctggattcgctccattgagtgtgtttactctaagtacaatttcaacagttatttcaatcagacaattgtatcata

SEQ ID NO: 20573 - DNA, 713 bp, synthetic construct
  source 1..713: mol_type = other DNA
cagaggcccacgtggcggctagtactccggtattgcggtacccttgtacgcctgttttatactcccttcccgtaacttagacgcacaaaaccaagttcaatagaagggggtacaaaccagtaccaccgcgaacaagcacttctgtttccccggtgatgttgtatagactgcttgcgtggttgaaagcgacggatccgttatccgcttatgtacttcgagaagcccagtaccacctcggaatcttcgatgcgttgcgctcagcactcaaccccagagtgtagcttaggctgatgagtctggacatccctcaccggtgacggtggtccaggctgcgttggcggcctacctatggctaacgccatgggacgctagttgtgaacaaggtgtgaagagcctattgagctacataagaatcctccggcccctgaatgcggctaatcccaacctcggggcaggtggtcacaaaccagtgattggcctgtcgtaacgcgcaagtccgtggcggaaccgactactttgggtgtccgtgtttccttttattttattgtggctgcttatggtgacaatcacagattgttatcataaagcgaattggattggccatccggtgaaagtgagattcattatctatctgtttgctggattcgctccattgagtgtgtttactctaagtacaatttcaacagttatttcaattagacaattgtatcata

SEQ ID NO: 20574 - DNA, 695 bp, synthetic construct
  source 1..695: mol_type = other DNA
ttgttcccaccccagaggcccacgtggcggctagtactctggtattacggtacctttgtacgcctgttttatatcccctcccccgcaactttagaagcttaacaaaagttcaacagcaggggtgcaatccagcacctctacgaacaagcacttctgtttccccggtgatattacatagactgtacccacggtcaaaagtgattgatccgttatccgcttgagtacttcgagaagcctagtatcaccttggaatcttcgacgcgttgcgctcaacactctaccccgggtgtagcttaggctgatgagtctgggcactcctcaccggtgacggtggcccaggctgcgttggcggcctacccatggctaacgccatgggacgctagttgtgaacaaggtgtgaagagcctattgagctacttaagagtcctccggcccctgaatgcggctaatcctaaccacggagcaatcgctcacgatccagtgagtaggttgtcgtaatgcgtaagtctgtggcggaaccgactactttgggtgtccgtgtttcccttttattcatactggctgcttatggtgacaatttacagattgttaccatatagctattggattggccatccggtgttgtgttacacgtgttaaaatacttttctgcaagcaacaacaacattgtgtttgaaccataatagccattacaa

SEQ ID NO: 20575 - DNA, 742 bp, synthetic construct
  source 1..742: mol_type = other DNA
ttaaaacagcctgtgggttgttcccacccgcagggcccactgggcgctagcacactggtattgcggtacctttgtgcgcctgttttatccaccctccccaacagtaacttagaagcacgaataacgtggtcaacaggaagctcagtaaaccaactgggtcttgaccaagcacttctgttaccccggactgagtatcaaaaagctgctcgcgtggctgaaggagaaaacgtccgttacccggccaattacttcgagaaacccagtaccaccatggaggttgcgcagcgtttcgctccgcacaaccccagtgtagatcaggtcgatgagtcaccgcaatcctcacgggtgaccgtggcggtggctgcgctggcggcctgcccatggggcaacccatgggacgcttcaatactgacatggtgcgaagagtctattgagctaattggtagtcctccggcccctgaatgcggctaatcctaactgcggagcagatacccacacaccagtggacagtctgtcgtaatgggcaactctgcagcggaaccgactactttgggtgtccgtgtttcctttcatccttctattggctgcttatggtgacaattgagaggttgttaccatatagctattggattggccatccggtgagcaacagagcaattgtatttctctttgtaggatttgtgccgttgaattacaacaactacaacaccttactctacattatccacttaaacacgcggaa

SEQ ID NO: 20576 - DNA, 731 bp, synthetic construct
  source 1..731: mol_type = other DNA
tgtgggttgatcccacccacagggcccattgggcgctagcactctggtatcacggtacctttgtgcgcctgttttataccccctcccccaactgtaacttagaagtaacacacaccgatcaacagtcagcgtggcacaccagccacgttttgatcaagcacttctgttaccccggactgagtatcaatagactgctcacgcggttgaaggagaaagcgttcgttatccggccaactacttcgaaaaacctagtaacaccgtggaagttgcagagtgtttcgctcagcactaccccagtgtagatcaggtcgatgagtcaccgcattccccacgggcgaccgtggcggtggctgcgttggcggcctgcccatggggaaacccatgggacgctctaatgcagacatggtgcgaagagtctattgagctagttggtagtcctccggcccctgaatgcggctaatcctaactgcggagcacacaccctcaagccagagtgcagtgtgtcgtaacgggcaactctgcagcggaaccgactactttgggtgtccgtgtttcattttattcctatactggctgcttatggtgacaatggagagattgttaccatatagctattggattggccatccggtgaccaatagagctattatatatctctttgttaggtttataccacttagcttgaaagaggttaaaacattacaattcattgttaagttgaatacagcaaa

SEQ ID NO: 20577 - DNA, 746 bp, synthetic construct
  source 1..746: mol_type = other DNA
ttttaaaacagccctgtgggttgttcccacccacggggcccattgggcgctagcacactggtatcacggtacccttgtgcgcctgttttatccaccccctccccaatgcaacatagaagcacaaactaagtggtcaatagacggctcagtgcaccaactgggtttagaccaagcacttctgttaccccggactgagtatcaataggctgctcacgcggctgaaggagaaaacgttcgttacccggccaactacttcgagaagcccagtaccaccatgaaggttgcgcagtgtttcgttcagcacaaccccagtgtagatcaggtcgatgagtcaccgcaatccccacgggcgaccgtggcggtggctgcgctggcggcctgcccatggggtgacccatgggacgcttcaattccgacatggtgcgaagagcctattgagctagttggtagtcctccggcccctgaatgcggctaatcccaactgcggagcaagcacccacaaaccagtgggctgtttgtcgtaacgggcaactctgcagcggaaccgactactttgggtgtccgtgtttccttttattcctacactggctgcttatggtgacaattgaaagattgttgccatatagctattggattggccatccggtaacaaacagagctattatttacttatttgttggctttgtgccgttgaatttcaaagttataaaaaccataacctccatcttgacactcaacacagcaaa

SEQ ID NO: 20578 - DNA, 811 bp, synthetic construct
  source 1..811: mol_type = other DNA
ttaaaacagcctgtgggttgttaccacccacaggcgccacggggcgcttcgcacctgggatgcttaacgtcggatttgcggatccgatgtttattgcccctgtgcgcgcctgttatattcccttcccccttaagtaactttagaagtttataataacaaagaccaataggagtccaacatccagttggatcgcggtcaggcacttctgtctccccggacctagtagtgataggctgtacccacggccgaagatgaacccgtccgttatccggccagctacttcgagaagcctagtaacatcaaagatctgtcctggcgtttcgctcagcgcgtttccccccgcgtagatcgggctgatgggtctccgcataccccacgggcgaccgtggcggaggccgcgtggcggcccgcctatggcgaaagccataggacgccatttcagtgacagggtgtgaagagcctattgagctagttggtagtcctccggcccctgaatgcggctaatcctaaccacggagcgtccaccagcaaaccagctggaagggcgtcgtaacgggtaactctgtggcggaaccgactactttgggtgtccgtgtttccttttgatcctattgtggctgcttatggtgacaacttacagttgttatcataaagcttttggattggccatccggaaagagttaacagtttgttcgcttattgctctctcaaaacttccattgaggaaagcaatttatcttctcatttcattttacaagcttgataaaatttcaagtgctcatttagagttactcatccaactccatcaaat

SEQ ID NO: 20579 - DNA, 712 bp, synthetic construct
  source 1..712: mol_type = other DNA
cccacgtggcggctagcactccggtattacggtacccttgtgcgcctgttttatactcccctcccgcaacttagaagcacgaaaccaagttcaatagaagggggtacaaaccagtaccactacgaacaagcacttctgtttccccggtgacattgcatagactgctcacgcggttgaaagtgatcgatccgttacccgcttgtgtacttcgaaaagcctagtatcgccttggaatcttcgacgcgttgcgctcagcacccgaccccggggtgtagcttaggctgatgagtctggacattcctcaccggtgacggtggtccaggctgcgttggcggcctacctatggctaacgccataggacgttagatgtgaacaaggtgtgaagagcctattgagctacataagagtcctccggcccctgaatgcggctaatcctaaccacggagcaggcggtcgcgaaccagcgactggcttgtcgtaacgcgcaagtctgtggcggaaccgactactttgggtgtccgtgtttcctgttatttttatcatggctgcttatggtgacaatcagagattgttatcataaagcgaattggattggccatccggtgagtgttgtgtcaggtatacaactgcttgttggaaccactgtgttagctttacttctcatttaaccaattaatcaaaaacaacacgaggataaaacaataataccaca

SEQ ID NO: 20580 - DNA, 718 bp, synthetic construct
  source 1..718: mol_type = other DNA
cagagacccacgtggcggctagcactccggtattacggtacccttgtgcgcctgttttatactcccctcccgcaacttagaagcacgaaaccaagttcaatagaagggggtacaaaccagtaccactacgaacaagcacttctgtttccccggtgacattgcatagactgctcacgcggttgaaagtgatcgatccgttacccgcttgtgtacttcgaaaagcctagtatcgccttggaatcttcgacgcgttgcgctcagcacccgaccccggggtgtagcttaggctgatgagtctggacattcctcaccggtgacggtggtccaggctgcgttggcggcctacctatggctaacgccataggacgttagatgtgaacaaggtgtgaagagcctattgagctacataagagtcctccggcccctgaatgcggctaatcctaaccacggaacaggcggtcgcgaaccagtgactggcttgtcgtaacgcgcaagtctgtggcggaaccgactactttgggtgtccgtgtttcctgttatttttatcatggctgcttatggtgacaatcagagattgttatcataaagcgaattggattggccatccggtgagtgttgtgtcaggtatacaactgtttgttggaaccactgtgttagctttacttctcatttaaccaattaatcaaaaacaatacgaggataaaacaacaatactaca

SEQ ID NO: 20581 - DNA, 718 bp, synthetic construct
  source 1..718: mol_type = other DNA
cagagacccacgtggcggctagcactccggtattacggtacccttgtgcgcctgttttatactcccctcccgcaacttagaagcacgaaaccaagttcaatagaagggggtacaaaccagtaccactacgaacaagcacttctgtttccccggtgacattgcatagactgctcacgcggttgaaagtgatcgatccgttacccgcttgtgtacttcgaaaagcctagtatcgccttggaatcttcgacgcgttgcgctcagcacccgaccccggggtgtagcttaggctgatgagtctggacattcctcaccggtgacggtggtccaggctgcgttggcggcctacctatggctaacgccataggacgttagatgtgaacaaggtgtgaagagcctattgagctacataagagtcctccggcccctgaatgcggctaatcctaaccacggagcaggcggtcgcgaaccagtgactggcttgtcgtaacgcgcaagtctgtggcggaaccgactactttgggtgtccgtgtttcctgttatttttatcatggctgcttatggtgacaatcagagattgttatcataaagcgaattggattggccatccggtgagtgttgtgtcaggtatacaactgtttgttggaaccactgtgttagctttacttctcatttaaccaattaatcaaaaacaatacgaggataaaacaacaatactaca

SEQ ID NO: 20582 - DNA, 718 bp, synthetic construct
  source 1..718: mol_type = other DNA
cagaggcccacgtggcggctagcactccggtattacggtacccttgtgcgcctgttttatactcccctcccgcaacttagaagcacgaaaccaagttcaatagaagggggtacaaaccagtaccactacgaacaagcacttctgtttccccggtgacattgcatagactgctcacgcggttgaaagtgatcgatccgttacccgcttgtgtacttcgaaaagcctagtatcgccttggaatcttcgacgcgttgcgctcagcacccgaccccggggtgtagcttaggctgatgagtctggacattcctcaccggtgacggtggtccaggctgcgttggcggcctacctatggctaacgccataggacgttagatgtgaacaaggtgtgaagagcctattgagctacataagagtcctccggcccctgaatgcggctaatcctaaccacggaacaggcggtcgcgaaccagtgactggcttgtcgtaacgcgcaagtctgtggcggaaccgactactttgggtgtccgtgtttcctgttatttttatcatggctgcttatggtgacaatcagagattgttatcataaagcgaattggattggccatccggtgagtgttgtgtcaggtatacaactgtttgttggaaccactgtgttagctttacttctcatttaaccaattaatcaaaaacaatacgaggataaaacaacaatactaca

SEQ ID NO: 20583 - DNA, 718 bp, synthetic construct
  source 1..718: mol_type = other DNA
cagaggcccacgtggcggctagcactccggtattacggtacccttgtgcgcctgttttatactcccctcccgcaacttagaagcacgaaaccaagttcaatagaagggggtacaaaccagtaccactacgaacaagcacttctgtttccccggtgacattgcatagactgctcacgcggttgaaagtgatcgatccgttacccgcttgtgtacttcgaaaagcctagtatcgccttggaatcttcgacgcgttgcgctcagcacccgaccccggggtgtagcttaggctgatgagtctggacattcctcaccggtgacggtggtccaggctgcgttggcggcctacctatggctaacgccataggacgttagatgtgaacaaggtgtgaagagcctattgagctacataagagtcctccggcccctgaatgcggctaatcctaaccacggagcaggcggtcgcgaaccagtgactggcttgtcgtaacgcgcaagtctgtggcggaaccgactactttgggtgtccgtgtttcctgttatttttatcatggctgcttatggtgacaatcagagattgttatcataaagcgaattggattggccatccggtgagtgttgtgtcaggtatacaactgtttgttggaaccactgtgttagctttacttctcatttaaccaattaatcaaaaacaatacgaggataaaacaacaatactaca

SEQ ID NO: 20584 - DNA, 718 bp, synthetic construct
  source 1..718: mol_type = other DNA
cagaggcccacgtggcggctagcactccggtattacggtacccttgtgcgcctgttttatactcccctcccgcaacttagaagcacgaaaccaagttcaatagaagggggtacaaaccagtaccaccacgaacaagcacttctgtttccccggtgacattgcatagactgctcacgcggttgaaagtgatcgatccgttacccgcttgtgtacttcgaaaagcctagtatcgccttggaatcttcgacgcgttgcgctcagcacccgaccccggggtgtagcttaggctgatgagtctggacattcctcaccggtgacggtggtccaggctgcgttggcggcctacctatggctaacgccataggacgctagatgtgaacaaggtgtgaagagcctattgagctacataagagtcctccggcccctgaatgcggctaatcctaaccacggagcaggcggtcgcgaaccagtgactggcttgtcgtaacgcgcaagtctgtggcggaaccgactactttgggtgtccgtgtttcctgttatttttatcatggctgcttatggtgacaatcagagattgttatcataaagcgaattggattggccatccggtgagtgttgtgtcaggtatacaactgtttgttggaaccactgtgttagctttacttctcatttaaccaattaatcaaaaacaatacgaggataaaacaacaatactaca

SEQ ID NO: 20585 - DNA, 718 bp, synthetic construct
  source 1..718: mol_type = other DNA
cagaggcccacgtggcggctagcactccggtattacggtacccttgtgcgcctgttttatactcccctcccgcaacttagaagcacgaaaccaagttcaatagaagggggtacaaaccagtaccactacgaacaagcacttctgtttccccggtgacattgcatagactgctcacgcggttgaaagtgatcgatccgttacccgcttgtgtacttcgaaaagcctagtatcgccttggaatcttcgacgcgttgcgctcagcacccgaccccggggtgtagcttaggctgatgagtctggacattcctcaccggtgacggtggtccaggctgcgttggcggcctacctatggctaacgccataggacgttagatgtgaacaaggtgtgaagagcctattgagctacataagagtcctccggcccctgaatgcggctaatcctaaccacggaacaggcggtcgcgaaccagtgactggcttgtcgtaacgcgcaagtctgtggcggaaccgactactttgggtgtccgtgtttcctgttatttttatcatggctgcttatggtgacaatcagagattgttatcataaagcgaattggattggccatccggtgagtgttgtgtcaggtatacaactgtttgttggaaccactgtgttagctttacttctcatttaaccaattaatcaaaaacaatacgaggataaaacaacaatactacg

SEQ ID NO: 20586 - DNA, 718 bp, synthetic construct
  source 1..718: mol_type = other DNA
cagaggcccacgtggcggctagcactccggtattacggtacccttgtgcgcctgttttatactcccctcccgcaacttagaagcacgaaaccaagttcaatagaagggggtacaaaccagtaccactacgaacaagcacttctgtttccccggtgacattgcatagactgctcacgcggttgaaagtgatcgatccgttacccgcttgtgtacttcgaaaagcctagtaacgccttggaatcttcgacgcgttgcgctcagcacccgaccccggggtgtagcttaggctgatgagtctggacattcctcaccggtgacggtggtccaggctgcgttggcggcctacctatggctaacgccataggacgttagatgtgaacaaggtgtgaagagcctattgagctacataagagtcctccggcccctgaatgcggctaatcctaaccacggagcaggcggtcgcgaaccagtgactggcttgtcgtaacgcgcaagtctgtggcggaaccgactactttgggtgtccgtgtttcctgttatttttatcatggctgcttatggtgacaatcagagattgttatcataaagcgaattggattggccatccggtgagtgttgtgtcaggtatacaactgtttgttggaaccactgtgttagctttacttctcatttaaccaattaatcaaaaacaatacgaggataaaacaacaatactaca

SEQ ID NO: 20587 - DNA, 718 bp, synthetic construct
  source 1..718: mol_type = other DNA
cagaggcccacgtggcggctagcactccggtattacggtacccttgtgcgcctgttttatactcccctcccgcaacttagaagcacgaaaccaagttcaatagaaaggggtacaaaccagtaccactacgaacaagcacttctgtttccccggtgacattgcatagactgctcacgcggttgaaagtgatcgatccgttacccgcttgtgtacttcgaaaagcctagtatcgccttggaatcttcgacgcgttgcgctcagcacccgaccccggggtgtagcttaggctgatgagtctggacattcctcaccggtgacggtggtccaggctgcgttggcggcctacctatggctaacgccataggacgctagatgtgaacaaggtgtgaagagcctattgagctacataagagtcctccggcccctgaatgcggctaatcctaaccacggagcaggcggtcgcgaaccagtgactggcttgtcgtaacgcgcaagtctgtggcggaaccgactactttgggtgtccgtgtttcctgttatttttatcatggctgcttatggtgacaatcagagattgttatcataaagcgaattggattggccatccggtgagtgttgtgtcaggtatacaactgtttgttggaaccactgtgttagctttacttctcatttaaccaattaatcaaaaacaatacgaggataaaacaacaatactaca

SEQ ID NO: 20588 - DNA, 718 bp, synthetic construct
  source 1..718: mol_type = other DNA
cagaggcccacgtggcggctagcactccggtattacggtacccttgtgcgcctgttttatactcccctcccgcaacttagaagcacgaaaccaagttcaatagaagggggtacaaaccagtaccactacgaacaagcacttctgtttccccggtgacattgcatagactgctcacgcggttgaaagtgatcgatccgttacccgcttgtgtacttcgaaaagcctagtatcgccttggaatcttcgacgcgttgcgctcagcacccgaccccggggtgtagcttaggctgatgagtctggacattcctcaccggtgacggtggtccaggctgcgttggcggcctacctatggctaacgccataggacgctagatgtgaacaaggtgtgaagagcctattgagctacataagagtcctccggcccctgaatgcggctaatcctaaccacggaacaggcggtcgcgaaccagtgactggcttgtcgtaacgcgcaagtctgtggcggaaccgactactttgggtgtccgtgtttcctgttatttttatcatggctgcttatggtgacaatcagagattgttatcataaagcgaattggattggccatccggtgagtgttgtgtcaggtatacaactgtttgttggaaccactgtgttagctttacttctcatttaaccaattaatcaaaaacaatacgaggataaaacaacaatactaca

SEQ ID NO: 20589 - DNA, 718 bp, synthetic construct
  source 1..718: mol_type = other DNA
cagaggcccacgtggcggctagcactccggtattacggtacccttgtgcgcctgttttatactcccctcccgcaacttagaagcacgaaaccaagttcaatagaagggggtacaaaccagtaccactacgaacaagcacttctgtttccccggtgacattgcatagactgctcacgcggttgaaagtgatcgatccgttacccgcttgtgtacttcgaaaagcctagtatcgccttggaatcttcgacgcgttgcgctcagcacccgaccccggggtgtagcttaggctgatgagtctggacattcctcaccggtgacggtggtccaggctgcgttggcggcctacctatggctaacgccataggacgttagatgtgaacaaggtgtgaagagcctattgagctacataagagtcctccggcccctgaatgcggctaatcctaaccacggaacaggcggtcacgaaccagtgactggcttgtcgtaacgcgcaagtctgtggcggaaccgactactttgggtgtccgtgtttcctgttatttttatcatggctgcttatggtgacaatcagagattgttatcataaagcgaattggattggccatccggtgagtgttgtgtcaggtatacaactgtttgttggaaccactgtgttagctttacttctcatttaaccaattaatcaaaaacaatacgaggataaaacaacaatactaca

SEQ ID NO: 20590 - DNA, 718 bp, synthetic construct
  source 1..718: mol_type = other DNA
cagaggcccacgtggcggctagcactccggtattacggtacccttgtgcgcctgttttatactcccctcccgcaacttagaagcacgaaaccaagttcaatagaagggggtacaaaccagtaccactacgaacaagcacttctgtttccccggtgacattgcatagactgctcacgcggttgaaagtgatcgatccgttacccgcttgtgtacttcgaaaagcctagtatcgccttggaatcttcgacgcgttgcgctcagcacccgaccccggggtgtagcttaggctgatgagtctggacattcctcaccggtgacggtggtccaggctgcgttggcggcctacctatggctaacgccataggacgttagatgtgaacaaggtgtgaagagcctattgagctacataagagtcctccggcccctgaatgcggctaatcctaaccacggagcaggcggtcgcgaaccagtgactggcttgtcgtaacgcgcaagtctgtggcggaaccgactactttgggtgtccgtgtttcctgttatttttatcatggctgcttatggtgacaatcagagattgttatcataaagcgaattggattggccatccggtgagtgttgtgtcaggtatacaactgtttgttggaaccactgtgttagctttacttctcattttaccaattaatcaaaaacaatacgaggataaaacaacaatactaca

SEQ ID NO: 20591 - DNA, 721 bp, synthetic construct
  source 1..721: mol_type = other DNA
ttcccacccacagggcccattgggcgtcagcacactggtatcacggtacctttgtgcgcctgttttatacaccctccccgaatgcaacttagaagctttacctagatggtcaatagaaggtccagcacaccagttgggctccgaccaagcacttctgttaccccggactgagtatcaataggccgtttgcacggctgaaggagaaaacgttcgttacccggccaattacttcgagaaacccagtaacaccatgaaggttgcgcagtgtatcgctccgcacgaccccggtgtagatcaggccgatgagccaccgcgttccccacgggcgaccgtggcggtggctgcgctggcggcctgcccatggggcaacccatgggacgctacaataccgacatggtgcgaagagtctattgagctaattggtagtcctccggcccctgaatgcggctaatcctaactgcggagcaggcaccctcaagccagagggcagcttgtcgtaacgggcaactctgcagcggaaccgactactttgggtgtccgtgtttcttttattcttgaactggctgcttatggtgacaattaaaagattgttaccatatagctattggattagccatccagtgacaaacagagcgattatatattcgtttgttggttttgttccattaaactataaagttttaaacacacttaaatttgtcttactactcaactcagcaaa

SEQ ID NO: 20592 - DNA, 687 bp, synthetic construct; identical to SEQ ID NO: 824
  source 1..687: mol_type = other DNA

SEQ ID NO: 20593 - DNA, 747 bp, synthetic construct
  source 1..747: mol_type = other DNA
gattttaaaacagcccgtgggttgttcccacccacggggcccattgggcgctagcacactggtatcacggtacccttgtgcgcctgttttatccaccccctccccaatgcaacatagaagcacaaactaagtggtcaatagacggctcagtgcaccaactgggtttagaccaagcacttctgttaccccggactgagtatcaataggctgctcacgcggctgaaggagaaaacgttcgttacccggccaactacttcgagaagcccagtaccaccatgaaggttgcgcagtgtttcgttcagcacaaccccagtgtagatcaggtcgatgagtcaccgcaatccccacgggcgaccgtggcggtggctgcgctggcggcctgcccatggggtgacccatgggacgcttcaattccgacatggtgcgaagagcctattgagctagttggtagtcctccggcccctgaatgcggctaatcccaactgcggagcaagcacccacaaaccagtgggctgtttgtcgtaacgggcaactctgcagcggaaccgactactttgggtgtccgtgtttccttttattcctacactggctgcttatggtgacaattgaaagattgttgccatatagctattggattggccatccggtaacaaacagagctattatttacttatttgttggctttgtgccgttgaatttcaaagttataaaaaccataacctccatcttgacactcaacacagcaaa

SEQ ID NO: 20594 - DNA, 726 bp, synthetic construct
  source 1..726: mol_type = other DNA
tgttcccacccacagggcctactgggcgctagcacactggtatcacggtacctttgtgcgcctgttttatagtccctccccccggacgcaacttagaagctgaacctaagcggtcaacaggcggctcagaacaccatctgggtctcgaccaagcacttctgtttccccggactgagtatcaataagctgcttacgcggctgaaggaaaaaacgtccgttatccggccaattacttcaagaaacccagtaccaccatgaaggttgcgcagcgtttcgctccgcacaaccccagtgtagatcaggtcgatgagtcaccgcattcctcacgggcgaccgtggcggtggctgcgctggcggcctgcccatgggacaacccatgggacgcttcaatactgacatggtgcgaagagtcaattgagctaattggtagtcctccggcccctgaatgcggctaatcctaactgtggagcagatgcccacgtaccagtgggtagtctgtcgtaacgggcaactccgcagcggaaccgactactttgggtgtccgtgtttctctttattcttatattggctgcttatggtgacaattgagagattgttaccatatagctattggattggccatccggtgacgaatagagcgattgtatatctttttgttggattcctaccattaaacaaaacaaattacaaaaccttgtgttacattattagattaaacacagcaaa

SEQ ID NO: 20595 - DNA, 719 bp, synthetic construct
  source 1..719: mol_type = other DNA
cacccacagggcccactgggcgctagtacactggtatcacggtacctttgtgcgcctgtttgacccaccttccccaaacgcaacttagaagcacaacttaaatggtcattagacggctcagtatgccaactgagtctcgatcaagcacttctgttaccccggactgagtaccaataggctgctcacgcggctgaaggggaaaccgttcgttacccgaccaactacttcgagaaacctagtaccaccatgaaagttgcgcagcgtttcgctccgcacaaccccagtgtagatcaggccgatgagtcaccgcaaaccccacgggcgactgtggcggtggctgcgctggcggcctgcccatgggacaactcatgggacgctacaatactgacatggtgcgaagagtctattgagctagttggtagtcctccggcccctgaatgcggctaatcctaactgtggagcagatacccacgcaccagtgggcagtctgtcgtaatgggcaactccgcagcggaaccgactactttgggtgtccgtgtttctttttattcctacgctggctacttatggtgacaattgagagactgtaaccatattgctatcgggttggccacctggtgaagaatagaacagttgctcacttgtttgtcagtcttgcaccgttgtaccataaagccttaactgcccctcaacaccgtcataacacttaacacgctgaa

SEQ ID NO: 20596 - DNA, 712 bp, synthetic construct
  source 1..712: mol_type = other DNA
cccacgtggcggccagtactccggtatcacggtacccttgtacgcctgttttattttcccttcccccgcaacttagaagcaatgaaaccaagttcaatagaagggggtacaaaccagtaccaccacgaacaagcacttctgtttccccggtgacgttgcatagactgtccccacggttgaaggcggctgatccgttatccgcttgtgtacttcgagaagcctagtaccatcttggaatctccgatgcgttgcgctcagcactcaaccccagagtgtagcttaggtcgatgagtctggacattccccaccggcgacggtggtccaggctgcgctggcggcctacctgtggtccaaaaccacaggacgctagttgtgaacaaggtgtgaagagcctattgagctacatgagagtcctccggcccctgaatgcggctaatcccaaccacggagcaggtgtttgcaatccagcaaatagcctgtcgtaacgcgcaagtctgtggcggaaccgactactttgggtgtccgtgtttccttttatttttatactggctgcttatggtgacaatctcggattgttatcatagagcaaattggattggccatccggtgaaaatcagaacgattatttaactttttgttggattaatatctttgacatcacatactccgaatctcattaagatagtgctcttgatacgacatcattgtcatt

SEQ ID NO: 20597 - DNA, 709 bp, synthetic construct; identical to SEQ ID NO: 854
  source 1..709: mol_type = other DNA

SEQ ID NO: 20598 - DNA, 724 bp, synthetic construct
  source 1..724: mol_type = other DNA
ttcccatccacagggcccactgggcgccagcactctggtattgcggtaccttagtgcgcctgttttatatacccaccccccaaatgtaatttagatgcatgtcaacaaagaccaatagtaagcgcagcacaccagctgtgttctggtcaagcacttctgttaccccggactgagtatcaataagctactcgcgtggctgaaggagaaaacgttcgttacccggccaattacttcgagaaacctagtaacaccatgaaggttgcgcagtgtttcgctccgcacaaccccagtgtagatcaggtcgatgagtcaccgcattccccacgggtgaccgtggcggtggctgcgctggcggcctgcccatggggtaacccatgggacgcttcaatactgacatggtgcgaagagtctattgagctaattggtagtcctccggcccctgaatgcggctaatcctaactgcggagcagatacccacacaccagtgggcagtctgtcgtaacgggcaactctgcagcggaaccgactactttgggtgtccgtgtttctctttatccttatactggctgcttatggtgacaattgagagattgttaccatatagctattggattggccatccggtgacgaatagagcaattgtgtatttgtttgttggttttataccattaaattacaaggttctaaacacccttaatcttattatagtattcaatacaataaa

SEQ ID NO: 20599 - DNA, 724 bp, synthetic construct
  source 1..724: mol_type = other DNA
ttcccatccacagggcccactgggcgccagcactctggtattgcggtaccttagtgcgcctgttttatatacccatcccccaaacgtaatttagatgcatgtcaacaaagaccaatagtaagcgcagcacaccagctgtgttccggtcaagcacttctgttaccccggactgagtatcaataagctactcacgtggctgaaggagaaaacgttcgttacccggccaattacttcgagaaacctagtaacaccatgaaggttgcgcagtgtttcgctccgcacaaccccagtgtagatcaggtcgatgagtcaccgcattccccacgggtgaccgtggcggtggctgcgctggcggcctgcccatggggtaacccatgggacgcttcaatactgacatggtgcgaagagtctattgagctaattggtagtcctccggcccctgaatgcggctaatcctaactgcggagcagatacccacacaccagtgggcagtctgtcgtaacgggcaactctgcagcggaaccgactactttgggtgtccgtgtttctctttatcctcatactggctgcttatggtgacaattgagagattgttaccatatagctattggattggccatccggtgacaaatagagcaattgtgtatttgtttgttggtctcataccattaaattacaaggttctaaacacccttaatcttattatagtattcaatacaacaaa

SEQ ID NO: 20600 - DNA, 724 bp, synthetic construct
  source 1..724: mol_type = other DNA
ttcccatccacagggcccactgggcgctagcactctggtattgcggtaccttagtgcgcctgttttatatacccctcccccaaatgtaatttagacgcatgccaacaaagaccaatagcaagcgcagcacaccagctgtgtttcggtcaagcacttctgttaccccggactgagtatcaataagctactcacgtggctgaaggagaaaacgttcgttaccccgccaattacttcgagaaacctagtaacaccatggaggttgcgcagtgtttcgctcagcacaaccccagtgtagatcaggtcgatgagtcaccgcattccccacgggtgaccgtggcggtggctgcgttggcggcctgcccatggggtaacccatgggacgcttcaatactgacatggtgcgaagagtctattgagctaattggtagtcctccggcccctgaatgcggctaatcctaactgcggagcagatacccacacaccagtgggcagtctgtcgtaatgggcaactctgcagcggaaccgactactttgggtgtccgtgtttctttttatttttatactggctgcttatggtgacaattgagagattgttaccatatagctattggattggccatccggtgacaaatagagcaattgtgtttttgtttgttggtttcataccattaaattataaggttctaaacaccctcaatcttattatagcattcaatacaataaa

SEQ ID NO: 20601 - DNA, 719 bp, synthetic construct
  source 1..719: mol_type = other DNA
cacccacagggcccactgggcgccagtacactggtatcacggtacctttgtgcgcctgtttgactcaccttccccaaacgcaacttagaagcataacttaaatggtcattaggcggctcagtatgccaactgagtctcgatcaagcacttctgttaccccggactgagtaccaataggctgctcacgcggctgaaagggaaaccgttcgttacccgaccaactacttcgagaaacctagtaccaccatgaaagttgcgcggcgtttcgctccgcacaaccccagtgtagatcaggccgatgagtcaccgcaaaccccacgggcgaccgtggcggtggctgcgctggcggcctgcccatgggacaacccatgggacgccacaatactgacatgatgcgaagagtctattgagctagttggtagtcctccggcccctgaatgcggctaatcccaactgtggagcaaatacccacgcaccagtgggcagtctgtcgtaatgggcaactctacagcggaaccgactactttgggtgtccgtgtttctttttattcctacgctggctacttatggtgacaattgagagactgtaaccatattgctatcgggttggccacctggtgaagaataaaacagttgctcacttgtttgtcagtcttgcaccgtcgtgccacaaagtcttaactgcccctcaacatcgtcataatactaaacacgctgaa

SEQ ID NO: 20602 - DNA, 720 bp, synthetic construct
  source 1..720: mol_type = other DNA
cccacccacagggcccactgggcgttagcacactggtatcacggtacccttgtgcgcctgttttatctaccctaccccattgtaacttagaagctaaccaagtacggtcattaggcagctcagtatgccaactgagttttgaccaagcacttctgttaccccggactgagtatcaataggctgtttgcgcggctgaaggagaaaacgttcgttacccgaccaattacttcgagaaacccagtatcaccatggaagttgcgcagtgtttcgctccacacaaccccagtgtagatcaggccgatgagtcaccgcattccccacgggcgaccgtggcggtggctgcgctggcggcctgcccatgggtcaacccatgggacgcttcaaaactgacatggtgtgaagagtctattgagctaattggtagtcctccggcccctgaatgcggctaatcctaactgcggagcagatacccacacgccagtgggcggtctgtcgtaacgggcaactctgcagcggaaccgactactttgggtgtccgtgtttccttttatctctatactggctgcttatggtgacaattgagagattgttaccatatagctattggattggccatccggtgacaaacagagcgattatttacctatttgttggttttgtaccattaaattttaaagttttgaaaactctcaaccttgttttggcatttaacgcagcaag

SEQ ID NO: 20603 - DNA, 740 bp, synthetic construct
  source 1..740: mol_type = other DNA
ttaaaccaacctgtgggttgctcccacccgcagggcccactgggcgctagcacactggtattgcggtacctttgtgcgcctgttttatccacccccccaacagtaatttagaagcacgaacaatgtgaccaacaggaggcccagtaaaccaactgggttatggtcaagtacttctgttaccccggaccgagtatcaataagctgctcgcgtggctgaaggagaaaacgtccgttacccggccaattacttcgagaaacttagtaccaccatgaaagttgcgatgcgtttcgctccgcacaaccccagtgtagatcaggtcgatgagtcaccgcaatcctcacgggcgaccgtggcggtggctgcgctggcggcctgcccatggggcgacccatgggacgcttcaatactgacatggtgtgaagagtctattgagctaattggtagtcctccggcccctgaatgcggctaatcctaactgcggagcagacatccacacaccagtggacagtctgtcgtaatgggtaactctgcagcggaaccgactactttgggtgtccgtgtttccttttatcttttattggctgcttatggtgacaattgagagattgttaccatatagctattggattggccatccggtgagcgacagagcaatcatattcctctttattggatttataccactaaattacaacaactataacaccttgctttacattatccacttaaactcgcagaa

SEQ ID NO: 20604 - DNA, 740 bp, synthetic construct
  source 1..740: mol_type = other DNA
aaacagcctgtgggttgttcccacccacagggcccactgggcgctagcactctggtatcatggtacctttgtgcgcctgttttatccaccctccccaaaatgcaacttagaagcataatccaaacggtcattaggtagctcagtacaccaactgagcccagaccaagcacttctgtcaccccggaccgagtatcaataggctgctcgcgcggctgaaggagaaaacgttcgttatccggccaattacttcgagaaacccagtaccactatgaaagttgcgcagcgtttcgttccgcacaaccccagtgtagatcaggtcgatgagtcaccgcgttccccacgggcgaccgtggcggtggctgcgttggcggcctgcccatggggcaacctatgggacgcttcaatactgacatggtgtgaagagtctattgagctaattggtagtcctccggcccctgaatgcggctaatcctaactgcggagcagatgctcacaaaccagtgggcagtctgtcgtaatgggtaactctgcagcggaaccgactactttgggtgtccgtgtttcctttcatttttacactggctgcttatggtgacaattgagagattgttaccatatagctattggattggccatccggtgactaacagagcaattgtttacctatttattggttttgtaccgttagattacaaagttctaaagactctgaatcttattatagcactcaatacagtaaa

SEQ ID NO: 20605 - DNA, 722 bp, synthetic construct
  source 1..722: mol_type = other DNA
cccacccacagggcctactgggcgctagcacactggtatcacggtacctttgtgcgcctgttttatagtccctccccccggacgcatcttagaagctgaacctaagtggtcaacaggcggctcagaacaccatctgggtctcgaccaagcacttctgtttccccggactgagtatcaataagctgcttacgcggctgaaggaaaaaacgtccgttatccggccaattacttcaagaaacccagtaccaccatgaaggttgcgcagcgtttcgctccgcacaaccccagtgtagatcaggtcgatgagtcaccgcattcctcacgggcgaccgtggcggtggctgcgctggcggcctgcccatggggcaacccatgggacgcttcaatactgacatggtgcgaagagtcaattgagctaattggtagtcctccggcccctgaatgcggctaatcctaactgtggagcagatgcccacgtaccagtgggtagtctgtcgtaacgggcaactccgcagcggaaccgactactttgggtgtccgtgtttctctttattcttatgttggctgcttatggtgacaattgagagattgttaccatatagctattggattggccatccggtgacgaatagagcgattgtatatctttttgttggattcgtaccattaaacaaaacaaattacaaaaccttgtgttacattattaaattaaacacagcaaa

SEQ ID NO: 20606 - DNA, 741 bp, synthetic construct
  source 1..741: mol_type = other DNA
ttaaaacagcctgtgggttgttcccacccacagggcccactgggcgctagcacactggtatcatggtacctttgtgtgcctgttttatttcccttccccagatgcaacttagaagcaacactccacgaccaatagcaggcgtggcacaccagccatgtcttggtcaagcacttctgtaaccccggactgagtatcaataaactgctcacgcggtcgaaggagaaaacgtccgttacccggctaactacttcgagaaacctagtaacgccatgaaaattgcgaggtgtttcgctcagcacatccccagtgtagatcaggtcgatgagtcaccgcattccccacaggtaactgtggcggtggctgcgttggcggcctgcccatggggtgacccatgggacgcttcaatacggacatggtgtgaagagtctattgagctagttggtagtcctccggcccctgaatgcggctaatcctaactgtggagcatgcgcccccaatccagagggtagcgtgtcgtaacgggtaactccgcagcggaaccgactactttgggtgtccgtgtttctttttattcttatattggctgcttatggtgacaattgaaaggttgttgccatatagctattggattggccacccagtgacaaacagagcaataatttaccaatttgtgggatttgttccaataagtttgaaagtcttgaagacacttaatctaatattacaactcaatagtgcaaa

SEQ ID NO: 20607 - DNA, 803 bp, synthetic construct
  source 1..803: mol_type = other DNA
cctgtgggttgttcccacccacagggcccactgggcgccagtacactggtacgccagtactgcggtatcacggtatcacagtatgccagtacctttgtacgcctgttttataccctttccccacatgtaatcttagaagtttaagcaagtaaagaccaacaggagtccaacatccagttggattgcggtcaaacacttctgtttccccggacctagtagtgataggctgtacccacggccgaagacgaacccgtccgttatccggccagctacttcgagaagcccagtagcatcaaagatctgtcttggcgtttcgctcagcgcgtttcccccgcgtagatcgggctgatgggtctccgcattccccacgggcgaccgtggcggaggccgcgtggcggcccgcctatggcgaaagccataggacgccatttcagtgacagggtgtgaagagcctattgagctagttggtagtcctccggcccctgaatgcggctaatcctaaccacggagcgtccgccagcaaaccagccggcagggcgtcgtaacgggcaactctgtggcggaaccgactactttgggtgtccgtgtttccttttgatcctatattggctgcttatggtgacaacgataagttgttatcataaagcttttgggttggccacccggagaaagttgtcagtatttgatattgctcggctctcgcgcctaccaataagacaagctttatatttattggtttcattttatccttctaaggaaatcactgaaactcatttgttattactgcttacattgtcagcgat

SEQ ID NO: 20608 - DNA, 721 bp, synthetic construct
  source 1..721: mol_type = other DNA
acccaccccagaggcccacgtggcggctagtactccggtattgcggtacccttgtacgcctgttttatactcccttcccgtaacttagacgcacaaaaccaagttcaatagaagggggtacaaaccagtaccaccacgaacaagcacttctgtttccccggtgatgttgtatagactgcttgcgtggttgaaagcgacggatccgttatccgcttatgtacttcgagaagcccagtaccacctcggaatcttcgatgcgttgcgctcagcactcaaccccagagtgtagcttaggctgatgagtctggacatccctcaccggtgacggtggtccaggctgcgttggcggcctacctatggctaacgccatgggacgctagttgtgaacaaggtgtgaagagcctattgagctacataagaatcctccggcccctgaatgcggctaatcccaacctcggggcaggtggtcacaaaccagtgattggcctgtcgtaacgcgcaagtccgtggcggaaccgactactttgggtgtccgtgtttccttttattttattgtggctgcttatggtgacaatcacagattgttatcataaagcgaattggattggccatccggtgaaagtgagattcattatctatctgtttgctggattcgctccattgagtgtgtttactctaagtacaatttcaacagttatttcaatcagacaattgtatcata

SEQ ID NO: 20609 - DNA, 722 bp, synthetic construct
  source 1..722: mol_type = other DNA
cccacccacagggcctactgggcgctagcacactggtatcacggtacctttgtgcgcctgttttatagtccctccccccggacgcaacttagaagctgaacctaagcggtcaacaggcggctcagaacaccatctgggtctcgaccaagcacttctgtttccccggactgagtatcaataagctgcttacgcggctgaaggaaaaaacgtccgttatccggccaattacttcaagaaacccagtaccaccatgaaggttgcgcagcgtttcgctccgcacaaccccagtgtagatcaggtcgatgagtcaccgcattcctcacgggcgaccgtggcggtggctgcgctggcggcctgcccatggggcaacccatgggacgcttcaatactgacatggtgcgaagagtcaattgagctaattggtagtcctccggcccctgaatgcggctaatcctaactgtggagcagatgcccacgtaccagtgggtagtctgtcgtaacgggcaactccgcagcggaaccgactactttgggtgtccgtgtttctctttattcttatgttggctgcttatggtgacaattgagagattgttaccatatagctattggattggccatccggtgacgaatagagcgattgtatatctttttgttggattcgtaccattaaacaaaacaaattacaaaaccttgtgttacattattagattaaacacagcaaa

SEQ ID NO: 20610 - DNA, 729 bp, synthetic construct
  source 1..729: mol_type = other DNA
ttgttcccacctacagggcccactgggcgctagcacactggtatcacggtacctttgtgcgcctgttttatgcttcctcccccactatagtaatttagaagcttgaactatacggccaacagacaacccggtacaccaaccggaccccggccaagcacttctgtatccccggactgagtatcagtaggctgctcgcgcggctgaaggagaaaacgttcgttacccggccacttacttcgagaaacctagtaacgccatgaaagttgcgcagcgtttcgctccgcacaaacccagtgtagatcaggtcgatgagtcaccgcatcccccacgggcgaccgtggcggtggctgcgttggcggcctgcccatggggtaacccatgggacgcttcaatactgacatggtgcgaagagtctattgagctaagtggtggtcctccggcccctgaatgcggctaatcctaactgcggagcagatacccacactccagtgggcagtctgtcgtaacgggcaactctgcagcggaaccgactactttgggtgtccgtgtttccttttgtcttttacactggctgcttatggtgacaattgaaagattgttaccatatagctattggattggccatccggtgtcaaacagagcaattatttacttgtttgttggttatatacctctcaataccaaggttctaaaaacacttaactacatcttgttattgaatacgttgaa

SEQ ID NO: 20611 - DNA, 720 bp, synthetic construct
  source 1..720: mol_type = other DNA
cccacccatagggcccactgggcgttagcacactggtattccggtacctttgtgcgcctgttttatttaccctctcccagagtaacttagaagcataatctatgtggtcaatagacagcccagtgcaccaactgggtcccgaccaagcacttctgttgccccggaccgagtatcaataggctgctcacgcggctgaaggagaaagcgttcgttacccggccaattacttcgagaaacttagtagcaccatgaaggttgcgcagcgtttcgctccgcacaaccccagtgtagatcaggtcgatgagtcaccgcgttcctcacgggcgaccgtggcggtggctgcgttggcggcctgcccatgaggcaactcatgggacgcttcaatactgacatggtgtgaagagtctattgagctaattggtagtcctccggcccctgaatgcggctaatccttactgcggagcagatacccacaaaccagtgggcggtctgtcgtaacgggcaactccgcagcggaaccgactactttgggtgtccgtgtttccttttattccaaatttggctgcttatggtgacaattgaaaggttgttaccatatagctattggattggccatccggtaacaagcagagcgattgtttatctgtttgttggtttcgttccattaaattataaagttttaaacacactcaattatattttattactcaactcagggaa

SEQ ID NO: 20612 - DNA, 730 bp, synthetic construct
  source 1..730: mol_type = other DNA
gtgggttgttcccacccacagggcccactgggcgtttgcacactggtatcgcggtacctttgtgcgcctgttttatccaccctcctctaattgaatttagaagtcaagcacaaccggtcaacagatagcccagcataccagctgggtttcgaccaagcacttctgtttacccgggctgagtatcaataggctgctcacgcggctgaaggagaaaacgttcgttacccggccaaatacttcgagaaacctagtaccgccatggacgttgcgcagcgtttcgttccacgcaaccccagtgtagatcaggtcgatgagtcaccgcatcccccacgggcgaccgtggcggtggctgcgctggcggcctgcccatggggtaacccatgggacgcttcaatgctgacatggtgcgaagagtctattgagctatttggtagtcctccggcccctgaatgcggctaatcctaactgcggagcagacacccacacgccagtgggcagtctgtcgtaacgggcaactccgcagcggaaccgactactttgggtgtccgtgtttctttttattctttcattggctgcttatggtgacaattgagaggttgttaccatatagctattggattggccatccggtgagcaacagagcaattatatttctttttgttggatatataccacttgactctaataactacaataccctgctttatattctccaattgaatacgaaaag

SEQ ID NO: 20613 - DNA, 730 bp, synthetic construct
  source 1..730: mol_type = other DNA
gtgggttgttcccacccacagggcccactgggcgtttgcacactggtatcgcggtacctttgtgcgcctgttttatccaccctcccctaattgaatttagaagtcaagcacaaccggtcaacagatggcccagcataccagctgggtttcgaccaagcacttctgtttacccgggctgagtatcaataggctgctcacgcggctgaaggagaaaacgttcgttacccggccaattacttcgagaaacctagtaccgccatggacgttgcgcagcgtttcgttccacgcaaccccagtgtagatcaggtcgatgagtcaccgcatcccccacgggtgaccgtggcggtggctgcgctggcggcctgcccatggggtaacccatgggacgcttcaatgctgacatggtgcgaagagtctattgagctaattggtagtcctccggcccctgaatgcggctaatcctaactgcggagcagacacccacacgccagtgggcagtctgtcgtaacgggcaactccgcagcggaaccgactactttgggtgtccgtgtttctttttattctttcattggctgcttatggtgacaattgagaggttgttaccatatagctattggattggccatccggtgagcaacagagcaattatatttctttttgttggatatataccacttgactctaataactacaataccctgctttatattctccaattgaatacgaaaag

SEQ ID NO: 20614 - DNA, 799 bp, synthetic construct
  source 1..799: mol_type = other DNA
tgtgggttgttcccacccacagggcccactgggcgccagtacactggtatgctttacctcggtattgcggtaccgttgtatacagtacctttgtacgcctgttttaaatcccctccccaaatgtaaccttagaagtttaagtaaactcagaccaataggagtccaacacccagttggattacggtcaagcacttctgtctccccggacctagtagtgataggctgtacccacggccgaagatgaacccgtccgttatccggccagctacttcgagaagcctagtagcatcaaaaatctgtcttggcgtttcgctcagcgcgttccccccgcgtagatcgggctgatgggtctccgcattccccacgggcgaccgtggcggaggccgcgtggcggcccgcctatggcgaaagccataggacgccatttcagtgacagggtgtgaagagcctattgagctagttggtagtcctccggcccctgaatgcggctaatcctaaccacggagcgtccgccaacaatccagttggtagggcgtcgtaacgggtaactctgtggcggaaccgactactttgggtgtccgtgtttccttttgatcctattttggctgcttatggtgacaacgataagttgttatcataaagcttttgggttggccacctggaaaaagatatcagtgtttgatattgttcggctctcacgcctaccaacaaaacaagctctatatttattaatttcattttatccattggaggatattaccgaattccatctacaacttttgctcactttatcagcaaa

SEQ ID NO: 20615 - DNA, 721 bp, synthetic construct
  source 1..721: mol_type = other DNA
cccacccgcagggcccaccgggcgctagcacactggtatctcggtacctttgtgcgcctgttttatagcccctcccccgaatgtaacgtagaagctgaacccaagtggtcaataggcggctcagaacaccatctgggtcttgaccaagcacttctgttaccccggactgagtatcaacaagctgctcacgcggctgaaggagaaaacgttcgttacccggccaattacttcgagaagcccagtaccaccatgaaggttgcgcagcgtttcgctccgcacaaccccagtgtagatcaggccgatgagtcaccgcgttcctcacgggtgaccgtggcggtggctgcgctggcggcctgcccatggggtaacccatgggacgcttcaatactgacatggtgcgaagagtcgattgagctaattggtagtcctccggcccctgaatgcggctaatcctaactgcggagcagatgcccaagctccagtgggtagtctgtcgtaatgggtaactctgcagcggaaccgactactttgggtgtccgtgtttccttttattcttacattggctgcttatggtgacaattgagagattgttaccatatagctattggattggccatccggtgacaaatagagcaattatatatctttttgtcggattcgtaccactcgacaaaacaaatttccaaaccttgtgttacattgttagactaaatacagcaaa

SEQ ID NO: 20616 - DNA, 721 bp, synthetic construct
  source 1..721: mol_type = other DNA
cacccacccatagggcccaccgggcgccagcactctggtatcatggtacctttgtgcgcctgttttatataacccttcccccagttgaaacctagaagtaatgcctcccgaccaacagcaggcgtggcacaccagccatgtcttggtcaagcacttctgtttcccggactgagtatcaatagactgctcacgcggttgaaggagaaaacgttcgttaaccggccaaccacttcgagaaacctagtagcaccatgaatattgcgaagtgtttcgctcagcactaccccagtgtagatcaggccgatgagtcaccgcattccccacgggtgaccgtggcggtggctgcgttggcggcctgcccatggggcaacccatgggacgcttcaatgtggacatggtgcgaagagtctattgagctggttggtagtcctccggcccctgaatgcggctaatcctaactgcggagcacgcgccctcactccagagggtagcgtgtcgtaacgggcaactctgcagcggaaccgactactttgggtgtccgtgtttccttttatattttattggctgcttatggtgacaatcaaagaattgttaccatatagctattggattggccatccggtgtctaatagagccttcatttatctatttgttggttacacaccacttaacaccaagccttaaatacccttaattacatcttattattgaatactataaa

SEQ ID NO: 20617 - DNA, 716 bp, synthetic construct
  source 1..716: mol_type = other DNA
cacagggcccactgggcgctagtacactggtatcacggtacctttgtgcgcctgtttgacccaccttccccaaacgcaacttagaagcacaacttaaatggtcattagacggctcagtatgccaactgagtctcgatcaagcacttctgttaccccggactgagtaccaataggctgctcacgcggctgaaggggaaaccgttcgttacccgaccaactacttcgagaaacctagtaccaccatgaaagttgcgtagcgtttcgctccgcacaaccccagtgtagatcaggccgatgagtcaccgcaaaccccacgggcgactgtggcggtggctgcgctggcggcctgcccatgggacaactcatgggacgctacaatactgacatggtgcgaagagtctattgagctagttggtagtcctccggcccctgaatgcggctaatcctaactgtggagcagatacccacgcaccagtgggcagtctgtcgtaatgggcaactccgcagcggaaccgactactttgggtgtccgtgtttcctttttattcctacgctggctacttatggtgacaattgagagactgtaaccatattgctatcgggttggccacctggtgaagaatagaacagttgctcgcttgtttgtcagtcttgaaccgttgtaccataaagccttaactgcccctcaacaccgtcataacacttaacacgctgaa

SEQ ID NO: 20618 - DNA, 737 bp, synthetic construct
  source 1..737: mol_type = other DNA
cctgtgggttgatcccacccacagggcccattgggcgctagcacactggtatcacggtacctttgtgcgcctgttttatccatcccttcccaaattgcaacttagaagcatgctacaatcggatcaataggtggttcagtaaaccaactgagccttgaccaagtacttctgttaccccggactgagtatcaataggctgctcgcgtggctgatggagaaaacgtccgttacccgaccaattacttcgagaaacctagtaccaccatgaaagttgcgcagcgtttcgctccgcacaaccccagtgtagatcaggtcgatgagtcaccgcgttccccacgggcgaccgtggcggtggctgcgttggcggcctgcccatggggtaacctatgggacgcttcaatactgacatggtgcgaagagtctattgagctaattggtagtcctccggcccctgaatgcggctaatcctaactgcggagcagatacccacgcaccagtgggcagtctgtcgtaacgggcaactctgcagcggaaccgactactttgggtgaccgtgtttccttttatttcaatgctggctgctttatggtgacaattgaaagattgttaccatatagctattggattggccatccggtgacaaaaaaaacaattatctacctgtttattggctttatacctctcaattacaaggttataaatactcttaacttcattttaatgcttaacacagcaaa

SEQ ID NO: 20619 - DNA, 803 bp, synthetic construct
  source 1..803: mol_type = other DNA
cctgtgggttgttcccacccacagggcccactgggcgccagtacactggtatgtcagtactttggtattacggtaccattgtacgccagtacctttgtacgcctgttttatatcccttcccccacacgtaactttagaagtttgatcaaacagaccaataggagtccaacaaccagttggattgcggtcaagcacttctgtctccccggacctagtagtgataggctgtacccacggccgaagatgaacccgtccgttacccggccagctacttcgagaagcctagtagcatcaaagatctgtcttggcgtttcgctcagcgcgttcccccccgcgtagatcgggctgatgggtctccgcatcccccacgggcgaccgtggcggaggccgcgtggcggcccgcctatggcgaaagccataggacgccatttcagtgacagggtgtgaagagcctattgagctagttggtagtcctccggcccctgaatgcggctaatcctaaccatggagcgtccgccagcaaaccagctggtagggcgtcgtaacgggcaactccgtggcggaaccgactactttgggtgtccgtgtttccttttgatcctattgtggctgcttatggtgacaacttacagttgttatcataaagcttttggattggccatccggaaggagttaacagtttgttcgctcatcgctttatcaaagctacctttgagaaaggcaatttatttgttaatttcattttataaacttgaagatatatcaagtgctcacttggatttactcatacaactatatcaaac

SEQ ID NO: 20620 - DNA, 735 bp, synthetic construct
  source 1..735: mol_type = other DNA
ccccctgggttgttcccacccacagggcccaccgggcgctagcacactggtatctcggtacccttgtgcgcctgttttatccacccttttcccatttaacttagaagcacgcgccaagacggtcaaaagggagcccagtaagccaattgggctatgaccaagcactcctgtaaccccgggccgagtatcaataagctgctcgcgcggctgaaggagaaaaagctcgttacccggccaattacttcgagaaacccagtagcatcatgaaagttgcgcagcgtttcgctccacacaaccccagtgtagatcaggtcgatgagtcaccgcgttccccacgggtgaccgtggcggtggctgcgctggcggcctgcccatggggccacccatgggacgcttcaatactgacatggtgtgaagagtctattgagctaattggtagtcctccggcccctgaatgcggctaatcctaactgcggagcagatgcccacacaccagtgggaagtctgtcgtaacgggtaactctgcagcggaaccgactactttgggtgtccgtgtttccttttatttctactctggctgcttatggtgacaattgaaaggttgttaccatatagctattggattggccatccggtgtcacatagagcgattatttacttgtttgttgggtttataccactgaactataaagttttaaatactcttaactacattttaatccttaactcattaaa

SEQ ID NO: 20621 - DNA, 727 bp, synthetic construct
  source 1..727: mol_type = other DNA
ttcccaccccagaggcccacgtggcggccagtactccggtattacggtacccttgtacgcctgttttatactcccttcccctgtaacttagaagcatacaaaccaagttcaatagaagggggtacaaaccagtaccaccacgaacaagcactcctgtttccccggtgacattgcatagactgtacccacggttgaaagcgatcgatccgttacccgctcctgtacttcgagaagcctagtatcatcttggaatcttcgatgcgttgcgctcagcactcaaccccagagtgtagcttaggctgatgagtctggacgtcccccaccggcgacggtggtccaggctgcgttggcggcctacctgtggcccaaagccacaggacgctagttgtgaacaaggtgtgaagagcctattgagctacaagagagtcctccggcccctgaatgcggctaatcctaaccacggagcaggcagttgcaaaccagcaaccggcctgtcgtaacgcgcaagtctgtggcggaaccgactactttgggtgtccgtgtttccttttatttttacaatggctgcttatggtgacaatcatagattgttatcataaagcgacttggattggccatccggtgaaagtgaaacacattgtttacttgtttgttggattcactccgattaactcttttacttacaaactcattacaacaactctattaattagagataagcgtcaca

SEQ ID NO: 20622 - DNA, 708 bp, synthetic construct
  source 1..708: mol_type = other DNA
gcccacgtggcggctagtacactggtatcacggtacctttgtacgcctgttttatactccctcccccgcaacttagaagcatacaattcaagctcaataggagggggtgcaagccagcgcctccgtgggcaagcactactgtttccccggtgaggccgcatagactgttcccacggttgaaagtgtccgatccgttatccgctcatgtacttcgagaagcctagtatcgctctggaatcttcgacgcgttgcgctcagcactcaaccccggagtgtagcttgggccgatgagtctggacagtccccactggcgacagtggtccaggctgcgctggcggcccacctgtggcccaaagccacgggacgctagttgtgaacagggtgtgaagagcctattgagctacatgagagtcctccggcccctgaatgcggctaatcctaaccatggagcaggcagctgcaacccagcagccagcctgtcgtaacgcgcaagtccgtggcggaaccgactactttgggtgtccgtgtttccttttattcttgaatggctgcttatggtgacaatcatagattgttatcataaagcgagttggattggccatccagtgtgaatcagattaattactcccttgtttgttggatccactcccgaaacgttttactccttaacttattgaaattgtttgaagacaggatttcagtgtcaca

SEQ ID NO: 20623 - DNA, 799 bp, synthetic construct
  source 1..799: mol_type = other DNA
tgtgggttgtacccacccacagggcccaccgggcgccagtacactggtacgccagtaccatggtattacggtaccatgttacgtcagtacctttgtacgcctgttttatatcccctccccgaagtaaccttagaagtttaagtaacaaagaccaataggagtccagcaaccagctggattgcggtcaagcacttctgtctccccggacctagtagtgataggctgtacccacggccgaagatgaacccgtccgttatccggccagctacttcgagaagcctagtagcatcaaagatctgtcttggcgtttcgctcagcgcgtttcccccgcgtagatcgggctgatgggtctccgcatcccccacgggcgaccgtggcggaggccgcgtggcggcccgcctatggcgaaagccataggacgctatttcagtgacagggtgtgaagagcctattgagctagttggtagtcctccggcccctgaatgcggctaatcctaaccacggagcgtccaccagcaaaccagctggcggggcgtcgtaacgggtaactctgtggcggaaccgactactttgggtgtccgtgtttccttttgatcctattttggctgcttatggtgacaacaataagttgttatcataaagcttttgggttggccacctggaaaaagttatcagtgtttgatattgttcggctttcacgcctaccaacaaaacaagccttatatttattggttgccttttgtcccttggcggaaattactgattttcacctaaagcttctgattacattgacggcaaa

SEQ ID NO: 20624 - DNA, 726 bp, synthetic construct
  source 1..726: mol_type = other DNA
gtgttcccacccacggggcctactgggcgccagcacactggtatcacggtacctttgtgcgcctgttttataacccctcccccgaatgtaacgtagaagctgaacctaagcggtcaataggcggctcagaacaccatctgggtcttgaccaagcacttctgttaccccggactgagtatcaataagctgcttacgcggctgaaggagaaaacgttcgttacccggccaattacttcaagaaacccagtaccaccatgaaggttgcgcagcgtttcgctccacacaaccccagtgtagatcaggtcgatgagtcaccgcgttcctcacgggcgaccgtggcggtggctgcgctggcggcctgcccatggggcaacccatgggacgcttcaatactgacatggtgcgaagagtcaattgagctaattggtagtcctccggcccctgaatgcggctaatcctaactgcggagcagacgcccaagctccagtgggtagtctgtcgtaacgggtaactctgcagcggaaccgactactttgggtgtccgtgtttccttttattcttacattggctgcttatggtgacaattgagagattgttaccatatagctattggattggccatccggtgacaaatagagcaattgtatatctttttgttggattcatatcactcgacaaaacaaatttcagaaccttgtgttatattattagattaaatacagcaaa

SEQ ID NO: 20625 - DNA, 719 bp, synthetic construct
  source 1..719: mol_type = other DNA
cacccacagggcccactgggcgctagtacactggtatcacggtacctttgtgcgcctgtttgacccaccttccccaaacgcaacttagaagcacagcttaaatggtcattagacggctcagtatgccaactgagtctcgatcaagcacttctgttaccccggactgagtaccaataggctgctcacgcggctgaaggggaaaccgttcgttacccgaccaactacttcgagaaacctagtaccaccatgaaagttgcgcagcgtttcgctccgcacaaccccagtgtagatcaggccgatgagtcaccgcaaaccccacgggcgactgtggcggtggctgcgctggcggcctgcccatgggacaactcatgggacgctacaatactgacatggtgcgaagagtctattgagctagttggtagtcctccggcccctgaatgcggctaatcctaactgtggagcagatacctacgcaccagtgggcagtctgtcgtaatgggcaactccgcagcggaaccgactactttgggtgtccgtgtttctttttattcctacgctggctacttatggtgacaattgagagactgtaaccatattgctatcgggttggccacctggtgaagaatagaacagttgctcacttgtttgtcagtcttgcaccgttgtaccataaagccttaactgcccctcaacaccgtcataacacttaacacgctgaa

SEQ ID NO: 20626 - DNA, 713 bp, synthetic construct
  source 1..713: mol_type = other DNA
cagaggcccacgtggcggctagtacactggtatcacggtacctttgtacgcctgttttatactccctcccccgcaacttagaagcatacaattcaagctcaataggagggggtgcaagccagcgcctccgtgggcaagcactactgtttccccggtgaggccgcatagactgttcccacggttgaaagtgtccgatccgttatccgctcatgtacttcgagaagcctagtatcgctctggaatcttcgacgcgttgcgctcagcactcaaccccggagtgtagcttgggccgatgagtctggacagtccccactggcgacagtggtccaggctgcgctggcggcccacctgtggcccaaagccacgggacgctagttgtgaacagggtgtgaagagcctattgagctacatgagagtcctccggcccctgaatgcggctaattctaaccatggagcaggcagctgcaacccagcagccagcctgtcgtaacgcgcaagtccgtggcgaaaccgactactttgggtgtccgtgtttccttttattcttgaatggctgcttatggtgacaatcatagattgttatcataaagcgagttggattggccatccagtgtgaatcagattaattactcccttgtttgttggatccactcccgaaacgttttactccttaacttattgaaattgtttgaagacaggatttcagtgtcaca

SEQ ID NO: 20627 - DNA, 713 bp, synthetic construct
  source 1..713: mol_type = other DNA
cagaggcccacgtggcggctagtacactggtatcacggtacctttgtacgcctgttttatactccctcccccgcaacttagaagcatacaattcaagctcaataggagggggtgcaagccagcgcctccgtgggcaagcactactgtttccccggtgaggccgcatagactgttcccacggttgaaagtgtccgatccgttatccgctcatgtacttcgagaagcctagtatcgctctggaatcttcgacgcgttgcgctcagcactcaaccccggagtgtagcttgggccgatgagtctggacagtccccactggcgacagtggtccaggctgcgctggcggcccacctgtggcccaaagccacgggacgctagttgtgaacagggtgtgaagagcctattgagctacatgagagtcctccggcccctgaatgcggctaattctaaccatggagcaggcagctgcaacccagcagccagcctgtcgtaacgcgcaagtccgtggcggaaccgactactttgggtgtccgtgtttccttttattcttgaatggctgcttatggtgacaatcatagattgttatcataaagcgagttggattggccatccagtgtgaatcagattaattactcccttgtttgttggatccactcccgaaacgttttactccttaacttattgaaattgtttgaagacaggatttcagtgtcaca

SEQ ID NO: 20628 - DNA, 713 bp, synthetic construct
  source 1..713: mol_type = other DNA
cagagacccacgtggcggctagtacactggtatcacggtacctttgtacgcctgttttatactccctcccccgcaacttagaagcatacaattcaagctcaataggagggggtgcaagccagcgcctccgtgggcaagcactactgtttccccggtgaggccgcatagactgttcccacggttgaaagtgtccgatccgttatccgctcatgtacttcgagaagcctagtatcgctctggaatcttcgacgcgttgcgctcagcactcaaccccggagtgtagcttgggccgatgagtctggacagtccccactggcgacagtggtccaggctgcgctggcggcccacctgtggcccaaagccacgggacgctagttgtgaacagggtgtgaagagcctattgagctacatgagagtcctccggcccctgaatgcggctaattctaaccatggagcaggcagctgcaacccagcagccagcctgtcgtaacgcgcaagtccgtggcggaaccgactactttgggtgtccgtgtttccttttattcttgaatggctgcttatggtgacaatcatagattgttatcataaagcgagttggattggccatccagtgtgaatcagattaattactcccttgtttgttggatccactcccgaaacgttttactccttaacttattgaaattgtttgaagacaggatttcagtgtcaca

SEQ ID NO: 20629 - DNA, 713 bp, synthetic construct
  source 1..713: mol_type = other DNA
cagaggcccacgtggcggctagtacactggtatcacggtacctttgtacgcctgttttatactccctcccccgcaacttagaagcatacaattcaagctcaataggagggggtgcaagccagcgcctccgtgggcaagcactactgtttccccggtgaggccgcatagactgttcccacggttgaaagtgtccgatccgttatccgctcatgtacttcgagaagcctagtatcgctctggaatcttcgacgcgttgcgctcagcactcaaccccggagtgtagcttgggccgatgagtctggacagtccccactggcgacagtggtccaggctgcgctggcggcccacctgtggcccaaagccacgggacgctagttgtgaacagggtgtgaagagcctattgagctacatgagagtcctccggcccctgaatgcggctaatcctaaccatggagcaggcagctgcaacccagcagccagcctgtcgtaacgcgcaagtccgtggcggaaccgactactttgggtgtccgtgtttccttttattcttgaatggctgcttatggtgacaatcatagattgttatcataaagcgagttggattggccatccagtgtgaatcagattaattactcccttgtttgttggatccactcccgaaacgttttactccttaacttattgaaattgtttgaagacaggatttcagtgtcaca

SEQ ID NO: 20630 - DNA, 713 bp, synthetic construct
  source 1..713: mol_type = other DNA
cagaggcccacgtggcggctagtacactggtatcacggtacctttgtacgcctgttttatactccctcccccgcaacttagaagcatacaattcaagctcaataggagggggtgcaagccagcgcctccgtgggcaagcactactgtttccccggtgaggccgcatagactgttcccacggttgaaagtgtccgatccgttatccgctcatgtacttcgagaagcctagtatcgctctgggatcttcgacgcgttgcgctcagcactcaaccccggagtgtagcttgggccgatgagtctggacagtccccactggcgacagtggtccaggctgcgctggcggcccacctgtggcccaaagccacgggacgctagttgtgaacagggtgtgaagagcctattgagctacatgagagtcctccggcccctgaatgcggctaattctaaccatggagcaggcagctgcaacccagcagccagcctgtcgtaacgcgcaagtccgtggcggaaccgactactttgggtgtccgtgtttccttttattcttgaatggctgcttatggtgacaatcatagattgttatcataaagcgagttggattggccatccagtgtgaatcagattaattactcccttgtttgttggatccactcccgaaacgttttactccttaacttattgaaattgtttgaagacaggatttcagtgtcaca

SEQ ID NO: 20631 - DNA, 713 bp, synthetic construct
  source 1..713: mol_type = other DNA
cagaggcccacgtggcggctagtacactggtatcacggtacctttgtacgcctgttttatactccctcccccgcaacttagaagcatacaattcaagctcaataggagggggtgcaagccagcgcctccgtgggcaagcactactgtttccccggtgaggccgcatagactgttcccacggttgaaagtgtccgatccgttatccgctcatgtacttcgagaagcctagtatcgctctggaatcttcgacgcgttgcgctcagcactcaaccccggagtgtagcttgggccgatgagtctggacagtccccactggcgacagtggtccaggctgcgctggcggcccacctgtggcccaaagccacgggacgctagttgtgaacagggtgtgaagagcctattgagctacatgagagtcctccggcccctgaatgcggctaattctaaccatggagcaggcagctgcaacccagcagccagcctgtcgtaacgcgcaagtccgtggcggaaccgactactttgggtgtccgtgtttccttttattcttgaatggctgcttatggtgacaatcatagattgttatcataaagcgagttggattggccatccagtgtgaatcagattaattactcccttgtttgttggatccactcccgaaacgttttactccttaacttattgaaattgtttgaagacaggacttcagtgtcaca

SEQ ID NO: 20632 - DNA, 713 bp, synthetic construct
  source 1..713: mol_type = other DNA
cagaggcccacgtggcggctagtacactggtatcacggtacctttgtacgcctgttttatactccctcccccgcaacttagaagcatacaattcaagctcaataggagggggtgcaagccagcgcctccgtgggcaagcactactgtttccccggtgaggccgcatagactgttcccacggttgaaagtgtccgatccgttatccgctcatgtacttcgagaagcctagtatcgctctggaatcttcgacgcgttgcgctcagcactcaaccccggagtgtagcttgggccgatgagtctggacagtccccactggcgacagtggtccaggctgcgctggcggcctacctgtggcccaaagccacgggacgctagttgtgaacagggtgtgaagagcctattgagctacatgagagtcctccggcccctgaatgcggctaattctaaccatggagcaggcagctgcaacccagcagccagcctgtcgtaacgcgcaagtccgtggcggaaccgactactttgggtgtccgtgtttccttttattcttgaatggctgcttatggtgacaatcatagattgttatcataaagcgagttggattggccatccagtgtgaatcagattaattactcccttgtttgttggatccactcccgaaacgttttactccttaacttattgaaattgtttgaagacaggatttcagtgtcaca

SEQ ID NO: 20633 - DNA, 713 bp, synthetic construct
  source 1..713: mol_type = other DNA
cagagacccacgtggcggctagtacactggtatcacggtacctttgtacgcctgttttatactccctcccccgcaacttagaagcatacaattcaagctcaataggagggggtgcaagccagcgcctccgtgggcaagcactactgtttccccggtgaggccgcatagactgttcccacggttgaaagtgtccgatccgttatccgctcatgtacttcgagaagcctagtatcgctctggaatcttcgacgcgttgcgctcagcactcaaccccggagtgtagcttgggccgatgagtctggacagtccccactggcgacagtggtccaggctgcgctggcggcccacctgtggcccaaagccacgggacgctagttgtgaacagggtgtgaagagcctattgagctacatgagagtcctccggcccctgaatgcggctaatcctaaccatggagcaggcagctgcaacccagcagccagcctgtcgtaacgcgcaagtccgtggcggaaccgactactttgggtgtccgtgtttccttttattcttgaatggctgcttatggtgacaatcatagattgttatcataaagcgagttggattggccatccagtgtgaatcagattaattactcccttgtttgttggatccactcccgaaacgttttactccttaacttattgaaattgtttgaagacaggatttcagtgtcaca

SEQ ID NO: 20634 - DNA, 713 bp, synthetic construct
  source 1..713: mol_type = other DNA
cagaggcccacgtggcggctagtacactggtatcacgatacctttgtacgcctgttttatactccctcccccgcaacttagaagcatacaattcaagctcaataggagggggtgcaagccagcgcctccgtgggcaagcactactgtttccccggtgaggccgcatagactgttcccacggttgaaagtgtccgatccgttatccgctcatgtacttcgagaagcctagtatcgctctggaatcttcgacgcgttgcgctcagcactcaaccccggagtgtagcttgggccgatgagtctggacagtccccactggcgacagtggtccaggctgcgctggcggcccacctgtggcccaaagccacgggacgctagttgtgaacagggtgtgaagagcctattgagctacatgagagtcctccggcccctgaatgcggctaattctaaccatggagcaggcagctgcaacccagcagccagcctgtcgtaacgcgcaagtccgtggcggaaccgactactttgggtgtccgtgtttccttttattcttgaatggctgcttatggtgacaatcatagattgttatcataaagcgagttggattggccatccagtgtgaatcagattaattactcccttgtttgttggatccactcccgaaacgttttactccttaacttattgaaattgtttgaagacaggatttcagtgtcaca

SEQ ID NO: 20635 - DNA, 713 bp, synthetic construct
  source 1..713: mol_type = other DNA
cagagacccacgtggcggctagtacactggtatcacggtacctttgtacgcctgttttatactccctcccccgcaacttagaagcatacaattcaagctcaataggagggggtgcaagccagcgcctccgtgggcaagcactactgtttccccggtgaggccgcatagactgttcccacggttgaaagtgtccgatccgttatccgctcatgtacttcgagaagcctagtatcgctctggaatcttcgacgcgttgcgctcagcactcaaccccggagtgtagcttgggccgatgagtctggacagtccccactggcgacagtggtccaggctgcgctggcggcccacctgtggcccaaagccacgggacgctagttgtgaacagggtgtgaagagcctattgagctacatgagagtcctccggcccctgaatgcggctaatcctaaccatggagcaggcagctgcaacccagcagccagcctgtcgtaacgcgcaagtccgtggcggaaccgactactttgggtgtccgtgtttccttttattcttgaatggctgcttatggtgacaatcatagattgttatcataaagcgagttggattggccatccagtgtgaatcagattaattactcccttgtttgttggatccactcccgaaacgttttattccttaacttattgaaattgtttgaagacaggatttcagtgtcaca

SEQ ID NO: 20636 - DNA, 713 bp, synthetic construct
  source 1..713: mol_type = other DNA
cagagacccacgtggcggctagtacactggtatcacggtacctttgtacgcctgttttatactccctcccccgcaacttagaagcatacaattcaagctcaataggagggggtgcaagccagcgcctccgtgggcaagcactactgtttccccggtgaggccgcatagactgttcccacggttgaaagtgtccgatccgttatccgctcatgtacttcgagaagcctagtatcgctctggaatcttcgacgcgttgcgctcagcactcaaccccggagtgtagcttgggccgatgagtctggacagtccccactggcgacagtggtccaggctgcgctggcggcccacctgtggcccaaagccacgggacgctagttgtgaacagggtgtgaagagcctattgagctacatgagagtcctccggcccctgaatgcggctaatcctaaccatggagcaggcagctgcaacccagcagccagcctgtcgtaacgcgcaagtccgtggcggaaccgactactttgggtgtccgtgtttccttttattcttgaatggctgcttatggtgacaatcatagattgttaccataaagcgagttggattggccatccagtgtgaatcagattaattactcccttgtttgttggatccactcccgaaacgttttactccttaacttattgaaattgtttgaagacaggatttcagtgtcaca

SEQ ID NO: 20637 - DNA, 713 bp, synthetic construct
  source 1..713: mol_type = other DNA
cagaggcccacgtggcggctagtacactggtatcacggtacctttgtacgcctgttttatactccctcccccgcaacttagaagcatacaattcaagctcaataggagggggtgcaagccagcgcctccgtgggcaagcactactgtttccccggtgaggccgcatagactgttcccacggttgaaagtgtccgatccgttatccgctcatgtacttcgagaagcctagtatcgctctggaatcttcgacgcgttgcgctcagcactcaaccccggagtgtagcttgggccgatgagtctggacagtccccactggcgacagtggtccaggctgcgctggcggcccacctgtggcccaaagccacgggacgctagttgtgaacagggtgtgaagagcctattgagctacatgagagtcctccggcccctgaatgcggctaattctaaccatggagcaggcagctgcaacccagcagccagcctgtcgtaacgcgcaagtccgtggcggaaccgactactttgggtgtccgtgtttccttttattcttgaatggctgcttatggtgacaatcatagattgttatcataaagcgtgttggattggccatccagtgtgaatcagattaattactcccttgtttgttggatccactcccgaaacgttttactccttaacttattgaaattgtttgaagacaggatttcagtgtcaca

SEQ ID NO: 20638 - DNA, 713 bp, synthetic construct
  source 1..713: mol_type = other DNA
cagagacccacgtggcggctagtacactggtatcacggtacctttgtacgcctgttttatactccctcccccgcaacttagaagcatacaattcaagctcaataggagggggtgcaagccagcgcctccgtgggcaagcactactgtttccccggtgaggccgcatagactgttcccacggttgaaagtgtccgatccgttatccgctcatgtacttcgagaagcctagtatcgctctggaatcttcgacgcgttgcgctcagcactcaaccccggagtgtagcttgggccgatgagtctggacagtccccactggcgacagtggtccaggctgcgctggcggcccacctgtggcccaaagccacgggacgctagttgtgaacagggtgtgaagagcctattgagctacatgagagtcctccggcccctgaatgcggctaattctaaccatggagcaggcagctgcaacccagcagccagcctgtcgtaacgcgcaagtccgtggcgaaaccgactactttgggtgtccgtgtttccttttattcttgaatggctgcttatggtgacaatcatagattgttatcataaagcgagttggattggccatccagtgtgaatcagattaattactcccttgtttgttggatccactcccgaaacgttttactccttaacttattgaaattgtttgaagacaggatttcagtgtcaca

SEQ ID NO: 20639 - DNA, 713 bp, synthetic construct
  source 1..713: mol_type = other DNA
cagaggcccacgtggcggctagtacactggtatcacggtacctttgtacgcctgttttatactccctcccccgcaacttagaagcatacaattcaagctcaataggagggggtgcaagccagcgcctccgtgggcaagcactactgtttccccggtgaggccgcatagactgttcccacggttgaaagtgtccgatccgttatccgctcatgtacttcgagaagcctagtatcgctctggaatcttcgacgcgttgcgctcagcactcaaccccggagtgtagcttgggccgatgagtctggacagtccccactggcgacagtggtccaggctgcgctggcggcccacctgtggcccaaagccacgggacgctagttgtgaacagggtgtgaagagcctattgagctacatgagagtcctccggcccctgaatgcggctaatcctaaccatggagcaggcagctgcaacccagcagccagcctgtcgtaacgcgcaagtccgtggcggaaccgactactttgggtgtccgtgtttccttttattcttgaatggctgcttatggtgacaatcatagattgttatcataaagcgagttggattggccatccagtgtgaatcagattaattactcccttgtttgttggatccactcctgaaacgttttactccttaacttattgaaattgtttgaagacaggatttcagtgtcaca

SEQ ID NO: 20640 - DNA, 713 bp, synthetic construct
  source 1..713: mol_type = other DNA
cagaggcccacgtggcggctagtacactggtatcacggtacctttgtacgcctgttttatactccctcccccgcaacttagaagcatacaattcaagctcaataggagggggtgcaagccagcgcctccgtgggcaagcactactgtttccccggtgaggccgcatagactgttcccacggttgaaagtgtccgatccgttatccgctcatgtacttcgagaagcctagtatcgctctggaatcttcgacgcgttgcgctcagcactcaaccccggagtgtagcttgggccgatgagtctggacagtccccactggcgacagtggtccaggctgcgctggcggcccacctgtggcccaaagccacgggacgctagttgtgaacagggtgtgaagagcctattgagctacatgagagtcctccggcccctgaatgcggctaattctaaccatggagcaggcagctgcaacccagcagccagcctgtcgtaacgcgcaagtccgtggcgaaaccgactactttgggtgtccgtgtttccttttattcttgaatggctgcttatggtgacaatcatagattgttatcataaagcgagttggattggccatccagtgtgaatcagattaattactcccttgtttgctggatccactcccgaaacgttttactcctcaacttattgaaattgtttgaagacaggatttcagtgtcaca

SEQ ID NO: 20641 - DNA, 713 bp, synthetic construct
  source 1..713: mol_type = other DNA
cagaggcccacgtggcggctagtacactggtatcacggtacctttgtacgcctgttttatactccctcccccgcaacttagaagcatacaattcaagctcaataggagggggtgcaagccagcgcctccgtgggcaagcactactgtttccccggtgaggccgcatagactgttcccacggttgaaagtgtccgatccgttatccgctcatgtacttcgagaagcctagtatcgctctggaatcttcgacgcgttgcgctcagcactcaaccccggagtgtagcttgggccgatgagtctggacagtccccactggcgacagtggtccaggctgcgctggcggcccacctgtggcccaaagccacgggacgctagttgtgaacagggtgtgaagagcctattgagctacatgagagtcctccggcccctgaatgcggctaatcctaaccatggagcaggcagctgcaacccagcagccagcctgtcgtaacgcgcaagtccgtggcggaaccgactactttgggtgtccgtgtttccttttattcttgaatggctgcttatggtgacaatcatagattgttatcataaagcgagttggattggccatccagtgtgaatcagattaattactcccttgtttgttggttccactcccgaaacgttttactccttaacttattgaaattgtttgaagacaggatttcagtgtcaca

SEQ ID NO: 20642 - DNA, 713 bp, synthetic construct
  source 1..713: mol_type = other DNA
cagagacccacgtggcggctagtacactggtatcacggtacctttgtacgcctgttttatactccctcccccgcaacttagaagcatacaattcaagctcaataggagggggtgcaagccagcgcctccgtgggcaagcactactgtttccccggtgaggccgcatagactgttcccacggttgaaagtgtccgatccgttatccgctcatgtacttcgagaagcctagtatcgctctggaatcttcgacgcgttgcgctcagcactcaaccccggagtgtagcttgggccgatgagtctggacagtccccactggcgacagtggtccaggctgcgctggcggcccacctgtggcccaaagccacgggacgctagttgtgaacagggtgtgaagagcctattgagctacatgagagtcctccggcccctgaatgcggctaatcctaaccatggagcaggcagctgcaacccagcagccagcctgtcgtaacgcgcaagtccgtggcggaaccgactactttgggtgtccgtgtttccttttattcttgaatggctgcttatggtgacaatcatagattgttatcataaagcgagttggattggccatccagtgtgaatcagattaattactcccttgtttgttggttccactcccgaaacgttttactccttaacttattgaaattgtttgaagacaggatttcagtgtcaca

SEQ ID NO: 20643 - DNA, 713 bp, synthetic construct
  source 1..713: mol_type = other DNA
cagaggcccacgtggcggctagtacactggtatcacggtacctttgtacgcctgttttatactccctcccccgcaacttagaagcatacaattcaagctcaataggagggggtgcaagccagcgcctccgtgggcaagcactactgtttccccggtgaggccgcatagactgttcccacggttgaaagtgtccgatccgttatccgctcatgtacttcgagaagcctagtatcgctctggaatcttcgacgcgttgcgctcagcactcaaccccggagtgtagcttgggccgatgagtctggacagtccccactggcgacagtggtccaggctgcgctggcggtccacctgtggcccaaagccacgggacgctagttgtgaacagggtgtgaagagcctattgagctacatgagagtcctccggcccctgaatgcggctaatcctaaccatggagcaggcagctgcaacccagcagccagcctgtcgtaacgcgcaagtccgtggcggaaccgactactttgggtgtccgtgtttccttttattcttgaatggctgcttatggtgacaatcatagattgttatcataaagcgagttggattggccatccagtgtgaatcagattaattactcccttgtttgttggatccactcccgaaacgttttactccttaacttattgaaattgtttgaagacaggattccagtgtcaca

SEQ ID NO: 20644 - DNA, 713 bp, synthetic construct
  source 1..713: mol_type = other DNA
cagaggcccacgtggcggctagtacactggtatcacggtacctttgtacgcctgttttatactccctcccccgcaacttagaagcatacaattcaagctcaataggagggggtgcaagccagcgcctccgtgggcaagcactactgtttccccggtgaggccgcatagactgttcccacggttgaaagtgtccgatccgttatccgctcatgtacttcgagaagcctagtatcgctctggaatcttcgacgcgttgcgctcagcactcaaccccggagtgtagcttgggccgatgagtctggacagtccccactggcgacagtggtccaggctgcgctggcggcccacctgtggcccaaagccacgggacgctagttgtgaacagggtgtgaagagcctattgagctacatgagagtcctccggcccctgaatgcggctaattctaaccatggagcaggcagctgcaacccagcagccagcctgtcgtaacgcgcaagtccgtggcgaaaccgactactttgggtgtccgtgtttccttttattcttgaatggctgcttatggtgacaatcatagattgttatcataaagcgagttggattggccatccagtgtgaatcagattaattactcccttgtttgttggatccactcccgaaacgttttactccttaacttactgaaattgtttgaagacaggatttcagtgtcaca

SEQ ID NO: 20645 - DNA, 713 bp, synthetic construct
  source 1..713: mol_type = other DNA
cagaggcccacgtggcggctagtacactggtatcacggtacctttgtacgcctgttttatactccctcccccgcaacttagaagcatacaattcaagctcaataggagggggtgcaagccagcgcctccgtgggcaagcactactgtttccccggtgaggccgcatagactgttcccacggttgaaagtgtccgatccgttatccgctcatgtacttcgagaagcctagtatcgctctggaatcttcgacgcgttgcgctcagcactcaaccccggagtgtagcttgggccgatgagtctggacagtccccactggcgacagtggtccaggctgcgctggcggcccacctgtggcccaaagccacgggacgctagttgtgaacagggtgtgaagagcctattgagctacatgagagtcctccggcccctgaatgcggctaatcctaaccatggagcaggcagctgcaacccagcagccagcctgtcgtaacgcgcaagtccgtggcggaaccgactactttgggtgtccgtgtttccttttattcttgaatggctgcttatggtgacaatcatagattgttatcataaagcgagttggattggccatccagtgtgaatcagattaactactcccttgtttgttggatccactcccgaaacgttttactccttaacttattgaaattgtttgaagacaggatttcagtgtcaca

SEQ ID NO: 20646 - DNA, 721 bp, synthetic construct
  source 1..721: mol_type = other DNA
cccacccacagggcccattgggcgctagcacactggtatcgtggtacctttgtgtgcctgttttatccaccccaccccgcaacgcattagaagcatgggtacacatggtcgataggtggctctgtaatccaactgagtctcgaccaagcacttctgttaccccggaccgagtatcaataggctgcttgcgcggctgaaggagaaagcgttcgttatccggccaattacttcgagaaacccagtaccatcatgaaggttgcgcggcgtttcgttccacacaaccccagtgtagatcaggctgatgagtcaccgcattccccacgggcgaccgtggcggtggctgcgctggcggcctgcccatggggcaacccatgggacgcttcaaaactgacatggtgcgaagagtctattgagctaattggtagtcctccggcccctgaatgcggctaatcctaactgcggagcagatacccacacaccagtgggcagtctgtcgtaacgggcaactctgcagcggaaccgactactttgggtgtccgtgtttccttttattcttatactggctgcctatggtgacaattgaaagattgttaccatatagctattggattggccatccggtgactaacagagcagttatttatctatttgttggatttgtaccaataaaccccaaagcttttaaaaccctaaatcttatattactattaaataaagcgaa

SEQ ID NO: 20647 - DNA, 720 bp, synthetic construct
  source 1..720: mol_type = other DNA
ccacccacagggcccactgggcgctagcactctggtatcacggtacctttgtgcgcctgttttgtatcccctttccccaattgcaacttagaagatgtacacactgatcaatagtgggcatagcacaccagttatgtcttgatcaagcactcctgtatccccggaccaagtatcaatagaccgctcacgcggttgaaggagaaaacgttcgtcacccggctaactacttcgagaaacccagtagtatcatggaagttgcgaggcgtttcgttcagcacatccccagtgtagatcaggtcgatgagtcaccgcgtcccccacgggcgaccgtggcggtggctgcgctggcggcctgcctacggggtaacccgtaggacgcctcaatacagacatggtgcgaagagtcgattgagctagttagtagtcctccggcccctgaatgcggctaatcctaactgcggagcacatgccctcaacccagggggtattgtgtcgtaacgggcaactctgcagcggaaccgactactttgggtgtccgtgtttccttttattcttatactggctgcttatggtgacaattgaaagattgttgccatatagctattggattggccatccagtgtctaatagagctattgtttacctctttgttggattcataccactcaacttaaaagaagttaaaacactacaactcattatacaactgaatacagcaag

SEQ ID NO: 20648 - DNA, 720 bp, synthetic construct
  source 1..720: mol_type = other DNA
ccacccacagggcccactgggcgctagcactctggtatcacggtacctttgtgcgcctgttttatatcccctttccccaattgcaacttagaagatgtacacactgatcaatagtgggcatagcacaccagttatgtcttgatcaagcactcctgtatccccggaccaagtatcaatagaccgctcacgcggttgaaggagaaaacgttcgttacccggctaactacttcgagaaacccagtagtatcatgaaagttgcgaggcgtttcgttcagcacatccccagtgtagatcaggtcgatgagtcaccgcgtcccccacgggcgaccgtggcggtggctgcgctggcggcctgcctacggggcaacccgtaggacgcctcaatacagacatggtgcgaagagtcgattgagctagttagtagtcctccggcccctgaatgcggctaatcctaactgcggagcacacgccctcaacccagggggtattgtgtcgtaacgggcaactctgcagcggaaccgactactttgggtgtccgtgtttccttttattcttatactggctgcttatggtgacaattgaaagattgttgccatatagctattggattggccatccagtgtctaatagagctattgtttacctctttgttggattcataccactcaacttaaaagaagttaaaacactacaactcattatacaactgaatacagcaag

SEQ ID NO: 20649 - DNA, 801 bp, synthetic construct
  source 1..801: mol_type = other DNA
tgtgggttgttcccacccacagggcccactgggcgctagtacactggtatgccttacctcggtattgcggtaccgttgtatacagtacctttgtacgcctgttttaaaatcccttccccaaatgtaaccttagaagctttagttgacaaagaccaataggagtccaacatccagttggattgcggtcaagcacttctgtctccccggacctagtagtgataggctgtacccacggccgaagatgaacccgtccgttatccggccagctacttcgagaagcctagtaacatcgaagatctgtcttggcgtttcgctcagcgcgtttccccccgcgtagatcgggctgatgggtctccgcacaccccacgggcgaccgtggcggaggccgcgtggcggcccgcctatggcgaaagccataggacgccatttcagtgacagggtgtgaagagcctattgagctagttggtagtcctccggcccctgaatgcggctaatcccaaccacggagcactcgccaacaagccagttggtagggtgtcgtaatgggtaactctgtggcggaaccgactactttgggtgtccgtgtttccttttgatcccattttggctgcttatggtgacaacaataagttgttatcataaagcttttgggttggccacctggaaaaagttatcagtgtttgatatcgtacggctttcacgcctgccaataagacaagctttgtatttgctgatttcattttattcagtgagagacattacagacgcacacctaaaccttttgctcgcactgtcagcagg

SEQ ID NO: 20650 - DNA, 811 bp, synthetic construct
  source 1..811: mol_type = other DNA
gccccgggggttgtacccacccccggggcccacgtggcgccagtactctggtacgctagtacctttgtacgcctgttttcccccccttaaacaaattaagattgctgggcctgtggggagtagtccgactccgcaccgatacgtcgcaccagtactccggtatgcttagtaccctagtacggagtgtccagtaacccttccccgaaacttagaagctatgcaccaaactgacccaagagggcgcgttgcatccagcagcgtgatggtcaagcacttctgtttccccggccgcgaggtcgttacccgcccgcaccactacgggaagcctattaggcagccaagtttgtgaagcgttgcgctcagccacaaccccagtggtagctctgagagatgggactcgtccgccccccatggtaacatggtgacttgtccgcgtgcgctctcgggttcacctcacggtgatcacgccgatcaaatgcaactgttgaagagcctactgtgctggagcggttttcctccggagccgtgaatgctgctaatcctaacctccgagcgtgtgcgcacaaaccagtgttgctacgtcgtaacgcgtaagttggaggcggaacagactactttcggtactccgtgtttcctttattttactatttcaatttatggtgacaattgttgagatttgtgatattgcgaaattacccttgaacattgctctgtattatttggttgcattctacaaaacctcggaaattcccagctcgtacatcgacttacttgtttacttgaacttgaagtataagttagagaacacaag

SEQ ID NO: 20651 - DNA, 731 bp, synthetic construct
  source 1..731: mol_type = other DNA
gtgggttgttcccacccacagggcccaccgggcgctagcacactggtatctcggtacccttgtgcgcctgttttatccacccttttcccatttaacttagaagcacgcgccaagacggtcaaaagggagcccagtaagccaattgggctatgaccaagcactcctgtaaccccgggccgagtatcaataagctgctcgcgcggctgaaggagaaaaagctcgttacccggccaattacttcgagaaacccagtagcatcatgaaagttgcgcagcgtttcgctccacacaaccccagtgtagatcaggtcgatgagtcaccgcgttccccacgggtgaccgtggcggtggctgcgctggcggcctgcccatggggccacccatgggacgcttcaatactgacatggtgtgaagagtctattgagctaattggtagtcctccggcccctgaatgcggctaatcctaactgcggagcagatgcccacacaccagtgggaagtctgtcgtaacgggtaactctgcagcggaaccgactactttgggtgtccgtgtttccttttatttctactctggctgcttatggtgacaattgaaaggttgttaccatatagctattggattggccatccggtgtcacatagagcgattatttacttgtttgttgggtttataccactgaactataaagttttaaatactcttaactacattttaatccttaactcattaaa

SEQ ID NO: 20652 - DNA, 747 bp, synthetic construct
  source 1..747: mol_type = other DNA
ttaaaacagctctggggttgttcccaccccagaggcccacgtggcggccagtactccggtattacggtacccttgtacgcctgttttatactcccttcccctgtaacttagaagcatacaaaccaagttcaatagaagggggtacaaaccagtaccaccacgaacaagcactcctgtttccccggtgacattgcatagactgtacccacggttgaaagcgatcgatccgttacccgctcctgtacttcgagaagcctagtatcatcttggaatcttcgatgcgttgcgctcagcactcaaccccagagtgtagcttaggctgatgagtctggacgtcccccaccggcgacggtggtccaggctgcgttggcggcctacctgtggcccaaagccacaggacgctagttgtgaacaaggtgtgaagagcctattgagctacaagagagtcctccggcccctgaatgcggctaatcctaaccacggagcaggcagttgcaaaccagcaaccggtctgtcgtaacgcgcaagtctgtggcggaaccgactactttgggtgtccgtgtttccttttatttttacaatggctgcttatggtgacaatcatagattgttatcataaagcgacttggattggccatccggtgaaagtaaaacacattgtttacttgtttgttggattcactccaattaacccttttacttacaaactcattacaacaactctattaattagagataagcatcaca

SEQ ID NO: 20653 - DNA, 801 bp, synthetic construct
  source 1..801: mol_type = other DNA
gtgggttgttcccacccacagggcccactgggcgctagtacactgatatgccagcaccttggtatcacggtaccattgtgcgtcagtacctttgtacgcctgttttatgctcccttcccccacatgcaaccttagaagtttaaatgaacaaagaccaataggagtccaacatccagttgggttgcggtcacgcacttctgtttccccggacctagtagtgataggctgtacccacggccgaagatgaacccgtccgttatccggccagctacttcgagaagcctagtagcatcaaagatctgtcttggcgtttcgctcagcgcgttccccccgcgtagatcgggctgatgggtctccgcataccccacgggtgaccgtggcggaggccgcgtggcggcccgcctatggcgaaagccataggacgccatttcagtgacagggtgtgaagagcctattgagctagttggtagtcctccggcccctgaatgcggctaatcctaaccacggagcgtccaccagcaaaccagctgggagggcgtcgtaacgggtaactctgtggcggaaccgactactttgggtgtccgtgtttccttttgatcctatattggctgcttatggtgacaacaataagttgttatcataaagcttttggattggccatccggaaagagttaacagtttgttcgctcattgctttatcaaaacttccattgagaaaagcaatttatttgttagtttcattttataaactagagaatatatcaactgctcacttgaacttactcatacaattacaccaat

SEQ ID NO: 20654 - DNA, 730 bp, synthetic construct
  source 1..730: mol_type = other DNA
tgggttgttcccacccacggggcccattgggcgctagcacactggtatcacggtacccttgtgcgcctgttttatccaccccctccccaatgcaacatagaagcacaaactaagtggtcaatagacggctcagtgcaccaactgggtttagaccaagcacttctgttaccccggactgagtatcaataggctgctcacgcggctgaaggagaaaacgttcgttacccggccaactacttcgagaagcccagtaccaccatgaaggttgcgcagtgtttcgttcagcacaaccccagtgtagatcaggtcgatgagtcaccgcaatccccacgggcgaccgtggcggtggctgcgctggcggcctgcccatggggtgacccatgggacgcttcaattccgacatggtgcgaagagcctattgagctagttggtagtcctccggcccctgaatgcggctaatcccaactgcggagcaagcacccacaaaccagtgggctgtttgtcgtaacgggcaactctgcagcggaaccgactactttgggtgtccgtgtttccttttattcctacactggctgcttatggtgacaattgaaagattgttgccatatagctattggattggccatccggtaacaaacagagctattatttacttatttgttggctttgtgccgttgaatttcaaagttataaaaaccataacctccatcttgacactcaacacagcaaa

SEQ ID NO: 20655 - DNA, 701 bp, synthetic construct
  source 1..701: mol_type = other DNA
gggcgctagcactctggtattgcggtacctttgtgcgcctgttttatgttcccacccccaatcgcaacttagaagcggtacttcacgaccaacagtgggcgtgacacaccagccacgtctcggtcaagcacttctgtctccccggactgagtatcaataggctgctcacgcggctgaaggagaaaacgtccgttatccggccaattacttcgagaaacctagtaccgccatgaaagttgcgcagcgtttcgatccgcacaaccccagtgtagatcaggtcgatgagtcaccgcgttccccacgggtgaccgtggcggtggctgcgttggcggcctgcccatgggagaacccatgggacgcttcaatactgacatggtgtgaagagtctattgagctaattggtagtcctccggcccctgaatgcggctaatcctaactgcggagcagattcccgcatgccagcgggtggtctgtcgtaacgggcaactctgcagcggaaccgactactttgggtgtccgtgtttccttttattcctatattggctgcttatggtgacaattgagagattgttaccatatagctattggattggccatccggtgacaaacagagcgattatttaccaatttattggttttgtaccgttgaattttaacacattcagaactcttaaccttattttggctcttaatacagcaaa

SEQ ID NO: 20656 - DNA, 571 bp, synthetic construct
  source 1..571: mol_type = other DNA
cttctgttatcccggactgagtatcaataagctgcttgcgcggctgaaggagaaaacgttcgttatccggccaattacttcgagaaacctagtaccaccatgaaggttgcgcggcgtttcgctccacacaaccccagtgtagatcaggccgatgagtcaccgcactccccacgggcgaccgtggcggtggctgcgttggcggcctgcccatggggcaacccatgggacgcttcaatactgacatggtgtgaagagtctattgagctaattggtagtcctccggcccctgaatgcggctaatcctaactgcggagcagatacccacatgccagtgggcagtctgtcgtaatgggtaactctgcagcggaaccgactactttgggtgtccgtgtttccttttattctaatattggctgcttatggtgacaattgagagattgttgccatatagctattggattggccatccagtgacaaacagagcaattgtttatctatttgttggtttcataccattaaatcttaaagctttaagaaccctcaactttattatacaacttaattcagtaca

SEQ ID NO: 20657 - DNA, 722 bp, synthetic construct
  source 1..722: mol_type = other DNA
ttcccacccacagggcccattgggcgccagcacactggtatcacggtacctttgtgcgcctgttttatataccctccccgaatgtaacttagaagctttacatagatggtcaatagaaggtccagcacaccagttggattccgaccaagtacttctgttatcccggactgagtatcaataggctgtttgcacggctgaaggagaaaacgttcgttacccggccaattacttcgagaaacctagtaacaccatggaagttgcgtagtgtttcgctccgcacgaccccggtgtagatcaggtcgatgagccaccgcgttccccacgggcgaccgtggcggtggctgcgctggcggcctgcccatggggcaacccatgggacgcttcaatactgacatggtgcgaagagtctattgagctaattggtagtcctccggcccctgaatgcggctaatcctaactgcggagcaggcaccctcaagccagagggcagtctgtcgtaacgggcaactctgcagcggaaccgactactttgggtgtccgtgtttccttttattcttgaactggctgcttatggtgacaattgaaagattgttaccatatagctattggattggccatccagtgacaaatagagcaattatatatctgtttgttggttttattccattaaactataaagttttaaacacacttaaatttgtcttaatactcaactcaataaa

SEQ ID NO: 20658 - DNA, 319 bp, synthetic construct; identical to SEQ ID NO: 305
  source 1..319: mol_type = other DNA

SEQ ID NO: 20659 - DNA, 728 bp, synthetic construct
  source 1..728: mol_type = other DNA
ggttgttcccacccacagggcccaccgggcgctagcacactggtatctcggtacccttgtgcgcctgttttatccacccttttcccatttaacttagaagcacgcgccaagacggtcaaaagggagcccagtaagccaattgggctatgaccaagcactcctgtaaccccgggccgagtatcaataagctgctcgcgcggctgaaggagaaaaagctcgttacccggccaattacttcgagaaacccagtagcatcatgaaagttgcgcagcgtttcgctccacacaaccccagtgtagatcaggtcgatgagtcaccgcgttccccacgggtgaccgtggcggtggctgcgctggcggcctgcccatggggccacccatgggacgcttcaatactgacatggtgtgaagagtctattgagctaattggtagtcctccggcccctgaatgcggctaatcctaactgcggagcagatgcccacacaccagtgggaagtctgtcgtaacgggtaactctgcagcggaaccgactactttgggtgtccgtgtttccttttatttctactctggctgcttatggtgacaattgaaaggttgttaccatatagctattggattggccatccggtgtcacatagagcgattatttacttgtttgttgggtttataccactgaactataaagttttaaatactcttaactacattttaatccttaactcattaaa

SEQ ID NO: 20660 - DNA, 725 bp, synthetic construct
  source 1..725: mol_type = other DNA
ttaaaatagcctgagggttgctcccacccacagggcccacgtggcgtagtactctggtatcacggtacctttgtacgcctattttatatcccttccccactgtaacttagaagcaactaacaaatcgcccaatagcagcacaatacccaattgtgttaagggcaagcacttctgtttccccggaagggtctaacggtatgctgtacccacggcagaagtatgacctaccgttaaccggccatgtacttcgagaagcctagtaccattatgaaggttgattgatgttacgctccccagcaaccccagctggtagttctggtcgatgagtctcggcataccccacgggcgaccgtggccgaggctgcgttggcggccagcctacacctcacggtgtaggacgtcaagatactgacatggtgtgaagagcctattgagctacgtggtagtcctccggcccctgaatgcggctaatcccaactccggagcatccgccagtaagcccactggaagggtgtcgtaatgcgaaagtctggagcggaaccgactactttgggtgtccgtgtttcctgttttacctattgtttggctgcttatggtgacaacttacagttatcatcataagctacttggtcttgccaaccggaaaattatttggttatttgttggtttcacaaacctacaactatatttacctgtcttattaattgttctcaaggttaacaaca

SEQ ID NO: 20661 - DNA, 711 bp, synthetic construct
  source 1..711: mol_type = other DNA
ggcccactgggcgccagcactctggtattgcggtaccttagtgcgcctgttttatacaccccttccctaaatgtaatttagatgcatgtaaataaaggccaatagcaggcgcagcacaccagctgtgtctcggtcaagcactcctgttaccccggactgagtatcaataggctactcacgtggctgaaggagaaaacgttcgttacccggccaattacttcgagaaacctagtaacaccatgaaggttgcgaagtgtttcgctcagcacaaccccagtgtagatcaggtcgatgagtcaccgcattccccacgggtgaccgtggcggtggctgcgttggcggcctgcccatgggattacccatgggacgcttcaatattgacatggtgtgaagagtctattgagctaattggtattcctccggcccctgaatgcggctaatcccaactgcggagcaggtacccacataccagtgggcagtctgtcgtaatgggcaactctgcagcggaaccgactactttgggtgtccgtgtttctctttattcttatactggctgcttatggtgacaattgagaaattgttgccatatagctattggattggccatccggtgacaaatagagcaattgtgcatccatttgttggttttataccattgaattacaaagttttaagtacccttaatcctattatatcattcaatacagcaaa

SEQ ID NO: 20662 - DNA, 800 bp, synthetic construct
  source 1..800: mol_type = other DNA
gtgggttgttcccacccacagggcccactgggcgctagtacactggtatgccttacctcggtattgcggtaccgttgtatacagtacctttgtacgcctgttttaaaatcccttccccaaatgtaaccttagaagctttagttgacaaagaccaataggagtccaacatccagttggattgcggtcaagcacttctgtctccccggacctagtagtgataggctgtacccacggccgaagatgaacccgtccgttatccggccagctacttcgagaagcctagtaacatcgaagatctgtcttggcgtttcgctcagcgcgtttccccccgcgtagatcgggctgatgggtctccgcacaccccacgggcgaccgtggcggaggccgcgtggcggcccgcctatggcgaaagccataggacgccatttcagtgacagggtgtgaagagcctattgagctagttggtagtcctccggcccctgaatgcggctaatcccaaccacggagcactcgccaacaagccagttggtagggtgtcgtaatgggtaactctgtggcggaaccgactactttgggtgtccgtgtttccttttgatcccattttggctgcttatggtgacaacaataagttgttatcataaagcttttgggttggccacctggaaaaagttatcagtgtttgatatcgtacggctttcacgcctgccaataagacaagctttgtatttgctgatttcattttattcagtgagagacattacagacgcacacctaaaccttttgctcgcactgtcagcagg

SEQ ID NO: 20663 - DNA, 690 bp, synthetic construct
  source 1..690: mol_type = other DNA
cactggtatcacggtacctttgtgcgcctgttttatttaccctcccccgacgtaaattagaagcatgcgctacacgatcaataggtggcttgacgcgccagtcaagtctcgatcatgcacttctgtttccccggaccgagtatcaataggctgctcgcgcggctgaaggagaaagcgttcgttatccggccaattacttcgagaaacctagtaacatcatgaaggttgcatggcgtttcgctccgcactaccccagtgtagatcaggccgatgagtcaccgcgatcctcacgggcgaccgtggcggtggctgcgctggcggcctgcccatggggcgacccatgggacgctataatactgacatggtgtgaagagtctattgagctaattggtagtcctccggcccctgaatgcggctaatcctaactgcggagcaggcacccacgaaccagtgggcagtctgtcgtaacgggcaactctgcagcggaaccgactactttgggtgtccgtgtttccttttattactattttggctgcttatggtgacaattgagagattgttaccatatagcttttggattggccatccagtgacaaacagagctatcatttatttatttgttggatttgtgccactagattacaacgtgtttaacaccctcaattacattctaatactcaacacaaagag

SEQ ID NO: 20664 - DNA, 713 bp, synthetic construct
  source 1..713: mol_type = other DNA
cacaaggcccactgggcgctagcacactggtattacggtacctttgtgcgcctgttttatacacccttaccccacgtaatatagaagcaaaacaacaaggtcaatagagagcccagtgagccaactgggtcgagaccaagcacttctgtttccccggaccgagtatcaataggctgcttacgcggctgaaggagaaaacgttcgttacccggctaactacttcgaaaaacctagtaacgccatggaagttgcgaaccgtttcgctcggcacttccccagtgtagatcaggtcgatgagtcaccgcattccccacgggcgaccgtggcggtggctgcgttggcggcctgcctatggggcaacccataggacgcttcaatatggacatggtgtgaagagtctattgagctagttagtagtcctccggcccctgaatgcggctaatcctaactgcggagcacatgcccccaacccaggaggtggtgtgtcgtaatgggtaactctgcagcggaaccgactactttgggtgtccgtgtttccttttatcccaatgttggctgcttatggtgacaattgaaagattgttaccatatagctattggattgaccatccggtgactaacagagcaattgtatacctattcattggttacgttccattaaatctcaaggaattaacgactctcaattacattttgctcttgaattctgcaaa

SEQ ID NO: 20665 - DNA, 730 bp, synthetic construct
  source 1..730: mol_type = other DNA
gtgggttgttcccacccacagggcccactgggcgcttgcacactggtatcacggtacctttgtgcgcctgttttatccacccccccctaatcgagtttagaagtcaagcacaactggtcgacaggtagcccagcacaccagctgggttctgaccaagcacttctgtttacccggactgagtatcaataggctgctcgcgcggctgaaggagaaaacgttcgttacccggccaattacttcgagaaacctagtaccgccatgaacgctgcgcggcgtttcgttccgcacaaccctagtgtagatcaggtcgatgagtcaccgcgttccccacgggtgaccgtggcggtggctgcgctggcggcctgcccatggggtaacccatgggacgcttcaatgctgacatggtgcgaagagtctattgagctaattggtagtcctccggcccctgaatgcggctaatcctaactgcggagcagacactcacacgccagtgggcagtctgtcgtaacgggcaactccgcagcggaaccgactactttgggtgtccgtgtttccttttattcttgcactggctgcttatggtgacaattgaaaggttgttaccatttagctattggattggccatccggtgagcaacagagcaattatatttctatttgttggatatataccatttgattttattaactacaatactctgctttatattctccaattgaatacgaaaag

SEQ ID NO: 20666 - DNA, 802 bp, synthetic construct
  source 1..802: mol_type = other DNA
cctgtgggttgttcccacccacagggcccactgggcgccagtacactggtatgtcagtaccttggtattacggtaccattgtatgctagtacctttgtacgcctgttttatatcccctccctatatgtaactttagaagtttaataaacaaagaccaataggagtccaacatccagttggattgtggtcaagcacttctgtctccccggacctagtagtgataggctgtacccacggccgaagatgaacccgtccgttatccggccagctacttcgagaagcctagtaacatcaaagatctgtcttggcgtttcgctcagcgcgttccccccgcgtagatcgggctgatgggtctccgcataccccacgggcgaccgtggcggaggccgcgtggcggcccgcctatggcgaaagccataggacgccatttcagtgacagggtgtgaagagcctattgagctagttggtagtcctccggcccctgaatgcggctaatcctaaccacggagcactcgccaacgaaccagttggtagggtgtcgtaacgggcaactctgtggcggaaccgactactttgggtgtccgtgtttccttttgatcctattttggctgcttatggtgacaacgataagttgttatcataaagcttttgggttggccacctggaaaaagttatcagtgtttgatattgttcggctttcacgcctgccaataaaacaagctttatatttattaatctcattctatccatttgaggatattactgaatttcatttgcaacttttactcacactatcagcaaa

SEQ ID NO: 20667 - DNA, 716 bp, synthetic construct
  source 1..716: mol_type = other DNA
cccacagggcccatagggcgctagcactctggtattgcggtacctttgtgcgcctgttttatattcccacccccaatcgcaacttagaagcagtacttcacgaccaacagtgggcgtgacacaccagccacgtctcggtcaagcacctctgtctccccggactgagtatcaataagctgctcacgcggctgagggagaaaacgtccgttacccggccaattacttcgagaaacctagtaccaccacgaaagttgcgcagcgtttcgatccgcacaaccccagtgtagatcaggtcgatgagtcaccgcgttccccacgggcgaccgtggcggtggctgcgttggcggcctgcccatgggagaacccatgggacgcttcaatactgacatggtgtgaagagtctattgagctaattggtagtcctccggcccctgaatgcggctaatcctaactgtggagcagattcccgcatgccagcgggtggtctgtcgtaacgggcaactctgcagcggaaccgactactttgggtgaccgtgtttccttttattcctatattggctgcttatggtgacagttgagagattgttaccatatagctattggattggccatccggtgacaaacagagcaattatctaccaatttatcggttttgtaccattgaatttcaacgcattcaaaaccctcaactttattttgactcttaatacagcaaa

SEQ ID NO: 20668 - DNA, 722 bp, synthetic construct
  source 1..722: mol_type = other DNA
cccacccacagggcctactgggcgctagcacactggtatcacggtacctttgtgcgcctgttttatagtccctccccccggacgcaacttagaagctgaacctaagcggtcaacaggcggctcagaacaccatctgggtctcgaccaagcacttctgtttccccggactgagtatcaataggctgcttacgcggctgaaggaaaaaacgtccgttatccggccaattacttcaagaaacccagtaccaccatgaaggttgcgcagcgtttcgctccgcacaaccccagtgtagatcaggtcgatgagtcaccgcattcctcacgggcgaccgtggcggtggctgcgctggcggcctgcccatggggcaacccatgggacgcttcaatactgacatggtgcgaagagtcaattgagctaattggtagtcctccggcccctgaatgcggctaatcctaactgtggagcagatgcccacgtaccagtgggtagtctgtcgtaacgggcaactccgcagcggaaccgactactttgggtgtccgtgtttctctttattcttatgttggctgcttatggtgacaattgagagattgttaccatatagctattggattggccatccggtgacgaatagagcgattgtatatctttttgttggattcgtaccattaaacaaaacacattacaaaaccttgtgttacattattagattaaacacagcaaa

SEQ ID NO: 20669 - DNA, 725 bp, synthetic construct
  source 1..725: mol_type = other DNA
gttcccacccacagggcctactgggcgctagcacactggtatcacggtacctttgtgcgcctgttttatagtccctccccccgaacgcaacttagaagctgaacctaagcggtcaacaggcggctcagaacaccatctgggtctcgaccaagcacttctgtttccccggactgagtatcaataagctgcttacgcggctgaaggaaaaaacgtccgttatccggccaattacttcaagaaacccagtaccaccatgaaggttgcgcagcgtttcgctccgcacaaccccagtgtagatcaggtcgatgagtcaccgcattcctcacgggcgaccgtggcggtggctgcgctggcggcctgcccatggggcaacccatgggacgcttcaatactgacatggtgcgaagagtcaattgagctaattggtagtcctccggcccctgaatgcggctaatcctaactgtggagcagatgcccacgtaccagtgggtagtctgtcgtaacgggcaactccgcagcggaaccgactactttgggtgtccgtgtttctctttattcttatgttggctgcttatggtgacaattgagatattgttaccatatagctattggattggccatccggtgacgaatagagcgattgtatatctttttgttggattcgtaccattaaacaaaacaaattacaaaaccttgtgttacattattagattaaacacagcaaa

SEQ ID NO: 20670 - DNA, 722 bp, synthetic construct
  source 1..722: mol_type = other DNA
tccccacccgcagggcccactgggcgttagcactctggtatcacggtacccttgtgcgcctgttttatacatcccaccccaaagtaacttagaagtatattacaaatgatcaatagtcagctcaacacgccagttgagtaccgatcaagcacttctgttaccccggactgagtatcaataagctgctaacgcggctgaaggagaaaacgttcgttatccgaccaactacttcgggaagcctagtaccaccatgaaagttgcgcagcgtttcgttccgcacagccccagtgtagatcaggccgatgagtcaccgcgtcccccgcaggcgactgtggcggtggctgcgttggcggcctgcccatggggtgacccatgggacgcttcaatactgacatggtgcgaagagtctactgagctagctggtagtcctccggcccctgaatgcggctaatcctaactgcggaacaggcaatcacaatccagtgggtggcctgtcgtaacgggcaactccgcagcggaaccgactactttgggtgtccgtgtttctttttattcttacattggctgcttatggtgacaattacagaattgttaccatatagctattggattggccatccagtgactaacagagcaatcgtgtacctttttgttggatttgtaccactaaacatcacgaattttataacactaaactacattctattattaaactcagcaaa

SEQ ID NO: 20671 - DNA, 743 bp, synthetic construct
  source 1..743: mol_type = other DNA
ttaaaacagcctgtgggttgttcccacccacggggcccattgggcgctagcacactggtatcacggtacccttgtgcgcctgttttatccaccccctcctcaatgcaacgtagaagcacaaactaagtggtcaatagacggctcagtgcaccaactgggtttagaccaagcacttctgttaccccggactgagtatcaataggctgctcacgcggctgaaggagaaaacgttcgttacccggccaactacttcgagaagcccagtaccaccatgaaggttgcgcagtgtttcgttcagcacaaccccagtgtagatcaggtcgatgagtcaccgcaatccccacgggcgaccgtggcggtggctgcgctggcggcctgcccatggggtgacccatgggacgcttcaattccgacatggtgcgaagagcctattgagctagttggtagtcctccggcccctgaatgcggctaatcccaactgcggagcaagcacccacaaaccagtgggctgtttgtcgtaacgggcaactctgcagcggaaccgactactttgggtgtccgtgtttccttttattcctacactggctgcttatggtgacaattgaaagattgttgccatatagctattggattggccatccggtaacaaacagagctattatttacttatttgttggctttgtgccgttgaatttcaaagttataaaaaccataaccttcatcttgacactcaacacagcaaa

SEQ ID NO: 20672 - DNA, 723 bp, synthetic construct
  source 1..723: mol_type = other DNA
gttgatcccacccgcagggcccactgggcgctagcacactggtatcacggtacctttgtgcgcctgttttacttcccttccctatatgtaacttagaagcagcactctacgaccaatagtaggcgtggcacaccagccatgtcttggtcaagcacttctgtaaccccgggccgagtatcaatagactgctcacgcggtcgaaggagaaaacgtccgttacccgaccaactacttcgaaaaacctagtaacgccatgaaaattgcgaggtgtttcgctcagcacacccccagtgtagatcaggccgatgagtcaccgcattccccacaggtgactgtggcggtggctgcgttggcggcctgcccatggggtgacccatgggacgcttcaatacggacatggtgtgaagagtctattgagctagttggtagtcctccggcccctgaatgcggctaatcctaactgtggagcacgcgcccccactccagagggtagcgtgtcgtaacgggtaactccgcagcggaaccgactactttgggtgtccgtgtttcctttattcttatactgctgcttatggtgacaattgatagattgttaccatatagctactggattggccacccggtgacaaacagagcaataatttatcaatttgtaggatttgttccaataagtttgaaagtcttgaagacactcaatctaatattactattcaatagtgcaaa

SEQ ID NO: 20673 - DNA, 709 bp, synthetic construct
  source 1..709: mol_type = other DNA
cccactgggtgctagcactctggtaccgcggtacctttgtgtgcctgttttatacccccttccccctatttgcaacttagaagctgcacaaactgatcaatagcaggcgtagcataccagctatgtcttgatcaagcactcctgtatccccggaccaagtatcaatagactgctcacgcggttgaaggagaaaacgttcgttacccggctaactacttcgagaaacctagtagtatcatgaaagttgcgaggcgtttcgttcagcacattcccagtgtagatcaggtcgatgagtcaccgcgttccccacgggcgaccgtggcggtggctgcgttggcggcctgcctacggggcgacccgtaggacgcttcaatacagacatggtgcgaagagtcgattgagctagttagtagtcctccggcccctgaatgcggctaatcctaactgcggagcacatgccctcaacccagggggtattgtgtcgtaacgggtaactctgcagcggaaccgactactttgggtgtccgtgtttccttttattcttacatcggctgcttatggtgacaattgagaggttgttaccatatagctattggattggccatccagtgtctaatagagctattatatacctctttgttggatttataccacttaacctaaaagaagttaagacactacagctcataatacagttgaatacagcaat

SEQ ID NO: 20674 - DNA, 808 bp, synthetic construct
  source 1..808: mol_type = other DNA
tcagtctgtgggttgttcccacccacagggcccactgggcgccagtacactggtacgtcagtaccttggtatcacggtaccattgtacgccagtacctttgtacgcctgttttatatcccttccccaaaccgtaactttagaagcataagtaaacatagaccactaggagtccaacatccagttggattgcggtcaagcacttctgtctccccggacctagtagtgataggctgtacccacggccgaagatgaacccgtccgttatccggccagctacttcgagaagcctagtagcatcaaagatctgtcttggcgtttcgctcagcgcgttccccccgcgtagatcgggctgatgggtctccgcataccccacgggcgaccgtggcggaggccgcgtggcggcccgcctatggcgaaagccataggacgccatttcagtgacagggtgtgaagagcctattgagctagttggtagtcctccggcccctgaatgcggctaatcctaaccacggagcatccgccaacaaaccagttggtagggtgtcgtaacgggtaactctgtggcggaaccgactactttgggtgtccgtgtttccttttgatcctatattggctgcttatggtgacaacgataagttgttatcataaagctcttgggttggccacctggaaaaagttatcagtgtttgatattgttcggctttcacgcctaccaataaaacaagctttatatttgttaatttcatttcatccatctgaggatattactgaatttcacttacagctcttgcttacactgtcaacaag

SEQ ID NO: 20675 - DNA, 722 bp, synthetic construct
  source 1..722: mol_type = other DNA
tccccacccgcagggcccactgggcgttagcactctggtatcacggtacccttgtgcgcctgttttatacatcccaccccaaagtaacttagaagtatattacaaatgatcaatagtcagctcaacacgccagttgagtaccgatcaagcacttctgttaccccggactgagtatcaataagctgctaacgcggctgaaggagaaaacgttcgttatccgaccaactacttcgggaagcctagtaccaccatgaaagttgcgcagcgtttcgttccgcacagccccagtgtagatcaggccgatgagtcaccgcgtcccccgcaggcgactgtggcggtggctgcgttggcggcctgcccatggggtgacccatgggacgcttcaatactgacatggtgcgaagagtctactgagctagctggtagtcctccggcccctgaatgcggctaatcctaactgcggagcaggcaatcacaatccagtgggtggcctgtcgtaacgggcaactccgcagcggaaccgactactttgggtgtccgtgtttctttttattcttacattggctgcttatggtgacaattacagaattgttaccatatagctattggattggccatccagtgactaacagagcaatcgtgtacctttttgttggatttgtaccactaaacatcacgaattttacaacactaaactacattctattattaaactcagcaaa

SEQ ID NO: 20676 - DNA, 722 bp, synthetic construct
  source 1..722: mol_type = other DNA
tccccacccgcagggcccactgggcgttagcactctggtatcacggtacccttgtgcgcctgttttatacatcccaccccaaagtaacttagaagtatattacaaatgatcaatagtcagctcaacacgccagttgagtaccgatcaagcacttctgttaccccggactgagtatcaataagctgctaacgcggctgaaggagaaaacgttcgttatccgaccaactacttcgggaagcctagtaccaccatgaaagttgcgcagcgtttcgttccgcacagccccagtgtagatcaggccgatgagtcaccgcgtcccccgcaggcgactgtggcggtggctgcgttggcggcctgcccatggggtgacccatgggacgcttcaatactgacatggtgcgaagagtctactgagctagctggtagtcctccggcccctgaatgcggctaatcctaactgcggagcaggcaatcacaatccagtgggtggcctgtcgtaacgggcaactccgcagcggaaccgactactttgggtgtccgtgtttctttttattcttacattggctgcttatggtgacaattacagaattgttaccatatagctattggattggccatccagtgactaacagagcaatcgtgtacctttttgttggatttgtaccactaaacatcacgaattttataacactaaactacattctattattaaactcagcaaa

SEQ ID NO: 20677 - DNA, 718 bp, synthetic construct
  source 1..718: mol_type = other DNA
cccacccacagggcccactgggcgctagcacactggtatcacggtacccttgtgcgcctgttttatctaccctaccccattgcaacttagaagttaaacaagcacggtcgttaggcggctcagtataccaactgggtcatgaccaagcacttctgttaccccgggctgagtatcaataagctgctcacgtggctgagggagaaaacgctcgttacccggccaattacttcgagaaacctagtaccaccatgaaggttgcgcagcgtttcgctccgcacaaccccagtgtagatcaggtcgatgagtcaccgcattcctcacgggcgaccgtggcggtggctgcgctggcggcctgcccatggggcaacccatgggacgcttcaatactgacatggtgtgaagagtctattgagctaattggtagtcctccggcccctgaatgcggctaatcctaactgcggagcagatacctacaagccagtaggcagtctgtcgtaacgggtaactctgcagcggaaccgactactttggtgtccgtgtttcctttattcttataatggctgcttatggtgacaattgaaaggttgttaccatatagctattggattggccatccagtgtctaacagagcaattgtttacttgtttgttggttttgtaccattgaattacagggtattaaatactctcaattttataatactactcaattcagcaaa

SEQ ID NO: 20678 - DNA, 734 bp, synthetic construct
  source 1..734: mol_type = other DNA
ctgtgggttgctcccacccacagggcccactgggcgctagcacactggtatcccggtacctttgtgcgcctgttttatttaccccacccccagctgtaatttagaagttcgacacacatggtcaatagatggctcagtgcaccaactgggtttagaccaagcacttctgttaccccggaccgagtatcaataagctgctcgcgcggctgaaggagaaaacgttcgttacccggccaattacttcgagaaacctagtaccaccatggaggttgcgcagcgtttcgctccgcacagccccagtgcagatcaggccgatgagtcaccgcattcctcacgggcgaccgtggcggtggctgcgttggcggcctgcccatggggcaacccatgggacgcttcaatactaacatggtgtgaagagtctattgagctaattggtagtcctccggcccctgaatgcggctaatcctaactgcggagcagatactcacatgccagtgggcagtctgtcgtaacgggcaactctgcagcggaaccgactactttgggtgtccgtgtttccttttattcttatactggctgcttatggtgacaattgagaaattgttaccatatagctattggattggccatccagtgacaaacagagcaattgtttacctatttgtcggcttcataccgttaaattttagagttttgaagacccttaacttgattatactattcaactctgtgaa

SEQ ID NO: 20679 - DNA, 734 bp, synthetic construct
  source 1..734: mol_type = other DNA
tcctgtgggttgatcccacccacagggcccactgggcgctagcacactggtattccggtacctttgtgcgcctgttttatacacccttcccaagtgtaacttagaagcttatcacacacggtcaacaggtgactcagtatgccaactgggtcttgatcaagcacttctgtttccccggactgagtatcaataagctgctcacgcggctgaaggagaaaacgttcgttaaccggccaattacttcgagaaacctagtaacaccatggaggttgcgcagtgtttcgctccacacaaccccagtgtagatcaggccgatgagtcaccgcactcctcacgggcgaccgtggcggtggctgcgctggcggcctgcccatgggataacccatgggacgcttcaatactgacatggtgcgaagagtctattgagctaattggtagtcctccggcccctgaatgcggctaatcctaactgcggagcagatacccacacgccagtgggcagtctgtcgtaatgggcaactctgcagcggaaccgactactttgggtgtccgtgtttccttttatttttatactggctgcttatggtgacaattgagagattgttaccatatagctattggattggccatccagtgacaaacagagcgattatttatttatttgttggttatatcccattaagccaaaaggccctagttactctcaactttatactattgcttaatacaacgaa

SEQ ID NO: 20680 - DNA, 720 bp, synthetic construct
  source 1..720: mol_type = other DNA
cccacccacagggcctactgggcgctagcacactggtattacggtacctttgtgcgcctgttttatacaccctcacccaacgtaatgtagaagcaagacaacaaggtcaatagagagcccagtgagccaactgggtcgtgaccaagcacttctgtttccccggaccgagtatcaataggctgcccacgcggctgaaggagaaaacgttcgttacccggctaactacttcgagaaacctagtaacgccatggaagttgcgaatcgtttcgctcggcacttccccagtgtagatcaggtcgatgagtcaccgcattccccacgggcgaccgtggcggtggctgcgttggcggcctgcctatgaggcaactcataggacgcttcaatatggacatggtgtgaagagtctattgagctagttagtagtcctccggcccctgaatgcggctaatcctaactgcggagcacatgcccccaatccaggaggtagtgtgtcgtaacgggtaactctgcagcggaaccgactactttgggtgtccgtgtttcctttttatcccaatattggctgcttatggtgacaattgaaagattgttaccatatagctattggattggccatccggtgactaacagagcaattgtatatctcttcattggatacgttccattaaatctcaaggaattaacgactctcaattacattttgctcttgaattctgcaaa

SEQ ID NO: 20681 - DNA, 720 bp, synthetic construct
  source 1..720: mol_type = other DNA
cccacccacagggcctactgggcgctagcacactggtattacggtacctttgtgcgcctgttttatacacccttacccaacgtaatatagaagcaagacaacaaggtcaatagaaagcccagtgagccaactgggtcgtgaccaagcacttctgtttccccggaccgagtatcaataggctgcccacgcggctgaaagagaaaacgttcgttacccggctaactacttcgaaaaacctagtaacgccatggaagttgcgaatcgtttcgctcggcacttccccagtgtagatcaggtcgatgagtcaccgcattccccacgggcgaccgtggcggtggctgcgttggcggcctgcctatgaggcaactcataggacgcttcaatatggacatggtgtgaagagtctattgagctagttagtagtcctccggcccctgaatgcggctaatcctaactgcggagcacatgcccccaatccaggaggtagtgtgtcgtaatgggtaactctgcagcggaaccgactactttgggtgtccgtgtttcctttttatcccaatattggctgcttatggtgacaattgaaagattgttaccatatagctattggattggccatccggtgactaacagagcaattgtatatctattcattggatacgttccattaaatctcaaggaattaacgactctcaattacattttgctcttgaattctgcaaa

SEQ ID NO: 20682 - DNA, 720 bp, synthetic construct
  source 1..720: mol_type = other DNA
cccacccacagggcctactgggcgctagcacactggtattacggtacctttgtgcgcctgttttatacaccctcacccaacgtaatatagaagcaagacaacaaggtcaatagagagcccagtgagccaactgggtcgtgaccaagcacttctgtttccccggactgagtatcaataggctgcccacgcggctgaaggagaaaacgttcgttacccggctaactacttcgaaaaacctagtaacgccatggaagttgcgaatcgtttcgctcggcacttccccagtgtagatcaggtcgatgagtcaccgcattccccacgggcgaccgtggcggtggctgcgttggcggcctgcctatgaggcaactcataggacgcttcaatatggacatggtgtgaagagtctattgagctagttagtagtcctccggcccctgaatgcggctaatcctaactgcggagcacatgcccccaatccaggaggtagtgtgtcgtaatgggtaactctgcagcggaaccgactactttgggtgtccgtgtttcctttttatcccagtattggctgcttatggtgacaattgaaagattgttaccatatagctattggattggccatccggtgactaacagagcaattgtatatcttttcattggatacgttccattaaatctcaaggaattaacgactctcaattacattttgcacttgaattctgtaaa

SEQ ID NO: 20683 - DNA, 720 bp, synthetic construct
  source 1..720: mol_type = other DNA
cccacccacagggcctactgggcgctagcacactggtattacggtacctttgtgcgcctgttttatacaccctcacccaacgtaatatagaagcaagacaacaaggtcaatagagagcccagtgagccaactgggtcgtgaccaagcacttctgtttccccggaccgagtatcaataggctgcccacgcggctgaaggagaaaacgttcgttacccggctaactacttcgaaaaacctagtaacgccatggaagttgcgaatcgtttcgctcggcacttccccagtgtagatcaggtcgatgagtcaccgcattccccacgggcgaccgtggcggtggctgcgttggcggcctgcctatgaggcaactcataggacgcttcaatatggacatggtgtgaagagtctattgagctagttagtagtcctccggcccctgaatgcggctaatcctaactgcggagcacatgcccccaatccaggaggtggtgtgtcgtaatgggtaactctgcagcggaaccgactactttgggtgtccgtgtttcctttttatcccaataatggctgcttatggtgacaattgaaagattgttaccatatagctattggattggccatccggtgactaacagagcaattgtatatcttttcattggatacgttccattaaatctcaaagaattaacgactctcaattacattttgctcttgaattctgcaaa

SEQ ID NO: 20684 - DNA, 723 bp, synthetic construct
  source 1..723: mol_type = other DNA
tccccactcacagggcccactgggcgccagcacactggtatcaaggtacctttgtgcgcctgttttatagccccttccccgaatgtaacgtagaagctgaacccaagcggtcaacaggcggctcagaataccatctgggtcttgaccaagcacttctgttaccccggactgagtatcaataagctgctcacgcggctgaaggagaaaatgttcgttatccggccaattacttcgagaaacctagtatcaccatgaaggttgcgcagcgtttcgctccgcacaatcccagtgtagatcaggtcgatgagtcaccgcattcctcacgggcgaccgtggcggtggctgcgctggcggcctgcccatggggcaacccatgggacgcttcaatactgacatggtgcgaagagtcaattgagctaattggtagtcctccggcccctgaatgcggctaatcctaactgcggagcagatgcccaagctccagtgggtagtctgtcgtaacgggtaactctgcagcggaaccgactactttgggtgtccgtgtttccttttattcttacattggctgcttatggtgacaattgagagattgttaccatatagctattggattggccaaccggtgacgaatagagcaattgtgtatctttttgttggattcataccactagacaatataaacttcaaaactttgtgttacatcattagattaaacacagcaag

SEQ ID NO: 20685 - DNA, 673 bp, synthetic construct
  source 1..673: mol_type = other DNA
cttgtgcgcctgttttatctaccccctccccaatgtaacgtaaaagcacaaatcaagtggtcaatagatggcccagtatgccaactgggtttagaccaagcacttctgttaccccggactgagtatcaataagctgctcacgcggctgaaggagaaaacgttcgttacccggccaactacttcgagaagcctagtaccaccatgaaggatgcgcagtgtttcgttcagcacaaccccagtgtagatcaggtcgatgagtcaccgcaatccccacgggcgaccgtggcggtggctgcgctggcggcctgcccatggggttacccatgggacgcttcaattccgacatggtgcgaagagtctattgagctagttggtagtcctccggcccctgaatgcggctaatcccaactgcggagcaagcacccacaaaccagtgggctgtttgtcgtaatgggtaactctgcagcggaaccgactactttgggtgtccgtgtttccttttattcctacactggctgcatatggtgacaattgaaagattgttgccatatagctattggattggccatccggtgacaaacagagctattatctacttgtttgtcggctttgtaccgttgaatttcaaagttgtaaaaaccctaatcttcatcttaacactcaacacagcaaa

SEQ ID NO: 20686 - DNA, 733 bp, synthetic construct
  source 1..733: mol_type = other DNA
tgtgggttgctcccacccacagggcccactgggcgctagcacactggtatcccggtacctttgtgcgcctgttttatttaccccacccccagctgtaatttagaagtacgacacacatggtcaatagatggctcagtgcaccaactgggtttagaccaagcacttctgttaccccggaccgagtatcaataagctgctcgcgcggctgaaggagaaaacgttcgttacccggccaattacttcgagaaacctagtaccaccatggaggttgcgcagcgtttcgctccgcacagccccagtgtagatcaggccgatgagtcaccgcgttcctcacgggcgaccgtggcggtggctgcgttggcggcctgcccatggggtaacccatgggacgcttcaatactaacatggtgtgaagagtctattgagctaattggtagtcctccggcccctgaatgcggctaatcctaactgcggagcagatactcacatgccagtgggcagtctgtcgtaacgggcaactctgcagcggaaccgactactttgggtgtccgtgtttccttttattcttatactggctgcttatggtgacaattgagaaattgttaccatatagctattggattggccatccagtgacaaacagagcaattgtttacctatttgtcggcttcataccgttaaacttaagagctttgaagacccttaacttgattatactattcaactctgtaaa

SEQ ID NO: 20687 - DNA, 725 bp, synthetic construct
  source 1..725: mol_type = other DNA
tcccaccccagaggcccacgtggcggctagtacaccggtatcacggtacccttgtacgcctgttttatgctccctttcccatgtaactttagaagcaatgaccaaagttcaatagaagggggtacaaaccagtaccaccacgaacaagcactactgtttccccggtgaggttgtatagactgtacccacggtcaaaaacgactgatccgttatccgcttgagtacttcgagaagcctagtaccgccttggaatcttcgacgcgttgcgttcagcactctaccccgagtgtagcttaggctgatgagtctgggcactccccaccggcgacggtggcccaggctgcgttggcggcctacccgtggcgaatgccacgggacgctagatgtgaacaaggtgtgaagagcctattgagctacttaagagtcctccggcccctgaatgcggctaatcctaaccatggagcaagtgctcacaaaccagtgagtggcttgtcgtaatgcgtaagtccgtggcggaaccgactactttgggtgtccgtgtttccttttatttttatcatggctgcttatggtgacaatcagtgattgccatcatatagcgacttggattggccatccggttaaagtgagatatattatatacttgtttattggattcactcctttatcaactaggactaatcatctaatacgtgtgatcttactcattagaggtttataccaca

SEQ ID NO: 20688 - DNA, 721 bp, synthetic construct
  source 1..721: mol_type = other DNA
cccacccacagggcctactgggcgctagcacactggtatcacggtacctttgtgcgcctgttttatccacccttccccaaatgaaacttagaagtttgacttaaacggtcaatagaaaatccagtacgccaactgggtcgtgaccaagcacttctgtgaccccggactgagtatcaataagctactcacgtggctgaaggagaaaacgttcgttacccggccaattacttcgagaaacttagtaccaccatgaaggttgcgtagcgtttcgctccgcacaaccccagtgtagatcaggtcgatgagtcaccgcgttccccacgggtgaccgtggcggtggctgcgttggcggcctgcccttggggtaacccaagggacgcttcaatactgacatggtgcgaagagtctattgagctaattggtagtcctccggcccctgaatgcggctaatcctaactgcggagcagatacccacatgccagtgggcagtctgtcgtaacgggcaactctgcagcggaaccgactactttgggtgtccgtgtttccttttattcttatactggctgcttatggtgacaattgagagattgttaccatatagctattggattggccatccagtgtctaatagagcaatcatctaccttttcgttggatttattccacttgactataaagcactcaaaacactcgaatacattgtaaaccttaacacaacaaa

SEQ ID NO: 20689 - DNA, 712 bp, synthetic construct
  source 1..712: mol_type = other DNA
agggcccactgggcgctagcacactggtatcacggtacccttgtgcgcctgttttattcaccctccccctatcgtaacttagaagtaacaccccaacggccaacagacagctcagtaagccaactgagttctggccaagcacttctgttaccccggactgagtatcaataggctgcttacgcggctgaaggagaaaacgttcgttatccggccaattacttcgagaaacctagtaacaccatgaaggttgcgcagtgtttcgttcagcacaaccccagtgtagatcaggctgatgagtcaccgcattccccacgggtgaccgtggcggtggctgcgccggcggcctgcccatggggtaacccatgggacgcttcaatactgacatggtgtgaagagtcaattgagctaattggtagtcctccggcccctgaatgcggctaatcctaactgtggagcagatacccgcacaccagcgggcagtctgtcgtaacgggcaactccgcagcggaaccgactactttgggagtccgtgtttccttttattcttatattggctgcttatggtgacaattgaaaggttgttaccatatagctattggattggccatccggtatcaaacagagcgattatctacttgtttgttggttttataccattaaattacaaggttctaattacccttaattttattttaacactcaacaagtcaaa

SEQ ID NO: 20690 - DNA, 723 bp, synthetic construct
  source 1..723: mol_type = other DNA
cccacccacagggcctactgggcgctagcacactggtatcacggtacctttgtgcgcctgttttatagtccctcccccccggacgcaacttagaagctgaacctaaacggtcaacaggcggctcagaacaccatctgggtctcgaccaagcacttctgtttccccggactgagtatcaataagctgcccacgcggctgaaggaaaaaacgtccgttatccggccaattacttcaagaaacccagtaccaccatgaaggttgcgcagcgtttcgctccgcacaaccccagtgtagatcaggtcgatgagtcaccgcattccacacgggcgaccgtggcggtggctgcgctggcggcctgcccatggggcaacccatgggacgcttcaatactgacatggtgcgaagagtcaattgagctaattggtagtcctccggcccctgaatgcggctaatcctaactgtggagcagatgcccacgtaccagtgggtagtctgtcgtaacgggcaactccgcagcggaaccgactactttgggtgtccgtgtttctctttattcttatgttggctgcttatggtgacaattgagagattgttaccatatagctgttggattggccatccggtgacgaatagagcgattgtatatctttttgttggattcgtaccattaaacaaaacaaattacaaaaccttgcgttacattattagattgaacacagcaaa

SEQ ID NO: 20691 - DNA, 722 bp, synthetic construct
  source 1..722: mol_type = other DNA
tcccacccacggggcccaccgggcgccagcacactggtatctcggtacctttgtgcgcctgttttatagcccctcccccgaatgtaacgtagaagctgaacctaagtggtcaataggcggctcagaacaccatctgggtcttgaccaagcacttctgttaccccggactgagtatcaataagctgctcacgcggctgaaggagaaaacgttcgttacccgaccaattacttcgagaaacccagtatcaccatgaaggttgcgcagcgtttcgctccgcacaaccccagtgtagatcaggtcgatgagtcaccgcgttcctcacgggcgaccgtggcggtggctgcgctggcggcctgcccatggggcaacccatgggacgcttcaatgctgacatggtgcgaagagtcaattgagctaattggtagtcctccggcccctgaatgcggctaatcccaactgcggagcagacgcccaaactccagtgggtagtctgtcgtaacgggtaactctgcagcggaaccgactactttgggtgtccgtgtttccttttattcttacactggctgcttatggtgacaattgagagattgttaccatatagctattggattggccatccggtgacaaatagagcaattatatatctttttgttggattcgtaccactcgacaaaacaaatttcaaaaccttgtgttacattattagactaaatacagcaaa

SEQ ID NO: 20692 - DNA, 734 bp, synthetic construct
  source 1..734: mol_type = other DNA
tcctgtgggttgatcccacccacagggcccactgggcgctagcacactggtattccggtacctttgtgcgcctgttttatacacccttcccaagtgtaacttagaagcttatcacacacggtcaacaggtgactcagtatgccaactgggtcttgatcaagcacttctgttttcccggactgagtatcaataagctgctcacgcggctgaaggagaaaacgttcgttaaccggccaattacttcgagaaacctagtaacaccatggaggttgcgcagtgtttcgctccgcacaaccccagtgtagatcaggccgatgagtcaccgcactcctcacgggcgaccgtggcggtggctgcgctggcggcctgcccatggggtaacccatgggacgcttcaatactgacatggtgcgaagagtctattgagctaattggtagtcctccggcccctgaatgcggctaatcctaactgcggagcagatacccacacgccagtgggcagtctgtcgtaatgggcaactctgcagcggaaccgactactttgggtgtccgtgtttccttttattcttatactggctgcttatggtgacaattgagagattgttaccatatagctattggattggccatccagtgacaaacagagctattatttatttgtttgttggttatatcccattaagccaaaaggtcttagccactctcaattatatactattgcttaatacaacgaa

SEQ ID NO: 20693 - DNA, 738 bp, synthetic construct
  source 1..738: mol_type = other DNA
ctctggggttgttcccaccccagaggcccacgtggcggccagtactccggtattacggtacccttgtacgcctgttttatactcccctcccctgtaacttagaagcatacaaaccaagttcaatagaagggggtacaaaccagtaccaccacgaacaagcactcctgtttccccggtgacattgcatagactgtacccacggttgaaagcgatcgatccgttacccgctcctgtacttcgagaagcctagtatcatcttggaatcttcgatgcgttgcgctcagcactcaaccccagagtgtagcttaggctgatgagtctggacgtcccccaccggcgacggtggtccaggctgcgttggcggcctacctgtggcccaaagccacaggacgctagttgtgaacaaggtgtgaagagcctattgagctacaagagagtcctccggcccctgaatgcggctaatcctaaccacggagcaggcagttgcaaaccagcaaccggcctgtcgtaacgcgcaagtctgtggcggaaccgactactttgggtgtccgtgtttccttttatttttacaatggctgcttatggtgacaatcatagattgttatcataaagcgacttggattggccatccggtgaaagtaaaacacattgtttacttgtttgttggattcactccaattaactcttttacttacaaactcattacaacaactctattaattagagataagcatcaca

SEQ ID NO: 20694 - DNA, 733 bp, synthetic construct
  source 1..733: mol_type = other DNA
ttaaaacagccttggggttgttcccacctcaagggcccacgtggcggctagtactctggtatctcggtacctttgtacgcctgttttaattccctccccaacgtaacttagaagcttttaaaccaaagctcaataggcggagcgcaaaccagcgctcttatgagcaagcacttctgtctccccggtgtggttgtatagactgtccccacggttgaaaacaacttatccgttaaccgctatagtacttcgagaaacctagtattgccttcggagtgtcgatgcgttgcgctcagcacactaacccgtgtgtagcttgggtcgatgagtctggacgtaccccactggcgacagtggtccaggctgcgttggcggcctactcatggtgaaaaccatgagacgctagacatgaacaaggtgtgaagagtctattgagctactatagagtcctccggcccctgaatgcggctaatcctaaccatggagcaagtgctcacaaaccagtgggttacttgtcgtaacgcgcaagtccgtggcggaaccgactactttgggtgtccgtgtttcactttttacttttatgactgctaatggtgacaatttaatattgttaccatttggcttgtcgaattgatcacataagatctatagttttgttcactgatttgctttgaaacaatctcacctcaaaacctccagtacataacatttaaagagtttaaacttatttataaca

SEQ ID NO: 20695 - DNA, 688 bp, synthetic construct
  source 1..688: mol_type = other DNA
tggtattgcggtacctttgtgcgcctgttttatacaccctctccccatattaacttagaagtacattttatatgatcaataggcggctcagtatgccaactgagtctcgatcaagcacttctgttgtcccggaccgagtatcaataagctactcacgtggctgaaggagaaaacgttcgttacccggccagctacttcgagaaacctagtaccaccatgaatgttgcgcggcgtttcgctccgcactaccccagtgtagatcaggtcgatgagtcaccgcactcctcacgggcgaccgtggcggtggctgcgctggcggcctgcccgtggggcaacccatgggacgcttcaatacagacatggtgtgaagagtctattgagctagttggtagtcctccggcccctgaatgcggctaatcctaactgcggagcagatccccacaagccagtgggcagtctgtcgtaatgggcaactctgcagcggaaccgactactttgggtgtccgtgtttccttttattcttatactggctgcttatggtgacaattgaaggattgttgccatatagctattggattggccatccggtgtctaacagagcaataatttatctttttgttggattcgtcccacttaaccacagagcacttgcaacgctcaattacatcatagatctcaacacaacaaa

SEQ ID NO: 20696 - DNA, 732 bp, synthetic construct
  source 1..732: mol_type = other DNA
ttaaaacagctctggggttgttcccactcaagggcccacgtggcggctagtactctggtatctcggtacctttgtacgcctgttttaattccctccccaacgtaacttagaagcttttaaaccaaagctcaataggtggagcgcaaaccagcgctcttatgagcaagcacttctgtctccccggtgtggttgtatagactgtccccacggttgaaaacaacttatccgttaaccgctatagtacttcgagaaacctagtattgccttcggagtgttgatgcgttgcgctcagcacactaacccgtgtgtagcttgggtcgatgagtctggacgtaccccactggcgacagtggtccaggctgcgttggcggcctactcatggtgaaaaccatgagacgctagacatgaacaaggtgtgaagagtctattgagctgctatagagtcctccggcccctgaatgcggctaatcctaaccatggagcaagtgctcacaaaccagtgagttacttgtcgtaacgcgcaagtccgtggcggaaccgactactttgggtgtccgtgtttcactttttacttttatgactgctaatggtgacaatttaatattgttaccatttggcttgtcgaattgatcacataagatctatagttttgttcactgatttgctttgaaataatctcacctcaaaacctccagtacataacatttaaagagtttaaacttatttataaca

SEQ ID NO: 20697 - DNA, 720 bp, synthetic construct
  source 1..720: mol_type = other DNA
cccacccacagggcccactgggcgccagcacactggtattacggtacccttgtgcgcctgttttatccaccctccccccatcgtaacttagaagcataacctagacggtcaatagacaacccagcacgccagctgggtcccgaccaagtacttctgttaccccggaccgagtatcaataggctgcttacgcggctgaaggagaaaaagttcgttatccggccaattacttcgagaagcctagtaacaccatgaaagttgcgtagcgtttcgctccgcacaaccccagtgtagatcaggtcgatgagtcaccgcattcctcacgggcgaccgtggcggtggctgcgctggcggcctgcccatggtgcaacccatgggacgctacaataccgacatggtgcgaagagtctattgagctaattggtagtcctccggcccctgaatgcggctaatcctaactgcggagcagacgcccacatgccagtgggtagtctgtcgtaacgggcaactctgcagcggaaccgactactttggtgtccgtgtttccttttatttctaatttggctgcttatggtgacaattgagaaatggttaccatatagctactggattggccatccggtgactaacagagcagttgtttacctgtttgttggttttgttccattagactacaaagtgctgaacactcttaattatattttactactaaactcaataaa

SEQ ID NO: 20698 - DNA, 721 bp, synthetic construct
  source 1..721: mol_type = other DNA
cccacccacagggcccactgggcgccagcactctggtatcacggtacctttgtgcgcctgttttatccaccctctccccagtgtaacttagaagcacgtaccatgcggtcaataggcggctcagtatgccaactgagttgtgaccaagtacttctgttgccccggaccgagtatcaataagctactcacgtggctgaaggagaaaacgttcgttatccggccaattacttcgagaaacctagtaccaccatgaatgttgcgcggcgtttcgctccgcacaatcccagtgtagatcaggtcgatgagtcaccgcacccctcacgggcgaccgtggcggtggctgcgctggcggcctgcccatggggcaacccatgggacgcttcaatacagacatggtgtgaagagtctattgagctaattggtagtcctccggcccctgaatgcggctaatcctaactgcggagcagattcccacatgccagtgggcagtctgtcgtaatgggtaactctgcagcggaaccgactactttgggtgtccgtgtttccttttattcttgtactggctgctaatggtgacaattgaaagattgttaccatatagctattggattggccacccagtgtctaacagagcaattatttacctttttattggattcatcccacttgattataaagcacttgtaacactcaaatacatcatagacctcaacacaacaaa

SEQ ID NO: 20699 - DNA, 660 bp, synthetic construct; identical to SEQ ID NO: 797
  source 1..660: mol_type = other DNA

SEQ ID NO: 20700 - DNA, 795 bp, synthetic construct
  source 1..795: mol_type = other DNA
gttgttcccacccacagggcccactgggcgccagtacactggtatgctttacctcggtattacggtaccgttgtatacagtacctttgtacgcctgttttaaatcccctcccccaaatgtaaccttagaagtttaagtaaactgagaccaataggagtccaacacccagttggattacggtcaagtacttctgtttccccggacctagtagtgataggctgtacccacggctgaagatgaacccgtccgttatccggccagctacttcgagaagcctagtagcatcaaagatctgtcttggcgtttcgctcagcgcgttccccccgcgtagatcgggctgatgggtctccgcactccccacgggcgaccgtggcggaggccgcgtggcggcccgcctatggcgaaagccataggacgccatttcagtgacagggtgtgaagagcctattgagctagttggtagtcctccggcccctgaatgcggctaatcctaaccacggagcgtccgccaacaatccagttggtagggcgtcgtaacgggtaactctgtggcggaaccgactactttgggtgtccgtgtttccttttgatcctattttggctgcttatggtgacaacgataagttgttatcataaagcttttgggttggccacctggaaaaagatatcagtgtttgatattgttcggctctcacgcctaccaacaaaacaagctctatatttattaatttcattttatccattggaggatattaccgaattccatctacaacttttgctcactttatcagcaaa

SEQ ID NO: 20701 - DNA, 718 bp, synthetic construct
  source 1..718: mol_type = other DNA
cactcacagggcccactgggcgccagcacactggtatcaaggtacctttgtgcgcctgttttacccaccctcccccaaagcaacttagaagttaatcacagatgatcgacaggaagctcagtgagccaactgagccttgatcaagcacttctgttaccccggaccgagtatcaataggctgctcacgcggctgaaggagaaaacgttcgttacccggccaattacttcgagaaacctagtaccaccatggaggttgcgcagcgtttcgctccgcacaaccccagtgtagatcaggtcgatgagtcaccgcataccccacgggcgaccgtggcggtggctgcgttggcggcctgcccatggggcaacccatgggacgctacaataccaacatggtgtgaagagtcaattgagctaattggtagtcctccggcccctgaatgcggctaatcctaactgcggagcagatgcccacaagccagtgggtggtctgtcgtaacgggcaactctgcagcggaaccgactactttgggtgtccgtgtttccttttattcttacattggctgcttatggtgacaattgaaagattgttaccatatagctattggattggccatccggttagcgacagagcgattatattcctatttgttgggtttgtatcacttgacaaaagtagttataacaccctgctgtacatcatccatttgaacacgagaaa

SEQ ID NO: 20702 - DNA, 733 bp, synthetic construct
  source 1..733: mol_type = other DNA
ctgtgggttgttcccacccacggggcctactgggcgccagcacactggtatcacggtacctttgtgcgcctgttttacaacccctcccccgaacgtaacgtagaagctgaacctaagcggtcaataggcggctcagaacaccatctgggtcttgaccaagcacttctgttgccccggactgagtatcaataagctgctcacgcggctgaaggagaaaacgtccgttacccggccaattacttcaagaaacccagtaccaccatgaaggttgcgcagcgtttcgctccgcacaaccccagtgtagatcaggtcgatgagtcaccgcattcctcacgggcgaccgtggcggtggctgcgctggcggcctgcccatggggtaacccatgggacgcttcaatactgacatggtgcgaagagtcaattgagctaattggtagtcctccggcccctgaatgcggctaatcctaactgcggagcagacgcccaagctccagtgggtagtctgtcgtaacgggtaactctgcagcggaaccgactactttgggtgtccgtgtttccttttattcttacattggctgcttatggtgacaattgagaggttgttaccatatagctattggattggccatccggtgacaaatagagcaattgtatatctttttgttggattcataccactcgacaaaacaaatttcagaaccttgtgttatatcattagattaaacacagcaaa

SEQ ID NO: 20703 - DNA, 721 bp, synthetic construct
  source 1..721: mol_type = other DNA
cccacccacagggcccactgggcgctagcacactggtatcaaggtacctttgtgcgcctgttttatccaccctttccccctcgtaactaagaagcataacttagacggtcaatagacagcccagtgtgccagctgggtcccgaccaagcacttctgttaccccggactaagtatcaataggctgctaacgcggctgaaggagaaaagttcgttacccggccagttacttcgagaaacctagtaacaccatgaaagttgcgtagtgtttcgctccgcacaaccccagtgtagatcaggtcgatgagtcaccgcattcctcacgggtgaccgtggcggtggctgcgctggcggcctgcccatggggtaaacccatgggacgctacaatactgacatggtgcgaagagtctattgagctaattggtagtcctccggcccctgaatgcggctaatcctaactgcggagcagatacccacataccagtgggcagtctgtcgtaacgggtaactctgcagcggaaccgactactttgggtgtccgtgtttccttttattcctaatctggctgcttatggtgacaattgagagattgttaccatatagctattggactggccatccggtgactaacagagcgatcgtttacctgtttgttggtttcgttccattaaactacaaagcactaaacactcttaattacatcttgcaacttaactcatcaaa

SEQ ID NO: 20704 - DNA, 705 bp, synthetic construct; identical to SEQ ID NO: 848
  source 1..705: mol_type = other DNA

SEQ ID NO: 20705 - DNA, 801 bp, synthetic construct
  source 1..801: mol_type = other DNA
ctgtgggttgctcccacccacagggcccactgggcgctagtacactggtatgccttacctcggtattacggtaccgttgtatatagtacctttgtacgcctgttttatattcccttcccccacatgtaactttagaagtttaagcaacaaagaccactaggagtccaacaaccagttggattgcggtcaagtacttctgtttccccggacctagtagtgataggctgtgcccacggctgaagatgaacccgtccgttatccggccagctacttcgagaagcctagtagcatcaaagatctgtcttggcgtttcgctcagcgcgttccccccgcgtagatcgggctgatgggtctccgcattccccacgggcgaccgtggcggaggccgcgtggcggcccgcctatggcgaaagccataggacgccatttcagtgacagggtgtgaagagcctattgagctagttggtagtcctccggcccctgaatgcggctaatcctaaccacggagcgtccaccagcaaaccagctgggagggcgtcgtaacgggtaactctgtggcggaaccgactactttgggtgtccgtgtttccttttgatcctattgtggctgcttatggtgacaacgataagttgttatcataaagcttttgggttggccgcctggaaaaagatatcagtgtttgatattgttcggctttcacgcctaccaacaaaacaagctctatatttgttgatttcattttatccattggaggatattaccgaatttcatctacaacttttgctcaccttatcagcaaa

SEQ ID NO: 20706 - DNA, 679 bp, synthetic construct; identical to SEQ ID NO: 818
  source 1..679: mol_type = other DNA

SEQ ID NO: 20707 - DNA, 723 bp, synthetic construct
  source 1..723: mol_type = other DNA
ttcccacccacagggcccactgggcgctagcactctggtatcatggtacctttgtgcgcctgttttatccaccctccccaaaatgcaacttagaagcataatccaagcggtcattaggtagctcagtacaccaactgagcccagaccaagcacttctgtcaccccggaccgagtatcaataggctgctcgcgcggctgaaggagaaaacgttcgttatccggccaattacttcgagaaacccagtaccactatgaaagttgcgcagcgtttcgttccgcacaaccccagtgtagatcaggtcgatgagtcaccgcgttccccacgggcgaccgtggcggtggctgcgttggcggcctgcccatggggcaacctatgggacgcttcaatactgacatggtgtgaagagtctattgagctaattggtagtcctccggcccctgaatgcggctaatcctaactgcggagcagatgctcacaaaccagtgggcagtctgtcgtaatgggtaactctgcagcggaaccgactactttgggtgtccgtgtttccttttatttttacactggctgcttatggtgacaattgagagattgttaccatatagctattggattggccatccggtgactaacagagcaattgtttacctatttattggttttgtaccgttagattacaaagttctaaagactctgaatcttattatagcactcaatacagtaaa

SEQ ID NO: 20708 - DNA, 795 bp, synthetic construct
  source 1..795: mol_type = other DNA
ggttgttcccaccctagagcccactgggcgctagtacactggtacgccagtaccttggtatcacggtatcattgtacgtcagtacctttgtatgcctgttttatgccccttcccccaatgtaactttagaagcttacaaaacaaagaccactaggagtccaacacccagttggattgcggtcaagcacttctgtttccccggacctagtagtgataggctgtacccacggccgaagatgaacccgtccgttatccggccagctacttcgagaagcctagtagcatcaaagatctgtcttggcgtttcgctcagcgcgttccccccgcgtagatcgggctgatgggtctccgcatcccccacgggcgaccgtggcggaggccgcgtggcggcccgcctatggcgaaagccataggacgccatttcagtgacagggtgtgaagagcctattgagctagttggtagtcctccggcccctgaatgcggctaatcctaaccacggagcgtccaccagcaaaccagctggcagggcgtcgtaacgggtaactcggtggcggaaccgactactttgggtgtccgtgtttccttttgatcctattttggctgcttatggtgacaacgataagttgttatcataaagcttttgggttggccacctggaaaaagttatcagtgtttgatattgttcggctttcacgcctaccaataagacaagctctttatttgttaattgcattttatccatctgaggatattactgaatttcatttacaactcctgcttacattgtcaacaag

SEQ ID NO: 20709 - DNA, 789 bp, synthetic construct
  source 1..789: mol_type = other DNA
cccacccacagggcccactgggcgctagtacactggtatgccttacctcggtatcacggtaccgttgtatacagtacctttgtacgcctgttttatatcccttccccaaatcgtaactttagaagtttaaataaacaaagaccaataggagtccaacatccagttggattgcggtcaagcacttctgtctccccggacctagtagtgataggctgtacccacggccgaagatgaacacgtccgttatccggccagctacttcgagaagcctagtaacatcaaagatctgtcttggcgtttcgctcagcgcgttccccccgcgtagatcgggctgatgggtctccgcataccccacgggcgaccgtggcggaggccgcgtggcggcccgcctatggcgaaagccataggacgccatttcagtgacagggtgtgaagagcctattgagctagttggtagtcctccggcccctgaatgcggctaatcctaaccacggagcactcgccaacaaaccagttggtagggtgtcgtaacgggtaactctgtggcggaaccgactactttgggtgtccgtgtttccttttgatcctatattggctgcttatggtgacaacgataagttgttatcataaagcttttgggttggccacctggaaaaagttatcagtgtttgatattgttcggctttcacgcctaccaataaaacaagccttatatttgttaatttcattttatccatccaaggatattactgaatttcatcttaaactcttactctcattatcagcaag

SEQ ID NO: 20710 - DNA, 747 bp, synthetic construct
  source 1..747: mol_type = other DNA
ggttttaaaacaggccgtgggttgttcccacccacggggcccattgggcgctagcacactggtatcacggtacccttgtgcgcctgttttatccaccccctccccaatgtaacatagaagcacaaactaagtggtcaatagacggctcagtgcaccaactgggtttagaccaagcacttctgttaccccggactgagtatcaataggctgctcacgcggctgaaggagaaaacgttcgttacccggccaactacttcgagaagcccagtaccaccatgaaggttgcgcagtgtttcgttcagcacaaccccagtgtagatcaggtcgatgagtcaccgcaatccccacgggcgaccgtggcggtggctgcgctggcggcctgcccatggggtgacccatgggacgcttcaattccgacatggtgcgaagagcctattgagctagttggtagtcctccggcccctgaatgcggctaatcccaactgcggagcaagcacccacaaaccagtgggctgtttgtcgtaacgggcaactctgcagcggaaccgactactttgggtgtccgtgtttccttttattcctacactggctgcttatggtgacaattgaaagattgttgccatatagctattggattggccatccggtaacaaacagagctattatttacttatttgttggctttgtgccgttgaatttcaaagttataaaaaccataacctccatcttgacactcaacacagcaaa

SEQ ID NO: 20711 - DNA, 725 bp, synthetic construct
  source 1..725: mol_type = other DNA
tgttcccacccacagggcccaccgggcgctagcacactggtatcccggtacctttgtgcgcctgttttacacaccctcccccgatggcaacttagaagatttccacacacggtcaataggcggctcagtataccaactgggtcatgaccaagcacttctgttcccccggactgagtatcaataagctgctcacgtggctgaaggagaaaacgttcgttatccggccaattacttcgagaagcttagtaccaccatagaggttgcgcagtgtttcgctccgcacaaccccagtgtagatcaggtcgatgagtcaccgcactcctcacgggcgaccgtggcggtggctgcgctggcggcctgcccatggggcaacccatgggacgcttcaatactgacatggtgcgaagagcctattgagctaattggtattcctccggcccctgaatgcggctaatcctaactgcggagcagatacccacgagccagtgggcagtctgtcgtaatgggtaactctgcagcggaaccgactactttgggtgtccgtgtttccttttattcctatattggctgctaatggtgacaattgagagattgttgccatatagctattggattggccatccggtgacaaacagagcgattatctatctatttgttggcttcataccattaaaccttagagtcctaaagaccctcaacttaattatacaatttaactctgcgaa

SEQ ID NO: 20712 - DNA, 687 bp, synthetic construct
  source 1..687: mol_type = other DNA
ggtatcacggtacctttgtgcgcctgttttataacccctcccccgaatgtaacgtagaagctgaacctaagtggtcaataggcggctcagaacaccatctgggtcttgaccaagcacttctgttaccccggactgagtatcaataagctgctcacgcggctgaaggagaaaacgtccgttacccggccaattacttcaagaaacccagtaccaccatgaaggttgcgcagcgtttcgctccgcacaaccccagtgtagatcaggtcgatgagtcaccgcattcctcacgggcgaccgtggcggtggctgcgctggcggcctgcccatggggcaacccatgggacgcttcaatactgacatggtgcgaagagtcaattgagctaattggtagtcctccggcccctgaatgcggctaatcctaactgcggagcagacgcccaagctccagtgggtagtctgtcgtaacgggtaactctgcagcggaaccgactactttgggtgtccgtgtttccttttattcttacattggctgcttatggtgacaattgagagattgttaccatatagctattggattggccatccggtgacaaatagagcaattgtatatctttttgttggattcataccactcggcaaaacaaatttcagaaccttgtgttatattattagattaaatacagcaaa

SEQ ID NO: 20713 - DNA, 725 bp, synthetic construct
  source 1..725: mol_type = other DNA
tgttcccacccacagggcccaccgggcgctagcacactggtatctcggtacctttgtgcgcctgttttatacacccttccccgagtgcaacttagaagatatccacacacggtcaataggcggctcagtatgccaactgagtcatgaccaagcacttctgttcccccggactgagtatcaataagctgcttacgtggctgaaggagaaaacgttcgttatccggccaattacttcgagaagcttagtaccaccatggaggttgcgcagtgtttcgttccgcacaaccccagtgtagatcaggtcgatgagtcaccgcactcctcacgggcgaccgtggcggtggctgcgctggcggcctgcccatggggcaacccatgggacgcttcaatactgacatggtgcgaagagcctattgagctaattggtagtcctccggcccctgaatgcggctaatcctaactgcggagcagacacccacgagccagtgggcggtctgtcgtaatgggtaactctgcagcggaaccgactactttgggtgtccgtgtttccttttatccatacattggctgcttatggtgacaattgagagattgttaccatatagctattggattggccgtccagtgacgaacagagcgattatctatctatttgttggcttcgtaccattaaaccttagagtcctaaagaccctcaatttgattatacaatttaactctgcgaa

SEQ ID NO: 20714 - DNA, 733 bp, synthetic construct
  source 1..733: mol_type = other DNA
tggggttgttcccaccccagaggcccacgtggcggctagtactccggtattacggtacccttgtacgcctgttttatactcccctccccgcaacttagatgaaacaaaacaagttcaataggagggggtacaaaccagtaccaccacgaacaagcacttctgtctccccggtgacattgcatagactgtccccacggttgaaagcaattgatccgttacccgctcttgtacttcgagaagcctagtaccatcttggaatcattgatgcgttgcgctccacactcagtcccagagtgtagcttaggctgatgagtctggacattcctcaccggcgacggtggtccaggctgcgttggcggcctacctgtggcccaaagccacaggacgctagatgtgaacaaggtgtgaagagcctattgagctataagagagtcctccggcccctgaatgcggctaatcccaaccacggatcaagggtgcacgaaccagtgtataccttgtcgtaacgcgcaagtctgtggcggaaccgactactttgggtgaccgtgtttccttttattatttcaatggctgcttatggtgacaatcattgattgttatcataaagcgaattggattggccatccggtgaaagtgaaacatattgtttgcctcctcgttgggtctactccaaccaatctctttgcttacaatcttaccactacagttttgctggttagaagtgtgtttcacg

SEQ ID NO: 20715 - DNA, 798 bp, synthetic construct
  source 1..798: mol_type = other DNA
gttgttcccacccacagggcccactgggcgccagtacactggtacgccagtaccttggtatcacggtatcactgtacgccagtacctttgtacgcctgttttatattccccttccccacatgtaaccttagaagtttaaacaaaatctgaccaataggagtccaacatccagttggattgcggtcgagcacttctgtttccccggacctagtagtgataggctgtacccacggccgaagatgaacccgtccgttatccggccagctacttcgagaagcctagtaacatcaaagatctgtcttggcgtttcgctcagcgcgttccccccgcgtagatcgggccgatgggtctccgcatcccccacgggcgaccgtggcggaggccgcgtggcggcccgcctatggcgaaagccataggacgccatttcagtgacagggtgtgaagagcctattgagctagttggtagtcctccggcccctgaatgcggctaatcctaaccatggagcgtccaccgacaatccagtcggcgggacgtcgtaatgggtaactccgtggcggaaccgactactttgggtgtccgtgtttccttttgatcctattttggctgcttatggtgacaacgacaagttgttatcataaagcttttgggttggccacctggaaaaagttatcagtgtttgatattgttcggctttcacgcctaccaataaaacaagctttatacttgttagtttcattttatccatctgaggatattactgagtttcacctacaacttttgctcacattatcagcaag

SEQ ID NO: 20716 - DNA, 672 bp, synthetic construct
  source 1..672: mol_type = other DNA
tttaaaacagcttgagggttgttcccaccctcagggcctactgggcgctagtacaccggtatctcggtacccttgtacgcctgttttatcttccctccccaaaagtaactttagaagcaagtaaactcacagctcaacagccatcgcaccgccagtgcgattttgagcaagcactcctgtttccccggttgcgtcccatatgctgtgaaaacggcagaaggggacaatatcgttacccgcttatctactacgggaagcctagtaacaccattgagcactttgagggttgcgttcagcgctaaacccagcgtagctcaggctgatggggcttcggaatccccacgggtgaccgtgtcgaagcccgcgttggcggcctgcccacaccaatgggtgtgggacgctcaatttgtgacatggtgcgaagagcctactgtgctaggtgagagtcctccggcccctgaatgtggctaatcctaaccaccgaacccgtggttgcaatccagcaactagcgggccgtaatgcgcaagtcggtgatggaaccaactactttgggtgaccgtgtttcctttatctcttatattgcaattttatggtgacatttatagtatttaagtgttaccatatattgcgcaaatacattgtaataatacagagttattactacggaaatc

SEQ ID NO: 20717 - DNA, 726 bp, synthetic construct
  source 1..726: mol_type = other DNA
gttcccaccccagaggcccacgtggcggctagtactccggtattacggtacccttgtacgcctgttttatactcccctccccgtaacttagaagaaacaaatcaagttcaataggagggggtacaaaccagtaccaccacgaacaagtacttctgtctccccggtgacattgcatagactgtccccacggttgaaagcgattgatccgttacccgctcttatacttcgagaagcctagtaccaccttggaatcatcgatgcgttgcgctccgcactcaaccccagagtgtagcttaggctgatgagtctggacattcctcaccggcgacggtggtccaggctgcgttggcggcctacctgtggcccaaagccacaggacgctagttgtgaacaaggtgtgaagagcctattgagctataagagagtcctccggcccctgaatgcggctaatcccaaccacggatcaagggtgcacgaaccagtgtataccttgtcgtaacgcgcaagtctgtggcggaaccgactactttgggtgtccgtgtttccttttattgtttcaatggctgcttatggtgacaatcattgattgttatcataaagcgaattggattggccatccggtgaaagtgaaacatattgtttgcctcctcgttgggtctactccaatcaatctttttacctacaatcttattaccacagttttactggttagaagtgtgttccaca

SEQ ID NO: 20718 - DNA, 727 bp, synthetic construct
  source 1..727: mol_type = other DNA
ggttgatcccacccacagggcccatagggcgctagcactctggtattgcggtacctttgtgcgcctgttttatattcccacccccaattgcaacttagaagcagtacttaacgaccaacagtgggcgtgacacaccagccacgtctcggtcaagcacttctgtctccccggactgagtatcaaaaagctgctcacgcggctgaaggagaaaacgtccgttatccggccaattacttcgagaaacctagtaccgccatgaaagttgcgcagcgtttcgatccgcacaaccccagtgtagatcaggtcgatgagtcaccgcgttccccacgggtgaccgtggcggtgactgcgttggcggcctgcccatgggagaacccatgggacgcttcaatactgacatggtgtgaagagtctattgagctaattggtagtcctccggcccctgaatgcggctaatcctaactgcggagcagattcccgcatgccagcgggtggtctgtcgtaacgggcaactctgcagcggaaccgactactttgggtgtccgtgtttccttttattcttatattggctgcttatggtgacaattgagagattgttaccatatagctattggattggccatccggtaacaaacagagcaattatttaccaatttattggttttgtaccattgaattttaacacattcaaaactcttaaccttatcttggctcttaatacagcaaa

SEQ ID NO: 20719 - DNA, 680 bp, synthetic construct
  source 1..680: mol_type = other DNA
gcggtacctttgtgcgcctgttttatattcccacccccaaacgcaacttagaagcagtacttcacgaccaacagtgggcgtggcacaccagccacgtctcggtcaagcacttctgtctccccggactgagtatcaataagctgatcgcgcggctgaaggagaaaacgtccgttatccggccaattacttcgagaaacctagtaccaccatgaaagttgcgtggcgtttcgatccgcacaaccccagtgtagatcaggtcgatgagtcaccgcgttccccacgggtgaccgtggcggtggctgcgttggcggcctgcccatgggggaacccatgggacgcttcaatactgacatggtgtgaagagtctattgagctaattggtagtcctccggcccctgaatgcggctaatcctaactgcggagcagattcccgcatgccagcgggtggtctgtcgtaacgggcaactctgcagcggaaccgactactttgggtgtccgtgtttccttttattcctatattggctgcttatggtgacaattgagagattgttaccatatagctattggattggccatccggtgacaaacagagcaattatttaccaatttattggttttgtaccattgaattttaacgcattcaaaactcttaaccttattttggctcttaatacatcaaa

SEQ ID NO: 20720 - DNA, 729 bp, synthetic construct
  source 1..729: mol_type = other DNA
ggttgctcccacccacagggcccactgggcgctagcacactggtatcccggtacctttgtgcgcctgttttatttaccccacccccagctgtaatttagaagtacgacacacatggtcaatagatggctcagtgcaccaactgggtttagaccaagcacttctgttaccccggaccgagtatcaataagctgctcgcgcggctgaaggagaaaacgttcgttacccggccaattacttcgagaaacctagtaccaccatggaggttgcgcagcgtttcgctccgcacagccccagtgtagatcaggccgatgagtcaccgcattcctcacgggcgaccgtggcggtggctgcgttggcggcctgcccatggggtaacccatgggacgcttcaatactaacatggtgtgaagagtctattgagctaattggtagtcctccggcccctgaatgcggctaatcctaactgcggagcagatactcacatgccagtgggcagtctgtcgtaacgggcaactctgcagcggaaccgactactttgggtgtccgtgtttccttttattcttatactggctgcttatggtgacaattgagaaattgttaccatatagctattggattggccatccagtgacaaacagagcaattgtttacctatttgtcggcttcataccgttaaacttaagagttttgaagacccttaacttgattatactattcaactctgtaaa

SEQ ID NO: 20721 - DNA, 725 bp, synthetic construct
  source 1..725: mol_type = other DNA
ttcccaccctagaggcccacgtggcggctagtactctggtattacggtacctttgtacgcctgttttatatccctacccccattgtaacttagaagtttcaaagcacagttcaatagacagtagtacaaaccagtactgctacgaacaagcacttctgtttccccggtgaagctgcatagactgtacctacggttgaaagcaactgatccgttatccgctttagtacttcgagaagcctagtaacaccttggaatcttcgatgcgttgcgctcagcactcaaccccagagtgtagcttaggtcgatgagtctggacattcctcaccggcgacggtagtccaggctgcgttggcggcctacctgtggctcaaagccacaggacgctagttgtgaacaaggtgtgaagagcctattgagctactaaagagtcctccggcccctgaatgcggctaatcctaaccacggagcaagtgctcacaatccagtgagtggcttgtcgtaatgagcaattctgtggcggaaccgactactttgggtgtccgtgtttccttttatttttatcattggctgcttatggtgacaatctaagattgccatcatatagcttttggattggccatccggtgatatttcgaattattcaatttgctgcttacagctcttttaaacagtattcactcaccagcattcgtattttactcttgaattgtcaacaaatagtcaaa

SEQ ID NO: 20722 - DNA, 722 bp, synthetic construct
  source 1..722: mol_type = other DNA
caaccccagaggcccacgtggcggctagtactccggtattacggtacccttgtacgcctgttttatactcccctccccgtaacttagaagaaacaaattaagttcaataggagggggtacaaaccagtaccaccacgaacaagcacttctgtctccccggtgacattgcatagactgtccccacggttgaaagcgattgatccgttacccgctcttatacttcgagaagcctagtaccatcttggaatcatcgatgcgttgcgctccacactcaatcccagagtgtagcttaggctgatgagtctggacattcctcactggcgacggtggtccaggctgcgttggcggcctacctgtggcccaaagccacaggacgctagttgtgaacaaggtgtgaagagcctattgagctataagagagtcctccggcccctgaatgcggctaatcccaaccacggatcaagggtgcacgaaccagtgtataccttgtcgtaatgcgcaagtctgtggcggaaccgactactttgggtgtccgtgtttccttttattgtttcaatggctgcttatggtgacaatcattgattgttatcataaagcgaattggattggccatccggtgaaagtgaaacatattatttgcctcctcgttgggtctactccaatcaatctctttacttataatcttatcaccacagttttactggttagaggtgtgtttcaca

SEQ ID NO: 20723 - DNA, 800 bp, synthetic construct
  source 1..800: mol_type = other DNA
gtgggttgttcccacccacagggcccactgggcgctagtacactggtatgccttacctcggtattgcggtaccgttgtatacagtacctttgtacgcctgttttaaaatcccttccccaaatgtaaccttagaagctttagttgacaaagaccaataggagtccaacatccagttggattgcggtcaagcacttctgtctccccggacctagtagtgataggctgtacccacggccgaagatgaacccgtccgttatccggccagctacttcgagaagcctagtaacatcaaagatctgtcttggcgtttcgctcagcgcgtttccccccgcgtagatcgggctgatgggtctccgcacaccccacgggcgaccgtggcggaggccgcgtggcggcccgcctatggcgaaagccataggacgccatttcagtgacagggtgtgaagagcctattgagctagttggtagtcctccggcccctgaatgcggctaatcccaaccacggagcactcgccaacaagccagttggtagggtgtcgtaatgggtaactctgtggcggaaccgactactttgggtgtccgtgtttccttttgatcccattttggctgcttatggtgacaacaataagttgttatcataaagcttttgggttggccacctggaaaaagttatcagtgtttgatattgtacggctttcacgcctgccaataagacaagctttgtatttgctgatttcattttattcagtgagagacattacagacgcacacctaaaccttttgctcgcactgtcagcagg

SEQ ID NO: 20724 - DNA, 795 bp, synthetic construct
  source 1..795: mol_type = other DNA
gttgttcccacccacagggcccactgggcgccagtacactggtatgctttacctcggtattacggtaccgttgtatacagtacctttgtacgcctgttttaaatcccctcccccaaatgtaaccttagaagtttaagtaaactgagaccaataggagtccaacacccagttggattacggtcaagtacttctgtttccccggacctagtagtgataggctgtacccacggctgaagatgaacccgtccgttatccggccagctacttcgagaagcctagtagcatcaaagatctgtcttggcgtttcgctcagcgcgttccccccgcgtagatcgggctgatgggtctccgcactccccacgggcgaccgtggcggaggccgcgtggcggcccgcctatggcgaaagccataggacgccatttcagtgacagggtgtgaagagcctattgagctagttggtagtcctccggcccctgaatgcggctaatcctaaccacggagcgtccgccaacaatccagttggtagggcgtcgtaacgggtaactctgtggcggaaccgactactttgggtgtccgtgtttccttttgatcctattttggctgcttatggtgacaacgataagttgttatcataaagcttttgggttggccacctggaaaaagatatcagtgtttgatattgttcggctctcacgcctaccaacaaaacaagctctatatttattaatttcattttatccattggaaaacgtcactgagtttcatttacaacttttgctcacacttgcgataag

SEQ ID NO: 20725 - DNA, 720 bp, synthetic construct
  source 1..720: mol_type = other DNA
acccacccacagggcccactgggcgctagcacactggtattacggtacctttgtgcgcctgttttatccaccctccccgatgtaacttagaagctcaacttagatggtcaataggcaacctagcaaaccagctggggctcgaccaagcactcctgttaccccggactgagtatcaataggccgctcgcgcggctgaaggagaaaacgttcgttacccggccaattacttcgagaaacttagtaacaccgtgaaagttgcgcagcgtttcgctccgcacaatcccagtgtagatcaggtcgatgagtcaccgcattccccacgggcgaccgtggcggtggctgcgttggcggcctgcccatgggagatcccatgggacgctacaatactgacatggtgcgaagagtctattgagctaattggtactcctccggcccctgaatgcggctaatcctaactgcggagcagatacccacataccagtgggcagtctgtcgtaacgggcaactctgcagcggaaccgactactttgggtgtccgtgtttccttttattcttactttggctgcttatggtgacaattgaaagattgttaccatatagctattggattggccatccggtgacaaacagagccattgtatatttgtttgttggtttcattccactaaattataaagagttaaacactcttgaatttatcataacactcaattcatcaaa

SEQ ID NO: 20726 - DNA, 688 bp, synthetic construct
  source 1..688: mol_type = other DNA
tggtatctcggtacccttgtgcgcctgttttatccacccttttcccatttaacttagaagcacgcgccaagacggtcaaaagggagcccagtaagccaattgggctatgaccaagcactcctgtaaccccgggccgagtatcaataagctgctcgcgcggctgaaggagaaaaagctcgttacccggccaattacttcgagaaacccagtagcatcatgaaagttgcgcagcgtttcgctccacacaaccccagtgtagatcaggtcgatgagtcaccgcgttccccacgggtgaccgtggcggtggctgcgctggcggcctgcccatggggccacccatgggacgcttcaatactgacatggtgtgaagagtctattgagctaattggtagtcctccggcccctgaatgcggctaatcctaactgcggagcagatgcccacacaccagtgggaagtctgtcgtaacgggtaactctgcagcggaaccgactactttgggtgtccgtgtttccttttatttctactctggctgcttatggtgacaattgaaaggttgttaccatatagctattggattggccatccggtgtcacatagagcgattatttacttgtttgttgggtttataccactgaactataaagttttaaatactcttaactacattttaatccttaactcattaaa

SEQ ID NO: 20727 - DNA, 709 bp, synthetic construct
  source 1..709: mol_type = other DNA
ggcccatgggcgctagcactctggtattacggtacccttgtgcgcctgttttatccacccctcccgatgtaacttagaagttgatcaaagaaaaggtcagtaggatgcccagtacaccaactgggttttgaccaagcacttctgttaccccggaccgagtatcaataggccactcacgtggctgaaggagaaaacgttcgttatccggccaattacttcgagaaacccagtaacaccatgaaggttgcgcggcgtttcgctccacacaaccccagtgtagatcaggccgatgagtcaccgcattccccacgggcgaccgtggcggtggctgcgctggcggcctgcccatggggcaacccatgggacgcctcaataccgacatggtgcgaagagtctattgagctaattggtagtcctccggcccctgaatgcggctaatcccaactgcggagcagatgcccacaaaccagtgggtggtctgtcgtaacgggcaactctgcagcggaaccgactactttgggtgtccgtgtttccttttattcttatactggctgcttatggtgacaattgggaaattgttaccatatagctattggattggccacccggtttgcaacagagcacttgtatttctgtttgttgggttcgtaccacttgactttaatagttacagaactttactctacattgtccaattgaatacaaaaag

SEQ ID NO: 20728 - DNA, 730 bp, synthetic construct
  source 1..730: mol_type = other DNA
tgggttgttcccacccacagggcccactgggcgctagcactctggtatcatggtacctttgtgcgcctgttttatccaccctccccaaaatgcaacttagaagcataatccaaacggtcattaggtagctcagtacaccaactgagcccagaccaagcacttctgtcaccccggaccgagtatcaataggctgctcgcgcggctgaaggagaaaacgttcgttatccggccaattacttcgagaaacccagtaccactatgaaagttgcgcagcgtttcgttccgcacaaccccagtgtagatcaggtcgatgagtcaccgcgttccccacgggcgaccgtggcggtggctgcgttggcggcctgcccatggggcaacccatgggacgcttcaatactgacatggtgtgaagagtctattgagctaattggtagtcctccggcccctgaatgcggctaatcctaactgcggagcagatgctcacaaaccagtgggcagtctgtcgtaatgggtaactctgcagcggaaccgactactttgggtgtccgtgtttcctttcatttttacactggctgcttatggtgacaattgagagattgttaccatatagctattggattggccatccggtgactaacagagcaattgtttacctatttattggttttgtaccgttagattacaaagttctaaagactctgaatcttattatagcactcaatacagtaaa

SEQ ID NO: 20729 - DNA, 722 bp, synthetic construct
  source 1..722: mol_type = other DNA
atcccacccacagggcccattgggcgctagcacactggtatcacggtacctttgtgcgcctgttttatccacccctccccgatgcaacttagaagcatgttacaaacggtcaataggcggttcagtgaaccaactgagcctcgaccaagcacttctgttaccccggactgagtatcaataggctgctcgcgtggctgatggagaaaacgtccgttacccggccaattacttcgagaaacctagtaccaccatgaaagttgcgcagcgtttcgctccgcacaaccccagtgtagatcaggtcgatgagtcactgcgttccccacgggcgaccgtggcagtggctgcgttggcggcctgcccatggggtatcccatgggacgcttcaatactgacatggtgcgaagagtctattgagctaattggtagtcctccggcccctgaatgcggctaatcctaactgcggagcagatacccacgcaccagtgggcagtctgtcgtaacgggcaactctgcagcggaaccgactactttgggtgaccgtgtttccttttattctaatactggctgcttatggtgacaattgaaagattgttaccatatagctattggattggccatccggtaacaaacagagcaattatttacctgtttattggttttatacctctcaatcacaaggctataaatactctcaacctcattttagcacttaacacagcaaa

SEQ ID NO: 20730 - DNA, 689 bp, synthetic construct
  source 1..689: mol_type = other DNA
ggtatcacggtacccttgtacgcctgttttatactcccttcccccgtaacttagaagaaataaaccaagttcaatagaagggggtacaaaccagtaccaccacgaacaagcacttctgtttccccggtgaagttgtatagactgtacccacggttgaaggcgactgatccgttatccgcttttgtacttcgaaaagcttagtatcatcttggaatcttcgacgcgttgcgctcagcactcaaccccagagtgtagcttaggctgatgagtctggacactcctcaccggtgacggtggttcaggctgcgttggcggcctacctgtggcccaaagccacaggacgctagttgtgaacaaggtgtgaagagcctattgagctacaaaagagtcctccggcccctgaatgcggctaatcctaaccacggagcaagggtgcgcaaaccagtgcatgccttgtcgtaacgcgcaagtctgtggcggaaccgactactttgggtgtccgtgtttccttttattcttataatggctgcttatggtgacaatcatagattgttatcataaagcgaattggattggccatccggtgaaagtgaaacacattatttatctttttgttggattcactccattcacttccctttcttttaaactcatcactacagtcttattgattagagactcatatcaca

SEQ ID NO: 20731 - DNA, 800 bp, synthetic construct
  source 1..800: mol_type = other DNA
gtgggttgttcccacccacagggcccactgggcgctagtacactggtatgccagtactctggtattacggtaccactgtacgccagtacctttgtacgcctgttttatatccctttcccaaacgtaaccttagaagtttaagtaaacaaagaccaataggagtccaacatccagttggattgcggtcaagcacttctgtttccccggacctagtagtgataggctgtacccacggccgaagatgaacccgtccgttatccggccagctacttcgagaagcctagtagcatcaaagatctgtcttggcgtttcgctcagcgcgttccccccgcgtagatcgggtcgatgggtctccgcatcccccacgggcgaccgtggcggaggccgcgtggcggcccgcctatggcgaaagccataggacgccatttcagtgacagggtgtgaagagcctattgagctagttggtagtcctccggcccctgaatgcggctaatcctaaccacggagcgtccaccagcaaaccagctgggagggcgtcgtaacgggtaactctgtggcggaaccgactactttgggtgtccgtgtttccttttgatcctattgtggctgcttatggtgacaacttacagttgttatcataaagcttttggattggccatccggaaagagttaacagtttgctcgctcattgctttgtcaaagcttccgttaaggaaagcagtttatttgttagtctcgttttataaattaagggagatctcaagtgctcacctggaattgctcatacaattacatcaatc

SEQ ID NO: 20732 - DNA, 687 bp, synthetic construct
  source 1..687: mol_type = other DNA
actatcaaggtacctttgtgcgcctgttttatagctccctccccgaatgtaacgtagaagctgaacccaagcggtcaacaggcggctcagagcaccatctgggtcttgaccaagcacttctgttaccccggactgagtatcaataagctgctcacgcggctgaaggagaaaatgttcgttatccggccaattacttcgagaaacctagtaccaccatgaaggttgcgcagcatttcgctccgcacaatcccagtgtagatcaggtcgatgagtcaccgcattcctcacgggcgaccgtggcggtggctgcgctggcggcctgcccatggggcaacccatgggatgcttcaatactgacatggtgtgaagagtcaattgagctaattggtagtcctccggcccctgaatgcggctaatcctaactgcggagcagacgcccaagctccagtgggtagtctgtcgtaacgggtaactctgcagcggaaccgactactttgggtgtccgtgtttccttttattcttacattggctgcttatggtgacaattgagagattgttaccatatagctattggattggccatccggtgacgaatagagcaattgtgtatctttttgttggattcataccactagataatacaaacttcaaaaccttgtgttacatcattagattaaacacagcaag

SEQ ID NO: 20733 - DNA, 792 bp, synthetic construct
  source 1..792: mol_type = other DNA
gtacccacccacagggcccactgggcgccagtacactggtatgcttaaccacggtattacggtaccgttgtttacagtacctttgtacgcctgttttatattccctccccaaattgtaactttagaagtacaaataaataaagaccaataggagtccaacatccagttggattgcggtcaagcacttctgtctccccggacctagtagtgataggctgtacccacggccgaagatgaacccgtccgttatccggccagctacttcgagaagcctagtagcatcaaagatctgtcttggcgtttcgctcagcgcgttccccccgcgtagatcgggctgatgggtctccgcataccccacgggcgaccgtggcggaggccgcgtggcggcccgcctatggcgaaagccataggacgccatttcagtgacagggtgtgaagagcctattgagctagttggtagtcctccggcccctgaatgcggctaatcctaaccacggagcatccgccaacaaaccagttggtagggtgtcgtaacgggtaactctgtggcggaaccgactactttgggtgtccgtgtttccttttgatcctatattggctgcttatggtgacaacgataagttgttatcataaagctcttgggttggccacctggaaaaagttatcagtgtttgatattgttcggctttcacgcctaccaataaaacaagctttatatttgttaatttcatttcatccatctgaggatattactgaatttcacttacagctcttgcttacactgtcaacaag

SEQ ID NO: 20734 - DNA, 717 bp, synthetic construct
  source 1..717: mol_type = other DNA
gttgccccatgggcaggccgccagcacactggtatcaaggtacctttgtgcgcctgttttatagccccttccccgaatgtaacgtagaagctgaacccaagcggtcaacaggcggctcagaacaccatctgggtcttgaccaagcacttctgttaccccggactgagtatcaataagctgctcacgcggctgaaggagaaaatgttcgttatccggccaattacttcgagaaacctagtaccaccatgaaggttgcgcagcgtttcgctccgcacaatcccagtgtagatcaggtcgatgagtcaccgcattcctcacgggcgaccgtggcggtggctgcgctggcggcctgcccatggggcaacccatgggacgcttcaatactgacatggtgcgaagagttaattgagctaattggtagtcctccggcccctgaatgcggctaatcctaactgcggagcagatgcccaagctccagtgggtagtctgtcgtaacgggtaactctgcagcggaaccgactactttgggtgtccgtgtttccttttattcttacattggctgctaatggtgacaattgagagattgttaccatatagctattggattggccatccggtgacgaatagagcaattgtgtatctttttgttggattcataccattagacaatacaaacttcaaaaccttgtgttacatcattagattaaacacagcaag

SEQ ID NO: 20735 - DNA, 698 bp, synthetic construct
  source 1..698: mol_type = other DNA
gccagcacactggtatctcggtacctttgtgcgcctgttttatagcccctcccccgaatgtaacgtagaagctgaacctaagtggtcaataggcggctcagaacaccatctgggtcttgaccaagcacttctgttaccccggactgagtatcaataagctgctcacgcggctgaaggagaaaacgttcgttacccggccaattacttcgagaaacccagtatcaccatgaaggttgcgcagcgtttcgctccgcacaaccccagtgtagatcaggtcgatgagtcaccgcgttcctcacgggcgaccgtggcggtggctgcgctggcggcctgcccatggggcaacccatgggacgcttcaatgctgacatggtgcgaagagtcaattgagctaattggtagtcctccggcccctgaatgcggctaatcccaactgcggagcagacgcccaaactccagtgggtagtctgtcgtaacgggtaactctgcagcggaaccgactactttgggtgtccgtgtttccttttattcttacactggctgcttatggtgacaattgagagattgttaccatatagctattggattggccatccggtgacaaatagagcaattatatatctttttgttggattcgtaccactcgacaaaacaaatttcaaaaccttgtgttacattattagactaaatacagcaaa

SEQ ID NO: 20736 - DNA, 702 bp, synthetic construct
  source 1..702: mol_type = other DNA
gtggcggctagtacactggtatcacggtacctttgtacgcctgttttatactccctcccccgcaacttagaagtatacaattcaagctcaataggagggggtgcaagccagcgcctccgtgggcaagcactactgtttccccggtgaggtcgcatagactgttcccacggttgaaagtgtccgatccgttatccgctcatgtacttcgagaagcctagtatcgctctggaatcttcgacgcgttgcgctcagcactcaaccccggagtgtagcttgggccgatgagtctggacagtccccactggcgacagtggtccaggctgcgctggcggcccacctgtggcccaaagccacgggacgctagttgtgaacagggtgtgaagagcctattgagctacatgagagtcctccggcccctgaatgcggctaatcctaaccatggagcaggcagctgcaacccagcagccagcctgtcgtaacgcgcaagtccgtggcggaaccgactactttgggtgtccgtgtttccttttattcttgaatggctgcttatggtgacaatcatagattgttatcataaagcgagttggattggccatccagtgtgaatcagattaattgctcccttgtttgttggatccactcccgaaacgttttactccttaacttattgaaattgtttgaagacaggatttcagtgtcaca

SEQ ID NO: 20737 - DNA, 716 bp, synthetic construct
  source 1..716: mol_type = other DNA
ccatagggcccattgggcgctagcactctggtattacggtacccttgtgcgcctgttttatccacccctcccgatgtaacttagaagttgatcaaagaaaaggtcagtaggatgcccagtacaccaactgggttttgaccaagcacttctgttaccccggaccgagtatcaataggccactcacgtggctgaaggagaaaacgttcgtcatccggccaattacttcgagaaacccagtaacaccatgaaggttgcgcggcgtttcgctccacacaaccccagtgtagatcaggccgatgagtcaccgcattccccacgggcgaccgtggcggtggctgcgctggcggcctgcccatggggcaacccatgggacgcctcaataccgacatggtgcgaagagtctattgagctaattggtagtcctccggcccctgaatgcggctaatcccaactgcggagcagatgcccacaaaccagtgggtggtctgtcgtaacgggcaactctgcagcggaaccgactactttgggtgtccgtgtttccttttattcttatactggctgcttatggtgacaattgggaaattgttaccatatagctattggattggccacccggtttgcaacagagcacttgtatttctgtttgttgggttcgtgccacttgactttaatagttacagaactttactctacattgtccaattgaatacaaaaag

SEQ ID NO: 20738 - DNA, 664 bp, synthetic construct
  source 1..664: mol_type = other DNA
gcctgttttatacaccctccccgaatgcaacttagaagctttacctagatggtcaatagaaggtccagcacaccagttgggctccgaccaagcacttctgttaccccggactgagtatcaataggccgtttgcacggctgaaggagaaaacgttcgttacccggccaattacttcgagaaacccagtaacaccatgaaggttgcgcagtgtatcgctccgcacgaccccggtgtagatcaggccgatgagccaccgcgttccccacgggcgaccgtggcggtggctgcgctggcggcctgcccatggggcaacccatgggacgctacaataccgacatggtgcgaagagtctattgagctaattggtagtcctccggcccctgaatgcggctaatcctaactgcggagcaggcaccctcaagccagagggcagcttgtcgtaacgggcaactctgcagcggaaccgactactttgggtgtccgtgtttcttttattcttgaactggctgcttatggtgacaattaaaagattgttaccatatagctattggattagccatccagtgacaaacagagcgattatatattcgtttgttggttttgttccattaaactataaagttttaaacacacttaaatttgtcttactactcaactcagcaaa

SEQ ID NO: 20739 - DNA, 798 bp, synthetic construct
  source 1..798: mol_type = other DNA
gtgggttgtacccacccacagggcccaccgggcgccagtacactggtacgccagtaccatggtattacggtaccatgttacgtcagtacctttgtacgcctgttttatatcccctccccgaagtaaccttagaagtttaagtaacaaagaccaataggagtccagcaaccagctggattgcggtcaagcacttctgtttccccggacctagtagtgataggctgtacccacggccgaagatgaacccgtccgttatccggccagctacttcgagaagcctagtagcatcaaagatctgtcttggcgtttcgctcagcgcgtttcccccgcgtagatcgggctgatgggtctccgcatcccccacgggcgaccgtggcggaggccgcgtggcggcccgcctatggcgaaagccataggacgccatttcagtgacagggtgtgaagagcctattgagctagttggtagtcctccggcccctgaatgcggctaatcctaaccacggagcgtccaccagcaaaccagctggcggggcgtcgtaacgggtaactctgtggcggaaccgactactttgggtgtccgtgtttccttttgatcctattttggctgcttatggtgacaacaataagttgttatcataaagcttttgggttggccacctggaaaaagttatcagtgtttgatattgttcggctttcacgcctaccaacaaaacaagccttatatttattggttgccttttgtcccttggcggaaattactgattttcacctaaagcttctgattacattgacggcaaa

SEQ ID NO: 20740 - DNA, 798 bp, synthetic construct
  source 1..798: mol_type = other DNA
gtgggttgtacccacccacagggcccaccgggcgccagtacactggtacgccagtaccatggtattacggtaccatgttacgtcagtacctttgtacgcctgttttatatcccctccccgaagtaaccttagaagtttaagtaacaaagaccaataggagtccagcaaccagctggattgcggtcaagcacttctgtttccccggacctagtagtgataggctgtacccacggccgaagatgaacccgtccgttatccggccagctacttcgagaagcctagtagcatcaaagatctgtcttggcgtttcgctcagcgcgtttcccccgcgtagatcgggctgatgggtctccgcataccccacgggcgaccgtggcggaggccgcgtggcggcccgcctatggcgaaagccataggacgccatttcagtgacagggtgtgaagagcctattgagctagttggtagtcctccggcccctgaatgcggctaatcctaaccacggagcgtccaccagcaaaccagctggcggggcgtcgtaacgggtaactctgtggcggaaccgactactttgggtgtccgtgtttccttttgatcctattttggctgcttatggtgacaacaataagttgttatcataaagcttttgggttggccacctggaaaaagttatcagtgtttgatattgttcggctttcacgcctaccaacaaaacaagccttatatttattggttgccttttgtcccttggcggaaattactgattttcacctaaagcttctgattacattgacggcaaa

SEQ ID NO: 20741 - DNA, 801 bp, synthetic construct
  source 1..801: mol_type = other DNA
tgtgggttgttcccactcacagggcccactgggcgctagtacactggtatgccagtactctggtattacggtaccactgtacgccagtacctttgtacgcctgttttatatccctttcccaaacgtaaccttagaagtttaagtaaacaaagaccaataggagtccaacatccagttggattgcggtcaagcacttctgtttccccggacctagtagtgataggctgtacccacggccgaagatgaacccgtccgttatccggccagctacttcgagaagcctagtagcatcaaagatctgtcttggtgtttcgctcagcgcgttccccccgcgtagatcgggctgatgggtctccgcatcccccacgggcgaccgtggcggaggccgcgtggcggcccgcctatggcgaaagccataggacgccatttcagtgacagggtgtgaagagcctattgagctagttggtagtcctccggcccctgaatgcggctaatcctaaccactgagcgtccaccagcaaaccagctgggagggcgtcgtaacgggtaactctgtggcggaaccgactactttgggtgtccgtgtttccttttgatcctattgtggctgcttatggtgacaacctacagttgttatcataaagcttttggattggccatccggagagagttaacagtttgttcgctcattgctttgtcaaagtttcctttgagaaaagcaatctatttgttagtttcattttataaactagaggatatttcaagtgcccatttgaacttgttaattcaactacatcaaac

SEQ ID NO: 20742 - DNA, 726 bp, synthetic construct
  source 1..726: mol_type = other DNA
tgttcccacccacagggcctactgggcgctagcacactggtatcacggtacctttgtgcgcctgttttatagtccctccccccggacgcaacttagaagctgaacctaagcggtcaacaggcggctcagaacaccatctgggtctcgaccaagcacttctgtttccccggactgagtatcaataagctgcttacgcggctgaaggaaaaaacgtccgttatccggccaattacttcaagaaacccagtaccaccatgaaggttgcgcagcgtttcgctccgcacaaccccagtgtagatcaggtcgatgagtcaccgcattcctcacgggcgaccgtggcggtggctgcgctggcggcctgcccatggggcaacccatgggacgcttcaatactgacatggtgcgaagagtcaattgagctaattggtagtcctccggcccctgaatgcggctaatcctaactgtggagcagatgcccacgtaccagtgggtagtctgtcgtaacgggcaactccgcagcggaaccgactactttgggtgtccgtgtttctctttattcttatgttggctgcttatggtgacaattgagagattgttaccatatagctattggattggccatccggtgacgaatagagcgattgtatatctttttgttggattcgtaccattaaacaaaacaaattacaaaaccttgtgttacattattagattaaacacagcaaa

SEQ ID NO: 20743 - DNA, 663 bp, synthetic construct; identical to SEQ ID NO: 800
  source 1..663: mol_type = other DNA

SEQ ID NO: 20744 - DNA, 708 bp, synthetic construct; identical to SEQ ID NO: 852
  source 1..708: mol_type = other DNA

SEQ ID NO: 20745 - DNA, 709 bp, synthetic construct
  source 1..709: mol_type = other DNA
ggcccattggcgctagcactctggtattacggtacccttgtgcgcctgttttatccacccctcccgatgtaacttagaagttgatcaaagaaaaggtcagtaggatgcccagtacaccaactgggttttgaccaagcacttctgttaccccggaccgagtatcaataggccactcacgtggctgaaggagaaaacgttcgttatccggccaattacttcgagaaacccagtaacaccatgaaggttgcgcggtgtttcgctccacacaaccccagtgtagatcaggccgatgagtcaccgcattccccacgggcgaccgtggcggtggctgcgctggcggcctgcccatggggcaacccgtgggacgcctcaataccgacatggtgcgaagagtctattgagctaattggtagtcctccggcccctgaatgcggctaatcccaactgcggagcagatgcccacaaaccagtgggtggtctgtcgtaacgggcaactctgcagcggaaccgactactttgggtgtccgtgtttccttttattcttaaactggctgcttatggtgacaattgggagattgttaccatacagctattggattggccacccggtttgcaacagagcacttgtatttctgtttgttgggttcgtaccacttgactttaatagttacagaactttactctacattatccaattaaatacaaaaag

SEQ ID NO: 20746 - DNA, 723 bp, synthetic construct
  source 1..723: mol_type = other DNA
ttcccacccacagggcccactgggcgcttgcactctggtatcacggtacctttgtgcgcctgttttatgatcccttccccaattgaaacttagaagcattactctacgaccaatagtaggcgtggcacaccagtcgcgtcttggtcaagcacttctgtcaccccgggctgagtatcaataggctgcttacgtggctgaaggagaaaacgctcgttacccggccaattacttcgagaaacctagtagcatcatgaaagttgcgcagtgtttcgctccgcacaatcccagtgtagatcaggtcgatgagtcaccgcgttccccacgggcgaccgtggcggtggctgcgttggcggcctgcccatggggcaacccatgggacgcttcaataccgacatggtgcgaagagtctattgagctgattggtagtcctccggcccctgaatgcggctaatcctaactgcggagcagatactcacacgccagtgggcagtctgtcgtaatgggcaactctgcagcggaaccgactactttgggtgtccgtgtttccttttattctttacattggctgcttatggtgacaattgagagattgttaccatatagctattggattggccatccggtgactaatagagcgattgtttatttattcataggtttcataccactaaatcacaaagttctaaatactctcaatcttatcctagcgctcaatacgtcaag

SEQ ID NO: 20747 - DNA, 719 bp, synthetic construct
  source 1..719: mol_type = other DNA
cccacccacagggcccactgggcgcttgcacactggtatcccggtacctttgtgtgcctgttttactcaccctaccccattgtaacctagaagccaatcaaatatggtcattaggtggcccagtgcgccaactgggtcttgaccaagcacttctgttaccccggactgagtatcaataggctgctcacgcggccgaaggagaaaacgttcgttacccggccaattacttcgagaaacccagtaccaccatgaaggtagcgcagcgtttcgctccgcacaatcccagtgtagatcaggtcgatgggtcaccgcatcccccacgggcgaccgtggcggtggccgcgttggcggcctgcccatggggtatcccatgggacgcttcaatactgacatggtgcgaagagtctattgagctaattggtagtcctccggcccctgaatgcggctaatcctaactgcggagcagatacccacataccagtgggcagtctgtcgtaatgggcaactctgcagcggaaccgactactttgggtgtccgtgtttctttttattcctatttggctgcttatggtgacaattgaagaattgttaccatatagctattggattggccatccggtgaccaatagagctattgtttacctctttgttggttttgtaccactgaaccacacagtcctaaataccctaaatttgattttagtgctcaacacatcaca

SEQ ID NO: 20748 - DNA, 723 bp, synthetic construct
  source 1..723: mol_type = other DNA
tccccactcacagggcccactgggcgccagcacactggtatcaaggtacctttgtgcgcctgttttatagccccttccccgaatgtaacgtagaagctgaacccaagcggtcaacaggcggctcagaataccatctgggtcttgaccaagcacttctgttaccccggactgagtatcaataagctgctcacgcggctgaaggagaaaatgttcgttatccggccaattacttcgagaaacttagtaccaccatgaaggttgcgcagcgtttcgctccgcacaatcccagtgtagatcaggtcgatgagtcaccgcattcctcacgggcgaccgtggcggtggctgcgctggcggcctgctcatggggcaacccatgagacgcttcaatactgacatggtgcgaagagtcaattgagctaattggtagtcctccggcccctgaatgcggctaatcctaactgcggagcagatgcccaagatccagtgggtagtctgtcgtaacgggtgactctgcagcggaaccgactactttgggtgtccgtgtttccttttattcttacattggctgcttatggtgacaattgagagattgttaccatatagctattggattagccatccggtgacgaatagagcaattgtgtatctttttgttggattcataccactagacaatacaaacttcaaaaccttgtgttacatcattagactaaacacagtaag

SEQ ID NO: 20749 - DNA, 722 bp, synthetic construct
  source 1..722: mol_type = other DNA
gtaccgatgtatatagtacctttgtacgcctgttttatatccctcccccacatgtaaccttagaagtttacacaaacaaagaccaataggagtccaacacccagttggattgcggtcaagcacttctgtttccccggacctagtagtgataggctgtacccacggccgaagatgaacccgtccgttatccggctacctacttcgggaagcctagtaacattctgaagtctctgaggcgtttcgctcagcacgaccccggtgtagatcgggctgatgggtctccgcataccccacgggcgaccggcggaggcgcgttgcggcacgctatgcgaaagccataggacgcctcttagatgacagggtgtgaagagcctactgagctgggtagtagtctccggcccctgaatgcggctaatcctaaccacggagcgtccaccagcaatccagctggcagggcgtcgtaacgggcaactctgtggcggaaccgactactttgggtgtccgtgtttccttttgatcctattttggctgcttatggtgacaacgataagttgttatcataaagctcttgggttggccacctggaaaaagttatcagtgtttgatattgttcggctctcacgcctaccaataagacaagccctatatttacttgttgcattttactcgtcagaagaaatcacagagtatcatttggatttgttactcacattaaggacaag

SEQ ID NO: 20750 - DNA, 722 bp, synthetic construct
  source 1..722: mol_type = other DNA
cccacccacagggcccactgggcgctagcactctggtatcacggtacctttgtgcgcctgttttattttcccaccccctaaatgtaacttagaagctcaaattgaggggtcaataggaaacccaacacaccagttgggccttgaccaagtacttctgttaccccggaccgagtatcaataagctgcttgcgcggctgaaggagaaaacgttcgttacccggccaattacttcgagaaacctagtaacaccatgaaagttgcgcagtgtttcgctccgcacagccccagtgtagatcaggccgatgagtcaccgcgttccccacgggcgaccgtggcggtggctgcgttggcggcctgcccatggggaaacccatgggacgcttcaataccgacatggtgcgaagagtctattgagctaattggtagtcctccggcacctgaatgcggctaatcctaactgcggagcagatactcacaaaccagtgggcggtctgtcgtaacgggcaactctgcagcggaaccgactactttggagtccgtgtttcctttttattcttgacttggctgcttatggtgacaattgagagattgttaccatatagctattggattggccatccggtgacaaacagggcaattatttatttgtttgttggcttcattccactaaactataaagctataaatactcttgaattcattataatactcaattcatcaaa

SEQ ID NO: 20751 - DNA, 709 bp, synthetic construct
  source 1..709: mol_type = other DNA
cccattgggtcgctagcacactggtattacggtacctttgtgcgcctgttttatccacccttccctcaaatgaaacttagaagcttaactcgaatggtcaacaggaaacccagtacaccaactgggtcgcgaccaagcacttctgtaaccccggaccgagtatcaataagctgcttgcgtggctgaaagagaaaacgttcgttacccggccaattacttcgagaaacctagtaccaccatggaggttgcgcagtgtttcgctccgcacaaccccagtgcagatcgggccgatgagtcaccgcgttccccacgggcgaccgtggcggtggctgcgctggcggcccgcccatggggcaacccatgggacgcttcaatactgacatggtgcaaagagtctattgagctaattggtagtcctccggcccctgaatgcggctaatcccaactgcggagcagatacccacacgccagtgggcagtctgtcgtaacgggcaactctgcagcggaaccgactactttgggtgtccgtgtttccttttatcttttactggctgcttatggtgacaattgagagattgttaccatatagctactggattggccatccggtgtctaacagagcgatcatttatctgtttgttggatttgtgcccttaaacctcaaagttttcaacactcttaaccttgtactacaatttaactcagcaaa

SEQ ID NO: 20752 - DNA, 688 bp, synthetic construct
  source 1..688: mol_type = other DNA
tggtattgcggtacctttgtgcgcctgttttattcacccttccccaatgaaacttagaagtttaactcaaccggtcgatagacagcccagtacaccaactgggttttgaccaagtactcctgttttccccggactgagtatcaataagctgctcgcgcggctgaaggagaaaacgttcgttacccggccaattacttcgagaaacctagtaccaccatggacgttgcgcagtgtttcgctccgcacaaccccagtgtagatcaggtcgatgagtcaccgcaatccccacgggcgaccgtggcggtggctgcgctggcggcctgcccatggggcaacccatgggacgcttcaatactgacatggtgcgaagagtctattgagctaattggtagtcctccggcccctgaatgcggctaatcctaactgcggggcagatacccacacgccagtgggcagtctgtcgtaacgggtaactccgcagcggaaccgactactttgggtgtccgtgtttccttttattcttatattggctgcttatggtgacaattgaaagattgttgccatatagctattggattggccatccagtcagcaatagagcaattatatttctttttgttgggtttgtaccacttgataataacaactacaacaccttactatacattatccatttgaacacgagaaa

SEQ ID NO: 20753 - DNA, 725 bp, synthetic construct
  source 1..725: mol_type = other DNA
tacccatccacagggcccactgggcgttagcacactggtatcccggtacctttgtgcgcctgttttatgtccctttcccccgtattgcaacttagaagacatacaaccccggtcaacagccgacgtagcaacccagctgcgttttgaccaagtacttctgttaccccggactgagtatcaacaagctgctcgcgcggctgaaggagaaaccgtccgttacccggctaactacttcgagaagcctagtagcatcatgaacgttgcggggtgtttcgctcagcacttcccccgtgtagatcaggtcgatgagtcaccgcattccccacgggcgaccgtggcggtggctgcgttggcggcctgcctgtggagcaatccacaggacgctctaatacagacatggtgcgaagagtctattgagctagttggtagtcctccggcccctgaatgcggctaatcccaactgcggagcacattcccacaagccagtgggtagtgtgtcgtaacgggcaactctgcagcggaaccgactactttgggtgtccgtgtttccttttatttttataatggctgcttatggtgacaattgagagattgttaccatatagcttttggattggccatccggtgtctaacagagcaattatttacctgtttgttggttttatacctttaaatttcaaggttctaaaaaccctcaattttataataaaacttaattcaataaa

SEQ ID NO: 20754 - DNA, 722 bp, synthetic construct
  source 1..722: mol_type = other DNA
ttcccactcacagggcccactgggcgctagcacactggtatcatggtacctttgtgtgcctgttttatttacccttccccagtgtaacttagaagcaaacaacgcacggtcaacaggcggctcagtacgccaactgagtctcgaccaagcacttctgttaccccggaccaagtatcaataggccgctcacgcggctgaaggagaaaacgttcgttacccggccagttacttcgagaaacccagtaccaccatgaaggttgcgcagcgtttcgctccacacaaccccagtgtagatcaggccgatgagccaccgcgtccctcacgggcgaccgtggcggtggctgcgctggcggcctgcccatggggtaacccatgggacgcttcaataccgacatggtgtgaagagtctattgagctaattggtagtcctccggcccctgaatgcggctaatcctaactgcggagcagatacccacatgccagtgggcggtctgtcgtaatgggcaactctgcagcggaaccgactactttgggtgtccgtgtttccttttatttttacactggctgcttatggtgacaattgagagattgttgccatatagctattggattggccatccggtgacaaatagagcgattgtttacctatttgttggtttcataccattgaattacaaagtcctaaaaaccttagactttatcttaatacttaacacagcaaa

SEQ ID NO: 20755 - DNA, 722 bp, synthetic construct
  source 1..722: mol_type = other DNA
ttcccacccacagggcccactgggcgccagcacactggtatcacggtacctttgtgcgcctgttttatccacccttccccaacgtaacttagaagtacaccgcatacggtcaataggcagctcagtgcaccaactgagtcacgaccaagcacttctgttaccccggacttagtatcaataggctgctcacgcggctgaaggagaaaacgttcgttacccggccaattacttcgagaaacccagtaccaccatggaggttgcgcggcgtttcgctccacacaaccccagtgtagatcaggctgatgagtcaccacactccccacgggcgaccgtggtggtggctgcgctggcggcctgcccatggggcaacccatgggacgcttcaatactgaaatggtgcgaagagtctattgagctaattggtagtcctccggcccctgaatgcggctaatcctaactgcggagcagatacccacatgccagtgggcagtctgtcgtaacgggcaactctgcagcggaaccgactactttgggtgtccgtgtttccttttattcttgtactggctgcttatggtgacaattgatagattgttgccatatagctattggattggccatccagtgacaaatagagcgattatttatttattcattggtttcgtaccattaaattacacagctttaaacactctcaattttatcttggcacttaacacatcaaa

SEQ ID NO: 20756 - DNA, 722 bp, synthetic construct
  source 1..722: mol_type = other DNA
tcccacccacagggcccactgggcgctagcactctggtatcatggtacctttgtgcgcctgttttatccaccctccccaaaatgcaacttagaagcataatccaaacggtcattaggtagctcagtacaccaactgagcccagaccaagcacttctgtcaccccggaccgagtatcaataggctgctcgcgcggctgaaggagaaaacgttcgttatccggccaattacttcgagaaacccagtaccactatgaaagttgcgcagcgtttcgttccgcacaaccccagtgtagatcaggtcgatgagtcaccgcgttccccacgggcgaccgtggcggtggctgcgttggcggcctgcccatggggcaacccatgggacgcttcaatactgacatggtgtgaagagtctattgagctaattggtagtcctccggcccctgaatgcggctaatcctaactgcggagcagatgctcacaaaccagtgggcagtctgtcgtaatgggtaactctgcagcggaaccgactactttgggtgtccgtgtttcctttcatttttacactggctgcttatggtgacaattgagagattgttaccatatagctattggattggccatccggtgactaacagagcaattgtttacctatttattggttttgtaccgttagattacaaagttctaaagactctgaatcttattatagcactcaatacagtaaa

SEQ ID NO: 20757 - DNA, 718 bp, synthetic construct
  source 1..718: mol_type = other DNA
cccacagggcccactgggcgctagcacactggtatcccggtacctttgtgcgcctgttttatttaccccacccccagctgtaatttagaagttcgacacacatggtcagtagatggctcagtgcaccaactgggtttagaccaagcacttctgttaccccggaccgagtatcaataagctgctcgcgcggctgaaggagaaaacgttcgttacccggccaattacttcgagaaacctagtaccaccatggaggttgcgcagcgtttcgctccgcacagccccagtgtagatcaggccgatgagtcaccgcattcctcacgggcgaccgtggcggtggctgcgttggcggcctgcccatggggcaacccatgggacgcttcaatactaacatggtgtgaagagtctattgagctaattggtagtcctccggcccctgaatgcggctaatcctaactgcggagcagatactcacatgccagtgggcagtctgtcgtaacgggcaactctgcagcggaaccgactactttgggtgtccgtgtttccttttgttcttatactggctgcttatggtgacaattgagaaattgttaccatatagctattggattggccatccagtgacaaacagagcaattgtttacctatttgtcggcttcataccgttaaactttagagttttgaagacccttaacttgattatactattcaactctgtaaa

SEQ ID NO: 20758 - DNA, 792 bp, synthetic construct
  source 1..792: mol_type = other DNA
cccatccacagggcccactgggcgccagtacactggtacgccagtaccttggtatcacggtatcactgtacgccagtacctttgtacgcctgttttatattccccttccccacatgtaaccttagaagtttaaacaaaatctgaccaataggagtccaacatccagttggattgcggtcgagcacttctgtttccccggacctagtagtgataggctgtacccacggccgaagatgaacccgtccgttatccggccagctacttcgagaagcctagtaacatcaaagatctgtcttggcgtttcgctcagcgcgttccccccgcgtagatcgggccgatgggtctccgcatcccccacgggcgaccgtggcggaggccgcgtggcggcccgcctatggcgaaagccataggacgccatttcagtgacagggtgtgaagagcctattgagctagttggtagtcctccggcccctgaatgcggctaatcctaaccatggagcgtccaccgacaatccagtcggcgggacgtcgtaatgggtaactccgtggcggaaccgactactttgggtgtccgtgtttccttttgatcctattttggctgcttatggtgacaacgacaagttgttatcataaagcttttgggttggccacctggaaaaagttatcagtgtttgatattgttcggctttcacgcctaccaataaaacaagctttatacttgttagtttcattttatccatctgaggatattactgagtttcacctacaacttttgctcacattatcagcaag

SEQ ID NO: 20759 - DNA, 710 bp, synthetic construct
  source 1..710: mol_type = other DNA
ttaaaacaaccttggggttgttcccaccccaagggcccacgtggcggctagtactctggtatttcggtacctttgtacgcctgttttatctccctccccaatgtaacttagaagctttcaaatcaaagctcaataggtggagcgcaagccagcgcttccgtgagcaagcactcctgtttccccggtgcggttgtatagactgttcccacggttgaaaacaacctatccgttatccgctatagtacttcgagaaacctagtatcacctttggattgttgatgcgttgcgctcagcacactaacccgtgtgtagcttgggtcgatgagtctggacataccccactggtgacagtggtccaggctgcgttggcggcctactcatggtgaaaaccatgagacgctagacatgaacaaggtgtgaagagtctattgagctactatagagtcctccggcccctgaatgcggctaatcttaaccatggagcaagtgcttacaaaccagtgagttgcttgtcgtaatgcgcaagtccgtggcggaaccgactactttgggtgtccgtgtttcactttttacttttatgactgcttatggtgacaatttaatattgttaccatttagctagtcaaattaatcacataaaactttaaatcctatctaacaattcacatttgaatagcttcattttgaggactttaaacctatttacaaag

SEQ ID NO: 20760 - DNA, 710 bp, synthetic construct
  source 1..710: mol_type = other DNA
ttaaaacagccttggggttgttcccaccccaagggcccacgtggcggctagtactctggtatttcggtacctttgtacgcctgttttatctccctccccaatgtaacttagaagttttcaaatcaaagctcaataggtggagcgcaaaccagcgttttcatgagcaagcactcctgtttccccggtgcgattgtatagactgttcccacggttgaaaacaatctatccgttatccgctatagtacttcgagaaacctagtatcacctttggattgttgatgcgttgcgctcagcacactaacccgtgtgtagcttgggtcgatgagtctggacataccccactggtgacagtggtccaggctgcgttggcggcctactcatggtgaaaaccatgagacgctaaacatgaacaaggtgtgaagagtctattgagctactatagagtcctccggcccctgaatgcggctaatcttaaccatggagcaagtgctcacaaaccagtgagttgcttgtcgtaatgcgcaagtccgtggcggaaccgactactttgggtgtccgtgtttcactttttacttttatgactgcttatggtgacaatttgatattgttaccatttagcttgtcaaattaatcacacaaagccttaaatcttatctatcaatttgcatttggatagcttcattttgaagattctaaacctgttcacaaag

SEQ ID NO: 20761 - DNA, 710 bp, synthetic construct
  source 1..710: mol_type = other DNA
tgaaaacagccttggggttgttcccaccccaagggcccacgtggcggctagtactctggtatttcggtacctttgtacgcctgttttatctccctccccaatgtaacttagaagctttcaaatcaaagctcaataggtggagcgcaagccagcgcttccgtgagcaagcactcctgtttccccggtgcggttgtatagactgttcccacggttgaaaacaacctatccgttatccgctatagtacttcgagaaacctagtatcacctttggattgttgatgcgttgcgctcagcacactaacccgtgtgtagcttgggtcgatgagtctggacataccccactggtgacagtggtccaggctgcgttggcggcctactcatggtgaaaaccatgagacgctaaacatgaacaaggtgtgaagagtctattgagctactatagagtcctccggcccctgaatgcggctaatcttaaccatggagcaagtgctcacaaaccagtgagttgcttgtcgtaatgcgcaagtccgtggcggaaccgactactttgggtgtccgtgtttcactttttacttttatgactgcttatggtgacaatttaatattgttaccatttagctagtcaaattaatcatataaaactttaaatcctatctaacaattcacatttggatagcttcattttgaggactttatacctacttacaaag

SEQ ID NO: 20762 - DNA, 710 bp, synthetic construct
  source 1..710: mol_type = other DNA
tgaaaacagccttggggttgttcccaccccaagggcccacgtggcggctagtactctggtatttcggtacctttgtacgcctgttttatctccctccccaatgtaacttagaagttttcaaatcaaagctcaataggtggagcgcaagccagcgcttccgtgagcaagcactcctgtttccccggtgcggttgtatagactgttcccacggttgaaaacaacctatccgttatccgctatagtacttcgagaaacctagtatcacctttggattgttgatgcgttgcgctcagcacactaacccgtgtgtagcttgggtcgatgagtctggacataccccactggtgacagtggtccaggctgcgttggcggcctactcatggtgaaaaccatgagacgctagacatgaacaaggtgtgaagagtctattgagctactatagagtcctccggcccctgaatgcggctaatcttaaccatggagcaagtgctcacaaaccagtgagttgcttgtcgtaatgcgcaagtccgtggcggaaccgactactttgggtgtccgtgtttcactttttacttttatgactgcttatggtgacaatttaatattgttaccatttagctagtcaaattaatcacataaaactttaaatcctatctaacaattcacatttgaatagcttcattttgaggactttaaacctatttacaaag

SEQ ID NO: 20763 - DNA, 710 bp, synthetic construct
  source 1..710: mol_type = other DNA
ttaaaacagccttggggttgttcccactccaagggcccacgtggcggctagtactctggtatttcggtacctttgtacgcctgttttatctccctccccaatgtaacttagaagttttcaaatcaaagctcaataggtggagcgcaagccagcgcttccgtgagcaagcactcctgtttccccggtgcggttgtatagactgttcccacggttgaaaacaacctatccgttatccgctatagtacttcgagaaacctagtatcacctttggattgttgatgcgttgcgctcagcacactaacccgtgtgtagcttgggtcgatgagtctggacataccccactggtgacagtggtccaggctgcgttggcggcctactcatggtgaaaaccatgagacgctagacatgaacaaggtgtgaagagtctattgagctactatagagtcctccggcccctgaatgcggctaatcttaaccatggagcaagtgctcacaaaccagtgagttgcttgtcgtaatgcgcaagtccgtggcggaaccgactactttgggtgtccgtgtttcactttttacttttatgactgcttatggtgacaatttaatattgttaccatttagctagtcaaattaatcacataaaactttaaatcctatctaacaattcacatttgaatagcttcgttttgaggactttaaacctatttacaaag

SEQ ID NO: 20764 - DNA, 710 bp, synthetic construct
  source 1..710: mol_type = other DNA
ttaaaacagccttggggttgttcccaccccaagggcccacgtggcggctagtactctggtatttcggtacctttgtacgcctgttttatctccctccccaatgtaactcagaagttttcaaatcaaagctcaataggtggagcgcaagccagcgcttccgtgagcaagcactcctgtttccccggtgcggttgtatagactgttcccacggttgaaaacaacctatccgttatccgctatagtacttcgagaaacctagtatcacctttggattgttgatgcgttgcgctcagcacactaacccgtgtgtagcttgggtcgatgagtctggacataccccactggtgacagtggtccaggctgcgttggcggcctactcatggtgaaaaccatgagacgctagacatgaacaaggtgtgaagagtctattgagctactatagagtcctccggcccctgaatgcggctaatcttaaccatggagcaagtgctcacaaaccagtgagttgcttgtcgtaatgcgcaagtctgtggcggaaccgactactttgggtgtccgtgtttcactttttacttttatgactgcttatggtgacaatttaatattgttgccatttagctagtcgaattaatcacataaaactttaaatcctatctaacaattcacatttggatagcttcattttgaggactttaaacctatttacaaag

SEQ ID NO: 20765 - DNA, 732 bp, synthetic construct
  source 1..732: mol_type = other DNA
ctgtgggttgttcccacccacagggcccactgggcgtttgcacactggtatcgcggtacctttgtgcgcctgttttatccaccctcccctaattgaatttagaagtcaagcacaaccggtcaacagatagcccagcataccagctgggtttcgaccaagcacttctgttcacccgggctgagtatcaataggctgctcacgcggctgaaggagaaaacgttcgttacccggccaattacttcgagaaacctagtaccgccatggacgttgcgcagcgtttcgttccacgcaaccccagtgtagatcaggtcgatgagtcaccgcatcccccacgggtgaccgtggcggtggctgcgctggcggcctgcccatggggtaacccatgggacgcttcaatgctgacatggtgcgaagagtctattgagctaattggtagtcctccggcccctgaatgcggctaatcctaactgcggagcagacacccacacgccagtgggcagtctgtcgtaacgggcaactccgcagcggaaccgactactttgggtgtccgtgtttctttttattctttcattggctgcttatggtgacaattgagaggttgttaccatatagctattggattggccatccggtgagcaacagagcaattatatttctttttgttggatatataccacttgattctaataattacaataccctgctttatattctccaattgaatacgaaaag

SEQ ID NO: 20766 - DNA, 720 bp, synthetic construct
  source 1..720: mol_type = other DNA
cccacccacagggcccactgggcgctagcacactggtatcgcggtacctttgtgcgcctgttttatctaccccaccccaaggaaacttagaagcttaatctaaacggtcggtaggaaacccagtacaccaactgggtcatgaccaagcacttctgtaaccccggaccgagtatcaataagctgcttacgcggctgaaggagaaaacgttcgttacccggccaattacttcgagaaacctagtaccaccatggatgttgcgcggtgtttcgttccgcacaaccccagtgtagatcaggccgatgagtcaccgcatcccccacgggcgaccgtggcggtggctgcgctggcggcctgcccatggggcaacccatgggacgcctcaatactgacatggtgcgaagagtctattgagctaattggtagtcctccggcccctgaatgcggctaatcctaactgcggagcagatacccacacgccagtgggcagtctgtcgtaacgggcaactctgcagcggaaccgactactttgggtgtccgtgtttcctgtttttctcatattggctgcttatggtgacaattgagagattgttgccatatagctattggattggccatccggtgacaaacagagcaattatctacttgtttgttggttttgtaccattggactttagagtactgaagacactcaacttaattttaatacttaacacagcaag

SEQ ID NO: 20767 - DNA, 710 bp, synthetic construct
  source 1..710: mol_type = other DNA
ttaaaacagccttggggttgttcccaccccaagggcccacgtggcggctagtactctggtatttcggtacctttgtacgcctgttttatatccctccccaatgtaatttagaagctttcaaatcaaagctcaataggtggagcgcaagccagcgcttccgtgagcaagcacttctgtttccccggtgcggttgtatagactgttcccacggttgaaaacgacctatccgttatccgctatagtacttcgagaaacctagtatcacctttggattgttgatgcgttgcgctcaacacactaacccgtgtgtagcttgggtcgatgagtctggacataccccactggtgacagtggtccaggctgcgttggcggcctactcatggtgaaaaccatgagacgctagacatgaacaaggtgtgaagagtctattgagctactatagagtcctccggcccctgaatgcggctaatcttaaccatggagcaagtgctcacaaaccagtgagttgcttgtcgtaatgcgcaagtccgtggcggaaccgactactttgggtgtccgtgtttcactttttacttttatgactgcttatggtgacaatttaatattgttaccattcagctagtcgaaataatcacataaaactttaaatcctatctaataattcacatttggatagtttcatttcgaggactttaaacctacttacaaag

SEQ ID NO: 20768 - DNA, 710 bp, synthetic construct
  source 1..710: mol_type = other DNA
ttaaaacagccttggggttgttcccaccccaagggcccacgtggcggctagtactctggtatttcggtacctttgtacgcctgttttatatccctccccaatgtaatttagaagctttcaaatcaaagctcaataggtggagcgcaagccagcgcttccgtgagcaagcacttctgtttccccggtgcggttgtatagactgttcccacggttgaaaacgacctatccgttatccgctgtagtacttcgagaaacctagtatcacctttggattgttgatgcgttgcgctcaacacactaacccgtgtgtagcttgggtcgatgagtctggacataccccactggtgacagtggtccaggctgcgttggcggcctactcatggtgaaaaccatgagacgctagacatgaacaaggtgtgaagagtctattgagctactatagagtcctccggcccctgaatgcggctaatcttaaccatggagcaagtgctcacaaaccagtgagttgcttgtcgtaatgcgcaagtccgtggcggaaccgactactttgggtgtccgtgtttcactttttacttttatgactgcttatggtgacaatttaatattgttaccattcagctagtcgaaataatcacataaaactttaaatcctatctaataattcacatttggatagtttcatttcgaggactttaaacctacttacaaag

SEQ ID NO: 20769 - DNA, 710 bp, synthetic construct
  source 1..710: mol_type = other DNA
ttaaaacagccttggggttgttcccaccccaagggcccacgtggcggctagtactctggtatttcggtacctttgtacgcctgttttatctccctccccaatgtaacttagaagctttcaaatcaaagctcaataggtggagcgcaagccagcgcttccgtgagcaagtacttctgtttccccggtgcggttgtatagactgttcccacggttgaaaacaacctatccgttatccgctatagtacttcgagaaacctagtatcacctttggattgttgatgcgttgcgctcaacacactaacccgtgtgtagcttgggtcgatgagtctggacataccccactggtgacagtggtccaggctgcgttggcggcctactcatggtgaaaaccatgagacgctagacatgaacaaggtgtgaagagtctattgagctactatagagtcctccggcccctgaatgcggctaatcttaaccatggagcaagtgctcacaaaccagtgagttgcttgtcgtaatgcgcaagtccgtggcggaaccgactactttgggtgtccgtgtttcactttttacttttatgactgcttatggtgacaatttaatattgttaccattcagctagtcgaaataatcgcataaaacttcaaatcctatctaacagttcacatttggatagttttattttaaggactttaaacctacctagaaag

SEQ ID NO: 20770 - DNA, 710 bp, synthetic construct
  source 1..710: mol_type = other DNA
ttaaaacagccttggggttgttcccaccccaagggcccacgtggcggctagtactctggtatttcggtacctttgtacgcctgttttatctccctccccaatgtaacttagaagctttcaagtcaaagctcaataggtggagcgcaagccagcgcttccgtgagcaagcactcctgtttccccggtgcggttgtatagactgttcccacggttgaaaacaatctatccgttatccgctatagtacttcgagaaacctagtatcacctttggattgttgatgcgttgcgctcagcacactaacccgtgtgtagcttgggtcgatgagtctggacataccccactggtgacagtggtccaggctgcgttggcggcctactcatggtgaaaaccatgagacgctaaacatgaacaaggtgtgaagagtctattgagctactatagagtcctccggcccctgaatgcggctaatctcaaccatggagcaagtgctcacaaaccagtgagttgcttgtcgtaatgcgcaagtccgtggcggaaccgactactttgggtgtccgtgtttcactttttacttttatgactgcttatggtgacaatttaatattgttaccatttagctagtcaaattaatcacataaaactttgaattctacctaataattcacatttggatagcttcatcttgaggactttaaacctatttacaaag

SEQ ID NO: 20771 - DNA, 710 bp, synthetic construct
  source 1..710: mol_type = other DNA
ttaaaacagccttggggttgttcccacctcaagggcccacgtggcggctagtactctggtatttcggtacccttgtacgcctgttttatctccctccccaatgtaacttagaagctttcaaatcaaagctcaataggtggagcgcaagccagcgcttccgtgagcaagcactcctgtttccccggtgcggttgtatagactgttcccacggttgaaaacaacctatccgttatccgctatagtacttcgagaaacctagtatcacctttggattgttgatgcgttgcgctcagcacactaacccgtgtgtagcttgggtcgatgagtctggacataccccactggtgacagtggtccaggctgcgttggcggcctactcatggtgaaaaccatgagacgctagacatgaacaaggtgtgaagagtctattgagctactatagagtcctccggcccctgaatgcggctaatcttaaccatggagcaagtgctcacaaaccagtgagttgcttgtcgtaatgcgcaagtccgtggcggaaccgactactttgggtgtccgtgtttcactttttacttttatgactgcttatggtgacaatttaatattgttaccatttagctagtcaaattaatcacataaaactttaaatcctatctaacaattcacatttggatagcttcattttgaggactttaaacctatttacaaag

SEQ ID NO: 20772 - DNA, 725 bp, synthetic construct
  source 1..725: mol_type = other DNA
ttcccacccacagggcccactgggcgcttgcacactggtatcacggtacctttgtgcgcctgttttatataccaccccccccctgcgtaacttagaagtggaacttacacggtcaataggcaactcggtaagccaaccgggcaatgaccaagcactactgttaccccggaccaagtatcaatagactgctagcgcggttgaaggagaaaacgtccgttacccggccaattacttcaagaaacctagtaccactatggatgttgcgcagtgtttcgctccgcacaaccccagtgtagatcaggccgatgagccaccgcattccccacgggcgaccgtggcggtggctgcgctggcggcctgcccatggggcaacccatgggacgcttcaatactgacatggtgcgaagagtctattgagctaattggtattcctccggcccctgaatgcggctaatcctaactgcggagcagatacccacatgccagtgggcagtctgtcgtaacgggcaactctgcagcggaaccgactactttgggtgtccgtgtttccttttaatcttatattggctgcttatggtgacaattgaaagattgttaccatatagctattggattggccatccggtgacaaacagagcaatcgtttatttgttcgttggttttattccattgaatctcaaagttttgaacactctaaactttatcatttcactcaacacaacaaa

SEQ ID NO: 20773 - DNA, 802 bp, synthetic construct
  source 1..802: mol_type = other DNA
gtgggttgttcccacccacagggcccactgggcgccagtacactggtacgtcagtaccttggtattacggtaccaccgtacgccagtacctttgtacgcctgttttatatccccttcccccatatgcaactttagaagtttaaataaacaaagaccactaggagtccaacatccagttggattgcggtcaagcacttctgtttccccggacctagtagtgataggctgtacccacggccgaagatgaacccgtccgttatccggccagctacttcgagaagcctagtagcatcaaagatctgtcttggcgtttcgctcagcgcgttccccccgcgtagatcgggctgatgggtctccgcataccccacgggcgaccgtggcggaggccgcgtggcggcccgcctatggcgaaagccataggacgccatttcagtgacagggtgtgaagagcctattgagctagttggtagtcctccggcccctgaatgcggctaatcccaaccacggagcgtccaccagcaaaccagctggcagggcgtcgtaacgggtaactctgtggcggaaccgactactttgggtgtccgtgtttccttttgatcctatattggctgcttatggtgacaacgataagttgttatcataaagctcttgggttggccacctggaaaaagttatcagtgtttgatattgttcggctttcacgcctaccacccagactagctctttatttgcttattgcattttacccatcggaggatattacagacttccatctacaacttttattcacattatcaacaaa

SEQ ID NO: 20774 - DNA, 727 bp, synthetic construct
  source 1..727: mol_type = other DNA
gttgttcccacccgcagggcccactgggcgctagcacactggtatctcggtacctttgtgcgcctgttttatagcccctcccccgaatgtaacgtagaagctgaacccaagcggtcaataggcggctcagaacaccatctgggtcttgaccaagcacttctgttaccccggactgagtatcaacaagctgctcacgcggctgaaggagaaaacgttcgttacccggccaattacttcgagaagcccagtaccaccatgaaggttgcgcagcgtttcgctccgcacaaccccagtgtagatcaggtcgatgagtcaccgcgttcctcacgggtgaccgtggcggtggctgcgctggcggcctgcccatggggtaacccatgggacgcttcaatactgacatggtgcgaagagtcgattgagctaattggtagtcctccggcccctgaatgcggctaatcctaactgcggagcagatgcccaagctccagtgggtagtctgtcgtaatgggtaactctgcagcggaaccgactactttgggtgtccgtgtttccttttattcttacattggctgcttatggtgacaattgagagattgttaccatatagctattggattggccatccggtgacaaatagagcaattatatatctttttgtcggattcgtaccactcgacaaaacaaatttccaaaccttgtgttacattattagactaaatacagcaaa

SEQ ID NO: 20775 - DNA, 709 bp, synthetic construct
  source 1..709: mol_type = other DNA
taaaacagccttggggttgttcccaccccaagggcccacgtggcggctagtactctggtatttcggtacctttgtacgcctgttttatctccctccccaatgtaacttagaagctttcaaatcaaagctcaataggtggagcgcaagccagcgcttccgtgagcaagtacttctgtttccccggtgcggttgtatagactgtccccacggttgaaaacaacctatccgttatccgctatagtacttcgagaaacctagtatcacctttggattgttgatgcgttgcgctcaacacactaacccgtgtgtagcttgggtcgatgagtctggacataccccactggtgacagtggtccaggctgcgttggcggcctactcatggtgaaaaccatgagacgctagacatgaacaaggtgtgaagagtctattgagctactatagagtcctccggcccctgaatgcggctaatcttaaccatggagcaagtgctcacaaaccagtgagttgcttgtcgtaatgcgcaagtccgtggcggaaccgactactttgggtgtccgtgtttcactttttacttttatgactgcttatggtgacaatttaatattgttaccattcagctagtcgaaataatcgcataaaacttcaaatcctatctaacagttcacatttggatagttttattttaaagactttaaacctacctagaaag

SEQ ID NO: 20776 - DNA, 676 bp, synthetic construct
  source 1..676: mol_type = other DNA
cacgtggcggctagtactctggtattacggtacctttgtacgcctgttttatatcccttcccccgcaactttagaagcttaacaaaagttcaacagcaggggtgcaaaccagtacctctacgaacaagcacttctgtttccccggtgaaattacatagactgtacccacggtcaaaagtgattgatccgttatccgcttgagtacttcgagaagcctagtatcaccttggaatcttcgacgcgttgcgctcaacactctaccccgggtgtagcttaggctgatgagtctgggcactccccactggtgacagtggcccaggctgcgttggcggcctacccatggctaacgccatgggacgctagttgtgaacaaggtgtgaagagcctattgagctactcaagaatcctccggcccctgaatgcggctaatcctaaccacggagcaatcgctcacgacccagtgagtaggttgtcgtaatgcgcaagtccgtggcggaaccgactactttgggtgtccgtgtttccctttttattcatactggctgcttatggtgacaatttacagattgttaccatatagctattggattggccacccagtattgtgttacacatattaaaatactcttatacaagcaacaacaacattgtgtttgaaccacaatagccattacaa

SEQ ID NO: 20777 - DNA, 704 bp, synthetic construct
  source 1..704: mol_type = other DNA
actgggcgttagcacactggtattccggtacctttgtgcgcctgttttatccaccctccccaatgtaacgtagaagctacgctcaaacggtcaacagatagtccagtaatccagctgggccacgaccaagcacttctgtttccccggacagagtaccaataagctgctcgcgcggctgaaggggaaaacgttcgttatccggccaattacttcgagaaacctagtaccgccatggacgttgcgcagcgtttcgctccacacaaccccagtgtagatcaggtcgatgagccaccgcattccccacgggcgaccgtggcggtggctgcgttggcggcctgcccatggggtaacccatgggacgcttcaatacagacatggtgcgaagagtctattgagctaattggtagtcctccggcccctgaatgcggctaatcctaactgcggagcaggtacccacaacccagtgggtcacctgtcgtaatgggcaactctgcagcggaaccgactactttgggtgtccgtgtttccttttaacctttacactggctgcttatggtgacaattgaaagattgttaccatatagctattggattggccatcctgtgagtaatagagcgattgtatacttatttgttggctttataccactcaatttgaaagctttacagacactgaattatattgtggcattaaacacagcaaa

SEQ ID NO: 20778 - DNA, 709 bp, synthetic construct
  source 1..709: mol_type = other DNA
taaaacagccttggggttgttcccaccccaagggcccacgtggcggctagtactctggtatttcggtacctttgtacgcctgttttatctccctccccaatgtaacttagaagctttcaaatcaaagctcaataggtggagcgcaaaccagcgcttccgtgagcaagtactcctgtttccccggtgcggttgtatagactgtttccacggttgaaaacaacctatccgttatccgctatagtacttcgagaaacctagtatcacctttggattgttgatgcgttgcgctcaacacactaacccgtgtgtagcttgggtcgatgagtctggacataccccactggtgacagtggtccaggctgcgttggcggcctactcatggtgaaaaccatgagacgctagacatgaacaaggtgtgaagagtctattgagctactatagagtcctccggcccctgaatgcggctaatcttaaccatggagcaagtgctcacaagccagtgagttgcttgtcgtaatgcgcaagtccgtggcggaaccgactactttgggtgtccgtgtttcactttttacttttgtgactgcttatggtgacaatttaatattgttaccattcagctagtcgaaataatcgcataaagctttaaatcctatctaacaattcacatttggatagtttcattttgaggactttaaacctgcttacaaag

SEQ ID NO: 20779 - DNA, 714 bp, synthetic construct
  source 1..714: mol_type = other DNA
acagggcccactgggcgctagcactctggtatcatggtacctttgtgcgcctgttttatccaccctccccaaaatgcaacttagaagcataatccaaacggtcattaggtagctcagtacaccaactgagcccagaccaagcacttctgtcaccccggaccgagtatcaataggctgctcgcgcggctgaaggagaaaacgttcgttatccggccaattacttcgagaaacccagtaccactatgaaagttgcgcagcgtttcgttccgcacaaccccagtgtagatcaggtcgatgagtcaccgcgttccccacgggcgaccgtggcggtggctgcgttggcggcctgcccatggggcaacccatgggacgcttcaatactgacatggtgtgaagagtctattgagctaattggtagtcctccggcccctgaatgcggctaatcctaactgcggagcagatgctcacaaaccagtgggcagtctgtcgtaatgggtaactctgcagcggaaccgactactttgggtgtccgtgtttcctttcatttttacactggctgcttatggtgacaattgagagattgttaccatatagctattggattggccatccggtgactaacagagcaattgtttacctatttattggttttgtaccgttagattacaaagttctaaagactctgaatcttattatagcactcaatacagtaaa

SEQ ID NO: 20780 - DNA, 719 bp, synthetic construct
  source 1..719: mol_type = other DNA
cccacccacagggcccactgggcgttagcacactggtattccggtacctttgtgcgcctgttttattcaccccccccattgtaacttagaagcataacctagatggtcaatagacagcccagtgcaccaactgggtctcgaccaagcactcctgttaccccggaccgagtatcaataggctgctcacgcggctgaaggagaaagcgttcgttacccggccaattacttcgagaaacttagtaacaccatgaaagttgcgcagcgtttcgctccgcacaaccccagtgtagatcaggtcgatgagtcaccgcgttcctcacgggcgaccgtggcggtggctgcgttggcggcctgcccatgaggtaactcatgggacgcttcaatactgacatggtgcgaagagtctattgagctaattggtagtcctccggcccctgaatgcggctaatcctcactgtggagcagatactcacaagccagtgggtggtctgtcgtaacgggtaactccgcagcggaaccgactactttgggtgtccgtgtttccttttattccaaatctggctgcttatggtgacaattgaaagattgttgccatatagctattggattggccatccggtgacaggcagagcaattgtttatctgtttgttggtttcattccattaaattataacgttttaagcacactcaactatattttgttactcaacgcaggaaa

SEQ ID NO: 20781 - DNA, 766 bp, synthetic construct
  source 1..766: mol_type = other DNA
tcccacccacagggcctactgggcgccagtacactggtatgccttacctcggtattacggtaccgttgtatatagtacctttgtacgcctgttttaaatcccctcccccaaatgtaaccttagaagtttaagtaaactcagaccaataggagtccaacacccagttggattgcggtcaagcacttctgtctccccggacctagtagtgataggctgtgcccacggccgaagatgaacccgtccgttatccggccagctacttcgagaagcctagtagcatcaaagatctgtcttggcgtttcgctcagcgcgttccccccgcgtagatcgggctgatgggtctccgcattccccacgggcgaccgtggcggaggccgcgtggcggcccgcctatggcgaaagccataggacgccatttcagtgacagggtgtgaagagcctattgagctagttggtagtcctccggcccctgaatgcggctaatcctaaccacggagcgtccgccaacaatccagttggcagggcgtcgtaacgggtaactctgtggcggaaccgactactttgggtgtccgtgtttccttttgatcctattttggctgcttatggtgacaacgataagttgttatcataaagcttttgggttggccgcctggaaaaagatatcagtttgttcgctcgttgctttatcaaaactccctttgaggaaagcaatctatttattagtttcattttacaagcttgaaaatatatcaagtgctcacttaag

SEQ ID NO: 20782 - DNA, 710 bp, synthetic construct
  source 1..710: mol_type = other DNA
ttaaaacacccccccggttgttcccactccaagggcccatgtggcggctagtacactggtacttcggtacctttgtacgcctgttttatctccctccccaatgtaacttagaagctttcaaatcaaagctcaataggtggagcgcaaaccagcgcttccgtgagcaagtactcctgtttccccggtgcggttgtatagactgttcccacggttgaaaacaacctatccgttatccgctatagtacttcgagaaacctagtatcacctttggattgttgatgcgttgcgctcaacacactaacccgtgtgtagcttgggtcgatgagtctggacataccccactggtgacagtggtccaggctgcgttggcggcctactcatggtgaaaaccatgagacgctagacatgaacaaggtgtgaagagtctattgagctactatagagtcctccggcccctgaatgcggctaatcttaaccatggagcaagtgctcacaaaccagtgagttgcttgtcgtaatgcgcaagtccgtggcggaaccgactactttgggtgtccgtgtttcactttttacttttatgactgcttatggtgacaatttaatattgttaccattcagctagtcgaaataatcgcataaaactttaaatcctatctaacgattcacatttggatagtttcattttgaggactttaaacctacttacaaag

SEQ ID NO: 20783 - DNA, 710 bp, synthetic construct
  source 1..710: mol_type = other DNA
ttaaaacaacccctgggttgttcccactccaagggcccacgtggctggtgtactcctgggtattcggtacctttgtacgcctgttttatctcccttcccaatgtaatttagaagcttttaaatcaaggctcaataggtggggcgcaaaccagcgctctcatgagcaagcactcctgtttccccggtgtggttgtataaactgttcccacggttgaaaacaacctatccgttatccgctatagtacttcgagaaacctagtatcacctttggattgttgacgcgttgcgctcagcacactaacccgtgtgtagcttgggtcgatgagtctggacataccccactggcgacagtggtccaggctgcgttggcggcctactcatggtgaaaaccatgagacgctagacatgaacaaggtgtgaagagtctattgagctactatagagtcctccggcccctgaatgcggctaatcctaaccatggagcaagtgctcacaggccagtgagttgcttgtcgtaatgcgcaagtccgtggcggaaccgactactttgggtgtccgtgtttcactttttacttttatgactgcttatggtgacaatttaatattgttaccattcagctagtcgaaataatcgcataaaactttaaatcctatctaacaattcacatttggatagtttcattttgaggactttaaacctacttacaaag

SEQ ID NO: 20784 - DNA, 710 bp, synthetic construct
  source 1..710: mol_type = other DNA
ttaaaacaccccctgggttgttcccactccaagggcccacgtggcggctagtactctggttattcggtacccttgtacgcctgttttatctccctccccaatgtaaattagaagctttcaaatcaaagctcaataggtggagcgcaaaccagcgcttccgtgagcaagtactcctgtttccccggtgcggttgtatagactgttcccacggttgaaaacaacctatccgttatccgttatagtacttcgagaaacctagtatcacctttggattgttgatgcgttgcgctcaacacactaacccgtgtgtagcttgggtcgatgagtctggacataccccactggtgacagtggtccaggctgcgttggcggcctactcatggtgaaaaccatgagacgctagacatgaacaaggtgtgaagagtctattgagctactatagagtcctccggcccctgaatgcggctaatcttaaccatggagcaagtgctcacaaaccagtgagttgcttgtcgtaatgcgcaagtccgtggcggaaccgactactttgggtgtccgtgtttcactttttacttttatgactgcttatggtgacaatctaatattgtttccattcagctagtcgaaataaccgcataaaactttaaatcctatctaacaattcacatttggatagtttcattttgaggactttaaacttacttacaaag

SEQ ID NO: 20785 - DNA, 710 bp, synthetic construct
  source 1..710: mol_type = other DNA
tttaaacgcttctaaggttgtttacattgggggaggggagataaaaaccgactcttggggtattcggtacctttgtacgcctgttttatctccctccccaatgtaacttagaagctttcaaatcaaagctcaataggtggagcgcaaaccagcgcttccgtgagcaagtactcctgtttccccggtgcggttgtatagactgttcccacggttgaaaacaacctatccgttatccgctatagtacttcgagaaacctagtatcacctttggattgttgatgcgttgcgctcaacacactaacccgtgtgtagcttgggtcgatgagtctggacataccccactggtgacagtggtccaggctgcgttggcggcctactcatggtgaaaaccatgagacgctagacatgaacaaggtgtgaagagtctattgagctactatagagtcctccggcccctgaatgcggctaatcttaaccatggagcaagtgctcacaaaccagtgagttgcttgtcgtaatgcgcaagtccgtggcggaaccgactactttgggtgtccgtgtttcactttttacttttatgactgcttatggtgacaatttaatattgttaccattcagctagtcgaaataatcgcataaaactttaaatcctatctaacaattcacatttggatagattcattttgaggactttaaacctacttacaaag

SEQ ID NO: 20786 - DNA, 710 bp, synthetic construct
  source 1..710: mol_type = other DNA
tttaaacgcttctaaggttgtttacattgggggaggggagataaaaaccatattctggggtcttcggtacctttgtacgcctgttttatctccctccccaatgtaacttagaagctttcaaatcaaagctcaataggtggagcgcaaaccagcgcttccgtgagcaagtactcctgtttccccggtgcggttgtatagactgttcccacggttgaaaacaacctatccgttatccgctatagtacttcgagaaacctagtatcacctttggattgttgatgcgttgcgctcaacacactaacccgtgtgtagcttgggtcgatgagtctggacataccccactggtgacagtggtccaggctgcgttggcggcctactcatggtgaaaaccatgagacgctagacatgaacaaggtgtgaagagtctattgagctactatagagtcctccggcccctgaatgcggctaatcttaaccatggagcaagtgctcacaaaccagtgagttgcttgtcgtaatgcgcaagtccgtggcggaaccgactactttgggtgtccgtgtttcactttttacttttatgactgcttatggtgacaatttaatattgttaccattcagctagtcgaaataatcgcatgaaactttaaatcctatctaacaattcacatttggatagattcattttgaggactttaaacctacttacaaag

SEQ ID NO: 20787 - DNA, 710 bp, synthetic construct
  source 1..710: mol_type = other DNA
ttaaaacaacccctgggttgttcccactccaagggcccacgtggcggctgtactctgggtacttcggtacctttgtacgcctgttttatctcccttcccaatgtaatttagaagctcttaaatcaaggctcaataggtggggcgcaaaccagcgctctcatgagcaagcactcctgtctccccggtgtggttgtataaactgttcccacggttgaaaacaacctatccgttatccgctatagtacttcgagaaacctagtatcacctttggattgttgacgcgttgcgctcagcacactaacccgtgtgtagcttgggtcgatgagtctggacacaccccactggcgacagtggtccaggctgcgttggcggcctactcatggtgaaaaccatgagacgctagacatgaacaaggtgtgaagagtctattgagctactatagagtcctccggcccctgaatgcggctaatcctaaccatggagcaagtgctcacaggccagtgagttgcttgtcgtaatgcgcaagtccgtggcggaaccgactactttgggtgtccgtgtttcactttttacttttatgactgcttatggtgacaatttaatattgttaccattcagctagtcgaaataatcgcataaaactttaaatcctatctaacaattcacatttggatagtttcattttgaggactttaaacctacttacaaag

SEQ ID NO: 20788 - DNA, 710 bp, synthetic construct
  source 1..710: mol_type = other DNA
tttaaacgcttctaaagttgttcccattgggggaggggagattaaaaccgactcttggggtcttcggtacctttgtacgcctgttttatctccctccccaatgtaacttagaagctttcaaatcaaagctcaataggtggagcgcaaaccagcgcttccgtgagcaagtactcctgtttccccggtgcggttgtatagactgttcccacggttgaaaacaacctatccgttatccgctgtagtacttcgagaaacctagtatcacctttggattgttgatgcgttgcgctcaacacactaacccgtgtgtagcttgggtcgatgagtctggacataccccactggtgacagtggtccaggctgcgttggcggcctactcatggtgaaaaccatgagacgctagacatgaacaaggtgtgaagagtctattgagctactatagagtcctccggcccctgaatgcggctaatcttaaccatggagcaagtgctcacaaaccagtgagttgcttgtcgtaatgcgcaagtccgtggcggaaccgactactttgggtgtccgtgtttcactttttatttttatgactgcttatggtgacaatttaatattgttaccattcagctagtcgaaataatcgcataaaactttaaatcctatctaacaattcacatttggatagtttcattttgaggactttaaacttacttacaaag

SEQ ID NO: 20789 - DNA, 720 bp, synthetic construct
  source 1..720: mol_type = other DNA
cacccacggggcccactgggcgctagcacactggtatcacggtacctttgtgcgcctgttttatccacccgtcccccccacgtaacttagaagcaaaacctacccggtcaatagataactcagtgagccaactgagcagtgaccaagcacttctgttaccccggaccaagtatcaatagactgctagcgcggttgaaggagaaaacgtccgttacccggccaattacttcgagaaacctagtaccaccatggaggttgcgcagtgtttcgctccgcacaaccccagtgtagatcaggccgatgagccaccgcactccccacgggcgaccgtggcggtggctgcgctggcggcctgcccatggggcaacccatgggacgcttcaatactgacatggtgcgaagagtctattgagctaattggtagtcctccggcccctgaatgcggctaatcctaactgcggagcagatacccacatgccagtgggcagtctgtcgtaacgggcaactctgcagcggaaccgactactttgggtgtccgtgtttccttttattcttacattggctgcttatggtgacaattgaaagattgttaccatatagctattggattggccatccggtgacaaatagagcgatcatttatttgtttgttggttttatcccattgaacctcaaagttttgaacactcttaaccttattatatcacttaacacaacaaa

SEQ ID NO: 20790 - DNA, 709 bp, synthetic construct
  source 1..709: mol_type = other DNA
taaaacagccttggggttgttcccaccccaagggcccacgtggcggctagtactctggtatttcggtacctttgtacgcctgttttatatccctccccaatgtaatttagaagctttcaaatcaaagctcaataggtggagcgcaagccagcgcttccgtgagcaagcacttctgtttccccggtgcggttgtatagactgttcccacggttgaaaacgacctatccgttatccgctatagtacttcgagaaacctagtatcacctttggattgttgatgcgttgcgctcaacacactaacccgtgtgtagcttgggtcgatgagtctggacgtaccccactggtgacagtggtccaggctgcgttggcggcctactcatggtgaaaaccatgagacgctagacatgaacaaggtgtgaagagtctattgagctactatagagtcctccggcccctgaatgcggctaatcttaaccatggagcaagtgctcacaaaccagtgagttgcttgtcgtaatgcgcaagtccgtggcggaaccgactactttgggtgtccgtgtttcactttttacttttatgactgcttatggtgacaatttaatattgttaccattcagctagtcgaaataatcacataaaactttaaatcctatctaataattcacatttggatagtttcatttcgaggactttaaacctacttacaaag

SEQ ID NO: 20791 - DNA, 710 bp, synthetic construct
  source 1..710: mol_type = other DNA
ttaaaacagccttggggttgttcccaccccaagggcccacgtggcggctagtactctggtatctcggtacctttgtacgcctgttttatctcccctcccaatgtaacttagaagttttcaaaccagagctcaataggtggagcgcaaaccagcgttctcatgagcaagcactcctgtctccccggtgcggttgtataaactgttcccacggttgaaaacaacctatccgttaaccgctatagtacttcgagaaacctagtatcacctttggattgttgatgcgttgcgctcagcacactaacccgtgtgtagcttgggtcgatgagtctggacataccccactggcgacagtggtccaggctgcgttggcggcctactcatggtgaaaaccatgagacgctagacatgaacaaggtgtgaagagtctattgagctactatagagtcctccggcccctgaatgcggctaatcttaaccatggagcaagtgctcacaagccagtgagttgcttgtcgtaatgcgcaagtccgtggcggaaccgactactttgggtgtccgtgtttcactttttacttttatgactgcttatggtgacaatttaatattgttaccatttagcttgtcaaattaatcacataagatcctaaatcttatttatcaacttatattttgataacttcattttgaaaactctaagtttattcataaca

SEQ ID NO: 20792 - DNA, 664 bp, synthetic construct
  source 1..664: mol_type = other DNA
ctgttttatctcccctcccccccgtgtaatttagaagcataagcacaatgatcaatagacaacccagtgcaccaactgggccttgatcaagcacttctgttaccccgggccgactatcaataggctgctcacgtggctgaaggagaaaacgctcgttacccggccagttacttcgagaagcctagtaccaccatgaacgttgcgcagtgtttcgctccgcacaaccccagtgtagatcaggtcgatgagtcaccgcatcccccacgggcgaccgtggcggtggctgcgttggcggcctgcccatggggcaacccatgggacgctacaatactgacatggtgtgaagagtctattgagctaactggtagtcctccggcccctgaatgcggctaatcccaactgcggagcacgtgcttccaatccaggaggtagcgtgtcgtaacgggcaactctgcagcggaaccgactactttgggtgtccgtgtttccttttatctctttattggctgcttatggtgacaattgaaagattgttgccatatagctattggattggccatccggtatctaacagagcaatcatatacctgtttgttggatttgttccacttaacaaaacagagttctgtactttgtgttatattattaggttgaacacatcaaa

SEQ ID NO: 20793 - DNA, 787 bp, synthetic construct
  source 1..787: mol_type = other DNA
cacccacagggcccaccgggcgctagtacactggtatgccttacctcggtatttcggtaccattgtacgccagtacctttgtacgcctgttttatatcccctccccaaatgtaaccttagaagtttaagcaaacaaagaccaataggagtccaacatccagttggattgcggtcaagcacttctgtttccccggacctagtagtgataggctgtacccacggccgaagatgaacccgtccgttatccggccagctacttcgagaagcctagtaacatcaaagatctgtcttggcgtttcgctcagcgcgttccccccgcgtagatcgggctgatgggtctccgcataccccacgggcgaccgtggcggaggccgcgtggcggcccgcctatggcgaaagccataggacgccatttcagtgacagggtgtgaagagcctattgagctagttggtagtcctccggcccctgaatgcggctaatcctaaccactgagcgtccaccaacaaaccagctggcagggcgtcgtaacgggtaactctgtggcggaaccgactactttgggtgtccgtgtttccttttgatcctatattggctgcttatggtgacaacgataagttgttatcataaagcttttgggttggccacctggaaaaagttatcagtgtttgatattgttcggctttcacgcctaccaataaaacaagctctatattatttagtttccttttacccaaaggaggaaatttctgaattccatcttcaattgctcttggcattatcagcaag

SEQ ID NO: 20794 - DNA, 722 bp, synthetic construct
  source 1..722: mol_type = other DNA
ctcccacccatagggcccactgggcgcttgcacactggtatcacggtacctttgtgcgcctgttttatccacccccccctgcgtaatttagaagtggaacttacacggtcaataggcaactcggtaagccaaccgggcaatgaccaagcactactgttaccccggaccaagtatcaataaactgctagcgcggtcgaaggagaaaacgtccgttacccggccaattacttcgagaaacctagtaccaccatggatgttgcgcagtgtttcgctccgcacaaccccagtgtagatcaggccgatgagccaccgcattccccacgggcgaccgtggcggtggctgcgctggcggcctgcccatggggcaacccatgggacgcttcaatactgacatggtgcgaagagtctattgagctaattggtagtcctccggcccctgaatgcggctaatcctaactgcggagcagatacccacatgccagtgggcggtctgtcgtaacgggcaactctgcagcggaaccgactactttgggtgtccgtgtttcctctttttccttgtattggctgcatatggtgacaactgaaagattgttaccatatagctattggattggccatccggtgacaaacagagcaattatttatttgttcgtcggttttattccattgaatctcaaagttttgaacactctaaactttattatttcactcaacacaacaaa

SEQ ID NO: 20795 - DNA, 662 bp, synthetic construct
  source 1..662: mol_type = other DNA
ctgttttatacacccttaccctacgtaatatagaagcaaaacaacaaggtcaatagagagcccagtgagccaactgggtcgagaccaagcacttctgtttccccggaccgagtatcaataggctgcttacgcggctgaaggagaaaacgttcgttacccggctaactacttcgaaaaacctagtaacgccatggaagttgcgaaccgtttcgctcggcacttccccagtgtagatcaggtcgatgagtcaccgcattccccacgggcgaccgtggcggtggctgcgttggcggcctgcctatggggcaacccataggacgcttcaatatggacatggtgtgaagagtctattgagctagttagtagtcctccggcccctgaatgcggctaatcctaactgcggagcacatgcccccaacccaggaggtggtgtgtcgtaatgggtaactctgcagcggaaccgactactttgggtgtccgtgtttccttttatcccaatgttggctgcttatggtgacaattgaaagattgttaccatatagctattggattggccatccggtgactaacagagcaattgtatacctattcattggttacgttccattaaatctcaaggaattaacgactctcaattacattttgctcttgaattctgcaaa

SEQ ID NO: 20796 - DNA, 652 bp, synthetic construct; identical to SEQ ID NO: 789
  source 1..652: mol_type = other DNA

SEQ ID NO: 20797 - DNA, 709 bp, synthetic construct
  source 1..709: mol_type = other DNA
ttaaaacagccttggggttgttcccactccaagggcccacgtggcggctagtactctggtactttggtacctttgtacgcctgttttatctcccttcccaatgtaatttagaagctcttaaaccaaggctcaataggtggggcgcaaaccagcgctctcatgagcaagcactcctgtctccccggtgtggttgtataaactgttcccacggttgaaaacaacctatccgttatccgctatagtacttcgagaaacctagtatcacctttggattgttgacgcgttgcgctcagcacactaacccgtgtgtagcttgggtcgatgagtctggacataccccactggcgacagtggtccaggctgcgttggcggcctactcatggtgaaaaccatgagacgctagacatgaacaaggtgtgaagagtctattgagctactatagagtcctccggcccctgaatgcggctaatcctaaccatggagcaagtgctcacaagccagtgagttgcttgtcgtaatgcgcaagtccgtggcggaaccgactactttgggtgtccgtgtttcactttttacttttatgactgcttatggtgacaatttgatattgttaccatttagcttgtcaaatcaattgcaaaagatcctaaatcttatttatcaacttgcattttgataactctattcgaaaattctaaactcatttttaata

SEQ ID NO: 20798 - DNA, 710 bp, synthetic construct
  source 1..710: mol_type = other DNA
ttaaaacagctttggggttgttcccaccccaagggcccacgtggcggctagtactctggtatttcggtacctttgtacgcctgttttatctccctccccaatgtaacttagaagctttcaaatcaaagctcaataggtggagcgcaagccagcgcttccgtgagcaagcactcctgtctccccggtgcggttgtatagactgttcccacggttgaaaacaacctatccgttatccgctatagtacttcgagaaacctagtatcacctttggattgttgatgcgttgcgctcagcacactaacccgtgtgtagcttgggtcgatgagtctggacataccccactggtgacagtggtccaggctgcgttggcggcctactcatggtgaaaaccatgagacgctagacatgaacaaggtgtgaagagtctattgagctactatagagtcctccggcccctgaatgcggctaatcttaaccatggagcaagtgctcacaaaccagtgagttgcttgtcgtaatgcgcaagtccgtggcggaaccgactactttgggtgtccgtgtttcactttttacttttatgactgcttatggtgacaatttaatattgttaccatttagctagtcaaattaatcacataaaactttaaatcctatctaacaattcacatttggatagcttcattttgaggactttaaacctatttacaaag

SEQ ID NO: 20799 - DNA, 709 bp, synthetic construct
  source 1..709: mol_type = other DNA
taaaacagccttggggttgttcccactccaagggcccacgtggcggctagtactctggtactttggtacctttgtacgcctgttttatctcccttcccaatgtaatttagaagcttttaaatcaaggctcaataggtggggcgcaaaccagcgctctcatgagcaagcactcctgtctccccggtgtggttgtataaactgttcccacggttgaaaacaacctatccgttatccgctatagtacttcgagaaacctagtatcgcctttggattgttgacgcgttgcgctcagcacactaacccgtgtgtagcttgggtcgatgagtctggacataccccactggcgacagtggtccaggctgcgttggcggcctactcatggtgaaaaccatgagacgctagacatgaacaaggtgtgaagagtctattgagctactatagagtcctccggcccctgaatgcggctaatcctaaccatggagcaagtgctcacaggccagtgagttgcttgtcgtaatgcgcaagtccgtggcggaaccgactactttgggtgtccgtgtttcactttttacttttatgactgcttatggtgacaatttgatattgttaccatttagctggtcgaaataatcgcataaaactttaaatcctatctaacagttcacatttggatagttttattttaaggactttaaacctacctagaaag

SEQ ID NO: 20800 - DNA, 662 bp, synthetic construct
  source 1..662: mol_type = other DNA
ctgttttatatacccttacccaacgtaatatagaagcaaaacaacaaggtcaatagagagcccagtgagccaactgggtcgagaccaagcacttctgtttccccggaccgagtatcaataggctgcttacgcggctgaaggagaaaacgttcgttacccggctaactacttcgaaaaacctagtaacgccatggaagttgcgaaccgtttcgctcggcacttccccagtgtagatcaggtcgatgagtcaccgcattccccacgggcgaccgtggcggtggctgcgttggcggcctgcctatggggcaacccataggacgcttcaatatggacatggtgtgaagagtctattgagctagttagtagtcctccggcccctgaatgcggctaatcctaactgcggagcacatgcccccaacccaggaggtggtgtgtcgtaatgggtaactctgcagcggaaccgactactttgggtgtccgtgtttccttttatctcaatattggctgcttatggtgacaattgaaaggttgttaccatatagctattggattggccatccggtgactaacagagcaattgtatacctattcattggttacgttccattaaatctcaaggaattaacgactctcaattacattttgctcttgaattctgcaaa

SEQ ID NO: 20801 - DNA, 721 bp, synthetic construct
  source 1..721: mol_type = other DNA
tcccacccacagggcccactgggcgcttgcacactggtatcacggtacccttgtgcgcctgttttatccacccccccctgcgtaatttagaagtggaacttacacggtcaaaaggcaactcggtaagccaaccgggcaatgaccaagcactactgttaccccggaccaagtatcaataaactgctagcgcggttgaaggagaaaacgtccgttacccggccaattacctcgagaaacctagtaccaccatggatgttgcgcagtgtttcgctccgcacaaccccagtgtagatcaggccgatgagccaccgcataccccacgggcgaccgtggcggtggctgcgctggcggcctgcccatggggcaacccatgggacgcttcaatactgacatggtgtgaagagtctattgagctaattggtagtcctccggcccctgaatgcggctaatcctaactgcggagcagatacccacatgccagtgggcagtctgtcgtaacgggcaactctgcagcggaaccgactactttgggtgtccgtgtttcctttttaaccttatattggctgcatatggtgacaattgaaagattgttaccatatagctattggattggccatccggtgacgaacagagcaatcatttatttgtttgttggttttattccattggatctcaaagcttggaacactctaaattttattatttcactcaacacaacaaa

SEQ ID NO: 20802 - DNA, 769 bp, synthetic construct
  source 1..769: mol_type = other DNA
cgctagtacactggtacgccagtaccttggtattacggtaccattgtacgccagtacctttgtacgcctgttttatatccctttccccaaatgtaactttagaagtataaataaacaaagaccaataggggtccaacatccagttggattgcggtcaagcacttctgtctccccggacctagtagtgataggctgtacccacggccgaagatgaacccgtccgttatccggccagctacttcgagaagcctagtaacatcaaagatctgtcttggcgtttcgctcagcgcgttccccccgcgtagatcgggctgatgggtctccgcataccccacgggcgaccgtggcggaggccgcgtggcggcccgcctatggcgaaagccataggacgccatttcagtgacagggtgtgaagagcctattgagctagttggtagtcctccggcccctgaatgcggctaatcctaaccacggagcgttcaccagcaaaccagctgggagggcgtcgtaacgggtaactctgtggcggaaccgactactttgggtgtccgtgtttccttttgatcctatattggctgcttatggtgacaacgataagttgttatcataaagcttttgggttggccacctggaaaaggttatcagtgtttgatattgttcggctctcacgcctgccgataaaacaatccttatacttgctaattgcattttacccaattgagaacatctcagagtttcatttgaagcttttactaacattatcagcaag

SEQ ID NO: 20803 - DNA, 707 bp, synthetic construct
  source 1..707: mol_type = other DNA
aacagccttggggttgttcccactccaagggcccacgtggcggctagtactctggtacttcggtacctttgtacgcctgttttatctcccctcccaatgtaacttagaagttcttaaatcaatgctcaataggtggggcgcaaaccagcgctctcatgagcaagcactcctgtctccccggtgaggttgtataaactgttcccacggttgaaaacaacctatccgttatccgctatagtacttcgagaaacctagtaccacctttggattgttgacgcgttgcgctcagcacactaacccgtgtgtagcttgggtcgatgagtctggacatacctcactggcgacagtggtccaggctgcgttggcggcctactcatggtgaaagccatgagacgctagacatgaacaaggtgtgaagagtctattgagctactatagagtcctccggcccctgaatgcggctaatcctaaccatggagcaagtgctcacaggccagtgagttgcttgtcgtaatgcgcaagtccgtggcggaaccgactactttgggtgtccgtgtttcactttttacttttatgactgcttatggtgacaatttgatattgttaccatttagcttgtcaaatcaattgcaaaagatcctaaatctcatttatcaacttgcatcttgataactttaatttgaaaaattaatttgaaaattttaaca

SEQ ID NO: 20804 - DNA, 707 bp, synthetic construct
  source 1..707: mol_type = other DNA
aacagccttggggttgttcccactccaagggcccacgtggcggctagtactctggtacttcggtacctttgtacgcctgttttatctcccttcccaatgtaacttagaagttcttaaatcaatgctcaataggtggggcgcaaaccagcgctctcatgagcaagcactcctgtctccccggtgaggttgtataaactgttcccacggttgaaaacaacctatccgttatccgctatagtacttcgagaaacctagtaccacctttggattgttgacgcgttgcgctcagcacactaacccgtgtgtagcttgggtcgatgagtctggacatacctcactggcgacagtggtccaggctgcgttggcggcctactcatggtgaaagccatgagacgctagacatgaacaaggtgtgaagagtctattgagctactatagagtcctccggcccctgaatgcggctaatcctaaccatggagcaagtgctcacaggccagtgagttgcttgtcgtaatgcgcaagtccgtggcggaaccgactactttgggtgtccgtgtttcactttttacttttatgactgcttatggtgacaatttgatattgttaccatttagcttgtcaaatcaattgcaaaagatcctaaatcttatttatcaacttgcatcttgataactttaatttgaaaaattaatttgaaaattttaaca

SEQ ID NO: 20805 - DNA, 662 bp, synthetic construct
  source 1..662: mol_type = other DNA
ctgttttatacacccttaccctacgtaatatagaagcaaaacaacaaggtcaatagagagcccagtgagccaactgggtcgagaccaagcacttctgtttccccggaccgagtatcaataggctgcttacgcggctgaaggagaaaacgttcgttacccggctaactacttcgaaaaacctagtaacgccatggaagttgcgaaccgtttcgctcggcacttccccagtgtagatcaggtcgatgagtcaccgcattccccacgggcgaccgtggcggtggctgcgttggcggcctgcctatggggcaacccataggacgcttcaatacggacatggtgtgaagagtctattgagctagttagtagtcctccggcccctgaatgcggctaatcctaactgcggagcacatgcccccaacccaggaggtggtgtgtcgtaatgggtaactctgcagcggaaccgactactttgggtgtccgtgtttccttttatcccaatgttggctgcttatggtgacaattgaaaggttgttaccatatagctattggattggccatccggtgactaacagagcaattgtatacctattcattggttacgttccattaaatctcaaggaattagcgactctcaagtacattttgctcttgaattccgcaaa

SEQ ID NO: 20806 - DNA, 709 bp, synthetic construct
  source 1..709: mol_type = other DNA
ttaaaacagctttggggttgttcccaccccaagggcccacgtggcggctagtactctggtatttcggtacctttgtacgcctgttttatctcccttcccaatgtaacttagaagttttcaaatcgaagctcagtaggtggggcgcaaaccagcgctttcatgagcaagcacttctgtttccccggtgcggttgtatagactgtttccacggttgaaaacaacttatccgttatccgctatagtacttcgagaaacctagtatcacctttggattgttgatgcgttgcgctcagcacactaacccgtgtgtagcttgggctgatgagtctggacgtaccccactggtgacagtggtccaggctgcgttggcggcctactcatggtgaaaaccatgagacgctagacatgaacaaggtgtgaagagtctattgagctactatagagtcctccggcccctgaatgcggctaatcttaaccatggagcaagtgctcacaagccagtgagttgcttgtcgtaacgcgcaagtccgtggcggaaccgactactttgggtgtccgtgtttcactttttacctttatgactgcttatggtgacaatttaatattgttaccatttagcttgtcagattaatcgcgtgaaatcctaaatcttatttatcaatttgtatttggatagcttcatttgaaaattctaaatccattcataaag

SEQ ID NO: 20807 - DNA, 709 bp, synthetic construct
  source 1..709: mol_type = other DNA
ttaaaacagccttggggttgttcccaccccaagggcccacgtggcggctagtactctggtatttcggtacctttgtacgcctgttttatctcccttcccgatgtaacttagaagttttcaaatcaaagctcaataggtggagcgcaaaccagcgctttcatgagcaagcacttctgtttccccggtgcggttgtatagactgtttccacggttgaaaacaacttatccgttatccgctatagtacttcgagaaacctagtatcacctttggattgttgatgcgttgcgctcagcacactaacccgtgtgtagcttgggtcgatgagtctggacgtaccccactggtgacagtggtccaggctgcgttggcggcctactcatggtgaaaaccatgagacgctagacatgaacaaggtgtgaagagtctattgagctactatagagtcctccggcccctgaatgcggctaatcttaaccatggagcaagtgctcacaagccagtgagttgcttgtcgtaacgcgcaagtccgtggcggaaccgactactttgggtgtccgtgtttcactttttacctttatgactgcttatggtgacaatttaatattgttaccatttagctagtcggattaatcacgtgaaatcctaagtcttatttatcaatttgtatttggatagcttcatttgaaaattctaaactcattcataaag

SEQ ID NO: 20808 - DNA, 709 bp, synthetic construct
  source 1..709: mol_type = other DNA
ttaaaacagccttggggttgttcccaccccaagggcccacgtggcggctagtactctggtatttcggtacctttgtacgcctgttttatctcccttcccaatgtaacttagaagttttcaaatcgaagctcagtaggtggggcgcaaaccagcgctttcatgagcaagcacttctgtttccccggtgcggttgtatagactgtttccacggttgaaaacaacttatccgttatccgctatagtacttcgagaaacctagtatcacctttggattgttgatgcgttgcgctcagcacactaacccgtgtgtagcttgggctgatgagtctggacgtgccccactggtgacagtggtccaggctgcgttggcggcctactcatggtgaaaaccatgagacgctagacatgaacaaggtgtgaagagtctattgagctactatagagtcctccggcccctgaatgcggctaatcttaaccatggagcaagtgctcacaagccagtgagttgcttgtcgtaacgcgcaagtccgtggcggaaccgactactttgggtgtccgtgtttcactttttacctttatgactgcttatggtgacaatttaatattgttaccatttagcttgtcagattaatcgcgtgaaatcctaaatcttgttcaccaatttgcattcggatagcttcatttgaaaattctaaactcattcataaag

SEQ ID NO: 20809 - DNA, 709 bp, synthetic construct
  source 1..709: mol_type = other DNA
ttaaaacagccttggggttgttcccaccccaagggcccacgtggcggctagtactctggtatttcggtacctttgtacgcctgttttatctcccttcccaatgtaacttagaagttttcaaatcgaagctcagtaggtggagcgcaaaccagcgctttcatgagcaagcacttctgtttccccggtgcggttgtatagactgtttccacggttgaaaacaacttatccgttatccgctatagtacttcgagaaacctagtatcacctttggattgttgatgcgttgcgctcagcacactaacccgtgtgtagcttgggctgatgagtctggacgtaccccactggtgacagtggtccaggctgcgttggcggcctactcatggtgaaaaccatgagacgctagacatgaacaaggtgtgaagagtctattgagctactatagagtcctccggcccctgaatgcggctaatcttaaccatggagcaagtgctcacaagccagtgagttgcttgtcgtaacgcgcaagtccgtggcggaaccgactactttgggtgtccgtgtttcactttttacctttatgactgcttatggtgacaatttaatattgttaccatttagcttgtcagattaatcgcgtgaaatcctaaatcttgttcaccaatttgcattcggataacttcatttgaaaattctaaactcattcataaag

SEQ ID NO: 20810 - DNA, 703 bp, synthetic construct
  source 1..703: mol_type = other DNA
agtcttggggttgttcccaccccaagggcccacgtggcggctagtactctggtatttcggtacctttgtacgcctgttttatctccctccccaatgtaacttagaagctttcaaatcaaagctcaataggtggagcgcaagccagcgcttccgtgagcaagcactcctgtttccccggtgcggttgtatagactgttcccacggttgaaaacaacctatccgttatccgctatagtacttcgagaaacctagtatcacctttggattgttgatgcgttgccctcagcacactaacccgtgtgtagcttgggtcgatgagtctggacataccccactggtgacagtggtccaggctgcgttggcggcctactcatggtgaaaaccatgagacgctaaacatgaacaaggtgtgaagagtctattgagctactatagagtcctccggcccctgaatgcggctaatcttaaccatggagcaagtgctcacaaaccagtgagttgcttgtcgtaatgcgcaagtccgtggcggaaccgactactttgggtgtccgtgtttcactttttacttttatgactgcttatggtgacaatttaatattgttaccatttagctagtcatattaatcacataaaactttaaattctatctaataattcacatttggatagtttcattttgaggactttaaacctatttacaaaa

SEQ ID NO: 20811 - DNA, 703 bp, synthetic construct
  source 1..703: mol_type = other DNA
ggccttggggttgttcccaccccaagggcccacgtggcggctagtactctggtatttcggtacctttgtacgcctgttttatatccctccccaatgtaatttagaagctttcaaatcaaagctcaataggtggagcgcaagccagcgcttctgtgagcaagcacttctgtttccccggtgcggttgtatagactgttcccacggttgaaaacgacctatccgttatccgctatagtacttcgagaaacctagtatcacctttggattgttgatgcgttgcgctcaacacactaacccgtgtgtagcttgggtcgatgagtctggacataccccactggtgacagtggtccaggctgcgttggcggcctactcatggtgaaaaccatgagacgctagacatgaacaaggtgtgaagagtctattgagctactatagagtcctccggcccctgaatgcggctaatcttaaccatggagcaagtgctcacaaaccagtgagttgcttgtcgtaatgcgcaagtccgtggcggaaccgactactttgggtgtccgtgtttcactttttacttttatgactgcttatggtgacaatttaatattgttaccattcagctagtcgaaataatcacataaaactttaaatcctatctaataattcacatttggatagtttcattttgaggactttaaacctacttacaaag

SEQ ID NO: 20812 - DNA, 703 bp, synthetic construct
  source 1..703: mol_type = other DNA
ggtcttggggttgttcccaccccaagggcccacgtggcggctagtactctggtatttcggtacctttgtacgcctgttttatatccctccccaatgtaatttagaagctttcaaatcaaagctcaataggtggagcgcaagccagcgcttctgtgagcaagcacttctgtttccccggtgcggttgtatagactgttcccacggttgaaaacgacctatccgttatccgctatagtacttcgagaaacctagtatcacctttggattgttgatgcgttgcgctcaacacactaacccgtgtgtagcttgggtcgatgagtctggacataccccactggtgacagtggtccaggctgcgttggcggcctactcatggtgaaaaccatgagacgctagacatgaacaaggtgtgaagagtctattgagctactatagagtcctccggcccctgaatgcggctaatcttaaccatggagcaagtgctcacaaaccagtgagttgcttgtcgtaatgcgcaagtccgtggcggaaccgactactttgggtgtccgtgtttcactttttacttttatgactgcttatggtgacaatttaatattgttaccattcagctagtcgaaataatcacataaaactttaaatcctatctaataattcacatttggatagtttcattttgaggactttaaacctacttacaaag

SEQ ID NO: 20813 - DNA, 709 bp, synthetic construct
  source 1..709: mol_type = other DNA
ttaaaacagccttggggttgttcccaccccaagggcccacgtggcggctagtactctggtatttcggtacctttgtacgcctgttttatctcccttcccaatgtaacttagaagttttcaaatcgaagctcaataggtggagcgcaaaccagcgctttcatgagcaagcacttctgtctccccggtgcggttgtatagactgtttccacggttgaaaacaacttatccgttatccgctatagtacttcgagaaacctagtatcacctttggattgttgatgcgttgcgctcaacacactaacccgtgtgtagcttgggtcgatgagtctggacgtaccccactggtgacagtggtccaggctgcgttggcggcctactcatggtgaaaaccatgagacgctagacatgaacaaggtgtgaagagtctattgagctactatagagtcctccggcccctgaatgcggctaatcttaaccatggagcaagtgctcacaagccagtgagttgcttgtcgtaacgcgcaagtccgtggcggaaccgactactttgggtgtccgtgtttcactttttacttttatgactgcttatggtgacaatttaatattgttaccatttagcttgtcagattaatcacgtgaaatcctaaatcttatttatcaatttgtatttggatagcttcatttgaaaattctaaactcatttataaag

SEQ ID NO: 20814 - DNA, 709 bp, synthetic construct
  source 1..709: mol_type = other DNA
ttaaaacagccttggggttgttcccaccccaagggcccacgtggcggctagtactctggtatttcggtacctttgtacgcctgttttatctcccttccctacgtaacttagaagttttcagatcgaagctcaataggcggagcgcaaaccagcgctttcatgagcaagcacctctgtctccccggtgcggttgtatagactgtttccacggttgaaaacaacttatccgttatccgctatagtacttcgagaaacctagtatcacctttggattgttgatgcgttgcgctcagcacactaacccgtgtgtagcttgggtcgatgagtctggacgtaccccactggtgacagtggtccaggctgcgttggcggcctactcatggtgaaaaccatgagacgctagacatgaacaaggtgtgaagagtctattgagctactatagagtcctccggcccctgaatgcggctaatcttaaccatggagcaagtgctcacaagccagtgagttgcttgtcgtaacgcgcaagtccgtggcggaaccgactactttgggtgtccgtgtttcactttttacttttatgactgcttatggtgacaatttaatattgttaccatttagcttgtcagattaatcacgtgaaatcctaaatcttatttatcaatttgtatttggatagcttcatttgaaaattctaaactcattcataaag

SEQ ID NO: 20815 - DNA, 709 bp, synthetic construct
  source 1..709: mol_type = other DNA
ttaaaacagccttggggttgttcccaccccaagggcccacgtggcggctagtactctggtatttcggtacctttgtacgcctgttttatctcccttcccaatgtaacttagaagttctcaaatcgaagctcaataggtggagcgcaaaccagcgctttcatgagcaagcacttctgtctccccggtgcggttgtatagactgtttccacggttgaaaacaacttatccgttatccgctatagtacttcgagaaacctagtatcacctttggattgttgatgcgttgcgctcaacacactaacccgtgtgtagcttgggtcgatgagtctggacgtaccccactggtgacagtggtccaggctgcgttggcggcctactcatggtgaaaaccatgagacgctagacatgaacaaggtgtgaagagtctattgagctactatagagtcctccggcccctgaatgcggctaatcttaaccatggagcaagtgctcacaagccagtgagttgcttgtcgtaacgcgcaagtccgtggcggaaccgactactttgggtgtccgtgtttcactttttacttttatgactgcttatggtgacaatttaatattgttaccatttagcttgtcagattaatcacgtgaaatcctaaatcttatttatcaatttgtatttggatagcttcatttgaaaattctaaactcatttataaag

SEQ ID NO: 20816 - DNA, 709 bp, synthetic construct
  source 1..709: mol_type = other DNA
ttaaaacagccttggggttgttcccactccaagggcccacgtggcggctagtactctggtatttcgatacctttgtacgcctgttttatctcccttcccaatgtaacttagaagttttcagatcaaagctcaataggtggagcgcaaaccagcgctttcatgagcaagcacttctgtctccccggtgcggttgtatagactgtttccacggttgaaaacaacttatccgttatccgctatagtacttcgagaaacctagtatcacctttggattgttgatgcgttgcgctcagcacactaacccgtgtgtagcttgggtcgatgagtctggacgtaccccactggtgacagtggtccaggctgcgttggcggcctactcatggtgaaaaccatgagacgctagacatgaacaaggtgtgaagagtctattgagctactatagagtcctccggcccctgaatgcggctaatcttaaccatggagcaagtgctcacaagccagtgagttgcttgtcgtaacgcgcaagtccgtggcggaaccgactactttgggtgtccgtgtttcactttttacttttatgactgcttatggtgacaatttaatattgttaccatttagcttgtcagattaatcacgtgaagtcctaaatcttatttatcaatttgtatttggatagcttcatttgaaagttctaaactcattcataaag

SEQ ID NO: 20817 - DNA, 709 bp, synthetic construct
  source 1..709: mol_type = other DNA
ttaaaacagccttggggttgttcccaccccaagggcccacgtggcggctagtactctggtatttcggtacctttgtacgcctgttttatctcccttcccaatgtaacttagaagttttcaaatcgaagctcagtaggtggggcgcaaaccagcgctttcatgagcaagcacttctgtttccccggtgcggttgtatagactgtttccacggttgaaaacaacttatccgttatccgctatagtacttcgagaaacctagtatcacctttggattgttgatgcgttgcgctcagcacactaacccgtgtgtagcttgggctgatgagtctggacgtaccccactggtgacagtggtccaggctgcgttggcggcctactcatggtgaaaaccatgagacgctagacatgaacaaggtgtgaagagtctattgagctactatagagtcctccggcccctgaatgcggctaatcttaaccatggagcaagtgctcacaagccagtgagttgcttgtcgtaacgcgcaagtccgtggcggaaccgactactttgggtgtccgtgtttcactttttacctttatgactgcttatggtgacaatttaatattgttaccatttagcttgtcagattaatcgcgtaaaatcctaaatcttgtttatcaatttgtacttggatagcttcatttgaaaattctaaactcattcataaag

SEQ ID NO: 20818 - DNA, 709 bp, synthetic construct
  source 1..709: mol_type = other DNA
ttaaaacagccttggggttgttcccaccccaagggcccacgtggcggctagtactctggtatttcggtacctttgtacgcctgttttatctcccttcccaatgtaacttagaagttttcaaatcaaagctcaataggtggagcgcaaaccagcgctttcatgagcaagcactcctgtttccccggtgcggttgtatagactgttcccacggttgaaaacaatctatccgttatccgctatagtacttcgagaaacctagtatcacctttggattgttgatgcgttgcgctcagcacactaacccgtgtgtagcttgggtcgatgagtctggacataccccactggtgacagtggtccaggctgcgttggcggcctactcatggtgaaaaccatgagacgctagacatgaacaaggtgtgaagagtcaattgagctactatagagtcctccggcccctgaatgcggctaatcttaaccatggagcaagtgctcacaagccagtgagttgcttgtcgtaatgcgcaagtccgtggcggaaccgactactttgggtgtccgtgtttcactttttacttttgtgactgcttatggtgacaatttgatattgttaccatttagcttgtcagattaatcacataaaatcctaaatcttatttatcaacttgcatttggatagcttcatttgaaaattctgaacttattcataaag

SEQ ID NO: 20819 - DNA, 709 bp, synthetic construct
  source 1..709: mol_type = other DNA
ttaaaacagccttggggttgttcccaccccaagggcccacgtggcggctagtactctggtatttcggtacctttgtacgcctgttttatctcccttcccaatgtaacttagaagttttcaaatcaaagctcaataggtggagcgcaaaccagcgctttcatgagcaagcactcctgtctccccggtgcggttgtatagactgttcccacggttgaaaacaatctatccgttatccgctatagtacttcgagaaacctagtatcacctttggattgttgacgcgttgcgctcagcacactaacccgtgtgtagcttgggtcgatgagtctggacataccccactggtgacagtggtccaggctgcgttggcggcctactcatggtgaaaaccatgagacgctagacatgaacaaggtgtgaagagtctattgagctactatagagtcctccggcccctgaatgcggctaatcttaaccatggagcaagtgctcacaatccagtgagttgcttgtcgtaacgcgcaagtccgtggcggaaccgactactttgggtgtccgtgtttcactttttacttttatgactgcttatggtgacaatttgatattgttaccatttagcttgtcagattaatcacataaaaacctaaatcttatttatcaacttgcatttggatagcttcatttgaaaattctaaacttattcataaag

SEQ ID NO: 20820 - DNA, 709 bp, synthetic construct
  source 1..709: mol_type = other DNA
ttaaaacagccttggggttgttcccaccccaagggcccacgtggcggctagtactctggtatttcggtacctttgtacgcctgttttatctcccttcccaatgtaacttagaagttttcaaatcgaagctcaataggtggagcgcaaaccagcgctttcatgagcaagcacttctgtctccccggtgcggttgtatagactgtttccacggttgaaaacaacttatccgtaatccgctatagtacttcgagaaacctagtatcacctttggattgttgatgcgttgcgctcaacacactaacccgtgtgtagcttgggtcgatgagtctggacgtaccccactggtgacagtggtccaggctgcgttggcggcctactcatggtgaaaaccatgagacgctagacatgaacaaggtgtgaagagtctattgagctactatagagtcctccggcccctgaatgcggctaatcttaaccatggagcaagtgctcacaagccagtgagttgcttgtcgtaacgcgcaagtccgtggcggaaccgactactttgggtgtccgtgtttcactttttacttttatgactgcttatggtgacaatttaatattgttaccatttagcttgtcagattaatcacgtgaaatcctaaatcttatttatcaatttgtatttggatagcttcatttgaaaattctaaactcatttataaag

SEQ ID NO: 20821 - DNA, 709 bp, synthetic construct
  source 1..709: mol_type = other DNA
ttaaaacagccttggggttgttcccaccccaagggcccacgtggcggctagtactctggtatttcggtacctttgtacgcctgttttatctcccttcccaatgtaacttagaagttttcaaatcgaagctcagtaggtggggcgcaaaccagcgctttcatgagcaagcacttctgtttccccggtgcggttgtatagactgtttccacggttgaaaacaactcatccgttatccgctatagtacttcgagaaacctagtatcacctttggattgttgatgcgttgcgctcagcacactaacccgtgtgtagcttgggctgatgagtctggacgtaccccactggtgacagtggtccaggctgcgttggcggcctactcatggtgaaaaccatgagacgctagacatgaacaaggtgtgaagagtctattgagctactatagagtcctccggcccctgaatgcggctaatcttaaccatggagcaagtgctcacaagccagtgagttgcttgtcgtaacgcgcaagtccgtggcggaaccgactactttgggtgtccgtgtttcactttttacctttatgactgcttatggtgacaatttaatattgttaccatttagcttgtcagattaatcgcgtgaaatcctaaatcttgtttatcaatttgtatttggatagcttcatttgaaaattctaaactcattcataaag

SEQ ID NO: 20822 - DNA, 709 bp, synthetic construct
  source 1..709: mol_type = other DNA
ttaaaacagccttggggttgttcccaccccaagggcccacgtggcggctagtactctggtatttcggtacctttgtacgcctgttttatctcccttcccaatgtaacttagaagttttcaaatcgaagctcagtaggtggggcgcaaaccagcgctttcatgagcaagcacttctgtttccccggtgcggttgtatagactgtttccacggttgaaaacaacttatccgttatccgctatagtacttcgagaaacctagtatcacctttggattgttgatgcgttgcgctcagcacactaacccgtgtgtagcttgggctgatgagtctggacgtaccccactggtgacagtggtccaggctgcgttggcggcctactcatggtgaaaaccatgagacgctagacatgaacaaggtgtgaagagtctattgagctactatagagtcctccggcccctgaatgcggctaatcttaaccatggagcaagtgctcacaagccagtgagttgcttgtcgtaacgcgcaagtccgtggcggaaccgactactttgggtgtccgtgtttcactttttacctttatgactgcttatggtgacaatttaatattgttaccatttagcttgtcagattaatcgcgtgaaatcctaaatcttgttcaccaatttgtattcggatagcttcatttgaaaattctaaactcattcataaag

SEQ ID NO: 20823 - DNA, 709 bp, synthetic construct
  source 1..709: mol_type = other DNA
ttaaaacagccttggggttgttcccaccccaagggcccacgtggcggctagtactctggtatttcggtacctttgtacgcctgttttatctcccttcccaatgtaacttagaagttttcaaatcaaagctcaataggtggagcgcaaaccagcgctttcatgagcaagcactcctgtttccccggtgcggttgtatagactgttcccacggttgaaaacaatctatccgttatccgctatagtacttcgagaaacctagtatcacctttggattgttgatgcgttgcgctcagcacactaacccgtgtgtagcttgggtcgatgagtctggacataccccactggtgacagtggtccaggctgcgttggcggcctactcatggtgaaaaccatgagacgctagacatgaacaaggtgtgaagagtctattgagctactatagagtcctccggcccctgaatgcggctaatcttaaccatggagcaagtgctcacaagccagtgagttgcttgtcgtaatgcgcaagtccgtggcggaaccgactactttgggtgtccgtgtttcactttttacttttatgactgcttatggtgacaatttgatattgttaccatttagcttgtcagattaattacataaaatcctaaatcttatttatcaacttgcatttggatagcttcatttgaaaattctaaacttattcataaag

SEQ ID NO: 20824 - DNA, 709 bp, synthetic construct
  source 1..709: mol_type = other DNA
ttaaaacagccttggggttgttcccaccccaagggcccacgtggcggctagtactctggtattacggtacctttgtacgcctgttttatctcccttcccaatgtaacttagaagttttcaaatcaaagctcaataggtggagcgcaaaccagcgctttcatgagcaagtacttctgtttccccggtgcggttgtatagactgtttccacggttgaaaacaacttatccgttatccgctatagtacttcgagaaacctagtatcacctttggattgttgatgcgttgcgctcagcacactaacccgtgtgtagcttgggtcgatgagtctggacgtaccccactggtgacagtggtccaggctgcgttggcggcctactcatggtgaaaaccatgagacgctagacatgaacaaggtgtgaagagtctattgagctactatagagtcctccggcccctgaatgcggctaatcttaaccatggagcaagtgctcacaagccagtgagttgcttgtcgtaacgcgcaagtccgtggcggaaccgactactttgggtgtccgtgtttcactttttacctttatgactgcttatggtgacaatttaatattgttaccatttagcttgtcagattaatcacgtgaaatcctgaatcttatttatcaatttgtatttggatagcttcatttgaaaattctaaactcattcataaag

SEQ ID NO: 20825 - DNA, 709 bp, synthetic construct
  source 1..709: mol_type = other DNA
ttaaaacagccttggggttgttcccaccccaagggcccacgtggcggctagtactctggtatttcggtacctttgtacgcctgttttatctcccttcccaatgtaacttagaagttttcaaatcaaagctcaataggtggagcgcaatccagcgctttcatgagcaagcacttctgtttccccggtgcggttgtatagactgtttccacggttgaaaacaacttatccgttatccgctatagtacttcgagaaacctagtatcacctttggattgttgatgcgttgcgctcagcacactaacccgtgtgtagcttgggtcgatgagtctggacgtaccccactggtgacagtggtccaggctgcgttggcggcctactcatggtgaaaaccatgagacgctagacatgaacaaggtgtgaagagtctattgagctactatagagtcctccggcccctgaatgcggctaatcttaaccatggagcaagtgctcacaagccagtgagttgcttgtcgtaacgcgcaagtccgtggcggaaccgactactttgggtgtccgtgtttcactttttacctttatgactgcttatggtgacaatttaatattgttaccatttagctagtcggattaatcacgtgaaatcctaagtctcatttatcaatttgtatttggatagtttcatttgaaaattctaaactcattcataaag

SEQ ID NO: 20826 - DNA, 709 bp, synthetic construct
  source 1..709: mol_type = other DNA
ttaaaacagccttggggttgttcccaccccaagggcccacgtggcggctagtactctggtatttcggtacctttgtacgcctgttttatctcccttcccaatgtaacttagaagttttcaaatcgaagctcagtaggtggggcgcaaaccagcgctttcatgagcaagcacttctgtttccccggtgcggttgtatagactgtttccacggttgaaagcaacttatccgttatccgctatagtacttcgagaaacctagtatcacctttggattgttgatgcgttgcgctcagcacactaacccgtgtgtagcttgggctgatgagtctggacgtaccccactggtgacagtggtccaggctgcgttggtggcctactcatggtgaaaaccatgagacgctagacatgaacaaggtgtgaagagtctattgagctactatagagtcctccggcccctgaatgcggctaatcttaaccatggagcaagtgctcacaagccagtgagttgcttgtcgtaacgcgcaagtccgtggcggaaccgactactttgggtgtccgtgtttcactttttacctttatgactgcttatggtgacaatttaatattgttaccatttagcttgtcagattaatcgcgtgaaatcctaaatcttatttatcaatttgtatttggatagcttcatttgaagattctaaacccattcataaag

SEQ ID NO: 20827 - DNA, 709 bp, synthetic construct
  source 1..709: mol_type = other DNA
ttaaaacagccttggggttgttcccaccccaagggcccacgtggcggctagtactctggtatttcggtacctttgtacgcctgttttatctcccttcccaatgtaacttagaagttttcaaatcgaagctcagtaggtggggcgcaaaccagcgctttcatgagcaagcacttctgtttccccggtgcggttgtatagactgtttccacggttgaaaacaacttatccgttatccgctatagtacttcgagaaacctagtatcacctttggattgttgatgcgttgcgctcagcacactaacccgtgtgtagcttgggctgatgagtctggacgtaccccactggtgacagtggtccaggctgcgttggcggcctactcatggtgaaaaccatgagacgctagacatgaacaaggtgtgaagagtctattgagctactatagagtcctccggcccctgaatgcggctaatcttaaccatggagcaagtgctcacaagccagtgagttgcttgtcgtaacgcgcaagtccgtggcggaaccgactactttgggtgtccgtgtttcactttttacctttatgactgcttatggtgacaatttaatattgttaccatttagcttgtcagattaatcgcgtgaaatcctaaatcttgtttatcaatttgtattcggatagcttcatttgaaaattctaaactcattcataaag

SEQ ID NO: 20828 - DNA, 718 bp, synthetic construct
  source 1..718: mol_type = other DNA
cacccacagggcccactgggcgctagcactctggtattgcggtacctttgtgcgcctgttttacccaccctcccccaacgtaacttagaagcctgacatatacggtcacaagccagcccagtacgccaactgggtaccgaccaagcacttctgttaccccggactgagtatcaataagctgccaaagcggctgaaggagaaaacgttcgttatccggccaattacttcgagaaacccagtaacaccatgaaagttgcgtagcgtttcattcagcacaatcccagtgtagatcaggtcgatgagtcaccgcattccccacaggcgactgtggcggtggctgcgttggcggcctgcccatggggcaacccatgggacgcttcaatactgacatggtgcgaagagtctattgagctaattggtagtcctccggcccctgaatgcggctaatcctaactgcggagcaggcactcgcagaccagcgagcagcttgtcgtaatgggcaactccgcagcggaaccgactactttgggtgtccgtgtttcctatttcctttacactggctgcttatggtgacaattgagaaattgttaccatatagctattggagtggccatccggtgactaacagagcaataatatatttgtttgttggctttgtgccacttaatttgaaggttgttaagacgctcaatctgatactacttctaaataaagcaaa

SEQ ID NO: 20829 - DNA, 699 bp, synthetic construct
  source 1..699: mol_type = other DNA
gggttgttcccaccccagaggcccacgtggcggctagtactctggtatcacggtacctttgtacgcctgttttatatcccttcccccgtaactttagaagcttaacaaaagttcaacagcaggggtgcaaaccagtacctctacgaacaagcacttctgtctccccggtgaagttacatagactgtacccacggtcaaaagtaattgatccgttatccgcttgagtacttcgagaagcctagtatcaccttggaatcttcgacgcgttgcgctcaacactctaccccgggtgtagcttaggctgatgagtctgggcactccccaccggtgacggtggcccaggctgcgttggcggcctacccatggctaacgccatgggacgctagttgtgaacaaggtgtgaagagcctattgagctactcaagaatcctccggcccctgaatgcggctaatcctaaccacggagcaatcgctcacgacccagtgggtaggttgtcgtaacgcgcaagtccgtggcggaaccgactactttgggtgtccgtgtttccctttttacttatactggctgcttatggtgacaatttacagattgttaccatatagctattgggttggccatccagtattgtgttacacatattaaaatacttttctacaagcaataacaacactgtgtttgaaccacaatagtcactacaa

SEQ ID NO: 20830 - DNA, 702 bp, synthetic construct
  source 1..702: mol_type = other DNA
gtcttggggttgttcccaccccaagggcccacgtggcggctagtactctggtacttcggtacctttgtacgcctgttttatctccctccccaatgtaacttagaagctttcaaatcaaagctcaataggtggaacgcaagccagcgcttccgtgagcaagcactcctgtttccccggtgcggttgtatagactgttcccacggttgaaaacaacctatccgttatccgctatagtacttcgagaaacctagtatcacctttggattgttgatgcgttgcgctcagcacactaacccgtgtgtagcttgggtcgatgagtctggacataccccactggtgacagtggtccaggctgcgttggcggcctactcatggtgaaaaccatgagacgctaaacatgaacaaggtgtgaagagtctattgagctactatagagtcctccggcccctgaatgcggctaatcttaaccatggagcaagtgctcacaaaccagtgagttacttgtcgtaatgcgcaagtccgtggcggaaccgactactttgggtgtccgtgtttcactttttacttttatgactgcttatggtgacaatttaatattgttaccatttagctagtcatattaatcacataaaactttaaattctatctaataattcacatttggatagcttcattttgaggactttaaacctatttacaaaa

SEQ ID NO: 20831 - DNA, 662 bp, synthetic construct
  source 1..662: mol_type = other DNA
ctgttttatacacccttaccctacgtaatatagaagcaaaacaacaaggtcaatagagagcccggtgagccaactgggtcgagaccaagcacttctgtttccccggaccgagtatcaataggctgcttacgcggctgaaggagaaaacgttcgttacccggctaactacttcgaaaaacctagtaacgccatggaagttgcgaatcgtttcgctcggcacttccccagtgtagatcaggtcgatgagtcaccgcattccccacgggcgaccgtggcggtggctgcgttggcggcctgcctatggggcaacccataggacgcttcaatatggacatggtgtgaagagtctattgagctagttagtagtcctccggcccctgaatgcggctaatcctaactgcggagcacatgcccccaacccaggaggtggtgtgtcgtaatgggtaactctgcagcggaaccgactactttgggtgtccgtgtttccttttatcccaatgttggctgcttatggtgacaattgaaagattgttaccatatagctattggattggccatccggtgactaacagagcaattgtatacctattcattggttacgttccattaaatctcaaggaattaacgactctcaattacattttgctcttgaattctgcaaa

SEQ ID NO: 20832 - DNA, 708 bp, synthetic construct
  source 1..708: mol_type = other DNA
aacagccttggggttgttcccactccaagggcccacgtggcggctagtactctggtacttcggtacctttgtacgcctgttttatctcccttcccaatgtaacttagaagttcttaaatcaatgctcaataggtggggcgcaaaccagcgctctcatgagcaagcactcctgtctccccggtgaggttgtataaattgttcccacggttgaaaacaacctatccgttatccgctatagtacttcgagaaacctagtaccacctttggattgttgacgcgttgcgctcagcacactaacccgtgtgtagcttgggtcgatgagtctggacatacctcactggcgacagtggtccaggctgcgttggcggcctactcatggtgaaagccatgagacgctagacatgaacaaggtgtgaagagtctattgagctactatagagtcctccggcccctgaatgcggctaatcctaaccatggagcaagtgctcacaggccagtgagttgcttgtcgtaatgcgcaagtccgtggcggaaccgactactttgggtgtccgtgtttcactttttacttttatgactgcttatggtgacaatttgatattgttaccatttagcttgtcaaatcaattgcaaaagatcctaactcttatttatcaacttgcatcttgataactttaatttgaaaatattaatttgaaaattataaca

SEQ ID NO: 20833 - DNA, 708 bp, synthetic construct
  source 1..708: mol_type = other DNA
cccactgggcgctagcacactggtatcccggtacctttgtgcgcctgttttataccccctcctccaaccgtaacctagaagcagcaccatatggccaatagtagacgtggcgcaccagccacgttttggtcaagcacttctgtttccccgggccgagtatcaataggctgctcacgcggctgaaggagaaagcgtccgttacccggccaattacttcgagaaacctagtaccaccatggaagttgcgcggcgtttcgctccacacaaccccagtgtagatcgggtcgatgagtcaccgcatttccccacgggtgaccgtggcggtggctgcgttggcggcctgcccatgaggaaactcatgggacgcttcaatactgacatggtgtgaagagtctattgagctaattggtagtcctccggcccctgaatgcggctaatcctaactgcggagcagatgctcacaaaccagtgggtggtctgtcgtaatgggcaactctgcagcggaaccgactactttgggtgtccgtgtttccttttattttcacactggctgcttatggtgacaattgaaggattgttaccatatagctattggattggccatccggtgacaaacagagcgattgtctatctatttgttggttttgtaccattagatttcaaagtcctgaaaaccctcaatttcgtcttaacactcaattcggcaag

SEQ ID NO: 20834 - DNA, 730 bp, synthetic construct
  source 1..730: mol_type = other DNA
gttgttcccacccacagggcccactgggcgctagcacactggtatcacggtacctttgtgcgcctgttttatgcttcctcccccactatagtaatttagaagcttgaaccacacggccaacagacaacccggtacaccaaccgggccccggccaagcacttctgtatccccggactgagtatcagtaggctgctcgcgcggctgaaggagaaaacgttcgttacccggccacttacttcgagaaacctagtaacgccatgaaagttgcgcagcgtttcgctccgcacaaacccagtgtagatcaggtcgatgagtcaccgcatcccccacgggcgaccgtggcggtggctgcgttggcggcctgcccatggggtaacccatgggacgcttcaatactgacatggtgcgaagagtctattgagctaagtggtagtcctccggcccctgaatgcggctaatcctaactgcggagcagatacccacactccagtgggcagtctgtcgtaacgggcaactctgcagcggaaccgactactttgggtgtccgtgtttcctcttgtcttttacactggctgcttatggtgacaattgaaagattgttaccatatagctattggattggccatccggtatcaaacagagcaattatttacttgtttgttggttatatacctctcgacaccaaggttctaaaaacactcaactacatcttgttattgaatacgttgaa

SEQ ID NO: 20835 - DNA, 718 bp, synthetic construct
  source 1..718: mol_type = other DNA
acccacagggcccactgggcgctagcacactggtatcacggtacctttgtgcgcctgtttgacttaccctccccaaacgcaacttagaagcacaacttaaatggtcaataggcggctcagtatgccaactgagtctcgatcaagcacttctgttaccccggactgagtaccaataggctgctcacgcggctgaaggggaaaccgttcgttacccgactaactacttcgagaaacctagtaccaccatgaaagttgcgcagcgtttcgctccgcacaaccccagtgtagatcaggtcgatgagtcaccgcaaaccccacgggcgaccgtggcggtggctgcgctggcggcctgcccatggggcaactcatgggacgcttcaatactgacatggtgcgaagagtctattgagctagttggtagtcctccggcccctgaatgcggctaatcctaactgcggagcagacacccacgcaccagtgggcagtctgtcgtaatgggcaactctgcagcggaaccgactactttgggtgtccgtgtttccttttgttcttatactggctacttatggtgacaattgagagattgtaaccatattgctattggattggccacccggcgacgaatagaacagttgcttacctgtttgttagtctcgtatcactgaactacaaatccttaaacaccctttaatttcgtcataacgctcaatacgttaaa

SEQ ID NO: 20836 - DNA, 707 bp, synthetic construct
  source 1..707: mol_type = other DNA
cagccttggggttgttcccactccaagggcccacgtggcggctagtactctggtacttcggtacctttgtacgcctgttttatctcccttcccaatgtaacttagaagttcttaaatcaatgctcaataggtggggcgcaaaccagcgctctcatgagcaagcactcctgtctccccggtgaggttgtataaactgttcccacggttgaaaacaacctatccgttatccgctatagtacttcgagaaacctagtaccacctttggattgttgacgcgttgcgctcagcacactaacccgtgtgtagcttgggtcgatgagtctggacatacctcactggcgacagtggtccaggctgcgttggcggcctactcatggtgaaagccatgagacgctagacatgaacaaggtgtgaagagtctattgagctactatagagtcctccggcccctgaatgcggctaatcctaaccatggagcaagtgctcacaggccagtgagttgcttgtcgtaatgcgcaagtccgtggcggaaccgactactttgggtgtccgtgtttcactttttacttttatgactgcttatggtgacaatttgatattgttaccatttagcttgtcaaatcaattgcaaaagatcctaactcttatttatcaacttgcatcttgataactttaatttgaaaattattaatttgaaaattataaca

SEQ ID NO: 20837 - DNA, 708 bp, synthetic construct
  source 1..708: mol_type = other DNA
aacagccttggggttgttcccactccaagggcccacgtggcggctagtactctggtacttcggtacctttgtacgcctgttttatctcccttcccaatgtaacttagaagttcttaaatcaatgctcaataggtggggcgcaaaccagcgctctcatgagcaagcactcctgtctccccggtgaggttgtataaactgttcccacggttgaaaacaacctatccgttatccgctatagtacttcgagaaacctagtaccacctttggattgttgacgcgttgcgctcagcacactaacccgtgtgtagcttgggtcgatgagtctggacatacctcactggcgacagtggtccaggctgcgttggcggcctactcatggtgaaagccatgagacgctagacatgaacaaggtgtgaagagtctattgagctactatagagtcctccggcccctgaatgcggctaatcctaaccatggagcaagtgctcacaggccagtgagttgcttgtcgtaatgcgcaagtctgtggcggaaccgactactttgggtgtccgtgtttcactttttacttttatgactgcttatggtgacaatttgatattgttaccatttagcttgtcaaatcaattgcaaaagatcctaactcttatttatcaacttgcatcttgataactttaatttgaaaatattaatttgaaaattataaca

SEQ ID NO: 20838 - DNA, 645 bp, synthetic construct
  source 1..645: mol_type = other DNA
tgttcccacccccagggcccaccgggcgttagtactctggtatcacggtaccttagtatgcctgttttatgtcccctttcccccgcaactttagaagtaaccaagttatggctcaatagtcgccacacctccagtgtggtttcgagcaagcacttctgttccccggttgcgtcctatatgttgtgtgaacggcagaaagggacaatatcgttatccgctcaactactacgggaagcccagtaccaccatggattgacttgagagttgcgttcggcgcacccccagcgtagctcaggtcgatgaggctccgaataccccacgggcgaccgtgtcggagcctgcgttggcggcctgcccacgttgtaaaacgtgggacgctcatttcatgacatggtgcgaagagcctactgtgctagttgagagtcctccggcccctgaatgtggataatcctaaccactgaacctacgggcgcaaaccagcgtctgataggccgtaacgcgcaagtcggtggcggaaccaactactttgggtgtccgtgtttccttttatctcctttgaatgtttatggtgacaattgttgtgtacagttgttgccatagtttgcattcagaaataaacttaacacttcccaattatttgtcaca

SEQ ID NO: 20839 - DNA, 663 bp, synthetic construct
  source 1..663: mol_type = other DNA
cctgttttatatacccttacccaacgtaatatagaagtaaaacaacaaggtcaatagagagcccagtgagccaactgggtcgagaccaagcacttctgtttccccggactgagtatcaataggctgcctacgcggctgaaggagaaaacgttcgttacccggctaactacttcgaaaaacctagtaacgccatggaagttgcgaaacgtttcgctcggcacttccccagtgtagatcaggtcgatgagtcaccgcattccccacgggcgaccgtggcggtggctgcgttggcggcctgcctatggggcaactcataggacgcttcaatatggacatggtgtgaagagtctattgagctagttagttgtcctccggcccctgaatgcggctaatcctaactgcggagcacatgcccccaacccaggaggtggtgtgtcgtaatgggtaactctgcagcggaaccgactactttgggtgtccgtgtttccttttatcccaatattggctgcttatggtgacaattgaaagattgttaccatatagctattggattggccatccggtgactaacagagctattgtatacctattcattgggtacgttccactaaatctcaaggaattaacgactctcaattacattttgctcttgaattctgcaaa

SEQ ID NO: 20840 - DNA, 600 bp, synthetic construct
  source 1..600: mol_type = other DNA
cagtgaaccaactgagcctcgaccaagtacttctgttaccccggactgagtatcaataggctgctcacgtggctgatggagaaaacgtccgttacccggccaattacttcgagaaacctagtaccaccatgaaggttgcgcagcgtttcgctccgcacaaccccagtgtagatcaggtcgatgagtcactgcgctccccacgggcgaccgtggcggtgactgcgttggcggcctgcccatggggcatcccatgggacgcttcaatactgacatggtgtgaagagtctattgagctaattggtagtcctccggcccctgaatgcggctaatcctaactgcggagcagatacccacgcaccagtgggcagtctgtcgtaacgggcaactctgcagcggaaccgactactttgggtgaccgtgtttccttttattctaatgctggctgcttatggtgacaattgaaagattgttaccatatagctattggattggccatccggtaacaaacagagcaattatttacctgtttattggttttatacctctcaactacaaggttataaatactcttaactttattttagcacttaacacagcaaa

SEQ ID NO: 20841 - DNA, 662 bp, synthetic construct
  source 1..662: mol_type = other DNA
ctgttttatacacccttaccccacgcaatatagaagcaaaacaacaaggtcaatagagagcccagtgaaccaactgggtcgagaccaagcacttctgtttccccggaccgagtatcaataggctgcttacgcggctgaaggagaaaacgttcgttacccggctaactacttcgaaaaacctagtaacgccatggaagttgcgaaccgtttcgctcggcacttccccagtgtagatcaggtcgatgagtcaccgcattccccacgggcgaccgtggcggtggctgcgttggcggcctgcctatggggcaacccataggacgcttcaatacggacatggtgtgaagagtctattgagctagttagtagtcctccggcccctgaatgcggctaatcctaactgcggagcacatgcccccaacccaggaggtgatgtgtcgtaatgggtaactctgcagcggaaccgactactttgggtgtccgtgtttccttttatcccaatgttggctgcttatggtgacaattgaaaggttgttaccatatagctattggattggccatccggtgactaacagagcaattgtatacctattcattggttacgttccattaaatctcaaggaattaacgactctcaattacattttgctcttgaattccgcaaa

SEQ ID NO: 20842 - DNA, 709 bp, synthetic construct
  source 1..709: mol_type = other DNA
gcccattgggcgctagcacactggtattacggtacctttgtgcgcctgttttatccacccttccctcaaatgaaacttagaagcttaacttgaatggtcaacaggaaacccagtacaccaactgggtcgcgaccaagcacttctgtaaccccggaccgagtatcaataagctgcttgcgtggctgaaagagaaaacgttcgttacccgaccaattacttcgagaaacctagtaccaccatggaggttgcgcagtgtttcgctccgcacaaccctagtgcagatcgggccgatgagtcaccgcgttccccacgggcgaccgtggcggtggctgcgctggcggcccgcccatggggcaacccatgggacgcttcaatactgacatggtgcgaagagtctattgagctaattggtagtcctccggcccctgaatgcggctaatcccaactgcggagcagatacccacacgccagtgggcagtctgtcgtaacgggcaactctgcagcggaaccgactactttgggtgtccgtgtttccttttaccttttactggctgcttatggtgacaattgagagattgttaccatatagctactggattggccatccggtgtctaacagagcgattatttatctgtttgttggatttgtgcccttaaacctcaaagttctcaacactcttaaccttgtattacaatttaactcagcaaa

SEQ ID NO: 20843 - DNA, 699 bp, synthetic construct
  source 1..699: mol_type = other DNA
tttaaaacagccttggggttgttcccatcccaagggcccacgtggcggctagtactctggtatttcggtacctttgtacgcctgttttatctcccttcccaatgtaacctagaagctcttaaatcaaggctcaataggtggagcgcaaaccagcgctctcatgagcaagcactcctgtctccccggtgtggttgtataaactgttcccacggttgaaaacaacctatccgttatccgctatagtacttcgagaaacctagtatcacctttggattgttgatgcgttgcgctcagcacactaacccgtgtgtagcttgggtcgatgagtctggacgtacctcactggcgacagtggtccaggctgcgttggcggcctactcatggtgaaaaccatgagacgctaaacatgaacaaggtgtgaagagtctattgagctactatagagtcctccggcccctgaatgcggctaatcttaaccatggagcaagtgctcacaagccagtgagttgcttgtcgtaatgcgcaagtccgtggcggaaccgactactttgggtgtccgtgtttcactttttacttttatgactgcttatggtgacaatttgatattgttaccatttagcttgtcaaaccaattgcaaaagaccctaaatcttatttgtcaacttgtattttaataacttcaatttgaaaattttaata

SEQ ID NO: 20844 - DNA, 696 bp, synthetic construct
  source 1..696: mol_type = other DNA
gttgttcccaccccagaggcccacgtggcggctagtactctggtattacggtacctttgtacgcctgttttatatcccctcccccgcaactttagaagcttaacaacagttcaacagcaggggtgcaaaccagcacctctacgaacaagtacttctgtttccccggtgaaattacatagactgtacccacggtcaaaagtgattgatccgttatccgcttgagtacttcgagaagcctagtatcaccttggaatcttcgacgcgttgcgctcaacactctaccccgggtgtagcttaggctgatgagtctgggcactcctcaccggtgacggtggcccaggctgcgttggcggcctacccatggctaacgccatgggacgctagttgtgaacaaggtgtgaagagcctattgagctactcaagagtcctccggcccctgaatgcggctaatcctaaccacggagcaatcgctcacgatccagtgagtaggttgtcgtaatgcgtaagtctgtggcggaaccgactactttgggtgtccgtgtttcccttttattcatactggctgcttatggtgacaatttacagattgttaccatatagctattggattggccatccagtattgtgttacacatattaaaatacttttctacaagcaacaacaacattgtgtttgaaccacaatagccattacaa

SEQ ID NO: 20845 - DNA, 699 bp, synthetic construct
  source 1..699: mol_type = other DNA
ttaaaacagccttggggttgttcccaccccaagggcccatgtggcggctagtactctggtacttcggtacctttgtacgcctgttttatctcccttcccaatgtaatttagaagctcttaaatcaaggctcaataggtggggcgcaaaccagcgctctcatgagcaagcactcctgtctccccggtgtggttgtataaactgttcccacggttgaaaacaacctatccgttatccgctatagtacttcgagaaacctagtatcacctttggattgttgacgcgttgcgctcagcacactaacccgtgtgtagcttgggtcgatgagtctggacataccccactggcgacagtggtccaggctgcgttggcggcctactcatggtgaaaaccatgagacgctagacatgaacaaggtgtgaagagtctattgagctactatagagtcctccggcccctgaatgcggctaatcctaaccatggagcaagtgctcacaggccagtgagttgcttgtcgtaatgcgcaagtccgtggcggaaccgactactttgggtgtccgtgtttcactttttacttttatgactgcttatggtgacaatttgatattgttaccatttagcttgtcaaattaattgtaaaagatcctaaatcttacttaccaacttgtattttgacaaccttgatttgaaaatttttaata

SEQ ID NO: 20846 - DNA, 698 bp, synthetic construct
  source 1..698: mol_type = other DNA
ttaaaacaccccccccggtgttcccactccaagggcccacgtggcggctagtactctggtacttcggtacctttgtacgcctgttttatctcccttcccgatgtaatttagaagctcttaaatcaaggctcaataggtggggcgcaacccagcgctctcatgagcaagcacttctgtctccccggtgtggttgtataaactgttcccacggttgaaaacaacctatccgttatccgctatagtacttcgagaaacctagtatcacctttggattgttgacgcgttgcgctcagcacactaacccgtgtgtagcttgggtcgatgagtctggacataccccactggcgacagtggtccaggctgcgttggcggcctactcatggtgaaaaccatgagacgctagacatgaacaaggtgtgaagagtctattgagctactatagagtcctccggcccctgaatgcggctaatcctaaccatggagcaagtgctcacaggccagtgagttgcttgtcgtaatgcgcaagtccgtggcggaaccgactactttgggtgtccgtgtttcactttttacttttatgactgcttatggtgacaatttgatattgttaccatttagcttgtcaaattaattgcaaaagatcctaaatcttacttaccaacttgcattttgataaccttgatttgaaaattttaata

SEQ ID NO: 20847 - DNA, 698 bp, synthetic construct
  source 1..698: mol_type = other DNA
ttaaaacaccccccccggttgtcccactccaagggcccacgtggcggctagtactctggtacttcggtacctttgtacgcctgttttatctcccttcccgatgtaatttagaagctcttaaatcaaggctcaataggtggggcgcaacccagcgctctcatgagcaagcacttctgtctccccggtgtggttgtataaactgttcccacggttgaaaacaacctatccgttatccgctatagtacttcgagaaacctagtatcacctttggattgttgacgcgttgcgctcagcacactaacccgtgtgtagcttgggtcgatgagtctggacataccccactggcgacagtggtccaggctgcgttggcggcctactcatggtgaaaaccatgagacgctagacatgaacaaggtgtgaagagtctattgagctactatagagtcctccggcccctgaatgcggctaatcctaaccatggagcaagtgctcacaggccagtgagttgcttgtcgtaatgcgcaagtccgtggcggaaccgactactttgggtgtccgtgtttcactttttacttttatgactgcttatggtgacaatttgatattgttaccatttagcttgtcaaattaattgcaaaagatcctaaatcttacttaccaacttgcattttgataaccttgatttgaaaattttaata

SEQ ID NO: 20848 - DNA, 704 bp, synthetic construct
  source 1..704: mol_type = other DNA
agccttggggttgttcccactccaagggcccacgtggcggctagtactctggtacttcggtacctttgtacgcctgttttatctcccttcccaatgtaacttagaagttcttaaatcaatgctcaataggtggggcgcaaaccagcgctctcatgagcaagcactcctgtctccccggtgaggttgtataaactgttcccacggttgaaaacaacctatccgttatccgctatagtacttcgagaaacctagtaccacctttggattgttgacgcgttgcgctcagcacactaacccgtgtgtagcttgggtcgatgagtctggacatacctcactggcgacagtggtccaggctgcgttggcggcctactcatggtgaaagccatgagacgctagacatgaacaaggtgtgaagagtctattgagctactatagagtcctccggcccctgaatgcggctaatcctaaccatggagcaagtgctcacaggccagtgagttgcttgtcgtaatgcgcaagtccgtggcggaaccgactactttgggtgtccgtgtttcactttttacttttatgactgcttatggtgacaatttgatattgttaccatttagcttgtcaaatcaattgcaaaagatcctaaatcttatttatcaacttgcatcttgataactttaatttgaaaaattaatttgaaaattttaaca

SEQ ID NO: 20849 - DNA, 700 bp, synthetic construct
  source 1..700: mol_type = other DNA
taaaacagccttggggttgttcccactccaagggcccacgtggcggctagtactctggtacttcggtacctttgtacgcctgttttatctcccttcccaatgcaatttagaagctcttaaatcaaggctcaataggtggggcgcaaaccagcgctctcatgagcgagcactcctgtctccccggtgtggttgtataaactgttcccacggttgaaaacaacctatccgttatccgctatagtacttcgagaaacctagtatcacctttggattgttgacgcgttgcgctcagcacactaacccgtgtgtagcttgggtcgatgagtctggacataccccactggcgacagtggtccaggctgcgttggcggcctactcatggtgaaagccatgagacgctagacatgaacaaggtgtgaagagtctattgagctactatagagtcctccggcccctgaatgcggctaatcctaaccatggagcaagtgctcacaggccagtgagttgcttgtcgtaatgcgcaagtccgtggcggaaccgactactttgggtgtccgtgtttcactttttacttttatgactgcttatggtgacaatttgatattgttaccatttagcttgtcaaactaattgcaaaagattctaaatcttacttaccaacttgcattttgacaaccttggtttgaaaattttaataata

SEQ ID NO: 20850 - DNA, 700 bp, synthetic construct
  source 1..700: mol_type = other DNA
taaaacagccttggggttgttcccactccaagggcccacgtggcggctagtactctggtatttcggtacctttgtacgcctgttttatctcccttcccaacgcaatttagaagctctcaaatcaaggctcaataggtggggcgcaaaccagcgctctcatgagcaagcactcctgtctccccggtgcggttgtataaactgttcccacggttgaaaacaacctatccgttatccgctatagtacttcgagaaacctagtatcacctttggattgttgacgcgttgcgctcagcacactaacccgtgtgtagcttgggtcgatgagtctggacataccccactggcgacagtggtccaggctgcgttggcggcctactcatggtgaaaaccatgagacgctagacatgaacaaggtgtgaagagtctattgagctactatagagtcctccggcccctgaatgcggctaatcctaaccatggagcaagtgctcacaggccagtgagttgcttgtcgtaatgcgcaagtccgtggcggaaccgactactttgggtgtccgtgtttcactttttacttttatgactgcttatggtgacaatttgatattgttaccatttagcttgtcaaattaattgcaaaagatcctaaatcttacttaccaacttgcattttgacaaccttggtttgaaaactttaataata

SEQ ID NO: 20851 - DNA, 730 bp, synthetic construct
  source 1..730: mol_type = other DNA
tgggttgttcccacccacagggcccaccgggcgctagcacactggtatctcggtacccttgtgcgcctgttttatccacccttttcccatttaacttagaagcacgcgccaagacggtcaaaagggagcccagtaagccaattgggctatgaccaagcactcctgtaaccccgggccgagtatcaataagctgctcgcgcggctgaaggagaaaaagctcgttacccggccaattacttcgagaaacccagtagcatcatgaaagttgcgcagcgtttcgctccacacaaccccagtgtagatcaggtcgatgagtcaccgcgttccccacgggtgaccgtggcggtggctgcgctggcggcctgcccatggggccacccatgggacgcttcaatactgacatggtgtgaagagtctattgagctaattggtagtcctccggcccctgaatgcggctaatcctaactgcggagcagatgcccacacaccagtgggaagtctgtcgtaacgggtaactctgcagcggaaccgactactttgggtgtccgtgtttccttttatttctactctggctgcttatggtgacaattgaaaggttgttaccatatagctattggattggccatccggtgtcacatagagcgattatttacttgtttgttgggtttataccactgaactataaagttttaaatactcttaactacattttaatccttaactcattaaa

SEQ ID NO: 20852 - DNA, 699 bp, synthetic construct
  source 1..699: mol_type = other DNA
ttaaaacagccttggggttgttcccactccaagggcccacgtggcggctagtactctggtacttcggtacctttgtacgcctgttttatctcccttcccaatgtaatttagaagctcttaaatcaaggctcaataggtggggcgcaaaccagcgctctcatgagcaagcactcctgtctccccggtgtggttgtataaactgttcccacggttgaaaacaacctatccgttatccgctatagtacttcgagaaacctagtatcacctttggattgttgacgcgttgcgctcagcacactaacccgtgtgtagcttgggtcgatgagtctggacacaccccactggcgacagtggtccaggctgcgttggcggcctactcatggtgaaaaccatgagacgctagacatgaacaaggtgtgaagagtctattgagctactatagagtcctccggcccctgaatgcggctaatcctaaccatggagcaagtgctcacaagccagtgagttgcttgtcgtaatgcgcaagtccgtggcggaaccgactactttgggtgtccgtgtttcactttttacttttatgactgcttatggtgacaatttgatattgttaccatttagcttgtcaaattaattgcaaaagatcctaaatcttacttaccaacttgcattttgacaaccttgatttgaaaatttttaata

SEQ ID NO: 20853 - DNA, 699 bp, synthetic construct
  source 1..699: mol_type = other DNA
ttaaaacagccttggggttgttcccactccaagggcccacgtggcggctagtactctggtacttcggtacctttgtacgcctgttttatctcccttcccaatgtaatttagaagctcttaaatcaaggctcaataggtggggcgcaaaccagcgctctcatgagcaagcactcctgtctccccggtgtggttgtataaactgttcccacggttgaaaacaacctatccgttatccgctatagtacttcgagaaacctagtatcacctttggattgttgacgcgttgcgctcagcacactaacccgtgtgtagcttgggtcgatgagtctggacacaccccactggcgacagtggtccaggctgcgttggcggcctactcatggtgaaaaccatgagacgctagacatgaacaaggtgtgaagagtctattgagctactatagagtcctccggcccctgaatgcggctaatcctaaccatggagcaagtgctcacaggccagtgagttgcttgtcgtaatgcgcaagtccgtggcggaaccgactactttgggtgtccgtgtttcactttttacttttatgactgcttatggtgacaatttgatattgttaccatttagcttgtcaaattaattgcaaaagatcctaaatcttacttaccaacttgcattttgacaaccttgatttgaaaatttttaata

SEQ ID NO: 20854 - DNA, 698 bp, synthetic construct
  source 1..698: mol_type = other DNA
ttaaaacagccttggggttgttcccactccaagggcccacgtggcggctagtactctggtacttcggtacctttgtacgcctgttttatctcccttcccaatgtaacttagaagttcttaaatcaatgctcaataggtggggcgcaaaccagcgctctcatgagcaagcactcctgtctccccggtgaggttgtataaactgttcccacggttgaaaacaacctatccgttatccgctatagtacttcgagaaacctagtaccacctttggattgttgacgcgttgcgctcagcacactaacccgtgtgtagcttgggtcgatgagtctggacatacctcactggcgacagtggtccaggctgcgttggcggcctactcatggtgaaagccatgagacgctagacatgaacaaggtgtgaagagtctattgagctactatagagtcctccggcccctgaatgcggctaatcctaaccatggagcaagtgctcacaggccagtgagttgcttgtcgtaatgcgcaagtccgtggcggaaccgactactttgggtgtccgtgtttcactttttacttttatgactgcttatggtgacaatttgatattgttaccatttagcttgtcaaatcaattgcaaaagatcctaactcttatttatcaacttgcatcttgataactttaatttgaaaattttaaca

SEQ ID NO: 20855 - DNA, 698 bp, synthetic construct
  source 1..698: mol_type = other DNA
ttaaaacagccttggggttgttcccactccaagggcccacgtggcggctagtactctggtacttcggtacctttgtacgcctgttttatctcccttcccaatgtaacttagaagttcttaaaccaatgctcaataggtggggcgcaaaccagcgctctcatgagcaagcactcctgtctccccggtgaggttgtataaactgttcccacggttgaaaacaacctatccgttatccgctatagtacttcgagaaacctagtaccacctttggattgttgacgcgttgcgttcagcacactaacccgtgtgtagcttgggtcgatgagtctggacatacctcactggcgacagtggtccaggctgcgttggcggcctactcatggtgaaagccatgagacgctagacatgaacaaggtgtgaagagtctattgagctactatagagtcctccggcccctgaatgcggctaatcctaaccatggagcaagtgctcacaggccagtgagttgcttgtcgtaatgcgcaagtccgtggcggaaccgactactttgggtgtccgtgtttcactttttacttttatgactgcttatggtgacaatttgatattgttaccatttagcttgtcaaatcaattgcaaaagatcctaactcttatttatcaacttgcatcttgataactttaatttgaaaattttaaca

SEQ ID NO: 20856 - DNA, 708 bp, synthetic construct
  source 1..708: mol_type = other DNA
cccattgggcgctagcacactggtattgcggtacctttgtgcgcctgttttatccacccttccctcaaatgaaacttagaagcttaacttgaatggtcaacaggaaacccagtacgccaactgggtcgcgaccaagcacttctgtaaccccggactgagtatcaataagctgcttgcgtggctgaaagagaaaacgtccgttacccggccaattacttcgagaaacctagtaccaccatggaggttgcgcagtgtttcgctccgcacaaccccagtgcagatcgggccgatgagtcaccgcgttccccacgggcgaccgtggcggtggctgcgctggcggcctgcccatggggtaacccatgggacgcttcaatactgacatggtgcgaagagtctattgagctagttggtagtcctccggcccctgaatgcggctaatcccaactgcggagcagatacccacacgccagtgggcagtctgtcgtaacgggcaactctgcagcggaaccgactactttgggtgtccgtgtttccttttatcttatactggctgcttatggtgacaattgagagattgttaccatatagctactggattggccatccggtgtctaacagagcgatcatttatctgtttgttggatttgtgcccttaaacctcaaagttctcaacactcttaaccttgtactacaatttaactcagcaaa

SEQ ID NO: 20857 - DNA, 698 bp, synthetic construct
  source 1..698: mol_type = other DNA
ttaaaacagccttggggttgttcccactccaagggcccacgtggcggttagtactctggtacttcggtacctttgtacgcctgttttatctcccttcccaatgtaacttagaagctcttaaatcaaggctcaataggtggggcgcaaaccagcgctctcatgagcaagcactcctgtctccccggtgtggttgtataaactgttcccacggttaaaaacaacctatccgttatccgctatagtacttcgagaaacctagtatcacctttggattgttgacgcgttgcgttcagcacactaacccgtgtgtagcttgggtcgatgagtctggacgtaccccactggtgacagtggtccaggctgcgttggcggcctactcatggtgaaaaccatgagacgctagacatgaacaaggtgtgaagagtctattgagctactatagagtcctccggcccctgaatgcggctaatcctaaccatggagcaagtgctcacaggccagtgagttgcttgtcgtaatgcgcaagtccgtggcggaaccgactactttgggtgtccgtgtttcactttttacttttatgactgcttatggtgacaatttgatattgttaccatttagcttgtcaaattaattgcaaaagatcctaagtctcatttaccaacttgcattttgattaccttgatttgtaaattttaata

SEQ ID NO: 20858 - DNA, 698 bp, synthetic construct
  source 1..698: mol_type = other DNA
ttaaaacagccttggggttgttcccactccaagggcccacgtggcggctagtactctggtacttcggtacctttgtacgcctgttttatctcccttcccaatgtaacttagaagttcttaaatcaatgctcaataggtggggcgcaaaccagcgctctcatgagcaagcactcctgtctccccggtgaggttgtataaactgttcccacggttgaaaacaaccaatccgttatccgctatagtacttcgagaaacctagtaccacctttggattgttgacgcgttgcgctcagcacactaacccgtgtgtagcttgggtcgatgagtctggacatacctcactggcgacagtggtccaggctgcgttggcggcctactcatggtgaaaaccatgagacgctagacatgaacaaggtgtgaagagtctattgagctactatagagtcctccggcccctgaatgcggctaatcctaaccatggagcaagtgctcacaggccagtgagttgcttgtcgtaatgcgcaagtccgtggcggaaccgactactttgggtgtccgtgtttcactttttacttttatgactgcttatggtgacaatttgatattgttaccatttagcttgtcaaatcaattgcaaaagatcctaaatcttatttatcaatttgcatcttgataactttaatttgaaaattttaaca

SEQ ID NO: 20859 - DNA, 699 bp, synthetic construct
  source 1..699: mol_type = other DNA
ttaaaacagctttggggttgttcccactccaagggcccacgtggcggctagtactctggtacttcggtacctttgtacgcctgttttatctcccttcccaatgtaatttagaagctcttaaatcaaggctcaataggtggggcgcaaaccagcgctctcatgagcaagcactcctgtctccccggtgtggttgtataaactgttcccacggttgaaaacaacctatccgttatccgctatagtacttcgagaaacctagtatcacctttggattgttgacgcgttgcgctcagcacactaacccgtgtgtagcttgggtcgatgagtctggacataccccactggcgacagtggtccaggctgcgttggcggcctactcatggtgaaaaccatgagacgctagacatgaacaaggtgtgaagagtctattgagctactatagagtcctccggcccctgaatgcggctaatcctaaccatggagcaagtgctcacaggccagtgagttgcttgtcgtaatgcgcaagtccgtggcggaaccgactactttgggtgtccgtgtttcactttttacttttatgactgcttatggtgacaatttgatattgttaccatttagcttgtcaaattaattgcaaaagatcctaaatcttacttaccaacttgcattttgacaaccttgatttgaaaatttttaata

SEQ ID NO: 20860 - DNA, 701 bp, synthetic construct
  source 1..701: mol_type = other DNA
ttaaaacagctttggggttgttcccactccaagggcccacgtggcggctagtactctggtgcttcggtacctttgtacgcctgttttatctcccttcccaatgtaacttagaagttcttaaatcaaggctcaataggtggggcgcaaaccagcgctctcatgagcaagcactcctgtctccccggtgtggttgtataaactgttcccacggttgaaaacaacctatccgttatccgctatagtacttcgagaaacctagtatcacctttggattgttgacgcgttgcgctcagcacactaacccgtgtgtagcttgggtcgatgagtctggacgtaccccactggcgacagtggtccaggctgcgttggcggcctactcatggtgaaaaccatgagacgctagacatgaacaaggtgtgaagagtctattgagctactatagagtcctccggcccctgaatgcggctaatcctaaccatggagcaagtgctcacaggccagtgagttgcttgtcgtaatgcgcaagtccgtggcggaaccgactactttgggtgtccgtgtttcactttttacttttatgactgcttatggtgacaatttgatattgttaccatttagcttgtcaaattaattgcaaaagatcctaaatcttacttaccaacttgcattttgataaccttgatttgaaaattttaataata

SEQ ID NO: 20861 - DNA, 698 bp, synthetic construct
  source 1..698: mol_type = other DNA
taaaacagccttggggttgttcccactccaagggcccacgtggcggctagtactctggtacttcggtacctttgtacgcctgttttatctcccttcccaatgtaatttagaagctcttaaatcaaggctcactaggtggggcgcaaaccagcgctctcatgagcaagcactcctgtctccccggtgtggttgtataaactgttcccacggttgaaaacaacctatccgttatccgctatagtacttcgagaaacctagtatcacctttggattgttgacgcgttgcgctcagcacactaacccgtgtgtagcttgggtcgatgagtctggacataccccactggcgacagtggtccaggctgcgttggcggcctactcatggtgaaaaccatgagacgctagacatgaacaaggtgtgaagagtctattgagctactatagagtcctccggcccctgaatgcggctaatcctaaccatggagcaagtgctcacaggccagtgagttgcttgtcgtaatgcgcaagtccgtggcggaaccgactactttgggtgtccgtgtttcactttttacttttatgactgcttatggtgacaatttgatattgttaccatttagcttgtcaaattaattgcaaaagatcctaaatcttacttaccaacttgcattttgacaaccttgatttgaaaatttttaata

SEQ ID NO: 20862 - DNA, 698 bp, synthetic construct
  source 1..698: mol_type = other DNA
taaaacagccttggggttgttcccactccaagggcccacgtggcggctagtactctggtacttcggtacctttgtacgcctgttttatcccccttcccaatgtaatttagaagctcttaaattaaggctcaataggtggggcgcaaaccagcgctctcatgagcaagcactcctgtctccccggtgtggttgtataaactgttcccacggttgaaaacaacctatccgttatccgctatagtacttcgagaaacctagtatcacctttggattgttgacgcgttgcgctcagcacactaacccgtgtgtagcttgggtcgatgagtctggacataccccactggcgacagtggtccaggctgcgttggcggcctactcatggtgaaaaccatgagacgctagacatgaacaaggtgtgaagagtctattgagctactatagagtcctccggcccctgaatgcggctaatcctaaccatggagcaagtgctcacaggccagtgagttacttgtcgtaatgcgcaagtccgtggcggaaccgactactttgggtgtccgtgtttcactttttacttttatgactgcttatggtgacaatttgatattgttaccatttagcttgtcaaatcaattgcaaaagatcctaaatcttacttaccaacttgcattttgacaaccttgatttgaaaatttttaata

SEQ ID NO: 20863 - DNA, 698 bp, synthetic construct
  source 1..698: mol_type = other DNA
ttaaaacagccttggggttgttcccgctccaagggcccacgtggcggctagtactctggtacttcggtacctttgtacgcctgttttatctcccttcccaatgtaacttagaagctcttaaatcaaggctcaataggtggggcgcaaaccagcgctctcatgagcaagcactcctgtctccccggtgtggttgtataaactgttcccacggttgaaaacaacctatccgttatccgctatagtacttcgagaaacctagtatcacctttggattgttgacgcgttgcgctcagcacactaacccgtgtgtagcttgggtcgatgagtctggacatacctcactggcgacagtggtccaggctgcgttggcggcctactcatggtgaaaaccatgagacgctagacatgaacaaggtgtgaagagtctattgagctactatagagtcctccggcccctgaatgcggctaatcctaaccatggagcaagtgctcacaagccagtgagttgcttgtcgtaatgcgcaagtccgtggcggaaccgactactttgggtgtccgtgtttcactttttacttttatgactgcttatggtgacaatttgatattgttaccatttagcttgtcaaatcaattgcaaaagatcctaaatcttatttatcaacttgcattttgataactttgatttgaaaattttaata

SEQ ID NO: 20864 - DNA, 698 bp, synthetic construct
  source 1..698: mol_type = other DNA
ttgaaacagccttggggttgttcccactccaagggcccacgtggcggctagtactctggtacttcggtacctttgtacgcctgttttatctcccttcccaatgtaacttagaagctcttaaatcaaggctcaataggtggggcgcaaaccagcgctctcatgagcaagcactcctgtctccccggtgtggttgtataaactgttcccacggttgaaaacaacctatccgttatccgctatagtacttcgagaaacctagtatcacctttggattgttgacgcgttgcgctcagcacactaacccgtgtgtagcttgggtcgatgagtctggacgtaccccactggcgacagtggtccaggctgcgttggcggcctactcatggtgaaaaccatgagacgctagacatgaacaaggtgtgaagagtctattgagctactatagagtcctccggcccctgaatgcggctaatcctaaccatggagcaagtgctcacaggccagtgagttgcttgtcgtaatgcgcaagtctgtggcggaaccgactactttgggtgtccgtgtttcactttttacttttatgactgcttatggtgacaatttgatattgttaccatttagcttgtcaaatcaattgcaaaagatcctaaatcttacttaccaacttgcattttaataaccttgatttgaaaattttaata

SEQ ID NO: 20865 - DNA, 698 bp, synthetic construct
  source 1..698: mol_type = other DNA
ttaaaacagccttggggttgttcccaccccaagggcccacgtggcggctagtactctggtatttcggtacctttgtacgcctgttttatctcccttcccaatgtaacttagaagctctcaaattaaagctcaataggtggagcgcaaaccagcgctctcacgagcaagcactcctgtctccccggtgtggttgtataaactgtccccacggttgaaaacaacctatccgttatccgctatagtacttcgagaaacctagtatcacctttggattgttgatgcgttgcgctcagcacactaacccgtgtgtagcttgggtcgatgagtctggacataccccactggcgacagtggtccaggctgcgttggcggcctactcatggtggaaaccatgagacgctagacatgaacaaggtgtgaagagtctattgagctactatagagtcctccggcccctgaatgcggctaatcttaaccatggagcaagtgctcacaagccagtgagttgcttgtcgtaatgcgcaagtccgtggcggaaccgactactttgggtgtccgtgtttcactttttacttttatgactgcttatggtgacaatttgatattgttaccatttagcttgtcaaatcaattacaaaagaccctaaatcttatttatcaacttgcattttgataactttaatttgaaaattttaata

SEQ ID NO: 20866 - DNA, 698 bp, synthetic construct
  source 1..698: mol_type = other DNA
ttaaaacagccttggggttgttcccaccccaagggcccacgtggcggctagtactctggtatttcggtacctttgtacgcctgttttatctcccttcccaatgtaacttagaagctctcaaatcaaagctcaataggtggagcgcaaaccagcgctctcatgagcaagcactcctgtctccccggtgtggttgtataaactgttcccacggttgaaaacaacctatccgttatccgctatagtacttcgagaaacctagtatcacctttggattgttgatgcgttgcgctcagcacactaacccgtgtgtagcttgggtcgatgagtctggacataccccactggcgacagtggtccaggctgcgttggcggcctactcatggtgaaaaccatgagacgctaaacatgaacaaggtgtgaagagtctattgagctactatagagtcctccggcccctgaatgcggctaatcttaaccatggagcaagtgctcacaagccagtgagttgcttgtcgtaatgcgcaagtccgtggcggaaccgactactttgggtgtccgtgtttcactttttacttttatgactgcttatggtgacaatttgatattgttaccatttagcttgtcaaatcaattgcaaaagaccctaaatcttatttatcaacttgcattttgataacttcaatttgaaaattttaata

SEQ ID NO: 20867 - DNA, 698 bp, synthetic construct
  source 1..698: mol_type = other DNA
ttaaaacagccttggggttgttcccaccccaagggcccacgtggcggctagtactctggtatttcggtacctttgtacgcctgttttatctcccttcccaatgtaacttagaagctcttaaatcaaagctcaataggtggagcgcaaaccagcgctctcatgagcaagcactcctgtctccccggtgtggttgtataaactgttcccacggttgaaaacaacctatccgttatccgctatagtacttcgagaaacctagtatcacctttggattgttgatgcgttgcgctcagcacactaacccgtgtgtagcttgggtcgatgagtctggacataccccactggcgacagtggtccaggctgcgttggcggcctactcatggtgaaaaccatgagacgctaaacatgaacaaggtgtgaagagtctattgagctactatagagtcctccggcccctgaatgcggctaatcttaaccatggagcaagtgctcacaagccagtgagttgcttgtcgtaatgcgcaagtccgtggcggaaccgactactttgggtgtccgtgtttcactttttacttttatgactgcttatggtgacaatttgatattgttaccatttagcttgtcaaatcaattgcaagagaccctagatcttatttatcaacttgcattttgataacttcaatttgaaaattttaata

SEQ ID NO: 20868 - DNA, 698 bp, synthetic construct
  source 1..698: mol_type = other DNA
ttaaaacagccttggggttgttcccaccccaagggcccacgtggcggctagtactctggtacttcggtacctttgtacgcctgttttatctcccttcccaatgtaacttagaagctctcaaatcaaagctcgataggtggagcgcaaaccagcgctctcatgagcaagcactcctgtctccccggtgtggttgtataaactgttcccacggttgaaaacaacctatccgttatccgctatagtacttcgagaaacctagtatcacctttggattgttgatgcgttgcgctcagcacactaacccgtgtgtagcttgggtcgatgagtctggacataccccactggcgacagtggtccaggctgcgttggcggcctactcatggtgaaaaccatgagacgctaaacatgaacaaggtgtgaagagtctattgagctactatagagtcctccggcccctgaatgcggctaatcttaaccatggagcaagtgctcacaagccagtgagttgcttgtcgtaatgcgcaagtccgtggcggaaccgactactttgggtgtccgtgtttcactttttacttttatgactgcttatggtgacaatttgatattgttaccatttagcttgtcaaatcaattgcaaaagaccctaaatcttatttatcaacttgcattttgataacttcaatttgaaaattttaata

SEQ ID NO: 20869 - DNA, 698 bp, synthetic construct
  source 1..698: mol_type = other DNA
ttaaaacagccttggggttgttcccaccccaagggcccacgtggcggctagtactctggtatttcggtacctttgtacgcctgttttatctcccttcccaatgtaacttagaagctctcaaatcaaagctcgataggtggagcgcaaaccagcgctctcatgagcaagcactcctgtctccccggtgtggttgtataaactgttcccacggttgaaaacaacctatccgttatccgctatagtacttcgagaaacctagtatcacctttggattgttgatgcgttgcgctcagcacactaacccgtgtgtagcttgggtcgatgagtctggacataccccactggcgacagtggtccaggctgcgttggcggcctactcatggtgaaaaccatgagacgctaaacatgaacaaggtgtgaagagtctattgagctactatagagtcctccggcccctgaatgcggctaatcttaaccatggagcaagtgctcacaagccagtgagttgcttgtcgtaatgcgcaagtccgtggcggaaccgactactttgggtgtccgtgtttcactttttacttttatgactgcttatggtgacaatttgatattgttaccatttagcttgtcaaatcaattgcaaaagaccctaaatcttatttatcaacttgcattttgataacttcaatttgaaaattttaata

SEQ ID NO: 20870 - DNA, 698 bp, synthetic construct
  source 1..698: mol_type = other DNA
ttaaaacagccttggggttgttcccaccccaagggcccacgtggcggctagtactctggtacttcggtacctttgtacgcctgttttatctcccttcccaatgcaacttagaagctctcaaatcaaagctcgataggtggagcgcaaaccagcgctctcatgagcaagcactcctgtctccccggtgcggttgtataaactgttcccatggttgaaaacaacctatccgttatccgctatagtacttcgagaaacctagtatcacctttggattgttgatgcgttgcgctcagcacactaacccgtgtgtagcttgggtcgatgagtctggacgtaccccactggcgacagtggtccaggctgcgttggcggcctactcatggtgaaaaccatgagacgctaaacatgaacaaggtgtgaagagtctattgagctactatagagtcctccggcccctgaatgcggctaatcttaaccatggagcaagtgctcacaagccagtgagttgcttgtcgtaatgcgcaagtccgtggcggaaccgactactttgggtgtccgtgtttcactttttacttttatgactgcttatggtgacaatttgatattgttaccatttagcttgtcaaatcaattgcaaaagaccctaaatcttatttatcaacttgtattttgataacttcaatttgaaaattttaata

SEQ ID NO: 20871 - DNA, 698 bp, synthetic construct
  source 1..698: mol_type = other DNA
ttaaaacagccttggggttgttcccaccccaagggcccacgtggcggctagtactctggtacttcggtacctttgtacgcctgttttatctcccttcccaatgtaacttagaagttctcaaatcaaagctcgataggtggagcgcaaaccagcgctctcatgagcaagcactcctgtctccccggtgcggttgtataaactgttcccacggttgaaaacaacctatccgttatccgctatagtacttcgagaaacctagtatcacctttggattgttgatgcgttgcgctcagcacactaacccgtgtgtagcttgggtcgatgagtctggacacaccccactggcgacagtggtccaggctgcgttggcggcctactcatggtgaaaaccatgagacgctaaacatgaacaaggtgtgaagagtctattgagctactatagagtcctccggcccctgaatgcggctaatcttaaccatggagcaagtgctcacaagccagtgggttgcttgtcgtaatgcgcaagtccgtggcggaaccgactactttgggtgtccgtgtttcactttttacttttatgactgcttatggtgacaatttgatattgttaccatttagcttgtcaaatcaattaacttcaatcagaaaatttcaataagcttgtcaaatcaattaacttcaatcagaaaatttcaata

SEQ ID NO: 20872 - DNA, 698 bp, synthetic construct
  source 1..698: mol_type = other DNA
ttaaaacagccttggggttgttcccactccaagggcccacgtggcggctagtactctggtacttcggtacctttgtacgcctgttttatctcccttcccaatgtaatttagaagcttttaaatcaaggctcaataggtggggcgcaaaccagcgctctcatgagcaagcactcctgtctccccggtgtggttgtataaactgttcccacggttgaaaacaacctatccgttatccgctatagtacttcgagaaacctagtatcacctttggattgttgacgcgttgcgctcagcacactaacccgtgtgtagcttgggtcgatgagtctggacataccccactggcgacagtggtccaggctgcgttggcggcctactcatggtgaaaaccatgagacgctagacatgaacaaggtgtgaagagtctattgagctactatagagtcctccggcccctgaatgcggctaatcctaaccatggagcaagtgctcacaggccagtgagttgcttgtcgtaatgcgcaagtccgtggcggaaccgactactttgggtgtccgtgtttcatttttttacttttatgactgcttatggtgacaatttgatattgttaccatttagctgtcaaattaattgcaaaagatcctaagtcttacttaccaatttgcattttgataaccttgatttgaaaattttaata

SEQ ID NO: 20873 - DNA, 698 bp, synthetic construct
  source 1..698: mol_type = other DNA
ttaaaacagccttggggttgttcccactccaagggcccacgtggcggctagtactctggtacttcggtacctttgtacgcctgttttatctcccttcccaatgtaatttagaagctcttaaatcaaggctcaataggtggggcgcaaaccagcgctctcatgagcaagcactcctgtctccccggtgtggttgtataaactgttcccacggttgaaaacaacctatccgttatccgctatagtacttcgagaaacctagtatcacctttggattgttgacgcgttgcgctcagcacactaacccgtgtgtagcttgggtcgatgagtctggacataccccactggcgacagtggtccaggctgcgttggcggcctactcatggtgaaaaccatgagacgctagacatgaacaaggtgtgaagagtctattgagctactatagagtcctccggcccctgaatgcggctaatcctaaccatggagcaagtgctcacaggccagtgagttacttgtcgtaatgcgcaagtccgtggcggaaccgactactttgggtgtccgtgtttcactttttacttttatgactgcttatggtgacaatttgatattgttgccatttagcttgtcaaattaattacaaaagatcctaaatcttacttaccaacttgcattttgacaaccttgatttgaaaattttaata

SEQ ID NO: 20874 - DNA, 698 bp, synthetic construct
  source 1..698: mol_type = other DNA
ttaaaacagccttggggttgttcccactccaagggcccacgtggcggctagtactctggtacttcggtacctttgtacgcctgttttatctcccttcccaatgtaatttagaagctcttaaatcaaggctcaataggcggggcgcaacccagcgctctcatgagcaagcacttctgtctccccggtgtggttgtataaactgttcccacggttgaaaacaacctatccgttatccgctatagtacttcgagaaacctagtatcacctttggattgttgacgcgttgcgctcagcacactaacccgtgtgtagcttgggtcgatgagtctggacataccccactggcgacagtggtccaggctgcgttggcggcctactcatggtgaaaaccatgagacgctaaacatgaacaaggtgtgaagagtctattgagctactatagagtcctccggcccctgaatgcggctaatcctaaccatggagcaagcgctcacaagccagtgagttgcttgtcgtaatgcgcaagtccgtggcggaaccgactactttgggtgtccgtgtttcactttttacttttatgactgcttatggtgacaatttgatattgttaccatttagcttgtcaaattaattacaaaaggttctaaatcttacttactaacttgcattttgataaccttgatttgaaaattttaata

SEQ ID NO: 20875 - DNA, 698 bp, synthetic construct
  source 1..698: mol_type = other DNA
ttaaaacagccttggggttgttcccactccaagggcccacgtggcggctagtactctggtacttcggtacctttgtacgcctgttttatctcccttcccaatgtaatttagaagctcttaaaccaaggctcaataggcggggcgcaacccagcgctctcatgagcaagcacttctgtctccccggtgtggttgtataaactgttcccacggttgaaaacaacctatccgttatccgctatagtacttcgagaaacctagtatcacctttggattgttgacgcgttgcgctcagcacactaacccgtgtgtagcttgggtcgatgagtctggacataccccactggcgacagtggtccaggctgcgttggcggcctactcatggtgaaaaccatgagacgctaaacatgaacaaggtgtgaagagtctattgagctactatagagtcctccggcccctgaatgcggctaatcctaaccatggagcaagcgctcacaagccagtgagttgcttgtcgtaatgcgcaagtccgtggcggaaccgactactttgggtgtccgtgtttcactttttacttttatgactgcttatggtgacaatttgatattgttaccatttagcttgtcaaattaattacaaaaggttctaaatcttacttaccaacttgcattttgataaccttgatttgaaaattttaata

SEQ ID NO: 20876 - DNA, 698 bp, synthetic construct
  source 1..698: mol_type = other DNA
ttaaaacagccttggggttgttcccactccaagggcccacgtggcggctagtactctggtacttcggtacctttgtacgcctgttttatctcccttcccaatgtaatttagaagctcttaaatcaaggctcaataggcggggcgcaacccagcgctctcatgagcaagcacttctgtctccccggtgtggttgtataaactgttcccacggttgaaaacaacctatccgttatccgctatagtacttcgagaaacctagtatcacctttggattgttgacgcgttgcgctcagcacactaacccgtgtgtagcttgggtcgatgagtctggacataccccactggcgacagtggtccaggctgcgttggcggcctactcatggtgaaaaccatgagacgctaaacatgaacaaggtgtgaagagtctattgagctactatagagtcctccggcccctgaatgcggctaatcctaaccatggagcaagcgctcacaagccagtgagttgcttgtcgtaatgcgcaagtccgtggcggaaccgactactttgggtgtccgtgtttcactttttacttttatgactgcttatggtgacaatttgatattgttaccatttagcttgtcaaattaattacaaaaggttctaaatcttacttaccaacttgcattttgataaccttgatttgaaaattttaata

SEQ ID NO: 20877 - DNA, 698 bp, synthetic construct
  source 1..698: mol_type = other DNA
ttaaaacagccttggggttgttcccactccaagggcccacgtggcggctagtactctggtacttcggtacctttgtacgcctgttttatctcctttcccaatgtaatttagaagctcttaaaccaaggctcaataggcggggcgcaacccagcgctctcatgagcaagcacttctgtctccccggtgtggttgtataaactgttcccacggttgaaaacaacctatccgttatccgctatagtacttcgagaaacctagtatcacctttggattgttgacgcgttgcgctcagcacactaacccgtgtgtagcttgggtcgatgagtctggacataccccactggcgacagtggtccaggctgcgttggcggcctactcatggtgaaaaccatgagacgctaaacatgaacaaggtgtgaagagtctattgagctactatagagtcctccggcccctgaatgcggctaatcctaaccatggagcaagcgctcacaagccagtgagttgcttgtcgtaatgcgcaagtccgtggcggaaccgactactttgggtgtccgtgtttcactttttacttttatgactgcttatggtgacaatttgatattgttaccatttagcttgtcaaattaattacaaaaggttctaaatcttacttaccaacttgcattttgataaccttgatttgaaaattttaata

SEQ ID NO: 20878 - DNA, 698 bp, synthetic construct
  source 1..698: mol_type = other DNA
ttaaaacagccttggggttgttcccactccaagggcccacgtggcggctagtactctggtacttcggtacctttgtacgcctgttttatctcccttcccaatgtaatttagaagctcttaaatcaaggctcaataggtggggcgcaaaccagcgctctcatgagcaagcactcctgtctccccggtgtggttgtataaactgttcccacggttgaaaacaacctatccgttatccgctatagtacttcgagaaacctagtaccacctttggattgttgacgcgttgcgctcagcacactaacccgtgtgtagcttgggtcgatgagtctggacataccccactggcgacagtggtccaggctgcgttggcggcctactcatggtgaaaaccatgagacgctagacatgaacaaggtgtgaagagtctattgagctactatagagtcctccggcccctgaatgcggctaatcctaaccatggagcaagtgctcacaggccagtgagttgcttgtcgtaatgcgcaagtccgtggcggaaccgactactttgggtgtccgtgtttcactttttacttttatgactgcttatggtgacaatttgatattgttaccatttagcttgtcaaattaattgcaaaggatcttaaatcttacttaccaatttgcattttgacaatcttgatttgaaaattttaata

SEQ ID NO: 20879 - DNA, 698 bp, synthetic construct
  source 1..698: mol_type = other DNA
ttaaaacagccttggggttgttcccactccaagggcccacgtggcggctagtactctggtacttcggtacctttgtacgcctgttttatctcccttcccaatgtaatttagaagctcttaaatcaaggctcaataggtggggcgcaaaccagcgctctcatgagcaagcactcctgtctccccggtgtggttgtataaactgttcccacggttgaaaacaacctatccgttatccgctatagtacttcgagaaacctagtatcacctttggattgttgacgcgttgcgctcagcacactaacccgtgtgtagcttgggtcgatgagtctggacataccccactggcgacagtggtccaggctgcgttggcggcctactcatggtgaaaaccatgagacgctagacatgaacaaggtgtgaagagtctattgagctactatagagtcctccggcccctgaatgcggctaatcctaaccatggagcaagtgctcacaggccagtgagttgcttgtcgtaatgcgcaagtccgtggcggaaccgactactttgggtgtccgtgtttcactttttacttttatgactgcttatggtgacaatttgatattgttaccatttagcttgtcaaattaattgcaaaggatcctaaatcttacttaccaatttgcattttgacaatcttgatttgaaaattttaata

SEQ ID NO: 20880 - DNA, 698 bp, synthetic construct
  source 1..698: mol_type = other DNA
ttaaaacagccttggggttgttcccaccccaagggcccacgtggcggctagtactctggtacttcggtacctttgtacgcctgttttatctcccttcccaatgtaatttagaagctcttaaatcaaggctcaataggtggggcgcaaaccagcgctctcatgagcaagcactcctgtctccccggtgtggttgtataaactgttcccacggttgaaaacaacctatccgttatccgctatagtacttcgagaaacctagtatcacctttggattgttgacgcgttgcgctcagcacactaacccgtgtgtagcttgggtcgatgagtctggacacaccccactggtgacagtggtccaggctgcgttggcggcctactcatggtgaaaaccatgagacgctagacatgaacaaggtgtgaagagtctattgagctactatagagtcctccggcccctgaatgcggctaatcctaaccatggagcaagtgctcacaggccagtgagtagcttgtcgtaatgcgtaagtccgtggcggaaccgactactttgggtgtccgtgtttcactttttacttttatgactgcttatggtgacaatttgatattgttaccatttagcttgtcaaattgattgcaaaagatactaaatcttacttaccaacttgcattttgataaccttgatttgaaaattttaata

SEQ ID NO: 20881 - DNA, 698 bp, synthetic construct
  source 1..698: mol_type = other DNA
ttaaaacagccttggggttgttcccactccaagggcccacgtggcggctagtactctggtacttcggtacctttgtacgcctgttttatctcccttcccaatgtaatttagaagctcttaaatcaaggctcaataggtggggcgcaaaccagcgctctcatgagcaagcactcctgtctccccggtgtggttgtataaactgttcccacggttgaaaacaacctatccgttatccgctatagtacttcgagaaacctagtatcacctttggaatgttgacgcgttgcgctcagcacactaacccgtgtgtagcttgggtcgatgagtctggacataccccactggcgacagtggtccaggctgcgttggcggcctactcatggtgaaaaccatgagacgctagacatgaacaaggtgtgaagagtctattgagctactatagagtcctccggcccctgaatgcggctaatcctaaccatggagcaagtgctcacaggccagtgagttgcttgtcgtaatgcgcaagtccgtggcggaaccgactactttgggtgtccgtgtttcactttttacttttatgactgcttatggtgacaatttgatattgttaccatttagcttgtcaaattaattgcaaaagatcctaaaacttacttaccaatttgcattttgataaccttgatttgaaaattttaata

SEQ ID NO: 20882 - DNA, 698 bp, synthetic construct
  source 1..698: mol_type = other DNA
ttaaaacagccttggggttgttcccactccaagggcccacgtggcggctagtactctggtacttcggtacctttgtacgcctgttttatctcccttcccaatgtaatttagaagctcttaaatcaaggctcaataggtggggcgcaaaccagcgctctcatgagcaagcactcctgtctccccggtgtggttgtataaactgttcccacggttgaaaacaacctatccgttatccgctatagtacttcgagaaacctagtatcacctttggattgttgacgcgttgcgctcagcacactaacccgtgtgtagcttgggtcgatgagtctggacataccccactggcgacagtggtccaggctgcgttggcggcctactcatggtgaaaaccatgagacgctagacatgaacaaggtgtgaagagtctattgagctactatagagtcctccggcccctgaatgcggctaatcctaaccatggagcaagtgctcacaggccagtgagttacttgtcgtaatgcgcaagtccgtggcggaaccgactactttgggtgtccgtgtttcactttttacttttatgactgcttatggtgacaatttgatattgttgccatttagcttgtcaaattaattacaaaagatcccaaatcttacttaccaacttgcattttgacaaccttgatttgaaaattttaata

SEQ ID NO: 20883 - DNA, 698 bp, synthetic construct
  source 1..698: mol_type = other DNA
ttaaaacagccttggggttgttcccactccaagggcccacgtggcggctagtactctggtacttcggtacctttgtacgcctgttttatctcccctcccaatgtaatttagaagctcttaaatcaaggctcaataggtggggcgcaaaccagcgctctcatgagcaagcactcctgtctccccggtgtggttgtataaactgttcccacggttgaaaacaacttatccgttatccgctatagtacttcgagaaacctagtatcacctttggattgttgacgcgttgcgctcagcacactaacccgtgtgtagcttgggtcgatgagtctggacataccccactggcgacagtggtccaggctgcgttggcggcctactcatggtgaaaaccatgagacgctagacatgaacaaggtgtgaagagtctattgagctactatagagtcctccggcccctgaatgcggctaatcctaaccatggagcaagtgctcacaggccagtgagttgcttgtcgtaatgcgcaagtccgtggcggaaccgactactttgggtgtccgtgtttcactttttacttttatgactgcttatggtgacaatttgatattgttaccatttagcttgtcaaattaattgcaaaagatcctaaatcttacttaccaacttgcattttgacaaccttgatttgaaaattttaata

SEQ ID NO: 20884 - DNA, 698 bp, synthetic construct
  source 1..698: mol_type = other DNA
ttaaaacagccttggggttgttcccactccaagggcccacgtggcggctagtactctggtacttcggtacctttgtacgcctgttttatctcccttcccaatgtaatttagaagcttttaaatcaaggctcaataggtggggcgcaaaccagcgctctcatgagcaagcactcctgtctccccggtgtggatgtataaactgttcccacggttgaaaacaacctatccgttatccgctatagtacttcgagaaacctagtatcacctttggattgttgacgcgttgcgctcagcacactaacccgtgtgtagcttgggtcgatgagtctggacacaccccactggcgacagtggtccaggctgcgttggcggcctactcatggtgaaaaccatgagacgctagacatgaacaaggtgtgaagagtctattgagctactatagagtcctccggcccctgaatgcggctaatcctaaccatggagcaagtgctcacaggccagtgagtagcttgtcgtaacgcgcaagtccgtggcggaaccgactactttgggtgtccgtgtttcactttttacttttatgactgcttatggtgacaatttgatattgttaccatttagcttgtcaaattaattgcaaaagatcctaaattttacttaccaacttgcattttgataaccttgatttgaaaattttaata

SEQ ID NO: 20885 - DNA, 697 bp, synthetic construct
  source 1..697: mol_type = other DNA
ttaaaacagccttggggttgttcccaccccaagggcccacgtggcggctagtactctggtacttcggtacctttgtacgcctgttttatctcccttcccaatgtaacttagaagttctcaaatcaaagctcaataggtggagcgcaaaccagcgctctcatgagcaagcactcctgtctccccggtgcggttgtataaactgttcccacggttgaaaacaacctatccgttatccgctatagtacttcgagaaacctagtatcacctttggattgttgatgcgttgcgctcagcacactaacccgtgtgtagcttgggtcgatgagtctggacataccccactggcgacagtggtccaggctgcgttggcggcctactcatggtgaaaaccatgagacgctaaacatgaacaaggtgtgaagagtctattgagctactatagagtcctccggcccctgaatgcggctaatcttaaccatggagcaagtgctcacaagccagtgggttgcttgtcgtaatgcgcaagtccgtggcggaaccgactactttgggtgtccgtgtttcactttttacttttatgactgcttatggtgacaatttgatattgttaccatttagcttgtcaaatcaattacaaaagaccgaaatcttatttatcaacttgctttttgataacttcaatcagaaaatttcaata

SEQ ID NO: 20886 - DNA, 695 bp, synthetic construct
  source 1..695: mol_type = other DNA
cccacccccagggtccaatggacgctagtacaccggtatcacggtacccttgtacgcctgttttataatccccttcccccgtaacattagaagcataaaagcaaccgctcaatagacaccatacatccagtgtggttacgagcaagcacttctgtctccccggttgcgccctatatgctgtgtgaacggcaaaaaggggcaatatcgttacccgcttgactactacgggaaacccagtatcatcttcgattgatttgagagttgcgttcagcgcctgacccccggcgtagctcaggctgatgaggctccgaacaccccacaggcgactgtgccggagcctgcgttggcggcctgcctataccctgcggtatgggacgctcacttcatgacatggtgcgaagagtctactgtgctagtcaagattcctccggcccctgaatgtggataatcctaaccactgatcctacgttcgcaatccagcgttcggtaggtcgtaacgcgcaagtcggtggcggaaccaactactttgggtgtccgtgtttcctttatttcctactgaatgcttatggtgacaattgttttgatcagttgttgccattgctcgcgttcagtgtgtaattacgaaaacaagactatcagttgttaccatcccccacgttcagtgcataatcacaaaaacaagattttctgtcata

SEQ ID NO: 20887 - DNA, 698 bp, synthetic construct
  source 1..698: mol_type = other DNA
ttaaaacagccttggggttgttcccactccaagggcccacgtggcggctagtactctggtacttcggtacctttgtacgcctgttttatctcccttcccaatgtaacttagaagctcttaaatcaaggctcaataggtggggcgcaaaccagcgctctcatgagcaagcactcctgtctccccggtgtggttgtataaactgttcccacggttaaaaacaacctatccgttatccgctatagtacttcgagaaacctagtatcacctttggattgttgacgcgttgcgttcagcacactaacccgtgtgtagcttgggtcgatgagtctggacgtaccccactggtgacagtggtccaggctgcgttggcggcctactcatggtgaaaaccatgagacgctagacatgaacaaggtgtgaagagtctattgagctactatagagtcctccggcccctgaatgcggctaatcctaaccatggagcaagtgctcacaggccagtgagttgcttgtcgtaatgcgcaagtccgtggcggaaccgactactttgggtgtccgtgtttcactttttacttttatgactgcttatggtgacaatttgatattgttaccatttagcttgtcaaattaattgcaaaagatcctaagtctcatttaccaacttgcattttgattaccttgatttgtaaattttaata

SEQ ID NO: 20888 - DNA, 697 bp, synthetic construct
  source 1..697: mol_type = other DNA
taaaacagccttggggttgttcccactccaagggcccacgtggcggctagtactctggtacttcggtacctttgtacgcctgttttacctcccttcccaatgtaacttagaagttcttaaatcaatgctcaataggtggggcgcaaaccagcgttctcatgagcaagcactcctgtctccccggtgaggttgtataaactgttcccacggttgaaaacgacctatccgttatccgctatagtacttcgagaaacctagtaccacctttggattgttgacgcgttgcgctcagcacactaacccgtgtgtagcttgggtcgatgagtctggacatacctcactggcgacagtggtccaggctgcgttggcggcctactcatggcgaaagccatgagacgctagacatgaacaaggtgtgaagagtctattgagctactatagagtcctccggcccctgaatgcggctaatcctaaccatggagcaagtgctcacaggccagtgagttgcttgtcgtaatgcgcaagtccgtggcggaaccgactactttgggtgtccgtgtttcactttttacttttatgactgcttatggtgacaatttgatattgttaccatttagcttgtcaaatcaattgcaaaagatcctaaatcttatttatcaacttgcatcttgataactttaatttgaaaattttaaca

SEQ ID NO: 20889 - DNA, 697 bp, synthetic construct
  source 1..697: mol_type = other DNA
taaaacagccttggggttgttcccactccaagggcccacgtggcggctagtactctggtacttcggtacctttgtacgcctgttttatctcccttcccaatgtaacttagaagttcttaaatcaatgctcaataggtggggcgcaaaccagcgctctcatgagcaagcactcctgtctccccggtgaggttgtataaactgttcccacggttgaaaacaacctatccgttatccgctatagtacttcgagaaacctagtaccacctttggattgttgacgcgttgcgctcagcacactaacccgtgtgtagcttgggtcgatgagtctggacatacctcactggcgacagtggtccaggctgcgttggcggcctactcatggtgaaagccatgagacgctagacatgaacaaggtgtgaagagtctattgagctactatagagtcctccggcccctgaatgcggctaatcctaaccatggagcaagtgctcacaggccagtgagttgcttgtcgtaatgcgcaagtccgtggcggaaccgactactttgggtgtccgtgtttcactttttacttttatgactgcttatggtgacaatttgatattgttaccatttagcttgtcaaatcaattgcaaaagatcctaaatcttatttatcaacttgcatcttgataactttaatttgaaaattttaaca

SEQ ID NO: 20890 - DNA, 697 bp, synthetic construct
  source 1..697: mol_type = other DNA
taaaacagccttggggttgttcccactccaagggcccacgtggcggctagtactctggcacttcggtacctttgtacgcctgttttatctcccttcccaatgtaacttagaagttcttaaatcaatgctcaataggtggggcgcaaaccagcgttctcatgagcaagcactcctgtctccccggtgaggttgtataaactgttcccacggttgaaaacgacctatccgttatccgctatagtacttcgagaaacctagtaccacctttggattgttgacgcgttgcgctcagcacactaacccgtgtgtagcttgggtcgatgagtctggacatacctcactggcgacagtggtccaggctgcgttggcggcctactcatggcgaaagccatgagacgctagacatgaacaaggtgtgaagagtctattgagctactatagagtcctccggcccctgaatgcggctaatcctaaccatggagcaagtgctcacaggccagtgagttgcttgtcgtaatgcgcaagtccgtggcggaaccgactactttgggtgtccgtgtttcactttttacttttatgactgcttatggtgacaatttgatattgttaccatttagcttgtcaaatcaattgcaaaagatcctaaatcttatttatcaacttgcatcttgataactttaatttgaaaattttaaca

SEQ ID NO: 20891 - DNA, 697 bp, synthetic construct
  source 1..697: mol_type = other DNA
taaaacagccttggggttgttcccactccaagggcccacgtggcggctagtactctggtacttcggtacctttgtacgcctgttttatctcccttcccaatgtaacttagaagttcttaaatcaatgctcaataggtggggcgcaaaccagcgctctcatgagcaagcactcctgtctccccggtgaggttgtataaactgttcccacggttgaaaacaacctatccgttatccgctatagtacttcgagaaacctagtaccacctttggattgttgacgcgttgcgctcagcacactaacccgtgtgtagcttgggtcgatgagtctggacatacctcactggcgacagtggtccaggctgcgttggcggcctactcatggcgaaagccatgagacgctagacatgaacaaggtgtgaagagtctattgagctactatagagtcctccggcccctgaatgcggctaatcctaaccatggagcaagtgctcacaggccagtgagttgcttgtcgtaatgcgcaagtccgtggcggaaccgactactttgggtgtccgtgtttcactttttacttttatgactgcttatggtgacaatttgatattgttaccatttagcttgtcaaatcaactgcaaaagatcctaaatcttatttatcaacttgcatcttgataactttaatttgaaaattttaaca

SEQ ID NO: 20892 - DNA, 698 bp, synthetic construct
  source 1..698: mol_type = other DNA
ttaaaacagccttggggttgttcccactccaagggcccacgtggcggctagtactctggtacttcggtacctttgtacgcctgttttatctcccttcccaatgtaacttagaagctcttaaatcaaggctcaataggtggggcgcaaaccagcgctctcatgagcaagcactcctgtctccccggtgtggttgtataaactgttcccacggttgaaaacaacctatccgttatccgctatagtacttcgagaaacctagtatcacctttggattgttgacgcgttgcgctcagcacactaacccgtgtgtagcttgggtcgatgagtctggacgtaccccactggtaacagtggtccaggctgcgttggcggcctactcatggtgaaaaccatgagacgctagacatgaacaaggtgtgaagagtctattgagctactatagagtcctccggcccctgaatgcggctaatcctaaccatggagcaagtgctcacaggccagtgagttgcttgtcgtaatgcgcaagtccgtggcggaaccgactactttgggtgtccgtgtttcactttttacttttatgactgcttatggtgacaatttgatattgttaccatttagcttgtcaaattaattgcaaaagatcctaagtctcatttaccaacttgcattttgataaccttgatttgtaaattttaata

SEQ ID NO: 20893 - DNA, 698 bp, synthetic construct
  source 1..698: mol_type = other DNA
ttaaaacagccttggggttgttcccactccaagggcccacgtggcggctagtactctggtacttcggtacctttgtacgcctgttttatctcccttcccaatgtaacttagaagctcttaaattaaggctcaataggtggggcgcaaaccagcgctctcatgagcaagcactcctgtctccccggtgtggttgtataaactgttcccacggttgaaaacaacctatccgttatccgctatagtacttcgagaaacctagtatcacctttggattgttgacgcgttgcgctcagcacactaacccgtgtgtagcttgggtcgatgagtctggacgtaccccactggcgacagtggtccaggctgcgttggcggcctactcatggtgaaaaccatgagacgctagacatgaacaaggtgtgaagagtctattgagctactatagagtcctccggcccctgaatgcggctaatcctaaccatggagcaagtgctcacaggccagtgagttgcttgtcgtaatgcgcaagtctgtggcggaaccgactactttgggtgtccgtgtttcactttttacttttatgactgcttatggtgacaatttgatattgttaccatttagcttgtcaaatcaattgcaaaagatcctaaatcttacttaccaacttgcattttgataaccttgatttgaaaattttaata

SEQ ID NO: 20894 - DNA, 698 bp, synthetic construct
  source 1..698: mol_type = other DNA
ttaaaacagccttggggttgttcccactccaagggcccacgtggcggctagtactctggtacttcggtacccttgtacgcctgttttatctcccttcccaatgtaacttagaagctcttaaatcaaggctcaataggtggggcgcaaaccagcgctctcatgagcaagcactcctgtctccccggtgtggttgtataaactgttcccacggttgaaaacaacctatccgttatccgctatagtacttcgagaaacctagtatcacctttggattgttgacgcgttgcgctcagcacactaacccgtgtgtagcttgggtcgatgagtctggacgtaccccactggcgacagtggtccaggctgcgttggcggcctactcatggtgaaaaccatgagacgctagacatgaacaaggtgtgaagagtctattgagctactatagagtcctccggcccctgaatgcggctaatcctaaccatggagcaagtgctcacaggccagtgagttgcttgtcgtaatgcgcaagtctgtggcggaaccgactactttgggtgtccgtgtttcactttttacttttatgactgcttatggtgacaatttgatattgttaccatttagcttgtcaaatcaattgcaaaagatcctaaatcttacttaccaacttgcattttgataaccttgatttgaaaattttaata

SEQ ID NO: 20895 - DNA, 698 bp, synthetic construct
  source 1..698: mol_type = other DNA
ttaaaacagccttggggttgttcccactccaagggcccacgtggcggctagtactctggtacttcggtacctttgtacgcctgttttatctcccttcccaatgtaacttagaagctcttaaatcaaggctcaataggtggggcgcaaaccagcgctctcatgagcaagcactcctgtctccccggtgtggttgtataaactgttcccacggttgaaaacaacctatccgttatccgctatagtacttcgagaaacctagtatcacctttggattgttgacgcgttgcgctcagcacactaacccgtgtgtagcttgggtcgatgagtctggacgtaccccactggcgacagtggtccaggctgcgttggcggcctactcatggtgaaaaccatgagacgctagacatgaacaaggtgtgaagagtctattgagctactatagagtcctccggcccctgaatgcggctaatcctaaccatggagcaagtgctcacaggccagtgagttgcttgtcgtaatgcgcaagtccgtggcggaaccgactactttgggtgtccgtgtttcactttttacttttatgactgcttatggtgacaatttgatattgttaccatttagcttgtcaaattaattacaaaagatcctaaatcttatttaccaacttgcattttgataactttgatttgaaaattttaata

SEQ ID NO: 20896 - DNA, 698 bp, synthetic construct
  source 1..698: mol_type = other DNA
ttaaaacagccttggggttgttcccactccaagggcccacgtggcggctagtactctggtacttcggtacctttgtacgcctgttttatctcccctcccaatgtaacttagaagctcttaaatcaaggctcaataggtggggcgcaaaccagcgctctcatgagcaagcactcctgtctccccggtgtggttgtataaactgttcccacggttgaaaataacctatccgttatccgctatagtacttcgagaaacctagtatcacctttggattgttgacgcgttgcgctcagcacactaacccgtgtgtagcttgggtcgatgagtctggacgtaccccactggcgacagtggtccaggctgcgttggcggcctactcatggtgaaaaccatgagacgctagacatgaacaaggtgtgaagagtctattgagctactatagagtcctccggcccctgaatgcggctaatcctaaccatggagcaagtgctcacaggccagtgagttgcttgtcgtaatgcgcaagtctgtggcggaaccgactactttgggtgtccgtgtttcactttttacttttatgactgcttatggtgacaatttgatattgttaccatttagcttgtcaaattaattgcaaaagatcctaaatcttatttaccaacttgcattttgataaccttggtttgaaaattttaata

SEQ ID NO: 20897 - DNA, 698 bp, synthetic construct
  source 1..698: mol_type = other DNA
ttaaaacagccttggggttgttcccactccaagggcccacgtggcggctagtactctggtacttcggtacctttgtacgcctgttttatctcccttcccaatgtaacttagaagctcttaaatcaaggctcaataggtggggcgcaaaccagcgctctcatgagcaagcactcctgtctccccggtgtggttgtataaactgttcccacggttgaaaacaacctatccgttatccgctatagtacttcgagaaacctagtatcacctttggattgttgacgcgttgcgctcagcacactaacccgtgtgtagcttgggtcgatgagtctggacataccccactggcgacagtggtccaggctgcgttggcggcctactcatggtgaaaaccatgagacgctagacatgaacaaggtgtgaagagtctattgagctactatagagtcctccggcccctgaatgcggctaatcctaaccatggagcaagtgctcacaggccagtgagttgcttgtcgtaatgcgcaagtccgtggcggaaccgactactttgggtgtccgtgtttcactttttacttttatgactgcttatggtgacaatttgatattgttaccatttagcttgtcaaatcaattgcaaaagatcctaaatcttatttatcaacttgcattttgataactctgatttaaaaattttaata

SEQ ID NO: 20898 - DNA, 698 bp, synthetic construct
  source 1..698: mol_type = other DNA
ttaaaacagccttggggttgttcccactccaagggcccacgtggcggctagtactctggtacttcggtacctttgtacgcctgttttatctcccttccccatgtaacttagaagctcttaaatcaaggctcaataggtggggcgcaaaccagcgctctcatgagcaagcactcctgtctccccggtgtggttgtataaactgttcccacggttgaaaacaacctatccgttatccgctatagtacttcgagaaacctagtatcacctttggattgttgacgcgttgcgctcagcacactaacccgtgtgtagcttgggtcgatgagtctggacataccccactggcgacagtggtccaggctgcgttggcggcctactcatggtgaaaaccatgagacgctagacatgaacaaggtgtgaagagtctattgagctactatagagtcctccggcccctgaatgcggctaatcctaaccatggagcaagtgctcacaggccagtgagttgcttgtcgtaatgcgcaagtccgtggcggaaccgactactttgggtgtccgtgtttcactttttacttttatgactgcttatggtgacaatttgatattgttaccatttagcttgtcaaatcaattgtaaaagattctaaatcttatttatcaacttgcattttgataactttgatttgaaaattttaata

SEQ ID NO: 20899 - DNA, 697 bp, synthetic construct
  source 1..697: mol_type = other DNA
taaaacagccttggggttgttcccactccaagggcccacgtggcggctagtactctggtacttcggtacctttgtacgcctgttttatctcccttcccaatgtaacttagaagttcttaaatcaatgctcaataggtggggcgcaaaccagcgctctcatgagcaagcactcctgtctccccggtgaggttgtataaactgttcccacggttgaaaacaacctatccgttatccgctatagtacttcgagaaacctagtaccacctttggattgttgacgcgttgcgttcagcacactaacccgtgtgtagcttgggtcgatgagtctggacatacctcactggcgacagtggtccaggctgcgttggcggcctactcatggtgaaagccatgagacgctagacatgaacaaggtgtgaagagtctattgagctactatagagtcctccggcccctgaatgcggctaatcctaaccatggagcaagtgctcacaggccagtgagttgcttgtcgtaatgcgcaagtccgtggcggaaccgactactttgggtgtccgtgtttcactttttacttttatgactgcttatggtgacaatttgatattgttaccatttagcttgtcaaatcaattgcaaaagatcctaaatcttatttatcaacttgcatcttgataactttaatttgaaaattttaaca

SEQ ID NO: 20900 - DNA, 698 bp, synthetic construct
  source 1..698: mol_type = other DNA
ttaaaacagccttggggttgttcccactccaagggcccacgtggcggctagtactctggtacttcggtacctttgtacgcctgttttatctcccttcccaatgtaacttagaagctcttaaatcaaggctcaataggtggggcgcaaaccagcgctctcatgagcaagcactcctgtctccccggtgtggttgtataaactgttcccacggttgaaaacaacctatccgttatccgctatagtacttcgagaaacctagtatcacctttggattgttgacgcgttgcgctcagcacactaacccgtgtgtagcttgggtcgatgagtctggacatacctcactggcgacagtggtccaggctgcgttggcggcctactcatggtgaaaaccatgagacgctagacatgaacaaggtgtgaagagtctattgagctactatagagtcctccggcccctgaatgcggctaatcctaaccatggagcaagtgctcacaggccagtgagttgcttgtcgtaatgcgcaagtccgtggcggaaccgactactttgggtgtccgtgtttcactttttatttttatgactgcttatggtgacaatttgatattgttaccatttagcttgtcaaatcaattgcaaaagatcctaaatcttatttatcaacttgcattttgataactttgatttgaaaattttaata

SEQ ID NO: 20901 - DNA, 730 bp, synthetic construct
  source 1..730: mol_type = other DNA
gtgggttgttcccacccacagggcccactgggcgctagcacactggtatcacggtacctttgtgcgcctgttttatccaccccctccccaactaacgtagaagcacaaaccaagtggtcaatagatggctcagtacaccaactgggtttagaccaagtacttctgttaccccggactaagtatcaataggctgctcacgcggctgaaggagaaaacgttcgttacccggccaactacttcgagaagcccagtaccgccatggaggatgcgcagtgtttcgttcagcacaaccccagtgtagatcaggccgatgagtcaccgctaaccccacgggtgaccgtggcggtggctgcgctggcggcctgcccatggggtaacccatgggacgcttcaattccgacatggtgcgaagagcctattgagctagttggtagtcctccggcccctgaatgcggctaatcccaactgcggagcagacacccacaaaccagtgggcagtttgtcgtaacgggcaactctgcagcggaaccgactactttgggtgtccgtgtttccttttactcctatattgactgcttatggtgacaattgaaagattgttaccatatagctattggattggtcatccggtgacaaacagagctattatttacctttttattggctttgtgccattgaattttaaagttataaaaaccataaactttatcttgattcttaacacagcaaa

SEQ ID NO: 20902 - DNA, 698 bp, synthetic construct
  source 1..698: mol_type = other DNA
taaaacagccttggggttgttcccactccaagggcccacgtggcggctagtactctggtacttcggtacctttgtacgcctgttttatctcccttcccaatgtaatttagaagctcttaaatcaaggctcaataggtggggcgcaaaccagcgctctcatgagcaagcactcctgtctccccggtgtggttgtataaactgttcccacggttgaaaacaacctatccgttatccgctatagtacttcgagaaacctagtatcacctttggattgttgacgcgttgcactcagcacactaacccgtgtgtagcttgggtcgatgagtctggacataccccactggcgacagtggtccaggctgcgttggcggcctactcatggtgaaaaccatgagacgctagacatgaacaaggtgtgaagagtctattgagctactatagagtcctccggcccctgaatgcggctaatcctaaccatggagcaagtgctcacaggccagtgagttgcttgtcgtaatgcgcaagtccgtggcggaaccgactactttgggtgtccgtgtttcactttttacttttatgactgcttatggtgacaatttgatattgttaccatttagcttgtcaaattaattgcaaaagatcctaaatcttacttaccaacttgcattttgacaaccttgatttgaaaatttttaata

SEQ ID NO: 20903 - DNA, 698 bp, synthetic construct
  source 1..698: mol_type = other DNA
ttaaaacagccttggggttgttcccactccaagggcccacgtggcggctagtactctggtacttcggtacctttgtacgcctgttttatctcccttcccaatgtaatttagaagctgttaaatcaaggctcaataggtggggcgcaaaccagcgctctcatgagcaagcactcctgtctccccggtgtggttgtataaactgttcccacggttgaaaacaacctatccgttatccgctatagtacttcgagaaacctagtatcacctttggattgttgacgcgttgcgctcagcacactaacccgtgtgtagcttgggtcgatgagtctggacataccccactggcgacagtggtccaggctgcgttggcggcctactcatggtgaaaaccatgagacgctagacatgaacaaggtgtgaagagtctattgagctactatagagtcctccggcccctgaatgcggctaatcctaaccatggagcaagtgctcacaggccagtgagttgcttgtcgtaatgcgcaagtccgtggcggaaccgactactttgggtgtccgtgtttcactttttacttttatgactgcttatggtgacaatttgatattgttaccatttagctcgtcaaattaattgcaaaagatcctaaatcttacttaccaacttgcattttgacaaccttgatttgaaaattttaata

SEQ ID NO: 20904 - DNA, 698 bp, synthetic construct
  source 1..698: mol_type = other DNA
ttaaaacagccttggggttgttcccactccaagggcccacgtggcggctagtactctggtacttcggtacctttgtacgcctgttttatctcccttcccaatgtaatttagaagctcttaaatcaaggctcaataggtggggcgcaaaccagcgctctcatgagcaagcactcctgtctccccggtgtggttgtataaactgttcccacggttgaaaacaacctatccgttatccgctatagtacttcgagaaacctagtatcacctttggattgttgacgcgttgcgctcagcacactaacccgtgtgtagcttgggtcgatgagtctggacataccccactggcgacagtggtccaggctgcgttggcggcctactcatggtgaaaaccatgagacgctagacatgaacaaggtgtgaagagtctattgagctactatagagtcctccggcccctgaatgcggctaatcctaaccatggagcaagtgctcacaggccagtgagttgcttgtcgtaatgcgtaagtccgtggcggaaccgactactttgggtgtccgtgtttcactttttacttttatgactgcttatggtgacaatttgatattgttaccatttagcttgtcaaattaattgcaaaagatcctaaatcttacttgccaacttgcattttgacaaccttgatttgaaaattttaata

SEQ ID NO: 20905 - DNA, 698 bp, synthetic construct
  source 1..698: mol_type = other DNA
taaaacagccttggggttgttcccactccaagggcccacgtggcggctagtactctggtacttcggtacctttgtacgcctgttttatctcccttcccaatgtaatttagaagctcttaaatcaaggctcaataggtggggcgcaaaccagcgctctcatgagcaagcacttctgtctccccggtgtggttgtataaactgttcccacggttgaaaacaacctatccgttatccgctatagtacttcgagaaacctagtatcacctttggattgttgacgcgttgcgctcagcacactaacccgtgtgtagcttgggtcgatgagtctggacataccccactggcgacagtggtccaggctgcgttggcggcctactcatggtgaaaaccatgagacgctagacatgaacaaggtgtgaagagtctattgagctactatagagtcctccggcccctgaatgcggctaatcctaaccatggagcaagtgctcacaggccagtgagttgcttgtcgtaatgcgcaagtccgtggcggaaccgactactttgggtgtccgtgtttcactttttacttttatgactgcttatggtgacaatttgatattgttaccatttagcttgtcaaattaattgcaaaagatcctaaatcttacttaccaatttgcattttgacaaccttgatttgaaaatttttaata

SEQ ID NO: 20906 - DNA, 698 bp, synthetic construct
  source 1..698: mol_type = other DNA
taaaacagccttggggttgttcccactccaagggcccacgtggcggctagtaccctggtacttcggtacctttgtacgcctgttttatctcccttcccaatgtaatttagaagctcttaaatcaaggctcaataggtggggcgcaaaccagcgctctcatgagcaagcactcctgtctccccggtgtggttgtataaactgttcccacggttgaaaacaacctatccgttatccgctatagtacttcgagaaacctagtatcacctttggattgttgacgcgttgcgctcagcacactaacccgtgtgtagcttgggtcgatgagtctggacataccccactggcgacagtggtccaggctgcgttggcggcctactcatggtgaaaaccatgagacgctagacatgaacaaggtgtgaagagtctattgagctactatagagtcctccggcccctgaatgcggctaatcctaaccatggagcaagtgctcacaggccagtgagttgcttgtcgtaatgcgcaagtccgtggcggaaccgactactttgggtgtccgtgtttcactttttacttttatgactgcttatggtgacaatttgatattgttaccatttagcttgtcaaattaattgcaaaagatcctaaatcttacttaccaacctgcattttgacaaccttgatttgaaaatttttaata

SEQ ID NO: 20907 - DNA, 698 bp, synthetic construct
  source 1..698: mol_type = other DNA
taaaacagccttggggttgttcccaccccaagggcccacgtggcggctagtactctggtacttcggtacctttgtacgcctgttttatctcccttcccaatgtaatttagaagctcttaaatcaaggctcaataggtggggcgcaaaccagcgctctcatgagcaagcactcctgtctccccggtgtggttgtataaactgttcccacggttgaaaacaacctatccgttatccgctatagtacttcgagaaacctagtatcacctttggattgttgacgcgttgcgctcagcacactaacccgtgtgtagcttgggtcgatgagtctggacataccccactggcgacagtggtccaggctgcgttggcggcctactcatggtgaaaaccatgagacgctagacatgaacaaggtgtgaagagtctattgagctactatagagtcctccggcccctgaatgcggctaatcctaaccatggagcaagtgctcacaggccagtgagttgcttgtcgtaatgcgcaagtccgtggcggaaccgactactttgggtgtccgtgtttcactttttacttttatgactgcttatggtgacaatttgatattgttaccatttagcttgtcaaattaattgcaaaagatcctaaatcttacttaccaacttgtattttgacaaccttgatttgaaaatttttaata

SEQ ID NO: 20908 - DNA, 711 bp, synthetic construct
  source 1..711: mol_type = other DNA
agggcccactgggcgctagcactctggtattgcggtacctttgtgcgcctgttttatggcccccccccagttggaacttagaagtgaagcctctcgaccaatagtgggcgtggcacaccagccacgtcttggtcaagcacatctgtttccccggactgagtatcaataaactgctcgcgcggttgaaggagaaaacgttcgttacccggctaactacttcgggaaacccagtagtatcatggaaattgcgaggcgtttcgctcagcactccccccgtgcagatcaggtcgatgagtcactgcaccccccacgggtgaccgtggcagtggctgcgttggcggcctgcctatggggtgacccataggacgcttcaaaatggacatggtgcgaagagtctactgagctagttagtagtcctccggcccctgaatgcggcaaatcctaaccgcggagcaagtgtccacaaaccagtgggttgcttgtcgtaatgggtaactctgcggcggaaccgactactttgggtgtccgtgtttccttttatcttttattatggctgcttatggtgacaattgagagattgttaccatatagctattggattggccatccggtgaacaacagagcgatcatttacctctttgttggtttcgttccattgagtcccaaagtttttacgacactcaaatttattctcctacttaacaaagcaaa

SEQ ID NO: 20909 - DNA, 811 bp, synthetic construct
  source 1..811: mol_type = other DNA
taaaatagcctatggggcgctcccacccacagggccaatctggcgctagtacactggtacgccagtaccttggtatcacggtaccactgtacgttagtacctttgtatgcctgttttatatccccttccccaaagtaactttagaagcttaagaaaacaaagaccactaggagtccaacacccagttggattgcggtcaagcacttctgtttccccggacctagtagtgataggctgtacccacggccgaagatgaacccgtccgttatccggccagctacttcgagaagcctagtagcatcaaagatctgtcttggcgtttcgctcagcgcgttccccccgcgtagatcgggtcgatgggtctccgcatcccccacgggcgaccgtggcggaggccgcgtggcggcccgcctatggcgaaagccataggacgccatttcagtgacagggtgtgaagagcctattgagctagttggtagtcctccggcccctgaatgcggctaatcctaaccacggagcgtccaccagcaaaccagctggcagggcgtcgtaacgggtaactctgtggcggaaccgactactttgggtgtccgtgtttccttttgatcctattttggctgcttatggtgacaacgataagttgttatcataaagcttttggattggccatccggaaagagttgacagtttgttcgctcattgctttatcaagacttcctttgaggaaagcaatttacttattaatttcattttacaaccttgaagtgatttcaagtgcccatttaaacttgttaattcaattacatcgaac

SEQ ID NO: 20910 - DNA, 697 bp, synthetic construct
  source 1..697: mol_type = other DNA
ttaaaacagccttggggttgttcccaccccaagggcccacgtggcggctagtactctggtactttggtacctttgtacgcctgttttatctcccttcccaatgtaacttagaagttctcaaatcaaagctcgataggtggagcgcaaaccagcgctctcatgagcaagcactcctgtctccccggtgcggttgtataaactgttcccacggttgaaaacaacctatccgttatccgctatagtacttcgagaaacctagtatcacctttggattgttgatgcgttgcgctcatcacactaacccgtgtgtagcttgggtcgatgagtctggacataccccactggcgacagtggtccaggctgcgttggcggcctactcatggtgaaaaccatgagacgctaaacatgaacaaggtgtgaagagtctattgagctactatagagtcctccggcccctgaatgcggctaatcttaaccatggagcaagtgctcacaagccagtgggttgcttgtcgtaatgcgcaagtccgtggcggaaccgactactttgggtgtccgtgtttcactttttacttttatgactgcttatggtgacaatttgatattgttaccatttagcttgtcaaatcaattacaagagacctaaatcttatttatcaacttgctttttgataacttcaatcagaaaatttcaata

SEQ ID NO: 20911 - DNA, 697 bp, synthetic construct
  source 1..697: mol_type = other DNA
ttaaaacagccttggggttgttcccaccccaagggcccacgtggcggctagtactctggtacttcggtacctttgtacgcctgttttatctcccttcccaatgtaacttagaagttctcaaatcaaagctcgataggtggagcgcaaaccagcgctctcatgagcaagcactcctgtctccccggtgcggttgtataaactgttcccacggttgaaaacaacctatccgttatccgctatagtacttcgagaaacctagtatcacctttggattgttgatgcgttgcgctcatcacactaacccgtgtgtagcttgggtcgatgagtctggacataccccactggcgacagtggtccaggctgcgttggcggcctactcatggtgaaaaccatgagacgctaaacatgaacaaggtgtgaagagtctattgagctactatagagtcctccggcccctgaatgcggctaatcttaaccatggagcaagtgctcacaagccagtgggttgcttgtcgtaatgcgcaagtccgtggcggaaccgactactttgggtgtccgtgtttcactttttacttttatgactgcttatggtgacaatttgatattgttaccatttagcttgtcaaatcaattacaagagacctaaatcttatttatcaacttgctttttgataacttcaatcagaaaatttcaata

SEQ ID NO: 20912 - DNA, 697 bp, synthetic construct
  source 1..697: mol_type = other DNA
ttaaaacagccttggggttgttcccaccccaagggcccacgtggcggctagtactctggtacttcggtacctttgtacgcctgttttatctcccttcccaatgtaacttagaagttctcaaaccaaagctcgataggtggagcgcaaaccagcgctctcatgagcaagcactcctgtctccccggtgcggttgtataaactgttcccacggttgaaaacaacctatccgttatccgctatagtacttcgagaaacctagtatcacctttggattgttgatgcgttgcgctcagcacactaacccgtgtgtagcttgggtcgatgagtctggacataccccactggcgacagtggtccaggctgcgttggcggcctactcatggtgaaaaccatgagacgctaaacatgaacaaggtgtgaagagtctattgagctactatagagtcctccggcccctgaatgcggctaatcttaaccatggagcaagtgctcacaagccagtgggttgcttgtcgtaatgcgcaagtccgtggcggaaccgactactttgggtgtccgtgtttcactttttacttttacgactgcttatggtgacaatttgatattgttaccatttagcttgtcaaatcaattacaaaagacctaaatcttatttaccaacttgctttttgataacttcaatcagaaaatttcaata

SEQ ID NO: 20913 - DNA, 697 bp, synthetic construct
  source 1..697: mol_type = other DNA
ttaaaacagccttggggttgttcccactccaagggcccacgtggcggctagtactctggtacttcggtacctttgtacgcctgttttatctcccttcccaatgtaatttagaagcttttaaatcaaggctcaataggtggggcgcaaaccagcgctctcatgagcaagcactcctgtctccccggtgtggctgtataaactgttcccacggttgaaaacaacctatccgttatccgctatagtacttcgagaaacctagtatcacctttggattgttgacgcgttgcgctcaacacactaacccgtgtgtagcttgggtcgatgagtctggacataccccactggcgacagtggtccaggctgcgttggcggcctactcatggtgaaaaccatgagacgctagacatgaacaaggtgtgaagagtctattgagctactatagagtcctccggcccctgaatgcggctaatcctaaccatggagcaagtgctcacaggccagtgagttgcttgtcgtaatgcgcaagtccgtggcggaaccgactactttgggtgtccgtgtttcactttttacttttatgactgcttatggtgacaatttgatattgttaccatttagctgtcaaattaattgcaaaagatcctaagtcttacttaccaatttgcattttgataaccttgatttgaaaattttaata

SEQ ID NO: 20914 - DNA, 697 bp, synthetic construct
  source 1..697: mol_type = other DNA
ttaaaacagccttggggttgttcccactccaagggcccacgtggcggctagtactctggtactttggtacctttgtacgcctgttttatctcccttcccaatgtaatttagaagcttttaaatcaaagctcaataggtggggcgcaaaccagcgctctcatgagcaagcactcctgtttccccggtgtggttgtataaactgttcccacggttgaaaacaacctatccgttatccgctatagtacttcgagaaacctagtatcacctttggattgttgacgcgttgcgctcagcacactaacccgtgtgtagcttgggtcgatgagtctggacataccccactggcgacagtggtccaggctgcgttggcggcctactcatggtgaaaaccatgagacgctagacatgaacaaggtgtgaagagtctattgagctactatagagtcctccggcccctgaatgcggctaatcctaaccatggagcaagtgctcacaggccagtgagttgcttgtcgtaatgcgcaagtccgtggcggaaccgactactttgggtgtccgtgtttcactttttacttttatgactgcttatggtgacaatttgatattgttaccatttagctgtcaaattaattgcaaaagatcctaagtcttacttaccaatttgcattttgataaccttgatttgaaaattttaata

SEQ ID NO: 20915 - DNA, 697 bp, synthetic construct
  source 1..697: mol_type = other DNA
ttaaaacagccttggggttgttcccactccaagggcccacgtggcggctagtactctggtacttcggtacctttgtacgcctgttttatctcccttcccaatgtaatttagaagcttttaaatcaaggctcaataggtggggcgcaaaccagcgctctcatgagcaagcactcctgtctccccggtgtggttgtataaactgttcccacggttgaaaacaacctatccgttatccgctatagtacttcgagaaacctagtatcacctttggattgttgacgcgttgcgctcagcacactaacccgtgtgtagcttgggtcgatgagtctggacataccccactggcgacagtggtccaggctgcgttggcggcctactcatggtgaaaaccatgagacgctagacatgaacaaggtgtgaagagtctattgagctactatagagtcctccggcccctgaatgcggctaatcctaaccatggagcaagtgctcacaggccagtgagttgcttgtcgtaatgcgcaagtccgtggcggaaccgactactttgggtgtccgtgtttcactttttacttttatgactgcttatggtgacaatttgatattgttaccatttagctgtcaaattaattgcaaaagatcctaagtcttacttaccaatttgcattttgataaccttgatttgaaaattttaata

SEQ ID NO: 20916 - DNA, 697 bp, synthetic construct
  source 1..697: mol_type = other DNA
ttaaaacagccttggggttgttcccactccaagggcccacgtggcggctagtactctggtacttcggtacctttgtacgcctgttttatctcccttcccaatgtaatttagaagcttttaaatcaaggctcaataggtggggcgcaaaccagcgctctcatgagcaagcactcctgtctccccggtgtggttgtataaactgttcccacggttgaaaacaacctatccgttatccgctatagtacttcgagaaacctagtatcacctttggattgttgacgcgttgcgctcagcacactaacccgtgtgtagcttgggtcgatgagtctggacataccccactggcgacagtggtccaggctgcgttggcggcctactcatggtgaaaaccatgagacgctagacatgaacaaggtgtgaagagtctattgagctactatagagtcctccggcccctgaatgcggctaatcctaaccatggagcaagtgctcacaggccagtgagttgcttgtcgtaatgcgcaagtccgtggcggaaccgactactttgggtgtccgtgtttcactttttacttttatgactgcttatggtgacaatttgatattgttaccatttagctgtcaaattaattgcaaaagatcccaagtcttacttaccaatttgcattttgataaccttgatttgaaaattttaata

SEQ ID NO: 20917 - DNA, 697 bp, synthetic construct
  source 1..697: mol_type = other DNA
ttaaaacagccttggggttgttcccactccaagggcccacgtggcggctagtactctggtacttcggtacctttgtacgcctgttttatctcccttcccaacgtaatttagaagtttttaaatcaaggctcaataggtggggcgcaaaccagcgctctcatgagcaagcactcctgtctccccggtgtggttgtataaactgttcccacggttgaaaacaacctatccgttatccgctatagtacttcgagaaacctagtatcacctttggattgttgacgcgttgcgctcagcacactaacccgtgtgtagcttgggtcgatgagtctggacataccccactggcgacagtggtccaggctgcgttggcggcctactcatggtgaaaaccatgagacgctagacatgaacaaggtgtgaagagtctattgagctactatagagtcctccggcccctgaatgcggctaatcctaaccatggagcaagtgctcacaggccagtgagttgcttgtcgtaatgcgcaagtccgtggcggaaccgactactttgggtgtccgtgtttcactttttacttttatgactgcttatggtgacaatttgatattgttaccatttagctgtcaaattaattgcaaaagatcctaagtcttacttaccaatttgcattttgataaccttgatttgaaaattttaata

SEQ ID NO: 20918 - DNA, 697 bp, synthetic construct
  source 1..697: mol_type = other DNA
ttaaaacagccttggggttgttcccactccaagggcccacgtggcggctagtactctggtacttcggtacctttgtacgcctgttttatctcccttcccaatgtaatttagaagcttttaaatcaaggctcaataggtggggcgcaaaccagcgctctcatgagcaagcactcctgtctccccggtgtggttgtataaactgttcccacggttgaaaacaacctatccgttacccgctatagtacttcgagaaacctagtatcacctttggattgttgacgcgttgcgctcagcacactaacccgtgtgtagcttgggtcgatgagtctggacataccccactggcgacagtggtccaggctgcgttggcggcctactcatggtgaaaaccatgagacgctagacatgaacaaggtgtgaagagtctattgagctactatagagtcctccggcccctgaatgcggctaatcctaaccatggagcaagtgctcacaggccagtgagttgcttgtcgtaatgcgcaagtccgtggcggaaccgactactttgggtgtccgtgtttcactttttacttttatgactgcttatggtgacaatttgatattgttaccatttagctgtcaaattaattgcaaaagatcctaagtcttacttaccaatttgcattttgataaccttgatttgaaaactttaata

SEQ ID NO: 20919 - DNA, 697 bp, synthetic construct
  source 1..697: mol_type = other DNA
ttaaaacagccttggggttgttcccactccaagggcccacgtggcggctagtactctggtacttcggtacctttgtacgcctgttttatctcccttcccagtgtaatttagaagcttttaaatcaaggctcaataggtggggcgcaaaccagcgctctcatgagcaagcactcctgtctccccggtgtggttgtataaactgttcccacggttgaaaacaacctatccgttatccgctatagtacttcgagaaacctagtatcacctttggattgttgacgcgttgcgctcagcacactaacccgtgtgtagcttgggtcgatgagtctggacacaccccactggcgacagtggtccaggctgcgttggcggcctactcatggtgaaaaccatgagacgctagacatgaacaaggtgtgaagagtctattgagctactatagagtcctccggcccctgaatgcggctaatcctaaccatggagcaagtgctcacaggccagtgagttgcttgtcgtaatgcgcaagtccgtggcggaaccgactactttgggtgtccgtgtttcactttttacttttatgactgcttatggtgacaatttgatattgttaccatttagctgtcaaattaattgcaaaagatcctaagtcttacttaccaatttgcattttgataaccttgatttgaaaattttaata

SEQ ID NO: 20920 - DNA, 697 bp, synthetic construct
  source 1..697: mol_type = other DNA
ttaaaacagccttggggttgttcccactccaagggcccacgtggcggctagtactctggtacttcggtacctttgtacgcctgttttatctcccttcccaatgtaatttagaagctcttaaatcaaggctcaataggtggggcgcaaaccagcgctctcatgagcaagcactcctgtctccccggtgtggttgtataaactgttcccacggttgaaaacaacctatccgttatccgctatagtacttcgagaaacctagtatcacctttggattgttgacgcgttgcgctcagcacactaacccgtgtgtagcttgggtcgatgagtctggacataccccactggcgacagtggtccaggctgcgttggcggcctactcatggtgaaaaccatgagacgctagacatgaacaaggtgtgaagagtctattgagctactatagagtcctccggcccctgaatgcggctaatcctaaccatggagcaagtgctcacaggccagtgagttgcttgtcgtaatgcgcaagtccgtggcggaaccgactactttgggtgtccgtgtttcactttttacttttatgactgcttatggtgacaatttgatattgttaccatttagcttgtcaaattaattgcaaaagatcctaaatcttacttaccaatttgcattttgacaaccttatttgaaaattttaata

SEQ ID NO: 20921 - DNA, 697 bp, synthetic construct
  source 1..697: mol_type = other DNA
ttaaaacagccttggggttgttcccactccaagggcccatgtggcggctagtactctggtacttcggtacctttgtacgcctgttttatctcccttcccaatgtaatttagaagctcttaaatcaaggctcaataggcggggcgcaacccagcgctctcatgagcaagcacttctgtctccccggtgtggttgtataaactgttcccacggttgaaaacaacctatccgttatccgctatagtacttcgagaaacctagtatcacctttggattgttgacgcgttgcgctcagcacactaacccgtgtgtagcttgggtcgatgagtctggacataccccactggcgacagtggtccaggctgcgttggcggcctactcatggtgaaaaccatgagacgctaaacatgaacaaggtgtgaagagtctattgagctactatagagtcctccggcccctgaatgcggctaatcctaaccatggagcaagcgctcataagccagtgagttgcttgtcgtaatgcgcaagtccgtggcggaaccgactactttgggtgtccgtgtttcactttttacttttatgactgcttatggtgacaatttgatattgttaccatttagcttgtcaaattaattacaaaaggttctaaatcttacttaccaacctgcatttgataaccttgatttgaaaattttaata

SEQ ID NO: 20922 - DNA, 697 bp, synthetic construct
  source 1..697: mol_type = other DNA
ttaaaacagccttggggttgttcccactccaagggcccacgtggcggctagtactctggtatttcggtacctttgtacgcctgttttatctcccttcccaatgtaatttagaagcttttaaatcaaggctcaataggtggggcgcaaaccagcgctctcatgagcaagcactcctgtttccccggtgtggttgtataaactgttcccacggttgaaaacaacctatccgttatccgctatagtacttcgagaaacctagtatcacctttggattgttgacgcgttgcgctcagcacactaacccgtgtgtagcttgggtcgatgagtctggacataccccactggcgacagtggtccaggctgcgttggcggcctactcatggtgaaaaccatgagacgctagacatgaacaaggtgtgaagagtctattgagctactatagagtcctccggcccctgaatgcggctaatcctaaccatggagcaagtgctcacaggccagtgagttgcttgtcgtaatgcgcaagtccgtggcggaaccgactactttgggtgtccgtgtttcactttttacttttatgactgcttatggtgacaatttgatattgttaccatttagctgtcaaattaattgcaaaagatcctaagtcttacttaccaatttgcattttgataaccttgatttgaaaatttaaata

SEQ ID NO: 20923 - DNA, 697 bp, synthetic construct
  source 1..697: mol_type = other DNA
ttaaaacagccttggggttgttcccactccaagggcccacgtggcggctagtactctggtacttcggtacctttgtacgcctgttttatctcccttcccaacgtaacttagaagctcttaaatcaaggctcaataggtggagcgcaaaccagcgctcttatgagcaagtactcctgtttccccggtgcggttatatagactgttcccacggttaaaaataacctatccgttatccgctatagtacttcgagaaacctagtatcacctttggattgttgacgcgttgcgctcagcacactaacccgtgtgtagcttgggtcgatgagtctggacataccccactggcgacagtggtccaggctgcgttggcggcctactcatggtgaaaaccatgagacgctagacatgaacaaggtgtgaagagtctattgagctactatagagtcctccggcccctgaatgcggctaatcctaaccatggagcaagtgctcacagaccagtgagttgcttgtcgtaatgcgcaagtccgtggcggaaccgactactttgggtgtccgtgtttcactttttacctttatgactgcttatggtgacaatttgatattgttaccatttagcttgtcaaatcaattgcaaaagatcttaagttttatttatcaacttgcattttgataactttaaattgaagatttaata

SEQ ID NO: 20924 - DNA, 696 bp, synthetic construct
  source 1..696: mol_type = other DNA
ttaaaacagccttggggttgttcccaccccaagggcccacgtggcggctagtactctggtacttcggtacctttgtacgcctgttttatctcccttcccaatgtaacttagaagttctcaaatcaaagctcaataggtggagcgcaaaccagcgctctcatgagcaagtactcctgtctccccggtgcggttgtataaactgttcccacggttgaaaacaacctatccgttatccgctatagtacttcgagaaacctagtatcacctttggattgttgatgcgttgcgctcggcacactaacccgtgtgtagcttgggtcgatgagtctggacataccccactggcgacagtggtccaggctgcgttggcggcctactcatggtgaaaaccatgagacgctaaacatgaacaaggtgtgaagagtctattgagctactatagagtcctccggcccctgaatgcggctaatcttaaccatggagcaagtgctcacaagccagtgggttgcttgtcgtaatgcgcaagtccgtggcggaaccgactactttgggtgtccgtgtttcactttttacttttatgactgcttatggtgacaatttgatattgttaccatttagcttgtcaaatcaattacaaaagacctaaatcttatttatcaacttgcttttgataacttcaatcagaaaatttcaata

SEQ ID NO: 20925 - DNA, 696 bp, synthetic construct
  source 1..696: mol_type = other DNA
aaaacagccttggggttgttcccactccaagggcccacgtggcggctagtactctggtacttcggtacctttgtacgcctgttttatctcccttcccaatgtaacttagaagttcttaaatcaatgctcaataggtggggcgcaaaccagcgctctcatgagcaagcactcctgtctccccggtgaggttgtataaactgttcccacggttgaaaacaacctatccgttatccgctatagtacttcgagaaacctagtaccacctttggattgttgacgcgttgcgctcagcacactaacccgtgtgtagcttgggtcgatgagtctggacatacctcactggcgacagtggtccaggctgcgttggcggcctactcatggtgaaagccatgagacgctagacatgaacaaggtgtgaagagtctattgagctactatagagtcctccggcccctgaatgcggctaatcctaaccatggagcaagtgctcacaggccagtgagttgcttgtcgtaatgcgcaagtccgtggcggaaccgactactttgggtgtccgtgtttcactttttacttttatgactgcttatggtgacaatttgatattgttaccatttagcttgtcaaatcaattgcaaaagatcctaaatcttatttatcaacttgcatcttgataactttaatttgaaaattttaaca

SEQ ID NO: 20926 - DNA, 701 bp, synthetic construct
  source 1..701: mol_type = other DNA
ggctagtactccggtattacggtacccttgtacgcctgttttatactcccttcccccgtaacttagaagaaataaaccaagttcaatagaaggcggtacaaaccagtaccaccacgaacaagcacttctgtttccccggtgaagttgtatagactgtacccacggttgaaggcgactgatccgttatccgcttttgtacttcgagaagcttagtatcatcttggaatcttcgacgcgttgcactcagcactcaaccccagagtgtagcttaggctgatgagtctggacactcctcaccggtgacggtggtccaggctgcgttggcggcctacctgtggcccaaagccacaggacgctagttgtgaacaaggtgtgaagagcctattgagctacaaaagagtcctccggcccctgaatgcggctaatcctaaccacggagcaagggtgcgcaaaccagtgcatgccttgtcgtaacgcgcaagtctgtggcggaaccgactactttgggtgtccgtgtttccttttattcttataatggctgcttatggtgacaatcatagattgttatcataaagcgaattggattggccatccagtgaaagtgaaatacattatttatctttttgttggattcactccattcacttccctttcttttaaactcatcactacagtcttattgattagagacttatatcaca

SEQ ID NO: 20927 - DNA, 697 bp, synthetic construct
  source 1..697: mol_type = other DNA
taaaacagctttggggttgttcccactccaagggcccacgtggcggctagtactctggtacttcggtacctttgtacgcctgttttatcccccttcccaatgtaatttagaagctcttaaattaaggctcaataggtggggcgcaaaccagcgctctcatgagcaagcactcctgtctccccggtgtggttgtataaactgttcccacggttgaaaacaacctatccgttatccgctatagtacttcgagaaacctagtatcacctttggattgttgacgcgttgcgctcagcacactaacccgtgtgtagcttgggtcgatgagtctggacataccccactggcgacagtggtccaggctgcgttggcggcctactcatggtgaaaaccatgagacgctagacatgaacaaggtgtgaagagtctattgagctactatagagtcctccggcccctgaatgcggctaatcctaaccatggagcaagtgctcacaggccagtgagttgcttgtcgtaatgcgcaagtccgtggcggaaccgactactttgggtgtccgtgtttcactttttacttttatgactgcttatggtgacaatttgatattgttaccatttagcttgtcaaatcaattgcaaaagatcctaaatcttacttaccaacttgcattttgacaaccttgatttgaaaattttaata

SEQ ID NO: 20928 - DNA, 697 bp, synthetic construct
  source 1..697: mol_type = other DNA
taaaacagctttggggttgttcccactccaagggcccacgtggcggctagtactctggtacttcggtacctttgtacgcctgttttatcccccttcccaatgtaatttagaagctcttaaattaaggctcaataggtggggcgcaaaccagcgctctcatgagcaagcactcctgtctccccggtgtggttgtataaactgtttccacggttgaaaacaacctatccgttatccgctatagtacttcgagaaacctagtatcacctttggattgttgacgcgttgcgctcagcacactaacccgtgtgtagcttgggtcgatgagtctggacataccccactggcgacagtggtccaggctgcgttggcggcctactcatggtgaaaaccatgagacgctagacatgaacaaggtgtgaagagtctattgagctactatagagtcctccggcccctgaatgcggctaatcctaaccatggagcaagtgctcacaggccagtgagttgcttgtcgtaatgcgcaagtccgtggcggaaccgactactttgggtgtccgtgtttcactttttacttttatgactgcttatggtgacaatttgatattgttaccatttagcttgtcaaatcaattgcaaaagatcctaaatcttacttaccaacttgtattttgacaaccttgatttgaaaattttaata

SEQ ID NO: 20929 - DNA, 697 bp, synthetic construct
  source 1..697: mol_type = other DNA
taaaacagccttggggttgttcccactccaagggcccacgtggcggctagtactctggtacttcggtacctttgtacgcctgttttatcccccttcccaatgtaatttagaagctcttaaattaaggctcaataggtggggcgcaaaccagcgctctcatgagcaagcactcctgtctccccggtgtggttgtataaactgttcccacggttgaaaacaacctatccgttatccgctatagtacttcgagaaacctagtatcacctttggattgttgacgcgttgcgctcagcacactaacccgtgtgtagcttgggtcgatgagtctggacataccccactggcgacagtggtccaggctgcgttggcggcctactcatggtgaaaaccatgagacgctagacatgaacaaggtgtgaagagtctattgagctactatagagtcctccggcccctgaatgcggctaatcctaaccatggagcaagtgctcacaggccagtgagttgcttgtcgtaatgcgcaagtccgtggcggaaccgactactttgggtgtccgtgtttcactttttacttttatgactgcttatggtgacaatttgatattgttaccatttagcttgtcaaatcaattgcaaaagatcctaaatcttacttaccaacttgcattttgacaaccttgatttgaaaattttaata

SEQ ID NO: 20930 - DNA, 720 bp, synthetic construct
  source 1..720: mol_type = other DNA
cccacccacagggcccactgggcgtcagcacactggtattgcggtacccttgtgcgcctgttttatccaccccacccaaaagcaacttagaagcacgtcatatacggtcaataggcggcccagcactccaactgggtctcgaccaagcacttctgttaccccggaccgagtatcaataggctgctcacgcggctgagggagaaagcgttcgttacccgaccaattacttcgagaaacctagtaccaccatgaaggttgcgcagcgtttcgttccgcacaaccccagtgtagatcaggccgatgagtcaccgcattccccacgggcgaccgtggcggtggctgcgttggcggcctgcccatggggcaacccatgggacgcttcgatactgacatggtgtgaagagtctattgagctaattggtagtcctccggcccctgaatgcggctaatcctaactgcggagcagatacccacaaaccagtgggcggtctgtcgtaacgggcaactctgcagcggaaccgactactttgggtgtccgtgtttccttttattcttgtattggctgcttatggtgacaattgagagattgttaccatatagctattggattggccatccggtgacaaatagagcaatcatctatctattcgttggttttgtaccgctaacctttaaagttttaaaaactttaaatttcattttagccctaaacatagcaaa

SEQ ID NO: 20931 - DNA, 696 bp, synthetic construct
  source 1..696: mol_type = other DNA
taaaacagccttggggttgttcccactccaagggcccacgtggcggctagtactctggtacttcggtacctttgtacgcctgttttatctcccttcccaatgtaatttagaagcttttaaatcaaggctcaataggtggggcgcaaaccagcgctctcatgagcaagcactcctgtctccccggtgtggttgtataaactgttcccacggttgaaaacaacctatccgttatccgctatagtacttcgagaaacctagtatcacctttggattgttgacgcgttgcgctcagcacactaacccgtgtgtagcttgggtcgatgagtctggacacaccccactggcgacagtggtccaggctgcgttggcggcctactcatggtgaaaaccatgagacgctagacatgaacaaggtgtgaagagtctattgagctactatagagtcctccggcccctgaatgcggctaatcctaaccatggagcaagtgctcacaggccagtgagttgcttgtcgtaatgcgcaagtccgtggcggaaccgactactttgggtgtccgtgtttcactttttacttttatgactgcttatggtgacaatttgatattgttaccatttagctgtcaaattaattgcaaaagatcctaagtcttacttaccaatttgcattttgataaccttgatttgaaaattttaata

SEQ ID NO: 20932 - DNA, 696 bp, synthetic construct
  source 1..696: mol_type = other DNA
taaaacagccttggggttgttcccactccaagggcccacgtggcggctagtactctggtacttcggtacctttgtacgcctgttttatctcccttcccaatgtaatttagaagcttttaaatcaaagctcaataggtggggcgcaaaccagcgctctcatgagcaagcactcctgtctccccggtgtggttgtataaactgttcccacggttgaaaacaacctatccgttatccgctatagtacttcgagaaacctagtatcacctttggattgttgacgcgttgcgctcagcacactaacccgtgtgtagcttgggtcgatgagtctggacataccccactggcgacagtggtccaggctgcgttggcggcctactcatggtgaaaaccatgagacgctagacatgaacaaggtgtgaagagtctattgagctactatagagtcctccggcccctgaatgcggctaatcctaaccatggagcaagtgctcacaggccagtgagttgcttgtcgtaatgcgtaagtccgtggcggaaccgactactttgggtgtccgtgtttcactttttacttttatgactgcttatggtgacaatttgatattgttaccatttagctgtcaaattaattgcaaaagatcctaagtcttacttaccaatttgcattttgataaccttgatttgaaaattttaata

SEQ ID NO: 20933 - DNA, 696 bp, synthetic construct
  source 1..696: mol_type = other DNA
taaaacagccttggggttgttcccactccaagggcccacgtggcggctagtactctggtacttcggtacctttgtacgcctgttttatcccccttcccaatgtattttagaagcttttaaatcaaggctcaataggtggggcgcaaaccagcgctctcatgagcaagcactcctgtctccccggtgtggttgtataaactgttcccacggtcgaaaacaacctatccgttatccactatagtacttcgagaaacctagtatcacctttggattgttgacgcgttgcgctcagcacactaacccgtgtgtagcttgggtcgatgagtctggacataccccactggcgacagtggtccaggctgcgttggcggcctactcatggtgaaaaccatgagacgctagacatgaacaaggtgtgaagagtctattgagctactatagagtcctccggcccctgaatgcggctaatcctaaccatggagcaagtgctcacaggccagtgagttgcttgtcgtaatgcgcaagtccgtggcggaaccgactactttgggtgtccgtgtttcactttttacttttatgactgcttatggtgacaatttgatattgttaccatttagctgtcaaattaattgcaaaagatcctaagtcttacttaccaatttgcattttgataaccttgatttgaaaattttaata

SEQ ID NO: 20934 - DNA, 696 bp, synthetic construct
  source 1..696: mol_type = other DNA
taaaacagccttggggttgttcccactccaagggcccacgtggcggctagtactctggtacttcggtacctttgtacgcctgttttatctcccttcccaatgtaatttagaagcttttaaatcaaggctcaataggtggggcgcaaaccagcgctctcatgagcaagcactcctgtctccccggtgtggttgtataaactgttcccacggttgaaaacaacctatccgttatccgctatagtacttcgagaaacctagtatcacctttggattgttgacgcgttgcgctcagcacactaacccgtgtgtagcttgggtcgatgagtctggacataccccactggcgacagtggtccaggctgcgttggcggcctactcatggtgaaaaccatgagacgctagacatgaacaaggtgtgaagagtctattgagctactatagagtcctccggcccctgaatgcggctaatcctaaccatggagcaagtgctcacaggccagtgagttgcttgtcgtaacgcgcaagtccgtggcggaaccgactactttgggtgtccgtgtttcactttttacttttatgactgcttatggtgacaatttgatattgttaccatttagctgtcaaattaattgcaaaagatcctaagtcttacttaccaatttgcattttgataaccttgatttgaaaattttaata

SEQ ID NO: 20935 - DNA, 696 bp, synthetic construct
  source 1..696: mol_type = other DNA
taaaacagccttggggttgttcccactccaagggcccacgtggcggctagtactctggtacttcggtacctttgtacgcctgttttatctcccttcccaatgtaatttagaagcttttaaatcaaggctcaataggtggggcgcaaaccagcgctctcatgagcaagcactcctgtctccccggtgtggttgtataaactgttcccacggttgaaaacaacctatccgttatccgctatagtacttcgagaaacctagtatcacctttggattgttgacgcgttgcgctcagcacactaacccgtgtgtagcttgggtcgatgagtctggacataccccactggcgacagtggtccaggctgcgttggcggcctactcatggtgaaaaccatgagacgctagacatgaacaaggtgtgaagagtctattgagctactatagagtcctccggcccctgaatgcggctaatcctaaccatggagcgagtgctcacaggccagtgagttgcttgtcgtaatgcgcaagtccgtggcggaaccgactactttgggtgtccgtgtttcactttttacttttatgactacttatggtgacaatttgatattgttaccatttagctgtcaaattaattgcaaaagatcctaagttttacttaccaatttgcattttgataaccttgatttgaaaactttaata

SEQ ID NO: 20936 - DNA, 696 bp, synthetic construct
  source 1..696: mol_type = other DNA
taaaacagccttggggttgttcccactccaagggcccacgtggcggctagtactctggtacttcggtacctttgtacgcctgttttatctcccttcccaatgtaatttagaagcttttaaatcaaggctcaataggtggggcgcaaaccagcgctctcatgagcaagcactcctgtctccccggtgtggttgtataaactgttcccacggttgaaaacaacctatccgttatccgctatagtacttcgagaaacctagtatcacctttggattgttgacgcgttgcgctcagcacactaacccgtgtgtagcttgggtcgatgagtctggacataccccactggcgacagtggtccaggctgcgttggcggcctactcatggtgaaaaccatgagacgctagacatgaacaaggtgtgaagagtctattgagctactatagagtcctccggcccctgaatgcggctaatcctaaccatggagcaagtgctcacaggccagtgagttgcttgtcgtaatgcgcaagtccgtggcggaaccgactactttgggtgtccgtgtttcactttttacttttatgactgcttatggtgacaatttgatattgttaccatttagctgtcaaattaattgcaaaagatcctaagtcttacttaccaatttgcattttgataaccttgatttgaaaattttaata

SEQ ID NO: 20937 - DNA, 696 bp, synthetic construct
  source 1..696: mol_type = other DNA
taaaacagccttggggttgttcccactccaagggcccacgtggcggctagtactctggtacttcggtacctttgtacgcctgttttatctcccttcccaatgtaatttagaagcttttaaatcaaggctcaataggtggggcgcaaaccagcgctctcatgagcaagcactcctgtctccccggtgtggttgtataaactgttcccacggttgaaaacaacctatccgttatccgctatagtacttcgagaaacctagtatcacctttggattgttgacgcgttgcgctcagcacactaacccgtgtgtagcttaggtcgatgagtctggacataccccactggcgacagtggtccaggctgcgttggcggcctactcatggtgaaaaccatgagacgctagacatgaacaaggtgtgaagagtctattgagctactatagagtcctccggcccctgaatgcggctaatcctaaccatggagcaagtgctcacaggccagtgagttgcttgtcgtaatgcgcaagtccgtggcggaaccgactactttgggtgtccgtgtttcactttttacttttatgactgcttatggtgacaatttcatattgttaccatttagctgtcaaattaattgcaaaagatcctaagtcttacttaccaatttgcattttgataaccttgatttgaaaattttaata

SEQ ID NO: 20938 - DNA, 696 bp, synthetic construct
  source 1..696: mol_type = other DNA
taaaacagccttggggttgttcccactccaagggcccacgtggcggctagtactctggtacttcggtacctttgtacgcctgttttatctcccttcccaatgtaatttagaagcttttaaatcaaagctcaataggtggggcgcaaaccagcgctctcatgagcaagcactcctgtctccccggtgtggttgtataaactgttcccacggttgaaaacaacctatccgttatccgctatagtacttcgagaaacctagtatcacctttggattgttgacgcgttgcgctcagcacactaacccgtgtgtagcttgggtcgatgagtctggacataccccactggcgacagtggtccaggctgcgttggcggcctactcatggtgaaaaccatgagacgctagacatgaacaaggtgtgaagagtctattgagctactatagagtcctccggcccctgaatgcggctaatcctaaccatggagcaagtgctcacaggccagtgagttgcttgtcgtaatgcgcaagtccgtggcggaaccgactactttgggtgtccgtgtttcactttttacttttatgactgcttatggtgacaatttgatattgttaccatttagctgtcaaattaattgcaaaagatcctaagtcttacttaccaatttgcattttgataaccttgatttgaaaattttaata

SEQ ID NO: 20939 - DNA, 696 bp, synthetic construct
  source 1..696: mol_type = other DNA
taaaacagccttggggttgttcccactccaagggcccacgtggcggctagtactctggtacttcggtacctttgtacgcctgttttatctcccttcccaatgtaatttagaagcttttaaatcaaggctcaataggtggggcgcaaaccagcgctctcatgagcaagcactcctgtctccccggtgtggttgtataaactgttcccacggttgaaaacaacctatccgttatccgctatagtacttcgagaaacctagtatcacctttgaattgttgacgcgttgcgctcagcacactaacccgtgtgtagcttgggtcgatgagtctggacataccccactggtgacagtggtccaggctgcgttggcggcctactcatggtgaaaaccatgagacgctagacatgaacaaggtgtgaagagtctattgagctactatagagtcctccggcccctgaatgcggctaatcctaaccatggagcaagtgctcacaggccagtgagttgcttgtcgtaatgcgcaagtccgtggcggaaccgactactttgggtgtccgtgtttcactttttacttttatgactgcttatggtgacaatttgatattgttaccatttagctgtcaaattaattgcaaaagatcctaagtcttacttaccaatttgcattttgataaccttgatttgaaaactttaata

SEQ ID NO: 20940 - DNA, 696 bp, synthetic construct
  source 1..696: mol_type = other DNA
taaaacagccttggggttgttcccactccaagggcccacgtggcggctagtactctggtacttcggtacctttgtacgcctgttttatctcccttcccaatgtaatttagaagcttttacatcaaggctcaataggtggggcgcaaaccagcgctctcatgagcaagcactcctgtctccccggtgtggttgtataaactgttcccacggttgaaaacaacctatccgttatccgctatagtacttcgagaaacttagtatcacctttggattgttgacgcgttgcgctcagcacactaacccgtgtgtagcttgggtcgatgagtctggacataccccactggcgacagtggtccaggctgcgttggcggcctactcatggtgaaaaccatgagacgctagacatgaacaaggtgtgaagagtctattgagctactatagagtcctccggcccctgaatgcggctaatcctaaccatggagcaagtgctcacaggccagtgagttgcttgtcgtaatgcgcaagtccgtggcggaaccgactactttgggtgtccgtgtttcactttttacttttatgactgcttatggtgacaatttgatattgttaccatttagctgtcaaattaattgcaaaagatcctaagtcttacttaccaatttgcattttgataaccttgatttgaaaattttaata

SEQ ID NO: 20941 - DNA, 696 bp, synthetic construct
  source 1..696: mol_type = other DNA
taaaacagccttggggttgttcccactccaagggcccacgtggcggctagtactctggtacttcggtacctttgtacgcctgttttatctcccttcccaatgtaatttagaagcttttaaactaaggctcaataggtggggcgcaaaccagcgctctcatgagcaagcactcctgtctccccggtgtggttgtataaactgttcccacggttgaaaacaacctatccgttatccgctatagtacttcgagaaacctagtatcacctttggattgttgacgcgttgcgctcagcacactaacccgtgtgtagcttgggtcgatgagtctggacataccccactggtgacagtggtccaggctgcgttggcggcctactcatggtgaaaaccatgagacgctagacatgaacaaggtgtgaagagtctattgagctactatagagtcctccggcccctgaatgcggctaatcctaaccatggagcaagtgctcacaggccagtgagttgcttgtcgtaatgcgcaagtccgtggcggaaccgactactttgggtgtccgtgtttcactttttacttttatgactgcttatggtgacaatttgatattgttaccatttagctgtcaaattaattgcaaaagatcctaagtcttacttaccaatttgcattttgataaccttgatttgaaaattttaata

SEQ ID NO: 20942 - DNA, 696 bp, synthetic construct
  source 1..696: mol_type = other DNA
taaaacagccttggggttgttcccactccaagggcccacgtggcggctagtactctggtacttcggtacctttgtacgcctgttttatctcccttcccaatgtaatttagaagcttttaaatcaaggctcaataggtggggcgcaaaccagcgctctcatgagcaagcactcctgtctccccggtgtggttgtataaactgttcccacggttgaaaacaacctatccgttatccgctatagtacttcgagaaacctagtatcacctttggattgttgacgcgttgcgctcagcacactaacccgtgtgtagcttgggtcgatgagtctggacataccccactggcgacagtggtccaggctgcgttggcggcctactcatggtgaaaaccatgagacgctagacatgaacaaggtgtgaagagtctattgagctactatagagtcctccggcccctgaatgcggctaatcctaaccatggagcaagtgctcacaggccagtgagttgcttgtcgtaatgcgcaagtccgtggcggaaccgactactttgggtgtccgtgtttcactttttacttttatgactgcttatggtgacaatttgatattgttaccatttagctgtcaaattaattgctaaagatcctaagtcttacttaccaatttgcattttgataaccttgatttgaaaattttaata

SEQ ID NO: 20943 - DNA, 696 bp, synthetic construct
  source 1..696: mol_type = other DNA
taaaacagccttggggttgttcccactccaagggcccacgtggcggctagtactctggtacttcggtacctttgtacgcctgttttatctcccttcccaatgtaatttagaagcttttaaatcaaggctcaataggtggggcgcaaaccagcgctctcatgagcaagcactcctgtctccccggtgtggttgtataaactgttcccacggttgaaaataacctatccgttatccgctatagtacttcgagaaacctagtatcacctttggattgttgacgcgttgcgctcagcacactagcccgtgtgtagcttgggtcgatgagtctggacataccccactggcgacagtggtccaggctgcgttggcggcctactcatggtgaaaaccatgggacgctagacatgaacaaggtgtgaagagtctattgagctactatagagtcctccggcccctgaatgcggctaatcctaaccatggagcaagtgctcacaggccagtgagttgcttgtcgtaatgcgcaagtccgtggcggaaccgactactttgggtgtccgtgtttcactttttacttttatgactgcttatggtgacaatttgatattgttaccatttagctgtcaaattaattgcaaaagatcctaagtcttacttaccaatttgcattttgataaccttgatttgaaaattttaata

SEQ ID NO: 20944 - DNA, 696 bp, synthetic construct
  source 1..696: mol_type = other DNA
taaaacagccttggggttgttcccactccaagggcccacgtggcggctagtactctggtacttcggtacctttgtacgcctgttttatctcccttcccaatgtaatttagaagcttttaaatcaaggctcaataggtggggcgcaaaccagcgctctcatgagcaagcactcctgtctccccggtgtggttgtataaactgttcccacggttgaaaacaacctatccgttatccgctatagtacttcgagaaacctagtatcacctttggattgttgacgcgttgcgctcagcacactaacccgtgtgtagcttgggtcgatgagtctggacataccccactggcgacagtggtccaggctgcgttggcggcctactcatggtgaaaaccatgagacgctagacatgaacaaggtgtgaagagtctattgagctactatagagtcctccggcccctgaatgcggctaatcctaaccatggagcaagtgctcacaggccagtgagttgcttgtcgtaatgcgcaagtccgtggcggaaccgactactttgggtgtccgtgtttcactttttacttttatgactgcttatggtgacaatttgatattgttaccatttagctgtcaaattaattgcaaaagatcctaagtcttacttatcaatttgcattttgataaccttgatttgaaaattttaata

SEQ ID NO: 20945 - DNA, 722 bp, synthetic construct
  source 1..722: mol_type = other DNA
ttcccatccacagggcccactgggcgctagcacactggtattgcggtacctttgtgcgcctgttttatccaccctgaccccagggcaacatagaagcataccactaaaggtcaataggcaatccagtactccaactgggtcatgaccaagcacttctgttaccccggactgagtaccaataagctgctcacgcggctgaaggggaaagcgttcgttacccgaccaattacttcgagaaacccagtaccaccatgaaagtcgcgcagcgtttcgctcagcacgaccccagtgtagatcaggctgatgagtcaccgcattccccacgggcgaccgtggcggtggctgcgttggcggcctgcccatggggcaacccatgggacgcttcaatactgacatggtgcgaagagtctattgagctaattggtagtcctccggcccctgaatgcggctaatcctaactgcggagcagatacccacatgccagtgggcagtctgtcgtaatgggtaactctgcagcggaaccgactactttgggtgtccgtgtttccttttattttatactggctgcttatggtgacaattgatagattgttaccatatagctattggattggccatccagtgacaaaccgagctatcgtctacctgtttgttggttttgttccattgaactttaaagttctaaaaactattaactttgtcctagcactcaacacggcgaa

SEQ ID NO: 20946 - DNA, 697 bp, synthetic construct
  source 1..697: mol_type = other DNA
tgggaacagccttggggttgttcccactccaagggcccacgtggcggctagtactctggtacttcggtacctttgtacgcctgttttatctcccttcccaatgtaatttagaagcttttaaatcaaggctcaataggtggggcgcaaaccagcgctctcatgagcaagcactcctgtctccccggtgtggttgtataaactgttcccacggttgaaaacaacctatccgttatccgctatagtacttcgagaaacctagtatcacctttggattgttgacgcgttgcgctcagcacactaacccgtgtgtagcttgggtcgatgagtctggacataccccactggcgacagtggtccaggctgcgttggcggcctactcatggtgaaaaccatgagacgctagacatgaacaaggtgtgaagagtctattgagctactatagagtcctccggcccctgaatgcggctaatcctaaccatggagcaagtgctcacaggccagtgagttgcttgtcgtaatgcgcaagtccgtggcggaaccgactactttgggtgtccgtgtttcactttttacttttatgactgcttatggtgacaatttgatattgttaccatttagctgtcaaattaattgcaaaagatcctaagtcttacttaccaatttgcactttgataaccttgatttgaaaactttaata

SEQ ID NO: 20947 - DNA, 697 bp, synthetic construct
  source 1..697: mol_type = other DNA
taaaacagccttggagttgttcccactccaagggcccacgtggcggctagtactctggtacttcggtacctttgtacgcctgttttatctcccttcccaatgtaatttagaagctcttaaatcaaggctcaataggtggggcgcaaaccagcgctctcatgagcaagcactcctgtctccccggtgcggttgtataaactgttcccacggttgaaaacgacctatccgttatccgctatagtacttcgagaaacctagtatcacctttggattgttgacgcgttgcgctcagcacactaacccgtgtgtagcttgggtcgatgagtctggacgtaccccactggcgacagtggtccaggctgcgttggcggcctactcatggtgaaaaccatgagacgctagacatgaacaaggtgtgaagagtctattgagctactatagagtcctccggcccctgaatgcggctaatcctaaccatggagcaagtgctcacagaccagtgagttgcttgtcgtaatgcgcaagtccgtggcggaaccgactactttgggtgtccgtgtttcactttttacttttatgactgcttatggtgacaatttaatattgttaccatttagcttgtcaaattaattgcaaaacatcctaaatcttacttaccaacttgcattttgataaccttggtttgaaaatttcaata

SEQ ID NO: 20948 - DNA, 636 bp, synthetic construct
  source 1..636: mol_type = other DNA
ttagaagcatacaattcaagctcaataggagggggtgcaagccagcgcctccgtgggcaagcactactgtttccccggtgaggccgcatagactgttcccacggttgaaagtgtccgatccgttatccgctcatgtacttcgagaagcctagtatcgctctggaatcttcgacgcgttgcgctcagcactcaaccccggagtgtagcttgggccgatgagtctggacagtccccactggcgacagtggtccaggctgcgctggcggcccacctgtggcccaaagccacgggacgctagttgtgaacagggtgtgaagagcctattgagctacatgagagtcctccggcccctgaatgcggctaatcctaaccatggagcaggcagctgcaacccagcagccagcctgtcgtaacgcgcaagtccgtggcggaaccgactactttgggtgtccgtgtttccttttattcttgaatggctgcttatggtgacaatcatagattgttatcataaagcgagttggattggccatccagtgtgaatcagattaattactcccttgtttgttggatccactcccgaaacgttttactccttaacttattgaaattgtttgaagacaggatttcagtgtcaca

SEQ ID NO: 20949 - DNA, 696 bp, synthetic construct
  source 1..696: mol_type = other DNA
aaaacagccttggggttgttcccactccaagggcccacgtggcggctagtactctggtacttcggtacctttgtacgcctgttttatctcccttcccaatgtaacttagaagctcttaaatcaaggctcaataggtggagcgcaaaccagcgctctcatgagcaagcactcctgtctccccggtgtggttgtataaactgttcccacggttgaaaacaacctatccgttatccgctatagtacttcgagaaacctagtatcacctttggattgttgacgcgttgcgctcagcacactaacccgtgtgtagcttgggtcgatgagtctggacataccccactggcgacagtggtccaggctgcgttggcggcctactcatggtgaaaaccatgagacgctagacatgaacaaggtgtgaagagtctattgagctactatagagtcctccggcccctgaatgcggctaatcctaaccatggagcaagtgctcacaggccagtgagttgcttgtcgtaatgcgcaagtccgtggcggaaccgactactttgggtgtccgtgtttcactttttacctttatgactgcttatggtgacaatttgatattgttaccatttagcttgtcaaatcaattgcaaaagatcctaaatcttatttatcaacttgcattttgataactttaatttgaaaattttaata

SEQ ID NO: 20950 - DNA, 697 bp, synthetic construct
  source 1..697: mol_type = other DNA
ttaaaacagccttggggttgttcccactccaagggcccacgtggcggctagtactctggtacttcggtacctttgtacgcctgttttatctcccttcccaatgtaacttagaagctcttaaatcaaggctcaataggtggagcgcaaaccagcgctcttatgagcaagtacttctgtttccccggtgcggttatataaactgttcccacggttgaaaataacctatccgttatccgctatagtacttcgagaaacctagtatcacctttggattgttgacgcgttgcgctcagcacactaacccgtgtgtagcttgggtcgatgagtctggacataccccactggcgacagtggtccaggctgcgttggcggcctactcatggtgaaaaccatgagacgctagacatgaacaaggtgtgaagagtctattgagctactatagagtcctccggcccctgaatgcggctaatcctaaccatggagcaagtgctcacagaccagtgagttgcttgtcgtaatgcgcaagtccgtggcggaaccgactactttgggtgaccgtgtttcactttttacccttatgactgcttatggtgacaatttgatattgttgccatttagcttgtcaaatcaattgcaaaagatcctaaatcttatttatcaacttgcattttgataactttaatttgaagatttaata

SEQ ID NO: 20951 - DNA, 698 bp, synthetic construct
  source 1..698: mol_type = other DNA
ttaaaacagctttggggttgttcccactccaagggcccacgtggcggctagtactctggtgcttcggtacctttgtacgcctgttttatctcccttcccaatgtaacttagaagttcttaaatcaaggctcaataggtggggcgcaaaccagcgctctcatgagcaagcactcctgtctccccggtgtggttgtataaactgttcccacggttgaaaacaacctatccgttatccgctatagtacttcgagaaacctagtatcacctttggattgttgacgcgttgcgctcagcacactaacccgtgtgtagcttgggtcgatgagtctggacgtaccccactggcgacagtggtccaggctgcgttggcggcctactcatggtgaaaaccatgagacgctagacatgaacaaggtgtgaagagtctattgagctactatagagtcctccggcccctgaatgcggctaatcctaaccatggagcaagtgctcacaggccagtgagttgcttgtcgtaatgcgcaagtccgtggcggaaccgactactttgggtgtccgtgtttcactttttatttttatgactgcttatggtgacaatttgatattgttaccatttagcttgtcaaattaattgcaaaagatcctaaatcttacttaccaacttgcattttgataaccttgatttgaaaattttaata

SEQ ID NO: 20952 - DNA, 698 bp, synthetic construct
  source 1..698: mol_type = other DNA
ttaaaacagctttggggttgttcccactccaagggcccacgtggcggctagtactctggtgcttcggtacctttgtacgcctgttttatctcccttcccaatgtaacttagaagttcttaaatcaaggctcaataggtggggcgcaaaccagcgctctcgtgagcaagcactcctgtctccccggtgtggttgtataaactgttcccacggttgaaaacaacctatccgttatccgctatagtacttcgagaaacctagtatcacctttggattgttgacgcgttgcgctcagcacactaacccgtgtgtagcttgggtcgatgagtctggacgtaccccactggcgacagtggtccaggctgcgttggcggcctactcatggtgaaaaccatgagacgctagacatgaacaaggtgtgaagagtctattgagctactatagagtcctccggcccctgaatgcggctaatcctaaccatggagcaagcgctcacaggccagtgagttgcttgtcgtaatgcgcaagtccgtggcggaaccgactactttgggtgtccgtgtttcactttttacttttatgactgcttatggtgacaatttgatattgttaccatttagcttgtcaaattaattgcaaaagatcctaaatcttacttaccaacttgcattttgataaccttgatttgaaaatttcaata

SEQ ID NO: 20953 - DNA, 698 bp, synthetic construct
  source 1..698: mol_type = other DNA
ttaaaacagctttggggttgttcccactccaagggcccacgtggcggctagtactctggtgcttcggtacctttgtacgcctgttttatctcccttcccaatgtaacttagaagttcttaaatcaaggctcaataggtggggcgcaaaccagcgctctcatgagcaagcactcctgtctccccggtgtggttgtataaactgttcccacggttgaaaacaacctatccgttatccgctatagtacttcgagaaacctagtatcacctttggattgttgacgcgttgcgctcagcacactaacccgtgtgtagcttgggtcgatgagtctggacgtaccccactggcgacagtggtccaggctgcgttggcggcctactcatggtgaaaaccatgagacgctagacatgaacaaggtgtgaagagtctattgagctactatagagtcctccggcccctgaatgcggctaatcctaaccatggagcaagtgctcacaggccagtgagttgcttgtcgtaatgcgcaagtccgtggcggaaccgactactttgggtgtccgtgtttcactttttacttttatgactgcttatggtgacaatttgatattgttaccatttagcttgtcaaattaattgcaaaagatcctaaatcttacttaccaacttgcattttgataaccttgatttgaaaattttaata

SEQ ID NO: 20954 - DNA, 698 bp, synthetic construct
  source 1..698: mol_type = other DNA
ttaaaacagctttggggttgttcccactccaagggcccacgtggcggctagtactctggtacttcggtacctttgtacgcctgttttatctcccttcccaatgtaacttagaagctcttaaatcaaggctcaataggtggggcgcaaaccagcgctctcatgagcaagcactcctgtctccccggtgtggttgtataaactgttcccacggttgaaaacaacctatccgttatccgctatagtacttcgagaaacctagtatcacctttggattgttgacgcgttgcgctcagcacactaacccgtgtgtagcttgggtcgatgagtctggacgtaccccactggcgacagtggtccaggctgcgttggcggcctactcatggtgaaaaccatgagacgctagacatgaacaaggtgtgaagagtctattgagctactatagagtcctccggcccctgaatgcggctaatcctaaccatggagcaagtgctcacaggccagtgagttgcttgtcgtaatgcgcaagtctgtggcggaaccgactactttgggtgtccgtgtttcactttttacttttatgactgcttatggtgacaatttgatattgttaccatttagcttgtcaaattaattgcaaaagatcctaaatcttacttaccaacttgtattttgataaccttgatttgaaaattctaata

SEQ ID NO: 20955 - DNA, 698 bp, synthetic construct
  source 1..698: mol_type = other DNA
ttaaaacagctttggggttgttcccactccaagggcccacgtggcggctagtactctggtacttcggtacctttgtacgcctgttttatctcccttcccaatgtaacttagaagctcttaaatcaaggctcaataggtggggcgcaaaccagcgctctcatgagcaagcactcctgtctccccggtgtggttgtataaactgttcccacggttgaaaacaacctatccgttatccgctatagtacttcgagaaacctagtatcacctttggattgttgacgcgttgcgctcagcacactaacccgtgtgtagcttgggtcgatgagtctggacgtacctcactggcgacagtggtccaggctgcgttggcggcctactcatggtgaaaaccatgagacgctagacatgaacaaggtgtgaagagtctattgagctactatagagtcctccggcccctgaatgcggctaatcctaaccatggagcaagtgctcacaagccagtgagttgcttgtcgtaatgcgcaagtctgtggcggaaccgactactttgggtgtccgtgtttcactttttacttttatgactgcttatggtgacaatttgatattgttaccatttagcttgtcaaattaattgcaaaagatcctaaatcttatttaccaacttgcactttgataaccttgatttgaaaattttaata

SEQ ID NO: 20956 - DNA, 698 bp, synthetic construct
  source 1..698: mol_type = other DNA
ttaaaacagctttggggttgttcccactccaagggcccacgtggcggctagtactctggtacttcggtacctttgtacgcctgttttatctcccttcccaatgtaacttagaagctcttaaatcaaggctcaataggtggggcgcaaaccagcgctctcatgagcaagcactcctgtctccccggtgtggttgtataaactgttcccacggttgaaaacaacctatccgttatccgctatagtacttcgagaaacctagtatcacctttggattgttgacgcgttgcgctcagcacactaacccgtgtgtagcttaggtcgatgagtctggacgtaccccactggcgacagtggtccaggctgcgttggcggcctactcatggtgaaaaccatgagacgctagacatgaacaaggtgtgaagagtctattgagctactatagagtcctccggcccctgaatgcggctaatcctaaccatggagcaagtgctcacaggccagtgagttgcttgtcgtaatgcgcaagtctgtggcggaaccgactactttgggtgtccgtgtttcactttttacttttatgactgcttatggtgacaatttgatattgttaccatttagcttgtcaaatcaattgcaaaagatcctaaatcttacttaccaacttgcattttgataaccttgatttgaaaattttaata

SEQ ID NO: 20957 - DNA, 809 bp, synthetic construct
  source 1..809: mol_type = other DNA
aacagcctatggggcgttcccacccacagggcccactgggcgctagtacactggtacgccagtaccttggtatcacggtaccactgtacgttagtacctttgtatgcctgttttatatccccttcccccaatgtaactttagaagcttaagaaaacaaagaccactaggagtccaacacccagttggattgcggtcaagcacttctgtttccccggacctagtagtgataggctgtacccacggccgaagatgaacccgtccgttatccggccagctacttcgagaagcctagtagcatcaaagatctgtcttggcgtttcgctcagcgcgttccccccgcgtagatcgggtcgatgggtctccgcatcccccacgggcgaccgtggcggaggccgcgtggcggcccgcctatggcgaaagccataggacgccatttcagtgacagggtgtgaagagcctattgagctagttggtagtcctccggcccctgaatgcggctaatcctaaccacggagcgtccaccagcaaaccagctggcagggcgtcgtaacgggtaactctgtggcggaaccgactactttgggtgtccgtgtttccttttgatcctattgtggctgcttatggtgacaacttacagttgttatcataaagcttttggattggccatccggaaagagttgacagtttgttcgctcattgctttatcaagacttcctttgaggaaagcaatttacttattaatttcattttacaaccttgaagtgatttcaagtgcccatttaaacttgttaattcaattacatcgaac

SEQ ID NO: 20958 - DNA, 679 bp, synthetic construct
  source 1..679: mol_type = other DNA
ggtacccttgtgcgcctgttttatccaccccctccccaatgcaacatagaagcacaaactaagtggtcaatagacggctcagtgcaccaactgggtttagaccaagcacttctgttaccccggactgagtatcaataggctgctcacgcggctgaaggagaaaacgttcgttacccggccaactacttcgagaagcccagtaccaccatgaaggttgcgcagtgtttcgttcagcacaaccccagtgtagatcaggtcgatgagtcaccgcaatccccacgggcgaccgtggcggtggctgcgctggcggcctgcccatggggtgacccatgggacgcttcaattccgacatggtgcgaagagcctattgagctagttggtagtcctccggcccctgaatgcggctaatcccaactgcggagcaagcacccacaaaccagtgggctgtttgtcgtaacgggcaactctgcagcggaaccgactactttgggtgtccgtgtttccttttattcctacactggctgcttatggtgacaattgaaagattgttgccatatagctattggattggccatccggtaacaaacagagctattatttacttatttgttggctttgtgccgttgaatttcaaagttataaaaaccataacctccatcttgacactcaacacagcaaa

SEQ ID NO: 20959 - DNA, 708 bp, synthetic construct
  source 1..708: mol_type = other DNA
aacagccttggggttgttcccactccaagggcccacgtggcggctagtactctggtacttcggtacctttgtacgcctgttttatctcccttcccaatgtaacttagaagttcttaaatcaatgctcaataggtggggcgcaaaccagcgctctcatgagcaagcactcctgtctccccggtgaggttgtataaactgttcccacggttgaaaacaacctatccgttatccgctatagtacttcgagaaacctagtaccacctttggattgttgacgcgttgcgctcagcacactaacccgtgtgtagcttgggtcgatgagtctggacacacctcactggcgacagtggtccaggctgcgttggcggcctactcatggtgaaagccatgagacgctagacatgaacaaggtgtgaagagtctattgagctactatagagtcctccggcccctgaatgcggctaatcctaaccatggagcaagtgctcacaggccagtgagttgcttgtcgtaatgcgcaagtccgtggcggaaccgactactttgggtgtccgtgtttcactttttacttttatgactgcttatggtgacaatttgatattgttaccatttagcttgtcaaatcaattgcaaaagatcctaaatcttatttgtcaacttgcatcttgataactttaatttgaaaatattaatttgaaaattttaaca

SEQ ID NO: 20960 - DNA, 708 bp, synthetic construct
  source 1..708: mol_type = other DNA
aacagccttggggttgttcccactccaagggcccacgtggcggctagtactctggtacttcggtacctttgtacgcctgttttatctcccttcccaatgtaacttagaagttcttaaatcaatgctcaataggtggggcgcaaaccagcgttctcatgagcaagcactcctgtctccccggtgaggttgtataaactgttcccacggttgaaaacgacctatccgttatccgctatagtacttcgagaaacctagtaccacctttggattgttgacgcgttgcgctcagcacactaacccgtgtgtagcttgggtcgatgagtctggacatacctcactggcgacagtggtccaggctgcgttggcggcctactcatggcgaaagccatgagacgctagacatgaacaaggtgtgaagagtctattgagctactatagagtcctccggcccctgaatgcggctaatcctaaccatggagcaagtgctcacaggccagtgagttgcttgtcgtaatgcgcaagtccgtggcggaaccgactactttgggtgtccgtgtttcactttttacttttatgactgcttatggtgacaatttgatattgttaccatttagcttgtcaaatcaattgcaaaagatcctaaatcttatttatcaacttgcatcttgataactttaatttgaaaatattaatttgaaaattttaata

SEQ ID NO: 20961 - DNA, 700 bp, synthetic construct
  source 1..700: mol_type = other DNA
agccttggggttgttcccactccaagggcccacgtggcggctagtactctggtacttcggtacctttgtacgcctgttttatctcccttcccaatgtaacttagaagttcttaaatcgatgctcaataggtggggcgcaaaccagcgctctcatgagcaagcactcctgtctccccggtgaggttgtataaactgttcccacggttgaaaacaacctatccgttatccgctatagtacttcgagaaacctagtaccacctttggattgttgacgcgttgcgctcagcacactaacccgtgtgtagcttgggtcgatgagtctggacatacctcactggcgacagtggtccaggctgcgttggcggcctactcatggtgaaagccatgagacgctagacatgaacaaggtgtgaagagtctattgagctactatagagtcctccggcccctgaatgcggctaatcctaaccatggagcaagtgctcacaggccagtgagttgcttgtcgtaatgcgcaagtccgtggcggaaccgactactttgggtgtccgtgtttcactttttacttttatgactgcttatggtgacaatttgatattgttaccatttagcttgtcaaatcaattgcaaaagatcctaaatcttatttatcaacttgcatcttgataactttaatttgaaaaatttgaaaattttaaca

SEQ ID NO: 20962 - DNA, 658 bp, synthetic construct
  source 1..658: mol_type = other DNA
gctttcccccccactatagtaatttagaagcttgaactacacggccaacagacaacccggtccaccaaccgggccccggccaagcacttctgtatccccggactgagtatcaataggctgctcgcgcggctgaaggagaaaacgttcgttacccggccacttacttcgagaaacctagtaacaccatgaaagttgcgcagcgtttcgctccgcacaaacccagtgtagatcaggtcgatgagtcaccgcattccccacgggcgaccgtggcggtggctgcgttggcggcctgcccatggggtaacccacgggacgcttcaatactgacatggtgcgaagagtctattgagctaagtggtagtcctccggcccctgaatgcggctaatcctaactgcggagcagatacccacactccagtgggcagtctgtcgtaacgggcaactctgcagcggaaccgactactttgggtgtccgtgtttccttttgtcttttacactggctgcttatggtgacaattgaaagattgttaccatatagctattggattggccatccggtatcaaacagagcaattatttacttgtttgttggttatatacctctcgataccaaggttctaaaaacactcaactatatcttgttattgaatacgttgaa

SEQ ID NO: 20963 - DNA, 726 bp, synthetic construct
  source 1..726: mol_type = other DNA
gttttccccaccacagggcccaccgtgcgctagccccatggtatctcggtacccttgtgcgcctgttttatccacccttttcccatttaacttagaagcacgcgccaagacggtcaaaagggagcccagtaagccaattgggctatgaccaagcactcctgtaaccccgggccgagtatcaataagctgctcgcgcggctgaaggagaaaaagctcgttacccggccaattacttcgagaaacccagtagcatcatgaaagttgcgcagcgtttcgctccacacaaccccagtgtagatcaggtcgatgagtcaccgcgttccccacgggtgaccgtggcggtggctgcgctggcggcctgcccatggggccacccatgggacgcttcaatactgacatggtgtgaagagtctattgagctaattggtagtcctccggcccctgaatgcggctaatcctaactgcggagcagatgcccacacaccagtgggaagtctgtcgtaacgggtaactctgcagcggaaccgactactttgggtgtccgtgtttccttttatttctactctggctgcttatggtgacaattgaaaggttgttaccatatagctattggattggccatccggtgtcacatagagcgattatttacttgtttgttgggtttataccactgaactataaagttttaaatactcttaactacattttaatccttaactcattaaa

SEQ ID NO: 20964 - DNA, 698 bp, synthetic construct
  source 1..698: mol_type = other DNA
ttaaaacacccccccggttgttcccactccaagggcccacgtggcggctagtactctggtactttggtacctttgtacgcctgttttatctcccttcccaatgtaatttagaagctcttaaatcaaggctcaataggtggggcgcaaaccagcgctctcatgagcaagcactcctgtctccccggtgtggttgcataaactgttcccacggttgaaaacaacctatccgttatccgctatagtacttcgagaaacctagtatcacctttggattgttgacgcgttgcgctcagcacactaacccgtgtgtagcttgggtcgatgagtctggacataccccactggcgacagtggtccaggctgcgttggcggcctactcatggtgaaaaccatgagacgctagacatgaacaaggtgtgaagagtctattgagctactatagagtcctccggcccctgaatgcggctaatcctaaccatggagcaagtgctcacaggccagtgagttgcttgtcgtaatgcgtaagtctgtggcggaaccgactactttgggtgtccgtgtttcactttttacttttatgactgcttatggtgacaatttgatattgttaccatttagcttgtcaaattaattgcaaaagatcctaaatcttacttatcaacttgcattttgataaccttgatttgaaaattttaata

SEQ ID NO: 20965 - DNA, 698 bp, synthetic construct
  source 1..698: mol_type = other DNA
ttaaaacacccccccggttgttcccactccaagggcccacgtggcggctagtactctggtacttcggtacctttgtacgcctgttttatctcccttcccaatgtaatttagaagctcttaaatcaaggctcaataggtggggcgcaaaccagcgctctcatgagcaagcactcctgtctccccggtgtggttgtataaactgttcccacggttgaaaacaacctatccgttatccgctatagtacttcgagaaacctagtatcacctttggattgttgacgcgttgcgctcagcacactaacccgtgtgtagcttgggtcgatgagtctggacataccccactggcgacagtggtccaggctgcgttggcggcctactcatggtgaaaaccatgagacgctagacatgaacaaggtgtgaagagtctattgagctactatagagtcctccggcccctgaatgcggctaatcctaaccatggagcaagtgctcacaggccagtgagttgcttgtcgtaatgcgcaagtccgtggcggaaccgactactttgggtgtccgtgtttcactttttacttttatgactgcttatggtgacaatttgatattgttaccatttagcttgtcaaattaattgcaaaagatcctaaatcttatttaccaacttgcattttgataaccttgatttgaaagttttaata

SEQ ID NO: 20966 - DNA, 698 bp, synthetic construct
  source 1..698: mol_type = other DNA
ttaaaacacccccccggttgttcccactccaagggcccacgtggcggctagtactctggtacttcggtacctttgtacgcctgttttatctcccttcccaatgtaatttagaagcttttaaatcaaggctcaataggtggggcgcaaaccagcgctctcatgagcaagcactcctgtctccccggtgtggttgtataaactgttcccacggttgaaaacaacctatccgttatccgctatagtacttcgagaaacctagtatcacctttggattgttgacgcgttgcgctcagcacactaacccgtgtgtagcttgggtcgatgagtctggacataccccactggcgacagtggtccaggctgcgttggcggcctactcatggtgaaaaccatgagacgctagacatgaacaaggtgtgaagagtctattgagctactatagagtcctccggcccctgaatgcggctaatcctaaccatggagcaagtgctcacaggccagtgagttgcttgtcgtaatgcgcaagtccgtggcggaaccgactactttgggtgtccgtgtttcactttttacttttatgactgcttatggtgacaatttgatattgttaccatttagcttgtcaaattaattgcaaaagaccctaaatcttacttaccaacttgcattttgacaaccttgatttgaaaattttaata

SEQ ID NO: 20967 - DNA, 698 bp, synthetic construct
  source 1..698: mol_type = other DNA
ttaaaacaccccctgggttgttcccactccaagggcccacgtggcggctagtactctggtacttcggtacctttgtacgcctgttttatctcccttcccaatgtaatttagaagctcttaaatcaaggctcaataggtggggcgcaaaccagcgctctcatgagcaagcactcctgtctccccggtgtggttgtataaactgttcccacggttgaaaacaacctatccgttatccgctatagtacttcgagaaacctagtaccacctttggattgttgacgcgttgcgctcagcacactaacccgtgtgtagcttgggtcgatgagtctggacataccccactggcgacagtggtccaggctgcgttggcggcctactcatggtgaaaaccatgagacgctagacatgaacaaggtgtgaagagtctattgagctactatagagtcctccggcccctgaatgcggctaatcctaaccatggagcaagtgctcacaggccagtgagttgcttgtcgtaatgcgcaagtccgtggcggaaccgactactttgggtgtccgtgtttcactttttacttttatgactgcttatggtgacaatttgatattgttaccatttagcttgtcaaattaattgcaaaagatcctaaatcttacttaccaacttgcattttgataaccttgatttgaaaattttaata

SEQ ID NO: 20968 - DNA, 698 bp, synthetic construct
  source 1..698: mol_type = other DNA
ttaaaacaccccccgggttgttcccactccaagggcccacgtggcggctagtactctggtatttcggtacctttgtacgcctgttttatctccctccccaatgtaacttagaagctttcaaatcaaagctcaataggtggagcgcaaaccagcgcttccgtgagcaagtactcctgtttccccggtgcggttgtatagactgttcccacggttgaaaacaacctatccgttatccgctatagtacttcgagaaacctagtatcacctttggattgttgatgcgttgcgctcaacacactaacccgtgtgtagcttgggtcgatgagtctggacataccccactggtgacagtggtccaggctgcgttggcggcctactcatggtgaaaaccatgagacgctagacatgaacaaggtgtgaagagtctattgagctactatagagtcctccggcccctgaatgcggctaatcttaaccatggagcaagtgctcacaaaccagtgagttgcttgtcgtaatgcgcaagtccgtggcggaaccgactactttgggtgtccgtgtttcactttttacttttatgactgcttatggtgacaatctaatattgttaccattcagctagtcgaaataaccgcataaaactttaaatcctatctaacaattcacattttgataaccttgatttgaaaattttaata

SEQ ID NO: 20969 - DNA, 698 bp, synthetic construct
  source 1..698: mol_type = other DNA
ttaaaacaccccctgggttgttcccactccaagggcccacgtggcggctagtactctggtacttcggtacctttgtacgcctgttttatctcccttcccaacgtaatttagaagctcttgaatcaaggctcaataggtggggcgcaaaccagcgctctcatgagcaagcactcctgtctccccggtgtggttgtataaactgttcccacggttgaaaacaacctatccgttatccgctatagtacttcgagaaacctagtatcacctttggattgttgacgcgttgcgctcagcacactaacccgtgtgtagcttgggtcgatgagtctggacataccccactggcgacagtggtccaggctgcgttggcggcctactcatggtgaaaaccatgagacgctagacatgaacaaggtgtgaagagtctattgagctactatagagtcctccggcccctgaatgcggctaatcctaaccatggagcaagtgctcacaggccagtgagttgcttgtcgtaatgcgtaagtccgtggcggaaccgactactttgggtgtccgtgtttcactttttacttttatgactgcttatggtgacaatttgatattgttaccatttagcttgtcaaattaattgtaaaagatcctaaatcttacttaccaacttgcattttgataaccttgatttgaaaattttaata

SEQ ID NO: 20970 - DNA, 698 bp, synthetic construct
  source 1..698: mol_type = other DNA
ttaaaacaacccctgggttgttcccactccaagggcccacgtggcggctagtactctggtacttcggtacctttgtacgcctgttttatctcccttcccaatgtaatttagaagctcttaaatcaaggctcaataggtggggcgcaaaccagcgctctcatgagcaagcactcctgtctccccggtgtggttgtataaactgttcccacggttgaaaacaacctatccgttatccgctatagtacttcgagaaacctagtatcacctttggattgttgacgcgttgcgctcagcacactaacccgtgtgtagcttgggtcgatgagtctggacacaccccactggcgacagtggtccaggctgcgttggcggcctactcatggtgaaaaccatgagacgctagacatgaacaaggtgtgaagagtctattgagctactatagagtcctccggcccctgaatgcggctaatcctaaccatggagcaagtgctcacaggccagtgagttgcttgtcgtaatgcgcaagtccgtggcggaaccgactactttgggtgtccgtgtttcactttttacttttatgactgcttatggtgacaatttgatattgttaccatttagcttgtcaaattaattgcaaaagatcctaaatcttacttaccaacttgcattttgacaaccttgatttgaaaattttaata

SEQ ID NO: 20971 - DNA, 698 bp, synthetic construct
  source 1..698: mol_type = other DNA
ttaaaacaccccctgggttgttcccactccaagggcccacgtggcggctagtactctggtacttcggtacctttgtacgcctgttttatctcccttcccaatgtaatttagaagctcttaaatcaaggctcaataggtggggcgcaaaccagcgctctcatgagcaagcactcctgtctccccggtgtggttgtataaactgttcccacggttgaaaacaacctatccgttatccgctatagtacttcgagaaacctagtatcacctttggattgttgacgcgttgcgctcagcacactaacccgtgtgtagcttgggtcgatgagtctggacataccccactggcgacagtggtccaggctgcgttggcggcctactcatggtgaaaaccatgagacgctagacatgaacaaggtgtgaagagtctattgagctactatagagtcctccggcccctgaatgcggctaatcctaaccatggagcaagtgctcacaggccagtgagttgcttgtcgtaatgcgcaagtccgtggcggaaccgactactttgggtgtccgtgtttcactttttacttttatgactgcttatggtgacaatttgatattgttaccatttagcttgtcaaattaattgcaaaagatcctaaatcttatttaccaatttgcattttgataaccttgatttgaaaattttaata

SEQ ID NO: 20972 - DNA, 698 bp, synthetic construct
  source 1..698: mol_type = other DNA
ttaaaacaccccctgggttgttcccactccaagggcccacgtggcggctagtactctggtacttcggtacctttgtacgcctgttttatcttccttcccaatgtaatttagaagctcttaaatcaaggctcaataggtggggcgcaaaccagcgctctcatgagcaagcactcctgtctccccggtgtggttgtataaactgttcccacggttgaaaacagcctatccgttatccgctatagtacttcgagaaacctagtatcacctttggattgttgacgcgttgcgctcagcacactaacccgtgtgtagcttgggtcgatgagtctggacataccccactggcgacagtggtccaggctgcgttggcggcctactcatggtgtaaaccatgagacgctagacatgaacaaggtgtgaagagtctattgagctactatagagtcctccggcccctgaatgcggctaatcctaaccatggagcaagtgctcacaggccagtgagttgcttgtcgtaatgcgcaagtccgtggcggaaccgactactttgggtgtccgtgtttcactttttacttttatgactgcttatggtgacaatttgatattgttaccatttagcttgtcaaattaattgcaaaagatcctaaatcttacttaccaacttgcattttgacaaccttgatttgaaaattttaata

SEQ ID NO: 20973 - DNA, 698 bp, synthetic construct
  source 1..698: mol_type = other DNA
ttaaaacaccccctgggttgttcccactccaagggcccacgtggcggctagtactctggtacttcggtacctttgtacgcctgttttatctcccttcccaatgtaatttagaagctcttaaatcaaggctcaataggtggggcgcaaaccagcgctctcatgagcaagcactcctgtctccccggtgtggttgtataaactgttcccacggttgaaaacaacctatccgttatccgctatagtacttcgagaaacctagtatcacctttggattgttgacgcgttgcgctcagcacactaacccgtgtgtagcttgggtcgatgagtctggacataccccactggcgacagtggtccaggctgcgttggcggcctactcatggtgaaaaccatgagacgctagacatgaacaaggtgtgaagagtctattgagctactatagagtcctccggcccctgaatgcggctaatcctaaccatggagcaagtgctcacaggccagtgagttgcttgtcgtaatgcgcaagtccgtggcggaaccgactactttgggtgtccgtgtttcactttttacttttatgactgcttatggtgacaatttgatattgttaccatttagcttgtcaaattaattgcaaaagatcctatatcttatttaccaacttgcattttgataaccttgatttgaaaattttaata

SEQ ID NO: 20974 - DNA, 698 bp, synthetic construct
  source 1..698: mol_type = other DNA
ttaaaacaccccccgggttgttcccactccaagggcccacgtggcggctagtactctggtacttcggtacctttgtacgcctgttttatctcccttcccaatgtaatttagaagctcttaaatcaaggctcaataggtggggcgcaaaccagcgctctcatgagcaagcactcctgtctccccggtgtggttgtataaactgttcccacggttaaaaacgacctatccgttatccgctatagtacttcgagaaacctagtatcacctttggattgttgacgcgttgcgctcagcacactaacccgtgtgtagcttgggtcgatgagtctggacataccccactggcgacagtggtccaggctgcgttggcggcctactcatggtgaaaaccatgagacgctagacatgaacaaggtgtgaagagtctattgagctactatagagtcctccggcccctgaatgcggctaatcctaaccatggagcaagtgctcacaggccagtgagttgcttgtcgtaatgcgcaagtccgtggcggaaccgactactttgggtgtccgtgtttcactttttacttttatgactgcttatggtgacaatttgatattgttaccatttagcttgtcaaattaattgcaaaagatcctaaatcttacttaccaatttgcattttgataaccttgatttgaaaattttaata

SEQ ID NO: 20975 - DNA, 698 bp, synthetic construct
  source 1..698: mol_type = other DNA
ttaaaacacccccccggttgttcccactccaagggcccacgtggcggctagtactctggtacttcggtacctttgtacgcctgttttatctcccttcccgatgtaatttagaagctcttaaatcaaggctcaataggtggggcgcaacccagcgctctcatgagcaagcacttctgtctccccggtgtggttgtataaactgttcccacggttgaaaacaacctatccgttatccgctatagtacttcgagaaacctagtatcacctttggattgttgacgcgttgcgctcagcacactaacccgtgtgtagcttgggtcgatgagtctggacataccccactggcgacagtggtccaggctgcgttggcggcctactcatggtgaaaaccatgagacgctagacatgaacaaggtgtgaagagtctattgagctactatagagtcctccggcccctgaatgcggctaatcctaaccatggagcaagtgctcacaggccagtgagttgcttgtcgtaatgcgcaagtccgtggcggaaccgactactttgggtgtccgtgtttcactttttacttttatgactgcttatggtgacaatttgatattgttaccatttagcttgtcaaattaattgcaaaagatcctaaatcttacttaccaacttgcattttgataaccttgatttgaaaattttaata

SEQ ID NO: 20976 - DNA, 698 bp, synthetic construct
  source 1..698: mol_type = other DNA
ttaaaacaccccccgggttgttcccactccaagggcccacgtggcggctagtactctggtacttcggtacctttgtacgcctgttttatctcccttcccgatgtaatttagaagctcttaaatcaaggctcaataggtggggcgcaacccagcgctctcatgagcaagcacttctgtctccccggtgtggttgtataaactgttcccacggttgaaaacaacctatccgttatccgctatagtacttcgagaaacctagtatcacctttggattgttgacgcgttgcgctcagcacactaacccgtgtgtagcttgggtcgatgagtctggacataccccactggcgacagtggtccaggctgcgttggcggcctactcatggtgaaaaccatgagacgctagacatgaacaaggtgtgaagagtctattgagctactatagagtcctccggcccctgaatgcggctaatcctaaccatggagcaagtgctcacaggccagtgagttgcttgtcgtaatgcgcaagtccgtggcggaaccgactactttgggtgtccgtgtttcactttttacttttatgactgcttatggtgacaatttgatattgttaccatttagcttgtcaaattaattgcaaaagatcctaaatcttacttaccaacttgcattttgataaccttgatttgaaaattttaata

SEQ ID NO: 20977 - DNA, 698 bp, synthetic construct
  source 1..698: mol_type = other DNA
ttaacacacccccccggttgttcccactccaagggcccacgtggcggctagtactctggtactttggtacctttgtacgcctgttttatctcccttcccaatgtaatttagaagctcttaaatcaaggctcaataggtggggcgcaaaccagcgctctcatgagcaagcactcctgtctccccggtgtggttgcataaactgttcccacggttgaaaacaacctatccgttatccgctatagtacttcgagaaacctagtatcacctttggattgttgacgcgttgcgttcagcacactaacccgtgtgtagcttgggtcgatgagtctggacataccccactggcgacagtggtccaggctgcgttggcggcctactcatggtgaaaaccatgagacgctagacatgaacaaggtgtgaagagtctattgagctactatagagtcctccggcccctgaatgcggctaatcctaaccatggagcaagtgctcacaggccagtgagttgcttgtcgtaatgcgtaagtccgtggcggaaccgactactttgggtgtccgtgtttcactttttacttttatgactgcttatggtgacaatttgatattgttaccatttagcttgtcaaattaattgcaaaagatcctaaatcttacttatcaacttgcattttgataaccttgatttgaaaattttaata

SEQ ID NO: 20978 - DNA, 698 bp, synthetic construct
  source 1..698: mol_type = other DNA
ttaaaacacccccccggttgttcccactccaagggcccacgtggcggctagtactctggtacttcggtacctttgtacgcctgttttatctcccttcccgatgtaatttagaagctcttaaatcaaggctcaataggtggggtgcaacccagcgctctcatgagcaagcacttctgtctccccggtgtggttgtataaactgttcccacggttgaaaacaacctatccgttatccgctatagtacttcgagaaacctagtatcacctttggattgttgacgcgttgcgctcagcacactaacccgtgtgtagcttgggtcgatgagtctggacataccccactggcgacagtggtccaggctgcgttggcggcctactcatggtgaaaaccatgagacgctagacatgaacaaggtgtgaagagtctattgagctactatagagtcctccggcccctgaatgcggctaatcctaaccatggagcaagtgctcacaagccagtgagttgcttgtcgtaatgcgcaagtccgtggcggaaccgactactttgggtgtccgtgtttcactttttacttttatgactgcttatggtgacaatttgatattgttaccatttagcttgtcaaattaattacaaaagatcctaaatcttatttaccaacttgcattttgataaccttgacttgaaaattttaata

SEQ ID NO: 20979 - DNA, 697 bp, synthetic construct
  source 1..697: mol_type = other DNA
taaaacagccttggggttgttcccactccaagggcccacgtggcggctagtactctggtacttcggtacctttgtacgcctgttttatctcccttcccaatgtaatttagaagctcttaaatcaaggctcaataggtggggcgcaaaccagcgctctcatgagcaagcactcctgtctccccggtgtggttgtataaactgttcccacggttgaaaacaacctatccgttatccgctatagtacttcgagaaacctagtatcacctttggattgttgacgcgttgcgctcagcacactaacccgtgtgtagcttgggtcgatgagtctggacataccccactggcgacagtggtccaggctgcgttggcggcctactcatggtgaaaaccatgagacgctagacatgaacaaggtgtgaagagtctattgagctactatagagtcctccggcccctgaatgcggctaatcctaaccatggagcaagtgctcacaagccagtgagttgcttgtcgtaatgcgcaagtccgtggcggaaccgactactttgggtgtccgtgtttcactttttacttttatgactgcttatggtgacaatttgatattgttaccatttagcttgtcaaattaattgcaaaggatcctaaatcttacttaccaatttgcattttgacaatcttgatttgaaaattttaata

SEQ ID NO: 20980 - DNA, 705 bp, synthetic construct
  source 1..705: mol_type = other DNA
aacagccttggggttgttcccactccaagggcccacgtggcggctagtactctggtacttcggtacctttgtacgcctgttttatctcccttcccaatgtaacttagaagttcttaaatcaatgctcaataggtggggcgcaaaccagcgctctcatgagcaagcactcctgtctccccggtgaggttgtataaactgttcccacggttgaaaacaacctatccgttatccgctatagtacttcgagaaacctagtaccacctttggattgttgacgcgttgcgctcagcacactaacccgtgtgtagcttgggtcgatgagtctggacatacctcactggcgacagtggtccaggctgcgttggcggcctactcatggtgaaagccatgagacgctagacatgaacaaggtgtgaagagtctattgagctactatagagtcctccggcccctgaatgcggctaatcctaaccatggagcaagtgctcacaagccagtgagttgcttgtcgtaatgcgcaagtccgtggcggaaccgactactttgggtgtccgtgtttcactttttacttttatgactgcttatggtgacaatttgatattgttaccatttagcttgtcaaatcaattgcaaaagatcctaaatcttatttatcaacttgcatcttgataactttaatttgaaaataatttgaaaattttaaca

SEQ ID NO: 20981 - DNA, 707 bp, synthetic construct
  source 1..707: mol_type = other DNA
aacagccttggggttgttcccactccaagggcccacgtggcggctagtactctggtacttcggtacctttgtacgcctgttttatctcccttcccaatgtaacttagaagttcttaaatcaatgctcaataggtggggcgcaaaccagcgctctcatgagcaagcactcctgtctccccggtgaggttgtataaactgttcccacggttgaaaacaacctatccgttatccgctatagtacttcgagaaacctagtaccacctttggattgttgacgcgttgcgctcagcacactaacccgtgtgtagcttgggtcgatgagtctggacatacctcactggcgacagtggtccaggctgcgttggcggcctactcatggtgaaagccatgagacgctagacatgaacaaggtgtgaagagtctattgagctactatagagtcctccggcccctgaatgcggctaatcctaaccatggagcaagtgctcacaggccagtgagttgcttgtcgtaatgcgcaagtccgtggcggaaccgactactttgggtgtccgtgtttcactttttacttttatgactgcttatggtgacaatttgatattgttaccatttagcttgtcaaatcaattgcaagagatcctaaatcttatttatcaacttgcatcttgataactttaatttgaaaaattaatttgaaaattttgaca

SEQ ID NO: 20982 - DNA, 699 bp, synthetic construct
  source 1..699: mol_type = other DNA
tgggaacagccttggggttgttcccactccaagggcccacgtggcggctagtactctggtacttcggtacctttgtacgcctgttttatctcccttcccaatgtaatttagaagctcttaaatcaaggctcaataggtggggcgcaaaccagcgctctcatgagcaagcactcctgtctccccggtgtggttgtataaactgttcccacggttgaaaacaacctatccgttatccgctatagtacttcgagaaacctagtatcacctttggattgttgacgcgttgcgctcagcacactaacccgtgtgtagcttgggtcgatgagtctggacataccccactggcgacagtggtccaggctgcgttggcggcctactcatggtgaaaaccatgagacgctagacatgaacaaggtgtgaagagtctattgagctactatagagtcctccggcccctgaatgcggctaatcctaaccatggagcaagtgctcacaggccagtgagttgcttgtcgtaatgcgcaagtccgtggcggaaccgactactttgggtgtccgtgtttcactttttacttttatgactgcttatggtgacaatttgatattgttaccatttagcttgtcaaattaattgcaaaagatcctaaatcttacttaccaacttgcattttgacaaccttgatttgaaaatttttaata

SEQ ID NO: 20983 - DNA, 699 bp, synthetic construct
  source 1..699: mol_type = other DNA
tgggaacagccttggggttgttcccactccaagggcccacgtggcggctagtactctggtacttcggtacctttgtacgcctgttttatctcccttcccaatgtaatttagaagctcttaaatcaaggctcaataggtggggcgcaaaccagcgctctcatgagcaagcactcctgtctccccggtgtggttgtataaactgttcccacggttgaaaacaacctatccgttatccgctatagtacttcgagaaacctagtatcacctttggattgttgacgcgttgcgctcagcacactaacccgtgtgtagcttgggtcgatgagtctggacataccccactggcgacagtggtccaggctgcgttggcggcctactcatggtgaaaaccatgagacgctagacatgaacaaggtgtgaagagtctattgagctactatagagtcctccggcccctgaatgcggctaatcctaaccatggagcaagtgctcacaggccagtgagttgcttgtcgtaatgcgcaagtccgtggcggaaccgactactttgggtgtccgtgtttcactttttacttttatgactgcttatggtgacaatttgatattgttaccatttagcttgtcaaattaattgcaaaagatcctaaatcttacttaccaacttgcattttgacaaccttgatttaaaaatttttaata

SEQ ID NO: 20984 - DNA, 633 bp, synthetic construct; identical to SEQ ID NO: 759
  source 1..633: mol_type = other DNA

SEQ ID NO: 20985 - DNA, 701 bp, synthetic construct
  source 1..701: mol_type = other DNA
ccttggggttgttcccaccccaagggcccacgtggcggctagtactctggtatttcggtacctttgtacgcctgttttatatccctccccaatgtaatttagaagctttcaaatcaaagctcaataggtggagcgcaagccagcgcttccgtgagcaagcacttctgtttccccggtgcggttgtatagactgttcccacggttgaaaacgacctatccgttatccgctatagtacttcgagaaacctagtatcacctttggattgttgatgcgttgcgctcaacacactaacccgtgtgtagcttgggtcgatgagtctggacgtaccccactggtgacagtggtccaggctgcgttggcggcctactcatggtgaaaaccatgagacgctagacatgaacaaggtgtgaagagtctattgagctactatagagtcctccggcccctgaatgcggctaatcttaaccatggagcaagtgctcacaaaccagtgagttgcttgtcgtaatgcgcaagtccgtggcggaaccgactactttgggtgtccgtgtttcactttttacttttatgactgcttatggtgacaatttaatattgttaccattcagctagttgaaataatcacataaaactttaaatcctatctaataattcacatttggatagtttcatttcgaggactttaaacctacttacaaag

SEQ ID NO: 20986 - DNA, 701 bp, synthetic construct
  source 1..701: mol_type = other DNA
agccttggggttgttcccactccaagggcccacgtggcggctagtactctggtacttcggtacctttgtacgcctgttttatctcccttcccaatgtaacttagaagttcttaaatcaatgctcaataggtggggcgcaaaccagcgctctcatgagcaagcactcctgtctccccggtgaggttgtataaactgttcccacggttgaaaacaacctatccgttatccgctatagtacttcgagaaacctagtaccacctttggattgttgatgcgttgcgctcagcacactaacccgtgtgtagcttgggtcgatgagtctggacatacctcactggcgacagtggtccaggctgcgttggcggcctactcatggtgaaagccatgagacgctagacatgaacaaggtgtgaagagtctattgagctactatagagtcctccggcccctgaatgcggctaatcctaaccatggagcaagtgctcacaggccagtgagttgcttgtcgtaatgcgcaagtccgtggcggaaccgactactttgggtgtccgtgtttcactttttacttttatgactgcttatggtgacaatttgatattgttaccatttagcttgtcaaatcaattgcaaaagatcctaaatcttatttatcaacttgcatcttgataactttaatttgaaaatatttgaaaattttaaca

SEQ ID NO: 20987 - DNA, 704 bp, synthetic construct
  source 1..704: mol_type = other DNA
gccttggggttgttcccactccaagggcccacgtggcggctagtactctggtacttcggtacctttgtacgcctgttttatctcccttcccaatgtaacttagaagttcttaaatcaatgctcaataggtggggcgcaaaccagcgctctcatgagcaagcactcctgtctccccggtgaggttgtataaactgttcccacggttgaaaacaacctatccgttatccgctatagtacttcgagaaacctagtaccacctttggattgttgacgcgttgcgctcagcacactaacccgtgtgtagcttgggtcgatgagtctggacatacctcactggcgacagtggtccaggctgcgttggcggcctactcatggtgaaagccatgagacgctagacatgaacaaggtgtgaagagtctattgagctactatagagtcctccggcccctgaatgcggctaatcctaaccatggagcaagtgctcacaggccagtgagttgcttgtcgtaatgcgcaagtccgtggcggaaccgactactttgggtgtccgtgtttcactttttacttttatgactgcttatggtgacaatttgatattgttaccatttagcttgtcaaatcaattgcaaaagatcctaactcttatttatcaacttgcatcttgataactttaatttgaaaatattaatttgaaaattataaca

SEQ ID NO: 20988 - DNA, 732 bp, synthetic construct
  source 1..732: mol_type = other DNA
aaaacaacttatccgttatccgtttaaaacagccttggggttgttcccaccccaagggcccacgtggcggctagtactctggtatctcggtacctttgtacgcctgttttatctcccttcccaacgcaacttagaagttttcaaatcgaggctcaataggtgaagcgcaaaccagcgctttcatgagcaagcacttctgtctccccggtgcagttgtatagactgtttccacggttgaaaacaacttatccgttatccgctatagtacttcgagaaacctagtatcacctttggattgttgatgcgttgcgctcagcacactaacccgtgtgtagcttgggtcgatgagtctggacgtaccccactggtgacagtggtccaggctgcgttggcggcctactcatggtgaaaaccatgagacgctaaacatgaacaaggtgtgaagagtctattgagctactatagagtcctccggcccctgaatgcggctaatcttaaccatggagcaagtgctcacaagccagtgagttgcttgtcgtaatgcgcaagtccgtggcggaaccgactactttgggtgtccgtgtttcactttttacttttatgactgcttatggtgacaatttaatattgttaccatttagcttgtcagatcaatcacgtgaaatcccaaatcttattcaataacctgtatttggataacttcatttgaaaatcctaaactcgttcgcaaac

SEQ ID NO: 20989 - DNA, 698 bp, synthetic construct
  source 1..698: mol_type = other DNA
tgggaacagccttggggttgttcccactccaagggcccacgtggcggctagtactctggtacttcggtacctttgtacgcctgttttatctcccttcccaatgtaatttagaagctcttaaatcaaggctcaataggtggggcgcaaaccagcgctcttatgagcaagcactcctgtctccccggtgtggttgtataaactgttcccacggttgaaaacaacctatccgttatccgctatagtacttcgagaaacctagtatcacctttggattgttgacgcgttgcgctcagcacactaacccgtgtgtagcttgggtcgatgagtctggacacaccccactggcgacagtggtccaggctgcgttggcggcctactcatggtgaaaaccatgagacgctagacatgaacaaggtgtgaagagtctattgagctactatagagtcctccggcccctgaatgcggctaatcctaaccatggagcaagtgctcacaggccagtgagttgcttgtcgtaatgcgcaagtccgtggcggaaccgactactttgggtgtccgtgtttcactttttacttttatgactgcttatggtgacaatttgatattgttaccatttagcttgtcaaattaattgcaaaagatcctaaatcttacttaccaacttgcattttgataaccttgatttgaaaattttaata

SEQ ID NO: 20990 - DNA, 636 bp, synthetic construct
  source 1..636: mol_type = other DNA
ccccagggcccaccgggcgttagtactctggtatcacggtaccttagtatgcctgttttatgttccctttcccccgcaactttagaagtaaccaagttatggctcaatagtcgccacacctccagtgtggttccgagcaagcacttctgttccccggttgcgtcctatatgttgtgtgaacggcagaaagggacaacatcgttacccgctcaactactacgggaagcccagtaccaccatggattgacttgagagttgcgttcggcgcacccccagcgtagctcaggccgatgaggctccgaataccccacgggcgaccgtgtcggagcctgcgttggcggcctgcccacgttgtaaagcgtgggacgctcatttcatgacatggtgcgaagagcctactgtgctagttgagagtcctccggcccctgaatgtggataatcctaaccactgaacctacgggcgcaagccagcgtctggtaggccgtaacgcgcaagtcggtggcggaaccaactactttgggtgtccgtgtttccttttatctcctttgaatgtttatggtgacaattgttgtgtacagttgttgccatagtttgcattcaaaaataaacttaacacttcccaattatttgtcaca

SEQ ID NO: 20991 - DNA, 722 bp, synthetic construct
  source 1..722: mol_type = other DNA
ttcccacccacagggcccactgggcgctagcacactggtatcacggtacctttgtgcgcctgttttatcaaccctaccccaaggcaatatagaagcacgccacaaaaggtcaataggtaacccagtactccaactgggtcttgaccaagcacttctgttaccccggactgagtatcaataggctgctcgcgcggctgaaggagaaaacgttcgttacccggccaattacttcgagaaacctagtaccaccatgaaggttgcgcggcgtttcgttccgcacaaccccagtgcagatcaggccgatgagtcaccgcattccccacgggcgaccgtggcggtggctgcgctggcggcctgcccatggggcgacccatgggacgcttcaatactgacatggtgtgaagagtctattgagctaattggtagtcctccggcccctgaatgcggctaatcctaactgcggagcagatacccacataccagtgggcagtctgtcgtaacgggcaactctgcagcggaaccgactactttgggtgtccgtgtttccttttattcttatactggctgcttatggtgacaattgagagattgttgccatatagctattggattggccatccggtgacaaacagagcaatcgtctacctatttgttggttttgtcccattggattttaaagttctaaaaacccttgattttatcttagtactcaatacggcaaa

SEQ ID NO: 20992 - DNA, 698 bp, synthetic construct
  source 1..698: mol_type = other DNA
tgggaacagccttggggttgttcccactccaagggcccacgtggtggctagtactctggtacttcggtacctttgtacgcctgttttatctcccttcccaatgtaatttagaagctcttaaatcaaggctcaataggtggggcgcaaaccagcgctctcatgagcaagcactcctgtctccccggtatggttgtataaactgttcccacggttgaaaacaacctatccgttatccgctatagtacttcgagaaacctagtatcacctttggattgttgacgcgttgcgctcagcacactaacccgtgtgtagcttgggtcgatgagtctggacataccccactggcgacagtggtccaggctgcgttggcggcctactcatggtgaaaaccatgagacgctagacatgaacaaggtgtgaagagtctattgagctactatagagtcctccggcccctgaatgcggctaatcctaaccatggagcaagtgctcacaggccagtgagttgcttgtcgtaatgcgcaagtccgtggcggaaccgactactttgggtgtccgtgtttcactttttacttttatgactgcttatggtgacaatttgatattgttaccatttagcttgtcaaattaattgcaaaagatcctaaatcttacttaccaacttgcattttgacaaccttggtttgaaaattttaata

SEQ ID NO: 20993 - DNA, 701 bp, synthetic construct
  source 1..701: mol_type = other DNA
ccttggggttgttcccaccccaagggcccacgtggcggctagtactctggtatttcggtacctttgtacgcctgttttatctccctccccaatgtaacttagaagttttcaaatcaaagctcaataggtggagcgcaaaccagcgttttcatgagcaagcactcctgtttccccggtgcgattgtatagactgttcccacggttgaaaacaatctatccgttatccgctatagtacttcgagaaacctagtatcacctttggattgttgatgcgttgcgctcagcacactaacccgtgtgtagcttgggtcgatgagtctggacataccccactggtgacagtggtccaggctgcgttggcggcctactcatggtgaaaaccatgagacgctagacatgaacaaggtgtgaagagtctattgagctactatagagtcctccggcccctgaatgcggctaatcttaaccatggagcaagtgctcacaaaccagtgagttgcttgtcgtaatgcgcaagtccgtggcggaaccgactactttgggtgtccgtgtttcactttttacttttatgactgcttatggtgacaatttgatattgttaccatttagcttgtcaaattaatcacacaaagccttaaatcttatctatcaatttgcatttggatagcttcattttgaagattctaaacctgttcacaaag

SEQ ID NO: 20994 - DNA, 691 bp, synthetic construct
  source 1..691: mol_type = other DNA
gccttggggttgttcccactccaagggcccacgtggcggctagtactctggtacttcggtacctttgtacgcctgttttatctcccttcccaatgtaatttagaagctcttaaatcaaggctcaataggtggggcgcaaaccagcgctctcatgagcaagcactcctgtctccccggtgtggttgtataaactgttcccacggttgaaaacaacctatccgttatccgctatagtacttcgagaaacctagtatcacctttggattgttgacgcgttgcgctcagcacactaacccgtgtgtagcttgggtcgatgagtctggacataccccactggcgacagtggtccaggctgcgttggcggcctactcatggtgaaaaccatgagacgctagacatgaacaaggtgtgaagagtctattgagctactatagagtcctccggcccctgaatgcggctaatcctaaccatggagcaagtgctcacaggccagtgagttgcttgtcgtaatgcgtaagtccgtggcggaaccgactactttgggtgtccgtgtttcactttttacttttatgactgcttatggtgacaatttgatattgttaccatttagcttgtcaaattaattgcaaaagatcctaaatcttacttaacaacttgcattttgacaactttgatttgaaaatttttaata

SEQ ID NO: 20995 - DNA, 691 bp, synthetic construct
  source 1..691: mol_type = other DNA
gccttggggttgttcccactccaagggcccacgtggcggctagtactctggtacttcggtacctttgtacgcctgttttatctcccttcccaatgtgatttagaagctcttaaatcaaggctcaataggtggggcgcaaaccagcgctctcatgagcaagcactcctgtctccccggtgtggttgtataaactgttcccacggttgaaaacaacctatccgttatccgctatagtacttcgagaaacctagtatcacctttggattgttgacgcgttgcgctcagcacactaacccgtgtgtagcttgggtcgatgagtctggacataccccactggcgacagtggtccaggctgcgttggcggcctactcatggtgaaaaccatgagacgctagacatgaacaaggtgtgaagagtctattgagctactatagagtcctccggcccctgaatgcggctaatcctaaccatggagcaagtgctcacaggccagtgagttgcttgtcgtaatgcgcaagtccgtggcggaaccgactactttgggtgtccgtgtttcactttttacttttatgactgcttatggtgacaatttgatattgttaccatttagcttgtcaaatcaattgcaaaagatcctaaatcttacttaccaacttgcattttgataaccttgatttgaaaatttttaata

SEQ ID NO: 20996 - DNA, 691 bp, synthetic construct
  source 1..691: mol_type = other DNA
ggtcttggggttgttcccactccaagggcccacgtggcggctagtactctggtacttcggtacctttgtacgcctgttttatctcccttcccaatgtaatttagaagctcttaaatcaaggctcaataggtggggcgcaaaccagcgctctcatgagcaagcactcctgtctccccggtgtggttgtataaactgttcccacggttgaaaacaacctatccgttatccgctatagtacttcgagaaacctagtatcacctttggattgttgacgcgttgcgctcagcacactaacccgtgtgtagcttgggtcgatgagtctggacataccccactggcgacagtggtccaggctgcgttggcggcctactcatggtgaaaaccatgagacgctagacatgaacaaggtgtgaagagtctattgagctactatagagtcctccggcccctgaatgcggctaatcctaaccatggagcaagtgctcacaggccagtgagttgcttgtcgtaatgcgcaagtccgtggcggaaccgactactttgggtgtccgtgtttcactttttacttttatgactgcttatggtgacaatttgatattgttaccatttagcttgtcaaattaattgcaaaagatcctaaatcttacttaccaatttgcattttgataaccttgatttgaaaattttaata

SEQ ID NO: 20997 - DNA, 691 bp, synthetic construct
  source 1..691: mol_type = other DNA
gggcttggggttgttcccactccaagggcccacgtggcggctagtactctggtacttcggtacctttgtacgcctgttttatctcccttcccaatgtaatttagaagctcttaaatcaaggctcaataggtggggcgcaaaccagcgctctcatgagcaagcactcctgtctccccggtgtggttgtataaactgttcccacggttgaaaacaacctatccgttatccgctatagtacttcgagaaacctagtatcacctttggattgttgacgcgttgcgctcagcacactaacccgtgtgtagcttgggtcgatgagtctggacataccccactggcgacagtggtccaggctgcgttggcggcctactcatggtgaaaaccatgagacgctagacatgaacaaggtgtgaagagtctattgagctactatagagtcctccggcccctgaatgcggctaatcctaaccatggagcaagtgctcacaggccagtgagttgcttgtcgtaatgcgcaagtccgtggcggaaccgactactttgggtgtccgtgtttcactttttacttttatgactgcttatggtgacaatttgatattgttaccatttagcttgtcaaattaattgcaaaggatcctaaatcttacttaccaatttgcattttgacaatcttgatttgaaaattttaata

SEQ ID NO: 20998 - DNA, 691 bp, synthetic construct
  source 1..691: mol_type = other DNA
gggcttggggttgttcccactccaagggcccacgtggcggctagtactctggtacttcggtacctttgtacgcctgttttatctcccttcccaatgtaatttagaagctcttaaatcaaggctcaataggtggggcgcaaaccagcgctctcatgagcaagcactcctgtctccccggtgtggttgtataaactgttcccacggttgaaaacaacctatccgttatccgctatagtacttcgagaaacctagtatcacctttggattgttgacgcgttgcgctcagcacactaacccgtgtgtagcttgggtcgatgagtctggacataccccactggcgacagtggtccaggctgcgttggcggcctactcatggtgaaaaccatgagacgctagacatgaacaaggtgtgaagagtctattgagctactatagagtcctccggcccctgaatgcggctaatcctaaccatggagcaagtgctcacaggccagtgagttgcttgtcgtaatgcgcaagtccgtggcggaaccgactactttgggtgtccgtgtttcactttttacttttatgactgcttatggtgacaatttgatattgttaccatttagcttgtcaaattaattgcaaaggatcctaaatctcacttaccaatttgcattttgacaatcttgatttgaaaattttaata

SEQ ID NO: 20999 - DNA, 691 bp, synthetic construct
  source 1..691: mol_type = other DNA
ggtcttggggttgttcccactccaagggcccacgtggcggctagtactctggtacttcggtacctttgtacgcctgttttatctcccttcccaatgtaatttagaagctcttaaatcaaggctcaataggtggggcgcaaaccagcgctctcatgagcaagcactcctgtctccccggtgtggttgtataaactgttcccacggttgaaaacaacctatccgttatccgctatagtacttcgagaaacctagtatcacctttggattgttgacgcgttgcgctcagcacactaacccgtgtgtagcttgggtcgatgagtctggacataccccactggcgacagtggtccaggctgcgttggcggcctactcatggtgaaaaccatgagacgctagacatgaacaaggtgtgaagagtctattgagctactatagagtcctccggcccctgaatgcggctaatcctaaccatggagcaagtgctcacaggccagtgagttgcttgtcgtaatgcgcaagtccgtggcggaaccgactactttgggtgtccgtgtttcactttttacttttatgactgcttatggtgacaatttgatattgttaccatttagcttgtcaaattaattgcaaaggatcctaaatcttacttaccaatttgcattttgataatcttgatttgaaaattttaata

SEQ ID NO: 21000 - DNA, 710 bp, synthetic construct
  source 1..710: mol_type = other DNA
ccacttggcggctagtacactggtattacggtacccttgtacgcctgttttacacccctttcccccgtaacttagaagctttaaatccaagttcaacagtcagtggtacaacccagtactaccacgaacaagcacctctgttaccccggtgagattgcataggccgtccccacggctaaaagcgattgatccgttatccgctcttgtacttcgagaagcctagtaagaccttgggatcctcgatgcgttgcgctcaacactcaaccccagagtgtagcttgggctgatgagtctggacattcctcaccggtgacggtggtccaggctgcgttggcggcctacctgtggcccaaagccacaggacgctagttgtgaacaaggtgtgaagagcctattgagctacaagagagtcctccggcccctgaatgcggctaatcccaaccacggagcaggcgattgcaacccagcaactagcctgtcgtaacgcgcaagtctgtggcggaaccgactactttgggtgtccgtgtttccttttattacataatggctgcttatggtgacaatcacagattgttgtcataaagcgaattggattggccatccggtgagaattaaaacaattatttacttatttgttggatttgttcctatacacacccaaacaccttgcttgattgaagtaattctgttgataagacaacactattaca

SEQ ID NO: 21001 - DNA, 690 bp, synthetic construct
  source 1..690: mol_type = other DNA
gccttggggttgttcccactccaagggcccacgtggcggctagtactctggtacttcggtacctttgtacgcctgttttatctcccttcccaatgtaacttagaagttcttaaatcaatgctcaataggtggggcgcaaaccagcgctctcatgagcaagcactcctgtctccccggtgaggttgtataaactgttcccacggttgaaaacaacctatccgttatccgctatagtacttcgagaaacctagtaccacctttggattgttgacgcgttgcgctcagcacactaacccgtgtgtagcttgggtcgatgagtctggacatacctcactggcgacagtggtccaggctgcgttggcggcctactcatggtgaaagccatgagacgctagacatgaacaaggtgtgaagagtctattgagctactatagagtcctccggcccctgaatgcggctaatcctaaccatggagcaagtgctcacaggccagtgagttgcttgtcgtaatgcgcaagtccgtggcggaaccgactactttgggtgtccgtgtttcactttttacttttatgactgcttatggtgacaatttgatattgttaccatttagcttgtcaaatcaattgcaaaagatcctaaatcttatttatcaacttgcatcttgataactttaatttgaaaattttaaca

SEQ ID NO: 21002 - DNA, 690 bp, synthetic construct
  source 1..690: mol_type = other DNA
gccttggggttgttcccactccaagggcccacgtggcggctagtactctggtacttcggtacctttgtacgcctgttttatctcccttcccaatgtaacttagaagtttttaaatcaatgctcaataggtggggcacaaaccagtgctctcatgagcaagcactcctgtctccccggtgaggttgtataaactgttcccacggttgaaaacaacctatccgttatccgctatagtacttcgagaaacctagtaccacctttggattgttgacgcgttgcgctcagcacactaacccgtgtgtagcttgggtcgatgagtctggacatacctcactggcgacagtggtccaggctgcgttggcggcctactcatggtgaaagccatgagacgctagacatgaacaaggtgtgaagagtctattgagctactatagagtcctccggcccctgaatgcggctaatcctaaccatggagcaagtgctcacaggccagtgagttgcttgtcgtaatgcgcaagtccgtggcggaaccgactactttgggtgtccgtgtttcactttttacttttatgactgcttatggtgacaatttgatattgttaccatttagcttgtcaaatcaattgtaaaagatcctaaatcttatttatcaacttgcatcttgataactttaatttgaaaattttaaca

SEQ ID NO: 21003 - DNA, 691 bp, synthetic construct
  source 1..691: mol_type = other DNA
gccttggggttgttcccactccaagggcccacgtggcggctagtactctggtacttcggtacctttgtacgcctgttttatctcccttcccaatgtaatttagaagctcttaaatcaaggctcaataggtggggcgcaaaccagcgctctcatgagcaagcactcctgtctccccggtgtggttgtataaactgttcccacggttgaaaacaacctatccgttatccgctatagtacttcgagaaacctagtatcacctttggattgttgacgcgttgcgctcagcacactaacccgtgtgtagcttgggtcgatgagtctggacataccccactggcgacagtggtccaggctgcgttggcggcctactcatggtgaaaaccatgagacgctagacatgaacaaggtgtgaagagtctattgagctactatagagtcctccggcccctgaatgcggctaatcctaaccatggagcaagtgctcacaggccagtgagttgcttgtcgtaatgcgcaagtccgtggcggaaccgactactttgggtgtccgtgtttcactttttacttttatgactgcttatggtgacaatttgatattgttaccatttagcttgtcaaattaattgcaaaagatcctaaatcttacttaccaacttgcattttgacaaccttgatttgaaaatttttaata

SEQ ID NO: 21004 - DNA, 707 bp, synthetic construct
  source 1..707: mol_type = other DNA
cactgggcgctagcacactggtatcccggtacctttgtgcgcctgttttatttaccccacccccagctgtaatttagaagtacgacacacatggtcaatagatggctcagtgcaccaactgggtttagaccaagcacttctgttaccccggaccgagtatcaataagctgctcgcgcggctgaaggagaaaacgttcgttacccggccaattacttcgagaaacctagtaccaccatggaggttgcgcagcgtttcgctccgcacagccccagtgtagatcaggccgatgagtcaccgcattcctcacgggcgaccgtggcggtggctgcgttggcggcctgcccatggggtaacccatgggacgcttcaatactaacatggtgtgaagagtctattgagctaattggtagtcctccggcccctgaatgcggctaatcctaactgcggagcagatactcacatgccagtgggcagtctgtcgtaacgggcaactctgcagcggaaccgactactttgggtgtccgtgtttccttttattcttatactggctgcttatggtgacaattgagaaattgttaccatatagctattggattggccatccagtgacaaacagagcaattgtttacctatttgtcggcttcataccgttaaacttaagagttttgaagacccttaacttgattatactattcaactctgtaaa

SEQ ID NO: 21005 - DNA, 691 bp, synthetic construct
  source 1..691: mol_type = other DNA
ggacttggggttgttcccactccaagggcccacgtggcggctagtactctggtacttcggtacctttgtacgcctgttttatctcccttcccaatgtaatttagaagctcttaaatcaaggctcaataggtggggcgcaaaccagcgctctcatgagcaagcactcctgtctccccggtgtggttgtataaactgttcccacggttgaaaacaacctatccgttatccgctatagtacttcgagaaacctagtatcacctttggattgttgacgcgttgcgctcagcacactaacccgtgtgtagcttgggtcgatgagtctggacacaccccactggcgacagtggtccaggctgcgttggcggcctactcatggtgaaaaccatgagacgctagacatgaacaaggtgtgaagagtctattgagctactatagagtcctccggcccctgaatgcggctaatcctaaccatggagcaagtgctcacaggccagtgagttgcttgtcgtaatgcgcaagtccgtggcggaaccgactactttgggtgtccgtgtttcactttttacttttatgactgcttatggtgacaatttgatattgttaccatttagcttgtcaaattaattgcaaaaggccctaaatcttacctaccaacttgcattttgacaaccttgatttgaaaattttaata

SEQ ID NO: 21006 - DNA, 697 bp, synthetic construct
  source 1..697: mol_type = other DNA
cgcctgcacactggtatcccggtacctttgtgtgcctgttttattcaccctaccccattgtaacctagaagctaatcaaatatggtcactaggtagcccagtgcgccaactgggtcttgaccaagcacttctgttaccccggactgagtatcaataggctgcttacgcggccgaaggagaaaacgttcgttacccggccaattacttcgagaaacccagtaccaccatgaaggttgcgcagcgtttcgctccgcacaaccccagtgtagatcaggtcgatgggtcaccgcatccctcacgggtgaccgtggcggtggctgcgctggcggcctgcccatggggtatcccatgggacgcttcaatactgacatggtgcgaagagtctattgagctaattggtagtcctccggcccctgaatgcggctaatcctaactgcggagcagatacccacataccagtgggcagtctgtcgtaatgggcaactctgcagcggaaccgactactttgggtgtccgtgtttctttttattcctatttggctgcttatggtgacaattgaagaattgttaccatatagctattggattggccatccggtgactaatagagccattgtttacctctttgttggttttgtaccactgaatcacatagttctaaatactctaaatttgattttagtgctcaacacatcaaa

SEQ ID NO: 21007 - DNA, 690 bp, synthetic construct
  source 1..690: mol_type = other DNA
agccttggggttgttcccactccaagggcccacgtggcggctagtactctggtacttcggtacctttgtacgcctgttttatctcccttcccaatgtaatttagaagctttcaaatcaaggctcaataggtggggcgcaaaccagcgctctcatgagcaagcactcctgtctccccggtgtggttgtataaactgttcccacggttgaaaacaacctatccgttatccgctatagtacttcgagaaacctagtatcacctttggattgttgacgcgttgcgctcagcacactaacccgtgtgtagcttgggtcgatgagtctggacataccccactggcgacagtggtccaggctgcgttggcggcctactcatggtgaaaaccatgagacgctagacatgaacaaggtgtgaagagtctattgagctactatagagtcctccggcccctgaatgcggctaatcctaaccatggagcaagtgctcacaggccagtgagttgcttgtcgtaatgcgcaagtccgtggcggaaccgactactttgggtgtccgtgtttcactttttacttttatgactgcttatggtgacaatttgatattgttaccatttagctgtcaaattaattgcaaaagatcctaagtcttacttaccaatttgcattttgataaccttggtttgaaaactttaata

SEQ ID NO: 21008 - DNA, 690 bp, synthetic construct
  source 1..690: mol_type = other DNA
agccttggggttgttcccactccaagggcccacgtggcggctagtactctggtacttcggtacctttgtacgcctgttttatctcccttcccaatgtaatttagaagcttttaaatcaaggctcaataggtggggcgcaaaccagcgctctcatgagcaagcactcctgtctccccggtgtggttgtataaactgttcccacggttgaaaacaacctatccgttatccgctatagtacttcgagaaacctagtatcacctttggattgttgacgcgttgcgctcagcacactaacccgtgtgtagcttgggtcgatgagtctggacataccccactggcgacagtggtccaggctgcgttggcggcctactcatggtgaaaaccatgagacgctagacatgaacaaggtgtgaagagtctattgagctactatagagtcctccggcccctgaatgcggctaatcctaaccatggagcaagtgctcacaggccagtgagttgcttgtcgtaatgcgcaagtccgtggcggaaccgactactttgggtgtccgtgtttcactttttacttttatgactgcttatggtgacaatttgatattgttaccatttagctgtcaaattaattgcaaaagatcctaagtcttacttaccaatttgcattttgataaccttgatttgaaaattttaata

SEQ ID NO: 21009 - DNA, 683 bp, synthetic construct
  source 1..683: mol_type = other DNA
agttgttcccactccaagggcccacgtggcggctagtactctggtacttcggtacctttgtacgcctgttttatctcccttcccaatgtaatttagaagctcttaaatcaaggctcaataggtggggcgcaaaccagcgctctcacgagcaagcactcctgtctccccggtgcggttgtataaactgttcccacggttgaaaacgacctatccgttatccgctatagtacttcgagaaacctagtatcacctttggattgttgacgcgttgcgctcagcacactaacccgtgtgtagcttgggtcgatgagtctggacataccccactggcgacagtggtccaggctgcgttggcggcctactcatggtgaaaaccatgagacgctagacatgaacaaggtgtgaagagtctattgagctactatagagtcctccggcccctgaatgcggctaatcctaaccatggagcaagtgctcacaggccagtgagttgcttgtcgtaatgcgcaagtccgtggcggaaccgactactttgggtgtccgtgtttcactttttacttttatgactgcttatggtgacaatttaatattgttaccatttagcttgtcaaattaattgcaaaacatcctaaatcttacttaccaacttgcattttgataaccttggtttgaaaatttcaata

SEQ ID NO: 21010 - DNA, 689 bp, synthetic construct
  source 1..689: mol_type = other DNA
gccttggggttgttcccactccaagggcccacgtggcggctagtactctggtacttcggtacctttgtacgcctgttttatctcccttcccaatgtaatttagaagctttcaaatcaaggctcaataggtggggcgcaaaccagcgctctcatgagcaagcactcctgtctccccggtgtggttgtataaactgttcccacggttgaaaacaacctatccgttatccgctatagtacttcgagaaacctagtatcacctttggattgttgacgcgttgcgctcagcacactaacccgtgtgtagcttgggtcgatgagtctggacataccccactggcgacagtggtccaggctgcgttggcggcctactcatggtgaaaaccatgagacgctagacatgaacaaggtgtgaagagtctattgagctactatagagtcctccggcccctgaatgcggctaatcctaaccatggagcaagtgctcacaggccagtgagttgcttgtcgtaatgcgcaagtccgtggcggaaccgactactttgggtgtccgtgtttcactttttacttttatgactgcttatggtgacaatttgatattgttaccatttagctgtcaaattaattgcaaaagatcctaagtcttacttaccaatttgcattttgataaccttggtttgaaaactttaata

SEQ ID NO: 21011 - DNA, 689 bp, synthetic construct
  source 1..689: mol_type = other DNA
gccttggggttgttcccactccaagggcccacgtggcggctagtactctggtacttcggtacctttgtacgcctgttttatctcccttcccaatgtaatttagaagcttttaaatcaaggctcaataggtggggcgcaaaccagcgctctcatgagcaagcactcctgtctccccggtgtggttgtataaactgttcccacggttgaaaacaacctatccgttatccgctatagtacttcgagaaacctagtatcacctttggattgttgacgcgttgcgctcagcacactaacccgtgtgtagcttgggtcgatgagtctggacataccccactggcgacagtggtccaggctgcgttggcggcctactcatggtgaaaaccatgagacgctagacatgaacaaggtgtgaagagtctattgagctactatagagtcctccggcccctgaatgcggctaatcctaaccatggagcaagtgctcacaggccagtgagttgcttgtcgtaatgcgcaagtccgtggcggaaccgactactttgggtgtccgtgtttcactttttacttttatgactgcttatggtgacaatttgatattgttaccatttagctgtcaaattaattgcaaaagatcctaagttttacttaccaatttgcattttgataaccttgatttgaaaattttaata

SEQ ID NO: 21012 - DNA, 689 bp, synthetic construct
  source 1..689: mol_type = other DNA
gccttggggttgttcccactccaagggcccacgtggcggctagtactctggtacttcggtacctttgtacgcctgttttatctcccttcccaatgtaatttagaagcttttaaatcaaggctcaataggtggggcgcaaaccagcgctctcatgagcaagcactcctgtctccccggtgtggttgtataaactgttcccacggttgaaaacaacctatccgttatccgctatagtacttcgagaaacctagtatcacctttggattgttgacgcgttgcgctcagcacactaacccgtgtgtagcttgggtcgatgagtctggacataccccactggcgacagtggtccaggctgcgttggcggcctactcatggtgaaaaccatgagacgctagacatgaacaaggtgtgaagagtctattgagctactatagagtcctccggcccctgaatgcggctaatcctaaccatggagcaagtgctcacaggccagtgagttgcttgtcgtaatgcgcaagtccgtggcggaaccgactactttgggtgtccgtgtttcactttttacttttatgactgcttatggtgacaatttgatattgttaccatttagctgtcaaattaattgcaaaagatcctaagtcttacttaccaatttgcattttgataaccttgatttgaaaactttaata

SEQ ID NO: 21013 - DNA, 689 bp, synthetic construct
  source 1..689: mol_type = other DNA
gctttggggttgttcccactccaagggcccacgtggcggctagtactctggtacttcggtacctttgtacgcctgttttatctcccttcccaatgtaatttagaagcttttaaatcaaggctcaataggtggggcgcaaaccagcgctctcatgagcaagcactcctgtctccccggtgtggttgtataaactgttcccacggttgaaaacaacctatccgttatccgctatagtacttcgagaaacctagtatcacctttggattgttgacgcgttgcgctcagcacactaacccgtgtgtagcttgggtcgatgagtctggacataccccactggcgacagtggtccaggctgcgttggcggcctactcatggtgaaaaccatgagacgctagacatgaacaaggtgtgaagagtctattgagctactatagagtcctccggcccctgaatgcggctaatcctaaccatggagcaagtgctcacaggccagtgagttgcttgtcgtaatgcgcaagtccgtggcggaaccgactactttgggtgtccgtgtttcactttttacttttatgactgcttatggtgacaatttgatattgttaccatttagctgtcaaattaattgcaaaagatcctaagtcttacttaccaatttgcattttgataaccttgatttgaaaattttaata

SEQ ID NO: 21014 - DNA, 689 bp, synthetic construct
  source 1..689: mol_type = other DNA
gccttggggttgttcccactccaagggcccacgtggcggctagtactctggtacttcggtacctttgtacgcctgttttatctcccttcccaatgtaatttagaagcttttaaatcaaggctcaataggtggggcgcaaaccagcgctctcatgagcaagcactcctgtctccccggtgtggttgtataaactgttcccacggttgaaaacaacctatccgttatccgctatagtacttcgagaaacctagtatcacctttggattgttgacgcgttgcgctcagcacactaacccgtgtgtagcttgggtcgatgagtctggacacaccccactggcgacagtggtccaggctgcgttggcggcctactcatggtgaaaaccatgagacgctagacatgaacaaggtgtgaagagtctattgagctactatagagtcctccggcccctgaatgcggctaatcctaaccatggagcaagtgctcacaggccagtgagttgcttgtcgtaatgcgcaagtccgtggcggaaccgactactttgggtgtccgtgtttcactttttacttttatgactgcttatggtgacaatttgatattgttaccatttagctgtcaaattaattgcaaaagatcctaagtcttacttaccaatttgcattttgataaccttgatttgaaaattttaata

SEQ ID NO: 21015 - DNA, 689 bp, synthetic construct
  source 1..689: mol_type = other DNA
gccttggggttgttcccactccaagggcccacgtggcggctagtactctggtacttcggtacctttgtacgcctgttttatctcccttcccaatgtaatttagaagcttttaaatcaaggctcaataggtggggcgcaaaccagcgctctcatgagcaagcactcctgtctccccggtgtggttgtataaactgttcccacggttgaaaacaacctatccgttatccgctatagtacttcgagaaacctagtatcacctttggattgttgacgcgttgcgctcagcacactaacccgtgtgtagcttgggtcgatgagtctggacataccccactggcgacagtggtccaggctgcgttggcggcctactcatggtgaaaaccatgagacgctagacatgaacaaggtgtgaagagtctattgagctactatagagtcctccggcccctgaatgcggctaatcctaaccatggagcaagtgctcacaggccagtgagttgcttgtcgtaatgcgcaagtccgtggcggaaccgactactttgggtgtccgtgtttcactttttacttttatgactgcttatggtgacaatttgatattgttaccatttagctgtcaaattaattgcaaaagatcctaagtcttacttaccaatttgcattttgataaccttgatttgaaaattttaata

SEQ ID NO: 21016 - DNA, 689 bp, synthetic construct
  source 1..689: mol_type = other DNA
gccttggggttgttcccactccaagggcccacgtggcggctagtactctggtacttcggtacctttgtacgcctgttttatctcccttcccaatgtaatttagaagcttttaaatcaaggctcaataggtggggcgcaaaccagcgctctcatgagcaagcactcctgtctccccggtgtggttgtataaactgttcccacggttgaaaacaacctatccgttatccgctatagtacttcgagaaacctagtatcacctttggattgttgacgcgttgcgctcagcacactaacccgtgtgtagcttgggtcgatgagtctggacataccccactggcgacagtggtccaggctgcgttggcggcctactcatggtgaaaaccatgagacgctagacatgaacaaggtgtgaagagtctattgagctactatagagtcctccggcccctgaatgcggctaatcctaaccatggagcaagtgctcacaggccagtgagttgcttgtcgtaatgcgcaagtccgtggcggaaccgactactttgggtgtccgtgtttcactttttacttttatgactgcttatggtgacaatttgatattgttaccatttagctgtcaaattaattgcaaaagatcctaaatcttacttaccaatttgcattttgataaccttgatttgaaaattttaata

SEQ ID NO: 21017 - DNA, 689 bp, synthetic construct
  source 1..689: mol_type = other DNA
gccttggggttgttcccactccaagggcccacgtggcggctagtactctggtacttcggtacctttgtacgcctgttttatctcccttcccaatgtaatttagaagcttttaaatcaaggctcaataggtggggcgcaagccagcgctctcatgagcaagcactcctgtctccccggtgtggttgtataaactgttcccacggttgaaaacaacctatccgttatccgctatagtacttcgagaaacctagtatcacctttggattgttgacgcgttgcgctcagcacactaacccgtgtgtagcttgggtcgatgagtctggacataccccactggcgacagtggtccaggctgcgttggcggcctactcatggtgaaaaccatgagacgctagacatgaacaaggtgtgaagagtctattgagctactatagagtcctccggcccctgaatgcggctaatcctaaccatggagcaagtgctcacaggccagtgagttgcttgtcgtaatgcgcaagtccgtggcggaaccgactactttgggtgtccgtgtttcactttttacttttatgactgcttatggtgacaatttgatattgttaccatttagctgtcaaattaattgcaaaagatcctaagtcttacttaccaatttgcattttgataaccttgatttgaaaattttaata

SEQ ID NO: 21018 - DNA, 689 bp, synthetic construct
  source 1..689: mol_type = other DNA
gccttggggttgttcccactccaagggcccacgtggcggctagtactctggtacttcggtacctttgtacgcctgttttatctcccttcccaatgtaatttagaagcttttaaatcaaggctcaataggtggggcgcaaaccagcgctctcatgagcaagcactcctgtctccccggtgtggttgtataaactgttcccacggttgaaaacaacctatccgttatccgctatagtacttcgagaaacctagtatcacctttggattgttgacgcgttgcgctcagcacactaacccgtgtgtagcttgggtcgatgagtctggacataccccactggcgacagtggtccaggctgcgttggcggcctactcatggtgaaaaccatgagacgctagacatgaacaaggtgtgaagagtctattgagctactatagagtcctccggcccctgaatgcggctaatcctaaccatggagcaagtgctcacaggccagtgagttgcttgtcgtaatgcgcaagtccgtggcggaaccgactactttgggtgtccgtgtttcattttttacttttatgactgcttatggtgacaatttgatattgttaccatttagctgtcaaattaattgcaaaagatcctaagtcttacttaccaatttgcattttgataaccttgatttgaaaattttaata

SEQ ID NO: 21019 - DNA, 689 bp, synthetic construct
  source 1..689: mol_type = other DNA
gccttggggttgttcccactccaagggcccacgtggcggctagtactctggtactttggtacctttgtacgcctgttttatctcccttcccaatgtaatttagaagcttttaaatcaaggctcaataggtggggcgcaaaccagcgctctcatgagcaagcactcctgtctccccggtgtggttgtataaactgttcccacggttgaaaacaacctatccgttatccgctatagtacttcgagaaacctagtatcacctttggattgttgacgcgttgcgctcagcacactaacccgtgtgtagcttgggtcgatgagtctggacataccccactggcgacagtggtccaggctgcgttggcggcctactcatggtgaaaaccatgagacgctagacatgaacaaggtgtgaagagtctattgagctactatagagtcctccggcccctgaatgcggctaatcctaaccatggagcaagtgctcacaggccagtgagttgcttgtcgtaatgcgcaagtccgtggcggaaccgactactttgggtgtccgtgtttcactttttacttttatgactgcttatggtgacaatttgatattgttaccatttagctgtcaaattaattgcaaaagatcctaagtcttacttaccaatttgcattttgataaccttgatttgaaaattttaata

SEQ ID NO: 21020 - DNA, 689 bp, synthetic construct
  source 1..689: mol_type = other DNA
gccttggggttgttcccactccaagggcccacgtggcggctagtactctggtacttcggtacctttgtacgcctgttttatctcccttcccaatgtaatttagaagcttttacatcaaggctcaataggtggggcgcaaaccagcgctctcatgagcaagcactcctgtctccccggtgtggttgtataaactgtttccacggttgaaaacaacctatccgttatccgctatagtacttcgagaaacctagtatcacctttggattgttgacgcgttgcgctcagcacactaacccgtgtgtagcttgggtcgatgagtctggacataccccactggcgacagtggtccaggctgcgttggcggcctactcatggtgaaaaccatgagacgctagacatgaacaaggtgtgaagagtctattgagctactatagagtcctccggcccctgaatgcggctaatcctaaccatggagcaagtgctcacaggccagtgagttgcttgtcgtaatgcgcaagtccgtggcggaaccgactactttgggtgtccgtgtttcactttttacttttatgactgcttatggtgacaatttgatattgttaccatttagctgtcaaattaattgcaaaagatcctaagtcttacttaccaatttgcattttgataaccttgatttgaaaattttaata

SEQ ID NO: 21021 - DNA, 689 bp, synthetic construct
  source 1..689: mol_type = other DNA
gccttggggttgttcccactccaagggcccacgtggcggctagtactctggtacttcggtacctttgtacgcctgttttatctcccttcccaatgtaatttagaagcttttaaatcaaggctcaataggtggggcgcaaaccagcgctctcatgagcaagcactcctgtctccccggtgtggttgtataaactgttcccacggttgaaaacaacctatccgttatccgctatagtacttcgagaaacctagtatcacctttggattgttgacgcgttgcgctcagcacactaacccgtgtgtagcttgggtcgatgagtctggacataccccactggcgacagtggtccaggctgcgttggcggcctactcatggtgaaaaccatgagacgctagacatgaacaaggtgtgaagagtctattgagctactatagagtcctccggcccctgaatgcggctaatcctaaccatggagcaagtgctcacaggccagtgagttgcttgtcgtaatgcgcaagtccgtggcggaaccgactactttgggtgtccgtgtttcactttttacttttatgactgcttatggtgacaatttgatattgttaccatttagctgtcaaattaattgcaaaagatcccaagtcttacttaccaatttgcattttgataaccttgatttgaaaattttaata

SEQ ID NO: 21022 - DNA, 689 bp, synthetic construct
  source 1..689: mol_type = other DNA
gccttggggttgttcccactccaagggcccacgtggcggctagtactctggtacttcggtacctttgtacgcctgttttatctcccttcccaatgtaatttagaagcttttaaatcaaggctcaataggtggggcgcaaaccagcgctctcatgagcaagcactcctgtctccccggtgtggttgtataaactgttcccacggttgaaaacaacctatccgttatccgctatagtacttcgagaaacctagtatcacctttggattgttgacgcgttgcgctcagcacactaacccgtgtgtagcttgggtcgatgagtctggacataccccactggcgacagtggtccaggctgcgttggcggcctactcatggtgaaaaccatgagacgctagacatgaacaaggtgtgaagagtctattgagctactatagagtcctccggcccctgaatgcggctaatcctaaccatggagcaagtgctcacaagccagtgagttgcttgtcgtaatgcgcaagtccgtggcggaaccgactactttgggtgtccgtgtttcactttttacttttatgactgcttatggtgacaatttgatattgttaccatttagctgtcaaattaattgcaaaagatcctaagtcttacttaccaatttgcattttgataaccttgatttgaaaattttaata

SEQ ID NO: 21023 - DNA, 689 bp, synthetic construct
  source 1..689: mol_type = other DNA
gccttggggttgttcccactccaagggcccacgtggcggctagtactctggtacttcggtacctttgtacgcctgttttatctcccttcccaacgtaatttagaagtttttaaatcaaggctcaataggtggggcgcaaaccagcgctctcatgagcaagcactcctgtctccccggtgtggttgtataaactgttcccacggttgaaaacaacctatccgttatccgctatagtacttcgagaaacctagtatcacctttggattgttgacgcgttgcgctcagcacactaacccgtgtgtagcttgggtcgatgagtctggacataccccactggcgacagtggtccaggctgcgttggcggcctactcatggtgaaaaccatgagacgctagacatgaacaaggtgtgaagagtctattgagctactatagagtcctccggcccctgaatgcggctaatcctaaccatggagcaagtgctcacaggccagtgagttgcttgtcgtaatgcgcaagtccgtggcggaaccgactactttgggtgtccgtgtttcactttttacttttatgactgcttatggtgacaatttgatattgttaccatttagctgtcaaattaattgcaaaagatcctaagtcttacttaccaatttgcattttgataaccttgatttgaaaattttaata

SEQ ID NO: 21024 - DNA, 689 bp, synthetic construct
  source 1..689: mol_type = other DNA
gccttggggttgttcccactccaagggcccacgtggcggctagtactctggtacttcggtacctttgtacgcctgttttatctcccttcccaatgtaatttagaagcttttaaatcaaggctcaataggtggggcgcaaaccagcgctcttatgagcaagcactcctgtctccccggtgtggttgtataaactgttcccacggttgaaaacaacctatccgttatccgctatagtacttcgagaaacctagtatcacctttggattgttgacgcgttgcgctcagcacactaacccgtgtgtagcttgggtcgatgagtctggacataccccactggcgacagtggtccaggctgcgttggcggcctactcatggtgaaaaccatgagacgctagacatgaacaaggtgtgaagagtctattgagctactatagagtcctccggcccctgaatgcggctaatcctaaccatggagcaagtgctcacaggccagtgagttgcttgtcgtaatgcgcaagtccgtggcggaaccgactactttgggtgtccgtgtttcactttttacttttatgactgcttatggtgacaatttgatattgttaccatttagctgtcaaattaattgcaaaagatcttaagtcttacttaccaatttgcattttgataaccttgatttgaaaattttaata

SEQ ID NO: 21025 - DNA, 689 bp, synthetic construct
  source 1..689: mol_type = other DNA
gccttggggttgttcccactccaagggcccacgtggcggctagtactctggtacttcggtacctttgtacgcctgttttatctcccttcccaatgtaatttagaagcttttaaatcaaggctcaataggtggggcgcaaaccagcgctctcatgagcaagcactcctgtctccccggtgtggttgtataaactgttcccacggttgaaaacaacctatccgttatccgctatagtacttcgagaaacctagtatcacctttggattgttgacgcgttgcgctcagcacactaacccgtgtgtagcttgggtcgatgagtctggacatgccccactggcgacagtggtccaggctgcgttggcggcctactcatggtgaaaaccatgagacgctagacatgaacaaggtgtgaagagtctattgagctactatagagtcctccggcccctgaatgcggctaatcctaaccatggagcaagtgctcacaggccagtgagttgcttgtcgtaatgcgcaagtccgtggcggaaccgactactttgggtgtccgtgtttcactttttacttttatgactgcttatggtgacaatttgatattgttaccatttagctgtcaaattaattgcaaaagatcctaagtcttacttaccaatttgcattttgataaccttgatttgaaaactttaata

SEQ ID NO: 21026 - DNA, 689 bp, synthetic construct
  source 1..689: mol_type = other DNA
gccttggggttgttcccactccaagggcccacgtggcggctagtactctggtacttcggtacctttgtacgcctgttttatctcccttcccaatgtaatttagaagcttttaaatcaaggctcaataggtggggcgcaaaccagcgctctcatgagcaagcactcctgtctccccggtgtggttgtataaactgttcccacggttgaaaacaacctatccgttatccgctatagtacttcgagaaacctagtatcacctttggattgttgacgcgttgcgctcaacacactaacccgtgtgtagcttgggtcgatgagtctggacataccccactggcgacagtggtccaggctgcgttggcggcctactcatggtgaaaaccatgagacgctagacatgaacaaggtgtgaagagtctattgagctactatagagtcctccggcccctgaatgcggctaatcctaaccatggagcaagtgctcacaggccagtgagttgcttgtcgtaatgcgcaagtccgtggcggaaccgactactttgggtgtccgtgtttcactttttacttttatgactgcttatggtgacaatttgatattgttaccatttagctgtcaaattaattacaaaagatcctaagtcttacttaccaatttgcattttgataaccttgatttgaaaattttaata

SEQ ID NO: 21027 - DNA, 689 bp, synthetic construct
  source 1..689: mol_type = other DNA
gccttggggttgttcccactccaagggcccacgtggcggctagtactctggtacttcggtacctttgtacgcctgttttatctcccttccctatgtaatttagaagcttttaaatcaaggctcaataggtggggcgcaaaccagcgctctcatgagcaagcactcctgtctccccggtgtggttgtataaactgttcccacggttgaaaacaacctatccgttatccgctatagtacttcgagaaacctagtatcacctttggattgttgacgcgttgcgctcagcacactaacccgtgtgtagcttgggtcgatgagtctggacataccccactggtgacagtggtccaggctgcgttggcggcctactcatggtgaaaaccatgagacgctagacatgaacaaggtgtgaagagtctattgagctactatagagtcctccggcccctgaatgcggctaatcctaaccatggagcaagtgctcacaggccagtgagttgcttgtcgtaatgcgcaagtccgtggcggaaccgactactttgggtgtccgtgtttcactttttacttttatgactgcttatggtgacaatttgatattgttaccatttagctgtcaaattaattgcaaaagatcctaagtcttacttaccaatttgcattttgataaccttgatttgaaaattttaata

SEQ ID NO: 21028 - DNA, 689 bp, synthetic construct
  source 1..689: mol_type = other DNA
gccttggggttgttcccactccaagggcccacgtggcggctagtactctggtacttcggtacctttgtacgcctgttttatctcccttcccaatgtaatttagaagcttttaaatcaaggctcaataggtggggcgcaaaccagcgctctcatgagcaagcactcctgtctccccggtgtggttgtataaactgttcccacggttgaaaacaacctatccgttatccgctatagtacttcgagaaacctagtatcacctttggattgttgacgcgttgcgctcagcacactaacccgtgtgtagcttgggtcgatgagtctggacataccccactggcgacagtggtccaggctgcgttggcggcctactcatggtgaaaaccatgagacgctagacatgaacaaggtgtgaagagtctattgagctactatagagtcctccggcccctgaatgcggctaatcctaaccatggagcaagtgctcacaggccagtgagttgcttgtcgtaatgcgcaagtccgtggcggaaccgactactttgggtgtccgtgtttcactttttacttttatgactgcttatggtgacaatttgatattgttaccatttagctgtcaaattaattgcaaaagatcctaagtcttacttactaatttgcattttgataaccttgatttgaaaattttaata

SEQ ID NO: 21029 - DNA, 689 bp, synthetic construct
  source 1..689: mol_type = other DNA
gccttggggttgttcccactccaagggcccacgtggcggctagtactctggtgcttcggtacctttgtacgcctgttttatctcccttcccaatgtaatttagaagcttttaaatcaaggctcaataggtggggcgcaaaccagcgctctcatgagcaagcactcctgtctccccggtgtggttgtataaactgttcccacggttgaaaacaacctatccgttatccgctatagtacttcgagaaacctagtatcacctttggattgttgacgcgttgcgctcagcacactaacccgtgtgtagcttgggtcgatgagtctggacataccccactggcgacagtggtccaggctgcgttggcggcctactcatggtgaaaaccatgagacgctagacatgaacaaggtgtgaagagtctattgagctactatagagtcctccggcccctgaatgcggctaatcctaaccatggagcaagtgctcacaggccagtgagttgcttgtcgtaatgcgcaagtccgtggcggaaccgactactttgggtgtccgtgtttcactttttacttttatgactgcttatggtgacaatttgatattgttaccatttagctgtcaaattaattgcaaaagatcctaagtcttacttaccaatttgcattttgataaccttgatttgaaaatttcaata

SEQ ID NO: 21030 - DNA, 689 bp, synthetic construct
  source 1..689: mol_type = other DNA
gccttggggttgttcccactccaagggcccacgtggcggctagtactctggtacttcggtacctttgtacgcctgttttatctcccttcccaatgtaatttagaagcttttaaatcaaggctcaataggtggggcgcaaaccagcgctctcatgagcaagcactcctgtctccccggtgtggttgtataaactgttcccacggttgaaaacaacctatccgttatccgctatagtacttcgagaaacctagtatcacctttggattgttgacgcgttgcgctcagcacactaacccgtgtgtagcttgggtcgatgagtctggacataccccactggcgacagtggtccaggctgcgttggcggcctactcatggtgaaaaccatgagacgctagacatgaacaaggtgtgaagagtctattgagctactatagagtcctccggcccctgaatgcggctaatcctaaccatggagcaagtgctcacaggccagtgagttgcttgtcgtaatgcgcaagtccgtggcggaaccgactactttgggtgtccgtgtttcactttttacttttatgactgcttatggtgacaatttgatattgttaccatttagctgtcaaattaattacaaaagatcctaagtcttacttaccaatttgcattttgataaccttgatttgaaaattttaata

SEQ ID NO: 21031 - DNA, 689 bp, synthetic construct
  source 1..689: mol_type = other DNA
gccttggggttgttcccactccaagggcccacgtggcggctagtactctggtacttcggtacctttgtacgcctgttttatctcccttcccaatgtaatttagaagcttttaaatcaaggctcaataggtggggcgcaaaccagcgctctcatgagcaagcactcctgtctccccggtgtggttgtataaactgttcccacggttgaaaacaacctatccgttacccgctatagtacttcgagaaacctagtatcacctttggattgttgacgcgttgcgctcagcacactaacccgtgtgtagcttgggtcgatgagtctggacataccccactggcgacagtggtccaggctgcgttggcggcctactcatggtgaaaaccatgagacgctagacatgaacaaggtgtgaagagtctattgagctactatagagtcctccggcccctgaatgcggctaatcctaaccatggagcaagtgctcacaggccagtgagttgcttgtcgtaatgcgcaagtccgtggcggaaccgactactttgggtgtccgtgtttcactttttacttttatgactgcttatggtgacaatttgatattgttaccatttagctgtcaaattaattgcaaaagatcctaagtcttacttaccaatttgcattttgataaccttgatttgaaaactttaata

SEQ ID NO: 21032 - DNA, 692 bp, synthetic construct
  source 1..692: mol_type = other DNA
actctggtattacggtacccttgtgcgcctgttttatccacccctcccgatgtaacttataagttgatcaaagaaaaggtcagtaggatgcccagtacaccaactgggttttgaccaagcacttctgttaccccggaccgagtatcaataggccactcacgtggctgaaggagaaaacgttcgttatccggccaattacttcgagaaacccagtaacaccatgaaggttgcgcggcgtttcgctccacacaaccccagtgtagatcaggccgatgagtcaccgcattccccacgggcgaccgtggcggtggctgcgctggcggcctgcccatggggcaacccatgggacgcctcaataccgatatggtgcgaagagtctattgagctaattggtagtcctccggcccctgaatgcggctaatcccaactgcggagcagatgcccacaaaccagtgggtggtctgtcgtaacgggcaactctgcagcggaaccgactactttgggtgtccgtgtttccttttattcttatactggctgcttatggtgacaattgggaaattgttaccatatagctattggatcggccacccggtttgcaacagagcacttgtatttctgtttgttgggttcgtaccacttgactttaatagttacagaactttactctacattgtccaattgaatacaaaaag

SEQ ID NO: 21033 - DNA, 688 bp, synthetic construct
  source 1..688: mol_type = other DNA
ccttggggttgttcccactccaagggcccacgtggcggctagtactctggtacttcggtacctttgtacgcctgttttatctcccttcccaatgtaatttagaagcttttaaatcaaagctcaataggtggggcgcaaaccagcgctctcatgagcaagcactcctgtctccccggtgtggttgtataaactgttcccacggttgaaaacaacctatccgttatccgctatagtacttcgagaaacctagtatcacctttggattgttgacgcgttgcgctcagcacactaacccgtgtgtagcttgggtcgatgagtctggacataccccactggcgacagtggtccaggctgcgttggcggcctactcatggtgaaaaccatgagacgctagacatgaacaaggtgtgaagagtctattgagctactatagagtcctccggcccctgaatgcggctaatcctaaccatggagcaagtgctcacaggccagtgagttgcttgtcgtaatgcgcaagtccgtggcggaaccgactactttgggtgtccgtgtttcactttttacttttatgactgcttatggtgacaatttgatattgttaccatttagctgtcaaattaattgcaaaagatcctaagtcttacttaccaatttgcattttgataaccttgatttgaaaattttaata

SEQ ID NO: 21034 - DNA, 688 bp, synthetic construct
  source 1..688: mol_type = other DNA
gccttggggttgttcccactccaagggcccacgtggcggctagtactctggtacttcggtacctttgtacgcctgttttatctcccttcccaatgtaatttagaagcttttaaatcaaggctcaataggtggggcgcaaaccagcgctctcatgagcaagcactcctgtctccccggtgtggttgtataaactgttcccacggttgaaaacaacctatccgttatccgctatagtacttcgagaaacctagtatcacctttggattgttgacgcgttgcactcagcacactaacccgtgtgtagcttgggtcgatgagtctggacataccccactggcgacagtggtccaggctgcgttggcggcctactcatggtgaaaaccatgagacgctagacatgaacaaggtgtgaagagtctattgagctactatagagtcctccggcccctgaatgcggctaatcctaaccatggagcaagtgctcacaggccagtgagttgcttgtcgtaatgcgcaagtccgtggcggaaccgactactttgggtgtccgtgtttcactttttacttttatgactgcttatggtgacaatttgatattgttaccatttagctgtcaaattaattgcaaaagatcctaagtcttacttaccaattgcattttgataaccttgatttgaaaattttaata

SEQ ID NO: 21035 - DNA, 643 bp, synthetic construct
  source 1..643: mol_type = other DNA
ctatgtaacttagaagcacatcacaaacggtcaacaggcagctcagtaaaccaactgagccacgaccaggtacttctgttaccccggaccgagtatcaatagactgctgacgcggtcgaaggagaaaacgttcgttacccggccaactacttcgagaaacccagtaccaccatggaggttgcgtggcgtttcgctccacacaaccccagtgtagatcaggtcgatgagtcaccgcattccccacgggcgaccgtggcggtggctgcgttggcggcctgcccatgaggtaactcatgggacgctacaataccgacatggtgcgaagagtctattgagctagttggtagtcctccggcccctgaatgcggctaatcctaactgcagagcggacacctacaaaccagtgggcagtccgtcgtaacgggcaactctgcagcggaaccgactactttgggtgtccgtgtttccttttattctcatattggctgcttatggtgacaattgagagattgttgccatatagctattggattggccatccggtgactaacagagctattgtctacttatttgttggttacgcaccgctcaatttcaaagtcttaaacacgattaatttcatattatcactcaacacaacaaa

SEQ ID NO: 21036 - DNA, 684 bp, synthetic construct
  source 1..684: mol_type = other DNA
ccccaagggcccacgtggcggctagtactctggtatttcggtacctttgtacgcctgttttatctccctccccaatgtaacttagaagcttttaaatcaaagctcaataggtggagcgcaagccagcgcttccgtgagcaagcactcctgtttccccggtgcagttgtatagactgttcccacggttgaaaacaacctatccgttatccgctatagtacttcgagaaacctagtatcacctttggattgttgatgcgttgcgctcagcacactaacccgtgtgtagcttgggtcgatgagtctggacataccccactggtgacagtggtccaggctgcgttggcggcctactcgtggtgaaaaccacgagacgctagacatgaacaaggtgtgaagagtctattgagctactatagagtcctccggcccctgaatgcggctaaccttaaacctgcagccattgctcacaatccagtgagtttgtggtcgtaatgagcaattgcgggatgggaccgactactttgggtgtccgtgtttctctttttacttttatgactgcttatggtgacaatttaatattgttaccatttagctagtcaaattaatcacataaaactttaaatcctatctaacaattcacatttggatagctttattttgaggattttaaacctatttacaaag

SEQ ID NO: 21037 - DNA, 688 bp, synthetic construct
  source 1..688: mol_type = other DNA
ccttggggttgttcccactccaagggcccacgtggcggctagtactctggtacttcggtacctttgtacgcctgttttatctcccttcccaatgcaatttagaagcttttaaatcaaggctcaataggtggggcgcaaaccagcgctctcatgagcaagcactcctgtctccccggtgtggttgtataaactgttcccacggttgaaaacaacctatccgttatccgctatagtacttcgagaaacctagtatcacctttggattgttgacgcgttgcgctcggcacactaacccgtgtgtagcttgggtcgatgagtctggacataccccactggcgacagtggtccaggctgcgttggcggcctactcatggtgaaaaccatgagacgctagacatgaacaaggtgtgaagagtctattgagctactatagagtcctccggcccctgaatgcggctaatcctaaccatggagcaagtgctcacaggccagtgagttgcttgtcgtaatgcgcaagtccgtggcggaaccgactactttgggtgtccgtgtttcactttttacttttatgactgcttatggtgacaacttgatattgttaccatttagctgtcaaattaattgcaaaagatcctaagtcttacttaccaatttgcattttgataaccttgatttgaaaattttaata

SEQ ID NO: 21038 - DNA, 698 bp, synthetic construct
  source 1..698: mol_type = other DNA
tgggaacagccttggggttgttcccactccaagggcccacgtggcggctagtactctggtacttcggtacctttgtacgcctgttttatctcccttcccaatgtaatttagaagctcttaaatcaaggctcaataggtggggcgcaaaccagcgctctcatgagcaagcactcctgtctccccggtgtggttgtataaactgttcccacggttgaaaacaacctatccgttatccgctatagtacttcgagaaacctagtatcacctttggattgttgacgcgttgcgctcagcacactaacccgtgtgtagcttgggtcgatgagtctggacataccccactggcgacagtggtccaggctgcgttggcggcctactcatggtgaaaaccatgagacgctagacatgaacaaggtgtgaagagtctattgagctactatagagtcctccggcccctgaatgcggctaatcctaaccatggagcaagtgctcacaggccagtgagttgcttgtcgtaatgcgcaagtccgtggcggaaccgactactttgggtgtccgtgtttcactttttacttttatgactgcttatggtgacaatttgatattgttaccatttagcttgtcaaattaattacaaaagatcctaaatcttacttaccaacttgcattttgacaaccttggtttgaaaattttaata

SEQ ID NO: 21039 - DNA, 697 bp, synthetic construct
  source 1..697: mol_type = other DNA
taaaacagccttggggttgttcccactccaagggcccacgtggcggctagtactctggtacttcggtacctttgtacgcctgttttatctcccttcccaatgtaacttagaagttcttaaatcaatgctcagtaggtggggcgcaaaccagcgctctcatgagcaagcactcctgtctccccggtgaggttgtataaactgttcccacggttgaaaacaacctatccgttatccgctatagtacttcgagaaacctagtaccacctttggattgttgacgcgttgcgctcagcacactaacccgtgtgtagcttgggtcgatgagtctggacatacctcactggcgacagtggtccaggctgcgttggcggcctactcatggtgaaaaccatgagacgctagacatgaacaaggtgtgaagagtctattgagctactatagagtcctccggcccctgaatgcggctaatcctaaccatggagcaagtgctcacaggccagtgagttgcttgtcgtaatgcgcaagtccgtggcggaaccgactactttgggtgtccgtgtttcactttttacttttatgactgcttatggtgacaatttgatattgttaccatttagcttgtcaaatcaattgcgaaagatcctaaatcttatttatcaatttgcatcttgataactttaatttgaaaattttaaca

SEQ ID NO: 21040 - DNA, 697 bp, synthetic construct
  source 1..697: mol_type = other DNA
taaaacagccttggggttgttcccactccaagggcccacgtggcggctagtactctggtacttcggtacctttgtacgcctgttttatctcccttcccaatgtaacttagaagttcttaaatcaatgctcaataggtagggcgcaaaccagcgctctcatgagcaagcactcctgtctccccggtgaggttgtataaactgttcccacggttgaaaacaacctatccgttatccgctatagtacttcgagaaacctagtaccacctttggattgttgacgcgttgcgctcagcacactaacccgtgtgtagcttgggtcgatgagtctggacatacctcactggcgacagtggtccaggctgcgttggcggcctactcatggtgaaagccatgagacgctagacatgaacaaggtgtgaagagtctattgagctactatagagtcctccggcccctgaatgcggctaatcctaaccatggagcaagtgctcacaagccagtgagttgcttgtcgtaatgcgcaagtccgtggcggaaccgactactttgggtgtccgtgtttcactttttacttttatgactgcttatggtgacaatttgatattgttaccatttagcttgtcaaatcaattgcaaaagatcctaaatcttatttatcaacttgcatcttaacaactttaatttgaaaattttaaca

SEQ ID NO: 21041 - DNA, 687 bp, synthetic construct
  source 1..687: mol_type = other DNA
ttggggttgttcccactccaagggcccacgtggcggctagtactctggtacttcggtacctttgtacgcctgttttatctcccttcccaatgtaatttagaagctcttaaatcaaggctcaataggtggggcgcaaaccagcgctctcatgagcaagcactcctgtctccccggtgtggttgtataaactgttcccacggttgaaaacaacctatccgttatccgctatagtacttcgagaaacctagtatcacctttggattgttgacgcgttgcgctcagcacactaacccgtgtgtagcttgggtcgatgagtctggacataccccactggcgacagtggtccaggctgcgttggcggcctactcatggtgaaaaccatgagacgctagacatgaacaaggtgtgaagagtctattgagctactatagagtcctccggcccctgaatgcggctaatcctaaccatggagcaagtgctcacaggccagtgagttgcttgtcgtaatgcgcaagtccgtggcggaaccgactactttgggtgtccgtgtttcattttttacttttatgactgcttatggtgacaatttgatattgttaccatttagcttgtcaaattaattgcaaaagatcctgaatcttacttaccaacttgcattttgacaaccttgatttgaaaattttaata

SEQ ID NO: 21042 - DNA, 687 bp, synthetic construct
  source 1..687: mol_type = other DNA
ttggggttgttcccactccaagggcccacgtggcggctagtactctggtacttcggtacctttgtacgcctgttttatctcccttcccaatgtaatttagaagctcttaaatcaaggctcaataggtggggcgcaaaccagcgctctcatgagcaagcactcctgtctccccggtgtggttgtataaactgttcccacggttgaaaacaacctatccgttatccgctatagtacttcgagaaacctagtatcacctttggattgttgacgcgttgcgctcagcacactaacccgtgtgtagcttgggtcgatgagtctggacataccccactggcgacagtggtccaggctgcgttggcggcctactcatggtgaaaaccatgagacgctagacatgaacaaggtgtgaagagtctattgagctactatagagtcctccggcccctgaatgcggctaatcctaaccatggagcaagtgctcacaggccagtgagttgcttgtcgtaatgcgcaagtccgtggcggaaccgactactttgggtgtccgtgtttcactttttacttttatgactgcttatggtgacaatttgatattgttaccatttagcttgtcaaatcaattgcaaaagatcctaaatcttacttaccaacttgcattttgataaccttgacttgaaaattttaata

SEQ ID NO: 21043 - DNA, 693 bp, synthetic construct
  source 1..693: mol_type = other DNA
cggtattacggtacccttgtacgcctgttttatactcccctcccccgtaacttagaaaacttcaaaaccaaagttcaacaggagggggtacaaaccagtgccaccatgaacaagcacttctgtttccccggtgatgttgtatagactgtccccacggttgaaaacgactgatccgttatccgctctggtacttcgagaagcccagtaccaccttggaatcttcgatgcgttgcgctcagcactcaatcccagagtgtagcttaggtcgatgagtctggacgctcctcaccggtgacggtggtccaggctgcgttggcggcctacctgtggcccaaagccacaggacgctagttgtgaacaaggtgtgaagagcctattgagctaccagagattcctccggcccctgaatgcggctaatcctaaccacggagcaggtactcacaacccagtgaacagcctgtcgtaacgcgcaagtctgtggcggaaccgactactttgggtgtccgtgtttccttttattttttatatggctgcttatggtgacaatcacagattgttatcataaagcgaattggattggccatccagtgaaagtgagactcatcatttacttgtttgttggattcacacctttgaccaaatccacccctgacatcatctcagttgtgttactaattaggagacattatcaca

SEQ ID NO: 21044 - DNA, 686 bp, synthetic construct
  source 1..686: mol_type = other DNA
ttggggttgttcccactccaagggcccacgtggcggctagtactctggtacttcggtacctttgtacgcctgttttatctcccttcccaatgtaatttagaagcttttaaatcaaggctcaataggtggggcgcaaaccagcgctctcatgagcaagcactcctgtctccccggtgtggttgtataaactgttcccacggttgaaaacaacctatccgttatccgctatagtacttcgagaaacctagtatcacctttggattgttgacgcgttgcgctcagcacactaacccgtgtgtagcttgggtcgatgagtctggacataccccactggcgacagtggtccaggctgcgttggcggcctactcatggtgaaaaccatgagacgctagacatgaacaaggtgtgaagagtctattgagctactatagagtcctccggcccctgaatgcggctaatcctaaccatggagcaagtgctcacaggccagtgagttgcttgtcgtaatgcgcaagtccgtggcggaaccgactactttgggtgtccgtgtttcactttttacttttatgactgcttatggtgacaatttgatattgttaccatttagctgtcaaattaattgcaaaagatcctaagtcttacttactaatttgcattttgataaccttgatttgaaaactttaata

SEQ ID NO: 21045 - DNA, 699 bp, synthetic construct
  source 1..699: mol_type = other DNA
tggggttgttcccactccaagggcccacgtggcggctagtactctggtacttcggtacctttgtacgcctgttttatctcccttcccaatgtaacttagaagttcttaaatcaatgctcaataggtggggcgcaaaccagcgctctcatgagcaagcactcctgtctccccggtgaggttgtataaactgttcccacggttgaaaacaacctatccgttatccgctatagtacttcgagaaacctagtaccacctttggattgttgacgcgttgcgctcagcacactaacccgtgtgtagcttgggtcgatgagtctggacatacctcactggtgacagtggtccaggctgcgttggcggcctactcatggtgaaagccatgagacgctagacatgaacaaggtgtgaagagtctattgagctactatagagtcctccggcccctgaatgcggctaatcctaaccatggagcaagtgctcacaggccagtgagttgcttgtcgtaatgcgcaagtccgtggcggaaccgactactttgggtgtccgtgtttcactttttacttttatgactgcttatggtgacaatttgatattgttaccatttagcttgtcaaatcaattgcaaaagatcctaaatcttatttatcaacttgcatcttgataactttaatttgaaaaattaatttgaaaattttaaca

SEQ ID NO: 21046 - DNA, 680 bp, synthetic construct
  source 1..680: mol_type = other DNA
ggtacctttgtgcgcctgttttatagtcccttcccccggacgcaacttagaagctgaacctaagcggtcaacaggcggctcagaacaccatctgggtctcgaccaagcacttctgtttccccggactgagtatcaataagctgcttacgcggctgaaggagaaaacgtccgttatccggccaattacttcaagaaacccagtaccaccatgaaggttgcgcagcgtttcgctccgcacaaccccagtgtagatcaggtcgatgagtcaccgcattcctcacgggcgaccgtggcggtggctgcgctggcggcctgcccatggggcaacccatgggacgcttcaatactgacatggtgcgaagagtcaattgagctaattggtagtcctccggcccctgaatgcggctaatcctaactgtggagcagatgcccacgtaccagtgggtagtctgtcgtaacgggcaactccgcagcggaaccgactactttgggtgtccgtgtttctctttattcttatgttggctgcttatggtgacaattgagagattgttaccatatagctattggattggccatccggtgacgaatagagcgattgtatatctttttgttggattcgtaccattaaacaaaacaaattacaaaaccttgtgttacattattagattaaacacagcaaa

SEQ ID NO: 21047 - DNA, 694 bp, synthetic construct
  source 1..694: mol_type = other DNA
aacagccttggggttgttcccactccaagggcccacgtggcggctagtactctggtacttcggtacctttgtacgcctgttttatctcccttcccaatgtaatttagaagctcttaaatcaaggctcaataggtggggcgcaaaccagcgctctcatgagcaagcactcctgtctccccggtgtggttgtataaactgttcccacggttgaaaacaacctatccgttatccgctatagtacttcgagaaacctagtatcacctttggattgttgacgcgttgcgctcagcacactaacccgtgtgtagcttgggtcgatgagtctggacataccccactggcgacagtggtccaggctgcgttggcggcctactcatggtgaaaaccatgagacgctagacatgaacaaggtgtgaagagtctattgagctactatagagtcctccggcccctgaatgcggctaatcctaaccatggagcaagtgctcacaggccagtgagttgcttgtcgtaatgcgcaagtccgtggcggaaccgactactttgggtgtccgtgtttcactttttacttttatgactgcttatggtgacaatttgatattgttaccatttagcttgtcaaattaattgcaaaagatcctaaatcttacttaccaacttgcattttgacgaccttggtttgaaaattttaata

SEQ ID NO: 21048 - DNA, 692 bp, synthetic construct
  source 1..692: mol_type = other DNA
agccttggggttgttcccactccaagggcccacgtggcggctagtactctggtacttcggtacctttgtacgcctgttttatctcccttcccaatgtaatttagaagctcttaaatcaaggctcaataggtggggcgcaaaccagcgctctcatgagcaagcactcctgtctccccggtgtggttgtataaactgttcccacggttgaaaacaacctatccgttatccgctatagtacttcgagaaacctagtatcacctttggattgttgacgcgttgcgctcagcacactaacccgtgtgtagcttgggtcgatgagtctggacataccccactggcgacagtggtccaggctgcgttggcggcctactcatggtgaaaaccatgagacgctagacatgaacaaggtgtgaagagtctattgagctactatagagtcctccggcccctgaatgcggctaatcctaaccatggagcaagtgctcacaggccagtgagttgcttgtcgtaatgcgcaagtccgtggcggaaccgactactttgggtgtccgtgtttcactttttacttttatgactgcttatggtgacaatttgatattgttaccatttagcttgtcaaattaattgcaaaagatcctaaatcttacttaccaacttgcattttgacaaccttgatttgaaaatttttaata

SEQ ID NO: 21049 - DNA, 692 bp, synthetic construct
  source 1..692: mol_type = other DNA
cagccttggggttgttcccactccaagggcccacgtggcggctagtactctggtacttcggtacctttgtacgcctgttttatcccccttcccaatgtaatttagaagctcttaaattaaggctcaataggtggggcgcaaaccagcgctctcatgagcaagcactcctgtctccccggtgtggttgtataaactgttcccacggttgaaaacaacctatccgttatccgctatagtacttcgagaaacctagtatcacctttggattgttgacgcgttgcgctcagcacactaacccgtgtgtagcttgggtcgatgagtctggacacaccccactggcgacagtggtccaggctgcgttggcggcctactcatggtgaaaaccatgagacgctagacatgaacaaggtgtgaagagtctattgagctactatagagtcctccggcccctgaatgcggctaatcctaaccatggagcaagtgctcacaggccagtgagttgcttgtcgtaatgcgcaagtccgtggcggaaccgactactttgggtgtccgtgtttcactttttacttttatgactgcttatggtgacaatttgatattgttaccatttagcttgtcaaattaattgcaaaagatcctaaatcttacttaccaacttgcattttgacaaccttgatttgaaaattttaata

SEQ ID NO: 21050 - DNA, 692 bp, synthetic construct
  source 1..692: mol_type = other DNA
agccttggggttgttcccactccaagggcccacgtggcggctagtactctggtacttcggtacctttgtacgcctgttttatctcccttcccaatgtaatttagaagctcttaaatcaaggctcaataggtggggcgcaaaccagcgctctcatgagcaagcactcctgtctccccggtgtggttgtataaactgttcccacggttgaaaacaacctatccgttatccgctatagtacttcgagaaacctagtatcacctttggattgttgacgcgttgcgctcagcacactaacccgtgtgtagcttgggtcgatgagtctggacataccccactggcgacagtggtccaggctgcgttggcggcctactcatggtgaaaaccatgagacgctagacatgaacaaggtgtgaagagtctattgagctactatagagtcctccggcccctgaatgcggctaatcctaaccatggagcaagtgctcacaggccagtgagttgcttgtcgtaatgcgcaagtccgtggcggaaccgactactttgggtgtccgtgtttcactttttacttttatgactgcttatggtgacaatttgatattgttaccatttagcttgtcaaattaattgcaaaagatcctaaatcttacttaccaacctgcattttgacaaccttgatttgaaaatttttaata

SEQ ID NO: 21051 - DNA, 691 bp, synthetic construct
  source 1..691: mol_type = other DNA
agccttggggttgttcccactccaagggcccacgtggcggctagtactctggtacttcggtacctttgtacgcctgttttatcccccttcccaatgtaatttagaagctcttaaattaaggctcaataggtggggcgcaaaccagcgctctcatgagcaagcactcctgtctccccggtgtggttgtataaactgttcccacggttgaaaacaacctatccgttatccgctatagtacttcgagaaacctagtatcacctttggattgttgacgcgttgcgctcagcacactaacccgtgtgtagcttgggtcgatgagtctggacataccccactggcgacagtggtccaggctgcgttggcggcctactcatggtgaaaaccatgagacgctagacatgaacaaggtgtgaagagtctattgagctactatagagtcctccggcccctgaatgcggctaatcctaaccatggagcaagtgctcacaggccagtgagttgcttgtcgtaatgcgcaagtccgtggcggaaccgactactttgggtgtccgtgtttcactttttacttttatgactgcttatggtgacaatttgatattgttaccatttagcttgtcaaatcaattgcaaaagatcctaaatcttacttaccaacttgcattttgacaaccttgatttgaaaattttaata

SEQ ID NO: 21052 - DNA, 695 bp, synthetic construct
  source 1..695: mol_type = other DNA
aacagccttggggttgttcccactccaagggcccacgtggcggctagtactctggtacttcggtacctttgtacgcctgttttatctcccttcccaatgtaatttagaagctcttaaatcaaggctcaataggtggggcgcaaaccagcgctctcatgagcaagcactcctgtctccccggtgtggttgtataaactgttcccacggttgaaaacaacctatccgttatccgctatagtacttcgagaaacctagtatcacctttggattgttgacgcgttgcgctcagcacactaacccgtgtgtagcttgggtcgatgagtctggacataccccactggcgacagtggtccaggctgcgttggcggcctactcatggtgaaaaccatgagacgctagacatgaacaaggtgtgaagagtctattgagctactatagagtcctccggcccctgaatgcggctaatcctaaccatggagcaagtgctcataggccagtgagttgcttgtcgtaatgcgcaagtccgtggcggaaccgactactttgggtgtccgtgtttcactttttacttttatgactgcttatggtgacaatttgatattgttaccatttagcttgtcaaattaattacaaaagatcctaaatcttacttaccaacttgcattttgacaaccttgatttgaaaatttttaata

SEQ ID NO: 21053 - DNA, 689 bp, synthetic construct
  source 1..689: mol_type = other DNA
ttcccaccccaagggcccacatggcggctagtactctggtatttcggtacctttgtacgcctgttttatctcccttcccaatgtaacttagaagttttcaaatcgaagctcagtaggtggggcgcaaaccagcgctttcatgagcaagcacttctgtttccccggtgcggttgtatagactgtttccacggttgaaaacaacttatccgttatccgctatagtacttcgagaaacctagtatcacctttggattgttgatgcgttgcgctcagcacactaacccgtgtgtagcttgggctgatgagtctggacgtaccccactggtgacagtggtccaggctgcgttggcggcctactcatggtgaaaaccatgagacgctagacatgaacaaggtgtgaagagtctattgagctactatagagtcctccggcccctgaatgcggctaatcttaaccatggagcaagtgctcacaagccagtgagttgcttgtcgtaacgcgcaagtccgtggcggaaccgactactttgggtgtccgtgtttcactttttacctttatgactgcttatggtgacaatttaatattgttaccatttagcttgtcagattaatcgcgtgaaatcctaaatcttgttcaccaatttgtattcggatagcttcatttgaaaattctaaactcattcataaag

SEQ ID NO: 21054 - DNA, 685 bp, synthetic construct
  source 1..685: mol_type = other DNA
gggttgttcccactccaagggcccacgtggcggctagtactctggtacttcggtacctttgtacgcctgttttatctcccttcccaatgtaatttagaagctcttaaatcaaggctcaataggtggggcgcaaaccagcgctctcatgagcaagcactcctgtctccccggtgtggttgtataaactgttcccacggttgaaaacaacctatccgttatccgctatagtacttcgagaaacctagtatcacctttggattgttgacgcgttgcgctcagcacactaacccgtgtgtagcttgggtcgatgagtctggacataccccactggcgacagtggtccaggctgcgttggcggcctactcatggtgaaaaccatgagacgctagacatgaacaaggtgtgaagagtctattgagctactatagagtcctccggcccctgaatgcggctaatcctaaccatggagcaagtgctcacaggccagtgagttgcttgtcgtaatgcgcaagtccgtggcggaaccgactactttgggtgtccgtgtttcactttttacttttatgactgcttatggtgacaatttgatattgttaccatttagcttgtcaaatcaattgcaaaagatcctaaatcttacttaccaacttgcattttgacaaccttgatttgaaaatttttaata

SEQ ID NO: 21055 - DNA, 696 bp, synthetic construct
  source 1..696: mol_type = other DNA
taaaacagccttggggttgttcccactccaagggcccacgtggcggctagtactctggtacttcggtacctttgtacgcctgttttatctcccttcccaatgtaatttagaagcttttaaatcaaggctcaataggtggggcgcaaaccagcgctctcatgagcaagcactcctgtctccccggtgtggttgtataaactgttcccacggttgaaaacaacctatccgttatccgctatagtacttcgagaaacctagtatcacctttggattgttgacgcgttgcgctcagcacactaacccgtgtgtagcttgggtcgatgagtctggacataccccactggcgacagtggtccaggctgcgttggcggcctactcatggtgaaaaccatgagacgctagacatgaacaaggtgtgaagagtctattgagctactatagagtcctccggcccctgaatgcggctaatcctaaccatggagcaagtgctcacaggccagtgagttgcttgtcgtaatgcgcaagtccgtggcggaaccgactactttgggtgtccgtgtttcactttttacttttatgactgcttatggtgacaatttgatattgttaccatttagctgtcaaattaattgcaaaagatcctaagtcttacttaccaatttgcattttgataaccttgatttgaaaactttaata

SEQ ID NO: 21056 - DNA, 685 bp, synthetic construct
  source 1..685: mol_type = other DNA
tggggttgttcccactccaagggcccacgtggcggctagtactctggtacttcggtacctttgtacgcctgttttatctcccttcccaatgtaatttagaagcttttaaatcaaggctcaataggtggggcgcaaaccagcgctctcatgagcaagcactcctgtctccccggtgtggttgtataaactgttcccacggttgaaaacaacctatccgttatccgctatagtacttcgagaaacctagtatcacctttggattgttgacgcgttgcgctcagcacactaacccgtgtgtagcttgggtcgatgagtctggacataccccactggcgacagtggtccaggctgcgttggcggcctactcatggtgaaaaccatgagacgctagacatgaacaaggtgtgaagagtctattgagctactatagagtcctccggcccctgaatgcggctaatcctaaccatggagcaagtgctcacaggccagtgagttgcttgtcgtaatgcgcaagtccgtggcggaaccgactactttgggtgtccgtgtttcactttttacttttatgactgcttatggtgacaatttgatattgttaccatttagctgtcaaattaattgcaaaagatcctaagtcttacttaccaatttgcattttgataaccttgatttgaaaattttaata

SEQ ID NO: 21057 - DNA, 691 bp, synthetic construct
  source 1..691: mol_type = other DNA
agccttggggttgttcccactccaagggcccacgtggcggctagtactctggtacttgggtacctttgtacgcctgttttatctcccttcccaatgtaatttagaagctcttaaatcaaggctcaataggtggggcgcaaaccagcgctctcatgagcaagcactcctgtctccccggtgtggttgtataaactgttcccacggttgaaaacaacctatccgttatccgctatagtacttcgagaaacctagtatcacctttggattgttgacgcgttgcgctcagcacactaacccgtgtgtagcttgggtcgatgagtctggacataccccactggcgacagtggtccaggctgcgttggcggcctactcatggtgaaaaccatgagacgctagacatgaacaaggtgtgaagagtctattgagctactatagagtcctccggcccctgaatgcggctaatcctaaccatggagcaagtgctcacaggccagtgagttgcttgtcgtaatgcgcaagtccgtggcggaaccgactactttgggtgtccgtgtttcactttttacttttatgactgcttatggtgacaatttgatattgttaccatttagcttgtcaaattaattgcaaaagatcctaaattttacttaccaacttgcattttgacaaccttgatttgaaaattttaata

SEQ ID NO: 21058 - DNA, 682 bp, synthetic construct
  source 1..682: mol_type = other DNA
atcacggtacctttgtgcgcctgttttataaccctttccccaacgcaacatagaagctatacacactgatcaacagcaggcacagcgcaccagttgtgtctcgatcaagcacttctgtctccccggaccgagtatcaatagactgcttacgcggttgaaggagaaaacgttcgttacccggctgactacttcgaaaagcctagtagtgccatgaaagttgcggagcgttttgttcagcacttcccccgtgtagatcaggtcgatgagtcactgcgttccccacgggtgaccgtggcagtggctgcgttggcggcctgcccgtggggcaacccatgggacgcttcaatacaaacatggtgcgaagagtctattgagctagtcagtagtcctccggcccctgaatgcggctaatcccaactgcggagcatgcgccttcgacccagagggtagcatgtcgtaacgggcaactctgcagcggaaccgactactttgggtgtccgtgtttccttttattcttatactggctgcttatggtgacaattgagagattgttaccatatagctattggattggccatccggtgagtaatagagctattatatactcctttgtgggttttgtgccactggatcacaaggtcttgaaaactctcacttttatcacaacacttaacactgcaaa

SEQ ID NO: 21059 - DNA, 708 bp, synthetic construct
  source 1..708: mol_type = other DNA
cacccaagggcccacgtggcggctagtactctggtatcttggtacctttgtacgcctgttttaattccctccccaacctaacttagaagctttcaaaccaaagctcaataggtggagcgcaaaccagcgctcttatgagcaagcacttctgtctccccggtgcggttgcatagactgtccccacggttgaaaacaacttatccgttaaccgctatagtacttcgagaaacctagtatcaccttcggagtgtcgatgcgttgcgctcagcacactaacccgtgtgtagcttgggtcgatgagtctggacgtaccccactggcgacagtggtccaggctgcgttggcggcctactcatggtgaaaaccatgagacgctagacatgaacaaggtgtgaagagtttattgagctactatagagtcctccggcccctgaatgcggctaatcctaaccatggagcaagtgctcacaaaccagtgggttgcttgtcgtaacgcgcaagtccgtggcggaaccgactactttgggtgtccgtgtttcactttttacttttatgactgctaatggtgacaatttaatattgttaccatttggcttgtcaaattgatcacataagatctatagttttgtttactgagttattttgaagtaatcttacctcaaaacctccagtacataacatttaaagagtttaaacttaattataata

SEQ ID NO: 21060 - DNA, 697 bp, synthetic construct
  source 1..697: mol_type = other DNA
taaaacagccttggggttgttcccactccaagggcccacgtggcggctagtactctggtacttcggtacctttgtacgcctgttttatctcccttcccaatgtaatttagaagctcttgaatcaaggctcaataggtggggcgcaaaccagcgctctcatgagcaagcactcctgtctccccggtgtggttgtataaactgttcccacggttgaaaacaacctatccgttatccgctatagtacttcgagaaacctagtatcacctttggattgttgacgcgttgcgctcagcacactaacccgtgtgtagcttgggtcgatgagtctggacataccccactggcgacagtggtccaggctgcgttggcggcctactcatggtgaaaaccatgagacgctagacatgaacaaggtgtgaagagtctattgagctactatagagtcctccggcccctgaatgcggctaatcctaaccatggagcaagtgctcacaggccagtgagttgcttgtcgtaatgcgcaagtccgtggcggaaccgactactttgggtgtccgtgtttcactttttacttttatgactgcttatggtgacaatttgatattgttaccatttagcttgtcaaattaattgcaaaagatcctaaatcttacttaccaacttgcattttgataaccttgatttgaaaattttaata

SEQ ID NO: 21061 - DNA, 697 bp, synthetic construct
  source 1..697: mol_type = other DNA
taaaacagccttggggttgttcccactccaagggcccacgtggcggctagtactctggtacttcggtacctttgtacgcctgttttatctcccttcccaatgtaatttagaagctcttaaatcaaggctcaataggtggggcgcaaaccagcgctctcatgagcaagcactcctgtctccccggtgtggttgtataaactgttcccacggttgaaaacaacctatccgttatccgctatagtacttcgagaaacctagtatcacctttggattgttgacgcgttgcgctcagcacactaacccgtgtgtagcttgggtcgatgagtctggacacaccccactggcgacagtggtccaggctgcgttggcggcctactcatggtgaaaaccatgagacgctagacatgaacaaggtgtgaagagtctattgagctactatagagtcctccggcccctgaatgcggctaatcctaaccatggagcaagtgctcacaggccagtgagttgcttgtcgtaatgcgcaagtccgtggcggaaccgactactttgggtgtccgtgtttcactttttacttttatgactgcttatggtgacaatttgatattgttaccatttagcttgtcaaattaattgcaaaggatcctaaatcttacttaccaatttgcattttgacaatcttgatttgaaaattttaata

SEQ ID NO: 21062 - DNA, 690 bp, synthetic construct
  source 1..690: mol_type = other DNA
ccttggggttgttcccactccaagggcccacgtggcggctagtactctggtacttcggtacctttgtacgcctgttttatctcccttcccaatgtaatttagaagctcttaaatcaaggctcaataggtggggcgcaaaccagcgctctcatgagcaagcactcctgtctccccggtgtggttgtataaactgttcccacggttgaaaacaacctatccgttatccgctatagtacttcgagaaacctagtatcacctttggattgttgacgcgttgcgctcagcacactaacccgtgtgtagcttgggtcgatgagtctggacataccccactggcgacagtggtccaggctgcgttggcggcctactcatggtgaaaaccatgagacgctagacatgaacaaggtgtgaagagtctattgagctactatagagtcctccggcccctgaatgcggctaatcctaaccatggagcaagtgctcacaggccagtgagttgcttgtcgtaatgcgcaagtccgtggcggaaccgactactttgggtgtccgtgtttcactttttacttttatgactgcttatggtgacaatttgatattgttaccatttagcttgtcaaattaattgcaaaagatcctaaatcttacttaccaacttgcattttgacaaccttgatttgaaaatttttaata

SEQ ID NO: 21063 - DNA, 690 bp, synthetic construct
  source 1..690: mol_type = other DNA
gccttggggttgttcccactccaagggcccacgtggcggctagtactctggtacttgggtacctttgtacgcctgttttatctcccttcccaatgtaatttagaagctcttaaatcaaggctcaataggtggggcgcaaaccagcgctctcatgagcaagcactcctgtctccccggtgtggttgtataaactgttcccacggttgaaaacaacctatccgttatccgctatagtacttcgagaaacctagtatcacctttggattgttgacgcgttgcgctcagcacactaacccgtgtgtagcttgggtcgatgagtctggacataccccactggcgacagtggtccaggctgcgttggcggcctactcatggtgaaaaccatgagacgctagacatgaacaaggtgtgaagagtctattgagctactatagagtcctccggcccctgaatgcggctaatcctaaccatggagcaagtgctcacaggccagtgagttgcttgtcgtaatgcgcaagtccgtggcggaaccgactactttgggtgtccgtgtttcactttttacttttatgactgcttatggtgacaatttgatattgttaccatttagcttgtcaaattaattgcaaaagatcctaaatcttacttaccaacttgcattttgacaacctagatttgaaaattttaata

SEQ ID NO: 21064 - DNA, 712 bp, synthetic construct
  source 1..712: mol_type = other DNA
acatgggcacccagagggcccacgtggcgtagaactccggtattacggtacccttgttcgcctatttttaccacccctcccccagaaacttagaagttataaatacaaagctcaatagatacttgggcaaaccagtccaaggacgagcaagcacttctgtctccccggaaggcaacgctgttaggctgttcccacggctgaaggcaacgctaccgttaaccggcgtggtactgcgggaagtctagtagcatcattgaatttctttgacgttacgctcagcacacaaacccagtgtgtagttttggccgatgagtgcctgcactccccactggcgacagtggcaggcgctgcgttggcggccaactctcagggcaacctgagagacgtcaaattaaggacatggtgtgaagaacctactgcgctactgcgtagtcctccggcccctgaatgcggctaatcctaactcgggagcatctgcacacaatccagtgtgaagggtgtcgtaacgggcaactcctgagcggaaccgactactttgggtgtccgtgtttcctgttttatttaccttggctgcttatggtgacaatttagattgttaccatatagcaattgggctggccacctggtttaatagaattgtgaattgtattacgctaagagcttttaatataacacaagacagacatcactataaaaccacttgaaagaaagg

SEQ ID NO: 21065 - DNA, 658 bp, synthetic construct
  source 1..658: mol_type = other DNA
actctggtattgcggtacctttgtacgcctgttttatatcccttccccatgtaactttagaagcaattcacaaggttcaatagagggggtacaaaccagtaccaccacgaacaagcacttctgtttccccggtgaagctgtatagactgtccccacggtcaaaaacggcagatccgttatccgcttatgtacttcgagaagcctagtatcatcttggaatcttcgatgcgttgcgttcagcactctatcccgagtgtagcttaggtcgatgagtctgggcattccccaccggcgacggtggcccaggctgcgttggcggcctacccatggctaacgccatgggacgctagttgtgaacaaggtgtgaagagcctattgagctacatgagagtcctccggcccctgaatgcggctaatcccaaccacggagcaagtactcacaacccagtgggcagcttgtcgtaacgcgtaagtctgtggcggaaccgactactttgggtgtccgtgtttcctttttatttttgatatggctgcttatggtgacatctaagattgttatcatatagcttttggattggccatccggtgatttttgagactaaaacgcttgtttgccttatcacacaatttagtattttgttatattcatacggtcata

SEQ ID NO: 21066 - DNA, 706 bp, synthetic construct
  source 1..706: mol_type = other DNA
ctcaagggcccacgtggcggctagtactctggtatctcggtacctttgtacgcctgttttaattccctccccaacgtaacttagaagcttttaaaccaaagctcaataggcggagcgcaaaccagcgctcttatgagcaagcacttctgtctccccggtgtggttgtatagactgtccccacggttgaaaacaacttatccgttaaccgctatagtacttcgagaaacctagtattgccttcggagtgtcgatgcgttgcgctcagcacactaacccgtgtgtagcttgggtcgatgagtctggacgtaccccactggcgacagtggtccaggctgcgttggcggcctactcatggtgaaaaccatgagacgctagacatgaacaaggtgtgaagagtctattgagctactatagagtcctccggcccctgaatgcggctaatcctaaccatggagcaagtgctcacaaaccagtgggttacttgtcgtaacgcgcaagtccgtggcggaaccgactactttgggtgtccgtgtttcactttttacttttatgactgctaatggtgacaatttaatattgttaccatttggcttgtcgaattgatcacataagatctatagttttgttcactgatttgctttgaaacaatctcacctcaaaacctccagtacataacatttaaagagtttaaacttatttataaca

SEQ ID NO: 21067 - DNA, 693 bp, synthetic construct
  source 1..693: mol_type = other DNA
gttgttcccaccccaagggcccacgtggcggctagtactctggtatttcggtacctttgtacgcctgttttatctcccttcccaatgtaacttagaagttttcaaatcgaagctcaataggtggagcgcaaaccagcgctttcatgagcaagcacttctgtctccccggtgcggttgtatagactgtttccacggttgaaaacaacttatccgttatccgctatagtacttcgagaaacccagtatcacctttggattgttgatgcgttgcgctcagcacactaacccgtgtgtagcttgggtcgatgagtctggacgtaccccactggtgacagtggtccaggctgcgttggcggcctactcatggtgaaaaccatgagacgctagacatgaacaaggtgtgaagagtctattgagctactatagagtcctccggcccctgaatgcggctaatcttaaccatggagcaagtgctcacaagccagtgagttgcttgtcgtaacgcgcaagtccgtggcggaaccgactactttgggtgtccgtgtttcactttttacttttatgactgcttatggtgacaatttaatattgttaccatttagcttgtcaaattaatcacgtgaaatcctaaatcttatttatcaatttgtatttggatagcttcatttgaaaatcctaaactcattcataagg

SEQ ID NO: 21068 - DNA, 693 bp, synthetic construct
  source 1..693: mol_type = other DNA
gttcccaccccagaggcccacgtggcggctagtactctggtatcacggtacctttgtacgcctgttttatatcccttcccccgcaactttagaagcttaacaaaagttcaatagcaggggtgcaagccagtacctctatgaacaagcacttctgtttccccggtgaagttacatagactgtacccacggtcaaaagtaattgatccgttatccgcttgagtacttcgagaagcctagtatcaccttggaatcttcgacgcgttgcgctcgacactctaccccgggtgtagcttaggctgatgagtctgggcaccccccaccggtgacggtggcccaggctgcgttggcggcctacccatggctaacgccatgggacgctagttgtgaacaaggtgtgaagagcctattgagctactcaagagtcctccggcccctgaatgcggctaatcccaaccacggagcaatcgctcacgatccagtgagtaggttgtcgtaatgcgcaagttcgtggcggaaccgactactttgggtgtccgtgtttcccttttacttatactggctgcttatggtgacaatttacagattgttaccatatagctattggattggccatccagtattgtgttacatatattaaaatacttttctacaagcatcaacaacactgtgtttggaccacaataatcactacaa

SEQ ID NO: 21069 - DNA, 685 bp, synthetic construct
  source 1..685: mol_type = other DNA
tatcacggtacctttgtgtgcctgttttatccaccctcccctaaatgtaacttagaaacataatccaaacggtcattaggtagctcagtacaccaactgggcccagaccaagcacttctgttaccccggaccgagtatcaataggctgctcgcgcggctgaaggagaaaacgttcgttatccggccaattacttcgagaaacccagtatcactatgaaagttgcgcagcgtttcgttccgcacaaccccagtgtagatcaggtcgatgagtcaccgcgttccccacgggcgaccgtggcggtggctgcgttggcggcctgcccatggggcaacctatgggacgcttcaatactgacatggtgtgaagagtctattgagctaattggtagtcctccggcccctgaatgcggctaatcctaactgcggagcagatgctcacaaaccagtgggtggtctgtcgtaatgggtaactctgcagcggaaccgactactttgggtgtccgtgtttccttttatttttacactggctgcttatggtgacaattgagagattgttaccatatagctattggattggccatccggtgactaacagagcaattgtttacctatttattggttttgtaccgttagattacaaagttctaaggactctgaatcttattataacactcaatacagtaaa

SEQ ID NO: 21070 - DNA, 689 bp, synthetic construct
  source 1..689: mol_type = other DNA
gccttggggttgttcccactccaagggcccacgtggcggctagtactctggtacttcggtacctttgtacgcctgttttatctcccttcccaatgtaatttagaagctttcaaatcaaggctcaataggtggggcgcaaaccagcgctctcatgagcaagcactcctgtctccccggtgtggttgtataaactgttcccacggttgaaaacaacctatccgttatccgctatagtacttcgagaaacctagtatcacctttggattgttgacgcgttgcgctcagcacactaacccgtgtgtagcttgggtcgatgagtctggacataccccactggtgacagtggtccaggctgcgttggcggcctactcatggtgaaaaccatgagacgctagacatgaacaaggtgtgaagagtctattgagctactatagagtcctccggcccctgaatgcggctaatcctaaccatggagcaagtgctcacaggccagtgagttgcttgtcgtaatgcgcaagtccgtggcggaaccgactactttgggtgtccgtgtttcactttttacttttatgactgcttatggtgacaatttgatattgttaccatttagctgtcaaattaattgcaaaagatcctaagtcttacttaccaatttgcattttgataaccttgatttgaaaattttaata

SEQ ID NO: 21071 - DNA, 681 bp, synthetic construct
  source 1..681: mol_type = other DNA
gcggtacctttgtgcgcctgttttatattcccaccccccaatcgcaacttagaagcagtacttcacgaccaacagtgggcgtgacacaccagccacgtctcggtcaagcacctctgtctccccggactgagtatcaataagctgctcacgcggctgagggagaaaacgtccgttacccggccaattacttcgagaaacctagtaccaccacgaaagttgcgcagcgtttcgatccgcacaaccccagtgtagatcaggtcgatgagtcaccgcgttccccacgggcgaccgtggcggtggctgcgttggcggcctgcccatgggaaaacccatgggacgcttcaatactgacatggtgtgaagagtctattgagctaattggtagtcctccggcccctgaatgcggctaatcctaactgcggagcagattcccgcatgccagcgggtggtctgtcgtaacgggcaactctgcagcggaaccgactactttgggtgtccgtgtttccttttattcctatattggctgcttatggtgacaattgagagattgttaccatatagctattggattggccatccggtgacaagcagagcaattatctaccaatttattggttttgtaccattgaatttcaacgcattcaaaactcttaactttattttgactcttaatacagcaaa

SEQ ID NO: 21072 - DNA, 693 bp, synthetic construct
  source 1..693: mol_type = other DNA
cagccttggggttgttcccactccaagggcccacgtggcggctagtactctggtacttcggtacctttgtacgcctgttttatctcccttcccaatgtaatttagaagctcttaaatcaaggctcaataggtggggcgcaaaccagcactctcatgagcaagcactcctgtctccccggtgtggttgtataaactgttcccacggttgaaaacaacctatccgttatccgctatagtacttcgagaaacctagtatcacctttggattgttgacgcgttgcgctcagcacactaacccgtgtgtagcttgggtcgatgagtctggacataccccactggcgacagtggtccaggctgcgttggcggcctactcatggtgaaaaccatgagacgctagacatgaacaaggtgtgaagagtctattgagctactatagagtcctccggcccctgaatgcggctaatcctaaccatggagcaagtgctcacaggccagtgagttgcttgtcgtaatgcgcaagtccgtggcggaaccgactactttgggtgtccgtgtttcactttttacttttatgactgcttatggtgacaatttgatattgttaccatttagcttgtcaaattaattgcaaaagatcctaaatcttacttaccaacttgcattttgacaaccttgatttgaaaatttttaata

SEQ ID NO: 21073 - DNA, 678 bp, synthetic construct
  source 1..678: mol_type = other DNA
gggcccacgtggcggctagtactctggtacttcggtacctttgtacgcctgttttatctcccttcccaatgtaatttagaagcttttaaatcaaggctcaataggtggggcgcaaaccagcgctctcatgagcaagcactcctgtctccccggtgtggttgtataaactgttcccacggttgaaaacaacctatccgttatccgctatagtacttcgagaaacctagtatcacctttggattgttgacgcgttgcgctcagcacactaacccgtgtgtagcttgggtcgatgagtctggacataccccactggcgacagtggtccaggctgcgttggcggcctactcatggtgaaaaccatgagacgctagacatgaacaaggtgtgaagagtctattgagctactatagagtcctccggcccctgaatgcggctaatcctaaccatggagcaagtgctcacaggccagtgagttgcttgtcgtaatgcgcaagtccgtggcggaaccgactactttgggtgtccgtgtttcactttttacttttatgactgcttatggtgacaatttgatattgttaccatttagctggtcgaaataatcacataaaactttaaatcctatctaataattcacatttggatagtttcatttcgaggactttaaacctacttacaaag

SEQ ID NO: 21074 - DNA, 687 bp, synthetic construct
  source 1..687: mol_type = other DNA
gccttggggttgttcccactccaagggcccacgtggcggctagtactctggtacttcggtacctttgtacgcctgttttatctcccttcccaatgtaatttagaagctcttaaatcaaggctcaataggtggggcgcaaaccagcgctctcatgagcaagcactcctgtctccccggtgtggttgtataaactgttcccacggttgaaaacaacctatccgttatccgctatagtacttcgagaaacctagtatcacctttggattgttgacgcgttgcgctcagcacactaacccgtgtgtagcttgggtcgatgagtctggacataccccactggcgacagtggtccaggctgcgttggcggcctactcatggtgaaaaccatgagacgctagacatgaacaaggtgtgaagagtctattgagctactatagagtcctccggcccctgaatgcggctaatcctaaccatggagcaagtgctcacaggccagtgagttgcttgtcgtaatgcgtaagtccgtggcggaaccgactactttgggtgtccgtgtttcactttttacttttatgactgcttatggtgacaatttgatattgttaccatttagcttgtcaaattaattgcaaaagatcctaaatcttacttaacttgcattttgacaactttgatttgaaaattttaata

SEQ ID NO: 21075 - DNA, 698 bp, synthetic construct
  source 1..698: mol_type = other DNA
ttaaaacagccttggggttgttcccactccaagggcccacgtggcggctagtactctggtacttcggtacctttgtacgcctgttttatctcccttcccaatgtaacttagaagttcttaaatcaatgctcaataggtggggcgcaaaccagcgctctcatgagcaagcactcctgtctccccggtgaggttgtataaactgttcccacggttgaaaacaacctatccgttatccgctatagtacttcgagaaacctagtaccacctttggattgttgacgcgttgcgctcagcacactaacccgtgtgtagcttgggtcgatgagtctggacatacctcactggcgacagtggtccaggctgcgttggcggcctactcatggtgaaaaccatgagacgctagacatgaacaaggtgtgaagagtctattgagctactatagagtcctccggcccctgaatgcggctaatcctaaccatggagcaagtgctcacaggccagtgagttgcttgtcgtaatgcgcaagtccgtggcggaaccgactactttgggtgtccgtgtttcactttttacttttatgactgcttatggtgacaatttgatattgttaccatttagcttgtcaaatcaattgcaaaagatcttaaatcttatttatcaatttgcatcttgataactttgatttgaaaattttaaca

SEQ ID NO: 21076 - DNA, 691 bp, synthetic construct
  source 1..691: mol_type = other DNA
gccttggggttgttcccactccaagggcccacgtggcggctagtactctggtacttcggtacctttgtacgcctgttttatctcccttcccaatgtaatttagaagctcttaaatcaaggctcaataggtggggcgcaaaccagcgctctcatgagcaagcactcctgtctccccggtgtggttgtataaactgttcccacggttgaaaacaacctatccgttatccgctatagtacttcgagaaacctagtatcacctttggattgttgacgcgttgcgctcagcacactaacccgtgtgtagcttgggtcgatgagtctggacataccccactggcgacagtggtccaggctgcgttggcggcctactcatggtgaaaaccatgagacgctagacatgaacaaggtgtgaagagtctattgagctactatagagtcctccggcccctgaatgcggctaatcctaaccatggagcaagtgctcacaggccagtgagttgcttgtcgtaatgcgcaagtccgtggcggaaccgactactttgggtgtccgtgtttcactttttacttttatgactgcttatggtgacaatttgatattgttaccatttagcttgtcaaattaattgcaaaagatcctaaatcttacttaccaacttgcattttgacaaccttgatttgaagatttttaata

SEQ ID NO: 21077 - DNA, 687 bp, synthetic construct
  source 1..687: mol_type = other DNA
tggggttgttcccactccaagggcccacgtggcggctagtactctggtacttcggtacctttgtacgcctgttttatctcccttcccaatgcaatttagaagctcttaaatcaaggctcaataggtggggcgcaaaccagcgctctcatgagcaagcactcctgtctccccggtgtggttgtataaactgttcccacggttgaaaacaacctatccgttatccgctatagtacttcgagaaacctagtatcacctttggattgttgacgcgttgcgctcagcacactaacccgtgtgtagcttgggtcgatgagtctggacataccccactggcgacagtggtccaggctgcgttggcggcctactcatggtgaaaaccatgagacgctagacatgaacaaggtgtgaagagtctattgagctactatagagtcctccggcccctgaatgcggctaatcctaaccatggagcaagtgctcacaggccagtgagttgcttgtcgtaatgcgcaagtccgtggcggaaccgactactttgggtgtccgtgtttcactttttacttttatgactgcttatggtgacaatttgatattgttaccatttagcttgtcaaatcaattgcaaaagatcctaaatcttacttaccaacttgcattttgataaccttgatttgaaaatttttaata

SEQ ID NO: 21078 - DNA, 689 bp, synthetic construct
  source 1..689: mol_type = other DNA
gccttggggttgttcccactccaagggcccacgtggcggctagtactctggtacttcggtacctttgtacgcctgttttatctcccttcccaatgtaatttagaagcttttaaatcaaggctcaataggtggggcgcaaaccagcgctctcatgagcaagcactcctgtctccccggtgtggttgtataaactgttcccacggttgaaaacaacctatccgttatccgctatagtacttcgagaaacctagtatcacctttggattgttgacgcgttgcgctcagcacactaacccgtgtgtagcttgggtcgatgagtctggacataccccactggcgacagtggtccaggctgcgttggcggcctactcatggtgaaaaccatgagacgctagacatgaacaaggtgtgaagagtctattgagctactatagagtcctccggcccctgaatgcggctaatcctaaccatggagcaagtgctcacaggccagtgagttgcttgtcgtaatgcgcaagtccgtggcggaaccgactactttgggtgtccgtgtttcactttttacttttatgactgcttatggtgacaatttgatattgttaccatttagctgtcaaattaattgcaaaaggtcctaggtcttacttaccaatttgcattttgataaccttgatttgaaaattttaata

SEQ ID NO: 21079 - DNA, 651 bp, synthetic construct
  source 1..651: mol_type = other DNA
ccccgtaacttagaagcataaaaccaagttcagtaggaaggggtgcaaaccagtacctctatgaacaagcacttctgtttccccggtgacattgcatagactgctcacgcggttgaaagcgatcgatccgttatccgctcgtgtacttcgagaagcctagtatcgccttggaatcttcgatgcgttgcgctcagcacccgaccccggggtgtagcttaggctgatgagtctggacgttcctcaccggtgacggtggtccaggctgcgttggcggcctacctatggctaacgccataggacgctagatgtgaacaaggtgtgaagagcctattgagctacacgagagtcctccggcccctgaatgcggctaatcctaaccacggagcaagcggtcacaaaccagtggctggcttgtcgtaacgcgcaagtctgtggcggaaccgactactttgggtgtccgtgtttcctgttatttttatcatggctgcttatggtgacaatctgtgattgttatcataaagcgatttggattggccatccggtgagtgttgtatcgaatatttgactgtttgacagaaccactgtgttagattcacttcatatttaagtaatcaatcaaaaacagtacgaagataaaacaatagtactgca

SEQ ID NO: 21080 - DNA, 651 bp, synthetic construct
  source 1..651: mol_type = other DNA
ccccgtaacttagaagcataaaaccaagttcagtaggaaggggtgcaaaccagtacctctatgaacaagcacttctgtttccccggtgacattgcatagactgctcacgcggttgaaagcgatcgatccgttatccgctcgtgtacttcgagaagcctagtatcgccttggaatcttcgatgcgttgcgctcagcacccgaccccggggtgtagcttaggctgatgagtctggacgttcctcaccggtgacggtggtccaggctgcgttggcggcctacctatggctaacgccataggacgctagatgtgaacaaggtgtgaagagcctattgagctacacgagagtcctccggcccctgaatgcggctaatcctaaccacggagcaagcggtcacaaaccagtggctggcttgtcgtaacgcgcaagtctgtggcggaaccgactactttgggtgtccgtgtttcctgttatttttatcatggctgcttatggtgacaatctgtgattgttatcataaagcgatttggattggccatccggtgagtgttgtatcgaatacttgactgtttgacagaactactgtgttagactcacttcatatttaactaatcaatcaaaaacagtacgaagataaaacaacaatactgca

SEQ ID NO: 21081 - DNA, 651 bp, synthetic construct
  source 1..651: mol_type = other DNA
ccccgtaacttagaagcaaaaaaccaagttcagtaggaaggggtgcaaaccagtacctctatgaacaagcacttctgtttccccggtgacattgcatagactgctcacgcggttgaaagcgatcgatccgttatccgctcgtgtacttcgagaagcctagtatcgccttggaatcttcgatgcgttgcgctcagcacccgaccccggggtgtagcttaggctgatgagtctggacgctcctcaccggcgacggtggtccaggctgcgttggcggcctacctatggctaacgccataggacgctagatgtgaacaaggtgtgaagagcctattgagctacgcgagagtcctccggcccctgaatgcggctaatcctaaccacggagcaagcggtcacaaaccagtggctagcatgtcgtaatgcgcaagtctgtggcggaaccgactactttgggtgtccgtgtttcctgttatttttatcatggctgcttatggtgacaatctgtgattgttatcataaagcgatttggattggccatccggtgagtgttgtgtcgaatatttgactgtttaatagaaccactgtgttagattcacttcacatttgactaatcaatcaaaaacagtacgaagataaaacaacaatactgca

SEQ ID NO: 21082 - DNA, 651 bp, synthetic construct
  source 1..651: mol_type = other DNA
ccccgtaacttagaagcataaaaccaagttcagtaggaaggggtgcaaaccagtacctctatgaacaagcacttctgtttccccggtgacattgcatagactgctcacgcggttgaaagcgatcgatccgttatccgctcgtgtacttcgagaagcctagtatcgccttggaatcttcgatgcgttgcgctcagcacccgaccccggggtgtagcttaggctgatgagtctggacgttcctcaccggtgacggtggtccaggctgcgttggcggcctacctatggctaacgccataggacgctagatgtgaacaaggtgtgaagagcctattgagctacacgagagtcctccggcccctgaatgcggctaatcctaaccatggagcaagcggtcacaaaccagtggctggcttgtcgtaacgcgcaagtctgtggcggaaccgactactttgggtgtccgtgtttcctgttatttttatcatggctgcttatggtgacaatctgtgattgttatcataaagcgatttggattggccatccggtgagtgttgtatcgaatacttgactgtttgacagaactactgtgttagactcacttcatatttaactaatcaatcaaaaacagtacgaagataaaacaacaatactgca

SEQ ID NO: 21083 - DNA, 712 bp, synthetic construct
  source 1..712: mol_type = other DNA
cagggcccactgggcgccagcacactggtatcaaggtacctttgtgcgcctgttttgcttcccttttcccagaggtaacttagaagcaatactccacgaccaatagcaggcgtggcacaccagccatgtctcggtcaagcacttctgtgaccccggactgagtatcaataaactgctcacgcggtcgaaggagaaaacgtccgttacccggctagctacttcgagaaacctagtaacgccatgaaaattgcgaggtgtttcgctcagcacatccccagtgtagatcaggtcgatgagtcaccgcattccccacaggtaactgtggcggtggctgcgttggcggcctgcccatggggtaactcatgggacgcttcaatacggacatggtgtgaagagtctattgagctagttagtattcctccggcccctgaatgcggctaatcctaactgtggagcatgcgcccccattccagagggtagcatgtcgtaacgggtaactccgcagcggaaccgactactttgggtgtccgtgtttccttttattttatcattggctgcttatggtgacaattgaaagattgttaccatatagctattggattggccatccggtgacgaacagagctataatttaccaatttgtgggatttgttcctataagtttgaaagtcttaaagacccttaatttaatattactactcaatagtgcaag

SEQ ID NO: 21084 - DNA, 678 bp, synthetic construct
  source 1..678: mol_type = other DNA
gttcccactccaagggcccacgtggcggctagtactctggtacttcggtacctttgtacgcctgttttatctcccttcccaatgtaatttagaagcttttaaatcaaggctcaataggtggggcgcaaaccagcgctctcatgagcaagcactcctgtctccccggtgtggttgtataaactgttcccacggttgaaaacaacctatccgttatccgctatagtacttcgagaaacctagtatcacctttggattgttgacgcgttgcgctcagcacactaacccgtgtgtagcttgggtcgatgagtctggacatgccccactggcgacagtggtccaggctgcgttggcggcctactcatggtgaaaaccatgagacgctagacatgaacaaggtgtgaagagtctattgagctactatagagtcctccggcccctgaatgcggctaatcctaaccatggagcaagtgctcacaggccagtgagttgcttgtcgtaatgcgcaagtccgtggcggaaccgactactttgggtgtccgtgtttcactttttacttttatgactgcttatggtgacaatttgatattgttaccatttagctgtcaaattaattgcaaaagatcctaagtcttacttaccaatttgcattttgataaccttgatttgaaaattttaata

SEQ ID NO: 21085 - DNA, 678 bp, synthetic construct
  source 1..678: mol_type = other DNA
gggcccacgtggcggctagtactctggtatttcggtacctttgtacgcctgttttatctccctccccaatgtaacttagaagctttcaaatcaaagctcaataggtggagcgcaagccagcgcttccgtgagcaagtacttctgtttccccggtgcggttgtatagactgtccccacggttgaaaacaacctatccgttatccgctatagtacttcgagaaacctagtatcacctttggattgttgatgcgttgcgctcaacacactaacccgtgtgtagcttgggtcgatgagtctggacataccccactggtgacagtggtccaggctgcgttggcggcctactcatggtgaaaaccatgagacgctagacatgaacaaggtgtgaagagtctattgagctactatagagtcctccggcccctgaatgcggctaatcttaaccatggagcaagtgctcacaaaccagtgagttgcttgtcgtaatgcgcaagtccgtggcggaaccgactactttgggtgtccgtgtttcactttttacttttatgactgcttatggtgacaatttaatattgttaccattcagctagtcgaaataatcgcataaaactttaaatcctatctaacagttcacatttggatagttttattttaaggactttaaacctacctagaaag

SEQ ID NO: 21086 - DNA, 662 bp, synthetic construct
  source 1..662: mol_type = other DNA
ctgttttatatacccttacccaacgtaatatagaagcaaaacaacaaggtcaatagagagcccagtgagccaactgggtcgagaccaagcacttctgtttccccggaccgagtatcaataggctgcttacgcggctgaaggagaaaacgttcgttacccggctaactacttcgaaaaacctagtaacgccatggaagttgcgaaccgtttcgctcggcacttccccagtgtagatcaggtcgatgagtcaccgcattccccacgggcgaccgtggcggtggctgcgttggcggcctgcctatggggcaacccataggacgcttcaatatggacatggtgtgaagagtctattgagctagttagtagtcctccggcccctgaatgcggctaatcctaactgcggagcacatgcccccaacccaggaggtggtgtgtcgtaatgggtaactctgcagcggaaccgactactttgggtgtccgtgtttccttttatctcagtattggctgcttatggtgacaattgaaagattgttaccatatagctattggattggccatccggtgactaacagagcaattgtatacctattcattggttacgttccattaaatctcaaggaattaacgactctcaattacattttgctcttaaattctgcaaa

SEQ ID NO: 21087 - DNA, 647 bp, synthetic construct; identical to SEQ ID NO: 781
  source 1..647: mol_type = other DNA

SEQ ID NO: 21088 - DNA, 675 bp, synthetic construct
  source 1..675: mol_type = other DNA
ccactccaagggcccacgtggcggctagtactctggtacttcggtacctttgtacgcctgttttatctcccttcccaatgtaatttagaagttcttaaatcaatgctcaatagggggggcgcaaaccagcgctctcatgagcaagcactcctgtctccccggtgaggttgtataaactgttcccacggttgaaaacaacctatccgttatccgctatagtacttcgagaaacctagtaccacctttggattgttgacgcgttgcgctcagcacactaacccgtgtgtagcttgggtcgatgagtctggacatacctcactggcgacagtggtccaggctgcgttggcggcctactcatggtgaaagccatgagacgctagacatgaacaaggtgtgaagagtctattgagctactatagagtcctccggcccctgaatgcggctaatcctaaccatggagcaagtgctcacaggccagtgagttgcttgtcgtaatgcgcaagtccgtggcggaaccgactactttgggtgtccgtgtttcactttttacttttatgactgcttatggtgacaatttgatattgttaccatttagcttgtcaaatcaattgcaaaagatcctaactcttatttatcaacttgcatcttgataactttaatttgaaaattttaaca

SEQ ID NO: 21089 - DNA, 675 bp, synthetic construct
  source 1..675: mol_type = other DNA
ccactccaagggcccacgtggcggctagtactctggtacttcggtacctttgtacgcctgttttatctcccttcccaatgtaatttagaagttcttaaatcaatgctcaataggtggggcgcaaaccagcgctcttatgagcaagcactcctgtctccccggtgaggttgtataaactgttcccacggttgaaaacgacctatccgttatccgctatagtacttcgagaaacctagtaccacctttggattgttgacgcgttgcgctcagcacactaacccgtgtgtagcttgggtcgatgagtctggacatacctcactggcgacagtggtccaggctgcgttggcggcctactcatggtgaaagccatgagacgctagacatgaacaaggtgtgaagagtctattgagctactatagagtcctccggcccctgaatgcggctaatcctaaccatggagcaagtgctcacaagccagtgagttgcttgtcgtaatgcgcaagtccgtggcggaaccgactactttgggtgtccgtgtttcactttttacttttatgactgcttatggtgacaatttgatattgttaccatttagcttgtcaaatcaattgcaaaagatcctaactcttatttgtcaacttgcatcttgataactttaatttgaaaattttaaca

SEQ ID NO: 21090 - DNA, 689 bp, synthetic construct
  source 1..689: mol_type = other DNA
ccttggggttgttcccactccaagggcccacgtggcggctagtactctggtacttcggtacctttgtacgcctgttttatctccccccccaatgtaatttagaagctcttaaatcaaggctcaataggtggggcgcaaaccagcgctctcatgagcaagcactcctgtctccccggtgcggttgtataaactgttcccacggttgaaaacgacctatccgttatccgctatagtacttcgagaaacctagtatcacctttggattgttgacgcgttgcgctcagcacactaacccgtgtgtagcttgggtcgatgagtctggacataccccactggcgacagtggtccaggctgcgttggcggcctactcatggtgaaaaccatgagacgctagacatgaacaaggtgtgaagagtctattgagctactatagagtcctccggcccctgaatgcggctaatcctaaccatggagcaagtgcccacagaccagtgagttgcttgtcgtaatgcgcaagtccgtggcggaaccgactactttgggtgtccgtgtttcactttttacttttatgactgcttatggtgacaatttgatattgttaccatttagcttgtcaaattgattacaaaagatcctaaatcttgcttaccaatttgcattttggcaaccctgatttgaaaattttaata

SEQ ID NO: 21091 - DNA, 688 bp, synthetic construct
  source 1..688: mol_type = other DNA
ttggggttgttcccactccaagggcccacgtggcggctagtactctggtacttcggtacctttgtacgcctgttttatctcccttcccaatgtaatttagaagctcttaaatcaaggctcaataggtggggcgcaaaccagcgctctcatgagcaagcactcctgtctccccggtgtggttgtataaactgttcccacggttgaaaacaacctatccgttatccgctatagtacttcgagaaacctagtatcacctttggattgttgacgcgttgcgctcagcacactaacccgtgtgtagcttgggtcgatgagtctggacataccccactggcgacagtggtccaggctgcgttggcggcctactcatggtgaaaaccatgagacgctagacatgaacaaggtgtgaagagtctattgagctactatagagtcctccggcccctgaatgcggctaatcctaaccatggagcaagtgctcacaggccagtgagttgcttgtcgtaatgcgcaagtccgtggcggaaccgactactttgggtgtccgtgtttcactttttacttttatgactgcttatggtgacaatttgatattgttaccatttagcttgtcaaattaattacaaaagatcctaaatcttacttaccaacttgcattttgacaaccttgatttgaaaatttttaata

SEQ ID NO: 21092 - DNA, 676 bp, synthetic construct
  source 1..676: mol_type = other DNA
cccactccaagggcccacgtggcggctagtactctggtacttcggtacctttgtacgcctgttttatcccccttcccaatgtaatttagaagctcttaaattaaggctcaataggtggggcgcaaaccagcgctctcatgagcaagcactcctgtctccccggtgtggttgtataaactgtttccacggttgaaaacaacctatccgttatccgctatagtacttcgagaaacctagtatcacctttggattgttgacgcgttgcgctcagcacactaacccgtgtgtagcttgggtcgatgagtctggacataccccactggcgacagtggtccaggctgcgttggcggcctactcatggtgaaaaccatgagacgctagacatgaacaaggtgtgaagagtctattgagctactatagagtcctccggcccctgaatgcggctaatcctaaccatggagcaagtgctcacaggccagtgagttgcttgtcgtaatgcgcaagtccgtggcggaaccgactactttgggtgtccgtgtttcactttttacttttatgactgcttatggtgacaatttgatattgttaccatttagcttgtcaaatcaattgcaaaagatcctaaatcttacttaccaacttgtattttgacaaccttgatttgaaaattttaata

SEQ ID NO: 21093 - DNA, 709 bp, synthetic construct
  source 1..709: mol_type = other DNA
ggcccacagggcgctagcacactggtatcacggtacctttgtgcgcctgttttatgcatccttccccaaaagtaacttagaagcacaacttaagcgaccaatagaggctcagcactccagctgggttccggtcaagcacttctgttaccccggaccgagtatcaataggctgctagtgcggctgaaggagaaaacgttcgttacccggccaattacttcgagaaacccagtatcaccatgaaagttgcgcagtgtttcgctccacacaaccccagtgtagatcaggtcgatgagtcaccgcaacccccacgggcgaccgtggcggtggctgcgctggcggcctgcccatggggcaacccatgggacgcttcaatactgacatggtgtgaagagtctattgagctaattggtattcctccggcccctgaatgcggctaatcctaactgcggagcagacgctcgcataccagcgggtagtttgtcgtaacgggtaactctgcagcggaaccgactactttgggtgtccgtgtttccttttatttttatattggctgcttatggtgacaattgaaagattgttgccatatagctattggattggccatccggtgacaaatagagcgattatctactcatttgttgggttcattccattgaattacaaggaattaaacacccttaattttattctactgcttaattcaacaaa

SEQ ID NO: 21094 - DNA, 635 bp, synthetic construct; identical to SEQ ID NO: 66
  source 1..635: mol_type = other DNA

SEQ ID NO: 21095 - DNA, 710 bp, synthetic construct
  source 1..710: mol_type = other DNA
ttaaaacagccttggggttgttcccaccccaaaggcccacgtggcggctagtactctggtacttcggtacctttgtacgcctgttttatctcccttcccaatgtaatttagaagcttttaaatcaaggctcaataggtggggcgcaaaccagcgctctcatgagcaagcactcctgtctccccggtgtggttgtataaactgttcccacggttgaaaacaacctatccgttatccgctatagtacttcgagaaacctagtatcacctttggattgttgacgcgttgcgctcagcacactaacccgtgtgtagcttgggtcgatgagtctggacataccccactggcgacagtggtccaggctgcgttggcggcctactcatggtgaaaaccatgagacgctagacatgaacaaggtgtgaagagtctattgagctactatagagtcctccggcccctgaatgcggctaatcctaaccatggagcaagtgctcacaggccagtgagttgcttgtcgtaatgcgcaagtccgtggcggaaccgactactttgggtgtccgtgtttcattttttacttttatgactgcttatggtgacaatttgatattgttaccatttagctagtcgaaataatcacataaaactttaaatcctatctaataattcacatttggatagtttcatttcgaggactttaaacctacttacaaag

SEQ ID NO: 21096 - DNA, 684 bp, synthetic construct
  source 1..684: mol_type = other DNA
gggttgttcccactccaagggcccacgtggcggctagtactctggtacttcggtacctttgtacgcctgttttacctcccttcccaatgtaacttagaagttcttaaatcaatgctcaataggtggggcgcaaaccagcgttctcatgagcaagcactcctgtctccccggtgaggttgtataaactgttcccacggttgaaaacgacctatccgttatccgctatagtacttcgagaaacctagtaccacctttggattgttgacgcgttgcgctcagcacactaacccgtgtgtagcttgggtcgatgagtctggacatacctcactggcgacagtggtccaggctgcgttggcggcctactcatggcgaaagccatgagacgctagacatgaacaaggtgtgaagagtctattgagctactatagagtcctccggcccctgaatgcggctaatcctaaccatggagcaagtgctcacaggccagtgagttgcttgtcgtaatgcgcaagtccgtggcggaaccgactactttgggtgtccgtgtttcactttttacttttatgactgcttatggtgacaatttgatattgttaccatttagcttgtcaaatcaattgcaaaagatcctaaatcttatttatcaacttgcatcttgataactttaatttgaaaattttaaca

SEQ ID NO: 21097 - DNA, 673 bp, synthetic construct
  source 1..673: mol_type = other DNA
accccaagggcccacgtggcggctagtactctggtacttcggtacctttgtacgcctgttttatctcccttcccaatgtaacttagaagttcttaaattaatgctcaataggtggggcgcaaaccagcgctctcatgagcaagcactcctgtctccccggtgaggttgtataaactgttcccacggttgaaaacaacctatccgttatccgctatagtacttcgagaaacctagtaccacctttggattgttgacgcgttgcgctcagcacactaacccgtgtgtagcttgggtcgatgagtctggacatacctcactggcgacagtggtccaggctgcgttggcggcctactcatggtgaaagccatgagacgctagacatgaacaaggtgtgaagagtctattgagctactatagagtcctccggcccctgaatgcggctaatcctaaccatggagcaagtgctcacaggccagtgagttgcttgtcgtaatgcgcaagtccgtggcggaaccgactactttgggtgtccgtgtttcactttttacttttatgactgcttatggtgacaatttgatattgttaccatttagcttgtcaaatcaattgcaaaagatcctaaatcttatttatcaacttgcatcttgataactttaatttgaaaattttaaca

SEQ ID NO: 21098 - DNA, 673 bp, synthetic construct
  source 1..673: mol_type = other DNA
accccaagggcccacgtggcggctagtactctggtacttcggtacctttgtacgcctgttttatctcccttcccaatgtaacttagaagttcttaaatcaatgctcaataggtggggcgcaaaccagcgttctcatgagcaagcactcctgtctccccggtgaggttgtataaactgttcccacggttgaaaacgacctatccgttatccgctatagtacttcgagaaacctagtaccatctttggattgttgacgcgttgcgctcagcacactaacccgtgtgtagcttgggtcgatgagtctggacatacctcactggcgacagtggtccaggctgcgttggcggcctactcatggcgaaagccatgagacgctagacatgaacaaggtgtgaagagtctattgagctactatagagtcctccggcccctgaatgcggctaatcctaaccatggagcaagtgctcacaggccagtgagttgcttgtcgtaatgcgcaagtccgtggcggaaccgactactttgggtgtccgtgtttcactttttacttttatgactgcttatggtgacaatttgatattgttaccatttagcttgtcaaatcaattgcaaaagatcctaaatcttatttatcaacttgcatcttgataactttaatttgaaaattttaaca

SEQ ID NO: 21099 - DNA, 743 bp, synthetic construct
  source 1..743: mol_type = other DNA
ttaaaacagggctgtgggttgttcccacccacagggcccactgggcgccagcacactggtatcacggtacctttgtgcgcctgttttattcaccccccccttgagtaacgtagaagtacaattcaaacggtcaatagacagctcagtatgccaactgggcccagaccaagcacttctgtttccccggaccgagtatcaataagctgctcacgtggctgaaggagaaaacgttcgttacccggccaattacttcgagaaacccagtaccaccatggaggttgcgcagtgtttcgctccgcacaatcccagtgtagatcaggtcgatgagtcaccgcattccccacgggcgaccgtggcggtggctgcgctggcggcctgcccatggggtgacccatgggacgcttcaatatcgacatggtgcgaagagtctattgagctaattggtagtcctccggcccctgaatgcggctaatcctaactgcggagcagatacccacatgccagtgggcagtctgtcgtaacgggcaactctgcagcggaaccgactactttgggtgtccgtgtttctctttattctatatttggctgcttatggtgacaattgagagattgttgccatatagctattggattggccatccggtgacaaacagagcaattgtttatctatttgtcggctttgtgcctctaaaccttaaagcaattaagacccttaattttattttagtactcaacacagtaca

SEQ ID NO: 21100 - DNA, 684 bp, synthetic construct
  source 1..684: mol_type = other DNA
ggggttgttcccactccaagggcccacgtggcggctagtactctggtacttcggtacctttgtacgcctgttttatctcccttcccaatgtaatttagaagcttttaaatcaaggctcaataggtggggcgcaaaccagcgctctcatgagcaagcactcctgtctccccggtgtggttgtataaactgttcccacggttgaaaacaacctatccgttatccgctatagtacttcgagaaacctagtatcacctttggattgttgacgcgttgcgttcaacacactaacccgtgtgtagcttgggtcgatgagtctggacataccccactggcgacagtggtccaggctgcgttggcggcctactcatggtgaaaaccatgagacgctagacatgaacaaggtgtgaagagtctattgagctactatagagtcctccggcccctgaatgcggctaatcctaaccatggagcaagtgctcacaggccagtgagttgcttgtcgtaatgcgcaagtccgtggcggaaccgactactttgggtgtccgtgtttcactttttacttttatgactgcttatggtgacaatttgatattgttaccatttagctgtcaaattaattgcaaaagatcctaagtcttacttaccaatttgcattttgataaccttgatttgaaaattttaata

SEQ ID NO: 21101 - DNA, 684 bp, synthetic construct
  source 1..684: mol_type = other DNA
ggggttgttcccactccaagggcccacgtggcggctagtactctggtacttcggtacctttgtacgcctgttttatctcccttcccaatgtaatttagaagcttttaaatcaaagctcaataggtggggcgcaaaccagcgctctcatgagcaagcactcctgtctccccggtgtggttgtataaactgttcccacggttgaaaataacctatccgttatccgctatagtacttcgagaaacctagtatcacctttggattgttgacgcgttgcgctcagcacactaacccgtgtgtagcttgggtcgatgagtctggacataccccactggcgacagtggtccaggctgcgttggcggcctactcatggtgaaaaccatgagacgctagacatgaacaaggtgtgaagagtctattgagctactatagagtcctccggcccctgaatgcggctaatcctaaccatggagcaagtgctcacaggccagtgagttgcttgtcgtaatgcgcaagtccgtggcggaaccgactactttgggtgtccgtgtttcactttttacttttatgactgcttatggtgacaatttgatattgttaccatttagctgtcaaattaattgcaaaagatcctaagtcttacttaccaatttgcattttgataaccttgatttgaaaattttaata

SEQ ID NO: 21102 - DNA, 672 bp, synthetic construct
  source 1..672: mol_type = other DNA
accccaaggcccacgtggcggctagtactctggtacttcggtacctttgtacgcctgttttatctcccttcccaatgtaacttagaagttcttaaatcaatgctcaataggtggggcgcaaaccagcgctctcatgagcaagcactcctgtctccccggtgaggttgtataaactgttcccacggttgaaaacaacctatccgttatccgctatagtacttcgagaaacctagtaccacctttggattgttgacgcgttgcgctcagcacactaacccgtgtgtagcttgggtcgatgagtctggacatacctcactggcgacagtggtccaggctgcgttggcggcctactcatggtgagaaccatgagacgctagacatgaacaaggtgtgaagagtctattgagctactatagagtcctccggcccctgaatgcggctaatcctaaccatggagcaagtgctcacaggccagtgagttgcttgtcgtaatgcgcaagtccgtggcggaaccgactactttgggtgtccgtgtttcactttttacttttacgactgcttatggtgacaatttgatattgttaccatttagcttgtcaaatcaattgcaaaagatcctaaatcttatttatcaatttgcatcttgataactttaatttgaaaattttaaca

SEQ ID NO: 21103 - DNA, 723 bp, synthetic construct
  source 1..723: mol_type = other DNA
tcccaccccagaggcccacgtggcggccagtataccggtattacggtacccttgtacgcctgttttatactcccttccccgcaacttagaagttaaacaaaccaagttcaatagaagggggtacaaaccagtaccaccacgaacaagcacttctgtttccccggtgacgtcatataggttgtaaccacggccaaaagtgattgatccgttatccgctcttgtacttcgagaagcccagtaccatcttgggatcttcgatgcgttgcgctcagcactcgaacccggagtgtagcttaggccgatgagtctggacattccccaccggtgacggtggtccaggctgcgttggcggcctacctgtggcccaagccacaggacgctagatgtgaacaaggtgtgaagagcctattgagctacaagggaatcctccggcccctgaatgcggctaatcctaactacggagcagacggtcacaaaccagtgaatggtctgtcgtaatgcgcaagtctgtagcggaaccgactactttgggtgtccgtgtttccttttatctttttaatggctgcttatggtgacaatcctagattgttatcataaagcgatttggattggccatccagtgatatttgaaaccattactgtattgcctgttaaggctattttaaagacttaataaatacaacttcattcaactcatctacaccaaccaataactatctcata

SEQ ID NO: 21104 - DNA, 711 bp, synthetic construct
  source 1..711: mol_type = other DNA
agggcccactgggcgccagcactctggtatcacggtacctttgtgcgcctgttttaaaaccctctccccaatttgaaacttagaagcaatacacctcgatcaatagtaggcatgacacgccagccatgtcttgatcaagcacttctgtttccccggactgagtatcaataaactgcttgcgcggtcgaaggagaaaacgtccgttacccgactaactacttcgagaaacccagtaacaccatggaaattgcggagtgtttcactcagcacattcccagtgtagatcaggtcgatgagtcaccgcattccccacgggtgaccgtggcggtggctgcgctggcggcctgcccatggggcaacccatgggacgcttcaatatggacatggtgtgaagagtctattgagctagttagtagtcctccggcccctgaatgcggctaatcctaactgcggagcacgtgcctccattccagggggtggcgtgtcgtaacgggcaactctgcagcggaaccgactactttgggtgtccgtgtttcttttaattttatactggctgcttatggtgacaattgaaagattgttgccatatagctattggattggccatccggtatccaacagagcaattgtgtacctttttgttggatttgtaccacttaccagaacaagttttcatacactgtgttacattattagactaaacacagaaaa

SEQ ID NO: 21105 - DNA, 595 bp, synthetic construct
  source 1..595: mol_type = other DNA
gtactaccacgaacaagcacttctgttaccccggtgagattgcataggccgtccccacggctaaaagcgattgatccgttatccgctcttgtacttcgagaagcctagtaagaccttgggatcctcgatgcgttgcgctcaacactcaaccccagagtgtagcttgggctgatgagtctggacattcctcaccggtgacggtggtccaggctgcgttggcggcctacctgtggcccaaagccacaggacgctagttgtgaacaaggtgtgaagagcctattgagctacaagagagtcctccggcccctgaatgcggctaatcccaaccacggagcaggcgattgcaacccagcaactagcctgtcgtaacgcgcaagtctgtggcggaaccgactactttgggtgtccgtgtttccttttattacataatggctgcttatggtgacaatcacagattgttgtcataaagcgaattggattggccatccggtgagaattaaaacaattatttacttatttgttggatttgttcctatacacacccaaacaccttgcttgattgaagtaattctgttgataagacaacactattaca

SEQ ID NO: 21106 - DNA, 687 bp, synthetic construct
  source 1..687: mol_type = other DNA
ttggggttgttcccactccaagggcccacgtggcggctagtactctggtacttgggtacctttgtacgcctgttttatctcccttcccaatgtaatttagaagctcttaaatcaaggctcaataggtggggcgcaaaccagcgctctcatgagcaagtactcctgtctccccggtgtggttgtataaactgttcccacggttgaaaacaacctatccgttatccgctatagtacttcgagaaacctagtatcacctttggattgttgacgcgttgcgctcagcacactaacccgtgtgtagcttgggtcgatgagtctggacacaccccactggcgacagtggtccaggctgcgttggcggcctactcatggtgaaaaccatgagacgctagacatgaacaaggtgtgaagagtctattgagctactatagagtcctccggcccctgaatgcggctaatcctaaccatggagcaagtgctcacaggccagtgagttgcttgtcgtaatgcgcaagtccgtggcggaaccgactactttgggtgtccgtgtttcactttttacttttatgactgcttatggtgacaatttgatattgttaccatttagcttgtcaaattaattgcaaaagatcctaaatctcactcaccaactttcattttgacaaccttgatttgaaaattttaata

SEQ ID NO: 21107 - DNA, 704 bp, synthetic construct
  source 1..704: mol_type = other DNA
actgggcgctagcacactggtatcacggtacctttgtgcgcctgttttattcaccctgaccccaaagcaacgtagaagcatgccaccaaaggtcaataggcgatccagtactccaactgggttatgaccaagcacttctgttaccccggactgagtaccaataagctgctcacgcggctgaaggggaaagcgttcgtcacccgaccaattacttcgagaaacctagtaccaccatgaaagttgcgcagcgtttcgctcagcacaaccccagtgtagatcaggctgatgagtcaccgcattccccacgggcgaccgtggcggtggctgcgttggcggcctgcccatggggcaacccatgggacgcttcaatacagacatggtgtgaagagtctattgagctaattggtggtcctccggcccctgaatgcggctaatcctaactgcggagcagatacccacgcaccagtgggcagtctgtcgtaatgggtaactctgcagcggaaccgactactttgggtgtccgtgtttccttttattttatactggctgcttatggtgacaattgatagattgttaccatatagctattggattggccatccagtgacaagcagagctatcatctacctgtttgttggttttgttccattgaattttaaggttctaaaaactattgattttatcctagcactcaatacagcaaa

SEQ ID NO: 21108 - DNA, 670 bp, synthetic construct
  source 1..670: mol_type = other DNA
tccaagggcccacgtggcggctagtactctggtacttcggtacctttgtacgcctgttttatctcccttcccaatgtaatttagaagcttttaaatcaaggctcaataggtggggcgcaaaccagcgctctcatgagcaagcactcctgtctccccggtgtggttgtataaactgttcccacggttgaaaacaacctatccgttatccgctatagtacttcgagaaacctagtatcacctttggattgttgacgcgttgcgctcagcacactaacccgtgtgtagcttgggtcgatgagtctggacataccccactggcgacagtggtccaggctgcgttggcggcctactcatggtgaaaaccatgagacgctagacatgaacaaggtgtgaagagtctattgagctactatagagtcctccggcccctgaatgcggctaatcctaaccatggagcaagtgctcacaggccagtgagttgcttgtcgtaatgcgcaagtccgtggcggaaccgactactttgggtgtccgtgtttcactttttacttttatgactgcttatggtgacaatttgatattgttaccatttagctgtcaaattaattgcaaaagatcttaagtcttacttaccaatttgcattttgataaccttgatttgaaaattttaata

SEQ ID NO: 21109 - DNA, 697 bp, synthetic construct
  source 1..697: mol_type = other DNA
taaaacagctttggggttgttcccactccaagggcccacgtggcggctagtactctggtacttcggtacctttgtacgcctgttttatctcccttcccaatgtaatttagaagctcttaaatcaaggctcaataggtggggcgcaaaccagcgctctcatgagcaagcacttctgtctccccggtgtggttgtataaactgttcccacggttgaaaacaacctatccgttatccgctatagtacttcgagaaacctagtatcacctttggattgttgacgcgttgcgctcagcacactaacccgtgtgtagcttgggtcgatgagtctggacataccccactggcgacagtggtccaggctgcgttggcggcctactcatggtgaaaaccatgagacgctagacatgaacaaggtgtgaagagtctattgagctactatagagtcctccggcccctgaatgcggctaatcctaaccatggagcaagtgctcacaggccagtgagttgcttgtcgtaatgcgcaagtccgtggcggaaccgactactttgggtgtccgtgtttcactttttacttttatgactgcttatggtgacaatttgatattgttaccatttagcttgtcaaattaattgcaaaagatcctaaatcttacttaccaacttgcattttgacaatcttgatttgaaaattttaata

SEQ ID NO: 21110 - DNA, 684 bp, synthetic construct
  source 1..684: mol_type = other DNA
gtcggtgtcccactccaacagaccacgtggcggctagtactctggtacttcggtacctttgtacgcctgttttatctcccttcccaatgtaatttagaagctcttaaatcaaggctcaataggtggggcgcaaaccagcgctctcatgagcaagcactcctgtctccccggtgtggttgcataaactgttcccacggttgaaaacaacctatccgttatccgctatagtacttcgagaaacctagtatcacctttggattgttgacgcgttgcgctcagcacactaacccgtgtgtagcttgggtcgatgagtctggacataccccactggcgacagtggtccaggctgcgttggcggcctactcatggtgaaaaccatgagacgctagacatgaacaaggtgtgaagagtctattgagctactatagagtcctccggcccctgaatgcggctaatcctaaccatggagcaagtgctcacaggccagtgagttgcttgtcgtaatgcgcaagtccgtggcggaaccgactactttgggtgtccgtgtttcactttttacttttatgactgcttatggtgacaatttgatattgttaccatttagcttgtcaaattaattgcaaaagatcctaaatcttacttaccaacttgcattttaataaccttgatttgaaaattttaata

SEQ ID NO: 21111 - DNA, 666 bp, synthetic construct
  source 1..666: mol_type = other DNA
ggctagtactctggtatttcggtacctttgtacgcctgttttatctccctccccaatgtaacttagaagctttcaaatcaaagctcaataggtggagcgcaaaccagcgcttccgtgagcaagcactcctgtttccccggtgcggctgtatagactgttcccacggttgaaaacagcctatccgttatccgctatagtacttcgagaaacctagtatcacctttggattgttgatgcgttgcgctcagcacactaacccgtgtgtagcttgggtcgatgagtctggacacaccccactggtgacagtggtccaggctgcgttggcggcctactcatggtgaaaaccatgagacgctagacatgaacaaggtgtgaagagtctattgagctactatagagtcctccggcccctgaatgcggctaatcttaaccatggagcaagtgctcacaaaccagtgagttgcttgtcgtaatgcgtaagtccgtggcggaaccgactactttgggtgtccgtgtttcactttttacttttatgactgcttatggtgacaatttgatattgttgccatttagctagtcaaattaatcacataaaaactttgaatcctatctaacaattcacatttggatagcttcattttgaggattttaaacctatttacaaag

SEQ ID NO: 21112 - DNA, 678 bp, synthetic construct
  source 1..678: mol_type = other DNA
gggcccacgtggcggctagtactctggtatttcggtacctttgtacgcctgttttatctccctccccaatgtaacttagaagctttcaaatcaaagctcaataggtggagcgcaaaccagcgcttccgtgagcaagtactcctgtttccccggtgcggttgtatagactgttcccacggttgaaaacaacctatccgttatccgctatagtacttcgagaaacctagtatcacctttggattgttgatgcgttgcgctcaacacactaacccgtgtgtagcttgggtcgatgagtctggacataccccactggtgacagtggtccaggctgcgttggcggcctactcatggtgaaaaccatgagacgctagacatgaacaaggtgtgaagagtctattgagctactatagagtcctccggcccctgaatgcggctaatcttaaccatggagcaagtgctcacaagccagtgagttgcttgtcgtaatgcgcaagtccgtggcggaaccgactactttgggtgtccgtgtttcactttttacttttatgactgcttatggtgacaatttaatattgttaccattcagctagtcgaaataatcgcataaaactttaaatcctatctaacaattcacatttggatagtttcattttgaggactttaaacctgcttacaaag

SEQ ID NO: 21113 - DNA, 670 bp, synthetic construct
  source 1..670: mol_type = other DNA
tccaagggcccacgtggcggctagtactctggtacttcggtacctttgtacgcctgttttatctcccttcccaatgtaatttagaagcttttaaatcaaggctcaataggtggggcgcaaaccagcgctctcatgagcaagcactcctgtctccccggtgtggttgtataaactgttcccacggttgaaaacaacctatccgttatccgctatagtacttcgagaaacctagtatcacctttggattgttgacgcgttgcgctcagcacactaacccgtgtgtagcttgggtcgatgagtctggacataccccactggcgacagtggtccaggctgcgttggcggcctactcatggtgaaaaccatgagacgctagacatgaacaaggtgtgaagagtctattgagctactatagagtcctccggcccctgaatgcggctaatcctaaccatggagcaagtgctcacaggccagtgagttgcttgtcgtaatgcgcaagtccgtggcggaaccgactactttgggtgtccgtgtttcactttttacttttatgactgcttatggtgacaatttgatattgttaccatttagctgtcaaattaattgcaaaagatcctaagtcttacttaccaatttgcattttgataaccttgatttgaaaattttaata

SEQ ID NO: 21114 - DNA, 731 bp, synthetic construct
  source 1..731: mol_type = other DNA
ttgtgggttgcacccacccacagggcccactgggcgctagcacactggtattacggtacctttgtgcgcctgttttatacacccttacccaacgtaatatagaagcaaagcaacaaggtcaatagagagcccagtgagccaactgggtcaagaccaagcacttctgtttccccggaccgagtatcaataggctgcttacgcggctgaaggagaaaacgttcgttacccggctaactacttcaaaaaacctagtaacgccatggaagttgcgaaccgtttcactcggcacttccccagtgtagatcaggtcgatgagtcaccgcattccccacgggtaaccgtggcggtggctgcgttggcggcctgcctatggggcaacccataggacgcttcaatatggacatggtgtgaagagtctattgagctagttagtagtcctccggcccctgaatgcggctaatcctaactgcggagcacatgcccccaacccaggaggtggtgtgtcgtaatgggtaactctgcagcggaaccgactactttgggtgtccgtgtttccttttatcccaatgttggctgcttatggtgacaattgaaagattgttaccatatagctattggattggccacccggtgactaacagagcaattgtatacctattcattggttacgttccattaaatctcaaggaattaacgactctcaattacattttgctcttgaattctgcaaa

SEQ ID NO: 21115 - DNA, 657 bp, synthetic construct
  source 1..657: mol_type = other DNA
cacaccctccccaaagatgtaacttagaagcactttccaagtggtcattaggcagctcagcacaccagctgagtccagaccaagcacttctgttaccccggaccgagtatcaataggctgcttgcgcggctgaaagagaaaacgttcgttacccggccaattacttcgagaaacctagtaccaccatgaaagttgcgcggcgtttcgttccgcacaaccccagtgtagatcaggtcgatgagtcaccgcgttcctcacgggcgaccgtggcggtggctgcgctggcggcctgcccatgggacaacccatgggacgcttcaatgctgacatggtgtgaagagtctattgagctaattggtagtcctccggcccctgaatgcggctaatcctaactgcggagcagatacccacaaaccagtgggcagtctgtcgtaacgggtaactctgcagcggaaccgactactttgggtgtccgtgtttccttttattcatacattggctgcttatggtgacaattgagagattgttaccatatagctattggattggccatccggtgtctaacagagcaattgtatacctatttataggttttataccattgaattacaaagtcttagagactctgaatcttattataacacttaacacagcaaa

SEQ ID NO: 21116 - DNA, 784 bp, synthetic construct
  source 1..784: mol_type = other DNA
cacccaagggcccaacgggcgccagtacactggtacgccagtaccctggtattacggtaccattgtacgccagtacctttgtacgcctatttgtacccctcccccatgtaaccttagaagcttaaatatacaatgaccaataggagtccaacacccagttggattgcggtcaagcacttctgtctccccggacctagtagtgataggctgtacccacggccgaagatgaacccgtccgttatccggccagctacttcgagaagcctagtagcatcaaagatctgtcttggcgtttcgctcagcgcattccccccgcgtagatcgggctgatgggtctccgcattccccacgggcgaccgtggcggaggccgcgtggcggcccgcctatggcgaaagccataggacgccatttcagtgacagggtgtgaagagcctattgagctagttggtagtcctccggcccctgaatgcggctaatcctaaccactgagcgtccaccaacaaaccagttgggagggcgtcgtaacgggtaactcggtggcggaaccgactactttgggtgtccgtgtttcctgttgatcctatattggctgcttatggtgacaacgataagttgttatcataaagcttttgggttggccacctggaaaaaattatcagtgtttgatattgttcggctctcacgcctaccaacaaaacaagctctatatttattaatttcattttatccattggaggatattaccgaattccatctacaacttttgctcactttatcagcaaa

SEQ ID NO: 21117 - DNA, 684 bp, synthetic construct
  source 1..684: mol_type = other DNA
tattgcggtacctttgtgcgcctgttttatggcccccccccagttggaacttagaagtgaagcctctcgaccaatagtgggcgtggcacaccagccacgtcttggtcaagcacatctgtttccccggactgagtatcaataaactgctcgcgcggttgaaggagaaaacgttcgttacccggctaactacttcgggaaacccagtagtatcatggaaattgcgaggcgtttcgctcagcactccccccgtgtagatcaggtcgatgagtcactgcaccccccacgggtgaccgtggcagtggctgcgttggcggcctgcctatggggtgacccataggacgcttcaaaatggacatggtgcgaagagtctactgagctagttagtagtcctccggcccctgaatgcggctaatcctaaccgcggagcaagtgtccacaaaccagtgggttgcttgtcgtaatgggtaactctgcggcggaaccgactactttgggtgtccgtgtttccttttatcttttattatggctgcttatggtgacaattgagagattgttaccatatagctattggattggccatccggtgaacaacagagcgatcatttacctctttgttggtttcgttccattgagtcccaaagtttttacgacactcaaatttattctcctacttaacaaagcaaa

SEQ ID NO: 21118 - DNA, 677 bp, synthetic construct
  source 1..677: mol_type = other DNA
ggcccacgtggcggctagtactctggtacttcggtacctttgtacgcctgttttatctccctccccaatgtaacttagaagctttcaaatcaaagctcaataggtggaacgcaagccagcgcttccgtgagcaagcactcctgtttccccggtgcggttgtatagactgttcccacggttgaaaacaacctatccgttatccgctatagtacttcgagaaacctagtatcacctttggattgttgatgcgttgcgctcagcacactaacccgtgtgtagcttgggtcgatgagtctggacataccccactggtgacagtggtccaggctgcgttggcggcctactcatggtgaaaaccatgagacgctaaacatgaacaaggtgtgaagagtctattgagctactatagagtcctccggcccctgaatgcggctaatcttaaccatggagcaagtgctcacaaaccagtgagttgcttgtcgtaatgcgcaagtccgtggcggaaccgactactttgggtgtccgtgtttcactttttacttttatgactgcttatggtgacaatttaatattgttaccatttagctagtcatattaatcacataaaactttaaattctatctaataattcacatttggatagcttcattttgaggactttaaacctatttacaaaa

SEQ ID NO: 21119 - DNA, 710 bp, synthetic construct
  source 1..710: mol_type = other DNA
ttaaaacagccttggggttgttcccaccccaagggcccacgtggcggctagtactctggtatttcggtacctttgtacgcctgttttatatccctccccaatgtaatttagaagctttcaaatcaaagctcaataggtggagcgcaagccagcgcttccgtgagcaagcacttctgtttccccggtgcggttgtatagactgttcccacggttgaaaacgacctatccgttatccgctatagtacttcgagaaacctagtatcacctttggattgttgatgcgttgcgctcaacacactaacccgtgtgtagcttgggtcgatgagtctggacgtaccccactggtgacagtggtccaggctgcgttggcggcctactcatggtgaaaaccatgagacgctagacatgaacaaggtgtgaagagtctattgagctactatagagtcctccggcccctgaatgcggctaatcttaaccatggagcaagtgctcacaaaccagtgagttgcttgtcgtaatgcgcaagtccgtggcggaaccgactactttgggtgtccgtgtttcactttttacttttatgactgcttatggtgacaatttaatattgttaccattcagctagtcgaaataatcacataaaactttaaatcctatctaataattcacatttggatagtttcatttcgaggactttaaacctacttacaaag

SEQ ID NO: 21120 - DNA, 623 bp, synthetic construct
  source 1..623: mol_type = other DNA
aaaagttcaataggagggggtacaaaccagtaccaccacgaacaagcacttctgtctccccggtgacattgcatagactgtccccacggttgaaagcaattgatccgttacccgctcttgtacttcgagaagcctagtaccatcttggaatcatcgatgcgttgcgctccacactcagtcccagagtgtagcttaggctgatgagtctggacattcctcaccggcgacggtggtccaggctgcgttggcggcctacctgtggcccaaagccacaggacgctagatgtgaacaaggtgtgaagagcctattgagctataagagagtcctccggcccctgaatgcggctaatcccaaccacggatcaagggtgcacgaaccagtgtataccttgtcgtaacgcgcaagtccgtggcggaaccgactactttgggtgaccgtgtttccttttattatctcaatggctgcttatggtgacaatcattgattgttatcataaagcgaattggactggccatccggtgaaagtgaaacatattgtttgcctcctcgttgggtctacttcaaccaacctttacttacaatcttaccactacagttttgctggttagaagtgtgtttcacg

SEQ ID NO: 21121 - DNA, 688 bp, synthetic construct
  source 1..688: mol_type = other DNA
ttatattacggtacccttgtgcgcctgttttatctaccccctccccaatgtaacgtagaagcacaaatcaagtggtcaatagatggcccagtatgccaactgggtttagaccaagcacttctgttaccccggactgagtatcaataagctgctcacgcggctgaaggagaaaacgttcgttacccggccagctacttcgagaagcctagtaccaccatgaaggatgcgcagtgtttcgttcagcacaaccccagtgtagatcaggtcgatgagtcaccgcaatccccacgggcgaccgtggcggtggctgcgctggcggcctgcccatggggttacccatgggacgcttcaattccgacatggtgcgaagagtctattgagctagttggtagtcctccggcccctgaatgcggctaatcccaactgcggagcaagcacccacaaaccagtgggctgtttgtcgtaatgggcaactctgcagcggaaccgactactttgggtgtccgtgtttccttttattcctacactggctgcatatggtgacaattgaaagattgttgccatatagctattggattggccatccggtgacaaacagagctattatctacttgtttgtcggctttgtaccgttgaattttaaagttgtaaaaaccctaaccttcatcttaacactcaacacagcaaa

SEQ ID NO: 21122 - DNA, 633 bp, synthetic construct
  source 1..633: mol_type = other DNA
cacccacagggcccactgggcgctagtacactggtatcacggtacctttgtgcgcctgtttaacccaccttccccaaacgtaacttagaagcacaactcaaatgatcattagacggctcagtatgccaactgggtctcgatcaagcacttctgttaccccggactgagtaccaataggctgctcacgcggctgaaggggaaaccgttcgttacccgaccaactacttcgagaaacctagtaccaccatgaaagttgcgcagcgtttcgctccgcacaaccccagtgtagatcaggccgatgagtcaccgcaaaccccacgggcgaccgtggcggtggctgcgctggcggcctgcccatgggacaactcatgggacgctacaatactgacatggtgtgaagagtctattgagctagttggtagtcctccggcccctgaatgcggctaatcctaactgtggagcagatacccacgcaccagtgggcagtctgtcgtaatgggcaactccgcagcggaaccgactactttgggtgtccgtgtttcttttattcctacgctggctacatatggtgacgatttgtaccataaagccttaaccgctcctcaacaccgtcataacacttaacacgctgag

SEQ ID NO: 21123 - DNA, 666 bp, synthetic construct
  source 1..666: mol_type = other DNA
ggcccatgtggcggctagtactctggtacttcggtacctttgtacgcctgttttatctcccttcccaatgtaatttagaagctcttaaatcaaggctcaataggtggggcgcaaaccagcgctctcatgagcaagcactcctgtctccccggtgtggttgtataaactgttcccacggttgaaaacaacctatccgttatccgctatagtacttcgagaaacctagtatcacctttggattgttgacgcgttgcgctcagcacactaacccgtgtgtagcttgggtcgatgagtctggacataccccactggcgacagtggtccaggctgcgttggcggcctactcatggtgaaaaccatgagacgctagacatgaacaaggtgtgaagagtctattgagctactatagagtcctccggcccctgaatgcggctaatcctaaccatggagcaagtgctcacaggccagtgagttgcttgtcgtaatgcgcaagtccgtggcggaaccgactactttgggtgtccgtgtttcactttttacttttatgactgcttatggtgacaatttgatattgttaccatttagcttgtcaaattaattgcaaaagatcctaaatcttacttaccaacttgtattttgacaaccttgatttgaaaatttttaata

SEQ ID NO: 21124 - DNA, 791 bp, synthetic construct
  source 1..791: mol_type = other DNA
tcccacccacagggcccactgggcgctagtacactggtatgccagtactctggtattacggtaccactgtacgccagtacctttgtacgcctgttttatatccctttcccaaacgtaaccttagaagtttaagtaaacaaagaccaataggagtccaacatccagttggattgcggtcaagcacttctgtttccccggacctagtagtgataggctgtacccacggccgaagatgaacccgtccgttatccggccagctacttcgagaagcctagtagcatcaaagatctgtcttggcgtttcgctcagcgcgttccccccgcgtagatcgggtcgatgggtctccgcatcccccacgggcgaccgtggcggaggccgcgtggcggcccgcctatggcgaaagccataggacgccatttcagtgacagggtgtgaagagcctattgagctagttggtagtcctccggcccctgaatgcggctaatcctaaccacggagcgtccaccagcaaaccagctgggagggcgtcgtaacgggtaactctgtggcggaaccgactactttgggtgtccgtgtttccttttgatcctattgtggctgcttatggtgacaactaacagttgttatcataaagcttttggattggccatccggaaagagttaacagtttgttcgctcattgctttgtcaaagtttcctttgagaaaagcaatctatttgttagtttcattttataaactagaggatatttcaagtgcccatttgaacttgttaattcaactacatcaaac

SEQ ID NO: 21125 - DNA, 637 bp, synthetic construct; identical to SEQ ID NO: 71
  source 1..637: mol_type = other DNA

SEQ ID NO: 21126 - DNA, 633 bp, synthetic construct
  source 1..633: mol_type = other DNA
cacccacagggcccactgggcgctagtacactggtatcacggtacctttgtgcgcctgtttaacccaccttccccaaatgtaacttagaagcacaactcaaatgatcattagacggctcagtatgccaactgggtctcgatcaagcacttctgttaccccggactgagtaccaataggctgctcacgcggctgaaggggaaaccgttcgttacccgaccaactacttcgagaaacctagtaccaccatgaaagttgcgcagcgtttcgctccgcacaaccccagtgtagatcaggccgatgagtcaccgcaaacctcacgggcgaccgtggcggtggctgcgctggcggcctgcccatgggacaactcatgggacgctacaatactgacatggtgtgaagagtctattgagctagttggtagtcctccggcccctgaatgcggctaatcctaactgtggagcagatacccacgcaccagtgggcagtctgtcgtaatgggcaactccgcagcggaaccgactactttgggtgtccgtgtttcttttattcctgcgctagctacatatggtgacgatttgtaccataaagccttaaccgctcctcaacaccgtcataacacttaacacgctgag

SEQ ID NO: 21127 - DNA, 660 bp, synthetic construct
  source 1..660: mol_type = other DNA
gtactctggtacttcggtacctttgtacgcctgttttatctccctccccaatccacctattgagctttgatttgaaagctcaataggtggagtgcaagccagcgcttccgtgagcaagtacttctgtttccccggtgcggttgtatagactgttcccacggttgaaaacaacctatccgttatccgctatagtacttcgagaaacctagtatcacctttggattgttgatgcgttgcgctcaacacactaacccgtgtgtagcttgggtcgatgagtctggacataccccactggtgacagtggtccaggctgcgttggcggcctactcatggtgaaaaccatgagacgctaaacatgaacaaggtgtgaagagtctattgagctactatagagtcctccggcccctgaatgcggctaatcttaaccatggagcaagtgctcacaaaccagtgagttgcttgtcgtaatgcgcaagtccgtggcggaaccgactactttgggtgtccgtgtttcactttttacttttatgactgcttatggtgacaatttaatattgttaccattcagctagtcgaaataatcgcataaaactttaaatcctatctaacagttcacatttggatagtttcattttgaggactttaaacctacttataaag

SEQ ID NO: 21128 - DNA, 675 bp, synthetic construct
  source 1..675: mol_type = other DNA
ccactccaagggcccacgtggcggctagtactctggtacttcggtacctttgtacgcctgttttatctcccttcccaatgtaacttagaagttcttaaatcaatgctcaataggtggggcgcaaaccagcgctctcatgagcaagcactcctgtctccccggtgaggttgtataaactgttcccacggttgaaaacaacctatccgttatccgctatagtacttcgagaaacctagtaccacctttggattgttgacgcgttgcgctcagcacactaacccgtgtgtagcttgggtcgatgagtctggacatacctcactggcgacagtggtccaggctgcgttggcggcctactcatggtgaaagccatgagacgctagacatgaacaaggtgtgaagagtctattgagctactatagagtcctccggcccctgaatgcggctaatcctaaccatggagcaagtgctcacaggccagtgagttgcttgtcgtaatgcgcaagtccgtggcggaaccgactactttgggtgtccgtgtttcactttttacttttatgactgcttatggtgacaatttgatattgttaccatttagcttgtcaaatcaattgcaaaagatcctaaatcttatttatcaacttgcatcttgataactttaatttgaaaattttaaca

SEQ ID NO: 21129 - DNA, 672 bp, synthetic construct
  source 1..672: mol_type = other DNA
accccaaggcccacgtggcggctagtactctggtacttcggtacctttgtacgcctgttttatctcccttcccaatgtaacttagaagttcttaaatcaatgctcaataggtggggcgcaaaccagcgctttcatgagcaagcactcctgtctccccggtgaggttgtataaactgttcccacggttgaaaacaacctatccgttatccgctatagtacttcgagaaacctagtaccacctttggattgttgacgcgttgcgctcagcacactaacccgtgtgtagcttgggtcgatgagtctggacatacctcactggcgacagtggtccaggctgcgttggcggcctactcatggtgaaagccatgagacgctagacatgaacaaggtgtgaagagtctattgagctactatagagtcctccggcccctgaatgcggctaatcctaaccatggagcaagtgctcacaggccagtgagttgcttgtcgtaatgcgcaagtccgtggcggaaccgactactttgggtgtccgtgtttcactttttacttttatgactgcttatggtgacaatttgatattgttgccatttagcttgtcaaatcaattgcaaaagatcctaaatcttatttatcaacttgcatcttgataactttaatttgaaaattttaaca

SEQ ID NO: 21130 - DNA, 791 bp, synthetic construct
  source 1..791: mol_type = other DNA
gttcccacccacagggcccactgggcgccagtacactggtatgctttacctcggtattgcggtaccgttgtatacagtacctttgtacgcctgttttaaatcccctccccaaatgtaaccttagaagtttaagtaaactcagaccaataggagtccaacacccagttggattacggtcaagcacttctgtctccccggacctagtagtgataggctgtacccacggccgaagatgaacccgtccgttatccggccagctacttcgagaagcctagtagcatcaaaaatctgtcttggcgtttcgctcagcgcgttccccccgcgtagatcgggctgatgggtctccgcattccccacgggcgaccgtggcggaggccgcgtggcggcccgcctatggcgaaagccataggacgccatttcagtgacagggtgtgaagagcctattgagctagttggtagtcctccggcccctgaatgcggctaatcctaaccacggagcgtccgccaacaatccagttggtagggcgtcgtaacgggtaactctgtggcggaaccgactactttgggtgtccgtgtttccttttgatcctattttggctgcttatggtgacaacgataagttgttatcataaagcttttgggttggccacctggaaaaagatatcagtgtttgatattgttcggctctcacgcctaccaacaaaacaagctctatatttattaatttcattttatccattggaggatattaccgaattccatctacaacttttgctcactttatcagcaaa

SEQ ID NO: 21131 - DNA, 663 bp, synthetic construct
  source 1..663: mol_type = other DNA
ccccacgtggcggctagtactctggtacttcggtacctttgtacgcctgttttatctcccttcccaatgtaatttagaagcttttaaatcaaagctcaataggtggggcgcaaaccagcgctctcatgagcaagcactcctgtctccccggtgtggttgtataaactgttcccacggttgaaaacaacctatccgttatccgctatagtacttcgagaaacctagtatcacctttggattgttgacgcgttgcgctcagcacactaacccgtgtgtagcttgggtcgatgagtctggacataccccactggcgacagtggtccaggctgcgttggcggcctactcatggtgaaaaccatgagacgctagacatgaacaaggtgtgaagagtctattgagctactatagagtcctccggcccctgaatgcggctaatcctaaccatggagcaagtgctcacaggccagtgagttgcttgtcgtaatgcgcaagtccgtggcggaaccgactactttgggtgtccgtgtttcactttttacttttatgactgcttatggtgacaatttgatattgttaccatttagctgtcaaattaattgcaaaagatcctaagtcttacttaccaatttgcattttgataaccttgatttgaaaattttaata

SEQ ID NO: 21132 - DNA, 665 bp, synthetic construct
  source 1..665: mol_type = other DNA
gggcccacgtggcggctagtactctggtacttcggtacctttgtacgcctgttttatctcccttcccaatgtaatttagaagcttttaaatcaaggctcaataggtggggcgcaaaccagcgctctcatgagcaagcactcctgtctccccggtgtggttgtataaactgttcccacggttgaaaacaacctatccgttatccgctatagtacttcgagaaacctagtatcacctttggattgttgacgcgttgcgctcagcacactaacccgtgtgtagcttgggtcgatgagtctggacataccccactggcgacagtggtccaggctgcgttggcggcctactcatggtgaaaaccatgagacgctagacatgaacaaggtgtgaagagtctattgagctactatagagtcctccggcccctgaatgcggctaatcctaaccatggagcaagtgctcacaggccagtgagttgcttgtcgtaatgcgcaagtccgtggcggaaccgactactttgggtgtccgtgtttcactttttacttttatgactgcttatggtgacaatttgatattgttaccatttagctgtcaaattaattgcaaaagatcctaagtcttacttaccaatttgcattttgataaccttgatttgaaaattttaata

SEQ ID NO: 21133 - DNA, 609 bp, synthetic construct
  source 1..609: mol_type = other DNA
gggggtacaaaccagcaccaccacgaacaagcacttctgtttccccggtgatgttgcataaactgtacccacggtcgaaagcgactgatccgttatccgctcttgtacttcgagaagcctagtatcatcttggaatctccgatgcgttgcgttcagcactctaccccgagtgtagcttaggccgatgagtctggacattcctcaccggcgacggtggtccaggctgcgttggcggcctacctgtggcccaaagccacaggacgctagtagtgaacaaggtgtgaagagcctattgagctacaagtgattcctccggcccctgaatgcggctaatcccaaccacagagcaagtgctcacactccagtgagtagcttgtcgtaacgggtaactctgtggcggaaccgactactttgggtgtccgtgtttccttttattctcattatggctgcttatggtgacaatcatagattgttatcataaagcgatttggattggccatccggtgaaagttaaatacattatttatctttttgttggatttactccgattaatttctttacatacaaacttattactgcaaccatattaattagaaacatatatcaca

SEQ ID NO: 21134 - DNA, 670 bp, synthetic construct
  source 1..670: mol_type = other DNA
ccaagggcccacgtggcggctagtactctggtacttcggtacctttgtacgcctgttttatctccccccccaatgtaatttagaagctcttaaatcaaggctcaataggtggggcgcaaaccagcgctctcatgagcaagcactcctgtctccccggtgcggttgtataaactgttcccacggttgaaaacgacctatccgttatccgctatagtacttcgagaaacctagtatcacctttggattgttgacgcgttgcgctcagcacactaacccgtgtgtagcttgggtcgatgagtctggacataccccactggcgacagtggtccaggctgcgttggcggcctactcatggtgaaaaccatgagacgctagacatgaacaaggtgtgaagagtctattgagctactatagagtcctccggcccctgaatgcggctaatcctaaccatggagcaagtgcccacagaccagtgagttgcttgtcgtaatgcgcaagtccgtggcggaaccgactactttgggtgtccgtgtttcactttttacttttatgactgcttatggtgacaatttgatattgttaccatttagcttgtcaaattgattacaaaagatcctaaatcttgcttaccaatttgcattttggcaaccctgatttgaaaattttaata

SEQ ID NO: 21135 - DNA, 700 bp, synthetic construct
  source 1..700: mol_type = other DNA
ttaaacagctctggggttgttcccactccaagggcccacgtggcggctagtactctggtacttcggtacctttgtacgcctgttttatctcccttcccaatgcaatttagaagctctcaaatcaaggctcaataggtggggcgcaaaccagcgctctcatgagcaagcactcctgtctccccggtgtggttgtataaactgttcccacggttgaaaacaacctatccgttatccgctatagtacttcgagaaacctagtatcacctttggattgttgacgcgttgcgctcagcacactaacccgtgtgtagcttgggtcgatgagtctggacataccccactggcgacagtggtccaggctgcgttggcggcctactcatggtgaaaaccatgagacgctagacatgaacaaggtgtgaagagtctattgagctactatagagtcctccggcccctgaatgcggctaatcctaaccatggagcaagtgctcacaggccagtgagttgcttgtcgtaatgcgcaagtccgtggcggaaccgactactttgggtgtccgtgtttcactttttacttttatgactgcttatggtgacaatttgatattgttaccatttagcttgtcaaattaattacaaaagatcccaaatcttacttaccaacttgcattttgacaaccttggtttgaaaattttaataata

SEQ ID NO: 21136 - DNA, 640 bp, synthetic construct
  source 1..640: mol_type = other DNA
acgtaatatagaagcaaaacaacaaggtcaatagagagcccagtgagccaactgggtcgagaccaagcacttctgtttccccggaccgagtatcaataggctgcctacgcggctgaaggagaaaacgttcgttacccggctaactacttcgaaaaacctagtaacgccatggaagttgcgaaacgtttcgctcggcacttccccagtgtagatcaggtcgatgagtcaccgcattccccacgggcgaccgtggcggtggctgcgttggcggcctgcctatggggcaacccataggacgcttcaatatggacatggtgtgaagagtctattgagctagttagttgtcctccggcccctgaatgcggctaatcctaactgcggagcacatgcccccaacccaggaggtggtgtgtcgtaatgggtaactctgcagcggaaccgactactttgggtgtccgtgtttccttttatcccaatattggctgcttatggtgacaattgaaagattgttaccatatagctattggattggccatccggtgactaacagagctattgtatacctattcattgggtacgttccattaaatcttaaggaattaacgactctcaattacattttgctcttaaattctgcaaa

SEQ ID NO: 21137 - DNA, 685 bp, synthetic construct
  source 1..685: mol_type = other DNA
caccccaagggcccacgtggcggctagtactctggtatttcggtacctttgtacgcctgttttatctcccttcccaatgtaacttagaagttttcaaatcgaagctcagtaggtggggcgcaaaccagcgctttcatgagcaagcacttctgtttccccggtgcggttgtatagactgtttccacggttgaaaacaacttatccgttatccgctatagtacttcgagaaacctagtatcacctttggattgttgatgcgttgcgctcagcacactaacccgtgtgtagcttgggctgatgagtctggacgtaccccactggtgacagtggtccaggctgcgttggcggcctactcatggtgaaaaccatgagacgctagacatgaacaaggtgtgaagagtctattgagctactatagagtcctccggcccctgaatgcggctaatcttaaccatggagcaagtgctcacaagccagtgagttgcttgtcgtaacgcgcaagtccgtggcggaaccgactactttgggtgtccgtgtttcactttttacctttatgactgcttatggtgacaatttaatattgttaccatttagcttgtcggattaatcgcgtgaaatcctaaatcttgttcaccaatttgcattcggatagcttcatttgaaaattctaaactcattcacaaag

SEQ ID NO: 21138 - DNA, 678 bp, synthetic construct
  source 1..678: mol_type = other DNA
tcccactccaagggcccacgtggcggctagtactctggtacttcggtacctttgtacgcctgttttatctcccttcccaatgtaacttagaagttcttaaatcaatgctcaataggtggggcgcaaaccagcgctctcatgagcaagcactcctgtctccccggtgaggttgtataaactgttcccacggttgaaaacaacctatccgttatccgctatagtacttcgagaaacctagtaccacctttggattgttgacgcgttgcgctcagcacactaacccgtgtgtagcttgggtcgatgagtctggacatacctcactggcgacagtggtccaggctgcgttggcggcctactcatggtgaaagccatgagacgctagacatgaacaaggtgtgaagagtctattgagctactatagagtcctccggcccctgaatgcggctaatcctaaccatggagcaagtgctcacaggccagtgagttgcttgtcgtaatgcgcaagtccgtggcggaaccgactactttgggtgtccgtgtttcacttttttacttttatgactgcttatggtgacaatttgatattgttaccatttagcttgtcaaatcaattgcaaaagatcctaaatcttatttatcaacttgcatcttgataactttaatttgaaaattttaaca

SEQ ID NO: 21139 - DNA, 676 bp, synthetic construct
  source 1..676: mol_type = other DNA
tcccactccaagggcccacgtggcggctagtactctggtacttcggtacctttgtacgcctgttttatctcccttcccaatgtaacttagaagctcttaaatcaaggctcaataggtggagtgcaaaccagcactcttatgagcaagtactcctgtttccccggtgcggttatataaactgttcccacggttgaaaataacctatccgttatccgctatagtacttcgagaaacctagtatcacctttggattgttgacgcgttgcgctcagcacactaacccgtgtgtagcttgggtcgatgagtctggacataccccactggcgacagtggtccaggctgcgttggcggcctactcatggtgaaaaccatgagacgctagacatgaacaaggtgtgaagagtctattgagctactatagagtcctccggcccctgaatgcggctaatcctaaccatggagcaagtgctcacagaccagtgagttgcttgtcgtaatgcgcaagtccgtggcggaaccgactactttgggtgtccgtgtttcactttttacccttatgactgcttatggtgacaatttgatattgttaccatttagcttgtcaaatcaattgcgaaagatcctaaatcttatttatcaacttgcattttgataactctaatttgaagatttgata

SEQ ID NO: 21140 - DNA, 676 bp, synthetic construct
  source 1..676: mol_type = other DNA
tcccactccaagggcccacgtggcggctagtactctggtacttcggtacctttgtacgcctgttttatctcccttcccaacgtaacttagaagctcttaaatcaaggctcaataggtggagtgcaaaccagcactcttatgagcaagtactcctgtttccccggtgcggttatataaactgttcccacggttgaaagtaacctatccgttatccgctatagtacttcgagaaacctagtatcacctttggattgttgacgcgttgcgctcagcacactaacccgtgtgtagcttgggtcgatgagtctggacataccccactggcgacagtggtccaggctgcgttggcggcctactcatggtgaaaaccatgagacgctagacatgaacaaggtgtgaagagtctattgagctactatagagtcctccggcccctgaatgcggctaatcctaaccatggagcaagtgctcacagaccagtgagttgcttgtcgtaatgcgcaagtccgtggcggaaccgactactttgggtgtccgtgtttcactttttacccttatgactgcttatggtgacaatttgatattgttaccatttagcttgtcaaatcaattgcgaaagatcctaaatcttatttatcaacttgcattttgataactctaatttgaagatttaata

SEQ ID NO: 21141 - DNA, 678 bp, synthetic construct
  source 1..678: mol_type = other DNA
tcccactccaagggcccacgtggcggctagtactctggtacttcggtacctttgtacgcctgttttatctcccttcccaatgtaacttagaagttcttaaatcaatgctcaataggtggggcgcaaaccagcgctctcatgagcaagcactcctgtctccccggtgaggttgtataaactgttcccacggttgaaaacaacctatccgttatccgctatagtacttcgagaaacctagtaccacctttggattgttgacgcgttgcgctcagcacactaacccgtgtgtagcttgggtcgatgagtctggacatacctcactggcgacagtggtccaggctgcgttggcggcctactcatggtgaaagccatgagacgctagacatgaacaaggtgtgaagagtctattgagctactatagagtcctccggcccctgaatgcggctaatcctaaccatggagcaagtgctcacaggccagtgagttgcttgtcgtaatgcgcaagtccgtggcggaaccgactactttgggtgtccgtgtttcactttttacttttatgactgcttatggtgacaatttgatattgttaccatttagcttgtcaaatcaattgcaaaagatcctaattcttatttatcaacttgcatctcgataactctaatttgaaaatttttaaca

SEQ ID NO: 21142 - DNA, 676 bp, synthetic construct
  source 1..676: mol_type = other DNA
tcccactccaagggcccacgtggcggctagtactctggtacttcggtacctttgtacgcctgttttatctcccttcccaacgtaacttagaagctcttaaatcaaggctcaataggtggagtgcaaaccagcactcttacgagcaagtactcctgtttccccggtgcggttatataaactgttcccacggttgaaagtaacctatccgttatccgctatagtacttcgagaaacctagtatcacctttggattgttgacgcgttgcgctcagcacactaacccgtgtgtagcttgggtcgatgagtctggacataccccactggcgacagtggtccaggctgcgttggcggcctactcatggtgaaaaccatgagacgctagacatgaacaaggtgtgaagagtctattgagctactatagagtcctccggcccctgaatgcggctaatcctaaccatggagcaagtgctcacagaccagtgagttgcttgtcgtaatgcgcaagtccgtggcggaaccgactactttgggtgtccgtgtttcactttttacccttatgactgcttatggtgacaatttgatattgttaccatttagcttgtcaaatcaattgcgaaagatcctaaatcttatttatcaacttgcattttgataactctaatttgaagatttaata

SEQ ID NO: 21143 - DNA, 676 bp, synthetic construct
  source 1..676: mol_type = other DNA
tcccactccaagggcccacgtggcggctagtactctggcacttcggtacctttgtacgcctgttttatctcccttcccaacgtaacttagaagctcttaaatcaaggctcaataggtggagtgcaaaccagcactcttatgagcaagtactcctgtttccccggtgcggttatataaactgttcccacggttgaaagtaacctatccgttatccgctatagtacttcgagaaacctagtatcacctttggattgttgacgcgttgcgctcagcacactaacccgtgtgtagcttgggtcgatgagtctggacataccccactggcgacagtggtccaggctgcgttggcggcctactcatggtgaaaaccatgagacgctagacatgaacaaggtgtgaagagtctattgagctactatagagtcctccggcccctgaatgcggctaatcctaaccatggagcaagtgctcacagaccagtgagttgcttgtcgtaatgcgcaagtccgtggcggaaccgactactttgggtgtccgtgtttcactttttacccttatgactgcttatggtgacaatttgatattgttaccatttagcttgtcaaatcaattgcgaaagatcctaaatcttatttatcaacttgcattttgataactctaatttgaagatttaata

SEQ ID NO: 21144 - DNA, 678 bp, synthetic construct
  source 1..678: mol_type = other DNA
tcccactccaggggcccacgtggcggctagtactctggtacttcggtacctttgtacgcctgtttttatctcccttcccaatgtaacttagaagtttttaaatcaatgctcaataggtggggcgcaaaccagcgctctcatgagcaagcactcctgtctccccggtgaggttgtataaactgttcccacggttgaaaacaacctatccgttatccgctatagtacttcgagaaacctagtaccacctttggattgttgacgcgttgcgctcagcacactaacccgtgtgtagcttgggtcgatgagtctggacataccccactggcgacagtggtccaggctgcgttggcggcctactcatggtgaaagccatgagacgctagacatgaacaaggtgtgaagagtctattgagctactatagagtcctccggcccctgaatgcggctaatcctaaccatggagcaagtgctcacaggccagtgagttacttgtcgtaatgcgcaagtccgtggcggaaccgactactttgggtgtccgtgtttcactttttacttttatgactgcttatggtgacaatttgatattgttaccatttagcttgtcaaatcaattgcaaaagatcctaaatcttatttatcaacttgcatcttgataactttaatttgaaaattttaaca

SEQ ID NO: 21145 - DNA, 699 bp, synthetic construct
  source 1..699: mol_type = other DNA
ttaaaacaagctctggggttgttcccactccaagggcccacgtggcggctagtactctggtacttcggtacctttgtacgcctgttttatctcccttcccaatgtaatttagaagctcttaaatcaaggctcaataggtggggcgcaaaccagcgctctcatgagcaagcactcctgtctccccggtgtggttgcataaactgttcccacggttgaaaacaacctatccgttatccgctatagtacttcgagaaacctagtatcacctttggattgttgacgcgttgcgctcagcacactaacccgtgtgtagcttgggtcgatgagtctggacataccccactggcgacagtggtccaggctgcgttggcggcctactcatggtgaaaaccatgagacgctagacatgaacaaggtgtgaagagtctattgagctactatagagtcctccggcccctgaatgcggctaatcctaaccatggagcaagtgctcacaggccagtgagttgcttgtcgtaatgcgcaagtccgtggcggaaccgactactttgggtgtccgtgtttcactttttacttttatgactgcttatggtgacaatttgatattgttaccatttagcttgtcaaattaattgcaaaagatcctaaatcttacttaccaacttgcattttgataaccttgatttgaaaattttaata

SEQ ID NO: 21146 - DNA, 699 bp, synthetic construct
  source 1..699: mol_type = other DNA
ttaaaacaagctctggggttgttcccactccaagggcccacgtggcggctagtactctggtacttcggtacctttgtacgcctgttttatctcccttcccaatgtaatttagaagctcttaaatcaaggctcaataggtggggcgcaaaccagcgctctcatgagcaagcactcctgtctccccggtgtggttgtataaactgttcccacggttgaaaacaacctatccgttatccgctatagtacttcgagaaacctagtatcacctttggattgttgacgcgttgcgctcagcacactaacccgtgtgtagcttgggtcgatgagtctggacataccccactggcgacagtggtccaggctgcgttggcggcctactcatggtgaaaaccatgagacgctagacatgaacaaggtgtgaagagtctattgagctactatagagtcctccggcccctgaatgcggctaatcctaaccatggagcaagtgctcacaggccagtgagttgcttgtcgtaatgcgcaagtccgtggcggaaccgactactttgggtgtccgtgtttcactttttacttttatgactgcttatggtgacaatttgatattgttaccatttagcttgtcaaattaattacaaaagatcctaaatcttacttactaacttgcattttgataaccttgatttgaaaattttaata

SEQ ID NO: 21147 - DNA, 699 bp, synthetic construct
  source 1..699: mol_type = other DNA
ttaaaacaggctctggggttgttcccactccaagggcccacgtggcggctagtactctggtacttcggtacctttgtacgcctgttttatctcccttcccaatgtaacttagaagctcttaaatcaaggctcaataggtggggcgcaaaccagcgctctcatgagcaagcactcctgtttccccggtgtggttgtataaactgttcccacggttgaaaacaacctatccgttatccgctatagtacttcgagaaacctagtatcacctttggattgttgacgcgttgcgctcggcacactaacccgtgtgtagcttgggtcgatgagtctggacgtaccccactggtgacagtggtccaggctgcgttggcggcctactcatggtgaaaaccatgagacgctagacatgaacaaggtgtgaagagtctattgagctactatagagtcctccggcccctgaatgcggctaatcctaaccatggagcaagtgctcacaggccagtgagttgcttgtcgtaacgcgcaagtccgtggcggaaccgactactttgggtgtccgtgtttcactttttacttttatgactgcttatggtgacaatttgatattgttaccatttagcttgtcaaattaattacaaaagatcctaagtctcatataccaacttgcattttgataactttgatttgtaaattttaata

SEQ ID NO: 21148 - DNA, 685 bp, synthetic construct
  source 1..685: mol_type = other DNA
caccccaagggcccacgtggcggctagtactctggtatttcggtacctttgtacgcctgttttatctcccttcccaatgtaacttagaagttttcaaatcgaagctcagtaggtggggcgcaaaccagcgctttcatgagcaagcacttctgtttccccggtgcggttgtatagactgtttccacggttgaaaacaacttatccgttatccgctatagtacttcgagaaacctagtatcacctttggattgttgatgcgttgcgctcagcacactaacccgtgtgtagcttgggctgatgagtctggacgtaccccactggtgacagtggtccaggctgcgttggcggcctactcatggtgaaaaccatgagacgctagacatgaacaaggtgtgaagagtctattgagctactatagagtcctccggcccctgaatgcggctaatcttaaccatggagcaagtgctcacaagccagtgagttgcttgtcgtaacgcgcaagtccgtggcggaaccgactactttgggtgtccgtgtttcactttttacctttatgactgcttatggtgacaatttaatattgttaccatttagcttgtcagattaatcgcgtaaaatcctaaatcttgtttatcaatttgtatttggatagcttcatttgaaaattctaaactcattcataaag

SEQ ID NO: 21149 - DNA, 685 bp, synthetic construct
  source 1..685: mol_type = other DNA
caccccaagggcccacgtggcggctagtactctggtatttcggtacctttgtacgcctgttttatctcccttcccaatgtaacttagaagttttcaaatcgaagctcagtaggtggggcgcaaaccagcgctttcatgagcaagcacttctgtttccccggtgcggttgtatagactgtttccacggttgaaaacaacttatccgttatccgctatagtacttcgagaaacctagtatcacctttggattgttgatgcgttgcgctcagcacactaacccgtgtgtagcttgggctgatgagtctggacgtaccccactggtgacagtggtccaggctgcgttggcggcctactcatggtgaaaaccatgagacgctagacatgaacaaggtgtgaagagtctattgagctactatagagtcctccggcccctgaatgcggctaatcttaaccatggagcaagtgctcacaagccagtgagttgcttgtcgtaacgcgcaagtccgtggcggaaccgactactttgggtgtccgtgtttcactttttacctttatgactgcttatggtgacaatttaatattgttaccatttagcttgtcagattaatcgcgtgaaatcctaaatcttgtttatcaatttgtatttggatagcttcatttgaaaattctaaactcattcataaag

SEQ ID NO: 21150 - DNA, 661 bp, synthetic construct
  source 1..661: mol_type = other DNA
tagtactctggtatttcggtacctttgtacgcctgttttatctcccttcccaatgtaacttagaagttttcaaatcgaagctcagtaggtggggcgcaaaccagcgctttcatgagcaagcacttctgtttccccggtgcggttgtatagactgtttccacggttgaaaacaacttatccgttatccgctatagtacttcgagaaacctagtatcacctttggattgttgatgcgttgcgctcagcacactaacccgtgtgtagcttgggctgatgagtctggacgtgccccactggtgacagtggtccaggctgcgttggcggcctactcatggtgaaaaccatgagacgctagacatgaacaaggtgtgaagagtctattgagctactatagagtcctccggcccctgaatgcggctaatcttaaccatggagcaagtgctcacaagccagtgagttgcttgtcgtaacgcgcaagtccgtggcggaaccgactactttgggtgtccgtgtttcactttttacctttatgactgcttatggtgacaatttaatattgttaccatttagcttgtcagattaatcgcgtgaaatcctaaatcttgttcaccaatttgcattcggatagcttcatttgaaaattctaaactcattcataaag

SEQ ID NO: 21151 - DNA, 665 bp, synthetic construct
  source 1..665: mol_type = other DNA
gcctgttttactcaccctaccccattgtaacctagaagccaatcaaatatggtcattaggtggcccagtgcgccaactgggtctcgaccaagcacttctgttgccccggactgagtatcaataggctgctcacgcggctgaaggagaaaacgttcgttacccggccaattacttcgagaaacttagtaccaccatgaaggttgcgcagcgtttcgctccgcacaaccccagtgtagatcaggtcgatgagtcaccgcgttccccacgggcgaccgtggcggtggctgcgtcggcggcctgcccatgggtcaacccatgggacgcttcaatactgacatggtgcgaagagtctattgagctaattggtagtcctccggcccctgaatgcggctaatcctaactgcggagcagatgcccaagctccagtgggtagtctgtcgtaacgggtaactctgcagcggaaccgactactttgggtgtccgtgtttccttttattcttacattggctgcttatggtgacaattgagagattgttgccatatagctattggattggccatccggtgacgaatagagcaattgtgtatctttttgttggattcataccactagataatacaaacttcaaaaccctgtgttacatcattaggttaaacacagcaag

SEQ ID NO: 21152 - DNA, 656 bp, synthetic construct
  source 1..656: mol_type = other DNA
ggcggctagtactctggtacttcggtacctttgtacgcctgttttatctcccttcccaatgtaacttagaagttcttaaatcaatgctcaatagggggggcgcaaaccagcgctctcatgagcaagcactcctgtctccccggtgaggttgtataaactgttcccacggttgaaaacaacctatccgttatccgctatagtacttcgagaaacctagtaccacctttggattgttgacgcgttgcgctcagcacactaacccgtgtgtagcttgggtcgatgagtctggacatacctcactggcgacagtggtccaggctgcgttggcggcctactcatggtgaaagccatgagacgctagacatgaacaaggtgtgaagagtctattgagctactatagagtactccggcccctgaatgcggctaatcctaaccatggagcaagtgctcacaggccagtgagttgcttgtcgtaatgcgcaagtccgtggcggaaccgactactttgggtgtccgtgtttcactttttacttttatgactgcttatggtgacaatttgatattgttaccatttagcttgtcaaatcaattgcaaaagatcctaaatcttatttatcaacttgcatcttgataactttaatttgaaaattttaaca

SEQ ID NO: 21153 - DNA, 677 bp, synthetic construct
  source 1..677: mol_type = other DNA
tcccactccaagggcccatgtggcggctagtactctggtacttcggtacctttgtacgcctgttttatctcccttcccaatgtaacttagaagctcttaaatcaaggctcaataggtggagcgcaaaccagcgctctcatgagcaagcactcctgtctccccggtgtggttgtataaactgttcccacggttgaaaacaacctatccgttatccgctatagtacttcgagaaacctagtatcacctttggattgttgacgcgttgcgctcagcacactaacccgtgtgtagcttgggtcgatgagtctggacataccccactggcgacagtggtccaggctgcgttggcggcctactcatggtgaaaaccatgagacgctagacatgaacaaggtgtgaagagtctattgagctactatagagtcctccggcccctgaatgcggctaatcctaaccatggagcaagtgctcacaggccagtgagttgcttgtcgtaatgcgcaagtccgtggcggaaccgactactttgggtgtccgtgtttcactttttacctttatgactgcttatggtgacaatttgatattgttaccatttagcttgtcaaatcaattgcaaaaggtcctaaatcttatttatcaacttgcattttgataactttaatttgaagattttaata

SEQ ID NO: 21154 - DNA, 677 bp, synthetic construct
  source 1..677: mol_type = other DNA
tcccactccaagggcccacgtggcggctagtactctggtacttcggtacctttgtacgcctgttttatctcccttcccaatgtaacttagaagctcttaaatcaaggctcaataggtggagcgcaaaccagcgctctcatgagcaagcactcctgtctccccggtgtggttgtataaactgttcccacggttgaaaacaacctatccgttatccgctatagtacttcgagaaacctagtatcacctttggattgttgacgcgttgcgctcagcacactaacccgtgtgtagcttgggtcgatgagtctggacataccccactggcgacagtggtccaggctgcgttggcggcctactcatggtgaaaaccatgagacgctagacatgaacaaggtgtgaagagtctattgagctactatagagtcctccggcccctgaatgcggctaatcctaaccatggagcaagtgctcacaggccagtgagttgcttgtcgtaatgcgcaagtccgtggcggaaccgactactttgggtgtccgtgtttcactttttacctttatgactgcttatggtgacaatttgatattgttaccatttagcttgtcaaatcaattgcaaaaggtcctaaatcttatttatcaacttgcattttgataactttaatttgaagattttaata

SEQ ID NO: 21155 - DNA, 675 bp, synthetic construct
  source 1..675: mol_type = other DNA
ccactccaagggcccacgtggcggctagtactctggtacttcggtacctttgtacgcctgttttatctcccttcccaatgtaacttagaagttcttaaatcaatgctcaataggtggggcgcaaaccagcgttctcatgagcaagcactcctgtctccccggtgaggttgtataaactgttcccacggttgaaaacgacctatccgttatccgctatagtacttcgagaaacctagtaccacctttggattgttgacgcgttgcgctcagcacactaacccgtgtgtagcttgggtcgatgagtctggacatacctcactggcgacagtggtccaggctgcgttggcggcctactcatggcgaaagccatgagacgctagacatgaacaaggtgtgaagagtctattgagctactatagagtcctccggcccctgaatgcggctaatcctaaccatggagcaagtgctcacaggccagtgagttgcttgtcgtaatgcgcaagtccgtggcggaaccgactactttgggtgtccgtgtttcactttttacttttatgactgcttatggtgacaatttgatattgttaccatttagcttgtcaaatcaattgcaaaagaacctaaatcttatttatcaacttgcatcttgataactttaatttgaaaattttaaca

SEQ ID NO: 21156 - DNA, 675 bp, synthetic construct
  source 1..675: mol_type = other DNA
ccactccaagggcccacgtggcggctagtactctggtacttcggtacctttgtacgcctgttttatctcccttcccaatgtaacttagaagttcttaaatcaatgctcaataggtggagcgcaaaccagcgctctcatgagcaagcactcctgtctccccggtgaggttgtataaactgttcccacggttgaaaacaacctatccgttatccactatagtacttcgagaaacctagtaccacctttggattgttgacgcgttgcgctcagcacactaacccgtgtgtagcttgggtcgatgagtctggacatacctcactggcgacagtggtccaggctgcgttggcggcctactcatggtgaaaaccatgagacgctagacatgaacaaggtgtgaagagtctattgagctactatagagtcctccggcccctgaatgcggctaatcctaaccatggagcaagtgctcacaggccagtgagttgcttgtcgtaatgcgcaagtccgtggcggaaccgactactttgggtgtccgtgtttcactttttacttttatgactgcttatggtgacaacttgatattgttaccatttagcttgtcaaatcaattgcaaaagatcctaaatcttatttatcaatttgcatcttgataactttaatttgaaaattttaaca

SEQ ID NO: 21157 - DNA, 677 bp, synthetic construct
  source 1..677: mol_type = other DNA
tcccactccaagggcccacgtggcggctagtactctggtacttcggtacctttgtacgcctgttttatctcccttcccaatgtaacttagaagttcttaaatcaatgctcaataggtggggcgcaaaccagcgctctcatgagcaagcactcctgtctccccggtgaggttgtataaactgttcccacggttgaaaacaacctatccgttatccgctatagtacttcgagaaacctagtaccacctttggattgttgacgcgttgcgctcagcacactaacccgtgtgtagcttgggtcgatgagtctggacatacctcactggcgacagtggtccaggctgcgttggcggcctactcatggtgaaagccatgagacgctagacatgaacaaggtgtgaagagtctattgagctactatagagtcctccggcccctgaatgcggctaatcctaaccatggagcaagtgctcacaggccagtgagttgcttgtcgtaatgcgcaagtccgtggcggaaccgactactttgggtgtccgtgtttcactttttacttttatgactgcttatggtgacaatttgatattgttaccatttagcttgtcaaatcaattgcaaaagatcctaactcttatttatcaacttgcatcttgataactttaatttgaaaattttaaca

SEQ ID NO: 21158 - DNA, 677 bp, synthetic construct
  source 1..677: mol_type = other DNA
tcccactccaagggcccacgtggcggctagtactctggtacttcggtacctttgtacgcctgttttatctcccttcccaatgtaacttagaagttcttaaatcaatgctcaataggtggggcgcaaaccagcgctctcatgagcaagcactcctgtctccccggtgaggttgtataaactgttcccacggttgaaaacaacctatccgttatccgctatagtacttcgagaaacctagtaccacctttggattgttgacgcgttgcgctcagcacactaacccgtgtgtagcttgggtcgatgagtctggacatacctcactggcgacagtggtccaggctgcgttggcggcctactcatggtgaaagccatgagacgctagacatgaacaaggtgtgaagagtctattgagctactatagagtcctccggcccctgaatgcggctaatcctaaccatggagcaagtgctcacaggccagtgagttgcttgtcgtaatgcgcaagtccgtggcggaaccgactactttgggtgtccgtgtttcactttttacttttatgactgcttatggtgacaatttgatattgttaccatttagcttgtcaaatcaattgcaaaagatcctaactcttatttatcaacttgcatctcgataactctaatttgaaaattttaaca

SEQ ID NO: 21159 - DNA, 677 bp, synthetic construct
  source 1..677: mol_type = other DNA
tcccactccaagggcccacgtggcggctagtactctggtacttcggtacctttgtacgcctgttttatctcccttcccaatgtaacttagaagttcttaaatcaatgctcaataggtggggcgcaaaccagcgctctcatgagcaagcactcctgtctccccggtgaggttgtataaactgttcccacggttgaaaacaacctatccgttatccgctatagtacttcgagaaacctagtaccacctttggattgttgatgcgttgcgctcagcacactaacccgtgtgtagcttgggtcgatgagtctggacatacctcactggcgacagtggtccaggctgcgttggcggcctactcatggtgaaagccatgagacgctagacatgaacaaggtgtgaagagtctattgagctactatagagtcctccggcccctgaatgcggctaatcctaaccatggagcaagtgctcacaggccagtgagttgcttgtcgtaatgcgcaagtccgtggcggaaccgactactttgggtgtccgtgtttcactttttacttttatgactgcttatggtgacaatttgatattgttaccatttagcttgtcaaatcaattgcaaaagatcctaaatcttatttatcaacttgcatcttgataactttaatttgaaaattttaaca

SEQ ID NO: 21160 - DNA, 677 bp, synthetic construct
  source 1..677: mol_type = other DNA
tcccactccaagggcccacgtggcggctagtactctggtacttcggtacctttgtacgcctgttttatctcccttcccaatgtaacttagaagttcttaaatcaatgctcaataggtggggcgcaaaccagcgctctcatgagcaagcactcctgtctccccggtgaggttgtataaactgttcccacggttgaaaacaacctatccgttatccgctatagtacttcgagaaacctagtaccacctttggattgttgacgcgttgcgctcagcacactaacccgtgtgtagcttgggtcgatgagtctggacatacctcactggcgacagtggtccaggctgcgttggcggcctactcatggtgaaagccatgagacgctagacatgaacaaggtgtgaagagtctattgagctactatagagtcctccggcccctgaatgcggctaatcctaaccatggagcaagtgctcacaggccagtgagttgcttgtcgtaatgcgcaagtccgtggcggaaccgactactttgggtgtccgtgtttcactttttacttttatgactgcttatggtgacaatttgatattgttaccatttagcttgtcaaatcaattgcaaaagatcctaaatcttatttatcaacttgcatcttgataactttaatttgaaaattttaaca

SEQ ID NO: 21161 - DNA, 677 bp, synthetic construct
  source 1..677: mol_type = other DNA
tcccactccaagggcccacgtggcggctagtactctggtacttcggtacctttgtacgcctgttttatctcccttcccaatgtaacttagaagttcttaaatcaatgctcaataggtggggcgcaaaccagcgctctcatgagcaagcactcctgtctccccggtgaggttgtataaactgttcccacggttgaaaacaacctatccgttatccgctatagtacttcgagaaacctagtaccacctttggattgttgacgcgttgcgctcagcacactaacccgtgtgtagcttgggtcgatgagtctggacatacctcactggcgacagtggtccaggctgcgttggcggcctactcatggtgaaagccatgagacgctagacatgaacaaggtgtgaagagtctattgagctactatagagtcctccggcccctgaatgcggctaatcctaaccatggagcaagtgctcacaggccagtgagttgcttgtcgtaatgcgcaagtccgtggcggaaccgactactttgggtgtccgtgtttcactttttacttttatgactgcttatggtgacaatttgatattgttaccatttagcttgtcaaatcaattgcaaaagatcctaaattttacttatcaacttgcatcttgataactttaatttgaaaattttaaca

SEQ ID NO: 21162 - DNA, 677 bp, synthetic construct
  source 1..677: mol_type = other DNA
tcccactccaagggcccacgtggcggctagtactctggtacttcggtacctttgtacgcctgttttatctcccttcccaatgtaacttagaagttcttaaatcaatgctcaataggtggggcgcaaaccagcgctctcatgagcaagcactcctgtctccccggtgaggttgtataaactgttcccacggttgaaaacaacctatccgttatccgctatagtacttcgagaaacctagtaccacctttggattgttgacgcgttgcgctcagcacactaacccgtgtgtagcttgggtcgatgagtctggacatacctcactggcgacagtggtccaggctgcgttggcggcctactcatggtgaaagccatgagacgctagacatgaacaaggtgtgaagagtctattgagctactatagagtcctccggcccctgaatgcggctaatcctaaccatggagcaagtgctcacaggccagtgagttgcttgtcgtaatgcgcaagtccgtggcggaaccgactactttgggtgtccgtgtttcactttttacttttatgactgcttatggtgacaatttgatattgttaccatttagctcgtcaaatcaattgcaaaagatcctaaatctcatttatcaacttgcatcttgataactttaatttgaaaattttaaca

SEQ ID NO: 21163 - DNA, 677 bp, synthetic construct
  source 1..677: mol_type = other DNA
tcccactccaagggcccacgtggcggctagtactctggtacttcggtacctttgtacgcctgttttatctcccttcccaatgtaacttagaagttcttaaatcaatgctcaataggtggggcgcaaaccagcgctctcatgagcaagcactcctgtctccccggtgaggttgtataaactgttcccacggttgaaaacaacctatccgttatccgctatagtacttcgagaaacctagtaccacctttggattgttgacgcgttgcgctcagcacactaacccgtgtgtagcttgggtcgatgagtctggacatacctcactggcgacagtggtccaggctgcgttggcggcctactcatggtgaaagccatgagacgctagacatgaacaaggtgtgaagagtctattgagctactatagagtcctccggcccctgaatgcggctaatcctaaccatggagcaagtgctcacaagccagtgagttgcttgtcgtaatgcgcaagtccgtggcggaaccgactactttgggtgtccgtgtttcactttttacttttatgactgcttatggtgacaatttgatattgttaccatttagcttgtcaaatcaattgcaaaagatcctaaatcttatttatcaacttgcatcttgataactttaatttgaaaattttaaca

SEQ ID NO: 21164 - DNA, 677 bp, synthetic construct
  source 1..677: mol_type = other DNA
tcccactccaagggcccacgtggcggctagtactctggtacttcggtacctttgtacgcctgttttatctcccttcccaatgtaacttagaagttcttaaatcaatgctcaataggtggggcgcaaaccagcgctctcatgagcaagcactcctgtctccccggtgaggttgtataaactgttcccacggttgaaaacaacctatccgttatccgctatagtacttcgagaaacctagtaccacctttggattgttgacgcgttgcgctcagcacactaacccgtgtgtagcttgggtcgatgagtctggacatacctcactggcgacagtggtccaggctgcgttggcggcctactcatggtgaaaaccatgagacgctaaacatgaacaaggtgtgaagagtctattgagctactatagagtcctccggcccctgaatgcggctaatcctaaccatggagcaagtgctcacaggccagtgagttgcttgtcgtaatgcgcaagtccgtggcggaaccgactactttgggtgtccgtgtttcactttttacttttatgactgcttatggtgacaatttgatattgttaccatttagcttgtcaaatcaattgcaaaagatcctaaaccttatttatcaatttgcatcttgataactttaatttgaaaattttaaca

SEQ ID NO: 21165 - DNA, 677 bp, synthetic construct
  source 1..677: mol_type = other DNA
tcccactccaagggcccacgtggcggctagtactctggtacttcggtacctttgtacgcctgttttatctcccttcccaatgtaacttagaagttcttaaatcaatgctcaataggtggggcgcaaaccagcgctctcatgagcaagcactcctgtctccccggtgaggttgtataaactgttcccacggttgaaaacaacctatccgttatccgctatagtacttcgagaaacctagtaccacctttggattgttgacgcgttgcgctcagcacactaacccgtgtgtagcttgggtcgatgagtctggacatacctcactggcgacagtggtccaggctgcgttggcggcctactcatggtgaaaaccatgagacgctagacatgaacaaggtgtgaagagtctattgagctactatagagtcctccggcccctgaatgcggctaatcctaaccatggagcaagtgctcacaggccagtgggttgcttgtcgtaatgcgcaagtccgtggcggaaccgactactttgggtgtccgtgtttcactttttacttttatgactgcttatggtgacaatttgatattgttaccatttagcttgtcaaatcaattgcaaaagatcctaaatcttatttatcaatttgcatcttgataactttaatttgaaaattttaaca

SEQ ID NO: 21166 - DNA, 677 bp, synthetic construct
  source 1..677: mol_type = other DNA
tcccactccaagggcccacgtggcggctagtactctggtacttcggtacctttgtacgcctgttttatctcccttcccaatgtaacttagaagttcttaaatcaatgctcaataggtggggcgcaaaccagcgctctcatgagcaagcactcctgtctccccggtgaggttgtataaactgttcccacggttgaaaacaacctatccgttatccgctatagtacttcgagaaacctagtaccacctttggattgttgacgcgttgcgctcagcacactaacccgtgtgtagcttgggtcgatgagtctggacatacctcactggtgacagtggtccaggctgcgttggcggcctactcatggtgaaagccatgagacgctagacatgaacaaggtgtgaagagtctattgagctactatagagtcctccggcccctgaatgcggctaatcctaaccatggagcaagtgctcacaggccagtgagttgcttgtcgtaatgcgcaagtccgtggcggaaccgactactttgggtgtccgtgtttcactttttacttttatgactgcttatggtgacaatttgatattgttaccatttagcttgtcaaatcaattgcaaaagatcctaaatcttatttatcaacttgcatcttgataactttaatttgaaaattttaaca

SEQ ID NO: 21167 - DNA, 677 bp, synthetic construct
  source 1..677: mol_type = other DNA
tcccactccaagggcccacgtggcggctagtactctggtgcttcggtacctttgtacgcctgttttatctcccttcccaatgtaacttagaagttcttaaatcaatgctcaataggtggggcgcaaaccagcgctctcatgagcaagcactcctgtctccccggtgaggttgtataaactgttcccacggttgaaaacaacctatccgttatccgctatagtacttcgagaaacctagtaccacctttggattgttgacgcgttgcgctcagcacactaacccgtgtgtagcttgggtcgatgagtctggacatacctcactggcgacagtggtccaggctgcgttggcggcctactcatggtgaaagccatgagacgctagacatgaacaaggtgtgaagagtctattgagctactatagagtcctccggcccctgaatgcggctaatcctaaccatggagcaagtgctcacaggccagtgagttgcttgtcgtaatgcgcaagtccgtggcggaaccgactactttgggtgtccgtgtttcactttttacttttatgactgcttatggtgacaatttgatattgttaccatttagcttgtcaaatcaattgcaaaagatcctaaatcttatttatcaacttgcatcttgataactttaatttgaaaattttaaca

SEQ ID NO: 21168 - DNA, 677 bp, synthetic construct
  source 1..677: mol_type = other DNA
tcccactccaagggcccacgtggcggctagtactctggtacttcggtacctttgtacgcctgttttatctcccttcccaatgtaacttagaagttcttaaatcaatgctcaataggtggggcgcaaaccagcgctctcatgagcaagcactcctgtcttcccggtgaggttgtataaactgttcccacggttgaaaacaacctatccgttatccgctatagtacttcgagaaacctagtaccacctttggattgttgacgcgttgcgctcagcacactaacccgtgtgtagcttgggtcgatgagtctggacatacctcactggcgacagtggtccaggctgcgttggcggcctactcatggtgaaaaccatgagacgctagacatgaacaaggtgtgaagagtctattgagctactatagagtcctccggcccctgaatgcggctaatcctaaccatggagcaagtgctcacaggccagtgagttgcttgtcgtaatgcgcaagtccgtggcggaaccgactactttgggtgtccgtgtttcactttttacttttatgactgcttatggtgacaatttgatattgttaccatttagcttgtcaaatcaattacaaaagatcctaaatcttatttatcaatttgcatcttgataactttaatttgaaaatttcaaca

SEQ ID NO: 21169 - DNA, 677 bp, synthetic construct
  source 1..677: mol_type = other DNA
tcccactccaagggcccacgtggcggctagtactctggtacttcggtacccttgtacgcctgttttatctcccttcccaatgtaacttagaagttcttaaatcaatgctcaataggtggggcgcaaaccagcgctctcatgagcaagcactcctgtctccccggtgaggttgtataaactgtccccacggttgaaaacaacctatccgttatccgctatagtacttcgagaaacctagtaccacctttggattgttgacgcgttgcgctcagcacactaacccgtgtgtagcttgggtcgatgagtctggacatacctcactggcgacagtggtccaggctgcgttggcggcctactcatggtgaaaaccatgagacgctagacatgaacaaggtgtgaagagtctattgagctactatagagtcctccggcccctgaatgcggctaatcctaaccatggagcaagtgctcacaggccagtgagttgcttgtcgtaatgcgcaagtccgtggcggaaccgactactttgggtgtccgtgtttcactttttacttttatgactgcttatggtgacaatttgatattgttaccatttagcttgtcaaatcaattgctaaagatcctaaatcttatttatcaatttgcatcctgataactttaatttgaaaatttcaaca

SEQ ID NO: 21170 - DNA, 677 bp, synthetic construct
  source 1..677: mol_type = other DNA
tcccactccaagggcccacgtggcggctagtactctggtacttcggtacctttgtacgcctgttttgtctcccttcccaatgtaacttagaagttcttaaatcaatgctcaataggtggggcgcaaaccagcgctctcatgagcaagcactcctgtctccccggtgaggttgtataaactgttcccacggttgaagacaacctatccgttatccgctatagtacttcgagaaacctagtaccacctttggattgttgacgcgttgcgctcagcacactaacccgtgtgtagcttgggtcgatgagtctggacatacctcactggcgacagtggtccaggctgcgttggcggcctactcatggtgaaaaccatgagacgctagacatgaacaaggtgtgaagagtctattgagctactatagagtcctccggcccctgaatgcggctaatcctaaccatggagcaagtgctcacaggccagtgagttgcttgtcgtaatgcgcaagtccgtggcggaaccgactactttgggtgtccgtgtttcactttttacttttatgactgcttatggtgacaatttgatattgttaccatttagcttgtcaaatcaattacaaaagatcctaaatcttatttatcaatttgcatcttgataactttaatttgaaaatttcaaca

SEQ ID NO: 21171 - DNA, 677 bp, synthetic construct
  source 1..677: mol_type = other DNA
tcccactccaagggcccacgtggcggctagtactctggtacttcggtacctttgtacgcctgttttatctcccttcccaatgtaacttagaagttcttaaatcaatgctcagtaggtggggcgcaaaccagcgctctcatgagcaagcactcctgtctccccggtgaggttgtataaactgttcccacggttgaaaacaacctatccgttatccgctatagtacttcgagaaacctagtaccacctttggattgttgacgcgttgcgctcagcacactaacccgtgtgtagcttgggtcgatgagtctggacatacctcactggcgacagtggtccaggctgcgttggcggcctactcatggtgaaagccatgagacgctagacatgaacaaggtgtgaagagtctattgagctactatagagtcctccggcccctgaatgcggctaatcctaaccatggagcaagtgctcacaggccagtgagttgcttgtcgtaatgcgcaagtccgtggcggaaccgactactttgggtgtccgtgtttcactttttacttttatgactgcttatggtgacaatctgatattgttaccatttagcttgtcaaatcaattgcaaaagatcctaaatcttatttatcaacctgcatcttgataactttaatttgaaaattttaaca

SEQ ID NO: 21172 - DNA, 677 bp, synthetic construct
  source 1..677: mol_type = other DNA
tcccactccaagggcccacgtggcggctagtactctggtacttcggtacctttgtacgcctgttttatctcccttcccaatgtaacttagaagttcttaaatcaatgctcaataggtggggcgcaaaccagcgctctcatgagcaagcactcctgtctccccggtgaggttgtataaactgttcccacggttgaaaacaacctatccgttatccgctatagtacttcgagaaacctagtatcacctttggattgttgacgcgttgcgctcagcacactaacccgtgtgtagcttgggccgatgagtctggacatacctcactggcgacagtggtccaggctgcgttggcggcctactcatggtgaaaaccatgagacgctagacatgaacaaggtgtgaagagtctattgagctactatagagtcctccggcccctgaatgcggctaatcctaaccatggagcaagtactcacaggccagtgagttgcttgtcgtaatgcgcaagtccgtggcggaaccgactactttgggtgtccgtgtttcactttttacttttatgactgcttatggtgacaatttgatattgttaccatttagcttgtcaaatcaattgcaaaagatcctaaatcttacttatcaatttgcatcttgataactttaatttgaaaattttaaca

SEQ ID NO: 21173 - DNA, 677 bp, synthetic construct
  source 1..677: mol_type = other DNA
tcccactccaagggcccacgtggcggctagtactctggtacttcggtacctttgtacgcctgttttatctcccttcccaatgtaacttagaagttcttaaatcaatgctcaataggtggagcgcaaaccagcgctctcatgagcaagcactcctgtctccccggtgaggttgtataaactgttcccacggttgaaaacaacctatccgttatccgctatagtacttcgagaaacctagtaccacctttggattgttgacgcgttgcgctcagcacactaacccgtgtgtagcttgggtcgatgagtctggacatacctcactggcgacagtggtccaggctgcgttggcggcctactcatggtgaaaaccatgagacgctagacatgaacaaggtgtgaagagtctattgagctactatagagtcctccggcccctgaatgcggctaatcctaaccatggagcaagtgctcacaggccagtgagttgcttgtcgtaatgcgcaagtccgtggcggaaccgactactttgggtgtccgtgtttcactttttacttttatgactgcttatggtgacaatttgatattgttaccatttagcttgtcaaatcaattgcaaaagatcctaaaccttatttatcaatttgcatcttgataactttaatttgaaaattttaaca

SEQ ID NO: 21174 - DNA, 677 bp, synthetic construct
  source 1..677: mol_type = other DNA
tcccactccaagggcccacgtggcggctagtactctggtacttcggtacctttgtacgcctgttttatctcccttcccaatgtaacttagaagttcttaaatcaatgctcaataggtggggcgcaaaccagcgctctcatgagcaagcactcctgtctccccggtgaggttgtataaactgttcccacggttgaaaacaacctatccgttatccgctatagtacttcgagaaacctagtaccacctttggattgttgacgcgttgcgctcagcacactaacccgtgtgtagcttgggtcgatgagtctggacatacctcactggcgacagtggtccaggctgcgttggcggcctactcatggtgaaagccatgagacgctagacatgaacaaggtgtgaagagtctattgagctactatagagtcctccggcccctgaatgcggctaatcctaaccatggagcaagtgctcacaggccagtgagttgcttgtcgtaatgcgcaagtccgtggcggaaccgactactttgggtgtccgtgtttcactttttacttttatgactgcttatggtgacaatttgatattgttaccatttagcttgtcaaatcaattgcaaaagatcctaaatctcatttatcaacttgcatcttgataactttaatttgaaaattttaaca

SEQ ID NO: 21175 - DNA, 677 bp, synthetic construct
  source 1..677: mol_type = other DNA
tcccactccaagggcccacgtggcggctagtactctggtacttcggtacctttgtacgcctgttttatctcccttcccaatgtaacttagaagttcttaaatcaatgctcaataggtggggcgcaaaccagcgctctcatgagcaagcactcctgtctccccggtgaggttgtataaactgttcccacggttgaaaacaacctatccgttatccgctatagtacttcgagaaacccagtaccacctttggattgttgacgcgttgcgctcagcacactaacccgtgtgtagcttgggtcgatgagtctggacatacctcactggcgacagtggtccaggctgcgttggcggcctactcatggtgaaagccatgagacgctagacatgaacaaggtgtgaagagtctattgagctactatagagtcctccggcccctgaatgcggctaatcctaaccatggagcaagtgctcacaggccagtgagttgcttgtcgtaatgcgcaagtccgtggcggaaccgactactttgggtgtccgtgtttcactttttacttttatgactgcttatggtgacaatttgatattgttaccatttagcttgtcaaatcaattgcaaaagatcctaaatcttatttatcaacttgcatcttgataactttaatttgaaaattttaaca

SEQ ID NO: 21176 - DNA, 677 bp, synthetic construct
  source 1..677: mol_type = other DNA
tcccactccaagggcccacgtggcggctagtactctggtacttcggtacctttgtacgcctgttttatctcccttcccaatgtaacttagaagttcttaaatcaatgctcaataggtggggcgcaaaccagcgttctcatgagcaagcactcctgtctccccggtgaggttgtataaactgttcccacggttgaaaacgacctatccgttatccgctatagtacttcgagaaacctagtaccacctttggattgttgacgcgttgcgctcagcacactaacccgtgtgtagcttgggtcgatgagtctggacatacctcactggcgacagtggtccaggctgcgttggcggcctactcatggcgaaagccatgagacgctaaacatgaacaaggtgtgaagagtctattgagctactatagagtcctccggcccctgaatgcggctaatcctaaccatggagcaagtgctcacaggccagtgagttgcttgtcgtaatgcgcaagtccgtggcggaaccgactactttgggtgtccgtgtttcactttttacttttatgactgcttatggtgacaatttgatattgttaccatttagcttgtcaaatcaattgcaaaagatcctaaatcttatttatcaacttgcatcttgataactttaatttgaaaattttaaca

SEQ ID NO: 21177 - DNA, 677 bp, synthetic construct
  source 1..677: mol_type = other DNA
tcccactccaagggcccacgtggcggctagtactctggtacttcggtacctttgtacgcctgttttatctcccttcccaatgtaacttagaagttcttaaatcaatgctcaataggtggggcgcaaaccagcgctctcatgagcaagcactcctgtctccccggtgaggttgtataaactgttcccacggttgaaaacaacctatccgttatccgctatagtacttcgagaaacctagtaccacctttggattgttgacgcgttgcgctcagcacactaacccgtgtgtagcttgggtcgatgagtctggacatacctcactggcgacagtggtccaggctgcgttggcggcctactcatggtgaaagccatgagacgctagacatgaacaaggtgtgaagagtctattgagctactatagagtcctccggcccctgaatgcggctaatcctaaccatggagcaagtgctcacaggccagtgagttgcttgtcgtaatgcgcaagtccgtggcggaaccgactactttgggtgtccgtgtttcactttttacttttatgactgcttatggtgacaatttgatattgttaccatttagcttgtcaaatcaattgcaaaagatcctaactcttatttatcaacttgcatcttgataattttaatttgaaaattttaaca

SEQ ID NO: 21178 - DNA, 677 bp, synthetic construct
  source 1..677: mol_type = other DNA
tcccactccaagggcccacgtggcggctagtactctggtacttcggtacctttgtacgcctgttttatctcccttcccaatgtaacttagaagttcttaaatcaatgctcaataggtggggcgcaaaccagcgctctcatgagcaagcactcctgtctccccggtgaggttgtataaactgttcccacggttgaaaacaacctatccgttatccgctatagtacttcgagaaacctagtaccacctttggattgttgacgcgttgcgctcagcacactaacccgtgtgtagcttgggtcgatgagtctggacataccccactggcgacagtggtccaggctgcgttggcggcctactcatggcgaaagtcatgagacgctagacatgaacaaggtgtgaagagtctattgagctactatagagtcctccggcccctgaatgcggctaatcctaaccatggagcaagtgctcacaggccagtgagttacttgtcgtaatgcgcaagtccgtggcggaaccgactactttgggtgtccgtgtttcactttttacttttatgactgcttatggtgacaatttgatattgttaccatttagcttgtcaagtcaattgcaaaagatcctaaatcttatttgtcaacttgcatcttgataactttaatttgaaaattttaaca

SEQ ID NO: 21179 - DNA, 677 bp, synthetic construct
  source 1..677: mol_type = other DNA
tcccactccaagggcccacgtggcggctagtactctggtacttcggtacctttgtacgcctgttttatctcccttcccaatgtaacttagaagttcttaaatcaatgctcaataggtggggcgcaaaccagcgctctcatgagcaagcactcctgtctccccggtgaggttgtataaactgctcccacggttgaaaacaacctatccgttatccgctatagtacttcgagaaacctagtaccacctttggattgttgacgcgttgcgctcagcacactaacccgtgtgtagcttgggtcgatgagtctggacatacctcactggcgacagtggtccaggctgcgttggcggcctactcatggtgaaagccatgagacgctagacatgaacaaggtgtgaagagtctattgagctactatagagtcctccggcccctgaatgcggctaatcctaaccatggagcaagtgctcacaggccagtgagttgcttgtcgtaatgcgcaagtccgtggcggaaccgactactttgggtgtccgtgtttcactttttacttttatgactgcttatggtgacaatttgatattgttaccatttagcttgtcaaatcaattgcaaaagatcctaaatcttatttatcaacttgcatcttgataactttaatttgaaaattttaaca

SEQ ID NO: 21180 - DNA, 677 bp, synthetic construct
  source 1..677: mol_type = other DNA
tcccactccaagggcccacgtggcggctagtactctggtacttcggtacctttgtacgcctgttttatctcccttcccaatgtaacttagaagttcttaaatcaatgctcaataggtggggcgcaaaccagcgctcttatgagcaagcactcctgtctccccggtgaggttgtataaactgttcccacggttgaaaacaacctatccgttatccgctatagtacttcgagaaacctagtatcacctttggattgttgacgcgttgcgctcagcacactaacccgtgtgtagcttgggtcgatgagtctggacatacctcactggcgacagtggtccaggctgcgttggcggcctactcatggtgaaaaccatgagacgctagacatgaacaaggtgtgaagagtctattgagctactatagagtcctccggcccctgaatgcggctaatcctaaccatggagcaagtgctcacaggccagtgggttgcttgtcgtaatgcgcaagtccgtggcggaaccgactactttgggtgtccgtgtttcactttttacttttatgactgcttatggtgacaatttgatattgttaccatttagcttgtcaaatcaattgcaaaagatcctaaatcttacttatcaatttgcatcttgataactttaatttgaaaactttaaca

SEQ ID NO: 21181 - DNA, 677 bp, synthetic construct
  source 1..677: mol_type = other DNA
tcccactccaagggcccacgtggcggctagtactctggtacttcggtacctttgtacgcctgttttatctcccttcccaatgtaacttagaagttcttaaatcaatgctcaataggtggggcgcaaaccagcgctctcatgagcaagcactcctgtctccccggtgaggttgtataaactgttcccacggttgaaaacaaccaatccgttatccgctatagtacttcgagaaacctagtaccacctttggattgttgacgcgttgcgctcagcacactaacccgtgtgtagcttgggtcgatgagtctggacatacctcactggcgacagtggtccaggctgcgttggcggcctactcatggtgaaaaccatgagacgctagacatgaacaaggtgtgaagagtctattgagctactatagagtcctccggcccctgaatgcggctaatcctaaccatggagcaagtgctcacaggccagtgagttgcttgtcgtaatgcgcaagtccgtggcggaaccgactactttgggtgtccgtgtttcactttttacttttatgactgcttatggtgacaatttgatattgttaccatttagcttgtcaaatcaattgcaaaagatcctacatcttatttatcaatttgcatcttgataactttaatttgaaaattttaaca

SEQ ID NO: 21182 - DNA, 677 bp, synthetic construct
  source 1..677: mol_type = other DNA
tcccactccaagggcccacgtggcggctagtactctggtacttcggtacctttgtacgcctgttttatctcccttcccaatgtaacttagaagtttttaaattaatgctcaataggtggggcacaaaccagtgctctcatgagcaagcactcctgtctccccggtgaggttgtataaactgttcccacggttgaaaacaacctatccgttatccgctatagtacttcgagaaacctagtaccacctttggattgttgacgcgttgcgctcagcacactaacccgtgtgtagcttgggtcgatgagtctggacatacctcactggcgacagtggtccaggctgcgttggcggcctactcatggtgaaagccatgagacgctagacatgaacaaggtgtgaagagtctattgagctactatagagtcctccggcccctgaatgcggctaatcctaaccatggagcaagtgctcacaggccagtgagttgcttgtcgtaatgcgcaagtccgtggcggaaccgactactttgggtgtccgtgtttcactttttacttttatgactgcttatggtgacaatttgatattgttaccatttagcttgtcaaatcaattgcaaaagatcctaaatcttatttatcaacttgcatcttgataactttaatttgaaaattttaaca

SEQ ID NO: 21183 - DNA, 677 bp, synthetic construct
  source 1..677: mol_type = other DNA
tcccactccaagggcccacgtggcggctagtactctggtacttcggtacctttgtacgcctgttttatctcccttcccaatgtaacttagaagttcttaaatcaatgctcaataggtggggcgcaaaccagcgctttcatgagcaagcactcctgtctccccggtgaggttgtataaactgttcccacggttgaaaacaacctatccgttatccgctatagtacttcgagaaacctagtaccacctttggattgttgacgcgttgcgctcagcacactaacccgtgtgtagcttgggtcgatgagtctggacatacctcactggcgacagtggtccaggctgcgttggcggcctactcatggtgaaagccatgagacgctagacatgaacaaggtgtgaagagtctattgagctactatagagtcctccggcccctgaatgcggctaatcctaaccatggagcaagtgctcacaggccagtgagttgcttgtcgtaatgcgcaagtccgtggcggaaccgactactttgggtgtccgtgtttcactttttacttttatgactgcttatggtgacaatttgatattgttaccatttagcttgtcaaatcaattgcaaaagatcctaaatcttatttatcaacttgcatcttgataactttaatttgaaaattttaaca

SEQ ID NO: 21184 - DNA, 677 bp, synthetic construct
  source 1..677: mol_type = other DNA
tcccactccaagggcccacgtggcggctagtactctggtacttcggtacctttgtacgcctgttttatctcccttcccaatgtaacttagaagttcttaaatcaatgctcaataggtggggcgcaaaccagcgctctcatgagcaagcactcctgtctccccggtgaggttgtataaactgttcccacggttgaaaacaacctatccgttatccgctatagtacttcgagaaacctagtaccacctttggattgttgacgcgttgcgctcagcacactaacccgtgtgtagcttgggtcgatgagtctggacatacctcactggcgacagtggtccaggctgcgttggcggcctactcatggcgaaagccatgagacgctagacatgaacaaggtgtgaagagtctattgagctactatagagtcctccggcccctgaatgcggctaatcctaaccacggagcaagtgctcacagaccagtgagttgcttgtcgtaatgcgcaagtccgtggcggaaccgactactttgggtgtccgtgtttcactttttacttttatgactgcttatggtgacaatttgatattgttaccatttagcttgtcaaatcgattgcaaaagatcctaaatcttatttatcaacttgcatcttgataactttaatttgaagattttaaca

SEQ ID NO: 21185 - DNA, 677 bp, synthetic construct
  source 1..677: mol_type = other DNA
tcccactccaagggcccacgtggcggctagtactctggtacttcggtacctttgtacgcctgttttatctcccttcccaatgtaacttagaagttcttaaatcaatgctcaataggtggggcgcaaaccagcgctctcatgagcaagcactcctgtctccccggtgaggttgtacaaactgttcccacggttgaaaacaacctatccgttatccgctatagtacttcgagaaacctagtaccacctttggattgttgacgcgttgcgctcagcacactaacccgtgtgtagcttgggtcgatgagtctggacatacctcactggcgacagtggtccaggctgcgttggcggcctactcatggtgaaagccatgagacgctagacatgaacaaggtgtgaagagtctattgagctactatagagtcctccggcccctgaatgcggctaatcctaaccatggagcaagtgctcacaggccagtgagttgcttgtcgtaatgcgcaagtccgtggcggaaccgactactttgggtgtccgtgtttcactttttacttttatgactgcttatggtgacaatttgatattgttaccatttagcttgtcaaatcaattgcaaaagatcctaaatcttatttatcaacttgcatcttgataactttaatttgaaaattttaaca

SEQ ID NO: 21186 - DNA, 677 bp, synthetic construct
  source 1..677: mol_type = other DNA
tcccactccaagggcccacgtggcggctagtactctggtacttcggtacctttgtacgcctgttttatctcccttcccaatgtaacttagaagttcttaaattaatgctcaataggtggggcgcaaaccagcgctctcatgagcaagcactcctgtctccccggtgaggttgtataaactgttcccacggttgaaaacaacctatccgttatccgctatagtacttcgagaaacctagtaccacctttggattgttgacgcgttgcgctcagcacactaacccgtgtgtagcttgggtcgatgagtctggacatacctcactggcgacagtggtccaggctgcgttggcggcctactcatggtgaaagccatgagacgctagacatgaacaaggtgtgaagagtctattgagctactatagagtcctccggcccctgaatgcggctaatcctaaccatggagcaagtgctcacaggccagtgagttgcttgtcgtaatgcgcaagtccgtggcggaaccgactactttgggtgtccgtgtttcactttttacttttatgactgcttatggtgacaatttgatattgttaccatttagcttgtcaaatcaattgcaaaagatcctaaatcttatttatcaacttgcatcttgataattttaatttgaaaactttaaca

SEQ ID NO: 21187 - DNA, 677 bp, synthetic construct
  source 1..677: mol_type = other DNA
tcccactccaagggcccacgtggcggctagtactctggtacttcggtacctttgtacgcctgttttatctcccttcccgatgtaacttagaagttcttaaatcaatgctcaataggtggggcgcaaaccagcgctctcatgagcaagcactcctgtctccccggtgaggttgtataaactgttcccacggttgaaaacaacctatccgttatccgctatagtacttcgagaaacctagtaccacctttggattgttgacgcgttgcgctcagcacactaacccgtgtgtagcttgggtcgatgagtctggacatacctcactggcgacagtggtccaggctgcgttggcggcctactcatggtgaaagccatgagacgctagacatgaacaaggtgtgaagagtctattgagctactatagagtcctccggcccctgaatgcggctaatcctaaccatggagcaagtgctcacaggccagtgagttgcttgtcgtaatgcgcaagtccgtggcggaaccgactactttgggtgtccgtgtttcactttttacttttatgactgcttatggtgacaatttgatattgttaccatttagcttgtcaaatcaattgcaaaagatcctaaatcttatttatcaacttgcatcttgataactttaatttgaaaattttaaca

SEQ ID NO: 21188 - DNA, 677 bp, synthetic construct
  source 1..677: mol_type = other DNA
tcccactccaagggcccacgtggcggctagtactctggtacttcggtacctttgtacgcctgttttatctcccttcccaatgtaacttagaagttcttaaatcaatgctcaataggtggggcgcaaaccagcgctctcatgagcaagcactcctgtctccccggtgaagttgtataaactgttcccacggttgaaaacaacctatccgttatccgctatagtacttcgagaaacctagtaccacctttggattgttgacgcgttgcgctcagcacactaacccgtgtgtagcttgggtcgatgagtctggacatacctcactggcgacagtggtccaggctgcgttggcggcctactcatggtgaaagccatgagacgctagacatgaacaaggtgtgaagagtctattgagctactatagagtcctccggcccctgaatgcggctaatcctaaccatggagcaagtgctcacaggccagtgagttgcttgtcgtaatgcgcaagtccgtggcggaaccgactactttgggtgtccgtgtttcactttttacttttatgactgcttatggtgacaatttgatattgttaccatttagcttgtcaaatcaattgcaaaagatcctaaatcttatttatcaacttgcatcttgataactttaatttgaaaattttaaca

SEQ ID NO: 21189 - DNA, 677 bp, synthetic construct
  source 1..677: mol_type = other DNA
tcccactccaagggcccacgtggcggctagtactctggtacttcggtacctttgtacgcctgttttatctcccttcccaatgtaacttagaagttcttaaatcaatgctcaataggtggggcgcaaaccagcgctctcatgagcaagcactcctgtctccccggtgaggttgtataaactgttcccacggttgaaaacaacctatccgttatccgctatagtacttcgagaaacctagtaccacctttggattgttgacgcgttgcgctcagcacactaacccgtgtgtagcttgggtcgatgagtctggacatacctcactggcgacagtggtccaggctgcgttggcggcctactcatggtgaaagccatgagacgctagacatgaacaaggtgtgaagagtctattgagctactatagagtcctccggcccctgaatgcggctaatcctaaccatggagcaagtgctcacaggccagtgagttgcttgtcgtaatgcgcaagtccgtggcggaaccgactactttgggtgtccgtgtttcactttttacttttatgactgcttatggtgacaatttgatattgttaccatttagcttgtcaaatcaattgcaaaagatcctaaatcttgtttatcaacttgcatcttgataactttaatttgaaaattttaaca

SEQ ID NO: 21190 - DNA, 677 bp, synthetic construct
  source 1..677: mol_type = other DNA
tcccactccaagggcccacgtggcggctagtactctggtacttcggtacctttgtacgcctgttttatctcccttcccaatgtaacttagaagttcttaaatcaatgctcaataggtggggcgcaaaccagcgctctcatgagcaagcactcctgtctccccggtgaggttgtataaactgttcctacggttgaaaacaacctatccgttatccgctatagtacttcgagaaacctagtaccacctttggattgttgacgcgttgcgctcagcacactaacccgtgtgtagcttgggtcgatgagtctggacatacctcactggcgacagtggtccaggctgcgttggcggcctactcatggtgaaagccatgagacgctagacatgaacaaggtgtgaagagtctattgagctactatagagtcctccggcccctgaatgcggctaatcctaaccatggagcaagtgctcacaggccagtgagttgcttgtcgtaatgcgcaagtccgtggcggaaccgactactttgggtgtccgtgtttcactttttacttttatgactgcttatggtgacaatttgatattgttaccatttagcttgtcaaatcaattgcaaaagatcctaaatcttatttatcaacttgcatcttgataactttaatttgaaaattttaaca

SEQ ID NO: 21191 - DNA, 677 bp, synthetic construct
  source 1..677: mol_type = other DNA
tcccactccaagggcccacgtggcggctagtactctggtacttcggtacctttgtacgcctgttttatctcccttcccaatgcaacttagaagttcttaaatcaatgctcaataggtggggcgcaaaccagcgctctcacgagcaagcactcctgtctccccggtgaggttgtataaactgttcccacggttgaaaacaacctatccgttatccgctatagtacttcgagaaacctagtaccacctttggattgttgacgcgttgcgctcagcacactaacccgtgtgtagcttgggtcgatgagtctggacatacctcactggcgacagtggtccaggctgcgttggcggcctactcatggtgaaagccatgagacgctagacatgaacaaggtgtgaagagtctattgagctactatagagtcctccggcccctgaatgcggctaatcctaaccatggagcaagtgctcacaggccagtgagttgcttgtcgtaatgcgcaagtccgtggcggaaccgactactttgggtgtccgtgtttcactttttacttttatgactgcttatggtgacaatttgatattgttaccatttagcttgtcaaatcaattacaaaagatcctaaatcttatttatcaacttgcatcttgataactttaatttgaaaattttaaca

SEQ ID NO: 21192 - DNA, 677 bp, synthetic construct
  source 1..677: mol_type = other DNA
tcccactccaagggcccacgtggcggctagtactctggtacttcggtacctttgtacgcctgttttatctcccttcccaatgtaacttagaagttcttaaatcaatgctcaataggtggggcgcgaaccagcgctctcatgagcaagcactcctgtctccccggtgaggttgtataaactgttcccacggttgaaaacaacctatccgttatccgctatagtacttcgagaaacctagtaccacctttggattgttgacgcgttgcgctcagcacactaacccgtgtgtagcttgggtcgatgagtctggacatacctcactggcgacagtggtccaggctgcgttggcggcctactcatggtgaaagccatgagacgctagacatgaacaaggtgtgaagagtctattgagctactatagagtcctccggctcctgaatgcggctaatcctaaccatggagcaagtgctcacaggccagtgagttgcttgtcgtaatgcgcaagtccgtggcggaaccgactactttggatgtccgtgtttcactttttacttttatgactgcttatggtgacaatttgatattgttaccatttagcttgtcaaatcaattgcaaaagatcctaaatcttatttatcaacttgcatcttgataactttaatttgaaaattttaaca

SEQ ID NO: 21193 - DNA, 677 bp, synthetic construct
  source 1..677: mol_type = other DNA
tcccactccaagggcccacgtggcggctagtactctggtacttcggtacctttgtacgcctgttttatctcccttcccaatgtaacttagaagttcttaaatcaatgctcaataggtggggcgcaaaccagcgctctcatgagcaagcactcctgtctccccggtgaggttgtataaactgttcccacggttgaaaacaaccaatccgttatccgctatagtacttcgagaaacctagtaccacctttggattgttgacgcgttgcgctcagcacactaacccgtgtgtagcttgggtcgatgagtctggacatacctcactggcgacagtggtccaggctgcgttggcggcctactcatggtgaaaaccatgagacgctagacatgaacaaggtgtgaagagtctattgagctactatagagtcctccggcccctgaatgcggctaatcctaaccatggagcaagtgctcacaggccagtgagttgcttgtcgtaatgcgcaagtccgtggcggaaccgactactttgggtgtccgtgtttcactttttacttttatgactgcttatggtgacaatttgatattgttaccatttagcttgtcaaatcaattgcaaaagatcctaaatcttatttgtcaatttgcatcttgataactttaatttgaaaattttaaca

SEQ ID NO: 21194 - DNA, 677 bp, synthetic construct
  source 1..677: mol_type = other DNA
tcccactccaagggcccacgtggcggctagtactctggtacttcggtacctttgtacgcctgttttatctcccttcccaatgtaacttagaagttcttaaatcaatgctcaataggtggggcgcaaaccagcgctctcatgagcaagcactcctgtctccccggtgaggttgtataaactgttcccacggttgaaaacaacctatccgttatccgctatagtacttcgagaaacctagtaccacctttggattgttgacgcgttgcgctcagcacactaacccgtgtgtagcttgggtcgatgagtctggacatacctcactggcgacagtggtccaggctgcgttggcggcctactcatggtgaaagccatgagacgctagacatgaacaaggtgtgaagagtctattgagctactatagagtcctccggcccctgaatgcggctaatcctaaccatggagcaagtgctcacaggccagtgagttgcttgtcgtaatgcgcaagtccgtggcggaaccgactactttgggtgtccgtgtttcactttttacttttatgactgcttatggtgacaatttgatattgttaccatttagcttgtcaaatcaattgcaaaagatcctaaatcttatttatcaacttgcatcttaataactttaatttgaaaattttaaca

SEQ ID NO: 21195 - DNA, 677 bp, synthetic construct
  source 1..677: mol_type = other DNA
tcccactccaagggcccacgtggcggctagtactctggtacttcggtacctttgtacgcctgttttatctcccttcccaatgtaacttagaagttcttaaatcaatgctcaataggtggggcgcaaaccagcgctctcatgagcaagcactcctgtctccccggtgaggttgtataaactgttcccacggttgaaaacaacctatccgttatccgctatagtacttcgagaaacctagtaccacctttggattgttgacgcgttgcgctcagcacactaacccgtgtgtagcttgggtcgatgagtctggacatacctcactggcgacagtggtccaggctgcgttggcggcctactcatggtaaaagccatgagacgctagacatgaacaaggtgtgaagagtctattgagctactatagagtcctccggcccctgaatgcggctaatcctaaccatggagcaagtgctcacaagccagtgagttgcttgtcgtaatgcgcaagtccgtggcggaaccgactactttgggtgtccgtgtttcactttttacttttatgactgcttatggtgacaatttgatattgttaccatttagcttgtcaaatcaattgcaaaagatcctaaatcttatttatcaacttgcatcttgataactctaatttgaaaattttaaca

SEQ ID NO: 21196 - DNA, 677 bp, synthetic construct
  source 1..677: mol_type = other DNA
tcccactccaagggcccacgtggcggctagtactctggtacttcggtacctttgtacgcctgttttatctcccttcccaatgtaacttagaagttcttaaatcaatgctcaataggtggggcgcaaaccagcgctctcatgagcaagcacttctgtctccccggtgaggttgtataaactgttcccacggttgaaaacaacctatccgttatccgctatagtacttcgagaaacctagtaccacctttggattgttgacgcgttgcgctcagcacactaacccgtgtgtagcttgggtcgatgagtctggacatacctcactggcgacagtggtccaggctgcgttggcggcctactcatggtgaaagccatgagacgctagacatgaacaaggtgtgaagagtctattgagctactatagagtcctccggcccctgaatgcggctaatcctaaccatggagcaagtgctcacaggccagtgagttacttgtcgtaatgcgcaagtccgtggcggaaccgactactttgggtgtccgtgtttcactttttacttttatgactgcttatggtgacaatttgatattgttaccatttagcttgtcaaatcaattgcaaaagatcctaaatcttatttgtcaacttgcatcttgataactttaatttgaaaattttaaca

SEQ ID NO: 21197 - DNA, 677 bp, synthetic construct
  source 1..677: mol_type = other DNA
tcccactccaagggcccacgtggcggctagtactctggtactttggtacctttgtacgcctgttttatctcccttcccaatgtaacttagaagttcttaaatcaatgctcaataggtggggcgcaaaccagcgctctcatgagcaagcactcctgtctccccggtgaggttgtataaactgttcccacggttgaaaacaacctatccgttatccgctatagtacttcgagaaacctagtaccacctttggattgttgacgcgttgcgctcagcacactaacccgtgtgtagcttgggtcgatgagtctggacatacctcactggcgacagtggtccaggctgcgttggcggcctactcatggtgaaagccatgagacgctagacatgaacaaggtgtgaagagtctattgagctactatagagtcctccggcccctgaatgcggctaatcctaaccatggagcaagtgctcacaggccagtgagttgcttgtcgtaatgcgcaagtccgtggcggaaccgactactttgggtgtccgtgtttcactttttacttttatgactgcttatggtgacaatttgatattgttaccatttagcttgtcaaatcaattgcaaaagatcctaaatcttatttatcaacttgcatcttgataactttaatttgaaaattttaaca

SEQ ID NO: 21198 - DNA, 677 bp, synthetic construct
  source 1..677: mol_type = other DNA
tcccactccaagggcccacgtggcggctagtactctggtacttcggtacctttgtacgcctgttttatctcccttcccaatgtaacttagaagttcttaaatcaatgctcaataggtggggcgcaaaccagcgctctcatgagcaagcactcctgtctccccggtgaggttgtataaactgttcccacggttgaaaacaacctatccgttatccgctatagtacttcgagaaacctagtaccacctttggattgttgacgcgttgcgctcagcacactaacccgtgtgtagcttgggtcgatgagtctggacatacctcactggcgacagtggtccaggctgcgttggcggcctactcatggtgaaagccatgagacgctagacatgaacaaggtgtgaagagtctattgagctactatagagtcctccggcccctgaatgcggctaatcctaaccatggagcaagtgctcacaggccagtgagttgcttgtcgtaatgcgcaagtccgtggcggaaccgactactttgggtgtccgtgtttcactttttacttttatgactgcttatggtgacaattcaatattgttaccatttagcttgtcaaatcaattgcaaaagatcctaactcttatttatcaacttgcatcttgataactttaatttgaaaattttaaca

SEQ ID NO: 21199 - DNA, 677 bp, synthetic construct
  source 1..677: mol_type = other DNA
tcccactccaagggcccacgtggcggctagtactctggtacttcggtacctttgtacgcctgttttatctcccttcccaatgtaacttagaagttcttaaatcaatgctcaataggtggggcgcaaaccagcgctctcatgagcaagcactcctgtctccccggtgaggttgtataaactgttcccacggttgaaaacaacctatccgttatccgctatagtacttcgagaaacctagtaccacctttggattgttgacgcgttgcgctcagcacactaacccgtgtgtagcttgggtcgatgagtctggacatacctcactggcgacagtggtccaggctgcgttggcggcctactcatggtgaaagccatgagacgctagacatgaacaaggtgtgaagagtctattgagctactatagagtcctccggcccctgaatgcggctaatcctaaccatggagcaagtgctcacaggccagtgagttgcttgtcgtaatgcgcaagtccgtggcggaaccgactactttgggtgtccgtgtttcactttttacttttatgactgcttatggtgacaatttgatattgttaccatttagcttgtcagatcaattgcaaaagatcctaaatcttatttatcaacttgcatcttgataactttaattcgaaaattttaaca

SEQ ID NO: 21200 - DNA, 677 bp, synthetic construct
  source 1..677: mol_type = other DNA
tcccactccaagggcccacgtggcggctagtactctggtacttcggtacctttgtacgcctgttttatctcccttcccaatgtaacttagaagttcttaaatcaatgctcaataggtggggcgcaaaccagcgctctcatgagcaagcactcctgtctccccggtgaggttgtataaactgttcccacggttgaaaacaacctatccgttatccgctatagtacttcgagaaacctagtaccacctttggattgttgacgcgttgcgctcagcacactaacccgtgtgtagcttgggtcgatgagtctggacatacctcactggcgacagtggtccaggctgcgttggcggcctactcatggtgaaagccatgagacgctagacatgaacaaggtgtgaagagtctattgagctactatagagtcctccggcccctgaatgcggctaatcctaaccatggagcaagtgctcacaggccagtgagttgcttgtcgtaatgcgcaagtccgtgacggaaccgactactttgggtgtccgtgtttcactttttacttttatgactgcttatggtgacaatttgatattgttaccatttagcttgtcaaatcaattgcaaaagatcctaaatcttatttatcaacttgcatcttgataactttaatttgaaaattttaaca

SEQ ID NO: 21201 - DNA, 677 bp, synthetic construct
  source 1..677: mol_type = other DNA
tcccactccaagggcccacgtggcggctagtactctggtacttcggtacctttgtacgcctgttttatctcccttcccaatgtaacttagaagttcttaaatcaatgctcaataggtggggcgcaaaccagcgctctcatgagcaagcactcctgtctccccggtgaggttgtataaactgttcccacggttgaaaacaacctatccgttatccgctatagtacttcgagaaacctagtaccacctttggattgttgacgcgttgcgctcagcacactaacccgtgtgtagcttgggtcgatgagtctggacatacctcactggcgacagtggtccaggctgcgttggcggcctactcatggtgaaagccatgagacgctagacatgaacaaggtgtgaagagtctattgagctactatagagtcctccggcccctgaatgcggctaatcctaaccatggagcaagtgttcacaggccagtgagttgcttgtcgtaatgcgcaagtccgtggcggaaccgactactttgggtgtccgtgtttcactttttacttttatgactgcttatggtgacaatttgatattgttaccatttagcttgtcaaatcaattgcaaaagatcctaaatcttatttatcaacttgcatcttgataactttaatttgaaaattttaaca

SEQ ID NO: 21202 - DNA, 677 bp, synthetic construct
  source 1..677: mol_type = other DNA
tcccactccaagggcccacgtggcggctagtactctggtacttcggtacctttgtacgcctgttttatctcccttcccaatgtaacttagaagttcttaaatcaatgctcaataggtggggcgcaagccagcgctctcatgagcaagcactcctgtctccccggtgaggttgtataaactgttcccacggttgaaaacaacctatccgttatccgctatagtacttcgagaaacctagtatcacctttggattgttgacgcgttgcgctcagcacactaacccgtgtgtagcttgggtcgatgagtctggacatacctcactggcgacagtggtccaggctgcgttggcggcctactcatggtgaaaaccatgagacgctagacatgaacaaggtgtgaagagtctattgagctactatagagtcctccggcccctgaatgcggctaatcctaaccatggagcaagtgctcacaggccagtgagttgcttgtcgtaatgcgcaagtccgtggcggaaccgactactttgggtgtccgtgtttcactttttacttttatgactgcttatggtgacaatttgatattgttaccatttagcttgtcaaatcaattgcaaaagatcctaaatcttatttatcaatttgcatcttgataactttaatttgaaaattttaaca

SEQ ID NO: 21203 - DNA, 677 bp, synthetic construct
  source 1..677: mol_type = other DNA
tcccactccaagggcccacgtggcggctagtactctggtacttcggtacctttgtacgcctgttttatctcccttcccaatgtaacttagaagttcttaaatcaaagctcaataggtggggcgcaaaccagcgctctcatgagcaagcactcctgtctccccggtgaggttgtataaactgttcccacggttgaaaacaacctatccgttatccgctatagtacttcgagaaacctagtaccacctttggattgttgatgcgttgcgctcagcacactaacccgtgtgtagcttgggtcgatgagtctggacatacctcactggcgacagtggtccaggctgcgttggcggcctactcatggtgaaagccatgagacgctagacatgaacaaggtgtgaagagtctattgagctactatagagtcctccggcccctgaatgcggctaatcctaaccatggagcaagtgctcacaggccagtgagttgcttgtcgtaatgcgcaagtccgtggcggaaccgactactttgggtgtccgtgtttcactttttacttttatgactgcttatggtgacaatttgatattgttaccatttagcttgtcaaatcaattgcaaaagatcctaaatcttatttatcaacttgcatcttgataactttaatttgaaaattttaaca

SEQ ID NO: 21204 - DNA, 677 bp, synthetic construct
  source 1..677: mol_type = other DNA
tcccactccaagggcccacgtggcggctagtactctggtacttcggtacctttgtacgcctgttttatctcccttcccaatgtaacttagaagtttttaaatcaatgctcaataggtggggcacaaaccagtgctctcatgagcaagcactcctgtctccccggtgaggttgtataaactgttcccacggttgaaaacaacctatccgttatccgctatagtacttcgagaaacctagtaccacctttggattgttgacgcgttgcgctcagcacactaacccgtgtgtagcttgggtcgatgagtctggacatacctcactggcgacagtggtccaggctgcgttggcggcctactcatggtgaaagccatgagacgctagacatgaacaaggtgtgaagagtctattgagctactatagagtcctccggcccctgaatgcggctaatcctaaccatggagcaagtgctcacaggccagtgagttacttgtcgtaatgcgcaagtccgtggcggaaccgactactttgggtgtccgtgtttcactttttacttttatgactgcttatggtgacaatttgatattgttaccatttagcttgtcaaatcaattgcaaaagatcctaaatcttatttatcaacttgcatcttgacaactttaatttgaaaattttaaca

SEQ ID NO: 21205 - DNA, 677 bp, synthetic construct
  source 1..677: mol_type = other DNA
tcccactccaagggcccacgtggcggctagtactctggtacttcggtacctttgtacgcctgttttatctcccttcccaatgtaacttagaagttcttaaatcaatgctcaataggtggggcgcaaaccagcgctctcatgagcaagcactcctgtctccccggtgaggttgtataaactgttcccacggttgaaaacaacctatccgttatccgctatagtacttcgagaaacctagtaccacctttggattgttgacgcgttgcgctcagcacactaacccgtgtgtagcttgggtcgatgagtctggacatacctcactggcgacagtggtccaggctgcgttggcggcctactcatggtgaaagccatgagacgctagacatgaacaaggtgtgaagagtctattgagctactatagagtcctccggcccctgaatgcggctaatcctaaccatggagcaagtgctcacaggccagtgagttgcttgtcgtaatgcgcaagtccgtggcggaaccgactactttgggtgtccgtgtttcactttttacttttatgactgcttatggtgacaatttgatattgttaccatttagcttgtcaaatcaattgcaaaagatcctaaatcttatttatcaactcgcatcttgataaatttaatttgaaaattttaaca

SEQ ID NO: 21206 - DNA, 677 bp, synthetic construct
  source 1..677: mol_type = other DNA
tcccactccaagggcccacgtggcggctagtactctggtacttcggtacctttgtacgcctgttttatctcccttcccaatgtaacttagaagttcttaaatcaatgctcaataggtggggcgcaaaccagcgctctcatgagcaagcactcctgtctccccggtgaggttgtataaactgttcccacggttgaaaacaacctatccgttatccgctatagtacttcgagaaacctagtaccacctttggattgttgatgcgttgcgctcagcacactaacccgtgtgtagcttgggtcgatgagtctggacatacctcactggcgacagtggtccaggctgcgttggcggcctactcatggtgaaagccatgagacgctagacatgaacaaggtgtgaagagtctattgagctactatagagtcctccggctcctgaatgcggctaatcctaaccatggagcaagtgctcacaggccagtgagttgcttgtcgtaatgcgcaagtccgtggcggaaccgactactttggatgtccgtgtttcactttttacttttatgactgcttatggtgacaatttgatattgttaccatttagcttgtcaaatcaattgcaaaagatcctaaatcttatttatcaacttgcatcttgataactttaatttgaaaattttaaca

SEQ ID NO: 21207 - DNA, 677 bp, synthetic construct
  source 1..677: mol_type = other DNA
tcccactccaagggcccacgtggcggctagtactctggtacttcggtacctttgtgcgcctgttttatctcccttcccaatgtaacttagaagttcttaaatcaatgctcaataggtggggcgcaaaccagcgctctcatgagcaagcactcctgtctccccggtgaggttgtataaactgttcccacggttgaaaacaacctatccgttatccgctatagtacttcgagaaacctagtaccacctttggattgttgacgcgttgcgctcagcacactaacccgtgtgtagcttgggtcgatgagtctggacatacctcactggcgacagtggtccaggctgcgttggcggcctactcatggtgaaagccatgagacgctagacatgaacaaggtgtgaagagtctattgagctactatagagtcctccggcccctgaatgcggctaatcctaaccatggagcaagtgctcacaggccagtgagttgcttgtcgtaatgcgcaagtccgtggcggaaccgactactttgggtgtccgtgtttcactttttacttttatgactgcttatggtgacaatttgatattgttaccatttagcttgtcaaatcaattgcaaaagatcctaaatcttatttatcaacttgcatcttgataactttaatttgaaaatcttaaca

SEQ ID NO: 21208 - DNA, 677 bp, synthetic construct
  source 1..677: mol_type = other DNA
tcccactccaagggcccacgtggcggctagtactctggtactttggtacctttgtacgcctgttttatctcccttcccaatgtaacttagaagttcttaaatcaatgctcaataggtggggcgcaaaccagcgctctcatgagcaagcactcctgtctccccggtgaggttgtataaactgttcccacggttgaaaacaacctatccgttatccgctatagtacttcgagaaacctagtaccacctttggattgttgacgcgttgcgctcagcacactaacccgtgtgtagcttgggtcgatgagtctggacatacctcactggcgacagtggtccaggctgcgttggcggcctactcatggtgaaagccatgagacgctagacatgaacaaggtgtgaagagtctattgagctactatagagtcctccggcccctgaatgcggctaatcctaaccatggagcaagtgctcacaggccagtgagttgcttgtcgtaatgcgcaagtccgtggcggaaccgactactttgggtgtccgtgtttcactttttacttttatgactgcttatggtgacaatttgatattgttaccatttagcttgtcaaatcaattgcaaaagatcctaaatcttatttgtcaacttgcatcttaataactttaatttgaaaattttaaca

SEQ ID NO: 21209 - DNA, 677 bp, synthetic construct
  source 1..677: mol_type = other DNA
tcccactccaagggcccacgtggcggctagtactctggtacttcggtacctttgtacgcctgttttatctcccttcccaatgtaacttagaagttcttaaatcaatgctcaataggtggggcgcaaaccagcgctctcatgagcaagcactcctgtctccccggtgaggttgtataaactgttcccacggttgaaaacaacctatccgttatccgctatagtacttcgagaaacctagtaccacctttggattgttgacgcgttgcgctcagcacactaacccgtgtgtagcttgggtcgatgagtctggacatacctcactggcgacagtggtccaggctgcgttggcggcctactcatggcgaaagccatgagacgctagacatgaacaaggtgtgaagagtctattgagctactatagagtcctccggcccctgaatgcggctaatcctaaccatggagcaagtgctcacaggccagtgagttacttgtcgtaatgcgcaagtccgtggcggaaccgactactttgggtgtccgtgtttcactttttacttttatgactgcttatggtgacaatttgatattgttaccatttagcttgtcaaatcaattgcaaaagatcctaaatcttatttgtcaacttgcatcttgataactttaatttgaaaattttaaca

SEQ ID NO: 21210 - DNA, 677 bp, synthetic construct
  source 1..677: mol_type = other DNA
tcccactccaagggcccacgtggcggctagtactctggtacttcggtacctttgtacgcctgttttatctccctccccaatgtaacttagaagttcttaaatcaatgctcaataggtggggcgcaaaccagcgttctcatgagcaagcactcctgtctccccggtgaggttgtataaactgttcccacggttgaaaacaacctatccgttatccgctatagtacttcgagaaacctagtaccacctttggattgttgacgcgttgcgctcagcacactaacccgtgtgtagcttgggtcgatgagtctggacatacctcactggcgacagtggtccaggctgcgttggcggcctactcatggtgaaagccatgagacgctagacatgaacaaggtgtgaagagtctattgagctactatagagtcctccggcccctgaatgcggctaatcctaaccatggagcaagtgctcacaggccagtgagttgcttgtcgtaatgcgcaagtccgtggcggaaccgactactttgggtgtccgtgtttcactttttacttttatgactgcttatggtgacaatttgatattgttaccatttagcttgtcaaaccaattgtaaaagatcctaactcttatttatcaacttgcatctcgataactctaatttgaaaattttaaca

SEQ ID NO: 21211 - DNA, 677 bp, synthetic construct
  source 1..677: mol_type = other DNA
tcccactccaagggcccacgtggcggctagtactctggtacttcggtacctttgtacgcctgttttatctcccttcccaatgtaacttagaagttcttaaatcaatgctcaataggtggggcgcaaaccagcgctctcatgagcaagcactcctgtctccccggtgaggttgtataaactgttcccacggttgaaaacaacctatccgttatccgctatagtacttcgagaaacctagtaccacctttggattgttgacgcgttgcgctcagcacactaacccgtgtgtagcttgggtcgatgagtctggatatacctcactggcgacagtggtccaggctgcgttggcggcctactcatggtgaaagccatgagacgctagacatgaacaaggtgtgaagagtctattgagctactatagagtcctccggcccctgaatgcggctaatcctaaccatggagcaagtgctcacaggccagtgagttgcttgtcgtaatgcgcaagtccgtggcggaaccgactactttgggtgtccgtgtttcactttttacttttatgactgcttatggtgacaatttgatattgttaccatttagcttgtcaaatcaattgcaaaagaccctaaatcttatttatcaacttgcatcttgataactttaatttgaaaattttaaca

SEQ ID NO: 21212 - DNA, 677 bp, synthetic construct
  source 1..677: mol_type = other DNA
tcccactccaagggcccacgtggcggctagtactctggtacttcggtacctttgtacgcctgttttatctcccttcccaatgtaacttagaagttcttaaatcaatgctcaataggtggggcgcaaaccagcgttctcatgagcaagcactcctgtctccccggtgaggttgtataaactgttcccacggttgaaaacgacctatccgttatccgctatagtacttcgagaaacctagtaccacctttggattgttgacgcgttgcgctcagcacactaacccgtgtgtagcttgggtcgatgagtctggacacacctcactggcgacagtggtccaggctgcgttggcggcctactcatggcgaaagccatgagacgctagacatgaacaaggtgtgaagagtctattgagctactatagagtcctccggcccctgaatgcggctaatcctaaccatggagcaagtgctcacaggccagtgagttgcttgtcgtaatgcgcaagtccgtggcggaaccgactactttgggtgtccgtgtttcactttttacttttatgactgcttatggtgacaatttgatattgttaccatttagcttgtcaaatcaattgcaaaagatcctaaatcttatttatcaacttgcatcttgataactttaatttgaaaattttaaca

SEQ ID NO: 21213 - DNA, 677 bp, synthetic construct
  source 1..677: mol_type = other DNA
tcccactccaagggcccacgtggcggctagtactctggtacttcggtacctttgtacgcctgttttatctcccttcccaatgtaacttagaagttcttaaatcaatgctcaataggtggggcgcaaaccagcgctctcatgagcaagcactcctgtctccccggtgaggttgtataaactgttcccacggttgaaaacaacctatccgttatccgctatagtacttcgagaaacctagtaccacctttggattgttgacgcgttgcgctcagcacactaacccgtgtgtagcttgggtcgatgagtctggacataccccactggcaacagtggtccaggctgcgttggcggcctactcatggtgaaagccatgagacgctagacatgaacaaggtgtgaagagtctattgagctactatagagtcctccggcccctgaatgcggctaatcctaaccatggagcaagtgctcacaggccagtgagttgcttgtcgtaatgcgcaagtccgtggcggaaccgactactttgggtgtccgtgtttcactttttacttttatgactgcttatggtgacaatttgatattgttaccatttagcttgtcaaatcaattgcaaaagatcctaaatcttatttatcaacttgcatcttgataactttaatttgaaaattttaaca

SEQ ID NO: 21214 - DNA, 677 bp, synthetic construct
  source 1..677: mol_type = other DNA
tcccactccaagggcccacgtggcggctagtactctggtacttcggcacctttgtacgcctgttttatctcccttcccaatgtaacttagaagttcttaaatcaatgctcaataggtggggcgcaaaccagcgttctcatgagcaagcactcctgtctccccggtgaggttgtataaactgttcccacggttgaaaacgacctatccgttatccgctatagtacttcgagaaacctagtaccacctttggattgttgacgcgttgcgctcagcacactaacccgtgtgtagcttgggtcgatgagtctggacatacctcactggcgacagtggtccaggctgcgttggcggcctactcatggcgaaagccatgagacgctagacatgaacaaggtgtgaagagtctattgagctactatagagtcctccggcccctgaatgcggctaatcctaaccatggagcaagtgctcacaggccagtgagttgcttgtcgtaatgcgcaagtctgtggcggaaccgactactttgggtgtccgtgtttcactttttacttttatgactgcttatggtgacaatttgatattgttaccatttagcttgtcaaatcaattgcaaaagatcctaaatcttatttatcaacttgcatcttgataactttaatttgaaaattttaaca

SEQ ID NO: 21215 - DNA, 677 bp, synthetic construct
  source 1..677: mol_type = other DNA
tcccactccaagggcccacgtggcggctagtactctggtacttcggtacctttgtacgcctgttttatctcccttcccaatgtaacttagaagttcttaaatcaatgctcaataggtggggcgcaaaccagcgctctcatgagcaagcactcctgtctccccggtgaggttgtataaactgttcccacggttgaaaacaacctatccgttatccgctatagtacttcgagaaacctagtaccacctttggattgttgacgcgttgcgctcagcacactaacccgtgtgtagcttgggtcgatgagtctggacataccccactggcgacagtggtccaggctgcgttggcggcctactcatggtgaaagccatgagacgctagacatgaacaaggtgtgaagagtctattgagctactatagagtcctccggcccctgaatgcggctaatcctaaccatggagcaagtgctcacaggccagtgagttgcttgtcgtaatgcgcaagtccgtggcggaaccgactactttgggtgtccgtgtttcactttttacttttatgactgcttatggtgacaatttgatattgttaccatttagcttgtcaaatcaattgcaaaagatcctaaatcttatttatcaacttgcatcttgataactttaatttgaaaattttaaca

SEQ ID NO: 21216 - DNA, 677 bp, synthetic construct
  source 1..677: mol_type = other DNA
tcccactccaagggcccacgtggcggctagtactctggtacttcggtacctttgtacgcctgttttatctcccttcccaatgtaacttagaagttcttaaatcaatgctcaataggtggggcgcaaaccagcgctctcatgagcaagcactcctgtctccccggtgaggttgtataaactgttcccacggttgaaaacaacttatccgttatccgctatagtacttcgagaaacctagtaccacctttggattgttgacgcgttgcgctcagcacactaacccgtgtgtagcttgggtcgatgagtctggacatacctcactggcgacagtggtccaggctgcgttggcggcctactcatggtgaaagccatgagacgctagacatgaacaaggtgtgaagagtctattgagctactatagagtcctccggcccctgaatgcggctaatcctaaccatggagcaagtgctcacaggccagtgagttgcttgtcgtaatgcgcaagtccgtggcggaaccgactactttgggtgtccgtgtttcactttttacttttatgactgcttatggtgacaatttgatattgttaccatttagcttgtcaaatcaattgcaaaagatcctaaatcttatttatcaacttgcatcttgataactttaatttgaaaattttaaca

SEQ ID NO: 21217 - DNA, 677 bp, synthetic construct
  source 1..677: mol_type = other DNA
tcccactccaagggcccacgtggcggctagtactctggtacttcggtacctttgtacgcctgttttatctcccttcccaatgtaacttagaagttcttaaatcaatgctcaataggtggggcgcaaaccagcgctctcatgagcaagcactcctgtctccccggtgaggttgtataaactgttcccacggttgaaaacaacctatccgttatccgctatagtacttcgagaaacctagtaccacctttggattgttgacgcgttgcgctcagcacactaacccgtgtgtagcttgggtcgatgagtctggacatacctcactggcgacagtggtccaggctgcgttggcggcctactcatggtgaaagccatgagacgctagacatgaacaaggtgtgaagagtctattgagctactatagagtcctccggcccctgaatgcggctaatcctaaccatggagcaagtgctcacaggccagtgagttgcttgtcgtaatgcgcaagtccgtggcggaaccgactactttgggtgtccgtgtttcactttttacttttatgactgcttatggtgacaatttgatattgttaccatttagcttgtcaaatcaattgcaaaagatcctaaatcttatttgtcaacttgcatcttgataactttaatttgaaaattttaaca

SEQ ID NO: 21218 - DNA, 677 bp, synthetic construct
  source 1..677: mol_type = other DNA
tcccactccaagggcccacgtggcggctagtactctggtacttcggtacctttgtacgcctgttttatctcccttcccaatgtaacttagaagttcttaaatcaatgctcaataggtggggcgcaaaccagcgctctcatgagcaagcactcctgtctccccggtgaggttgtataaactgttcccacggttgaaaacaacctatccgttatccgctatagtacttcgagaaacctagtaccacctttggattgttgacgcgttgcgctcagcacactaacccgtgtgtagcttgggtcgatgagtctggacatacctcactggcgacagtggtccaggctgcgttggcggcctactcatggtgaaagccatgagacgctagacatgaacaaggtgtgaagagtctattgagctactatagagtcctccggcccctgaatgcggctaatcctaaccatggagcgagtgctcacaggccagtgagttgcttgtcgtaatgcgcaagtccgtggcggaaccgactactttgggtgtccgtgtttcactttttacttttatgactgcttatggtgacaatttgatattgttaccatttagcttgtcaaatcaattgcaaaagatcctaaatcttatttatcaacttgcaccttgataactttaatttgaaaattttaaca

SEQ ID NO: 21219 - DNA, 677 bp, synthetic construct
  source 1..677: mol_type = other DNA
tcccactccaagggcccacgtggcggctagtactctggtacttcggtacctttgtacgcctgttttatctcccttcccaatgtaacttagaagttcttaaatcaatgctcaataggtggggcgcaaaccagcgctctcatgagcaagcactcctgtctccccggtgaggttgtataaactgttcccacggttgaaaacaacctatccgttatccgctatagtacttcgagaaacctagtaccacctttggattgttgacgcgttgcgctcagcacactaacccgtgtgtagcttgggtcgatgagtctggacatacctcactggcgacagtggtccaggctgcgttggcggcctactcatggtgaaagccatgagacgctagacatgaacaaggtgtgaagagtctattgagctactatagagtcctccggcccctgaatgcggctaatcctaaccatggagcaagtgctcacaggccagtgagttgcttgtcgtaatgcgcaagtccgtggcggaaccgactactttgggtgtccgtgtttcactttttacttttatgactgcttatggtgacaatttgatattgttaccatttagcttgtcaaatcaattgcaaaagatcctaaatcttatttatcaacttgcatcttgataactttaattcgaaaattttaaca

SEQ ID NO: 21220 - DNA, 677 bp, synthetic construct
  source 1..677: mol_type = other DNA
tcccactccaagggcccacgtggcggctagtactctggtacttcggtacctttgtacgcctgttttatctcccttcccaatgtaacttagaagttcttaaatcaatgctcaataggtggggcgcaaaccagcgctctcatgagcaagcactcctgtctccccggtgaggttgtataaactgttcccacggttgaaaacaacctatccgttatccgctatagtacttcgagaaacctagtaccacctttggattgttgacgcgttgcgctcagcacactaacccgtgtgtagcttgggtcgatgagtctggacatacctcactggcgacagtggtccaggctgcgttggcggcctactcatggtgaaaaccatgagacgctagacatgaacaaggtgtgaagagtctattgagctactatagagtcctccggcccctgaatgcggctaatcctaaccatggagcaagtgctcacaggccagtgagttgcttgtcgtaatgcgcaagtccgtggcggaaccgactactttgggtgtccgtgtttcactttttacttttatgactgcttatggtgacaatttgatattgttaccatttagcttgtcaaatcaattacaaaagatcctaaatcttatttatcaatttgcatcttgataattttaatttgaaaatttcaaca

SEQ ID NO: 21221 - DNA, 677 bp, synthetic construct
  source 1..677: mol_type = other DNA
tcccactccaagggcccacgtggcggctagtactctggtacttcggtacctttgtacgcctgttttatctcccttcccaatgtaacttagaagttcttaaaccaatgctcaataggtggggcgcaaaccagcgctctcatgagcaagcactcctgtctccccggtgaggttgtataaactgttcccacggttgaaaacaacctatccgttatccgctatagtacttcgagaaacctagtaccacctttggattgttgacgcgttgcgctcagcacactaacccgtgtgtagcttgggtcgatgagtctggacatacctcactggcgacagtggtccaggctgcgttggcggcctactcatggtgaaagccatgagacgctagacatgaacaaggtgtgaagagtctattgagctactatagagtcctccggcccctgaatgcggctaatcctaaccatggagcaagtgctcacaggccagtgagttgcttgtcgtaatgcgcaagtccgtggcggaaccgactactttgggtgtccgtgtttcactttttacttttatgactgcttatggtgacaatttgatattgttaccatttagcttgtcaaatcaattgcaaaagatcctaactcttatttatcaacttgcatcttgataactttaatttgaaaattttaaca

SEQ ID NO: 21222 - DNA, 677 bp, synthetic construct
  source 1..677: mol_type = other DNA
tcccactccaagggcccacgtggcggctagtactctggtacttcggtacctttgtacgcctgttttatctcccctcccaatgtaacttagaagttcttaaatcaatgctcaataggtggggcgcaaaccagcgctctcatgagcaagcactcctgtctccccggtgaggttgtataaactgttcccacggttgaaaacaacctatccgttatccgctatagtacttcgagaaacctagtaccacctttggattgttgacgcgttgcgctcagcacactaacccgtgtgtagcttgggtcgatgagtctggacatacctcactggcgacagtggttcaggctgcgttggcggcctactcatggtgaaagccatgagacgctagacatgaacaaggtgtgaagagtctattgagctactatagagtcctccggcccctgaatgcggctaatcctaaccatggagcaagtgctcacaggccagtgagttgcttgtcgtaatgcgcaagtccgtggcggaaccgactactttgggtgtccgtgtttcactttttacttttatgactgcttatggtgacaatttgatattgttaccatttagcttgtcaaatcaattgcaaaagatcctaaatcttatttatcaacttgcatcttgataactttaatttgaaaattttaaca

SEQ ID NO: 21223 - DNA, 677 bp, synthetic construct
  source 1..677: mol_type = other DNA
tcccactccaagggcccacgtggcggctagtactctggtacttcggtacctttgtacgcctgttttatctcccttcccaatgtaacttagaagttcttaaatcaacgctcaataggtggggcgcaaaccagcgctctcatgagcaagcactcctgtctccccggtgaggttgtataaactgttcccacggttgaaaacaacctatccgttatccgctatagtacttcgagaaacctagtatcacctttggattgttgacgcgttgcgctcagcacactaacccgtgtgtagcttgggtcgatgagtctggacatacctcactggcgacagtggtccaggctgcgttggcggcctactcatggtgaaaaccatgagacgctagacatgaacaaggtgtgaagagtctattgagctactatagagtcctccggcccctgaatgcggctaatcctaaccatggagcaagtgctcacaggccagtgagttgcttgtcgtaatgcgcaagtccgtggcggaaccgactactttgggtgtccgtgtttcactttttactttcatgactgcttatggtgacaatttgatattgttaccatttagcttgtcaaatcaattgcaaaagatcctaaatcttacttatcaatttgcttcttgataactttaatttgaaaattttaaca

SEQ ID NO: 21224 - DNA, 677 bp, synthetic construct
  source 1..677: mol_type = other DNA
tcccactccaagggcccacgtggcggctagtactctggtacttcggtacctttgtacgcctgttttatctcccttcccaatgtaacttagaagttctcaaatcaatgctcaataggtggggcgcaaaccagcgctctcatgagcaagcactcctgtctccccggtgaggttgtataaactgttcccacggttgaaaacaacctatccgttatccgctatagtacttcgagaaacctagtaccacctttggattgttgacgcgttgcgctcagcacactaacccgtgtgtagcttgggtcgatgagtctggacatacctcactggcgacagtggtccaggctgcgttggcggcctactcatggtgaaaaccatgagacgctagacatgaacaaggtgtgaagagtctattgagctactatagagtcctccggcccctgaatgcggctaatcctaaccatggagcaagtgctcacaggccagtgagttgcttgtcgtaatgcgcaagtccgtggcggaaccgactactttgggtgtccgtgtttcactttttacttttatgactgcttatggtgacaatttgatattgttaccatttagcttgtcaaatcaattgcaaaagatcctaaatcttatttatcaatttgcatcttgataactttaatttgaaaattttaaca

SEQ ID NO: 21225 - DNA, 677 bp, synthetic construct
  source 1..677: mol_type = other DNA
tcccactccaagggcccacgtggcggctagtactctggtacttcggtacctttgtacgcctgttttatctcccttcccaatgtaacttagaagttcttaaatcaatgctcaataggtggggcgcaaaccagcgctctcatgagcaagcactcctgtctccccggtgaggttgtataaactgttcccacggttgaaaacaacctatccgttatccgctatagtacttcgagaaacctagtaccacctttggattgttgacgcgttgcgctcagcacactaacccgtgtgtagcttgggtcgatgagtctggacatacctcactggcgacagtggtccaggctgcgttggcggcctactcatggtgaaagccatgagacgctagacatgaacaaggtgtgaagagtctattgagctactatagagtcctccggcccctgaatgcggctaatcctaaccatggagcaagtgctcacaggccagtgagttgcttgtcgtaatgcgcaagtccgtggcggaaccgactactttgggtgtccgtgtttcactttttacttttatgactgcttatggtgacaattttatattgttaccatttagcttgtcaaatcaattgcaaaagatcctaactcttatttatcaacttgcatctcgataactctaatttgaaaattttaaca

SEQ ID NO: 21226 - DNA, 656 bp, synthetic construct
  source 1..656: mol_type = other DNA
ggcggctagtactctggtacttcggtacctttgtacgcctgttttatctcccttcccaatgtaacttagaagttcttaaatcaatgctcaatagggggggcgcaagccagcgctctcatgagcaagcactcctgtctccccggtgaggttgtataaactgttcccacggttgaaaacaacctatccgttatccgctatagtacttcgagaaacctagtaccacctttggattgttgacgcgttgcgctcagcacactaacccgtgtgtagcttgggtcgatgagtctggacatacctcactggcgacagtggtccaggctgcgttggcggcctactcatggtgaaagccatgagacgctagacatgaacaaggtgtgaagagtctattgagctactatagagtcctccggcccctgaatgcggctaatcctaaccgtggagcaagtgctcacaggccagtgagttgcttgtcgtaatgcgcaagtccgtggcggaaccgactactttgggtgtccgtgtttcactttttacttttatgactgcttatggtgacaatttgatattgttaccatttagcttgtcaaatcaattgcaaaagatcctaaatcttatttatcaacctgcatcttgataactttaatttgaaaattttaaca

SEQ ID NO: 21227 - DNA, 655 bp, synthetic construct
  source 1..655: mol_type = other DNA
acaccctcccccgagtgcaacttagaagatatccacacacggtcaataggcggctcagtatgccaactgagtcatgatcaagcacttctgttcccccggactgagtatcaataagctgcttacgtggctgaaggagaaaacgttcgttatccggccaattacttcgagaagcttagtaccaccatggaggttgcgcagtgtttcgttccgcacaaccccagtgtagatcaggtcgatgagtcaccgcactcctcacgggcgaccgtggcggtggctgcgctggcggcctgcccatggggcaacccatgggacgcttcaatactgacatggtgcgaagagcctattgagctaattggtagtcctccggcccctgaatgcggctaatcctaactgcggagcagacacccacaagccagtgggcagtctgtcgtaatgggtaactctgcagcggaaccgactactttgggtgtccgtgtttccttttattcctatattggctgcttatggtgacaattgagagattgttaccatatagctattggattggccgtccagtgacaaacagagcgattatctatctatttgttggcttcgtaccattaaaccttagagtcctaaagaccctcaatttgattatacaatttaactctgcgaa

SEQ ID NO: 21228 - DNA, 677 bp, synthetic construct
  source 1..677: mol_type = other DNA
tcccactccaagggcccacgtggcggctagtactctggtacttcggtacctttgtacgcctgttttatctcccttcccaatgtaacttagaagttcttaaatcaatgctcaataggtggggcgcaaaccagcgttctcatgagcaagcactcctgtctccccggtgaggttgtataaactgttcccacggttgaaaacgacctatccgttatccgctatagtacttcgagaaacctagtaccacctttggattgttgacgcgttgcgctcagcacactaacccgtgtgtagcttgggtcgatgagtctggacatacctcactggcgacagtggtccaggctgcgttggcggcctactcatggcgaaagccatgagacgctagacatgaacaaggtgtgaagagtctattgagctactatagagtcctccggcccctgaatgcggctaatcctaaccatggagcaagtgctcacaggccagtgagttgcttgtcgtaatgcgcaagtccgtggcggaaccgactactttgggtgtccgtgtttcactttttacttttatgactgcttatggtgacaatttgatattgttaccatttagcttgtcaaatcaattgcagaagatcctaaatcttatttatcaacttgcatcttgataactttaatttgaaaattttaaca

SEQ ID NO: 21229 - DNA, 678 bp, synthetic construct
  source 1..678: mol_type = other DNA
tcccactccaagggcccacgtggcggctagtactctggtacttcggtacctttgtacgcctgttttatctcccttcccaacgtaacttagaagctcttaaatcaaggctcaataggtggagtgcaaaccagcactcttatgagcaagtactcctgtttccccggtgcggttatataaactgttcccacggttgaaagtaacctatccgttatccgctatagtacttcgagaaacctagtatcacctttggattgttgacgcgttgcgctcagcacactaacccgtgtgtagcttgggtcgatgagtctggacataccccactggcgacagtggtccaggctgcgttggcggcctactcatggtgaaaaccatgagacgctagacatgaacaaggtgtgaagagtctattgagctactatagagtcctccggcccctgaatgcggctaatcctaaccatggagcaagtgctcacagaccagtgagttgcttgtcgtaatgcgcaagtccgtggcggaaccgactactttgggtgtccgtgtttcacttttttacccttatgactgcttatggtgacaatttgatattgttaccatttagcttgtcaaatcaattgcgaaagatcctatcaacttgcattttgataactcttttgaaaactctaatttgaagattcaata

SEQ ID NO: 21230 - DNA, 685 bp, synthetic construct
  source 1..685: mol_type = other DNA
caccccaagggcccacgtggcggctagtactctggtatttcggtacctttgtacgcctgttttatctcccttcccaatgtaacttagaagttttcaaatcgaagctcagtaggtggggcgcaaaccagcgctttcatgagcaagcacttctgtttccccggtgcggttgtatagactgtttccacggttgaaaacaacttatccgttatccgctatagtacttcgagaaacctagtatcacctttggattgttgatgcgttgcgctcagcacactaacccgtgtgtagcttgggctgatgagtctggacgtaccccactggtgacagtggttcaggctgcgttggcggcctactcatggtgaaaaccatgagacgctagacatgaacaaggtgtgaagagtctattgagctactatagagtcctccggcccctgaatgcggctaatcttaaccatggagcaagtgctcacaagccagtgagttgcttgtcgtaacgcgcaagtccgtggcggaaccgactactttgggtgtccgtgtttcactttttacctttatgactgcttatggtgacaatttaatattgttaccatttagcttgtcagattaatcgcgtgaaatcctaaatcttgtttaccaatttgtattcggatagcttcatttgaaaattctaaactcattcataaag

SEQ ID NO: 21231 - DNA, 685 bp, synthetic construct
  source 1..685: mol_type = other DNA
caccccaagggcccacgtggcggctagtactctggtatttcggtacctttgtacgcctgttttatctcccttcccaatgtaacttagaagttttcaaatcgaagctcagtaggtggggcgcaaaccagcgctttcatgagcaagcacttctgtttccccggtgcggttgtatagactgtttccacggttgaaaacaacttatccgttatccgctatagtacttcgagaaacctagtatcacctttggattgttgatgcgttgcgctcagcacactaacccgtgtgtagcttgggctgatgagtctggacgtaccccactggtgacagtggtccaggctgcgttggcggcctactcatggtgaaaaccatgagacgctagacatgaacaaggtgtgaagagtctattgagctactatagagtcctccggcccctgaatgcggctaatcttaaccatggagcaagtgctcacaagccagtgagttgcttgtcgtaacgcgcaagtccgtggcggaaccgactactttgggtgtccgtgtttcactttttacctttatgactgcttatggtgacaatttaatattgttaccatttagcttgtcagattaatcgcgtgaaatcctaaatcttgttcaccaatttacattcggatagcttcatttgaaaattctaaactcattcataaaa

SEQ ID NO: 21232 - DNA, 685 bp, synthetic construct
  source 1..685: mol_type = other DNA
caccccaagggcccacgtggcggctagtactctggtatttcggtacctttgtacgcctgttttatctcccttcccaatgtaacttagaagttttcaaatcgaagctcagtaggtggggcgcaaaccagcgctttcatgagcaagcacttctgtttccccggtgcggttgtatagactgtttccacggttgaaaacaacttatccgttatccgctatagtacttcgagaaacctagtatcacctttggattgttgatgcgttgcgctcagcacactaacccgtgtgtagcttgggctgatgagtctggacgtaccccactggtgacagtggtccaggctgcgttggcggcctactcatggtgaaaaccatgagacgctagacatgaacaaggtgtgaagagtctattgagctactatagagtcctccggcccctgaatgcggctaatcttaaccatggagcaagtgctcacaagccagtgagttgcttgtcgtaacgcgcaagtccgtggcggaaccgactactttgggtgtccgtgtttcactttttacctttatgactgcttatggtgacaatttaatattgttaccatttagcttgtcagattaatcgcgtgaaatcctaaatcttgttcaccaatttgcattcggatagcttcacttgaaaattctaaactcattcataaag

SEQ ID NO: 21233 - DNA, 685 bp, synthetic construct
  source 1..685: mol_type = other DNA
caccccaggggcccacgtggcggctagtactctggtatttcggtacctttgtacgcctgttttatctcccttcccaatgtaacttagaagttttcaaatcgaagctcagtaggtggggcgcaaaccagcgctttcatgagcaagcacttctgtttccccggtgcggttgtatagactgtttccacggttgaaaacaacttatccgttatccgctatagtacttcgagaaacctagtatcacctttggattgttgatgcgttgcgctcagcacactaacccgtgtgtagcttgggctgatgagtctggacgtaccccactggtgacagtggtccaggctgcgttggcggcctactcatggtgaaaaccatgagacgctagacatgaacaaggtgtgaagagtctattgagctactatagagtcctccggcccctgaatgcggctaatcttaaccatggagcaagtgctcacaagccagtgagttgcttgtcgtaacgcgcaagtccgtggcggaaccgactactttgggtgtccgtgtttcactttttacctttatgactgcttatggtgacaatttaatattgttaccatttagcttgtcagattaatcgcgtgaaatcttaaatcttgttcaccaatttgtattcggatagcttcatttgaaaattctaaactcattcataaag

SEQ ID NO: 21234 - DNA, 685 bp, synthetic construct
  source 1..685: mol_type = other DNA
caccccaagggcccacgtggcggctagtactctggtatttcggtacctttgtacgcctgttttatctcccttcccaatgtaacttagaagttttcaaatcgaagctcagtaggtggggcgcaaaccagcgctttcatgagcaagcacttctgtttccccggtgcggttgtataaactgtttccacggttgaaaacaacttatccgttatccgctatagtacttcgagaaacctagtatcacctttggattgttgatgcgttgcgctcagcacactaacccgtgtgtagcttgggctgatgagtctggacgtaccccactggtgacagtggtccaggctgcgttggcggcctactcatggtgaaaaccatgagacgctagacatgaacaaggtgtgaagagtctattgagctactatagagtcctccggcccctgaatgcggctaatcttaaccatggagcaagtgctcacaagccagtgagttgcttgtcgtaacgcgcaagtccgtggcggaaccgactactttgggtgtccgtgtttcactttttacctttatgactgcttatggtgacaatttaatattgttaccatttagcttgtcagatttattgcgtgaaatcctaaatcttgttcaccaatttgtattcggatagcttcatttgaaaattctaaactcactcataaag

SEQ ID NO: 21235 - DNA, 685 bp, synthetic construct
  source 1..685: mol_type = other DNA
caccccaagggcccacgtggcggctagtactctggtatttcggtacctttgtacgcctgttttatctcccttcccaatgtaacttagaagttttcaaatcgaagctcaataggtggagcgcaaaccagcgctttcatgagcaagcacttctgtctccccggtgcggttgtatagactgtttccacggttgaaaacaacttatccgttatccgctatagtacttcgagaaacctagtatcacctttggattgttgatgcgttgcgctcaacacactaacccgtgtgtagcttgggtcgatgagtctggacgtaccccactggtgacagtggtccaggctgcgttggcggcctactcatggtgaaaaccatgagacgctagacatgaacaaggtgtgaagagtctattgagctactatagagtcctccggcccctgaatgcggctaatcttaaccatggagcaagtgctcacaagccagtgagttgcttgtcgtaacgcgcaagtccgtggcggaaccgactactttgggtgtccgtgtttcactttttacttttatgactgcttatggtgacaatttaatattgttaccatttagcttgtcagattaatcacgtgaaatcctaaatcttatttatcaatttgtatttggatagcttcatttgaaaattctaaactcatttataaag

SEQ ID NO: 21236 - DNA, 685 bp, synthetic construct
  source 1..685: mol_type = other DNA
caccccaagggcccacgtggcggctagtactctggtatttcggtacctttgtacgcctgttttatctcccttcccaatgtaacttagaagttttcaaatcgaagctcagtaggtggggcgcaaaccagcgctttcatgagcaagcacttctgtttccccggtgcggttgtatagactgtttccacggttgaaaacaacttatccgttatccgctatagtacttcgagaaacctagtatcacctttggattgttgatgcgttgcgctcagcacactaacccgtgtgtagcttgggctgatgagtctggacgtaccccactggtgacagtggtccaggctgcgttggcggcctactcatggtgaaaaccatgagacgctagacatgaacaaggtgtgaagagtctattgagctactatagagtcctccggcccctgaatgcggctaatcttaaccatggagcaagtgctcacaagccagtgagttgcttgtcgtaacgcgcaagtccgtggcggaaccgactactttgggtgtccgtgtttcactttttacctttatgactgcttatggtgacaatttaatattgttaccatttagcttgtcagattaatcgcgtgaaatcctaaatcttgttcaccaatttacattcggatagcttcatttgaaaattctaaactcattcataaag

SEQ ID NO: 21237 - DNA, 685 bp, synthetic construct
  source 1..685: mol_type = other DNA
caccccaagggcccacgtggcggctagtactctggtatttcggtacctttgtacgcctgttttatctcccttcctaatgtaacttagaagttttcaaatcgaagctcagtaggtggggcgcaaaccagcgctttcatgagcaagcacttctgtttccccggtgcggttgtatagactgttcccacggttgaaaacaacttatccgttatccgctatagtacttcgagaaacctagtatcacctttggattgttgatgcgttgcgctcagcacactaacccgtgtgtagcttgggctgatgagtctggacgtaccccactggtgacagtggtccaggctgcgttggcggcctactcatggtgaaaaccatgagacgctagacatgaacaaggtgtgaagagtctattgagctactatagagtcctccggcccctgaatgcggctaatcttaaccatggagcaagtgctcacaagccagtgagttgcttgtcgtaacgcgcaagtccgtggcggaaccgactactttgggtgtccgtgtttcactttttacctttatgactgcttatggtgacaatttaatattgttaccatttagcttgtcagattaatcgcgtgaaatcctaaatcttgttcaccaatttgcattcggatagcttcatttgaaaattctaaactcattcataaag

SEQ ID NO: 21238 - DNA, 685 bp, synthetic construct
  source 1..685: mol_type = other DNA
caccccaagggcccacgtggcggctagtactctggtatttcggtacctttgtacgcctgttttatctcccttcccaatgtaacttagaagttttcaaatcgaagctcagtaggtggggcgcaaaccagcgctttcatgagcaagcacttctgtttccccggtgcggttgtatagactgtttccacggttgaaaacaacttatccgttatccgctatagtacttcgagaaacctagtatcacctttggattgttgatgcgttgcgctcagcacactaacccgtgtgtagcttgggctgatgagtctggacgtaccccactggtgacagtggtccaggctgcgttggcggcctactcatggtgaaaaccatgagacgctagacatgaacaaggtgtgaagagtctattgagctactatagagtcctccggcccctgaatgcggctaatcttaaccatggagcaagtgctcacaagccagtgagttgcttgtcgtaacgcgcaagtccgtggcggaaccgactactttgggtgtccgtgtttcactttttacctttatgactgcttatggtgacaatttaatattgttaccatttagcttgtcagattaatcgcgtgaaatcctaaatcttgttcaccaatttgcattcggatagcttcatttgaaaattctaaactcattcataaag

SEQ ID NO: 21239 - DNA, 685 bp, synthetic construct
  source 1..685: mol_type = other DNA
caccccaagggcccacgtggcggctagtactctggtatttcggtacctttgtacgcctgttttatctcccttcccaacgtaacttagaagttttcaaatcgaagctcagtaggtggggcgcaaaccagcgctttcatgagcaagcacttctgtttccccggtgcggttgtatagactgtttacacggttgaaaacaacttatccgttatccgctatagtacttcgagaaacctagtatcacctttggattgttgatgcgttgcgctcagcacactaacccgtgtgtagcttgggctgatgagtctggatgtaccccactggtgacagtggtccaggctgcgttggcggcctactcatggtgaaaaccatgagacgctagacatgaacaaggtgtgaagagtctattgagctactatagagtcctccggcccctgaatgcggctaatcttaaccatggagcaagtgctcacaagccagtgagttgcttgtcgtaacgcgcaagtccgtggcggaaccgactactttgggtgtccgtgtttcactttttacctttatgactgcttatggtgacaatttaatattgttaccatttagcttgtcagatcaatcgcgtgaaatcctaaatcttgttcaccaatttgcattcagatagcttcatttgaaaattctaagctcattcataaag

SEQ ID NO: 21240 - DNA, 685 bp, synthetic construct
  source 1..685: mol_type = other DNA
caccccaagggcccacgtggcggctagtactctggtatttcggtacctttgtacgcctgttttatctcccttcccaatgtaacttagaagttttcaaatcgaagctcagtaggtggggcgcaaaccagcgctttcatgagcaagcacttctgtttccccggtgcggttgtatagactgtttccacggttgaaaacaacttatccgttatccgctatagtacttcgagaaacctagtatcacctttggattgttgatgcgttgcgctcagcacactaacccgtgtgtagcttgggctgatgagtctggacgtaccccactggtgacagtggtccaggctgcgttggcggcctactcatggtgaaaaccatgagacgctagacatgaacaaggtgtgaagagtctattgagctactatagagtcctccggcccctgaatgcggctaatcttaaccatggagcaagtgctcacaagccagtgagttgcttgtcgtaacgcgcaagtccgtggcagaaccgactactttgggtgtccgtgtttcactttttacctttatgactgcttatggtgacaatttaatattgttaccatttagcttgtcagattaatcgcgtgaaatcctaaatcttgttcaccaatttgtattcggatagcttcacttgaaaattctaaactcattcataaag

SEQ ID NO: 21241 - DNA, 685 bp, synthetic construct
  source 1..685: mol_type = other DNA
caccccaagggcccacgtggcggctagtactctggtatttcggtacctttgtacgcctgttttatctcccttcccaatgtaacttagaagttttcaaatcgaagctcagtaggtggggcgcaaaccagcgctttcatgagcaagcacttctgtttccccggtgcggttgtatagactgtttccacggttgaaaacaacttatccgttatccgctatagtacttcgagaaacctagtatcacctttggattgttgatgcgttgcgctcagcacactaacccgtgtgtagcttgggctgatgagtctggacgtaccccactggtgacagtggtccaggctgcgttggcggcctactcatggtgaaaaccatgagacgctagacatgaacaaggtgtgaagagtctattgagctactatagagtcctccggcccctgaatgcggctaatcttaaccatggagcaagtgctcacaagccagtgagttgcttgtcgtaacgcgcaagtccgtggcggaaccgactactttgggtgtccgtgtttcactttttacctttatgactgcttatggtgacaatttaatattgttaccatttagcttgtcagattaatcgcgtgaaatcctgaatcttgttcaccaatttgcattcggatagcttcatttgaaaattctaaactcattcataaag

SEQ ID NO: 21242 - DNA, 685 bp, synthetic construct
  source 1..685: mol_type = other DNA
caccccaagggcccacgtggcggctagtactctggtatttcggtacctttgtacgcctgttttatctcccttcccaatgtaacttagaagttttcaaatcgaagctcagtaggtggggcgcaaaccagcgctttcatgagcaagcacttctgtttccccggtgcggttgtatagactgtttccacggttgaaaacaacttatccgttatccgctatagtacttcgagaaacctagtatcacctttggattgttgatgcgttgcgctcagcacactaacccgtgtgtagcttgggctgatgagtctggacttaccccactggtgacagtggtccaggctgcgttggcggcctactcatggtgaaaaccatgagacgctagacatgaacaaggtgtgaagagtctattgagctactatagagtcctccggcccctgaatgcggctaatcttaaccatggagcaagtgctcacaagccagtgagttgcttgtcgtaacgcgcaagtccgtggcggaaccgactactttgggtgtccgtgtttcactttttacctttatgactgcttatggtgacaatttaatattgttaccatttagcttgtcagattaatcgcgtgaaatcctaaatcttgtttatcaatttgtatttggatagcttcatttgaaaattctaaactcattcataaag

SEQ ID NO: 21243 - DNA, 696 bp, synthetic construct
  source 1..696: mol_type = other DNA
cagcacactggtatcaaggtacctttgtgcgcctgttttgcttcccttttccccagaggcaacttagaagcaatactccacgaccaatagcaggcgtggcacaccagccatgtctcggtcaagcacttctgtgaccccggactgagtatcaataaactgctcacgcagtcgaaggagaaaacgtccgttacccggctagctacttcgagaaacctagtaacgccatgaaaattgcgaggtgtttcgctcagcacatccccagtgtagatcaggtcgatgagtcaccgcattccccacaggtaactgtggcggtggctgcgttggcggcctgcccatggggtaactcatgggacgcttcaatacggacatggtgtgaagagtctattgagctagttagtattcctccggcccctgaatgcggctaatcctaactgtggagcatgcgcccccattccagagggtagcatgtcgtaacgggtaactccgcagcggaaccgactactttgggtgtccgtgtttccttttattttatcattggctgcttatggtgacaattggaagattgttaccatatagctattggattggccatccggtgacgaacagagctataatttaccaatttgtgggatttgttcctataagtttgaaagtcttaaagacccttaatttaatattactactcaatagtgcaag

SEQ ID NO: 21244 - DNA, 667 bp, synthetic construct
  source 1..667: mol_type = other DNA
aagggcccacgtggcggctagtactctggtacttcggtacctttgtacgcctgttttatctcccttcccaatgtaatttagaagcttttaaatcaaggctcaataggtggggcgcaaaccagcgctctcatgagcaagcactcctgtctccccggtgtggttgtataaactgttcccacggttgaaaacaatctatccgttatccgctatagtacttcgagaaacctagtatcacctttggattgttgacgcgttgcgctcagcacactaacccgtgtgtagcttgggtcgatgagtctggacttaccccactggcgacagtggtccaggctgcgttggcggcctactcatggtgaaaaccatgagacgctagacatgaacaaggtgtgaagagtctattgagctactatagagtcctccggcccctgaatgcggctaatcctaaccatggagcaagtgctcacaggccagtgagttgcttgtcgtaatgcgcaagtccgtggcggaaccgactactttgggtgtccgtgtttcactttttacttttatgactgcttatggtgacaatttgatattgttaccatttagctgtcaaattaattgcaaaagatcctaagtcttacttaccaatttgcattttgataaccttgatttgaaaattttaata

SEQ ID NO: 21245 - DNA, 675 bp, synthetic construct
  source 1..675: mol_type = other DNA
tcccactccaggggcccacgtggcggctagtactctggtacttcggtacctttgtacgcctgttttatctcccttcccaatgtaacttagaagttcttaaatcaatgctcaataggtggggcgcaaaccagcgctctcatgagcaagtactcctgtctccccggtgaggttgtataaactgttcccacggttgaaaacaacctatccgttatccgctatagtacttcgagaaacctagtaccacctttggattgttgacgcgttgcgctcagcacactaacccgtgtgtagcttgggtcgatgagtctggacgtacctcactggcgacagtggtccaggctgcgttggcggcctactcatggtgaaagccatgagacgctagacatgaacaaggtgtgaagagtctattgagctactatagagtcctccggcccctgaatgcggctaatcctaaccatggagcaagtgctcacaggccagtgagttgcttgtcgtaatgcgcaagtccgtggcggaaccgactactttgggtgtccgtgtttcactttttacttttatgactgcttatggtgacaatttgatattgttaccatttagcttgtcaaatcaattgcaaaagatcctaaatcttatttatcaacttgcatcttgataacttatttgaaaattttaaca

SEQ ID NO: 21246 - DNA, 656 bp, synthetic construct
  source 1..656: mol_type = other DNA
gcggctagtactctggtatttcggtacctttgtacgcctgttttatctcccttcccaatgtaatttagaagctcttaaatcaaggctcaataggtggggcgcaaaccagcgctctcatgagcaagcactcctgtctccccggtgtggttgtataaactgttcccacggttgaaaacaacctatccgttatccgctatagtacttcgagaaacctagtatcacctttggattgttgacgcgttgcgctcagcacactaacccgtgtgtagcttgggtcgatgagtctggacataccccactggcgacagtggtccaggctgcgttggcggcctactcatggtgaaaaccatgagacgctagacatgaacaaggtgtgaagagtctattgagctactatagagtcctccggcccctgaatgcggctaatcctaaccatggagcaagtgctcacaggccagtgagttgcttgtcgtaatgcgcaagtccgtggcggaaccgactactttgggtgtccgtgtttcactttttacttttatgactgcttatggtgacaatttgatattgttaccatttagcttgtcaaattaattgcaaaagatcctaaatcttatttatcaacttgcattttgacaaccttgatttgaaaatttttaata

SEQ ID NO: 21247 - DNA, 666 bp, synthetic construct
  source 1..666: mol_type = other DNA
gggcccacgtggcggctagtactctggtatttcggtacctttgtacgcctgttttatatccctccccaatgtaatttagaagctttcaaatcaaagctcaataggtggagcgcaagccagcgcttccgtgagcaagcacttctgtttccccggtgcggttgtatagactgttcccacggttgaaaacgacctatccgttatccgctatagtacttcgagaaacctagtatcacctttggattgttgatgcgttgcgctcaacacactaacccgtgtgtagcttgggtcgatgagtctggacgtaccccactggtgacagtggtccaggctgcgttggcggcctactcatggtgaaaaccatgagacgctagacatgaacaaggtgtgaagagtctattgagctactatagagtcctccggcccctgaatgcggctaatcttaaccatggagcaagtgctcacaaaccagtgagttgcttgtcgtaatgcgcaagtccgtggcggaaccgactactttgggtgtccgtgtttcactttttacttttatgactgcttatggtgacaatttaatattgttaccattcagctagtcaaattaattgcaaaagatcctaagtcttacttaccaatttgcattttgataaccttgatttgaaaattttaata

SEQ ID NO: 21248 - DNA, 669 bp, synthetic construct
  source 1..669: mol_type = other DNA
ccaagggcccacgtggcggctagtactctggtacttcggtacctttgtacgcctgttttatctcccttcccaatgtaacttagaagctcttaaatcaaggctcaataggtggagcgcaaaccagcgctcttatgagcaagtacttctgtttccccggtgcggttatataaactgttcccacggttgaaaataacctatccgttatccgctatagtacttcgagaaacctagtatcacctttggattgttgacgcgttgcgctcagcacactaacccgtgtgtagcttgggtcgatgagtctggacataccccactggcgacagtggtccaggctgcgttggcggcctactcatggtgaaaaccatgagacgctagacatgaacaaggtgtgaagagtctattgagctactatagagtcctccggcccctgaatgcggctaatcctaaccatggagcaagtgctcacagaccagtgagttgcttgtcgtaatgcgcaagtccgtggcggaaccgactactttgggtgaccgtgtttcactttttacccttatgactgcttatggtgacaatttgatattgttgccatttagcttgtcaaatcaattgcaaaagatcctaaatcttatttatcaacttgcattttgataactttaatttgaagatttaata

SEQ ID NO: 21249 - DNA, 676 bp, synthetic construct
  source 1..676: mol_type = other DNA
tcccactccaagggcccacgtggcggctagtactctggtacttcggtacctttgtacgcctgttttatctcccttcccaatgtaacttagaagctcttaaatcaaggctcaataggtggagcgcaaaccagcgctcttatgagcaagtacttctgtttccccggtgcggttatataaactgttcccacggttgaaaataacctatccgttatccgctatagtacttcgagaaacctagtatcacctttggattgttgacgcgttgcgctcagcacactaacccgtgtgtagcttgggtcgatgagtctggacataccccactggcgacagtggtccaggctgcgttggcggcctactcatggtgaaaaccatgagacgctagacatgaacaaggtgtgaagagtctattgagctactatagagtcctccggcccctgaatgcggctaatcctaaccatggagcaagtgctcacagaccagtgagttgcttgtcgtaatgcgcaagtccgtggcggaaccgactactttgggtgaccgtgtttcactttttacccttatgactgcttatggtgacaatttgatattgttgccatttagcttgtcaaatcaattgcaaaagatcctaaatcttatttatcaacttgcattttgataactttaatttgaagatttaata

SEQ ID NO: 21250 - DNA, 695 bp, synthetic construct
  source 1..695: mol_type = other DNA
ttaaacacacggtctgggtgtccactccaagagccacgtgacggctagtactctggtacttcggtacctttgtacgccggttttatctcccttcccaatgtaatttagaagctcttaaatcaaggctcaataggtggggcgcaaaccagcgctctcatgagcaagcactcctgtctccccggtgtggttgcataaactgttcccacggttgaaaacaacctatccgttatccgctatagtacttcgagaaacctagtatcacctttggattgttgacgcgttgcgctcagcacactaacccgtgtgtagcttgggtcgatgagtctggacataccccactggcgacagtggtccaggctgcgttggcggcctactcatggtgaaaaccatgagacgctagacatgaacaaggtgtgaagagtctattgagctactatagagtcctccggcccctgaatgcggctaatcctaaccatggagcaagtgctcacaggccagtgagttgcttgtcgtaatgcgcaagtccgtggcggaaccgactactttgggtgtccgtgtttcactttttacttttatgactgcttatggtgacaatttgatattgttaccatttagcttgtcaaattaattgcaaaagatcctaaatcttacttaccaacttgcattttgataaccttgatttgaaaattttaata

SEQ ID NO: 21251 - DNA, 665 bp, synthetic construct
  source 1..665: mol_type = other DNA
gggcccacgtggcggctagtactctggtacttcggtacctttgtacgcctgttttatctcccttcccaatgtaatttagaagcttttaaatcaaggctcaataggtggggcgcaaaccagcgctctcatgagcaagcactcctgtctccccggtgtggttgtataaactgttcccacggttgaaaacaacctatccgttatccgctatagtacttcgagaaacctagtatcacctttggattgttgacgcgttgcgctcagcacactaacccgtgtgtagcttgggtcgatgagtctggacataccccactggcgacagtggtccaggctgcgttggcggcctactcatggtgaaaaccatgggacgctagacatgaacaaggtgtgaagagtctattgagctactatagagtcctccggcccctgaatgcggctaatcctaaccatggagcaagtgctcacaggccagtgagttgcttgtcgtaatgcgcaagtccgtggcggaaccgactactttgggtgtccgtgtttcactttttacttttatgactgcttatggtgacaatttgatattgttaccatttagctgtcaaattaattgcaaaagatcctaagtcttacttaccaatttgcattttgataaccttgatttgaaaattttaata

SEQ ID NO: 21252 - DNA, 653 bp, synthetic construct
  source 1..653: mol_type = other DNA
ggctagtactctggtacttcggtacctttgtacgcctgttttatctcccttcccaatgtaacttagaagttcttaaattaatgctcaataggtggggcgcaaaccagcgctctcatgagcaagcactcctgtctccccggtgaggttgtataaactgttcccacggttgaaagcaacctatccgttatccgctatagtacttcgagaaacctagtaccaccttcggattgttgacgcgttgcgctcagcacactaacccgtgtgtagcttgggtcgatgagtctggacatacctcactggcgacagtggtccaggctgcgttggcggcctactcatggtgaaagccatgagacgctagacatgaacaaggtgtgaagagtctattgagctactatagagtcctccggcccctgaatgcggctaatcctaaccatggagcaagtgctcacaggccagtgagttgcttgtcgtaatgcgcaagtccgtggcggaaccgactactttgggtgtccgtgtttcactttttacttttatgactgcttatggtgacaatttgatattgttaccatttagcttgtcaaatcaattgcaaaagatcctaaatcttatttatcaacttgcatcttgataactttaatttgaaaattttaaca

SEQ ID NO: 21253 - DNA, 654 bp, synthetic construct
  source 1..654: mol_type = other DNA
gcggctagtactctggtacttcggtacctttgtacgcctgttttatctcccttcccaatgtaatttagaagcttttaaatcaaggctcaataggtggggcgcaaaccagcgctctcatgagcaagcactcctgtctccccggtgtggttgtataaactgttcccacggttgaaaacaacctatccgttatccgctatagtacttcgagaaacctagtatcacctttggattgttgatgcgttgcgctcagcacactaacccgtgtgtagcttgggtcgatgagtctggacataccccactggcgacagtggtccaggctgcgttggcggcctactcatggtgaaaaccatgagacgctagacatgaacaaggtgtgaagagtctattgagctactatagagtcctccggcccctgaatgcggctaatcctaaccatggagcaagtgctcgcaggccagtgagttgcttgtcgtaatgcgcaagtccgtggcggaaccgactactttgggtgtccgtgtttcactttttacttttatgactgcttatggtgacaatttgatattgttaccatttagctgtcaaattaattgcaaaagatcctaagtcttacttaccaatttgcattttgataaccttgatttgaaaattttaata

SEQ ID NO: 21254 - DNA, 732 bp, synthetic construct
  source 1..732: mol_type = other DNA
tgtttgcgaacgagtttaggattttaaaacagccttggggttgttcccaccccaagggcccacgtggcggctagtactctggtatctcggtacctttgtacgcctgttttatctcccttcccaacgcaacttagaagttttcaaatcgaggctcaataggtgaagcgcaaaccagcgctttcatgagcaagcacttctgtctccccggtgcagttgtatagactgtttccacggttgaaaacaacttatccgttatccgctatagtacttcgagaaacctagtatcacctttggattgttgatgcgttgcgctcagcacactaacccgtgtgtagcttgggtcgatgagtctggacgtaccccactggtgacagtggtccaggctgcgttggcggcctactcatggtgaaaaccatgagacgctaaacatgaacaaggtgtgaagagtctattgagctactatagagtcctccggcccctgaatgcggctaatcttaaccatggagcaagtgctcacaagccagtgagttgcttgtcgtaatgcgcaagtccgtggcggaaccgactactttgggtgtccgtgtttcactttttacttttatgactgcttatggtgacaatttaatattgttaccatttagcttgtcagatcaatcacgtgaaatcccaaatctcatttaataatctgtatttggataacttcatttgaaaatcctaaactcgttcgcaaac

SEQ ID NO: 21255 - DNA, 653 bp, synthetic construct
  source 1..653: mol_type = other DNA
ggctagtactctggtacttcggtacctttgtacgcctgttttatctcccttcccaatgtaacttagaagttcttaaaccaatgctcaataggtggggcgcaaaccagcgctctcatgagcaagcactcctgtctccccggtgaggttgtataaactgttcccacggttgaaaacaacctatccgttatccgctatagtacttcgagaaacctagtaccacctttggattgttgacgcgttgcgctcagcacactaacccgtgtgtagcttgggtcgatgagtctggacatacctcactggcgacagtggtccaggctgcgttggcggcctactcatggtgaaagccatgagacgctagacatgaacaaggtgtgaagagtctattgagctactatagagtcctccggcccctgaatgcggctaatcctaaccatggagcaagtgctcacaggccagtgagttgcttgtcgtaatgcgcaagtccgtggcggaaccgactactttgggtgtccgtgtttcactttttacttttatgactgcttatggtgacaatttgatattgttaccatttagcttgtcaaatcaattgcaaaagatcctaactcttatttatcaacttgcatcttgataactttaatttgaaaattttaaca

SEQ ID NO: 21256 - DNA, 652 bp, synthetic construct
  source 1..652: mol_type = other DNA
ggctagtactctggtacttcggtacctttgtacgcctgttttatctcccttcccaatgtaatttagaagcttttaaatcaaggctcaataggtggggcgcaaaccagcgctctcatgagcaagcactcctgtctccccggtgtggttgtataaactgttcccacggttgaaaacaacctatccgttatccgctatagtacttcgagaaacctagtatcacctttggattgttgacgcgttgcgctcagcacactaacccgtgtgtagcttgggtcgatgagtctggacataccccactggcgacagtggtccaggctgcgttggcggcctactcatggtgaaaaccatgagacgctagacatgaacaaggtgtgaagagtctattgagctactatagagtcctccggcccctgaatgcggctaatcctaaccatggagcaagtgctcacaggccagtgagttgcttgtcgtaatgcgcaagtccgtggcggaaccgactactttgggtgtccgtgtttcactttttacttttatgactgcttatggtgacaatttgatattgttaccatttagctgtcaaattaattgcaaaagatcctaagtcttacttaccaatttgcattttgataaccttgatttgaaaactttaata

SEQ ID NO: 21257 - DNA, 675 bp, synthetic construct
  source 1..675: mol_type = other DNA
cactccaagggcccacgtggcggctagtactctggtacttcggtacctttgtacgcctgttttatctcccttcccaatgtaacttagaagttcttaaatcaatgctcaataggtggggcgcaaaccagcgctctcatgagcaagcactcctgtctccccggtgaggttgtataaactgttcccacggttgaaaacaacctatccgttatccgctatagtacttcgagaaacctagtaccacctttggattgttgacgcgttgcgctcagcacactaacccgtgtgtagcttgggtcgatgagtctggacatacctcactggcgacagtggtccaggctgcgttggcggcctactcatggtgaaagccatgagacgctagacatgaacaaggtgtgaagagtctattgagctactatagagtcctccggcccctgaatgcggctaatcctaaccatggagcaagtgctcacaggccagtgagttgcttgtcgtaatgcgcaagtccgtggcggaaccgactactttgggtgtccgtgtttcatttttttacttttatgactgcttatggtgacaatttgatattgttaccatttagcttgtcaaatcaattgcaaaagatcctaactcttatttatcaacttgcatcttgataactttaatttgaaaattttaaca

SEQ ID NO: 21258 - DNA, 710 bp, synthetic construct
  source 1..710: mol_type = other DNA
ttaaaacagccttggggttgttcccaccccaagggcccacgtggcggctagtactctggtatttcggtacctttgtacgcctgttttatatccctccccaatgtaatttagacgctttcaaatcaaagctcaataggtggagcgcaagccagcgcttccgtgagcaagcacttctgtttccccggtgcggttgtatagactgttcccacggttgaaaacgacctatccgttatccgctatagtacttcgagaaacctagtatcacctttggattgttgatgcgttgcgctcaacacactaacccgtgtgtagcttgggtcgatgagtctggacgtaccccactggtgacagtggtccaggctgcgttggcggcctactcatggtgaaaaccatgagacgctagacatgaacaaggtgtgaagagtctattgagctactatagagtcctccggcccctgaatgcggctaatcttaaccatggagcaagtgctcacaaaccagtgagttgcttgtcgtaatgcgcaagtccgtggcggaaccgactactttgggtgtccgtgtttcactttttacttttatgactgcttatggtgacaatttaatattgttaccattcagctagtcgaaataatcacataaaactttaaatcctatctaataattcacatttggatagtttcatttcgaggactttaaacctacttacaaag

SEQ ID NO: 21259 - DNA, 596 bp, synthetic construct; identical to SEQ ID NO: 644
  source 1..596: mol_type = other DNA

SEQ ID NO: 21260 - DNA, 674 bp, synthetic construct
  source 1..674: mol_type = other DNA
cactccaagggcccacgtggcggctagtactctggtacttcggtacctttgtacgcctgttttatctcccttcccaatgtaacttagaagttcttaaatcaatgctcaataggtggggcgcaaaccagcgctctcatgagcaagcactcctgtttccccggtgaggttgtataaactgttcccacggttgaaaacaacctatccgttatccgctatagtacttcgagaaacctagtaccacctttggattgttgacgcgttgcgctcagcacactaacccgtgtgtagcttgggtcgatgagtctggacatacctcactggcgacagtggtccaggctgcgttggcggcctactcatggtgaaagccatgagacgctagacatgaacaaggtgtgaagagtctattgagctactatagagtcctccggcccctgaatgcggctaatcctaaccatggagcaagtgctcacaggccagtgagttgcttgtcgtaatgcgcaagtccgtggcggaaccgactactttgggtgtccgtgtttcactttttacttttatgactgcttatggtgacaatttgatattgttaccatttagcttgtcaaatcaatcgcaaaagatcctaaatcttatttatcaacttgcatcttgataactttaattcgaaaattttaaca

SEQ ID NO: 21261 - DNA, 674 bp, synthetic construct
  source 1..674: mol_type = other DNA
cactccaagggcccacgtggcggctagtactctggtacttcggtacctttgtacgcctgttttatctcccttcccaatgtaacttagaagttcttaaatcaatgctcaataggtggggcgcaaaccagcgctctcatgagcaagcactcctgtctccccggtgaggttgtataaactgttcccacggttgaaaacaacctatccgttatccgctatagtacttcgagaaacctagtaccacctttggattgttgacgcgttgcgctcagcacactaacccgtgtgtagcttgggtcgatgagtctggacatacctcactggcgacagtggtccaggctgcgttggcggcctactcatggtgaaagccatgagacgctagacatgaacaaggtgtgaagagtctattgagctactatagagtcctccggcccctgaatgcggctaatcctaaccatggagcaagtgctcacaggccagtgagttgcttgtcgtaatgcgcaagtccgtggcggaaccgactactttgggtgtccgtgtttcactttttacttttatgactgcttatggtgacaatttgatattgttaccatttagcttgtcaaatcaattgcaaaagatcctaaatcttatttatcaacttgcatcttgataactttaatttgaaaattttaaca

SEQ ID NO: 21262 - DNA, 674 bp, synthetic construct
  source 1..674: mol_type = other DNA
cactccaagggcccacgtggcggctagtactctggtacttcggtacctttgtacgcctgttttatctcccttcccaatgtaacttagaagttcttaaatcaatgctcaataggtggggcgcaaaccagcgctctcatgagcaagcactcctgtctccccggtgaggttgtataaactgttcccacggttgaaaacaacctatccgttatccgctatagtacttcgagaaacctagtaccacctttggattgttgacgcgttgcgctcagcacactaacccgtgtgtagcttgggtcgatgagtctggacatacctcactggcgacagtggtccaggctgcgttggcggcctactcatggtgaaagccatgagacgctagacatgaacaaggtgtgaagagtctattgagctactatagagtcctccggcccctgaatgcggctaatcctaaccatggagcaagtgctcacaggccagtgagttgcttgtcgtaatgcgcaagtccgtggcggaaccgactactttgggtgtccgtgtttcactttttactcttatgactgcttatggtgacaatttgatattgttaccatttagcttgtcaaatcaattgcaaaagatcctaactcttatttatcaacttgtatcttgataactttaatttgaaaattttaaca

SEQ ID NO: 21263 - DNA, 674 bp, synthetic construct
  source 1..674: mol_type = other DNA
cactccaagggcccacgtggcggctagtactctggtacttcggtacctttgtacgcctgttttatctcccttcccaatgtaacttagaagttcttaaatcaatgctcaataggtggggcgcaaaccagcgctctcatgagcaagcactcctgtctccccggtgaggttgtataaactgttcccacggttgaaaacaacctatccgttatccgctatagtacttcgagaaacctagtaccacctttggattgttgacgcgttgcgctcagcacactaacccgtgtgtagcttgggtcgatgagtctggacatacctcactggcgacagtggtccaggctgcgttggcggcctactcatggtgaaagccatgagacgctagacatgaacaaggtgtgaagagtctattgagctactatagagtcctccggcccctgaatgcggctaatcctaaccatggagcaagtgctcacaggccagtgagttgcttgtcgtaatgcgcaagtccgtggcggaaccgactactttgggtgtccgtgtttcactttttacttttatgactgcttatggtgacaatttgatattgttaccatttagcttgtcaaatcaattgcaaaagatcctaactcttatttatcaacttgcatcttgataactttaatttgaaaattttaaca

SEQ ID NO: 21264 - DNA, 674 bp, synthetic construct
  source 1..674: mol_type = other DNA
cactccaagggcccacgtggcggctagtactctggtacttcggtacctttgtacgcctgttttatctcccttcccaatgtaacttagaagttcttaaatcaatgctcaatagctggggcgcaaaccagcgctctcatgagcaagcactcctgtctccccggtgaggttgtataaactgttcccacggttgaaaacaacctatccgttatccgctatagtacttcgagaaacctagtaccacctttggattgttgacgcgttgcgctcagcacactaacccgtgtgtagcttgggtcgatgagtctggacatacctcactggcgacagtggtccaggctgcgttggcggcctactcatggtgaaagccatgagacgctagacatgaacaaggtgtgaagagtctattgagctactatagagtcctccggcccctgaatgcggctaatcctaaccatggagcaagtgctcacaagccagtgagttacttgtcgtaacgcgcaagtccgtggcggaaccgactactttgggtgtccgtgtttcactttttacttttatgactgcttatggtgacaatttgatattgttaccatttagcttgtcaaatcaattgcaaaagatcctaaatcttatttatcaacttgcatcttgataactttaatttgaaaattttaaca

SEQ ID NO: 21265 - DNA, 674 bp, synthetic construct
  source 1..674: mol_type = other DNA
cactccaagggcccacgtggcggctagtactctggtacttcggtacctttgtacgcctgttttatctcccttcccaatgtaacttagaagttcttaaatcaatgctcaataggtggggcgcaaaccagcgctctcatgagcaagcactcctgtctccccggtgaggttgtataaactgttcccacggttgaaaacaacctatccgttatccgctatagtacttcgagaaacctagtaccacctttggattgttgacgcgttgcgctcagcacactaacccgtgtgtagcttgggtcgatgagtctggacatacctcactggcgacagtggtccaggctgcgttggcggcctactcatggcgaaagccatgagacgctagacatgaacaaggtgtgaagagtctattgagctactatagagtcctccggcccctgaatgcggctaatcctaaccatggagcaagtgctcacaggccagtgagttacttgtcgtaatgcgcaagtccgtggcggaaccgactactttgggtgtccgtgtttcactttttacttttatgactgcttatggtgacaatttgatattgttaccatttagcttgtcaaatcaattgcaaaagatcctaaatcttatttgtcaacttgcatcttgataactttaatttgaaaattttaaca

SEQ ID NO: 21266 - DNA, 674 bp, synthetic construct
  source 1..674: mol_type = other DNA
cactccaagggcccacgtggcggctagtactctggtacttcggtacctttgtacgcctgttttatctcccttcccaatgtaacttagaagttcttaaatcaatgctcaataggtggggcgcaaaccagcgctctcatgagcaagcactcctgtctccccggtgaggttgtataaactgttcccacggttgaaaacaacctatccgttatccgctatagtacttcgagaaacctagtaccacctttggattgttgacgcgttgcgctcagcacactaacccgtgtgtagcttgggtcgatgagtctggacatacctcactggcgacagtggtccaggctgcgttggcggcctactcatggtgaaagccatgagacgctagacatgaacaaggtgtgaagagtctattgagctactatagagtcctccggcccctgaatgcggctaatcctaaccatggagcaagtgctcacaggccagtgagttgcttgtcgtaatgcgcaagtccgtggcggaaccgactactttgggtgtccgtgtttcactttttacttttatgactgcttatggtgacaatttgatattgttaccatttagcttgtcaaatcaattgcaaaagatcctaactcttatttatcaacttgcatctcgataactctaatttgaaaattttaaca

SEQ ID NO: 21267 - DNA, 674 bp, synthetic construct
  source 1..674: mol_type = other DNA
cactccaagggcccacgtggcggctagtactctggtacttcggtacctttgtacgcctgttttatctcccttcccaatgtaacttagaagttcttaaatcaatgctcaataggtggggcgcaaaccagcgctctcatgagcaagcactcctgtctccccggtgaggttgtataaactgttcccacggttgaaaacaacctatccgttatccgctatagtacttcgagaaacctagtaccacctttggattgttgacgcgttgcgctcagcacactaacccgtgtgtagcttgggtcgatgagtctggacatacctcactggcgacagtggtccaggctgcgttggcggcctactcatggtgaaaaccatgagacgctagacatgaacaaggtgtgaagagtctattgagctactatagagtcctccggcccctgaatgcggctaatcctaaccatggagcaagtgctcacaggccagtgagttgcttgtcgtaatgcgcaagtccgtggcggaaccgactactttgggtgtccgtgtttcactttttacttttgtgactgcttatggtgacaatttgatattgttaccatttagcttgtcaaatcaattacaaaagatcctaaatcttattcatcaatttgcatcttgataattttaatttgaaaatttcaaca

SEQ ID NO: 21268 - DNA, 674 bp, synthetic construct
  source 1..674: mol_type = other DNA
cactccaagggcccacgtggcggctagtactctggtacttcggtacctttgtacgcctgttttatctcccttcccaatgtaacttagaagttcttaaatcaatgctcaacaggtggggcgcaaaccagcgctctcatgagcaagcactcctgtctccccggtgaggttgtataaactgttcccacggttgaaaacaacctatccgttatccgctatagtacttcgagaaacctagtaccacctttggattgttgacgcgttgcgctcagcacactaacccgtgtgtagcttgggtcgatgagtctggacatacctcactggcgacagtggtccaggctgcgttggcggcctactcatggtgaaagccatgagacgctagacatgaacaaggtgtgaagagtctattgagctactatagagtcctccggcccctgaatgcggctaatcctaaccatggagcaagtgctcacaggccagtgagttgcttgtcgtaatgcgcaagtccgtggcggaaccgactactttgggtgtccgtgtttcactttttacttttatgactgcttatggtgacaatttgatattgttaccatttagcttgtcaaatcaattgcaaaagatcctaaatcttatttatcaacttgcatcttgataactttaatttgaaaattttaaca

SEQ ID NO: 21269 - DNA, 674 bp, synthetic construct
  source 1..674: mol_type = other DNA
cactccaagggcccacgtggcggctagtactctggtacttcggtacctttgtacgcctgttttatctcccttcccaatgtaacttagaagttcttaaatcaatgctcaataggtggggcgcaaaccagcgctctcatgagcaagcactcctgtctccccggtgaggttgtataaactgttcccacggttgaaaacaacctatccgttatccgctatagtacttcgagaaacctagtaccacctttggattgttgacgcgttgcgctcagcacactaacccgtgtgtagcttgggtcgatgagtctggacatacctcactggcgacagtggtccaggctgcgttggcggcctactcatggtgaaagccatgagacgctagacatgaacaaggtgtgaagagtctattgagctactatagagtcctccggcccctgaatgcggctaatcctaaccatggagcaagtgctcacaggccagtgagttgcttgtcgtaatgcgcaagtccgtggcggaaccgactactttgggtgtccgtgtttcactttttacttttatgactgcttatggtgacaatttgatattgttaccatttagcttgtcaaatcaattgcaaaagatcctaaatcttatttatcaacttgcatcttgataactttaacttgaaaattttaaca

SEQ ID NO: 21270 - DNA, 674 bp, synthetic construct
  source 1..674: mol_type = other DNA
cactccaagggcccacgtggcggctagtactctggtacttcggtacctttgtacgcctgttttatctcccttcccaatgtaacttagaagttcttaaatcaatgctcaataggtggggcgcaaaccagcgctctcatgagcaagcactcctgtctccccggtgaggttgtataaactgttcccacggttgaaaacaacctatccgttatccgctatagtacttcgagaaacctagtaccacctttggattgttgacgcgttgcgctcagcacactaacccgtgtgtagcttgggtcgatgagtctggacataccccactggcgacagtggtccaggctgcgttggcggcctactcatggtgaaagccatgagacgctagacatgaacaaggtgtgaagagtctattgagctactatagagtcctccggcccctgaatgcggctaatcctaaccatggagcaagtgctcacaggccagtgagttgcttgtcgtaatgcgcaagtccgtggcggaaccgactactttgggtgtccgtgtttcactttttgcttttatgactgcttatggtgacaatttgatattgttaccatttagcttgtcaaatcaattgcaaaagatcctaaatcttatttatcaacttgcatcttgataactttaatttgaaaattttaaca

SEQ ID NO: 21271 - DNA, 674 bp, synthetic construct
  source 1..674: mol_type = other DNA
cactccaagggcccacgtggcggctagtactctggtacttcggtacctttgtacgcctgttttatctcccttcccaatgtaacttagaagttcttaaatcaatgctcaataggtggggcgcaaaccagcgctctcatgagcaagcactcctgtctccccggtgaggttgtataaactgttcccacggttgaaaacaacctatccgttatccgctatagtacttcgagaaacctagtaccacctttggattgttgacgcgttgcgctcagcacactaacccgtgtgtagcttgggtcgatgagtctggacatacctcactggcgacagtggtccaggctgcgttggcggcctactcatggtgaaagccatgagacgctagacatgaacaaggtgtgaagagtctattgagctactatagagtcctccggcccctgaatgcggctaatcctaaccatggagcaagtgctcacaggccagtgagttgcttgtcgtaatgcgcaagtccgtggcggaaccgactactttgggtgtccgtgtttcactttttacttttatgactgcttatggtgacaatttgatattgttaccatttagcttgtcaaatcaattacaaaagattctaactcttatttatcaacttgcatctcgataactctaatttgaaaattttaaca

SEQ ID NO: 21272 - DNA, 674 bp, synthetic construct
  source 1..674: mol_type = other DNA
cactccaagggcccacgtggcggctagtactctggtacttcggtacctttgtacgcctgttttatctcccttcccaatgtaacttagaagttcttaaatcaatgctcaataggtggggcgcaaaccagcgctctcatgagcaagcactcctgtctccccggtgaggttgtataaactgttcccacggttgaaaacaacctatccgttatccgctatagtacttcgagaaacctagtaccacctttggattgttgacgcgttgcgctcagcacactaacccgtgtgtagcttgggtcgatgagtctggacacacctcactggcgacagtggtccaggctgcgttggcggcctactcatggtgaaagccatgagacgctagacatgaacaaggtgtgaagagtctattgagctactatagagtcctccggcccctgaatgcggctaatcctaaccatggagcaagtgctcacaggccagtgagttgcttgtcgtaatgcgcaagtccgtggcggaaccgactactttgggtgtccgtgtttcactttttacttttatgactgcttatggtgacaatttgatattgttaccatttagcttgtcaaatcaattgcaaaagatcctaaatcttatttgtcaacttgcatcttgataactttaatttgaaaattttaaca

SEQ ID NO: 21273 - DNA, 674 bp, synthetic construct
  source 1..674: mol_type = other DNA
cactccaagggcccacgtggcggctagtactctggtacttcggtacctttgtacgcctgttttatctcccttcccaatgtaacttagaagttcttaaatcaatgctcaataggtggggcgcaaaccagcgctctcatgagcaagcactcctgtctccccggtgaggttgtataaactgttcccacggttgaaaacaaccaatccgttatccgctatagtacttcgagaaacctagtaccacctttggattgttgacgcgttgcgctcagcacactaacccgtgtgtagcttgggtcgatgagtctggacatacctcactggcgacagtggtccaggctgcgttggcggcctactcatggtgaaaaccatgagacgctagacatgaacaaggtgtgaagagtctattgagctactatagagtcctccggcccctgaatgcggctaatcctaaccatggagcaagtgctcacaggccagtgagttgcttgtcgtaatgcgcaagtccgtggcggaaccgactactttgggtgtccgtgtttcactttttacttttatgactgcttatggtgacaatttgatattgttaccatttagcttgtcaaatcaattgcaaaagatcctaaatcttatttatcaatttgcatcttgataactttaatttgaaaattttaaca

SEQ ID NO: 21274 - DNA, 674 bp, synthetic construct
  source 1..674: mol_type = other DNA
cactccaagggcccacgtggcggctagtactctggtacttcggtacctttgtacgcctgttttatctcccttcccaatgtaacttagaagttcttaaatcaatgctcaataggtggggcgcaaaccagcgctctcatgagcaagcactcctgtctccccggtgaggttgtataaactgttcccacggttgaaaacaacctatccgttatccgctatagtacttcgagaaacctagtaccacctttggattgttgacgcgttgcgctcagcacactaacccgtgtgtagcttgggtcgatgagtctggacatacctcactggcgacagtggtccaggctgcgttggcggcctactcatggtgaaagccatgagacgctagacatgaacaaggtgtgaagagtctattgagctactatagagtcctccggcccctgaatgcggctaatcctaactatggagcaagtgctcacaggccagtgagttgcttgtcgtaatgcgcaagtccgtagcggaaccgactactttgggtgtccgtgtttcactttttacttttatgactgcttatggtgacaatttgatattgttaccatttagcttgtcaaatcaattgcaaaagatcctaaatcttatttatcaacttgcatcttgataactttaatttgaaaattttaaca

SEQ ID NO: 21275 - DNA, 674 bp, synthetic construct
  source 1..674: mol_type = other DNA
cactccaagggcccacgtggcggctagtactctggtacttcggtacctttgtacgcctgttttatctcccttcccaatgtaacttagaagttcttaaatcaatgctcaataggtggggcgcaaaccagcgctctcatgagcaagcactcctgtctccccggtgaggttgtataaactgttcccacggttgaaaacaacctatccgttatccgctatagtacttcgagaaacctagtaccacctttggattgttgacgcgttgcgctcagcacactaacccgtgtgtagcttgggtcgatgagtctggacatacctcactggtgacagtggtccaggctgcgttggcggcctactcatggtgaaagccatgagacgctagacatgaacaaggtgtgaagagtctattgagctactatagagtcctccggcccctgaatgcggctaatcctaaccatggagcaagtgctcacaggccagtgagttgcttgtcgtaatgcgcaagtccgtggcggaaccgactactttgggtgtccgtgtttcactttttacttttatgactgcttatggtgacaatttgatattgttaccatttagcttgtcaaatcaattgcaaaagatcctaaatcttatttatcaacttgcatcttgataactttaatttgaaaattttaaca

SEQ ID NO: 21276 - DNA, 674 bp, synthetic construct
  source 1..674: mol_type = other DNA
cactccaagggcccacgtggcggctagtactctggtacttcggtacctttgtacgcctgttttatctcccttcccaatgtaacttagaagttcttaaatcaatgctcaataggtggggcgcaaaccagcgctctcatgagcaagcactcctgtctccccggtgaggttgtataaactgttcccacggttgaaaacaacctatccgttatccgctatagtacttcgagaaacctagtaccacctttggattgttgacgcgttgcgctcagcacactaacccgtgtgtagcttgggtcgatgagtctggacatacctcactggcgacagtggtccaggctgcgttggcggcctactcatggtgaaaaccatgagacgctagacatgaacaaggtgtgaagagtctattgagctactatagagtcctccggcccctgaatgcggctaatcctaaccatggagcaagtgctcacaggccagtgagttgcttgtcgtaatgcgcaagtccgtggcggaaccgactactttgggtgtccgtgtttcactttttacttttatgactgcttatggtgacaatttgatattgttaccatttagcttgtcaaatcaattacaaaagatcctaaatcttattcatcaatttgcatcttgataatttcaatttgaaaatttcaaca

SEQ ID NO: 21277 - DNA, 674 bp, synthetic construct
  source 1..674: mol_type = other DNA
cactccaagggcccacgtggcggctagtactctggtacttcggtacctttgtacgcctgttttatctcccttcccaatgtaacttagaagttcttaaatcaatgctcaataggtggggcgcaaaccagcgctctcatgagcaagcactcctgtctccccggtgaggttgtataaactgttcccacggttgaaaacaacctatccgttatccgctatagtacttcgagaaacctagtaccacctttggattgttgacgcgttgcgctcagcacactaacccgtgtgtagcttgggtcgatgagtctggacatacctcactggcgacagtggtccaggctgcgttggcggcctactcatggtgaaaaccatgagacgctagacatgaacaaggtgtgaagagtctattgagctactatagagtcctccggcccctgaatgcggctaatcctaaccatggagcaagtgctcacaggccagtgagttgcttgtcgtaatgcgcaagtccgtggcggaaccgactactttgggtgtccgtgtttcactttttacttttatgactgcttatggtgacaatttgatattgttaccatttagcttgtcaaatcaattacaaaagatcctaaatcttattcatcaatttgcatcttgataattttaatttgaaaatttcaaca

SEQ ID NO: 21278 - DNA, 674 bp, synthetic construct
  source 1..674: mol_type = other DNA
cactccaagggcccacgtggcggctagtactctggtacttcggtacctttgtacgcctgttttatctcccttcccaatgtaacttagaagttcttaaatcaatgctcaataggtggggcgcaaaccagcgctctcatgagcaagcactcctgtctccccggtgaggttgtataaactgttcccacggttgaaaacaacctatccgttatccgctatagtacttcgagaaacctattaccacctttggattgttgacgcgttgcgctcagcacactaacccgtgtgtagcttgggtcgatgagtctggacatacctcactggcgacagtggtccaggctgcgttggcggcctactcatggtgaaagccatgagacgctagacatgaacaaggtgtgaagagtctattgagctactatagagtcctccggcccctgaatgcggctaatcctaaccatggagcaagtgctcacaggccagtgagttgcttgtcgtaatgcgcaagtccgtggcggaaccgactactttgggtgtccgtgtttcactttttacttttatgactgcttatggtgacaatttgatattgttaccatttagcttgtcaaatcaattgcaaaagatcctaactcttatttatcaacttgcatctcgataactctaatttgaaaattttaaca

SEQ ID NO: 21279 - DNA, 674 bp, synthetic construct
  source 1..674: mol_type = other DNA
cactccaagggcccacgtggcggctagtactctggtacttcggtacctttgtacgcctgttttatctcccttcccaatgtaacttagaagttcttaaatcaatgctcaataggtggggcgcaaaccagcgctctcatgagcaagcactcctgtctccccggtgaggttgtataaactgttcccacggttgaaagcaacctatccgttatccgctatagtacttcgagaaacctagtaccacctttggattgttgacgcgttgcgctcagcacactaacccgtgtgtagcttgggtcgatgagtctggacatacctcactggcgacagtggtccaggctgcgttggcggcctactcatggtgaaagccatgagacgctagacatgaacaaggtgtgaagagtctattgagctactatagagtcctccggcccctgaatgcggctaatcctaaccatggagcaagtgctcacaggccagtgagttgcttgtcgtaatgcgcaagcccgtggcggaaccgactactttgggtgtccgtgtttcactttttacttttatgactgcttatggtgacaatttgatattgttaccatttagcttgtcaaatcaattgcaagagatcctaaatcttatttatcaacttgcatcttgataactttaatttgaaaattttaaca

SEQ ID NO: 21280 - DNA, 674 bp, synthetic construct
  source 1..674: mol_type = other DNA
cactccaagggcccacgtggcggctagtactctggtacttcggtacctttgtacgcctgttttatctcccttcccaatgtaacttagaagttcttaaatcaatgctcaataggtggggcgcaaaccagcgctctcatgagcaagcactcctgtctccccggtgaggttgtataaactgttcccacggttgaaaacaacctatccgttatccgctatagtacttcgagaaacctagtaccacctttggattgttgacgcgttgcgctcagcacactaacccgtgtgtagcttgggtcgatgagtctggacatacctcactggcgacagtggtccaggctgcgttggcggcctactcatggtgaaaaccatgagacgctagacatgaacaaggtgtgaagagtctattgagctactatagagtcctccggcccctgaatgcggctaatcctaaccatggagcaagtgctcacaggccagtgagttgcttgtcgtaatgcgcaagtccgtggcggaaccgactactttgggtgtccgtgtttcactttttacttttatgactgcttatggtgacaatttgatattgttaccatttagcttgtcaaatcaattacaaaagatcctaaatcttatttatcaatttgcatcttgataactttaatttgaaaatttcaaca

SEQ ID NO: 21281 - DNA, 674 bp, synthetic construct
  source 1..674: mol_type = other DNA
cactccaagggcccacgtggcggctagtactctggtacttcggtacctttgtacgcctgttttatctcccttcccaatgtaacttagaagttcttaaatcaatgctcaataggtggggcgcaaaccagcgctctcatgagcaagcactcctgtctccccggtgaggttgtataaactgttcccacggttgaaaacaacctatccgttatccgctatagtacttcgagaaacctagtaccacctttggattgttgacgcgttgcgctcagcacactaacccgtgtgtagcttgggtcgatgagtctggacatacctcactggcgacagtggtccaggctgcgttggcggcctactcatggtgaaagccatgagacgctagacatgaacaaggtgtgaagagtctattgagctactatagagtcctccggcccctgaatgcggctaatcctaaccatggagcaagtgctcacaggccagtgagttgcttgtcgtaatgcgcaagtccgtggcggaaccgactactttgggtgtccgtgtttcactttttacttttatgactgcttatggtgacaatttgatattgttaccatttagcttgtcaaatcaaccgcaaaagatcctaaatcttatttatcaacttgcatcttgataactttaattcgaaaattttaaca

SEQ ID NO: 21282 - DNA, 674 bp, synthetic construct
  source 1..674: mol_type = other DNA
cactccaagggcccacgtggcggctagtactctggtacttcggtacctttgtacgcctgttttatctcccttcccaatgtaacttagaagttcttaaattaatgctcaataggtggggcgcaaaccagcgctctcatgagcaagcactcctgtctccccggtgaggttgtataaactgttcccacggttgaaaacaacctatccgttatccgctatagtacttcgagaaacctagtaccacctttggattgttgacgcgttgcgctcagcacactaacccgtgtgtagcttgggtcgatgagtctggacatacctcactggcgacagtggtccaggctgcgttggcggcctactcatggtgaaagccatgagacgctagacatgaacaaggtgtgaagagtctattgagctactatagagtcctccggcccctgaatgcggctaatcctaaccatggagcaagtgctcacaggccagtgagttgcttgtcgtaatgcgcaagtccgtggcggaaccgactactttgggtgtccgtgtttcactttttacttttatgactgcttatggtgacaatttgatattgttaccatttagcttgtcaaatcaattgcaaaagatcctaaatcttatttatcaacttgcatcttgataactttaatttgaaaattttaaca

SEQ ID NO: 21283 - DNA, 674 bp, synthetic construct
  source 1..674: mol_type = other DNA
cactccaagggcccacgtggcggctagtactctggtgcttcggtacctttgtacgcctgttttatctcccttcccaatgtaacttagaagttcttaaatcaatgctcaataggtggggcgcaaaccagcgctctcatgagcaagcactcctgtctccccggtgaggttgtataaactgttcccacggttgaaaacaacctatccgttatccgctatagtacttcgagaaacctagtaccacctttggattgttgacgcgttgcgctcagcacactaacccgtgtgtagcttgggtcgatgagtctggacatacctcactggcgacagtggtccaggctgcgttggcggcctactcatggtgaaagccatgagacgctagacatgaacaaggtgtgaagagtctattgagctactatagagtcctccggcccctgaatgcggctaatcctaaccatggagcaagtgctcacaggccagtgagttgcttgtcgtaatgcgcaagtccgtggcggaaccgactactttgggtgtccgtgtttcactttttacttttatgactgcttatggtgacaatttgatattgttaccatttagcttgtcaaatcaattgcaaaagatcctaaatcttatttatcaacttgcatcttgataactttaatttgaaaattttaaca

SEQ ID NO: 21284 - DNA, 674 bp, synthetic construct
  source 1..674: mol_type = other DNA
cactccaagggcccacgtggcggctagtactctggtacttcggtacctttgtacgcctgttttatctcccttcccaatgtaacttagaagttcttaaatcaatgctcaataggtggggcgcaaaccagcgctctcatgagcaagcactcctgtctccccggtgaggttgtataaactgttcccacggttgaaaacaacctatccgttaaccgctatagtacttcgagaaacctagtaccacctttggattgttgacgcgttgcgctcagcacactaacccgtgtgtagcttgggtcgatgagtctggacacacctcactggcgacagtggtccaggctgcgttggcggcctactcatggtgaaagccatgagacgctagacatgaacaaggtgtgaagagtctattgagctactatagagtcctccggcccctgaatgcggctaatcctaaccatggagcaagtgctcacaggccagtgagttgcttgtcgtaatgcgcaagtccgtggcggaaccgactactttgggtgtccgtgtttcactttttacttttatgactgcttatggtgacaatttgatattgttaccatttagcttgtcaaatcaattgcaaaagatcctaaatcttatttgtcaacttgcatcttgataactttaatttgaaaattttaaca

SEQ ID NO: 21285 - DNA, 674 bp, synthetic construct
  source 1..674: mol_type = other DNA
cactccaagggcccacgtggcggctagtactctggtacttcggtacctttgtacgcctgttttatctcccttcccaatgtaacttagaagttcttaaatcaatgctcaataggtggggcgcaaaccagcgctctcatgagcgagcactcctgtctccccggtgaggttgtataaactgttcccacggttgaaaacaacctatccgttatccgctatagtacttcgagaaacctagtaccacctttggattgttgacgcgttgcgctcagcacactaacccgtgtgtagcttgggtcgatgagtctggacatacctcactggcgacagtggtccaggctgcgttggcggcctactcatggtgaaagccatgagacgctagacatgaacaaggtgtgaagagtctattgagctactatagagtcctccggcccctgaatgcggctaatcctaaccatggagcaagtgctcacaggccagtgagttgcttgtcgtaatgcgcaagtccgtggcggaaccgactactttgggtgtccgtgtttcactttttacttttatgactgcttatggtgacaatttgatattgttaccatttagcttgtcaaatcaattgcaaaagatcctaaatcttatttatcaacttgcatcttgataactttaatttgaaaattttaaca

SEQ ID NO: 21286 - DNA, 674 bp, synthetic construct
  source 1..674: mol_type = other DNA
cactccaagggcccacgtggcggctagtactctggtactttggtacctttgtacgcctgttttatctcccttcccaatgtaacttagaagttcttaaatcaatgctcaataggtggggcgcaaaccagcgctctcatgagcaagcactcctgtctccccggtgaggttgtataaactgttcccacggttgaaaacaacctatccgttatccgctatagtacttcgagaaacctagtaccacctttggattgttgacgcgttgcgctcagcacactaacccgtgtgtagcttgggtcgatgagtctggacatacctcactggcgacagtggtccaggctgcgttggcggcctactcatggtgaaagccatgagacgctagacatgaacaaggtgtgaagagtctattgagctactatagagtcctccggcccctgaatgcggctaatcctaaccatggagcaagtgctcacaggccagtgagttgcttgtcgtaatgcgcaagtccgtggcggaaccgactactttgggtgtccgtgtttcactttttacttttatgactgcttatggtgacaatttgatattgttaccatttagcttgtcaaatcaattgcaaaagatcctaactcttatttatcaacttgcatcttgataactttaatttgaaaattttaaca

SEQ ID NO: 21287 - DNA, 674 bp, synthetic construct
  source 1..674: mol_type = other DNA
cactccaagggcccacgtggcggctagtactctggtacttcggtacctttgtacgcctgttttatctcccttcccaatgtaacttagaagttcttaaatcaatgctcaataggtggggcgcaaaccagcgctctcatgagcaagcactcctgtctccccggtgaggttgtataaactgttcccacggttgaaaacaacctatccgttatccgctatagtacttcgagaaacctagtaccacctttggattgttgacgcgttgcgctcagcacactaacccgtgtgtagcttgggtcgatgagtctggacatacctcactggcgacagtggtccaggctgcgttggcggcctactcatggtgaaagccatgagacgctagacatgaacaaggtgtgaagagtctattgagctactatagagtcctccggcccctgaatgcggctaatcctaaccatggagcaagtgctcacaggccagtgagttgcttgtcgtaatgcgcaagtccgtggcggaaccgactactttgggtgtccgtgtttcactttttacttttatgactgcttatggtgacaatttgatattgttaccatttagcttgtcaaatcaattgcaaaagatcctaaatcttatttatcaacttgcatcttgataactttaattcgaaaattttaaca

SEQ ID NO: 21288 - DNA, 674 bp, synthetic construct
  source 1..674: mol_type = other DNA
cactccaagggcccacgtggcggctagtactctggtacttcggtacctttgtacgcctgttttatctcccttcccaatgtaacttagaagttcttaaatcaatgctcaataggtggggcgcaaaccagcgctctcatgagcaagcactcctgtttccccggtgaggttgtataaactgttcccacggttgaaaacaacctatccgttatccgctatagtacttcgagaaacctagtaccacctttggattgttgacgcgttgcgctcagcacactaacccgtgtgtagcttgggtcgatgagtctggacatacctcactggcgacagtggtccaggctgcgttggcggcctactcatggtgaaaaccatgagacgctagacatgaacaaggtgtgaagagtctattgagctactatagagtcctccggcccctgaatgcggctaatcctaaccatggagcaagtgctcacaggccagtgagttgcttgtcgtaatgcgcaagtccgtggcggaaccgactactttgggtgtccgtgtttcactttttacttttatgactgcttatggtgacaatttgatattgttaccatttagcttgtcaaatcaattgcaaaatatcctaaatcttatttatcaatttgcatcttgataactttaatttgaaaattttaaca

SEQ ID NO: 21289 - DNA, 674 bp, synthetic construct
  source 1..674: mol_type = other DNA
cactccaagggcccacgtggcggctagtactctggtacttcggcacctttgtacgcctgttttatctcccttcccaatgtaacttagaagttcttaaatcaatgctcaataggtggggcgcaaaccagcgttctcatgagcaagcactcctgtctccccggtgaggttgtataaactgttcccacggttgaaaacgacctatccgttatccgctatagtacttcgagaaacctagtaccacctttggattgttgatgcgttgcgctcagcacactaacccgtgtgtagcttgggtcgatgagtctggacatacctcactggcgacagtggtccaggctgcgttggcggcctactcatggcgaaagccatgagacgctagacatgaacaaggtgtgaagagtctattgagctactatagagtcctccggcccctgaatgcggctaatcctaaccatggagcaagtgctcacaggccagtgagttgcttgtcgtaatgcgcaagtctgtggcggaaccgactactttgggtgtccgtgtttcactttttacttttatgactgcttatggtgacaatttgatattgttaccatttagcttgtcaaatcaattgcaaaagatcctaaatcttatttatcaacttgcatcttgataactttaatttgaaaattttaaca

SEQ ID NO: 21290 - DNA, 674 bp, synthetic construct
  source 1..674: mol_type = other DNA
cactccaagggcccacgtggcggctagtactctggtacttcggtacctttgtacgcctgttttatctcccttcccaatgtaacttagaagttcttaaatcaatgctcaataggtggggcgcaaaccagcgctctcatgagcaagcactcctgtctccccggtgaggttgtataaactgttcccacggttgaaaacaacctatccgttatccgctatagtacttcgagaaacctagtaccacctttggattgttgacgcgttgcgctcagcacactaacccgtgtgtagcttgggtcgatgagtctggacatacctcactggcgacagtggtccaggctgcgttggcggcctactcatggtgaaagccatgagacgctagacatgaacaaggtgtgaagagtctattgagctactatagagtcctccggcccctgaatgcggctaatcctaaccatggagcaagtgctcacaggccagtgagttgcttgtcgtaatgcgcaagtccgtggcggaaccgactactttgggtgtccgtgtttcactttttacttttatgactgcttatggtgacaatttgatattgttaccatttagcttgtcaaatcaattgcaaaagatcttaactcttatttatcaacttgcatctcgataactctaatttgaaaattttaaca

SEQ ID NO: 21291 - DNA, 674 bp, synthetic construct
  source 1..674: mol_type = other DNA
cactccaagggcccacgtggcggctagtactctggtacttcggtacctttgtacgcctgttttatctcccttcccaatgtaacttagaagttcttaaatcaatgctcaataggtggagcgcaaaccagcgctctcatgagcaagcactcctgtctccccggtgaggttgtataaactgttcccacggttgaaaacaacctatccgttatccgctatagtacttcgagaaacctagtaccacctttggattgttgacgcgttgcgctcagcacactaacccgtgtgtagcttgggtcgatgagtctggacatacctcactggcgacagtggtccaggctgcgttggcggcctactcatggtgaaaaccatgagacgctagacatgaacaaggtgtgaagagtctattgagctactatagagtcctccggcccctgaatgcggctaatcctaaccatggagcaagtgctcacaggccagtgagttgcttgtcgtaatgcgcaagtccgtggcggaaccgactactttgggtgtccgtgtttcactttttacttttatgactgcttatggtgacaatttgatattgttaccatttagcttgtcaaatcaattgcaaaagatcctaaatcttatttatcaatttgcatcttgataactttaatttgaaaattttaaca

SEQ ID NO: 21292 - DNA, 674 bp, synthetic construct
  source 1..674: mol_type = other DNA
caccccaagggcccacgtggcggctagtactctggtatttcggtacctttgtacgcctgttttatctcccttcccaatgtaacttagaagctctcaaatcaaagctcaataggtggggcgcaaaccagcgctctcacgagcaagcactcctgtctccccggtgtggttgtataaactgtccccacggttgaaaacaacctatccgttatccgctatagtacttcgagaaacctagtatcacctttggattgttgatgcgttgcgctcagcacactaacccgtgtgtagcttgggtcgatgagtctggacataccccactggcgacagtggtccaggctgcgttggcggcctactcatggtgaaaaccatgagacgctagacatgaacaaggtgtgaagagtctattgagctactatagagtcctccggcccctgaatgcggctaatcttaaccatggagcaagtgctcacaagccagtgagttgcttgtcgtaatgcgcaagtccgtggcggaaccgactactttgggtgtccgtgtttcactttttacttttatgactgcttatggtgacaatttgatattgttaccatttagcttgtcaaatcaattacaaaagaccttaaatcttatttatcaacttgcattttgataactttaatttgaaaattttaata

SEQ ID NO: 21293 - DNA, 674 bp, synthetic construct
  source 1..674: mol_type = other DNA
cactccaagggcccacgtggcggctagtactctggtacttcggtacctttgtacgcctgttttatctcccttcccaatgtaacttagaagctcttaaatcaaggctcaataggtggggcgcaaaccagcgctctcatgagcaagcactcctgtctccccggtgtggttgtataaactgttcccacggttgaaaacaacctatccgttatccgctatagtacttcgagaaacctagtatcacctttggattgttgacgcgttgcgctcagcacactaacccgtgtgtagcttgggtcgatgagtctggacatacctcactggcgacagtggtccaggctgcgttggcggcctactcatggtgaaaaccatgagacgctagacatgaacaaggtgtgaagagtctattgagctactatagagtcctccggcccctgaatgcggctaatcctaaccatggagcaagtgctcacaggccagtgagttgcttgtcgtaatgcgcaagtccgtggcggaaccgactactttgggtgtccgtgtttcactttttacttttatgactgcttatggtgacaatttgatattgttaccatttagcttgtcaaatcaattgcaaaagatcctaaatcttatttatcaacttgcattttgataactttgatttgaaaattttaata

SEQ ID NO: 21294 - DNA, 674 bp, synthetic construct
  source 1..674: mol_type = other DNA
caccccaagggcccacgtggcggctagtactctggtatttcggtacctttgtacgcctgttttatctcccttcccaatgtaacttagaagctctcaaatcaaagctcaataggtggagcgcaaaccagcgctctcatgagcaagcactcctgtctccccggtgtggttgtataaactgttcccacggttgaaaacaacctatccgttatccgctatagtacttcgagaaacctagtatcacctttggattgttgatgcgttgcgctcagcacactaacccgtgtgtagcttgggtcgatgagtctggacataccccactggcgacagtggtccaggctgcgttggcggcctactcatggtgaaaaccatgagacgctaaacatgaacaaggtgtgaagagtctattgagctactatagagtcctccggcccctgaatgcggctaatcttaaccatggagcaagtgctcacaagccagtgagttgcttgtcgtaatgcgcaagtccgtggcggaaccgactactttgggtgtccgtgtttcactttttacttttatgactgcttatggtgacaatttgatattgttaccatttagcttgtcaaatcaattgcaaaagaccctaaatcttatttatcaacttgcattttgataacttcaatttgaaaattttaata

SEQ ID NO: 21295 - DNA, 674 bp, synthetic construct
  source 1..674: mol_type = other DNA
cactccaagggcccacgtggcggctagtactctggtacttcggtacctttgtacgcctgttttatctcccttcccaatgtaacttagaagttcttaaatcaatgctcaataggtggagcgcaaaccagcgctctcatgagcaagcactcctgtctccccggtgaggttgtataaactgttcccacggttgaaaacaacctatccgttatccgctatagtacttcgagaaacctagtaccacctttggattgttgacgcgttgcgctcagcacactaacccgtgtgtagcttgggtcgatgagtctggacatacctcactggcgacagtggtccaggctgcgttggcggcctactcatggtgaaaaccatgagacgctagacatgaacaaggtgtgaagagtctattgagctactatagagtcctccggcccctgaatgcggctaatcctaaccatggagcaagtgctcataggccagtgagttgcttgtcgtaatgcgcaagtccgtggcggaaccgactactttgggtgtccgtgtttcactttttacttttatgactgcttatggtgacaatttgatattgttaccatttagcttgtcaaatcaattgcaaaagatcctaaatcttatttatcaatttgcatcttgataactttaatttgaaaattctaaca

SEQ ID NO: 21296 - DNA, 674 bp, synthetic construct
  source 1..674: mol_type = other DNA
cactccaagggcccacgtggcggctagtactctggtacttcggtacctttgtacgcctgttttatctcccttcccaatgtaacttagaagttcttaaatcaatgctcaataggtggggcgcaaaccagtgctctcatgagcaagcactcctgtctccccggtgaggttgtataaactgttcccacggttgaaaataacctatccgttatccgctatagtacttcgagaaacctagtaccacctttggattgttgacgcgttgcgctcagcacactaacccgtgtgtagcttgggtcgatgagtctggacatacctcactggcgacagtggtccaggctgcgttggcggcctactcatggtgaaagccatgagacgctagacatgaacaaggtgtgaagagtctattgagctactatagagtcctccggcccctgaatgcggctaatcctaaccatggagcaagtgctcacaggccagtgagttgcttgtcgtaatgcgcaagtccgtggcggaaccgactactttgggtgtccgtgtttcactttttacttttatgactgcttatggtgacaatttgatattgttaccatttagcttgtcaaatcaattgcaaaagatcctaaatcttatttatcaacttgcatcttgataactttaatttgaaaattttaaca

SEQ ID NO: 21297 - DNA, 674 bp, synthetic construct
  source 1..674: mol_type = other DNA
cactccaagggcccacgtggcggctagtactctggtacttcggtacctttgtacgcctgttttatctcccttcccaatgtaacttagaagctcttaaatcaaggctcaataggtggggcgcaaaccagcgctctcatgagcaagcactcctgtctccccggtgtggttgtataaactgttcccacggttgaaaataacctatccgttatccgctatagtacttcgagaaacctagtatcacctttggattgttgacgcgttgcgctcagcacactaacccgtgtgtagcttaggtcgatgagtctggacatacctcactggcgacagtggtccaggctgcgttggcggcctactcatggtgaaaaccatgagacgctagacatgaacaaggtgtgaagagtctattgagctactatagagtcctccggcccctgaatgcggctaatcctaaccatggagcaagtgctcacaggccagtgagttgcttgtcgtaatgcgcaagtccgtggcggaaccgactactttgggtgtccgtgtttcactttttacttttatgactgcttatggtgacaatttgatattgttaccatttagcttgtcaaatcaattgcaaaagatcctaaatcttatttatcaacttgcattttgataactttgatttgaaaattttaata

SEQ ID NO: 21298 - DNA, 674 bp, synthetic construct
  source 1..674: mol_type = other DNA
cactccaagggcccacgtggcggctagtactctggtacttcggtacctttgtacgcctgttttatctcccttcccaatgtaacttagaagtttttaaatcaatgctcaataggtggggcgcaaaccagcactctcatgagcaagcactcctgtctccccggtgaggttgtataaactgttcccacggttgaaaacaacctatccgttatccgctatagtacttcgagaaacctagtaccacctttggattgttgacgcgttgcgctcagcacactaacccgtgtgtagcttgggtcgatgagtctggacatacctcactggcgacagtggtccaggctgcgttggcggcctactcatggtgaaagccatgagacgctagacatgaacaaggtgtgaagagtctattgagctactatagagtcctccggcccctgaatgcggctaatcctaaccatggagcaagtgctcacaggccagtgagttgcttgtcgtaatgcgcaagtccgtggcggaaccgactactttgggtgtccgtgtttcactttttacttttatgactgcttatggtgacaatttgatattgttaccatttagcttgtcaaatcaattgcaaaagatcctaaatcttatttatcaacttgcatcttgataactttaatttgaaaattttaaca

SEQ ID NO: 21299 - DNA, 674 bp, synthetic construct
  source 1..674: mol_type = other DNA
cactccaagggcccacgtggcggctagtactctggtacttcggtacctttgtacgcctgttttatctcccttcccaatgtaacttagaagctcttaaatcaatgctcaataggtggggcgcaaaccagcgctctcatgagcaagcactcctgtctccccggtgaggttgtataaactgttcccacggttgaaaacaacctatccgttatccgctatagtacttcgagaaacctagtaccacctttggattgttgacgcgttgcgctcagcacactaacccgtgtgtagcttgggtcgatgagtctggacatacctcactggcgacagtggtccaggctgcgttggcggcctactcatggtgaaaaccatgagacgctagacatgaacaaggtgtgaagagtctattgagctactatagagtcctccggcccctgaatgcggctaatcctaaccatggagcaagtgctcacagaccagtgagttgcttgtcgtaatgcgcaagtccgtggcggaaccgactactttgggtgtccgtgtttcactttttacttttatgactgcttatggtgacaatttgatattgttaccatttagcttgtcaaaccaattgcaaaagatcctaaatcttattcatcaacttgcatcttgataactttgatttgaaaattttaaca

SEQ ID NO: 21300 - DNA, 674 bp, synthetic construct
  source 1..674: mol_type = other DNA
cactccaagggcccacgtggcggctagtactctggtacttcggtacctttgtacgcctgttttatctcccttcccaatgtaacttagaagctcttaaatcaaggctcaataggtggggcgcaaaccagcgctctcatgagcaagcactcctgtctccccggtgtggttgtataaactgttcccacggttgaaaacaacctatccgttatccgctatagtacttcgagaaacctagtatcacctttggattgttgacgcgttgcgctcagcacactaacccgtgtgtagcttgggtcgatgagtctggacatacctcactggcgacagtggtccaggctgcgttggcggcctactcatggtgaaaaccatgagacgctagacatgaacaaggtgtgaagagtccattgagctactatagagtcctccggcccctgaatgcggctaatcctaaccatggagcaagtgctcacaggccagtgagttgcttgtcgtaatgcgcaagtccgtggcggaaccgactactttgggtgtccgtgtttcactttttacttttatgactgcttatggtgacaatttgatattgttaccatttagcttgtcaaatcaattgcaaaagatcctaaatcttatttatcaacttgcattttgataactttgatttgaaaattttaata

SEQ ID NO: 21301 - DNA, 674 bp, synthetic construct
  source 1..674: mol_type = other DNA
caccccaagggcccacgtggcggctagtactctggtatttcggtacctttgtacgcctgttttatctcccttcccaatgtaacttagaagttctcaaatcaaagctcgataggtggagcgcaaaccagcgctctcatgagcaagcactcctgtctccccggtgtggttgtataaactgttcccacggttgaaaacaacctatccgttatccgctatagtacttcgagaaacctagtatcacctttggattgttgatgcgttgcgctcagcacactaacccgtgtgtagcttgggtcgatgagtctggacataccccactggcgacagtggtccaggctgcgttggcggcctactcatggtgaaaaccatgagacgctaaacatgaacaaggtgtgaagagtctattgagctactatagagtcctccggcccctgaatgcggctaatcttaaccatggagcaagtgctcacaagccagtgagttgcttgtcgtaatgcgcaagtccgtggcggaaccgactactttgggtgtccgtgtttcactttttacttttatgactgcttatggtgacaatttgatattgttaccatttagcttgtcaaatcaattgcaaaagaccctaaatcttatttatcaacttgcattttgataacttcaatttgaaaattttaata

SEQ ID NO: 21302 - DNA, 674 bp, synthetic construct
  source 1..674: mol_type = other DNA
cactccaagggcccacgtggcggctagtactctggtacttcggtacctttgtacgcctgttttatctcccttcccaatgtaactcagaagttcttaaatcaatgctcaataggtggggcgcaaaccagcgctctcatgagcaagcactcctgtctccccggtgaggttgtataaactgttcccacggttgaaaacaacctatccgttatccgctatagtacttcgagaaacctagtaccacctttggattgttgacgcgttgcgctcagcacactaacccgtgtgtagcttgggtcgatgagtctggacatacctcactggcgacagtggtccaggctgcgttggcggcctactcatggtgaaagccatgagacgctagacatgaacaaggtgtgaagagtctattgagctactatagagtcctccggcccctgaatgcggctaatcctaaccatggagcaagtgctcacaggccagtgagttgcttgtcgtaatgcgcaagtccgtggcggaaccgactactttgggtgtccgtgtttcactttttacttttatgactgcttatggtgacaatttgatattgttgccatttagcttgtcaaatcgattgcaaaagatcctaaatcttatttatcaactcgcatcttgacaactttaatttgaaaattttaaca

SEQ ID NO: 21303 - DNA, 674 bp, synthetic construct
  source 1..674: mol_type = other DNA
cactccaagggcccacgtggcggctagtactctggtacttcggtacctttgtacgcctgttttatctcccttcccaatgtaatttagaagctcttaaatcaaggctcaataggtggggcgcaaaccagcgctctcatgagcaagcactcctgtctccccggtgtggttgtataaactgttcccacggttgaaaacaacctatccgttatccgctatagtacttcgagaaacctagtatcacctttggattgttgacgcgttgcgctcagcacactaacccgtgtgtagcttgggtcgatgagtctggacatacctcactggcgacagtggtccaggctgcgttggcggcctactcatggtgaaaaccatgagacgctagacatgaacaaggtgtgaagagtctattgagctactatagagtcctccggcccctgaatgcggctaatcctaaccatggagcaagtgctcacaggccagtgagttgcttgtcgtaatgcgcaagtccgtggcggaaccgactactttgggtgtccgtgtttcactttttacttttatgactgcttatggtgacaatttgatattgttaccatttagcttgtcaaatcaattgcaaaagatcctaaatcttatttatcaacttgcattttgataactttgatttaaaaattttaata

SEQ ID NO: 21304 - DNA, 674 bp, synthetic construct
  source 1..674: mol_type = other DNA
cactccaagggcccacgtggcggctagtactctggtacttcggtacctttgtacgcctgttttatctcccttcccaatgtaacttagaagttcttaaatcaatgctcaataggtggagcgcaaaccagcgctctcatgagcaagcactcctgtctccccggtgaggttgtataaactgttcccacggttgaaaacaacctatccgttatccgctatagtacttcgagaaacctagtaccacctttggattgttgacgcgttgcgctcagcacactaacccgtgtgtagcttgggtcgatgagtctggacatacctcactggcgacagtggtccaggctgcgttggcggcctactcatggtgaaaaccatgagacgctagacatgaacaaggtgtgaagagtctattgagctactatagagtcctccggcccctgaatgcggctaatcctaaccatggagcaagtgctcacaggccagtgagttgcttgtcgtaatgcgcaagtccgtggcggaaccgactactttgggtgtccgtgtttcactttttacttttatgactgcttatggtgacaatttgatattgttaccatttagcttgtcaaatcaattgcaaaagatcctaaatcttatttatcaacttgcatcttgataactttaatttgaaaattttaaca

SEQ ID NO: 21305 - DNA, 674 bp, synthetic construct
  source 1..674: mol_type = other DNA
cactccaagggcccacgtggcggctagtactctggtacttcggtacctttgtacgcctgttttatctcccttcccaatgtaacttagaagttcttaaatcaatgctcaataggtggagcgcaaaccagcgctctcatgagcaagcactcctgtctccccggtgaggttgtataaactgttcccacggttgaaaacaacctatccgttatccgctatagtacttcgagaaacctagtactacctttggattgttgatgcgttgcgctcagcacactaacccgtgtgtagcttgggtcgatgagtctggacatacctcactggcgacagtggtccaggctgcgttggcggcctactcatggtgaaaaccatgagacgctagacatgaacaaggtgtgaagagtctattgagctactatagagtcctccggcccctgaatgcggctaatcctaaccatggagcaagtgctcacaggccagtgagttgcttgtcgtaatgcgcaagtccgtggcggaaccgactactttgggtgtccgtgtttcactttttacttttatgactgcttatggtgacaatttgatattgttaccatttagcttgtcaaatcaattgcaaaagatcctaaatcttatttatcaatttgcatcttgacaactttaatttgaaaattttaaca

SEQ ID NO: 21306 - DNA, 674 bp, synthetic construct
  source 1..674: mol_type = other DNA
cactccaagggcccacgtggcggctagtactctggtacttcggtacctttgtacgcctgttttacctcccttcccaatgtaacttagaagttcttaaatcaatgctcaataggtggggcgcaaaccagcgctctcatgagcaagcactcctgtctccccggtgaggttgtataaactgttcccacggttgaaaacaacctatccgttatccgctatagtacttcgagaaacctagtaccacctttggattgttgacgcgttgcgctcagcacactaacccgtgtgtagcttgggtcgatgagtctggacatacctcactggcgacagtggtccaggctgcgttggcggcctactcatggtgaaagccatgagacgctagacatgaacaaggtgtgaagagtctattgagctactatagagtcctccggcccctgaatgcggctaatcctaaccatggagcaagtgctcacaggccagtgagttgcttgtcgtaatgcgcaagtccgtggcggaaccgactactttgggtgtccgtgtttcactttttacttttatgactgcttatggtgacaatttgatattgttaccatttagcttgtcaaatcaattgcaaaagatcctaactcttatttatcaacttgcatcttgataactttaatttgaaaattttaaca

SEQ ID NO: 21307 - DNA, 674 bp, synthetic construct
  source 1..674: mol_type = other DNA
cactccaagggcccacgtggcggctagtactctggtacttcggtacctttgtacgcctgttttatctcccttcccaatgtaacttagaagctcttaaatcaatgctcaataggtggggcgcaaaccagcgctctcatgagcaagcactcctgtctccccggtgaggttgtataaactgttcccacggttgaaaacaacctatccgttatccgctatagtacttcgagaaacctagtaccacctttggattgttgacgcgttgcgctcagcacactaacccgtgtgtagcttgggtcgatgagtctggacatacctcactggcgacagtggtccaggctgcgttggcggcctactcatggtgaaaaccatgagacgctagacatgaacaaggtgtgaagagtctattgagctactatagagtcctccggcccctgaatgcggctaatcctaaccatggagcaagtgctcacaggccagtgagttgcttgtcgtaatgcgcaagtccgtggcggaaccgactactttgggtgtccgtgtttcactttttacttttatgactgcttatggtgacaatttgatattgttaccatttagcttgtcaaatcaattgcaaaagatcctaaatcttatttatcaacttgcatcttgataactttgatttgaaaattttaaca

SEQ ID NO: 21308 - DNA, 674 bp, synthetic construct
  source 1..674: mol_type = other DNA
cactccaagggcccacgtggcggctagtactctggtacttcggtacctttgtacgcctgttttatctcccttcccaatgtaacttagaagctcttaaatcaatgctcaataggtggggcgcaaaccagcgctctcatgagcaagcactcctgtctccccggtgaggttgtataaactgttcccacggttgaaaacaacctatccgttatccgctatagtacttcgagaaacctagtaccacctttggattgttgacgcgttgcgctcagcacactaacccgtgtgtagcttgggtcgatgagtctggacatacctcactggcgacagtggtccaggctgcgttggcggcctactcatggtgaaaaccatgagacgctagacatgaacaaggtgtgaagagtctattgagctactatagagtcctccggcccctgaatgcggctaatcctaaccatggagcaagtgctcacagaccagtgagttgcttgtcgtaatgcgcaagtccgtggcggaaccgactactttgggtgtccgtgtttcactttttacttttatgactgcttatggtgacaatttgatattgttaccatttagcttgtcaaaccaattgcaaaagatcctaaatcttattcatcaatttgcatcttgataactttgatttgaaaattttaaca

SEQ ID NO: 21309 - DNA, 674 bp, synthetic construct
  source 1..674: mol_type = other DNA
cactccaagggcccacgtggcggctagtactctggtacttcggtacctttgtacgcctgttttatctcccttcccaatgtaacttagaagctcttaaatcaatgctcaataggtggggcgcaaaccagcgctctcatgagcaagcactcctgtctccccggtgaggttgtataaactgttcccacggttgaaaacaacctatccgttatccgctatagtacttcgagaaacctagtaccacctttggattgttgacgcgttgcgctcagcacactaacccgtgtgtagcttgggtcgatgagtctggacatacctcactggcgacagtggtccaggctgcgttggcggcctactcatggtgaaaaccatgagacgctagacatgaacaaggtgtgaagagtctattgagctactatagagtcctccggcccctgaatgcggctaatcctaaccatggagcaagtgctcacaggccagtgagttgcttgtcgtaatgcgcaagtccgtggcggaaccgactactttgggtgtccgtgtttcactttttacttttatgactgcttatggtgacaatttgatattgttaccatttagcttgtcaaaccaattgcaaaagatcctaaatcttattcatcaacttgcatcttgataactttgatttgaaaattttaaca

SEQ ID NO: 21310 - DNA, 674 bp, synthetic construct
  source 1..674: mol_type = other DNA
caccccaagggcccacgtggcggctagtactctggtatttcggtacctttgtacgcctgttttatctcccttcccaatgtaacttagaagctctcaaatcaaagctcaataggtggagcgcaaaccagcgctctcatgagcaagcactcctgtctccccggtgtggttgtataaactgttcccacggttgaaaacaacctatccgttatccgctatagtacttcgagaaacctagtatcacctttggattgttgatgcgttgcgctcagcacactaacccgtgtgtagcttgggtcgatgagtctggacataccccactggcgacagtggtccaggctgcgttggcggcctactcatggtgaaaaccatgagacgctaaacatgaacaaggtgtgaagagtctattgagctactatagagtcctccggcccctgaatgcggctaatcttaaccatggagcaagtgctcacaagccagtgagttgcttgtcgtaatgcgcaagtccgtggcggaaccgactactttgggtgtccgtgtttcactttttacttttatgactgcttatggtgacaatttgatattgttaccatttagcttgtcaaatcaattgcaaaagactctaaatcttatttatcaacttgcattttgataacttcaatttgaaaattttaata

SEQ ID NO: 21311 - DNA, 674 bp, synthetic construct
  source 1..674: mol_type = other DNA
caccccaagggcccacgtggcggctagtactctggtacttcggtacctttgtacgcctgttttatctcccttcccaatgtaacttagaagctcttaaatcaaagctcgataggtggagcgcaaaccagcgctctcatgagcaagcactcctgtctccccggtgcggttgtataaactgttcccacggttgaaaacaacctatccgttatccgctatagtacttcgagaaacctagtatcacctttggattgttgatgcgttgcgctcagcacactaacccgtgtgtagcttgggtcgatgagtctggacataccccactggcgacagtggtccaggctgcgttggcggcctactcatggtgaaaaccatgagacgctaaacatgaacaaggtgtgaagagtctattgagctactatagagtcctccggcccctgaatgcggctaatcttaaccatggagcaagtgctcacaagccagtgagttgcttgtcgtaatgcgcaagtccgtggcggaaccgactactttgggtgtccgtgtttcactttttacttttatgactgcttatggtgacaatttgatattgttaccatttagcttgtcaaatcaattacaaaagaccctaaatcttatttatcaacttgcattttgataacttcaattagaaaattttaata

SEQ ID NO: 21312 - DNA, 674 bp, synthetic construct
  source 1..674: mol_type = other DNA
cactccaagggcccacgtggcggctagtactctggtacttcggtacctttgtacgcctgttttatctcccttcccaatgtaacttagaagttcttaaatcaatgctcaataggtggggcgcaaaccagcgctctcatgagcaagcactcctgtctccccggtgaggttgtataaactgttcccacggttgaaaacaacctatccgttatccgctacagtacttcgagaaacctagtaccacctttggattgttgacgcgttgcgctcagcacactaacccgtgtgtagcttgggtcgatgagtctggacatacctcactggcgacagtggtccaggctgcgttggcggcctactcatggtgaaagccatgagacgctagacatgaacaaggtgtgaagagtctattgagctactatagagtcctccggcccctgaatgcggctaatcctaaccatggagcaagtgctcacaggccagtgagttgcttgtcgtaatgcgcaagtccgtggcggaaccgactactttgggtgtccgtgtttcactttttacttttatgactgcttatggtgacaatttgatattgttaccatttagcttgtcaaatcaattgcaaaagatcctaactcttatttatcaacttgcatcttgataactttaatttgaaaattttaaca

SEQ ID NO: 21313 - DNA, 674 bp, synthetic construct
  source 1..674: mol_type = other DNA
caccccaagggcccacgtggcggctagtactctggtacttcggtacctttgtacgcctgttttatctccctccccaatgtaacttagaagctcttaaattaaagctcgataggtggagcgcaaaccagcgctctcatgagcaagcactcctgtctccccggtgcggttgtataaactgttcccacggttgaaaacaacctatccgttatccgctatagtacttcgaaaaacctagtatcacctttggattgttgatgcgttgcgctcagcacactaacccgtgtgtagcttgggtcgatgagtctggacataccccactggcgacagtggtccaggctgcgttggcggcctactcatggtgaaaaccatgagacgctaaacatgaacaaggtgtgaagagtctattgagctactatagagtcctccggcccctgaatgcggctaatcttaaccatggagcaagtgctcacaagccagtgagttgcttgtcgtaatgcgcaagtccgtggcggaaccgactactttgggtgtccgtgtttcactttttacttttatgactgcttatggtgacaatttgatattgttaccatttagcttgtcaaatcaattgcaaaagaccctaaatcttatttatcaacttgcattttgataacttcaattagaaaattttaata

SEQ ID NO: 21314 - DNA, 674 bp, synthetic construct
  source 1..674: mol_type = other DNA
caccccaagggcccacgtggcggctagtactctggtatttcggtacctttgtacgcctgttttatctcccttcccaatgtaacttagaagttctcaaatcaaagctcgataggtggagcgcaaaccagcgctctcatgagcaagcactcctgtctccccggtgtggttgtataaactgttcccacggttgaaaacaacctatccgttatccgctatagtacttcgagaaacctagtatcacctttggattgttgatgcgttgcgctcagcacactaacccgtgtgtagcttgggtcgatgagtctggacataccccactggcgacagtggtccaggctgcgttggcggcctactcatggtgaaaaccatgagacgctaaacatgaacaaggtgtgaagagtctattgagctactatagagtcctccggcccctgaatgcggctaatcttaaccatggagcaagtgctcacaagccagtgagttgcttgtcgtaatgcgcaagtccgtggcggaaccgactactttgggtgtccgtgtttcactttttacttttatgactgcttatggtgacaatttgacattgttaccatttagcttgtcaaatcaattgcaaaagaccctaaatcttatttatcaacttgcattttgataacttcaatttgaaaattttaata

SEQ ID NO: 21315 - DNA, 674 bp, synthetic construct
  source 1..674: mol_type = other DNA
cactccaagggcccacgtggcggctagtactctggtacttcggtacctttgtacgcctgttttatctcccttcccaatgtaacttagaagctcttgaatcaaggctcaataggtggagcgcaaaccagcgctctcatgagcaagcactcctgtctccccggtgtggttgtataaactgtccccacggttgaaaacaacctatccgttatccgctatggtacttcgagaaacctagtatcacctttggattgttgacgcgttgcgctcagcacactaacccgtgtgtagcttgggtcgatgagtctggacataccccactggcgacagtggtccaggctgcgttggcggcctactcatggtgaaagccatgagacgctagacatgaacaaggtgtgaagagtctattgagctactatagagtcctccggcccctgaatgcggctaatcctaaccatggagcaagtgctcacaggccagtgagttgcttgtcgtaatgcgcaagtccgtggcggaaccgactactttgggtgtccgtgtttcactttttacccttatgactgcttatggtgacaatttaatattgttaccatttagcttgtcaaatcaattgcaaaagatcctaaatctcatttatcaacttgcatttggataactttaatttgaagattttaata

SEQ ID NO: 21316 - DNA, 674 bp, synthetic construct
  source 1..674: mol_type = other DNA
caccccaagggcccacgtggcggctagtactctggtatttcggtacctttgtacgcctgttttatctcccttcccaatgtaatttagaagctctcaaatcaaagctcaataggtggagcgcaaaccagcgctctcacgagcaagcactcctgtctccccggtgtggttgtataaactgtccccacggttgaaaacaacctatccgttatccgctatagtacttcgagaaacctagtatcacctttggattgttgatgcgttgcgctcagcacactaacccgtgtgtagcttgggtcgatgagtctggacataccccactggcgacagtggtccaggctgcgttggcggcctactcatggtgaaaaccatgagacgctagacatgaacaaggtgtgaagagtctattgagctactatagagtcctccggcccctgaatgcggctaatcttaaccatggagcaagtgctcacaagccagtgagttgcttgtcgtaatgcgcaagtccgtggcggaaccgactactttgggtgtccgtgtttcactttttacttttatgactgcttatggtgacaatttgatattgttaccatttagcttgtcaaatcaattacaaaagaccctaaatcttatttatcaacttgcattttgataactttaatttgaaaattttaata

SEQ ID NO: 21317 - DNA, 674 bp, synthetic construct
  source 1..674: mol_type = other DNA
cactccaagggcccacgtggcggctagtactctggtacttcggtacctttgtacgcctgttttatctcccttcccaatgcaacttagaagttcttaaatcaatgctcaataggtggggcgcaaaccagcgctctcatgagcaagcactcctgtctccccggtgaggttgtataaactgttcccacggttgaaaacaacctatccgttatccgctatagtacttcgagaaacctagtaccacctttggattgttgatgcgttgcgctcagcacactaacccgtgtgtagcttgggtcgatgagtctggacatacctcactggcgacagtggtccaggctgcgttggcggcctactcatggtgaaagccatgagacgctagacatgaacaaggtgtgaagagtctattgagctactatagagtcctccggcccctgaatgcggctaatcctaaccatggagcaagtgctcacaggccagtgagttgcttgtcgtaatgcgcaagtccgtggcggaaccgactactttgggtgtccgtgtttcactttttacttttatgactgcttatggtgacaatttgatattgttaccatttagcttgtcaaatcaattgcaaaagatcctaaatcttatttatcaacttgcatcttgataactttaatttgaaaattttaaca

SEQ ID NO: 21318 - DNA, 674 bp, synthetic construct
  source 1..674: mol_type = other DNA
cactccaagggcccacgtggcggctagtactctggtacttcggtacctttgtacgcctgttttatctcccttcccaatgtaacttagaagttcttaaatcaatgctcaataggtggagcgcaaaccagcgctctcatgagcaagcactcctgtctccccggtgaggttgtataaactgttcccacggttgaaaacaacctatccgttatccgctatagtacttcgagaaacctagtaccacctttggattgttgacgcgttgcgctcagcacactaacccgtgtgtagcttgggtcgatgagtctggacatacctcactggcgacagtggtccaggctgcgttggcggcctactcatggtgaaaaccatgagacgctagacatgaacaaggtgtgaagagtctattgagctactatagagtcctccggcccctgaatgcggctaatcctaaccatggagcaagtgctcacaggccagtgagttgcttgtcgtaatgcgcaagtccgtggcggaaccgactactttgggtgtccgtgtttcactttttacttttatgactgcttatggtgacaatttgatattgttaccatttagcttgtcaaatcaattgcaaaagatcctaaatcttatttatcaatttgcatcttgataacttcaatttgaaaattttaaca

SEQ ID NO: 21319 - DNA, 674 bp, synthetic construct
  source 1..674: mol_type = other DNA
cactccaagggcccacgtggcggctagtactctggtacttcggtacctttgtacgcctgttttatctcccttcccaatgtaacttagaagctcttaaatcaatgctcaataggtggggcgcaaaccagcgctctcatgagcaagcactcctgtctccccggtgaggttgtataaactgttcccacggttgaaaacaacctatccgttatccgctatagtacttcgagaaacctagtaccacctttggattgttgacgcgttgcgctcagcacactaacccgtgtgtagcttgggtcgatgagtctggacatacctcactggcgacagtggtccaggctgcgttggcggcctactcatggtgaaaaccatgagacgctagacatgaacaaggtgtgaagagtctattgagctactatagagtcctccggcccctgaatgcggctaatcctaaccatggagcaagtgctcacaggccagtgagttgcttgtcgtaatgcgcaagtccgtggcggaaccgactactttgggtgtccgtgtttcactttttacttttatgactgcttatggtgacaatttgatattgttaccatttagcttgtcaaatcaattgcaaaagatcctaaatcttatttatcaacttgcatcttgataacttcaatttgaaaattttaata

SEQ ID NO: 21320 - DNA, 674 bp, synthetic construct
  source 1..674: mol_type = other DNA
cactccaagggcccacgtggcggctagtactctggtacttcggtacctttgtacgcctgttttatctcccttcccaatgtaacttagaagttcttaaatcaatgctcaataggtggggcgcaaaccagcgctctcatgagcaagcactcctgtctccccggtgaggttgtataaactgttcccacggttgaaaacaacctatccgttatccgctatagtacttcgagaaacctagtaccacctttggattgttgacgcgttgcgctcagcacactaacccgtgtgtagcttgggtcgatgagtctggacatacctcactggcgacagtggtccaggctgcgttggcggcctactcatggtgaaaaccatgagacgctagacatgaacaaggtgtgaagagtctattgagctactatagagtcctccggcccctgaatgcggctaatcctaaccatggagcaagtgctcacaggccagtgagttgcttgtcgtaatgcgcaagtccgtggcggaaccgactactttgggtgtccgtgtttcactttttacttttatgactgcttatggtgacaatctgatattgttaccatttagcttgtcaaatcaattgcaaaagatcctaaatcttatttatcaacttgcatcttaacaactttaatttgaaaattttaaca

SEQ ID NO: 21321 - DNA, 674 bp, synthetic construct
  source 1..674: mol_type = other DNA
cactccaagggcccacgtggcggctagtactctggtacttcggtacctttgtacgcctgttttatctcccttcccaatgtaacttagaagttcttaaatcaatgctcaataggtggggcgcaaaccagcgttctcatgagcaagcactcctgtctccccggtgaggttgtataaactgttcccacggttgaaaacgacctatccgttatccgctatagtacttcgagaaacctagtaccacctttggattgttgacgcgttgcgctcagcacactaacccgtgtgtagcttgggtcgatgagtctggacatacctcactggcgacagtggtccaggctgcgttggcggcctactcatggcgaaagccatgagacgctagacatgaacaaggtgtgaagagtctattgagctactatagagtcctccggcccctgaatgcggctaatcctaaccatggagcaagtgctcacaggccagtgagttgcttgtcgtaatgcgcaagtccgtggcggaaccgactactttgggtgtccgtgtttcactttttacttttatgactgcttatggtgacaatttgatattgttaccatttagcttgtcaaatcaattgcaaaagatcctaaatcttatttatcaacttgcatcttgataactttaatttgaaaattttaaca

SEQ ID NO: 21322 - DNA, 674 bp, synthetic construct
  source 1..674: mol_type = other DNA
cactccaagggcccacgtggcggctagtactctggtacttcggtacctttgtacgcctgttttatctcccttcccaatgtaacttagaagttcttaaatcaatgctcaataggtggggcgcaaaccagcgctctcatgagcaagcactcctgtctccccggtgaggttgtataaactgttcccacggttgaaaacaacctatccgttatccgctatagtacttcgagaaacctagtaccacctttggattgttgacgcgttgcgctcagcacactaacccgtgtgtagcttgggtcgatgagtctggacatacctcactggcgacagtggtccaggctgcgttggcggcctactcatggtgaaagccatgagacgctagacatgaacaaggtgtgaagagtctattgagctactatagagtcctccggcccctgaatgcggctaatcctaaccatggagcaagtgctcacaggccagtgagttgcttgtcgtaatgcgcaagtccgtggcggaaccgactactttgggtgtccgtgtttcactttttacttttatgactgcttatggtgacaatttgatattgttaccatttagcttgtcaaatcaattgcaaaagatcctaaatcttatttatcaacttgaatcttgataactttaatttgaaaattttaaca

SEQ ID NO: 21323 - DNA, 674 bp, synthetic construct
  source 1..674: mol_type = other DNA
cactccaagggcccacgtggcggctagtactctggtacttcggtacctttgtacgcctgttttatctcccttcccaatgtaacttagaagttcttaaatcaatgctcaataggtggggcgcaaaccagcgctctcatgagcaagcactcctgtctccccggtgaggttgtataaactgttcccacggttgaaaacaacctatccgttatccgctatagtacttcgagaaacctagtaccacctttggattgttgatgcgttgcgctcagcacactaacccgtgtgtagcttgggtcgatgagtctggacatacctcactggcgacagtggtccaggctgcgttggcggcctactcatggtgaaagccatgagacgctagacatgaacaaggtgtgaagagtctattgagctactatagagtcctccggcccctgaatgcggctaatcctaaccatggagcaagtgctcacaggccagtgagttgcttgtcgtaatgcgcaagtccgtggcggaaccgactactttgggtgtccgtgtttcactttttacttttatgactgcttatggtgacaatttgatattgttaccatttagcttgtcaaatcaattgcaaaagatcctaaatcttatttatcaacttgcatcttgataactttaatttgaaaattttaaca

SEQ ID NO: 21324 - DNA, 674 bp, synthetic construct
  source 1..674: mol_type = other DNA
cactccaagggcccacgtggcggctagtactctggtacttcggtacctttgtacgcctgttttatctcccttcccaatgtaacttagaagttcttaaatcaatgctcaataggtggggcgcaaaccagcgctctcatgagcaagcactcctgtctccccggtgaggttgtataaactgttcccacggttgaaaacaacctatccgttatccgctatagtacttcgagaaacctagtaccacctttggattgttgacgcgttgcgctcagcacactaacccgtgtgtagcttgggtcgatgagtctggacatacctcactggcgacagtggtccaggctgcgttggcggcctactcatggtgaaagccatgagacgctagacatgaacaaggtgtgaagagtctattgagctactatagagtcctccggcccctgaatgcggctaatcctaaccatggagcaagtgctcacaggccagtgagttgcttgtcgtaatgcgcaagtccgtggcggaaccgactactttgggtgtccgtgtttcactttttacttttatgactgcttatggtgacaatttgatattgttaccatttagcttgtcaaatcaattgcaaaaggtcctaactcttatttatcaacttgcatcttgataactttaatctgaaaattttaaca

SEQ ID NO: 21325 - DNA, 674 bp, synthetic construct
  source 1..674: mol_type = other DNA
cactccaagggcccacgtggcggctagtactctggtacttcggtacctttgtacgcctgttttatctcccttcccaatgtaacttagaagttcttaaatcaatgctcaataggtggggcgcaaaccagcgctctcatgagcaagcactcctgtctccccggtgaggttgtataaactgttcccacggttgaaaacaacctatccgttatccgctatagtacttcgagaaacctagtaccacctttggattgttgacgcgttgcgctcagcacactaacccgtgtgtagcttgggtcgatgagtctggacatacctcactggcgacagtggtccaggctgcgttggcggcctactcatggtgaaagccatgagacgctagacatgaacaaggtgtgaagagtctattgagctactatagagtcctccggcccctgaatgcggctaatcctaaccatggagcaagtgctcacaggccagtgagttgcttgtcgtaatgcgcaagtccgtggcggaaccgactactttgggtgtccgtgtttcactttttacttttatgactgcttatggtgacaatttgatattgttaccatttagcttgtcaaatcgattgcaaaagatcctaaatcttatttatcaacttgcatcttgataactttaacttgaaaattttaaca

SEQ ID NO: 21326 - DNA, 674 bp, synthetic construct
  source 1..674: mol_type = other DNA
cactccaagggcccacgtggcggctagtactctggtacttcggtacctttgtacgcctgttttatctcccttcccaatgtaacttagaagttcttaaatcaatgctcaataggtggggcgcaaaccagcgctctcatgagcaagcactcctgtctccccggtgaggttgtataaactgttcccacggttgaaaacaacctatccgttatccgctatagtacttcgagaaacctagtatcacctttggattgttgacgcgttgcgctcagcacactaacccgtgtgtagcttgggtcgatgagtctggacatacctcactggcgacagtggtccaggctgcgttggcggcctactcatggtgaaaaccatgagacgctagacatgaacaaggtgtgaagagtctattgagctactatagagtcctccggcccctgaatgcggctaatcctaaccatggagcaagtgctcacaggccagtgagttgcttgtcgtaatgcgcaagtccgtggcggaaccgactactttgggtgtccgtgtttcactttttacttttatgactgcttatggtgacaatttgatattgttaccatttagcttgtcaaatcaattgcaaaagatcctaaatcttacttatcaatttgcatcttgataactttaatttgaaaattttaaca

SEQ ID NO: 21327 - DNA, 674 bp, synthetic construct
  source 1..674: mol_type = other DNA
cactccaagggcccacgtggcggctagtactctggtacttcggtacctttgtacgcctgttttatctcccttcccaatgtaacttagaagttcttaaatcaatgctcaataggtggggcgcaaaccagcgctctcatgagcaagcactcctgtctccccggtgaggttgtataaactgttcccacggttgaaaacaacctatccgttatccgctatagtacttcgagaaacctagtaccacctttggattgttgacgcgttgcgctcagcacactaacccgtgtgtagcttgggtcgatgagtctggacatacctcactggcgacagtggtccaggctgcgttggcggcctactcatggtgaaagccatgagacgctagacatgaacaaggtgtgaagagtctattgagctactatagagtcctccggcccctgaatgcggctaatcctaaccatggagcgagtgctcacaggccagtgagttgcttgtcgtaatgcgcaagtccgtggcggaaccgactactttgggtgtccgtgtttcactttttacttttatgactgcttatggtgacaatttgatattgttaccatttagcttgtcaaatcaattgcaaaagatcctaaatcttatttatcaacttgcatcttgataactttaatttgaaaattttaaca

SEQ ID NO: 21328 - DNA, 674 bp, synthetic construct
  source 1..674: mol_type = other DNA
cactccaagggcccacgtggcggctagtactctggtacttcggtacctttgtacgcctgttttatctcccttcccaatgtaacttagaagttcttaaatcaatgctcaataggtggggcgcaaaccagcgctctcatgagcaagcactcctgtctccccggtgaagttgtataaactgttcccacggttgaaaacaacctatccgttatccgctatagtacttcgagaaacctagtaccacctttggattgttgacgcgttgcgctcagcacactaacccgtgtgtagcttgggtcgatgagtctggacatacctcactggcgacagtggtccaggctgcgttggcggcctactcatggtgaaagccatgagacgctagacatgaacaaggtgtgaagagtctattgagctactatagagtcctccggcccctgaatgcggctaatcctaaccatggagcaagtgctcacaggccagtgagttgcttgtcgtaatgcgcaagtccgtggcggaaccgactactttgggtgtccgtgtttcactttttacttttatgactgcttatggtgacaatttgatattgttaccatttagcttgtcaaatcaattgcaaaagatcctaactcttatttatcaacttgcatctcgataactctgatttgaaaattttaaca

SEQ ID NO: 21329 - DNA, 674 bp, synthetic construct
  source 1..674: mol_type = other DNA
cactccaagggcccacgtggcggctagtactctggtacttcggtacctttgtacgcctgttttatctcccttcccaatgtaacttagaagttcttaaatcaatgctcaataggtggggcgcaaaccagcgctctcatgagcaagcactcctgtctccccggtgaggttgtataaactgttcccacggttgaaaacaacctatccgttatccgctatagtacttcgagaaacctagtaccacctttggattgttgacgcgttgcgctcagcacactaacccgtgtgtagcttgggtcgatgagtctggacatacctcactggcgacagtggtccaggctgcgttggcggcctactcatggtgaaagccatgagacgctagacatgaacaaggtgtgaagagtctattgagctactatagagtcctccggcccctgaatgcggctaatcctaaccatggagcaagtgctcacaggccagtgagttgcttgtcgtaatgcgcaagtccgtggcggaaccgactactttgggtgtccgtgtttcactttttacttttatgactgcttatggtgacaatttgatattgttaccatttagcttgtcaaatcaattgcaaaagatcctaaatcttatttatcaacttgcatcttgataactttgatttgaaaattttaaca

SEQ ID NO: 21330 - DNA, 674 bp, synthetic construct
  source 1..674: mol_type = other DNA
cactccaagggcccacgtggcggctagtactctggtacttcggtacctttgtacgcctgttttatctcccttcccaatgtaacttagaagttcttaaatcaatgctcaataggtggggcgcaaaccagcgctctcatgagcaagcactcctgtctccccggtgaggttgtataaactgttcccacggttgaaaacaacctatccgttatccgctatagtacttcgagaaacctagtaccacctttggattgttgacgcgttgcgctcagcacactaacccgtgtgtagcttgggtcgatgagtctggacatacctcactggcgacagtggtccaggctgcgttggcggcctactcatggtgaaagccatgagacgctagacatgaacaaggtgtgaagagtctattgagctactatagagtcctccggcccctgaatgcggctaatcctaaccatggagcaagtgctcacaggccagtgagttgcttgtcgtaatgcgcaagtccgtggcggaaccgactactttgggtgtccgtgtttcactttttacttttatgactgcttatggtgacaatttgatattgttaccatttagcttgtcaaatcaattgcaaaagatcctagatcttatttatcaacttgcatcttgataactttaatttgaaaattttaaca

SEQ ID NO: 21331 - DNA, 674 bp, synthetic construct
  source 1..674: mol_type = other DNA
cactccaagggcccacgtggcggctagtactctggtacttcggtacctttgtacgcctgttttatctcccttcccaatgtaacttagaagctcttaaatcaaggctcaataggtggagcgcaaaccagcgctctcatgagcaagcactcctgtctccccggtgtggttgtataaactgttcccacggttgaaaacaacctatccgttatccgctatggtacttcgagaaacctagtatcacctttggattgttgacgcgttgcgctcagcacactaacccgtgtgtagcttgggtcgatgagtctggacataccccactggcgacagtggtccaggctgcgttggcggcctactcatggtgaaagccatgagacgctagacatgaacaaggtgtgaagagtctattgagctactatagagtcctccggcccctgaatgcggctaatcctaaccatggagcaagtgctcacaggccagtgagttgcttgtcgtaatgcgcaagtccgtggcggaaccgactactttgggtgtccgtgtttcactttttacccttatgactgcttatggtgacaatttgatattgttaccatttagcttgtcaaatcaattgcaaaagatcttaaatctcatttatcaacttgcatcttgataactttaatttgaagattttaata

SEQ ID NO: 21332 - DNA, 674 bp, synthetic construct
  source 1..674: mol_type = other DNA
caccccaagggcccacgtggcggctagtactctggtatttcggtacctttgtacgcctgttttatctcccttcccaatgtaacttagaagctctcaaatcaaagctcaataggtggagcgcaaaccagcgctctcacgagcaagcactcctgtctccccggtgtggttgtataaactgtccccacggttgaaaacaacctatccgttatccgctatagtacttcgagaaacctagtatcacctttggattgttgatgcgttgcgctcagcacactaacccgtgtgtagcttgggtcgatgagtctggacataccccactggcgacagtggtccaggctgcgttggcggcctactcatggtgaaaaccatgagacgctagacatgaacagggtgtgaagagtctattgagctactatagagtcctccggcccctgaatgcggctaatcttaaccatggagcaagtgctcacaagccagtgagttgcttgtcgtaatgcgcaagtccgtggcggaaccgactactttgggtgtccgtgtttcactttttacttttatgactgcttatggtgacaatttgatattgttaccatttagcttgtcaaatcaattacaaaagaccctaaatcttatttatcaacttgcattttgataactttaatttgaaaattttgata

SEQ ID NO: 21333 - DNA, 666 bp, synthetic construct
  source 1..666: mol_type = other DNA
cgttcgcagtctctggtattgcggtaccttgtacgcctgttttatacccccttcccacgtaactttagaagcaattcacacagttcaatagagggggtacaaaccagtaccaccacgaacaagcacttctgtttccccggtgaagccgtatagactgtacccacggttgaaaatggcagatccgttatccgctcaagtacttcgagaagcctagtatcatcttggaatcttcgacgcgttgcgctcagcactctaccccgagtgtagcttaggctgatgagtctgggcataccccaccggcgacggtggcccaggctgcgttggcggcctacccatggctaacgccatgggacgctagatgtgaacaaggtgtgaagagcctattgagctacttgagagtcctccggcccctgaatgcggctaatcccaaccacggagcaagtgcttacaaaccagtaagtggcttgtcgtaacgcgcaagtctgtggcggaaccgactactttgggtgtccgtgtttccttttatttttattatggctgcttatggtgacaatctaagattgttatcatatagctattggattggccatccggtgacttgttgaattttgaacatttatttgtttctctgcaacacttgcctattaaatacatttacaaactaca

SEQ ID NO: 21334 - DNA, 673 bp, synthetic construct
  source 1..673: mol_type = other DNA
caccccaagggcccacgtggcggctagtactctggtacttcggtacctttgtacgcctgttttatctcccttcccaatgtaacttagaagttctcaaatcaaagctcgataggtggagcgcaaaccagcgctctcatgagcaagcactcctgtctccccggtgcggttgtataaactgttcccacggttgaaaacaacctatccgttatccgctatagtacttcgagaaacctagtatcacctttggattgttgatgcgttgcgctcagcacactaacccgtgtgtagcttgggtcgatgagtctggacataccccactggcgacagtggtccaggctgcgttggcggcctactcatggtgaaaaccatgagacgctaaacatgaacaaggtgtgaagagtctattgagctactatagagtcctccggcccctgaatgcggctaatcttaaccatggagcaagtgctcacaagccagtgggttgcttgtcgtaatgcgcaagtccgtggcggaaccgactactttgggtgtccgtgtttcactttttacttttatgactgcttatggtgacaatttgatattgttaccatttagcttgtcaaatcaattacaaaagacctaaatcttatttatcaacttgctttttgataacttcaatcagaaaatttcaata

SEQ ID NO: 21335 - DNA, 673 bp, synthetic construct
  source 1..673: mol_type = other DNA
caccccaagggcccacgtggcggctagtactctggtacttcggtacctttgtacgcctgttttatctcccttcccaatgtaacttagaagttctcaaatcaaagctcgataggtggagcgcaaaccagcgctctcatgagcaagcactcctgtctccccggtgcggttgtataaactgttcccacggttgaaaacaacctatccgttatccgctatagtacttcgagaaacctagtatcacctttggattgttgatgcgttgcgctcagcacactaacccgtgtgtagcttgggtcgatgagtctggacacaccccactggcgacagtggtccaggctgcgttggcggcctactcatggtgaaaaccatgagacgctaaacatgaacaaggtgtgaagagtctattgagctactatagagtcctccggcccctgaatgcggctaatcttaaccatggagcaagtgctcacaagccagtgggttgcttgtcgtaatgcgcaagtccgtggcggaaccgactactttgggtgtccgtgtttcactttttacttttatgactgcttatggtgacaatttgatattgttaccatttagcttgtcaaatcaattacaaaagacctaaatcttatttatcaacttgctttttgacaacttcaatcagaaaatttcaata

SEQ ID NO: 21336 - DNA, 673 bp, synthetic construct
  source 1..673: mol_type = other DNA
caccccaagggcccacgtggcggctagtactctggtacttcggtacctttgtacgcctgttttatctcccttcccaatgtaacttagaagttttcaaatcaaagctcgataggtggagcgcaaaccagcgctctcatgagcaagcactcctgtctccccggtgcggttgtataaactgttcccacggttgaaagcaacctatccgttatccgctatagtacttcgagaaacctagtatcacctttggattgttgatgtgttgcgctcagcacactaacccgtgtgtagcttgggtcgatgagtctggacgtaccccactggcgacagtggtccaggctgcgttggcggcctactcatggtgaaaaccatgagacgctaaacatgaacaaggtgtgaagagtctattgagctactatagagtcctccggcccctgaatgcggctaatcttaaccatggagcaagtgctcacaagccagtgggttgcttgtcgtaatgcgcaagtccatggcggaaccgactactttgggtgtccgtgtttcactttttacttttatgactgcttatggtgacaatttgatattgttaccatttagcttgtcaaatcaattacaaaagacctatatcttatttatcaacttgctttttgataacttcaatcagaaaatttcaata

SEQ ID NO: 21337 - DNA, 673 bp, synthetic construct
  source 1..673: mol_type = other DNA
caccccaagggcccacgtggcggctagtactctggtacttcggtacctttgtacgcctgttttatctcccttcccaatgtaacttagaagttctcaaatcaaagctcgataggtggagcgcaaaccagcgctctcatgagcaagcactcctgtctccccggtgcggttgtataaactgttcccacggttgaaaacaacctatccgttatccgctatagtacttcgagaaacctagtatcacctttggattgttgatgcgttgcgctcagcacactaacccgtgtgtagcttgggtcgatgagtctggacacaccccactggcgacagtggtccaggctgcgttggcggcctactcatggtgaaaaccatgagacgctaaacatgaacaaggtgtgaagagtctattgagctactatagagtcctccggcccctgaatgcggctaatcttaaccatggagcaagtgctcacaagccagtgggttgcttgtcgtaatgcgcaagtccgtggcggaaccgactactttgggtgtccgtgtttcactttttacttttatgactgcttatggtgacaatttgatattgttaccatttagcttgtcaaatcaattacaaaaggcctaaatcttatttatcaacttgctttttgataacttcaatcagaaaatttcaata

SEQ ID NO: 21338 - DNA, 673 bp, synthetic construct
  source 1..673: mol_type = other DNA
caccccaagggcccacgtggcggctagtactctggtacttcggtacctttgtacgcctgttttatctcccttcccaatgtaacttagaagttctcaaatcaaagctcgataggtggagcgcaaaccagcgctctcatgagcaagcactcctgtctccccggtgcggttgtataaactgttcccacggttgaaaacaacctatccgttatccgctatagtacttcgagaaacctagtatcacctttggattgttgatgcgttgcgctcagcacactaacccgtgtgtagcttgggttgatgagtctggacacaccccactggcgacagtggtccaggctgcgttggcggcctactcatggtgaaaaccatgagacgctaaacatgaacaaggtgtgaagagtctattgagctactatagagtcctccggcccctgaatgcggctaatcttaaccatggagcaagtgctcacaagccagtgggttgcttgtcgtaatgcgcaagtccgtggcggaaccgactactttgggtgtccgtgtttcactttttacttttatgactgcttatggtgacaatttgatattgttaccatttagcttgtcaaatcaattacaaaagacctaaatcttatttaccaacttgctttttgacaacttcaatcagaaaatttcaata

SEQ ID NO: 21339 - DNA, 673 bp, synthetic construct
  source 1..673: mol_type = other DNA
caccccaagggcccacgtggcggctagtactctggtacttcggtacctttgtacgcctgttttatctcccttcccaatgtaacttagaagttctcaaatcaaagctcgataggtggagcgcaaaccagcgctcttatgagcaagcactcctgtctccccggtgcggttgtataaactgttcccacggttgaaaacaacctatccgttatccgctatagtacttcgagaaacctagtatcacctttggattgttgatgcgttgcgctcagcacactaacccgtgtgtagcttgggtcgatgagtctggacataccccactggcgacagtggtccaggctgcgttggcggcctactcatggtgaaaaccatgagacgctaaacatgaacaaggtgtgaagagtctattgagctactatagagtcctccggcccctgaatgcggctaatcttaaccatggagcaagtgctcacaagccagtgggttgcttgtcgtaatgcgcaagtccgtggcggaaccgactactttgggtgtccgtgtttcactttttacttttgtgactgcttatggtgacaatttgatattgttaccatttagcttgtcaaatcaattacaaaagacctaaatcttatttatcaacttgctttttgataacttcaatcagaaaatttcaata

SEQ ID NO: 21340 - DNA, 673 bp, synthetic construct
  source 1..673: mol_type = other DNA
caccccaagggcccacgtggcggctagtactctggtacttcggtacctttgtacgcctgttttatctcccttcccaatgtaacttagaagttctcaaatcaaagctcgataggtggagcgcaaaccagcgctctcatgagcaagcactcctgtctccccggtgcggttgtataaactgttcccacggttgaaaacaacctatccgttatccgctatagtacttcgagaaacctagtatcacctttggattgttgatgcgttgcgctcagcacactaacccgtgtgtagcttgggttgatgagtctggacacaccccactggcgacagtggtccaggctgcgttggcggcctactcatggtgaaaaccatgagacgctaaacatgaacaaggtgtgaagagtctattgagctactatagagtcctccggcccctgaatgcggctaatcttaaccatggagcaagtgctcacaagccagtgggttgcttgtcgtaatgcgcaagtccgtggcggaaccgactactttgggtgtccgtgtttcactttttacttttatgactgcttatggtgacaatttgatattgttaccatttagcttgtcaaatcaattacaaaagacctaaatcttatttatcaacttgctttttgacaacttcaatcagaaaatttcaata

SEQ ID NO: 21341 - DNA, 673 bp, synthetic construct
  source 1..673: mol_type = other DNA
cactccaagggcccacgtggcggctagtactctggtacttcggtacctttgtacgcctgttttatctcccttcccaatgtaacttagaagttctcaaatcaaagctcgataggtggagcgcaaaccagcgctctcatgagcaagcactcctgtctccccggtgcggttgtataaactgttcccacggttgaaaacaacctatccgttatccgctatagtacttcgagaaacctagtatcacctttggattgttgatgcgttgcgctcagcacactaacccgtgtgtagcttgggtcgatgagtctggacataccccactggcgacagtggtccaggctgcgttggcggcctactcatggtgaaaaccatgagacgctaaacatgaacaaggtgtgaagagtctattgagctactatagagtcctccggcccctgaatgcggctaatcttaaccatggagcaagtgctcacaagccagtgggttgcttgtcgtaatgcgcaagtccgtggcggaaccgactactttgggtgtccgtgtttcacttttaacttttatgactgcttatggtgacaatttgatattgttaccatttagcttgtcaaatcaattacaaaagacctaaatcttatttatcaacttgctttttgataacttcaatcagaaaatttcaata

SEQ ID NO: 21342 - DNA, 673 bp, synthetic construct
  source 1..673: mol_type = other DNA
caccccaagggcccacgtggcggctagtactctggtacttcggtacctttgtacgcctgttttatctcccttcccaatgtaacttagaagttctcaaatcaaagctcgataggtggagcgcaaaccagcgttctcatgagcaagcactcctgtctccccggtgcggttgtataaactgttcccacggttgaaaacaacctatccgttatccgctatagtacttcgagaaacctagtatcacctttggattgttgatgcgttgcgctcagcacactaacccgtgtgtagcttgggtcgatgagtctggacacaccccactggcgacagtggtccaggctgcgttggcggcctactcatggtgaaaaccatgagacgctaaacatgaacaaggtgtgaagagtctattgagctactatagagtcctccggcccctgaatgcggctaatcttaaccatggagcaagtgctcacaagccagtgggttgcttgtcgtaatgcgcaagtccgtggcggaaccgactactttgggtgtccgtgtttcactttttacttttatgactgcttatggtgacaatttgatattgttaccatttagcttgtcaaatcaattacaaaagacctaaatcttatttatcaacttgctttttgacaacttcaatcagaaaatttcaata

SEQ ID NO: 21343 - DNA, 673 bp, synthetic construct
  source 1..673: mol_type = other DNA
caccccaagggcccacgtggcggctagtactctggtacttcggtacctttgtacgcctgttttatctcccttcccaatgtaacttagaagttctcaaatcaaagctcgataggtggagcgcaaaccagcgctctcatgagcaagcactcctgtctccccggtgcggttgtataaactgttcccacggttgaaaacaacctatccgttatccgctatggtacttcgagaaacctagtatcacctttggattgttgatgcgttgcgctcagcacactaacccgtgtgtagcttgggttgatgagtctggacacaccccactggcgacagtggtccaggctgcgttggcggcctactcatggtgaagaccatgagacgctaaacatgaacaaggtgtgaagagtctattgagctactatagagtcctccggcccctgaatgcggctaatcttaaccatggagcaagtgctcacaagccagtgggttgcttgtcgtaatgcgcaagtccgtggcggaaccgactactttgggtgtccgtgtttcactttttacttttatgactgcttatggtgacaatttgatattgttaccatttagcttgtcaaatcaattacaaaagacctaaatcttatttatcaacttgctttttgacaacttcaatcagaaaatttcaata

SEQ ID NO: 21344 - DNA, 673 bp, synthetic construct
  source 1..673: mol_type = other DNA
caccccaagggcccacgtggcggctagtactctggtacttcggtacctttgtacgcctgttttatctcccttcccaatgtaacttagaagttctcaaatcaaagctcgataggtggagcgcaaaccagcgctcttatgagcaagcactcctgtctccccggtgcggttgtataaactgttcccacggttgaaaacaacctatccgttatccgctatagtacttcgagaaacctagtatcacctttggattgttgatgcgttgcgctcagcacactaacccgtgtgtagcttgggtcgatgagtctggacataccccactggcgacagtggtccaggctgcgttggcggcctactcatggtgaaaaccatgagacgctaaacatgaacaaggtgtgaagagtctattgagctactatagagtcctccggcccctgaatgcggctaatcttaaccatggagcaagtgctcacaagccagtgggttgcttgtcgtaatgcgcaagtccgtggcggaaccgactactttgggtgtccgtgtttcactttttacttttatgactgcttatggtgacaatttgatattgttaccatttagcttgtcaaatcaattacaaaagacctaaatcttatttatcaacttgctttttgataacttcaatcagaaaatttcaata

SEQ ID NO: 21345 - DNA, 673 bp, synthetic construct
  source 1..673: mol_type = other DNA
cactccaagggcccacgtggcggctagtactctggtacttcggtacctttgtacgcctgttttatctcccttcccaatgtaacttagaagttctcaaatcaaagctcgataggtggagcgcaaaccagcgctctcatgagcaagcactcctgtctccccggtgcggttgtataaactgttcccacggttgaaaacaacctatccgttatccgctatagtacttcgagaaacctagtatcacctttggattgttgatgcgttgcgctcagcacactaacccgtgtgtagcttgggtcgatgagtctggacataccccactggcgacagtggtccaggctgcgttggcggcctactcatggtgaaaaccatgagacgctaaacatgaacaaggtgtgaagagtctattgagctactatagagtcctccggcccctgaatgcggctaatcttaaccatggagcaagtgctcacaagccagtgggttgcttgtcgtaatgcgcaagtccgtggcggaaccgactactttgggtgtccgtgtttcactttttacttttatgactgcttatggtgacaatttgatattgttaccatttagcttgtcaaatcaattacaaaagacctaaatcttatttatcaacttgctttttgataacttcaatcagaaaatttcaata

SEQ ID NO: 21346 - DNA, 673 bp, synthetic construct
  source 1..673: mol_type = other DNA
caccccaagggcccacgtggcggctagtactctggtacttcggtacctttgtacgcctgttttatctcccttcccaatgtaacttagaagttctcaaattaaagctcgataggtggagcgcaaaccagcgctcttatgagcaagcactcctgtctccccggtgcggttgtataaactgttcccacggttgaaaacaacctatccgttatccgctatagtacttcgagaaacctagtatcacctttggattgttgatgcgttgcgctcagcacactaacccgtgtgtagcttgggtcgatgagtctggacataccccactggcgacagtggtccaggctgcgttggcggcctactcatggtgaaaaccatgagacgctaaacatgaacaaggtgtgaagagtctattgagctactatagagtcctccggcccctgaatgcggctaatcttaaccatggagcaagtgctcacaagccagtgggttgcttgtcgtaatgcgcaagtccgtggcggaaccgactactttgggtgtccgtgtttcactttttacttttatgactgcttatggtgacaatttgatattgttaccatttagcttgtcaaatcaattacaaaagacctaaatcttatttatcaacttgctttttgataactttaatcagaaaatttcaata

SEQ ID NO: 21347 - DNA, 673 bp, synthetic construct
  source 1..673: mol_type = other DNA
caccccaagggcccacgtggcggctagtactctggtacttcggtacctttgtacgcctgttttatctcccttcccaatgtaacttagaagttctcaaatcaaagctcgataggtggagcgcaaaccagcgctctcatgagcaagcactcctgtctccccggtgcggttgtataaactgttcccacggttgaaaacaacctatccgttatccgctatagtacttcgagaaacctagtatcacctttggattgttgatgcgttgcgctcagcacactaacccgtgtgtagcttgggtcgatgagtctggacacaccccactggcgacagtggtccaggctgcgttggcggcctactcatggtgaaaaccatgagacgctaaacatgaacaaggtgtgaagagtctattgagctactatagagtcctccggcccctgaatgcggctaatcttaaccatggagcaagtgctcacaagccagtgggttgcttgtcgtaatgcgcaagtccgtggcggaaccgactactttgggtgtccgtgtttcactttttacttttatgactgcttatggtgacaatttgacattgttaccatttagcttgtcaaatcaattacaaaagacctaaatcttatttatcaacttgctttttgacaacttcaatcagaaaatttcaata

SEQ ID NO: 21348 - DNA, 673 bp, synthetic construct
  source 1..673: mol_type = other DNA
caccccaagggcccacgtggcggctagtactctggtacttcggtacctttgtacgcctgttttatctcccttcccaatgtaacttagaagttctcaaatcaaagctcgataggtggagcgcaaaccagcgctctcatgagcaagcactcctgtttccccggtgcggttgtataaactgttcccacggttgaaaacaacctatccgttatccgctatagtacttcgagaaacctagtatcacctttggattgttgatgcgttgcgctcagcacactaacccgtgtgtagcttgggtcgatgagtctggacacaccccactggcgacagtggtccaggctgcgttggcggcctactcatggtgaaaaccatgagacgctaaacatgaacaaggtgtgaagagtctattgagctactatagagtcctccggcccctgaatgcggctaatcttaaccatggagcaagtgctcacaagccagtgggttgcttgtcgtaatgcgcaagtccgtggcggaaccgactactttgggtgtccgtgtttcactttttacttttatgactgcttatggtgacaatttgatattgttaccatttagcttgtcaaatcaattacaaaaggcctaaatcttatttatcaacttgctttttgataacttcaatcagaaaatttcaata

SEQ ID NO: 21349 - DNA, 673 bp, synthetic construct
  source 1..673: mol_type = other DNA
caccccaagggcccacgtggcggctagtactctggtacttcggtacctttgtacgcctgttttatctcccttcccaatgtaacttagaagttctcaaatcaaagctcgataggtggagcgcaaaccagcgctctcatgagcaagcactcctgtctccccggtgcggttgtataaactgttcccacggttgaaaacaacctatccgttatccgctatagtacttcgagaaacctagtatcacctctggattgttgatgcgttgcgctcagcacactaacccgtgtgtagcttgggtcgatgagtctggacacaccccactggcgacagtggtccaggctgcgttggcggcctactcatggtgaaaaccatgagacgctaaacatgaacaaggtgtgaagagtctattgagctactatagagtcctccggcccctgaatgcggctaatcttaaccatggagcaagtgctcacaagccagtgggttgcttgtcgtaatgcgcaagtccgtggcggaaccgactactttgggtgtccgtgtttcactttttacttttatgactgcttatggtgacaatttgatattgttaccatttagcttgtcaagtcaattacaaaagacctaaatcttatttatcaacttgctttttgacaacttcaatcagaaaatttcaata

SEQ ID NO: 21350 - DNA, 673 bp, synthetic construct
  source 1..673: mol_type = other DNA
caccccaagggcccacgtggcggctagtactctggtacttcggtacctttgtacgcctgttttatctcccttcccaatgtaacttagaagttctcaaatcaaagctcgataggtggagcgcaaaccagcgctctcatgagcaagcactcctgtttccccggtgcggttgtataaactgttcccacggttgaaaacaacctatccgttatccgctatagtacttcgagaaacctagtatcacctttggattgttgatgcgttgcgctcagcacactaacccgtgtgtagcttgggtcgatgagtctggacacaccccactggcgacagtggtccaggctgcgttggcggcctactcatggtgaaaaccatgagacgctaaacatgaacaaggtgtgaagagtctattgagctactatagagtcctccggcccctgaatgcggctaatcttaaccatggagcaagtgctcacaagccagtgggttgcttgtcgtaatgcgcaagtccgtggcggaaccgactactttgggtgtccgtgtttcactttttacttttatgactgcttatggtgacaatttgatattgttaccatttagcttgtcaaatcaattacaaaagacctaaatcttatttatcaacttgctttttgataacttcaatcagaagatttcaata

SEQ ID NO: 21351 - DNA, 673 bp, synthetic construct
  source 1..673: mol_type = other DNA
caccccaagggcccacgtggcggctagtactctggtacttcggtacctttgtacgcctgttttatctcccttcccaatgtaacttagaagctctcaaattaaagctcgataggtggagcgcaaaccagcgctctcatgagcaagcactcctgtctccccggtgcggttgtataaactgttcccacggttgaaaacaacctatccgttatccgctatagtacttcgagaaacctagtatcacctttggattgttgatgcgttgcgctcagcacactaacccgtgtgtagcttgggtcgatgagtctggacacaccccactggcgacagtggtccaggctgcgttggcggcctactcatggtgaaaaccatgagacgctaaacatgaacaaggtgtgaagagtctattgagctactatagagtcctccggcccctgaatgcggctaatcttaaccatggagcaagtgctcacaagccagtgggttgcttgtcgtaatgcgcaagtccgtggcggaaccgactactttgggtgtccgtgtttcactttttacttttatgactgcttatggtgacaatttgatattgttaccatttagcttgtcaaatcaattacaaaagacctaaatcttatttatcaacttgctttttgataacttcaatcagaaaatttcaata

SEQ ID NO: 21352 - DNA, 673 bp, synthetic construct
  source 1..673: mol_type = other DNA
caccccaagggcccacgtggcggctagtactctggtacttcggtacctttgtacgcctgttttatctcccttcccaatgtaacttagaagttctcaaatcaaagctcgataggtggagcgcaaaccagcgctctcatgagcaagcactcctgtctccccggtgcggttgtataaactgttcccacggttgaaaacaacctatccgttatccgctatagtacttcgagaaacctagtaccacctttggattgttgatgcgttgcgctcagcacactaacccgtgtgtagcttgggtcgatgagtctggacacaccccactggcgacagtggtccaggctgcgttggcggcctactcatggtgaaaaccatgagacgctaaacatgaacaaggtgtgaagagtctattgagctactatagagtcctccggcccctgaatgcggctaatcttaaccatggagcaagtgctcacaagccagtgggttgcttgtcgtaatgcgcaagtccgtggcggaaccgactactttgggtgtccgtgtttcactttttacttttatgactgcttatggtgacaatttgatattgttaccatttagcttgtcaaatcaattacaaaagacctaaatcttatttatcaacttgctttttgataacttcaatcagaaaatttcaaca

SEQ ID NO: 21353 - DNA, 675 bp, synthetic construct
  source 1..675: mol_type = other DNA
cactccaagggcccacgtggcggctagtactctggtacttcggtacctttgtacgcctgttttatctcccttcccaatgtaacttagaagttcttaaatcaatgctcaataggtggggcgcaaaccagcgctctcatgagcaagcactcctgtctccccggtgaggttgtataaactgttcccacggttgaaaacaacctatccgttatccgctatagtacttcgagaaacctagtaccacctttggattgttgacgcgttgcgctcagcacactaacccgtgtgtagcttgggtcgatgagtctggacatacctcactggcgacagtggtccaggctgcgttggcggcctactcatggtgaaagccatgagacgctagacatgaacaaggtgtgaagagtctattgagctactatagagtcctccggcccctgaatgcggctaatcctaaccatggagcaagtgctcacaggccagtgagttgcttgtcgtaatgcgcaagtccgtggcggaaccgactactttgggtgtccgtgtttcacttttttacttttatgactgcttatggtgacaatttgatattgttaccatttagcttgtcaaaccaattgcaaaagatcctaaatcttatttatcaacttgcatcttgataactttaatttgaaaatttcaaca

SEQ ID NO: 21354 - DNA, 648 bp, synthetic construct
  source 1..648: mol_type = other DNA
gtactctggtacttcggtacctttgtacgcctgttttatctcccttcccaatgtaacttagaagttcttaaatcaatgctcaataggtggggcgcaaaccagcgctctcatgagcaagcactcctgtctccccggtgaggttgtataaactgttcccacggttgaaaacaacctatccgttatccgctatagtacttcgagaaacctagtaccacctttggattgttgacgcgttgcgctcagcacactaacccgtgtgtagcttgggtcgatgagtctggacatacctcactggcgacagtggtccaggctgcgttggcggcctactcatggtgaaagccatgggacgctagacatgaacaaggtgtgaagagtctattgagctactatagagtcctccggcccctgaatgcggctaatcctaaccatggagcaagtgctcacaggccagtgagttgcttgtcgtaatgcgcaagtccgtggcggaaccgactactttgggtgtccgtgtttcactttttacttttatgactgcttatggtgacaatttgatattgttaccatttagcttgtcaaatcaattgcaaaagatcctaaatcttatttatcaacttgcatcttgataactttaatttgaaaattttaaca

SEQ ID NO: 21355 - DNA, 672 bp, synthetic construct
  source 1..672: mol_type = other DNA
cactccaagggcccacgtggcggctagtactctggtacttcggtacctttgtacgcctgttttatctcccttcccaatgcaacttagaagttcttaaatcaatgctcaataggtggggcgcaaaccagcgctctcatgagcaagcactcctgtctccccggtgaggttgtataaactgttcccacggttgaaaacaacctatccgttatccgctatagtacttcgagaaacctagtaccacctttggattgttgatgcgttgcgctcagcacactaacccgtgtgtagcttgggtcgatgagtctggacataccccactggcgacagtggtccaggctgcgttggcggcctactcatggtgaaaaccatgagacgctaaacatgaacaaggtgtgaagagtctattgagctactatagagtcctccggcccctgaatgcggctaatcttaaccatggagcaagtgctcacaagccagtgggttgcttgtcgtaatgcgcaagtccgtggcggaaccgactactttgggtgtccgtgtttcactttttacttttatgactgcttatggtgacaatttgatattgttaccatttagcttgtcaaatcaattacaaaagacctaaatcttatttatcaacttgcttttgataacttcaatcagaaaatttcaata

SEQ ID NO: 21356 - DNA, 674 bp, synthetic construct
  source 1..674: mol_type = other DNA
cactccaagggcccacgtggcggctagtactctggtacttcggtacctttgtacgcctgttttatctcccttcccaatgtaacttagaagttcttaaatcaatgctcaataggtggggcgcaaaccagcgctctcatgagcaagcactcctgtctccccggtgaggttgtataaactgttcccacggttgaaaacaacctatccgttatccgctatagtacttcgagaaacctagtaccacctttggattgttgacgcgttgcgctcagcacactaacccgtgtgtagcttgggtcgatgagtctggacatacctcactggcgacagtggtccaggctgcgttggcggcctactcatggtgaaagccatgagacgctagacatgaacaaggtgtgaagagtctattgagctactatagagtcctccggcccctgaatgcggctaatcctaaccatggagcaagtgctcacaggccagtgagttgcttgtcgtaatgcgcaagtccgtggcggaaccgactactttgggtgtccgtgtttcgctttttacttttatgactgcttatggtgacaatttgatattgttaccatttagcttgtcaaatcaattgcaaaagatcctaaatcttatttgtcaacttgcatcttgataactttaatttgaaaattttaaca

SEQ ID NO: 21357 - DNA, 674 bp, synthetic construct
  source 1..674: mol_type = other DNA
cactccaagggcccacgtggcggctagtactctggtacttcggtacctttgtacgcctgttttatctcccttcccaatgtaacttagaagttcttaaatcaatgctcaataggtggggcgcaaaccagcgctctcatgagcaagcactcctgtctccccggtgaggttgtataaactgttcccacggttgaaaacaacctatccgttatccgctatagtacttcgagaaacctagtaccacctttggattgttgacgcgttgcgctcagcacactaacccgtgtgtagcttgggtcgatgagtctggacatacctcactggcgacagtggtccaggctgcgttggcggcctactcatggtgaaagccatgagacgctagacatgaacaaggtgtgaagagtctattgagctactatagagtcctccggcccctgaatgcggctaatcctaaccatggagcaagtgctcacaggccagtgagttgcttgtcgtaatgcgcaagtccgtggcggaaccgactactttgggtgtccgtgtttcactttttacttttatgactgcttatggtgacaatttgatattgttaccatttagcttgtcaaatcaattgcaaaagatcctaaatcttatttatcaacttacatcttgataactttaatttgaaaattttaaca

SEQ ID NO: 21358 - DNA, 674 bp, synthetic construct
  source 1..674: mol_type = other DNA
cactccaagggcccacgtggcggctagtactctggtacttcggtacctttgtacgcctgttttatctcccttcccaatgtaacttagaagttcttaaattaatgctcaataggtggggcgcaaaccagcgctctcatgagcaagcactcctgtctccccggtgaggttgtataaactgttcccacggttgaaaacaacctatccgttatccgctatagtacttcgagaaacctagtaccacctttggattgttgacgcgttgcgctcagcacactaacccgtgtgtagcttgggtcgatgagtctggacatacctcactggcgacagtggtccaggctgcgttggcggcctactcatggtgaaagccatgagacgctagacatgaacaaggtgtgaagagtctattgagctactatagagtcctccggcccctgaatgcggctaatcctaaccatggagcaagtgctcacaggccagtgagttgcttgtcgtaatgcgcaagtccgtggcggaaccgactactttgggtgtccgtgtttcactttttacttttatgactgcttatggtgacaatttgatattgttaccatttagcttgtcaaatcaattgcaaaagatcctaaatcttatttatcaacttgcatcttgataattttaatttgaaaactttaaca

SEQ ID NO: 21359 - DNA, 687 bp, synthetic construct; identical to SEQ ID NO: 825
  source 1..687: mol_type = other DNA

SEQ ID NO: 21360 - DNA, 571 bp, synthetic construct; identical to SEQ ID NO: 620
  source 1..571: mol_type = other DNA

SEQ ID NO: 21361 - DNA, 673 bp, synthetic construct
  source 1..673: mol_type = other DNA
cactccaagggcccacgtggcggctagtactctggtacttcggtacctttgtacgcctgttttatctcccttcccaacgtaacttagaagctcttaaatcaaggctcaataggtggagcgcaaaccagcgctcttatgagcaagtactcctgtctccccggtgcggttgtataaactgttcccacggttgaaaacaacctatccgttatccgctatagtacttcgagaaacctagtatcaccttcggattgttgacgcgttgcgctcagcacactaacccgtgtgtagcttgggtcgatgagtctggacataccccactggcgacagtggtccaggctgcgttggcggcctactcatggtgaaaaccatgagacgctagacatgaacaaggtgtgaagagtctattgagctactatagagtcctccggcccctgaatgcggctaatcctaaccatggagcaagtgctcacagaccagtgagttgcttgtcgtaatgcgcaagtccgtggcggaaccgactactttgggtgtccgtgtttcactttttacccttatgactgcttatggtgacaatttgatattgttaccatttagcttgtcaaatcaattgcaaaagatcctaaatcttatttatcaacttgcattttgataactttaatttgaagatttaata

SEQ ID NO: 21362 - DNA, 673 bp, synthetic construct
  source 1..673: mol_type = other DNA
cactccaagggcccacgtggcggctagtactctggtacttcggtacctttgtacgcctgttttatctcccttcccaatgtaacttagaagctcttaaatcaaggctcaataggtggagcgcaaaccagcgctcttatgagcaagtacttctgtttccccggtgcggttatataaactgttcccacggttgaaaataacctatccgttatccgctatagtacttcgagaaacctagtatcacctttggattgttgacgcgttgcgctcagcacactaacccgtgtgtagcttgggtcgatgagtctggacataccccactggcgacagtggtccaggctgcgttggcggcctactcatggtgaaaaccatgagacgctagacatgaacaaggtgtgaagagtctattgagctactatagagtcctccggcccctgaatgcggctaatcctaaccatggagcaagtgctcacagaccagtgagttgcttgtcgtaatgcgcaagtccgtggcggaaccgactactttgggtgaccgtgtttcactttttacccttatgactgcttatggtgacaatttgatattgttgccatttagcttgtcaaatcaattgcaaaagatcctaaatcttatttatcaacttgcattttgataactttaatttgaagatttaata

SEQ ID NO: 21363 - DNA, 673 bp, synthetic construct
  source 1..673: mol_type = other DNA
cactccaagggcccacgtggcggctagtactctggtgcttcggtacctttgtacgcctgttttatctcccttcccaatgtaacttagaagctcttaaatcaaggctcaataggtggagcgcaaaccagcgctcttatgagcaagtactcctgtttccccggtgcggttatataaactgttcccacggttgaaaataacctatccgttatccgctatagtacttcgagaaacctagtatcacctttggattgttgacgcgttgcgctcagcacactaacccgtgtgtagcttgggtcgatgagtctggacataccccactggcgacagtggtccaggctgcgttggcggcctactcatggtgaaaaccatgagacgctagacatgaacaaggtgtgaagagtctattgagctactatagagtcctccggcccctgaatgcggctaatcctaaccatggagcaagtgctcacagaccagtgagttgcttgtcgtaatgcgcaagtccgtggcggaaccgactactttgggtgtccgtgtttcactttttacccttatgactgcttatggtgacaatttgatattgttaccatttagcttgtcaaatcaattgcaaaagatcctaaatcttatctatcaacttgcattttgataactttaatttgaagatttaata

SEQ ID NO: 21364 - DNA, 673 bp, synthetic construct
  source 1..673: mol_type = other DNA
cactccaagggcccacgtggcggctagtactctggtacttcggtacctttgtacgcctgttttatctcccttcccaacgtaacttagaagctcttaaaccaaggctcaataggtggagcgcaaaccagcgctcttatgagcaagtactcctgtttccccggtgcggttatataaactgtccccacggttgaaaataacctatccgttatccgctatagtacttcgagaaacctagtatcacctttggattgttgacgcgttgcgctcagcacactaacccgtgtgtagcttgggtcgatgagtctggacataccccactggcgacagtggtccaggctgcgttggcggcctactcatggtgaaaaccatgagacgctagacatgaacaaggtgtgaagagtctattgagctactatagagtcctccggcccctgaatgcggctaatcctaaccatggagcaagtgctcacagaccagtgagttgcttgtcgtaatgcgcaagtccgtggcggaaccgactactttgggtgtccgtgtttcactttttacccttatgactgcttatggtgacaatttgatattgttaccatttagcttgtcaaatcaattgcaaaagatcctaaatcttatttatcaacttgcattttgataactttaatttaaagattcaata

SEQ ID NO: 21365 - DNA, 658 bp, synthetic construct
  source 1..658: mol_type = other DNA
cgtggcggctagtactctggtacttcggtacctttgtacgcctgttttatctcccttcccaatgtaatttagaagcttttaaatcaaagctcaataggtggggcgcaaaccagcgctctcatgagcaagcactcctgtctccccggtgtggttgtataaactgttcccacggttgaaaacaacctatccgttatccgctatagtacttcgagaaacctagtatcacctttggattgttgacgcgttgcgctcagcacactagcccgtgtgtagcttgggtcgatgagtctggacataccccactggcgacagtggtccaggctgcgttggcggcctactcatggtgaaaaccatgagacgctagacatgaacaaggtgtgaagagtctattgagctactatagagtcctccggcccctgaatgcggctaatcctaaccatggagcaagtgctcacaggccagtgagttgcttgtcgtaatgcgcaagtccgtggcggaaccgactactttgggtgtccgtgtttcactttttacttttatgactgcttatggtgacaatttgatattgttaccatttagctgtcaaattaattgcaaaagatcctaagtcttacttaccaatttgcattttgataaccttgatttgaaaattttaata

SEQ ID NO: 21366 - DNA, 476 bp, synthetic construct; identical to SEQ ID NO: 505
  source 1..476: mol_type = other DNA

SEQ ID NO: 21367 - DNA, 653 bp, synthetic construct
  source 1..653: mol_type = other DNA
ggctagtactctggtacttcggtacctttgtacgcctgttttatctcccttcccaatgtaatttagaagctcttaaatcaaggctcaataggtggggcgcaaaccagcgctctcatgagcaagcactcctgtctccccggtgtggttgtataaactgttcccacggttgaaaacaacctatccgttatccgctatagtacttcgagaaacctagtatcacctttggattgttgacgcgttgcgctcagcacactaacccgtgtgtagcttgggtcgatgagtctggacataccccactggcgacagtggtccaggctgcgttggcggcctactcatggtgaaaaccatgagacgctagacatgaacaaggtgtgaagagtctattgagctactatagagtcctccggcccctgaatgcggctaatcctaaccatggagcaagtgctcacaggccagtgagttgcttgtcgtaatgcgcaagtccgtggcggaaccgactactttgggtgtccgtgtttcactttttacttttatgactgcttatggtgacaatttgatattgttaccatttagcttgtcaaattaattgcaaaggatcctaaatcttacttaccaatttgcattttgacaatcttgatttgaaaattttaata

SEQ ID NO: 21368 - DNA, 650 bp, synthetic construct
  source 1..650: mol_type = other DNA
ctagtactctggtacttcggtacctttgtacgcctgttttatctcccttcccaatgtaatttagaagcttttaaatcaaggctcaataggtggggcgcaaaccagcgctctcatgagcaagcactcctgtctccccggtgtggttgtataaactgttcccacggttgaaaacaacctatccgttatccgctatagtacttcgagaaacctagtatcacctttggattgttgacgcgttgcgctcagcacactaacccgtgtgtagcttgggtcgatgagtctggacataccccactggcgacagtggtccaggctgcgttggcggcctactcatggtgaaaaccatgagacgctagacatgaacaaggtgtgaagagtctattgagctactatagagtcctccggcccctgaatgcggctaatcctaaccatggagcaagtgctcacaggccagtgagttgcttgtcgtaacgcgcaagtccgtggcggaaccgactactttgggtgtccgtgtttcactttttacttttatgactgcttatggtgacaatttgatattgttaccatttagctgtcaaattaattgcaaaagatcctaagtcttacttaccaatttgcattttgataaccttgatttgaaaactttaata

SEQ ID NO: 21369 - DNA, 644 bp, synthetic construct
  source 1..644: mol_type = other DNA
tctggtacttcggtacctttgtacgcctgttttatctcccttcccattgtaacttagaagttcttaaatcaaggctcaataggtggggcgcaaaccagcgctctcatgagcaagcactcctgtctccccggtgtggttgtataaactgttcccacggttgaaaacaacctatccgttatccgctatagtacttcgagaaacctagtatcacctttggattgttgacgcgttgcgctcagcacactaacccgtgtgtagcttgggtcgatgagtctggacgtaccccactggcgacagtggtccaggctgcgttggcggcctactcatggtgaaaaccatgagacgctagacatgaacaaggtgtgaagagtctattgagctactatagagtcctccggcccctgaatgcggctaatcctaaccatggagcaagtgctcacaagccagtgagttgcttgtcgtaatgcgcaagtctgtggcggaaccgactactttgggtgtccgtgtttcactttttacttttatgactgcttatggtgacaatttgatattgttaccatttagcttgtcaaattaattgcaaaagatcctaaatcttatttactaacttgcattttgataaccttgatttgagaattttaata

SEQ ID NO: 21370 - DNA, 644 bp, synthetic construct
  source 1..644: mol_type = other DNA
tctggtacttcggtacctttgtacgcctgttttatctcccttcccaatgtaatttagaagctcttaaatcaaggctcaataggtggggcgcaaaccagcgctctcatgagcaagcactcctgtctccccggtgtggttgtataaactgttcccacggttgaaaacaacctatccgttatccgctatagtacttcgagaaacctagtatcacctttggattgttgacgcgttgcgctcagcacactaacccgtgtgtagcttgggtcgatgagtctggacataccccactggcgacagtggtccaggctgcgttggcggcctactcatggtgaaaaccatgagacgctagacatgaacaaggtgtgaagagtctattgagctactatagagtcctccggcccctgaatgcggctaatcctaaccatggagcaagtgctcacaggccagtgagttgcttgtcgtaatgcgcaagtccgtggcggaaccgactactttgggtgtccgtgtttcactttttacttttatgactgcttatggtgacaatttgatattgttaccatttagcttgtcaaattaattgcaaaagatcctaaatcttacttaccaacttgcattttgataaccttgatttgaaaattttaata

SEQ ID NO: 21371 - DNA, 644 bp, synthetic construct
  source 1..644: mol_type = other DNA
tctggtacttcggtacctttgtacgcctgttttatctcccttcccattgtaacttagaagttcttaaatcaaggctcaataggtggggcgcaaaccagcgctctcatgagcaagcactcctgtctccccggtgtggttgtataaactgttcccacggttgaaaacaacctatccgttatccgctatagtacttcgagaaacctagtatcacctttggattgttgacgcgttgcgctcagcacactaacccgtgtgtagcttgggtcgatgagtctggacgtaccccactggcgacagtggtccaggctgcgttggcggcctactcatggtgaaaaccatgagacgctagacatgaacaaggtgtgaagagtctattgagctactatagagtcctccggcccctgaatgcggctaatcctaaccatggagcaagtgctcacaagccagtgagttgcttgtcgtaatgcgcaagtctgtggcggaaccgactactttgggtgtccgtgtttcactttttacttttatgactgcttatggtgacaatttgatattgttaccatttagcttgtcaaattaattgcaaaagatcctaaatcttatttaccaacttgcattttgataaccttgatttgaaaattttaata

SEQ ID NO: 21372 - DNA, 702 bp, synthetic construct
  source 1..702: mol_type = other DNA
tgggcgccagcacactggtattacggtacccttgtgcgcctgttttatctacccatcccatgtgtaactaagaagcacatcacaaacggtcaacaggcggctcagtaaaccaactgagtctcgaccaagcacttctgttaccccggactgagtatcaatagactgctaacgcggtcgaaggagaaaacgttcgttacccggccaactacttcgagaaacccagtaccaccatgaaggttgcgcggcgtttcgctccacacaaccccagtgtagatcaggtcgatgagtcaccgcgttccccacgggcgaccgtggcggtggctgcgttggcggcctgcccatggggcaacccatgggacgctacaatactgacatggtgcgaagagtctattgagctagttggtagtcctccggcccctgaatgcggctaatcctaactgcggagcggacacccacacaccagtgggcagtccgtcgtaacgggaaactctgcagcggaaccgactactttgggtgtccgtgtttccttttattctcatactggctgcttatggtgacaattgagaaattgttaccatatagctattggattggccatccggtgactaacagagctattgtctacttatttgttggttacgtaccactcaattttaaagtcttaaataccatcaattttatattatcacttaacacaacaaa

SEQ ID NO: 21373 - DNA, 572 bp, synthetic construct; identical to SEQ ID NO: 621
  source 1..572: mol_type = other DNA

SEQ ID NO: 21374 - DNA, 643 bp, synthetic construct; identical to SEQ ID NO: 775
  source 1..643: mol_type = other DNA

SEQ ID NO: 21375 - DNA, 648 bp, synthetic construct
  source 1..648: mol_type = other DNA
gtactctggtacttcggtacctttgtacgcctgttttatctcccttcccgatgtaatttagaagctcttaaatcaaggctcaataggtggggcgcaacccagcgctctcatgagcaagcacttctgtctccccggtgcggttgtataaactgttcccacggttgaaaacaacctatccgttatccgctatagtacttcgagaaacctagtatcacctttggattgttgacgcgttgcgctcagcacactaacccgtgtgtagcttgggtcgatgagtctggacataccccactggcgacagtggtccaggctgcgttggcggcctactcatggtgaaaaccatgagacgctagacatgaacaaggtgtgaagagtctattgagctactatagagtcctccggcccctgaatgcggctaatcctaaccatggagcaagtgctcacaagccagtgagttgcttgtcgtaatgcgcaagtccgtggcggaaccgactactttgggtgtccgtgtttcactttttacttttatgactgcttatggtgacaatttgatattgttaccatttagcttgtcaaattaattgcaaaagatcctaaatcttacttgccaacttgcattttgacaaccttgatttgaaaattttaata

SEQ ID NO: 21376 - DNA, 619 bp, synthetic construct; identical to SEQ ID NO: 716
  source 1..619: mol_type = other DNA

SEQ ID NO: 21377 - DNA, 642 bp, synthetic construct
  source 1..642: mol_type = other DNA
ctggtacttcggtacctttgtacgcctgttttatctcccttcccaatgtaatttagaagcttttaaatcaaggctcaataggtggggcgcaaaccagcgctctcatgagcaagcactcctgtctccccggtgtggttgtataaactgttcccacggttgaaaacaacctatccgttatccgctatagtacttcgagaaacctagtatcacctttggattgttgacgcgttgcgctcagcacactaacccgtgtgtagcttgggtcgatgagtctggacataccccactggcgacagtggtccaggctgcgttggcggcctactcatggtgaaaaccatgagacgctagacatgaacaaggtgtgaagagtctattgagctactatagagtcctccggcccctgaatgcggctaatcctaaccatggagcaagtgctcacaggccagtgagttgcttgtcgtaatgcgcaagtccgtggcggaaccgactactttgggtgtccgtgtttcactttttacttttatgactgcttatggtgacaatttgatattgttaccatttagctgtcaaattaattgcaaaagatcctaagtcttacttaccaatttgcattttgataaccttgatttgaaaattttaata

SEQ ID NO: 21378 - DNA, 673 bp, synthetic construct
  source 1..673: mol_type = other DNA
ctgtgtgcgcctgttttatccaccctaccctgtcgtaacttagaagttaatcaactatggtcactaggcggctcagtgtgccaactgagtctcgaccaagcacttctgttaccccggactgagtatcaataggctgctcacgcggctgaaggagaaaacgttcgttacccggccaattacttcgagaaacctagtaccaccatgaaggttgcgcagcgtttcgctccgcacaaccccagtgtagatcaggtcgatgagtcaccgcattccccacgggcgaccgtggcggtggctgcgttggcggcctgcccatggggcaacccatgggacgcttcaatactgacatggtgcgaagagtctattgagctaattggtagtcctccggcccctgaatgcggctaatcctaactgcggagcagacactcacaatccagtgagcagtctgtcgtaatgggcaactctgcagcggaaccgactactttgggtgtccgtgtttccttttattcttatactggctgcttatggtgacaattgaaagattgttaccatatagctattggattggccatccagtgactaatagagcgatcatttatttgtttgttggttttgtcccattaaactataaagttttgaacacacttaattttatcatactgcttaactcatcaaa

SEQ ID NO: 21379 - DNA, 578 bp, synthetic construct; identical to SEQ ID NO: 631
  source 1..578: mol_type = other DNA

SEQ ID NO: 21380 - DNA, 593 bp, synthetic construct
  source 1..593: mol_type = other DNA
ccagccacgtctcggtcaagcacttctgtctccccggactgagtatcaataagctgctcacgcggctgaaggagaaaacgtccgttatccggccaattacttcgagaaacctagtaccgccatgaaagttgcgcagcgtttcgatccgcacaaccccagtgtagatcaggtcgatgagtcaccgcgttccccacgggtgaccgtggcggtggctgcgttggcggcctgcccatgggagaacccatgggacgcttcaatactgacatggtgtgaagagtctattgagctaattggtagtcctccggcccctgaatgcggctaatcctaactgcggagcagattcccgcatgccagcgggtggtctgtcgtaacgggcaactctgcagcggaaccgactactttgggtgtccgtgtttccttttgttcctatattggctgcttatggtgacaattgagagattgttaccatatagctattggattggccatccggtgacaaacagagcaattatttaccaatttattggttttgtaccattgaattttaacgcattcaaaactcttaaccttatattggcccttaatacagcaaa

SEQ ID NO: 21381 - DNA, 674 bp, synthetic construct
  source 1..674: mol_type = other DNA
cctttgtgcgcctgttttgcttcccttttcccagaggtaacttagaagcaatactccacgaccaatagcaggcgtggcacaccagccatgtctcggtcaagcacttctgtgaccccggactgagtatcaataaactgctcacgcggtcgaaggagaaaacgtccgttacccggctagctacttcgagaaacctagtaacgccatgaaaattgcgaggtgtttcgctcagcacatccccagtgtagatcaggtcgatgagtcaccgcattccccacaggtaactgtggcggtggctgcgttggcggcctgcccatggggtaactcatgggacgcttcaatacggacatggtgtgaagagtctattgagctagttagtattcctccggcccctgaatgcggctaatcctaactgtggagcatgcgcccccattccagagggtagcatgtcgtaacgggtaactccgcagcggaaccgactactttgggtgtccgtgtttccttttattttatcattggctgcttatggtgacaattgaaagattgttaccatatagctattggattggccatccggtgacgaacagagctataatttaccaatttgtgggatttgttcctataagtttgaaagtcttaaagacccttaatttaatattactactcaatagtgcaag

SEQ ID NO: 21382 - DNA, 714 bp, synthetic construct; identical to SEQ ID NO: 877
  source 1..714: mol_type = other DNA

SEQ ID NO: 21383 - DNA, 708 bp, synthetic construct
  source 1..708: mol_type = other DNA
gcccactgggcgctagcacactggtatcacggtacctttgtgcgcctgtttttcctaccctttcccgaaagaaacttagaagctcaacttgtgtggtcaatagtaagctcagtacgccaactgagccacgaccaagcacttctgttaccccggactgagtatcaataagctgctcacgtggctgaaggagaaaacgttcgttatccgaccaattacttcgagaaacccagtaccaccatgaaagttgcgcggcgtttcgctccgcacaaccccagtgtagatcgggccgatgagtcaccgcgttccccacgggcgaccgtggcggtggctgcgttggcggcctgcccatggagcaatccatgggacgcttcaatactgacatggtgcgaagagtctattgagctaattggtagtcctccggcccctgaatgcggctaatcctaactgcggagcagatacccacaagccagtgggcagtctgtcgtaacgggcaacttcgcagcggaaccgactactttgggtgtccgtgtttccttttattttatactggctgcttatggtgacaattgagagattgttaccatatagctattggattggccatccggtgtccaacagagcgatcatttacttgtttgttggattcgtacccttgtactacaaaacactcgtaacgcttaaatacgttatagacctcaacacagcaaa

SEQ ID NO: 21384 - DNA, 677 bp, synthetic construct
  source 1..677: mol_type = other DNA
tcccactccaagggcccacgtggcggctagtactctggtacttcggtacctttgtacgcctgttttatctcccttcccaatgtaacttagaagttcttaaatcaatgctcaataggtggggcgcaaaccagcgctctcatgagcaagcactcctgtctccccggtgaggttgtataaactgttcccacggttgaaaacaacctatccgttatccgctatagtacttcgagaaacctagtaccacctttggattgttgacgcgttgcgctcagcacactaacccgtgtgtagcttgggtcgatgagtctggacatacctcactggcgacagtggtccaggctgcgttggcggcctactcatggtgaaagccatgagacgctagacatgaacaaggtgtgaagagtctattgagctactatagagtcctccggcccctgaatgcggctaatcctaaccatggagcaagtgctcacaggccagtgagttgcttgtcgtaatgcgcaagtccgtggcggaaccgactactttgggtgtccgtgtttcactttttacttttatgactgcttatggtgacaatttgatattgttaccatttagcttgtcaaatcaattgcaaaagatcctaaatcttatttatcaacttgcatcttgataactttaatttgaaaattctaaca

SEQ ID NO: 21385 - DNA, 730 bp, synthetic construct
  source 1..730: mol_type = other DNA
tgggttgtccccactcacagggcccactgggcgccagcacactggtatcaaggtacctttgtgcgcctgttttatagccccttccccgaatgtaacgtagaagctgaacccaagcggtcaacaggcggctcagaataccatctgggtcttgaccaagcacttctgttaccccggactgagtatcaataagctgctcacgcggctgaaggagaaaatgttcgttatccggccaattacttcgagaaacttagtaccaccatgaaggttgcgcagcgtttcgctccgcacaatcccagtgtagatcaggtcgatgagtcaccgcattcctcacgggcgaccgtggcggtggctgcgctggcggcctgctcatggggcaacccatgagacgcttcaatactgacatggtgcgaagagtcaattgagctagttggtagtcctccggcccctgaatgcggctaatcctaactgtggagcagatgcccacgtaccagtgggtagtctgtcgtaacgggcaactccgcagcggaaccgactactttgggtgtccgtgtttctctttattcttatattggctgcttatggtgacaattgagagattgttaccatatagctattggattggccatccggtgacgaatagagcgattgtatatctttttgttggattcgtaccattaaacaaaacaaattacaaaaccttgtgttacattattagattaaacacagcaaa

SEQ ID NO: 21386 - DNA, 661 bp, synthetic construct
  source 1..661: mol_type = other DNA
ccacgtggcggctagtactctggtacttcggtacctttgtacgcctgttttatctcccttcccaatgtaatttagaagcttttacatcaaggctcaataggtggggcgcaaaccagcgctctcatgagcaagcactcctgtctccccggtgtggttgtataaactgttcccacggttgaaaacaacctatccgttatccgctatagtacttcgagaaacctagtatcacctttggattgttgacgcgttgcgctcagcacactaacccgtgtgtagcttgggtcgatgagtctggacataccccactggcgacagtggtccaggctgcgttggcggcctactcatggtgaaaaccatgagacgctagacatgaacaaggtgtgaagagtctattgagctactatagagtcctccggcccctgaatgcggctaatcctaaccatggagcaagtgctcacaggccagtgagttgcttgtcgtaatgcgcaagtccgtggcggaaccgactactttgggtgtccgtgtttcactttttacttttatgactgcttatggtgacaatttgatattgttaccatttagctgtcaaattaattgcaaaagatcctaagtcttacttaccaatttgcattttgataaccttgatttgaaaattttaata

SEQ ID NO: 21387 - DNA, 691 bp, synthetic construct
  source 1..691: mol_type = other DNA
ggtattacggtacccttgtacgcctgttttatactcccctcccccgtaacttagaagacttcaaaatcaaagttcaataggagggggtacaaaccagtaccaccacgaacaagcacttctgtttccccggtgatgttgtatagactgtctccacggtcgaaaacgactgatccgttatccgctctagtacttcgagaagcccagtaccaccttggaatcttcgatgcgttgcgctcagcactcaatcccagagtgtagcttaggttgatgagtctggacgtccctcaccggcgacggtggtccaggctgcgttggcggcctacctgtggcccaaagccacaggacgctagttgtgaacaaggtgcgaagagcctattgagctactagagattcctccggcccctgaatgcggctaatcccaaccacggagcaggtactcacaacccagtgagcagcctgtcgtaacgcgcaagtctgtggcggaaccgactactttgggtgtccgtgtttccttttatttttatatggctgcttatggtgacaatcattgattgttatcataaagcgaattggattggccatccggtgaaagttagacttatcatttacttgtttgttggattcactcctttgactaaattcacccctgacatcatcttagttgtgatactgattaggagacttcatcata

SEQ ID NO: 21388 - DNA, 633 bp, synthetic construct
  source 1..633: mol_type = other DNA
ggtacctttgtacgcctgttttatctcccttcccaatgtaacttagaagttcttaaatcaatgctcaataggtggggcgcaaaccagcgctctcatgagcaagcactcctgtctccccggtgaggttgtataaactgttcccacggttgaaaacaacctatccgttatccgctatagtacttcgagaaacctagtaccacctttggattgtcgacgcgttgcgctcagcacactaacccgtgtgtagcttgggtcgatgagtctggacatacctcactggcgacagtggtccaggctgcgttggcggcctactcatggtgaaagccatgagacgctagacatgaacaaggtgtgaagagtctattgagctactatagagtcctccggcccctgaatgcggctaatcctaaccatggagcaagtgctcacaggccagtgagttgcttgtcgtaatgcgcaagtccgtggcggaaccgactactttgggtgtccgtgtttcactttttacttttatgactgcttatggtgacaattcaatattgttaccatttagcttgtcaaatcaattgcaaaagatcctaactcttatttatcaacttgcatcttgataactttaatttgaaaattttaaca

SEQ ID NO: 21389 - DNA, 676 bp, synthetic construct
  source 1..676: mol_type = other DNA
tcccactccaagggcccacgtggcggctagtactctggtacttcggtacctttgtacgcctgttttatctcccttcccaacgtaacttagaagctcttaaatcaaggctcaataggtggagtgcaaaccagcactcttatgagcaagtactcctgtttccccggtgcggttatataaactgttcccacggttgaaagtaacctatccgttatccgctatagtacttcgagaaacctagtatcacctttggattgttgacgcgttgcgctcagcacactaacccgtgtgtagcttgggtcgatgagtctggacataccccactggcgacagtggtccaggctgcgttggcggcctactcatggtgaaaaccatgagacgctagacatgaacaaggtgtgaagagtctattgagctactatagagtcctccggcccctgaatgcggctaatcctaaccatggagcaagtgctcacagaccagtgagttgcttgtcgtaatgcgcaagtccgtggcggaaccgactactttgggtgtccgtgtttcactttttacccttatgactgcttatggtgacaatttgatattgttaccatttagcttgtcaaatcaattgcgaaagatcctaaatcttatttgtcaacttgcattttgataactctaatttgaagatttaata

SEQ ID NO: 21390 - DNA, 673 bp, synthetic construct
  source 1..673: mol_type = other DNA
caccctaagggcccacgtggcggctagtactctggtacttcggtacctttgtacgcctgttttatctcccttcccaatgtaacttagaagttctcaaatcaaagctcgataggtggagcgcaaaccagcgctcttatgagcaagcactcctgtctccccggtgcggttgtataaactgttcccacggttgaaaacaacctatccgttatccgctatagtacttcgagaaacctagtatcacctttggattgttgatgcgttgcgctcagcacactaacccgtgtgtagcttgggtcgatgagtctggacataccccactggcgacagtggtccaggctgcgttggcggcctactcatggtgaaaaccatgagacgctaaacatgaacaaggtgtgaagagtctattgagctactatagagtcctccggcccctgaatgcggctaatcttaaccatggagcaagtgctcacaagccagtgggttgcttgtcgtaatgcgcaagtccgtggcggaaccgactactttgggtgtccgtgtttcactttttacttttatgactgcttatggtgacaatttgatattgttaccatttagcttgtcaaatcaattacaaaagacctaaatcttatttatcaacttgctttttgataacttcaatcagaaaatttcaata

SEQ ID NO: 21391 - DNA, 652 bp, synthetic construct
  source 1..652: mol_type = other DNA
gctagtactctggtacttcggtacctttgtacgcctgttttatctcccttcccaatgtaatttagaagctcttaaatcaaggctcaataggtggggcgcaaaccagcgctctcatgagcaagcactcctgtctccccggtgtggttgtataaactgttcccacggttgaaaacaacctatccgttatccgctatagtacttcgagaaacctagtatcacctttggattgttgacgcgttgcgctcagcacactaacccgtgtgtagcttgggtcgatgagtctggacataccccactggcgacagtggtccaggctgcgttggcggcctactcatggtgaaaaccatgagacgctagacatgaacaaggtgtgaagagtctattgagctactatagagtcctccggcccctgaatgcggctaatcctaaccatggagcaagtgctcacaggccagtgagttgcttgtcgtaatgcgcaagtccgtggcggaaccgactactttgggtgtccgtgtttcactttttacttttatgactgcttatggtgacaatttgatattgttaccatttagcttgtcaaattaattgcaaaagatcctaaatcttacttaccaacttgcattttgataaccttgatttgaaaattttaata

SEQ ID NO: 21392 - DNA, 720 bp, synthetic construct
  source 1..720: mol_type = other DNA
cgctagtaccttttcacgcctgttttataccccttccccaaatgtaactttagaagcataaataaacaaagaccaataggaatccaacatccagttggattgcggtcaagcacttctgtctccccggacctagtagtgataggctgtacccacggccgaagatgaacccgtccgttatccggccagctacttcgagaagcctagtaacatcaaagatctgtcttggcgtttcgctcagcgcgtttcccccgcgtagatcgggctgatgggtctccgcataccccacgggcgaccgtggcggaggccgcgtggcggcccgcctatggcgaaagccataggacgccatttcagtgacagggtgtgaagagcctattgagctagttggtagtcctccggcccctgaatgcggctaatcctaaccacggagcactcgccaacgaaccagttggtagggtgtcgtaacgggcaactctgtggcggaaccgactactttgggtgtccgtgtttccttttgatcctattttggctgcttatggtgacaacgataagttgttatcataaagcttttgggttggccacctggaaaaagttatcagtgtttgatattgttcggctttcacgcctgccaataaaacaagctttatatttattaatctcattctacccatttgaggatattactgaatttcatttgcaacttttgctcacactatcagcaaa

SEQ ID NO: 21393 - DNA, 698 bp, synthetic construct
  source 1..698: mol_type = other DNA
ttaaaacagccttggggttgttcccactccaagggcccacgtggcggctagtactctggtacttcggtacctttgtacgcctgttttatctcccttcccaatgtaacttagaagttcttaaatcaatgctcaataggtggggcgcaaaccagcgctctcatgagcaagcactcctgtctccccggtgaggttgtataaactgttcccacggttgaaaacaacctatccgttatccgctatagtacttcgagaaacctagtaccacctttggattgttgacgcgttgcgctcagcacactaacccgtgtgtagcttgggtcgatgagtctggacatacctcactggcgacagtggtccaggctgcgttggcggcctactcatggtgaaagccatgagacgctagacatgaacaaggtgtgaagagtctattgagctactatagagtcctccggcccctgaatgcggctaatcctaaccatggagcaagtgctcacaggccagtgagttgcttgtcgtaatgcgcaagtccgtggcggaaccgactactttgggtgtccgtgtttcactttttacttttatgactgcttatggtgacaattttatattgttaccatttagcttgtcaaatcaattgcaaaagatcctaactcttatttatcaacttgcatctcgataactctaatttgaaaattttaaca

SEQ ID NO: 21394 - DNA, 579 bp, synthetic construct; identical to SEQ ID NO: 633
  source 1..579: mol_type = other DNA

SEQ ID NO: 21395 - DNA, 636 bp, synthetic construct; identical to SEQ ID NO: 69
  source 1..636: mol_type = other DNA

SEQ ID NO: 21396 - DNA, 669 bp, synthetic construct
  source 1..669: mol_type = other DNA
cccagggccacgtggcggctagtactctggtacttcggtacctttgtacgcctgttttatctcccttcccaatgtaatttagaagctcttaaatcaaggctcaataggtggggcgcaaaccagcgctctcatgagcaagcactcctgtctccccggtgtggttgcataaactgttcccacggttgaaaacaacctatccgttatccgctatagtacttcgagaaacctagtatcacctttggattgttgacgcgttgcgctcagcacactaacccgtgtgtagcttgggtcgatgagtctggacataccccactggcgacagtggtccaggctgcgttggcggcctactcatggtgaaaaccatgagacgctagacatgaacaaggtgtgaagagtctattgagctactatagagtcctccggcccctgaatgcggctaatcctaaccatggagcaagtgctcacaggccagtgagttgcttgtcgtaatgcgcaagtccgtggcggaaccgactactttgggtgtccgtgtttcactttttacttttatgactgcttatggtgacaatttgatattgttaccatttagcttgtcaaattaattgcaaaagatcctaaatcttacttaccaacttgcattttgataaccttgatttgaaaattttaata

SEQ ID NO: 21397 - DNA, 713 bp, synthetic construct
  source 1..713: mol_type = other DNA
ttcccacctcaagggcccacgtggcggctagtactctggtatctcggtacctttgtacgcctgttttaattccctccccaacgtaacttagaagcttttaaaccaaagctcaataggtggagcgcaaaccagcgctcttatgagcaagcacttctgtctccccggtgtggttgtatagactgtccccacggttgaaaacaacttatccgttaaccgctatagtacttcgagaaacctagtattgccttcggagtgttgatgcgttgcgctcagcacactaacccgtgtgtagcttgggtcgatgagtctggacgtaccccactggcgacagtggtccaggctgcgttggcggcctactcatggtgaaaaccatgagacgctagacatgaacaaggtgtgaagagtctattgagctactatagagtcctccggcccctgaatgcggctaatcctaaccatggagcaagtgctcacaaaccagtgagttacttgtcgtaacgcgcaagtccgtggcggaaccgactactttgggtgtccgtgtttcactttttacttttatgactgctaatggtgacaatttaatattgttaccatttggcttgtcgaattgatcacataagatctatagttttgttcactgatttgctttgaaataatctcacctcaaaacctccagtacataacatttaaagagtttaaacttatttataaca

SEQ ID NO: 21398 - DNA, 702 bp, synthetic construct
  source 1..702: mol_type = other DNA
agccttggggttgttcccaccccaagggcccacgtggcggctagtactctggtatctcggtacctttgtacgcctgttttatctcccttcccaacgcaacttagaagttttcaaatcgaggctcaataggtgaagcgcaaaccagcgctttcatgagcaagcacttctgtctccccggtgcagttgtatagactgtttccacggttgaaaacaacttatccgttatccgctatagtacttcgagaaacctagtatcacctttggattgttgatgcgttgcgctcagcacactaacccgtgtgtagcttgggtcgatgagtctggacgtaccccactggtgacagtggtccaggctgcgttggcggcctactcatggtgaaaaccatgagacgctaaacatgaacaaggtgtgaagagtctattgagctactatagagtcctccggcccctgaatgcggctaatcttaaccatggagcaagtgctcacaagccagtgagttgcttgtcgtaatgcgcaagtccgtggcggaaccgactactttgggtgtccgtgtttcactttttacttttatgactgcttatggtgacaatttaatattgttaccatttagcttgtcagatcaatcacgtgaaatcccaaatctcatttaataacctgtatttggataacttcatttgaaaatcctaaactcgttcgcaaac

SEQ ID NO: 21399 - DNA, 666 bp, synthetic construct
  source 1..666: mol_type = other DNA
gggcccacgtggcggctagtactctggtacttcggtacctttgtacgcctgttttatctcccttcccaatgtaatttagaagctcttaaatcaaggctcaataggtggggcgcaaaccagcgctcttatgagcaagcactcctgtctccccggtgcggttgtataaactgttcccacggttgaaaacgacctatccgttatccgctatagtacttcgagaaacctagtatcacctttggattgttgacgcgttgcgctcagcacactaacccgtgtgtagcttgggtcgatgagtctggacataccccactggcgacagtggtccaggctgcgttggcggcctactcatggtgaaaaccatgggacgctagacatgaacaaggtgtgaagagtctattgagctactatagagtcctccggcccctgaatgcggctaatcctaaccatggagcaagtgctcacaggccagtgagttgcttgtcgtaacgcgcaagtccgtggcggaaccgactactttgggtgtccgtgtttcactttttacttttatgactgcttatggtgacaatttgatattgttaccatttagcttgtcaaattaattgcaaaacatcctaattcttacttaccaacttgcattttgataaccttggtttgaaaattttaata

SEQ ID NO: 21400 - DNA, 636 bp, synthetic construct
  source 1..636: mol_type = other DNA
ccgaagtacctttgtacgcctgttttatctcccttcccaatgtaatttagaagcttctaaatcaaggctcaataggtggggcgcaaaccagcgctctcatgagcaagcactcctgtctccccggtgtggttgtataaactgttcccacggttgaaaacaacctatccgttatccgctatagtacttcgagaaacctagtatcacctttggattgttgacgcgttgcgctcagcacactaacccgtgtgtagcttgggtcgatgagtctggacataccccactggcgacagtggtccaggctgcgttggcggcctactcatggtgaaaaccatgagacgctagacatgaacaaggtgtgaagagtctattgagctactatagagtcctccggcccctgaatgcggctaatcctaaccatggagcaagtgctcacaggccagtgagttgcttgtcgtaatgcgcaagtccgtggcggaaccgactactttgggtgtccgtgtttcactttttacttttatgactgcttatggtgacaatttgatattgttaccatttagctgtcaaattaattgcaaaagatcctaggtcttacttaccaatttgcattttgataaccttgatttgaaaattttaata

SEQ ID NO: 21401 - DNA, 646 bp, synthetic construct
  source 1..646: mol_type = other DNA
ggtacctttgtacgcctgttttatatcccctcccccatgtaaccttagaagcaattcaaacagttcaatagagggggtacaaaccagtaccaccacgaacaagcacttctgtttccccggtgaagccgtatagactgcacccacggttgaaaatggctgatccgttatccgcttaagtacttcgagaagcctagtatcaccttggaatcttcgacgcgttgcgctcagcactctaccccgagtgtagcttaggccgatgagtctgggcataccccaccggcgacggtggcccaggctgcgttggcggcctacccatggctaacgccatgggacgctagttgtgaacaaggtgtgaaaagcctattgagctacttaagagtcctccggcccctgaatgcggctaatcctaaccacggagcaagtgctcacaaaccagtgagtggcttgtcgtaacgcgcaagtctgtggcggaaccgactactttgggtgtccgtgtttccttttatttttatcatggctgcttatggtgacaatctaagattgttatcatatagcatttggattggccatccggtgatttcaaaagcgatacatttgtcctactaccttaccgtgtttatttattcattatatttacacaatcaca

SEQ ID NO: 21402 - DNA, 568 bp, synthetic construct
  source 1..568: mol_type = other DNA
gtttccccggtgaggccgcatagactgttcacacggttgaaagtgtccgatccgttatccgctcatgtacttcgagaagcctagtatcgctctggaatcttcgacgcgttgcgctcagcactcaaccccggagtgtagcttgggccgatgagtctggacagtccccactggcgacagtggtccaggctgcgctggcggcccacctgtggcccaaagccacgggacgctagttgtgaacagggtgtgaagagcctattgagctacatgagagtcctccggcccctgaatgcggctaattctaaccatggagcaggcagctgcaacccagcagccagcctgtcgtaacgcgcaagtccgtggcgaaaccgactactttgggtgtccgtgtttccttttattcttgaatggctgcttatggtgacaatcatagattgttatcataaagcgagttggattggccatccagtgtgaatcagattaattactcccttgtttgttggatccactcccgaaacgttttactccttaacttattgaaattgtttgaagacaggatttcagtgtcaca

SEQ ID NO: 21403 - DNA, 630 bp, synthetic construct
  source 1..630: mol_type = other DNA
ctgttttatatccctccccaatgtaatttagaagctttcaaatcaaagctcaataggtggagcgcaagccagcgcttccgtgagcaagcacttctgtttccccggtgcggttgtatagactgttcccacggttgaaaacgacctatccgttatccgctatagtacttcgagaaacctagtatcacctttggattgttgatgcgttgcgctcaacacactaacccgtgtgtagcttgggtcgatgagtctggacgtaccccactggtgacagtggtccaggctgcgttggcggcctactcatggtgaaaaccatgagacgctagacatgaacaaggtgtgaagagtctattgagctactatagagtcctccggcccctgaatgcggctaatcttaaccatggagcaagtgctcacaaaccagtgagttgcttgtcgtaatgcgcaagtccgtggcggaaccgactactttgggtgtccgtgtttcactttttacttttatgactgcttatggtgacaatttaatattgttaccattcagctagtcgaaataatcacataaaactttaaatcctatctaataattcacatttggatagtttcatttcgaggactttaaacctacttacaaag

SEQ ID NO: 21404 - DNA, 680 bp, synthetic construct
  source 1..680: mol_type = other DNA
aagggcccacgtggcggctagtactctggtacttcggtacctttgtacgcctgttttatctcccttcccaatgtaatttagaagcttttaaatcaaggctcaataggtggggcgcaaaccagcgctctcgtgagcaagcactcctgtctccccggtgtggttgtataaactgttcccacggttgaaaacaacctatccgttatccgctatagtacttcgagaaacctagtatcacctttggattgttgacgcgttgcgctcaacacactaacccgtgtgtagcttgggtcgatgagtctggacataccccactggcgacagtggtccaggctgcgttggcggcctactcatggtgaaaaccatgagacgctagacatgaacaaggtgtgaagagtctattgagctactatagagtcctccggcccctgaatgcggctaatcctaaccatggagcaagtgctcacaggccagtgagttgcttgtcgtaatgcgcaagtccgtggcggaaccgactactttgggtgtccgtgtttcactttttacttttatgactgcttatggtgacaatttgatattgttaccatttagctggtcgaaataatcacataaaactttaaatcctatctaataattcacatttggatagtttcatttcgaggactttaaacctacttacaaag

SEQ ID NO: 21405 - DNA, 567 bp, synthetic construct; identical to SEQ ID NO: 616
  source 1..567: mol_type = other DNA

SEQ ID NO: 21406 - DNA, 653 bp, synthetic construct
  source 1..653: mol_type = other DNA
ggctagtactctggtacttcggtacctttgtacgcctgttttatctcccttcccaatgtaacttagaagttcttaaatcaatgctcaataggtggggcgcaaaccagcgctctcatgagcaagcactcctgtctccccggtgaggttgtataaactgttcccacggttgaaaataacctatccgttatccgctatagtacttcgagaaacctagtaccacctttggattgttgacgcgttgcgctcagcacactaacccgtgtgtagcttgggtcgatgagtctggacatacctcactggcgacagtggtccaggctgcgttggcggcctactcatggtgaaagccatgagacgctagacatgaacaaggtgtgaagagtctattgagctactatagagtcctccggcccctgaatgcggctaatcctaaccatggagcaagtgctcacaggccagtgagttgcttgtcgtaatgcgcaagtccgtggcggaaccgactactttgggtgtccgtgtttcactttttacttttatgactgcttatggtgacaatttgatattgttaccatttagcttgtcaaatcaattgcaaaagatcctaaatcttatttatcaacttgcatcttgataactttaatttgaaaattttaaca

SEQ ID NO: 21407 - DNA, 677 bp, synthetic construct
  source 1..677: mol_type = other DNA
tcccactccaagggcccacgtggcggctagtactctggtacttcggtacctttgtacgcctgttttatctcccttcccaatgtaacttagaagttcttaaatcaatgctcaataggtggggcgcaaaccagcgttctcatgagcaagcactcctgtctccccggtgaggttgcataaactgttcccacggttgaaaacgacctatccgttatccgctatagtacttcgagaaacctagtaccacctttggattgttgacgcgttgcgctcagcacattaacccgtgtgtagcttgggtcgatgagtctggacatacctcactggcgacagtggtccaggctgcgttggcggcctactcatggcgaaagccatgagacgctagacatgaacaaggtgtgaagagtctattgagctactatagagtcctccggcccctgaatgcggctaatcctaaccatggagcaagtgctcacaggccagtgagttgcttgtcgtaatgtgcaagtccgtggcggaaccgactactttgggtgtccgtgtttcactttttacttttatgactgcttatggtgacaatttgatattgttaccatttagcttgtcaaatcaattgcaaaagatcctaaatcttatttatcaacttgcatcttgataactttaatttgaaaattttaaca

SEQ ID NO: 21408 - DNA, 687 bp, synthetic construct
  source 1..687: mol_type = other DNA
tctgggtgtccccactccaacgagcccacgtggcggctagtactctggtacttcggtacctttgtacgcctgttttatctcccttcccaatgtaatttagaagctcttaaatcaaggctcaataggtggggcgcaaaccagcgctctcatgagcaagcactcctgtctccccggtgtggttgtataaactgttcccacggttgaaaacaacctatccgttatccgctatagtacttcgagaaacctagtatcacctttggattgttgacgcgttgcgctcagcacactaacccgtgtgtagcttgggtcgatgagtctggacataccccactggcgacagtggtccaggctgcgttggcggcctactcatggtgaaaaccatgagacgctagacatgaacaaggtgtgaagagtctattgagctactatagagtcctccggcccctgaatgcggctaatcctaaccatggagcaagtgctcacaggccagtgagttgcttgtcgtaatgcgcaagtccgtggcggaaccgactactttgggtgtccgtgtttcactttttacttttatgactgcttatggtgacaatttgatattgttaccatttagcttgtcaaattaattgcaaaagatcctaaatcttacttaccaacttgcatcttgataaccttgatttgaaaattttaata

SEQ ID NO: 21409 - DNA, 618 bp, synthetic construct
  source 1..618: mol_type = other DNA
ctgttttatctcccttcccaatgtaatttagaagcttttaaatcaaggctcaataggtggggcgcaaaccagcgctctcatgagcaagcactcctgtctccccggtgtggttgtataaactgttcccacggttaaaaacaacctatccgttatccgctatagtacttcgagaaacctagtatcacctttggattgttgacgcgttgcgctcagcacactaacccgtgtgtagcttgggtcgatgagtctggacataccccactggcgacagtggtccaggctgcgttggcggcctactcatggtgaaaaccatgagacgctagacatgaacaaggtgtgaagagtctattgagctactatagagtcctccggcccctgaatgcggctaatcctaaccatggagcaagtgctcacaggccagtgagttgcttgtcgtaatgcgcaagtccgtggtggaaccgactactttgggtgtccgtgtttcacttttttacttttatgactgcttatggtgacaatttgatattgttaccatttagctgtcaaattgattgcaaaagatcctaagtcttacttaccaatttgcattttgataaccttgatttgaaaattttaata

SEQ ID NO: 21410 - DNA, 577 bp, synthetic construct
  source 1..577: mol_type = other DNA
caagcacttctgtatccccggactgagtatcagtaggctgctcgcgcggctgaaggagaaaacgttcgttacccggccacttacttcgagaaacctagtaacgccatgaaagttgcgcagcgtttcgatccgcacaaccccagtgtagatcaggtcgatgagtcaccgcgttccccacgggcgaccgtggcggtggctgcgttggcggcctgcccatgggagaacccatgggacgcttcaatactgacatggtgtgaagagtctattgagctaattggtagtcctccggcccctgaatgcggctaatcctaactgtggagcagattcccgcatgccagcgggtggtctgtcgtaacgggcaactctgcagcggaaccgactactttgggtgtccgtgtttccttttattcctatattggctgcttatggtgacaattgagagattgttaccatatagctattggattggccatccggtgacaaacagagcgattatctaccaatttattggttttgtaccattgaatttcaacgcattcaaaactcttaactttattttgactcttaatacagcaaa

SEQ ID NO: 21411 - DNA, 709 bp, synthetic construct
  source 1..709: mol_type = other DNA
ttaaaacagccttggggttgttcccaccccaagggcccacgtggcggctagtactctggtatttcggtacctttgtacgcctgttttatctcccttcccaacgcaacttagaagttttcaaatcgaggctcaataggtgaagcgcaaaccagcgctttcatgagcaagcacttctgtctccccggtgcagttgtatagactgtttccacggttgaaaacaacttatccgttatccgctatagtacttcgagaaacctagtatcacctttggattgttgatgcgttgcgctcagcacactaacccgtgtgtagcttgggtcgatgagtctggacgtaccccactggtgacagtggtccaggctgcgttggcggcctactcatggtgaaaaccatgagacgctaaacatgaacaaggtgtgaagagtctattgagctactatagagtcctccggcccctgaatgcggctaatcttaaccatggagcaagtgctcacaagccagtgagttgcttgtcgtaatgcgcaagtccgtggcagaaccgactactttgggtgtccgtgtttcactttttacttttatgactgcttatggtgacaatttaatattgttaccatttagcttgtcagatcaatcacgtgaaatcccaaatcttatttaataacctgtatttggataacttcatttgaaaattctaaactcgttcgcaaac

SEQ ID NO: 21412 - DNA, 571 bp, synthetic construct
  source 1..571: mol_type = other DNA
cttctgtttccccggactgagtatcaataagctgctcgcgcggctgaaggagaaaacgttcgtcacccggccaattacttcgagaaacctagtaccaccatggaggttgcgcagcgtttcgctccacacaaccccagtgtagatcaggtcgatgagtcaccgcactcctcacgggcgaccgtggcggtggctgcgttggcggcctgcccatggggcaacccatgggacgcttcaatactgacatggtgcgaagagtctattgagctaattggtagtcctccggcccctgaatgcggctaatcctaactgcggagcagatacccacatgccagtgggcagtctgtcgtaatgggtaactctgcagcggaaccgactactttgggtgtccgtgtttccttttattcctacattggctgcttatggtgacaattgagagattgttaccatatagctattggattggccatccagtgacaaacagagcaattgtttatctatttgttggtttcatatcactgaatttcaaagtgttaaaaacccttaacctgatcatactacttaattcagcaaa

SEQ ID NO: 21413 - DNA, 533 bp, synthetic construct
  source 1..533: mol_type = other DNA
ctaaaatttcctacccaagtaacgttagaagttttatcaataagtacaataggaagcatcacatccagtggtgttttgtacaagcacttctgtttccccggagcgaggtataggctgtacccactgccaaaagcctttaaccgttatccgccaaccaactacgtaaaagctagtatcatcatgtttctgactaggcgttcgatcaggtggactccccctccactagtttggtcgatgaggctaggaaatccccacgggcgaccgtgtcctagcctgcgtggcggccaacccagcttttgctgggacgccttttcatagacatggtgtgaagactcgcatgtgcttggttgtgattcctccggcccctgaatgcggctaaccctaaccctggagccctgtgttacaatccagtaacattagggtcgtaatgagtaattccgggacgggaccgactactttgggtgtccgtgtttctcatttttcttattattgtcttatggtcacagcatatatataacatatatactgtgatc

SEQ ID NO: 21414 - DNA, 714 bp, synthetic construct; identical to SEQ ID NO: 878
  source 1..714: mol_type = other DNA

SEQ ID NO: 21415 - DNA, 580 bp, synthetic construct
  source 1..580: mol_type = other DNA
tggtcaagcacttctgtttcccggaccgagtatcaataagctactcacgtggctgaaggagaaaacgttcgttacccgaccaactacttcgagaaacctagtaccaccatgaatgttgcgcggcgtttcgctccgcactaccccagtgtagatcaggtcgatgagtcaccgcatccctcacgggcgaccgtggcggtggctgcgctggcggcctgcccatgggacaacccatgggacgcttcaacacagacatggtgtgaagagtctattgagctagttggtagtcctccggcccctgaatgcggctaatcctaactgcggagcagatccccacaagccagtgggcagtctgtcgtaatgggcaactctgcagcggaaccgactactttgggtgtccgtgtttccttttattctcatactggctgcttatggtgacaattgaaggattgttaccatatagctattggattggccatccggtgtctaacagagcaataatttatctttttgttggattcgtcccacttaactacagagcacttgcaacgctcaattacatcatagatctcaacctaacaaa

SEQ ID NO: 21416 - DNA, 553 bp, synthetic construct
  source 1..553: mol_type = other DNA
gactgttcccacggttgaaagcgtccgatccgttatccgctcatgtacttcgagaagcctagtatcgctctggaatcttcgacgcgttgcactcagcactcaaccccggagtgtagcttgggccgatgagtctggacagtccccactggcgacagtggtccaggctgcgctggcggcccacctgtggcctaaagccacgggacgctagtagtgaacagggtgtgaagagcctattgagctacatgagagtcctccggcccctgaatgcggctaatcctaaccatggagcaggcagctgcaacccagcagccagcctgtcgtaacgcgcaagtccgtggcggaaccgactactttgggtgtccgtgtttccttttattcttgaatggctgcttatggtgacaatcatagattgttatcataaagcgagttggattggccatccagtgtgaatcagattaattactcccttgtttgttggatccaatcccgaaacgttaaacgttttactctttaacttattgaaattgtttgaagacaggatttcagtgtcaca

SEQ ID NO: 21417 - DNA, 576 bp, synthetic construct; identical to SEQ ID NO: 628
  source 1..576: mol_type = other DNA

SEQ ID NO: 21418 - DNA, 654 bp, synthetic construct
  source 1..654: mol_type = other DNA
cggctagtactctggtacttcggtacctttgtacgcctgttttatctcccttcccaatgtaatttagaagctcttaaatcaaggctcaataggtggggcgcaaaccagcgctctcatgagcaagcactcctgtctccccggtgtggttgtataaactgttcccacggttgaaaacaacctatccgttatccgctatagtacttcgagaaacctagtatcacctttggattgttgacgcgttgcgctcagcacactaacccgtgtgtagcttgggtcgatgagtctggacataccccactggcgacagtggtccaggctgcgttggcggcctactcatggtgaaaaccatgagacgctagacatgaacaaggtgtgaagagtctattgagctactatagagtcctccggcccctgaatgcggctaatcctaaccatggagcaagtgctcacaggccagtgagttgcttgtcgtaatgcgtaagtccgtggcggaaccgactactttgggtgtccgtgtttcactttttacttttatgactgcttatggtgacaatttgatattgttaccatttagcttgtcaaattaattgcaaaagatcctaaatcttacttaccaacttgcattttgacaactttgatttgaaaattttaata

SEQ ID NO: 21419 - DNA, 707 bp, synthetic construct
  source 1..707: mol_type = other DNA
gcggccagtactccggtattacggtacccttgtacgcctgttttatactcccttccccgtaacttagaagacttcaaagaaatccaagttcaataggagggggtacaaaccagtaccaccacgaacaagcacttctgttcccccggtgaagttgtatagactgtacccacggttgaaaacgactgatccgttatccgctctaatacttcgagaagcttagtatcatcttggaatcttcgatgcgttgcgctcagcactcaaccctggagtgtagcttaggtcgatgagtctggacgttcctcaccggtgacggtggtccaggctgcgttggcggcctacctgtggcccaaagccacaggacgctagttgtgaacaaggtgtgaagagcctattgagctattagagattcctccggcccctgaatgcggctaatcccaaccacggagcaggcgcttacaaaccagtaagtagcttgtcgtaacgcgaaagtctgtggcggaaccgactactttgggtgtccgtgtttccttttatttttaaatggctgcttatggtgacaatcattgattgttatcataaagcgagttggattggccatccggtgaaagtgagactcatcatatatctatttgttggatttactcctttgactaagtatactctcaacattatattcattgtaatattaattagaagatactatcata

SEQ ID NO: 21420 - DNA, 713 bp, synthetic construct; identical to SEQ ID NO: 874
  source 1..713: mol_type = other DNA

SEQ ID NO: 21421 - DNA, 617 bp, synthetic construct
  source 1..617: mol_type = other DNA
ctgttttatctcccttcccaatgtaatttagaagcttttaaatcaaggctcaataggtggggcgcaaaccagcactctcatgagcaagcactcctgtctccccggtgtggttgtataaactgttcccacggttgaaaacaacctatccgttatccgctatagtacttcgagaaacctagtatcacctttggattgttgacgcgttgcgctcagcacactaacccgtgtgtagcttgggtcgatgagtctggacataccccactggcgacagtggtccaggctgcgttggcggcctactcatggtgaaaaccatgagacgctagacatgaacaaggtgtgaagagtctattgagctactatagagtcctccggcccctgaatgcggctaatcctaaccatggagcaagtgctcacaggccagtgagttgcttgtcgtaatgcgcaagtccgtggcggaaccgactactttgggtgtccgtgtttcactttttacttttatgactgcttatggtgacaatttgatattgttaccatttagctgtcaaattaattgcaaaagatcctaagtcttacttaccaatttgcattttgataaccttgatttgaaaattttaata

SEQ ID NO: 21422 - DNA, 655 bp, synthetic construct
  source 1..655: mol_type = other DNA
acaccctcccccgagtgcaacttagaagatatccacacacggtcaataggcggctcagtatgccaactgagtcatgaccaagcacttctgttcccccggactgagtatcaataagctgcttacgtggctgaaggagaaaacgttcgttatccggccaattacttcgagaagcttagtaccaccatggaggttgcgcagtgtttcgttccgcacaaccccagtgtagatcaggtcgatgagtcaccgcactcctcacgggcgaccgtggcggtggctgcgctggcggcctgcccctggggcaacccctgggacgctccaatactgacatggtgcgaagagcctattgagctaattggtagtcctccggcccctgaatgcggctaatcctaactgcggagcagacacccacaagccagtgggcagtctgtcgtagtgggtaactctgcagcggaaccgactactttgggtgtccgtgtttccttttattcctacattggctgcttatggtgacaattgagagattgttaccatatagctattggattggccgtccagtgacaaacagagcgattatctatctatttgttggcttcgtaccattaaaccttagagtcctaaagaccctcaatttgattatacaatttaactctgtgaa

SEQ ID NO: 21423 - DNA, 571 bp, synthetic construct
  source 1..571: mol_type = other DNA
cttctgtttccccggactgagtatcaataagctgctcgcgcggctgaaagagaaaatgttcgttatccggccaattacttcgagaaacccagtatcaccatggaggttgcgcagcgtttcgctccgcacgaccccagtgtagatcaggccgatgagtcaccgcattcctcacgggcgaccgtggcggtggctgcgttggcggcctgcccatggggcaacccatgggacgcttcaatactgacatggtgtgaagagtctattgagctaattggtagtcctccggcccctgaatgcggctaatcccaactgcggagcagatactcacatgccagtgagcagtctgtcgtaacgggcaactctgcagcggaaccgactactttgggtgtccgtgtttccttttattcttatattggctgcttatggtgacaattgagagattgttaccatatagctattggattggccatccagtgacaaacagggcaatagtttatctatttgttggttttataccactgaatttcaaggttttaaaaacccttaacttggtcttactactcaattcagtaag

SEQ ID NO: 21424 - DNA, 619 bp, synthetic construct
  source 1..619: mol_type = other DNA
ttaaaacagcggatgggttccccaccatccgacccactgggtgtagtactctggtactttgtacctttgtacgcctgtttctcccctccctcccaacctatacaatcccagtaacttagaagttttgaactgttgtacaataggtatcgtcacatccagtggcggttggtacaagcacttctgtttccccggagcggagtatagatggccaccgctgtcaaaagctcttaaccgttatccgccaattaactacgcaacggctagtaacatcatgccgcctttggggcgttcgatcaggtgagtgcacccctcactagtctggtcgatgaggctgagaattccccacgggtgaccgtgtctcagcctgcgtggcggccagcccagcctatgctgggacgccttaattgtgacatggtgtgaagacccacgtgtgcttaattgtgagtcctccggcccctgaatgcggctaacctaaaccctggagccttgtgacacaatccagtgttggcaaggtcgtaatgagtaattctgggacgggaccgactactttgggtgtccgtgtttccttttatttttaaattgttcttatggtcacaatataagcatatatattgtgatc

SEQ ID NO: 21425 - DNA, 721 bp, synthetic construct
  source 1..721: mol_type = other DNA
cccacccacggggcctactgggcgccagcacactggtatcacggtacctttgtgcgcctgttttataacccctcccccgatcgtaacgtagaagctgaacctaagcggtcaataggcggctcagaacaccatctgggtcttgaccaagcacttctgttaccccggactgagtatcaataagctgcttacgcggctgaaggagaaaacgtccgttacccggccaattacttcaagaaacccagtaccaccatgaaggttgcgcagcgtttcgctccgcacaaccccagtgtagatcaggtcgatgagtcaccgcattcctcacgggcgaccgtggcggtggctgcgttggcggcctgcccatggggtaacccatgggacgcttcaatactgacatggtgcgaagagtctattgagctaagtggtagtcctccggcccctgaatgcggctaatcctaactgcggagcagacgcccaagctccagtgggtagtctgtcgtaacgggtaactctgcagcggaaccgactactttgggtgtccgtgtttccttttattcttacattggctgcttatggtgacaattgagagattgttaccatatagctattggattggccatccggtgacaaatagagcaattatatatctttttgttggattcataccactcgacaaaacaaatttcagaaccttgtgttatattattagattaaatacagcaaa

SEQ ID NO: 21426 - DNA, 600 bp, synthetic construct; identical to SEQ ID NO: 651
  source 1..600: mol_type = other DNA

SEQ ID NO: 21427 - DNA, 716 bp, synthetic construct
  source 1..716: mol_type = other DNA
tacctttgtacgcctgttttatactcccttcccctacatgtaaccttagaagtataaataaacaaagaccaataggagtccaacatccagttggatcgcggtcaagtacttctgtttccccggacctagtagtgataggctgtacccacggccgaagatgaacccgtccgttatccggccagctacttcgagaagcctagtaacatcaaagatctgtcttggcgtttcgctcagcgcgttccccccgcgtagatcgggctgatgggtctccgcataccccacgggcgaccgtggcggaggccgcgtggcggcccgcctatggcgaaagccataggacgccatttcagtgacagggtgtgaagagcctattgagctagttggtagtcctccggcccctgaatgcggctaatcctaaccacggagcgttcaccagcaaaccagctgggagggcgtcgtaatgggcaactctgtggcggaaccgactactttgggtgtccgtgtttccttttgatcctatattggctgcttatggtgacaacgataagttgttatcataaagcttttgggttggccacctggaaaaagttatcagtgtttgatattgttcggctttcacgcctaccaataaaacaagctttatattatttaatctccttttacccaaagggagagatttctgaatttcatatccagttgctcctaacactatcagcaaa

SEQ ID NO: 21428 - DNA, 597 bp, synthetic construct
  source 1..597: mol_type = other DNA
atgtaatttagaagcttttaaatcaaggctcaataggtggggcgcaaaccagcgctctcatgagcaagcactcctgtctccccggtgtggttgtataaactgttcccacggttgaaaacaacctatccgttatccgctatagtacttcgagaaacctagtatcacctttggattgttgacgcgttgcgctcagcacactaacccgtgtgtagcttgggtcgatgagtctggacataccccactggcgacagtggtccaggctgcgttggcggcctactcatggtgaaaaccatgagacgctagacatgaacaaggtgtgaagagtctattgagctactatagagtcctccggcccctgaatgcggctaatcctaaccatggagcaagtgctcacaggccagtgagttgcttgtcgtaatgcgcaagtccgtggcggaaccgactactttgggtgtccgtgtttcactttttacttttatgactgctcatggtgacaatttgatattgttaccatttagctgtcaaattaattgcaaaagatcctaagtcttacttaccaatttgcattttgataaccttgatttgaaaattttaata

SEQ ID NO: 21429 - DNA, 710 bp, synthetic construct
  source 1..710: mol_type = other DNA
ttaaaacagccttggggttgttcccaccccaagggcccacgtggcggctagtactctggtatttcggtacctttgtacgcctgttttatatccctccccaatgtaatttagaagctttcaaatcaaagctcaataggtggagcgcaagccagtgcttccgtgagcaagcacttctgtttccccggtgcggttgtatagactgttcccacggttgaaaacgacctatccgttatccgctatagtacttcgagaaacctagtatcacctttggattgttgatgcgttgcgctcaacacactaacccgtgtgtagcttgggtcgatgagtctggacgtaccccactggtgacagtggtccaggctgcgttggcggcctactcatggtgaaaaccatgagacgctagacatgaacaaggtgtgaagagtctattgagctactatagagtcctccggcccctgaatgcggctaatcttaaccatggagcaagtgctcacaaaccagtgagttgcttgtcgtaatgcgcaagtccgtggcggaaccgactactttgggtgtccgtgtttcactttttacttttatgactgcttatggtgacaatttaatattgttaccattcagctagtcgaaataatcacataaaactttaaatcctatctaataattcacatttggatagttttatttcgaggactttaaacctacttacaaag

SEQ ID NO: 21430 - DNA, 710 bp, synthetic construct
  source 1..710: mol_type = other DNA
ttaaaacagccttggggttgttcccaccccaagggcccacgtggcggctagtactctggtatttcggtacctttgtacgcctgttttatctccctccccaatgtaacttagaagctttcaaatcaaagctcaataggtggagcgcaagccagcgcttccgtgagcaagtacttctgtttccccggtgcggttgtatagactgttcccacggttaaaaacaacctatccgttatccgctatagtacttcgagaaacctagtatcacctttggattgttgatgcgttgcgctcaacacactaacccgtgtgtagcttgggtcgatgagtctggacataccccactggtgacagtggtccaggctgcgttggcggcctactcatggtgaaaaccatgagacgctagacatgaacaaggtgtgaagagtctattgagctactatagagtcctccggcccctgaatgcggctaatcttaaccatggagcaagtgctcacaaaccagtgagttgcttgtcgtaatgcgcaagtccgtggcggaaccgactactttgggtgtccgtgtttcactttttacttttatgactgcttatggtgacaatttaatattgttaccattcagctagtcgaaataatcgcataaaactttaaatcctatctaacagttcacatttggatagttttattttaaggactttaaacctacctagaaag

SEQ ID NO: 21431 - DNA, 653 bp, synthetic construct
  source 1..653: mol_type = other DNA
ggtaaccttgtacgcctgttttataatccccttcccccgtaacagtagaagcacaaaagcaaccgctcaatagatgccatacctccagtgtggttatgagcaagcacttctgtctccccggttgcgccctatatgctgtgcgaacggcaaaaaggggcaatatcgttacccgcttgactactacgggaaacctagtattatcttcgattgatttgagagttgcgttcagcgcccaacccccggcgtagctcaggctgatgaggctccgaacaccccacaggcgactgtgtcagagcctgcgttggcggcctgcccataccctgcggtatgggacgctcacttcatgacatggtatgaagagtctactgtgctagtcaagattcctccggcccctgaatgtggataatcctaaccactgatcctacgttcgcaatccagcgtttggtaggtcgtaatgcgcaagtcggtggcggaaccaactactttgggtgtccgtgtttcccttacttcctactgaatgcttatggtgacaattgttttgatcagttgttgccattacttgcgttcagtgtgtaattacaaaaacaagatcatcagttgttactatccctcacgttcagtgcgcaattacaaaaacaagattttctgtcata

SEQ ID NO: 21432 - DNA, 664 bp, synthetic construct
  source 1..664: mol_type = other DNA
ggcccacgtggcggctagtactctggtacttcggtacctttgtacgcctgttttatctcccttcccaatgtaatttagaagcttctaaatcaaggctcaataggtggggcgcaaaccagcgctctcatgagcaagcactcctgtctccccggtgtggttgtataaactgttcccacggttgaaaacaacctatccgttatccgctatagtacttcgagaaacctagtatcacctttggattgttgacgcgttgcgctcagcacactaacccgtgtgtagcttgggtcgatgagtctggacataccccactggcgacagtggtccaggctgcgttggcggcctactcatggtgaaaaccatgagacgctagacatgaacaaggtgtgaagagtctattgagctactatagagtcctccggcccctgaatgcggctaatcctaaccatggagcaagtgctcacaggccagtgagttgcttgtcgtaatgcgcaagtccgtggcggaaccgactactttgggtgtccgtgtttcactttttacttttatgactgcttatggtgacaatttgatattgttaccatttagctgtcaaattaattgcaaaagatcctaggtcttacttaccaatttgcattttgataaccttgatttgaaaattttaata

SEQ ID NO: 21433 - DNA, 597 bp, synthetic construct
  source 1..597: mol_type = other DNA
atgtaatttagaagcttttaaatcaaggctcaataggtggggcgcaaaccagcgctctcatgagcaagcactcctgtctccccggtgtggttgtataaactgttcccacggttgaaaacaacctatccgttatccgctatagtacttcgagaaacctagtatcacctttggattgttgatgcgttgcgctcatcacactaacccgtgtgtagcttgggtcgatgagtctggacataccccactggcgacagtggtccaggctgcgttggcggcctactcatggtgaaaaccatgagacgctagacatgaacaaggtgtgaagagtctattgagctactatagagtcctccggcccctgaatgcggctaatcctaaccatggagcaagtgctcacaggccagtgagttgcttgtcgtaatgcgcaagtccgtggcggaaccgactactttgggtgtccgtgtttcactttttacttttatgactgcttatggtgacaatttgatattgttaccatttagctgtcaaactaattgcaaaagatcctaagtcttacttaccaatttgcattttgataaccttgatttgaaaattttaata

SEQ ID NO: 21434 - DNA, 593 bp, synthetic construct
  source 1..593: mol_type = other DNA
ctacctgggtctcgaccaagcacttctgttgccccggactgagtatcaataggctgctcacgcggctgaaggagaaaacgttcgttacccggccaattacttcgagaaacttagtaccaccatgaaggttgcgcggcgtttcgctccacacaaccccagtgtagatcaggtcgatgagtcaccgcgttccccacgggcgaccgtggcggtggctgcgtcggcggcctgcccatgggtcaacccatgggacgcttcaatactgacatggtgtgaagagtctattgagctaattggtattcctccggcccctgaatgcggctaatcctaactgcggagcagatacccacatgccagtgggcagtctgtcgtaacgggcaactctgcagcggaaccgactactttgggtgtccgtgtttccttttatccttatactggctgcttatggtgacaattgagagattgttaccatatagctattggattggccatccggtgacaagcagagcaattatttatttgtttgttggcttcgtgccattaaatagtaaagctctaacaaccctcaacctcatcttgttacttaatagtgcaaa

SEQ ID NO: 21435 - DNA, 652 bp, synthetic construct
  source 1..652: mol_type = other DNA
aagaccaataggagtccaacatccagttggattacggtcaagcacttctgtctccccggacctagtagtgataggctgtacccacggccgaagatgaacccgtccgttatccggccagctacttcgagaagcctagtaacatcaaagatctgtcttggcgtttcgctcagcgcgttccccccgcgtagatcgggctgatgggtctccgcataccccacgggcgaccgtggcggaggccgcgtggcggcccgcctatggcgaaagccataggacgccatttcagtgacagggtgtgaagagcctattgagctagttggtagtcctccggcccctgaatgcggctaatcctaaccacggagcatccaccagcaaaccagctgggagggtgtcgtaacgggtaactctgtggcggaaccgactactttgggtgtccgtgtttccttttgatcctattttggctgcttatggtgacaacgataagttgttatcataaagcttttgggttggccacctggaaaaagatatcagtgtttgatattgttcggctttcgcgcctaccaataagacaagccttatactttttaatttccttttatccaaaggaagaaatttctgagtttcatctacagttgctcctaacattatcatcaag

SEQ ID NO: 21436 - DNA, 642 bp, synthetic construct
  source 1..642: mol_type = other DNA
atgtaacgtagaagctacgctcaaacggtcaacagatagtccagtaatccagctgggccacgaccaagcacttctgtttccccggacagagtaccaataagctgctcgcgcggctgaaggggaaaacgttcgttacccggccaattacttcgagaaacctagtaccgccatggacgttgcgcagcgtttcgctccacacaaccccagtgtagatcaggtcgatgagccaccgcattccccacgggcgaccgtggcggtggctgcgttggcggcctgcccatggggtaacccatgggacgcttcaatacagacatggtgcgaagagtctattgagctaattggtagtcctccggcccctgaatgcggctaatcctaactgcggagcaggtacccacaacccagtgggtcacctgtcgtaatgggcaactctgcagcggaaccgactactttgggtgtccgtgtttccttttaacctttacactggctgcttatggtgacaattgaaagattgttaccatatagctattggattggccatcctgtgagtaatagagcgattgtatacttatttgttggctttataccactcaatttgaaagctttacagacactgaattatattgtggcattaaacacagcaaa

SEQ ID NO: 21437 - DNA, 622 bp, synthetic construct
  source 1..622: mol_type = other DNA
ttaaaacagctgatgggttccccaccatccgacccaatgggtgtagtactctggtattctgtacctttgtacgcctgtttctccccacccccccgtcctaaataatcccagtaacttagaagatttgaattatcgtacaataggtgctgtcacatccagtgatggctagtacaagcacttctgtttccccggagcggagtatagatggccaccgctgtcaaaagctcttaaccgttatccgccaattaactacgcaacggttagtaacatcttgtcatttttgaggcgttcgatcaggtgagtacacccctcactagtctggtcgatgaggctgagaattccccacgggcgaccgtgtctcagcctgcgtggcggccagcccagcttatgctgggacgccttaattgtgacatggtgcgaagacccacgtgtgcttaattgtgagtcctccggcccccgaatgcggctaacctaaaccccggagccttgagacacaatccagtgttagcaaggtcgtaacgagcaattctgggacgggaccgactactttgggtgtccgtgtttcctgttattctcaaattgttcttatggtcacaatataagtaatatatatattgtgatc

SEQ ID NO: 21438 - DNA, 620 bp, synthetic construct
  source 1..620: mol_type = other DNA
ttaaaacagcggatgggtttcccaccatccgacccactgggtgtagtactctggtacattgtacctttgtacgcctgtttctcccctccctcccaacctatacaatcccggcaacttagaagatttgaactattgtacaataggcgctgtcacatccagtggcggctagtacaagcacttctgtttccccggagcggagtatagatggccaccgctgtcaaaagctcttaaccgttatccgccaattaactacgcaacggctagtaatatcatgtaacttttagggtgttcgatcaggtgagtgtacccctcactagtctggtcgatgaggctgagaattccccacgggcgaccgtgtctcagcctgcgtggcggccagcccagcttatgctgggacgccttaattgtgacatggtgtgaagacccacgtgtgcttaattgtgagtcctccggcccctgaatgcggctaacctaaaccctggagccttgaaacacaatccagtgttagcaaggtcgtaatgagtaattccgggacgggaccgactactttgggtgtccgtgtttccttttatttttaagttgttcttatggtcacaatataagtaatatatattgtgatc

SEQ ID NO: 21439 - DNA, 614 bp, synthetic construct
  source 1..614: mol_type = other DNA
atgggtttcccaccatccgacccactgggtgtagtgctctggtattttgtacccttgcacgcctgtttcccatttgtacccttccttaatttcctacccctgtaacattagaagttttggaattttacggtacaataggaagcgccacatccagtggtgttgtgtacaagcacttctgtttacccggagcgaggtataggttgtacccacggccaaaaaccttcaaccgttatccgccaaccaactacgtaacggctagtatcatcttgtatttgacttggcgttcgatcaggtggtatcccccactagtctggtcgatgaggctaggaattccccacgggcgaccgtgtcctagcctgcgtggcggccagcccagctttagctgggacgccttttcaaagacatggtgtgaagacctgcatgtgcttggttgtgagtcctccggcccctgaatgcggctaaccttaaccccggagcccagtgacataatccaatgttatttgggtcgtaatgagtaattccgggatgggaccgactactttgggtgtccgtgtttccttttattctttatattgtcttatggtcacagcatatatagtatatatactgtgatc

SEQ ID NO: 21440 - DNA, 707 bp, synthetic construct
  source 1..707: mol_type = other DNA
tacgcctgtcttaaatcccctgcctcaaacgtaacattagaagtataaataaacaaagaccaataggagtccaacatccagttggattgcggtcaagcacttctgtctccccggacctagtagtgataggctgtacccacggccgaagatgaacccgtccgttatccggccagctacttcgagaagcctagtaacatcaaagatctgtcttggcgtttcgctcagcgcgttccccccgcgtagatcgggctgatgggtctccgcataccccacgggcgaccgtggcggaggccgcgtggcggcccgcatatggcgaaagccataggacgccatttcagtgacagggtgtgaagagcctattgagctagttggtagtcctccggcccctgaatgcggctaatcctaaccacggagcatccaccagcaaaccagctggaagggggtcgtaacgggtaactctgtggcggaaccgactactttgggtgtccgtgtttccttttgatcctatattggctgcttatggtgacaacgataagttgttatcataaagcttttgggttggccacctggagaaagttatcagtgtttgatattgttcggctttcacgcctaccaataaaacaagctttatacttattagtttcattttatccgtctgaggaaatttctgagttttacctacagcttctgctcactctaacagcaaa

SEQ ID NO: 21441 - DNA, 705 bp, synthetic construct
  source 1..705: mol_type = other DNA
gcctgttttatattcccctcccccaaacgtaacattagaagtataaacaaacaaagaccaataggagtccaacatccagttggattgcggtcaagcacttctgtctccccggacctagtagtgataggctgtacccacggccgaagatgaacccgtccgttatccggccagctacttcgagaagcctagtaacatcaaagatctgtcttggcgtttcgctcagcgcgttccccccgcgtagatcgggctgatgggtctccgcataccccacgggcgaccgtggcggaggccgcgtggcggcctgcctatggcgaaagccataggacgccatttcagtgacagggtgtgaagagcctattgagctagttggtagtcctccggcccctgaatgcggctaatcctaaccacggagcatccaccagcaaaccagctggaagggtgtcgtaacgggtaactctgtggcggaaccgactactttgggtgtccgtgtttccttttgatcctatattggctgcttatggtgacaacgataagttgttatcataaagcttttgggttggccacctggaaaaagttatcagtgtttgatattgttcggctttcacgcctaccaataaaacaagctttatacttgctaatttcattttatccatctgaggatattactgaattttacctacaacttttgctcaccctaacagtaaa

SEQ ID NO: 21442 - DNA, 671 bp, synthetic construct
  source 1..671: mol_type = other DNA
cgcctgttttatactcccctcccccgtaacttagaaaacttcaaaatcaaagttcaataggagggggtacaaaccagtaccaccacgaacaagcacttctgtttccccggtgatgttgtatagactgtctccacggttgaaaacgactgatccgttatccgctctagtacttcgagaagcccagtaccaccttggaatcttcgatgcgttgcgctcagcactcaaccccagagtgtagcttaggttgatgagtctggacatccctcaccggcgacggtggtccaggctgcgttggcggcctacctgtggcccaaagccacaggacgctagttgtgaacaaggtgcgaagagcctattgagctactagagattcctccggcccctgaatgcggctaatcccaaccacggagcaggtactcacaacccagtgagcagcctgtcgtaacgcgcaagtctgtggcggaaccgactactttgggtgtccgtgtttccttttatttttatatggctgcttatggtgacaatcattgattgttatcataaagcgaattggattggccatccggtgaaagttagacttatcatttacttgtttgttggattcactcctttgactaaattcacccctgacatcatcttagttgtgatactgattaggagacttcatcata

SEQ ID NO: 21443 - DNA, 699 bp, synthetic construct
  source 1..699: mol_type = other DNA
cgctagcacactggtatcccggtacctttgtgcgcctgttttacgcaccctcccccgacagcaacttagaagatttccacacacggtcaataggcggctcagtatgccaactgggtcatgaccaagcacttctgtctccccggactgagtatcaataagctgctcacgtggctgaaggagaaaacgttcgttatccggccaattacttcgagaagcttagtaccaccatggaggttgcgcagtgtttcgttccgcacaaccccagtgtagatcaggtcgatgagtcaccgcactcctcacgggcgactgtggcggtggctgcgctggcggcctgcccatggggcaccccatgggacgcttcaatactgacatggtgcgaagagcctattgagctaattggtaatcctccggcccctgaatgcggctaatcctaactgcggagcagataccctcgagccagtgggcagtctgtcgtaatgggcaactctgcagcggaaccgactactttgggtgtccgtgtttccttttattcctatattggctgcttatggtgacaattgagagattgttaccatatagctattggattggccatccagtgacaaacagagcgattatctacttatttgttggctttgtaccattaaatcttggagtccttaagaccctcaacttgattatacaatttaactctgcgaa

SEQ ID NO: 21444 - DNA, 618 bp, synthetic construct
  source 1..618: mol_type = other DNA
tttaaacagcggatgggttccccaccatccgacccactgggtgtagtactctggtattttgtacctttgtacgcctgtttctcccctacctcccaacctaaacaatcctggtaacttagaagacttaaatcatcgtacaataggtgctgtcacatccagtgacggctagtacaagcacttctgtttccccggagcggagtataaatggccaccgctgtcaaaagctcttaaccgttatccgccaattaactacgcaacggctagtaacatcttgttatttttagggcgttcgatcaggtgagtaaacccctcactagtctggtcgatgaggctgagaattccccacgggcgaccgtgtctcagcctgcgtggcggccagcccagctaatgctgggacgccttaattgtgacatggtgtgaagacccacgtgtgcttaattgtgagtcctccggcccctgaatgcggctaacctaaaccctggagccttgagacacaatccagtgttggcaaggtcgtaatgagtaattccgggacgggaccgactactttgggtgtccgtgtttccttttattttcaaattgttcttatggtcacaatataagtaatatattgtgatc

SEQ ID NO: 21445 - DNA, 513 bp, synthetic construct
  source 1..513: mol_type = other DNA
ttcgttacccggccaattacttcgagaaacctagtaacaccatggaagttgcgtagtgtttcgctccgcacgaccccggtgtagatcaggtcgatgagccaccgcgttccccacgggcgaccgtggcggtggctgcgctggcggcctgctcatggggcaacccatgggacgcttcaatactgacatggtgcgaagagtctattgagctaattggtagtcctccggcccctgaatgcggctaatcctaactgcggagcaggcaccctcaagccagagggcagtctgtcgtaacgggcaactctgcagcggaaccgactactttgggtgtccgtgtttccttttattcttgaactggctgcttatggtgacaattgaaagattgttaccatatagctattggattggccatccagtgacaaatagagcaattatatatctttttgttggttttattccattaaactataaagttttaaacacacttaaatttgtcttaatactcaactcaataaa

SEQ ID NO: 21446 - DNA, 631 bp, synthetic construct
  source 1..631: mol_type = other DNA
ttaaaacagcggatgggttctcccaccatccgacccactgggtgtagtactctggtattatgtacctttgtacgcctgtttattcccaaaccccctcccgttacatttccaacccctgtaacgttagaagtttggaacttaacagtacaataggaggcaccatatccaatggtgtaatgtacgagcacttctgtttccccggagcgaggtataggtggtacccaccgctgaaagcctttaaccgttatccgccaatcaactacgtaacagctagtagcattttgttgttgactggacgttcgatcaggtggtttacccccccactagtttggtcgatgaggctggaaattccccacgggtgaccgtgttccagcctgcgtggcggccaacccagctcatgctgggacgccctttcaatgacatggtgtgaagactcgcatgtgcttgattgtgaatcctccggcccctgaatgcggctaaccctaaccccggagccttgcatcacaatccagtgatgttagggtcgtaatgagtaattctgggatgggaccgactactttgggtgtccgtgtttctcatttttctttgaattgtcttatggtcacagcatatagtaatatatactgtgatc

SEQ ID NO: 21447 - DNA, 627 bp, synthetic construct
  source 1..627: mol_type = other DNA
ttaatacagcggatgggtatcccaccatccgacccactgggtgtagtactctggtattatgtacctttgtacgcctgttcttcccattgtacccttcccaaatttccaacccaagtaacgttagaagtttgacattaaagtacaataggaggcaccacatccagtggtgttttgtacaagcacttctgtttccccggagcgaggtataggctgtacccactgccaaaaacctttaaccgttacccgccagccaactacgtaaaagctagtaacatcttgtttgtaacttggcgttcgatcaggtggattccccctccactagtttggtcgatgaggctaggaactccccacgggtgaccgtgtcctagcctgcgtggcggccaacccagctcttgctgggacgcccttttatagacatggtgtgaagactcgcatgtgcttggttgtgattcctccggcccctgaatgcggctaaccctaaccctggagccttgtgttacaaaccagtaatattaaggtcgtaatgagcaattccgggacgggaccgactactttgggtgtccgtgtttctcatttttcttattattgtcttatggtcacagcatatttgttaaatatactgtgatc

SEQ ID NO: 21448 - DNA, 630 bp, synthetic construct; identical to SEQ ID NO: 65
  source 1..630: mol_type = other DNA

SEQ ID NO: 21449 - DNA, 624 bp, synthetic construct
  source 1..624: mol_type = other DNA
ttaaaacagcggatgggtatcccaccatccgacccactgggtgtagtactctggtattatgtacctttgtacgcctgtttctcccccccattacccctccccacatatcccagtaacttagaagaattaaattatcgcacaataggagctattacaaccagtaatagttagtgcaagtacttctgtttccccggagcggagtatagatggccaccgctgtcaaaagctcttaaccgttatccgccagttaactacgtaacggctagtaacatcttgttgtgcttaaggtgttcgatcaggtgaagagacacccccttcactagtctggtcgatgaggctgagaaatccccacgggcgaccgtgtctcagcctgcgtggcggccagcccagcttatgctgggacgccttaagtatgacatggtgtgaagacccgcatgtgcttaactgtgagtcctccggcccctgaatgcggctaaccttaaccctggagccttggggtacaatccagtgctaacaaggtcgtaacgagcaattccgggacgggaccgactactttgggtgtccgtgtttccttttatttcattattgttcttatggttacaatatatagagtatattgtaatc

SEQ ID NO: 21450 - DNA, 574 bp, synthetic construct
  source 1..574: mol_type = other DNA
ctggtattatgtacctttgtacgcctgtttctccctccctactaccccgcctcaagcatcctgtaacttagaagaattgaaaaaccgcacaacaggagctattacaaccagtaatagttagtgcaagcacttctgtttccccggagcggagtatagacggccaccgctgtcaaaagctcttaaccgttatccgccagttaactacgtaacggctagtaacatcttgttgtgcttagggtgttcgatcaggtgaagaaaaacccccttcactagtctggtcgatgaggctgagaagtccccacgggcgaccgtgtctcagcctgcgtggcggccagcccagcatatgctgggacgccttaagtatgacatggtgtgaagacccgcatgtgcttaactgtgagtcctccggcccctgaatgcggctaacctaaaccctggagccttggagcacaagccagtgcttacaaggtcgtaatgagcaattccgggacgggaccgactactttgggtgtccgtgtttccttttatctcattattgttcttatggttacaatatatagagtatattgtaatc

SEQ ID NO: 21451 - DNA, 624 bp, synthetic construct
  source 1..624: mol_type = other DNA
ttaaaacagcggatgggtatcccaccatccgacccactgggtgtagtactctggtattatgtacctttgtacgcctgtttctccctccctaccaccccgccccacgtatcccgtaacttagaagaattgaacaatcgcacaataggagctattacaaccagtaatagttggtgcaagcacttctgtttccccggagcggagtatagacggccaccgctgtcaaaagctcttaaccgttacccgccagttaactacgtaacggctagtaacatcttgtcgtgcttagggtgttcgatcaggtgaagaaaaacccccttcactagtctggtcgatgaggctgagaagtccccacgggtaaccgtgtctcagcctgcgtggcggccagcccagcatatgctgggacgccttaagtatgacatggtgtgaagacccgcatgtgcttagctgtgagtcctccggcccctgaatgcggctaacctaaaccctggagccttggagcacaagccagtgcttgcaaggtcgtaatgagcaattccgggacgggaccgactactttgggtgtccgtgtttccttttatctcattattgttcttatggttacaatatatagagtatattgtaatc

SEQ ID NO: 21452 - DNA, 579 bp, synthetic construct
  source 1..579: mol_type = other DNA
aaatcaatgctcaatagggggggcgcaaaccagcgctctcatgagcaagcactcctgtctccccggtgaggttgtataaactgttcccacggttgaaaacaacctatccgttatccgctatagtacttcgagaaacctagtaccacctttggattgttgacgcgttgcgctcagcacactaacccgtgtgtagcttgggtcgatgagtctggacacacctcactggcgacagtggtccaggctgcgttggcggcctactcatggtgaaagccatgagacgctagacatgaacaaggtgtgaagagtctattgagctactatagagtactccggcccctgaatgcggctaatcctaaccatggagcaagtgctcacaggccagtgagttgcttgtcgtaatgcgcaagtccgtggcggaaccgactactttgggtgtccgtgtttcactttttacttttatgactgcttatggtgacaatttgatattgttaccatttagcttgtcaaatcaattgcaaaagatcctaaatcttatttgtcaacttgcatcttgataactttaatttgaaaattttaaca

SEQ ID NO: 21453 - DNA, 582 bp, synthetic construct
  source 1..582: mol_type = other DNA
ttccctccccaaaagtaactttagaagcaaataaactcacagctcgatagccgtcgcaccgccagtgcgactatgagcaagcactcctgtttccccggttgcgtcctatatgctgtggaaacggcagaaggggacaatatcgttacccgcttatctactacgggaagcctagtaacaccattgagcactttgagggttgcgttcagcgccaaacccagcgtagctcaggccgatggggcttcggaatccccacgggtgaccgtgtcgaagcccgcgttggcggcctgcccacaccaatgggtgtgggacgctcaatttgtgacatggtgcgaagagcctactgtgctaggtgagagtcctccggcccctgaatgtggctaatcccaaccaccgaacccgtggttacaatccagtaactagcgggccgtaatgcgcaagtcggtgacggaaccaactactttgggtgaccgtgtttcctttatctcttatattgcaattttatggtgacatttatagtatttaagtgttaccatatattgcgcaaatacattgtaataacacagagttactactgcagaaatc

SEQ ID NO: 21454 - DNA, 529 bp, synthetic construct
  source 1..529: mol_type = other DNA
gctgaaggagaaaacgtccgttatccggccaattacttcgagaaacctagtaccgccatgaaagttgcgcagcgtttcgatccgcacaaccccagtgtagatcaggtcgatgagtcaccgcgttccccacgggtgaccgtggcggtggctgcgttggcggcctgcccatgggagaacccatgggacgcttcaatactgacatggtgtgaagagtctattgagctaattggtagccctccggcccctgaatgcggctaatcctaactgcggagcagattcccgcatgccagcgggtggtctgtcgtaacgggcaactctgcagcggaaccgactactttgggtgtccgtgtttccttttattcctatatcggctgcttatggtgacaattgagagattgttaccatatagctattggattggccatccggtgacaaacagagcaattatttaccaatttattggttttgtaccattgaattttaacgtattcaaaactcttaaccttattttggctcttaatacagcaaa

SEQ ID NO: 21455 - DNA, 698 bp, synthetic construct
  source 1..698: mol_type = other DNA
ttaaaacagccttggggttgttcccactccaagggcccacgtggcggctagtactctggtacttcggtacctttgtacgcctgttttatctcccttcccaatgtaatttagaagctcttaaatcaaggctcaataggtggggcgcaaaccagcgctctcatgagcaagcactcctgtctccccggtgtggttgtataaactgttcccacggttgaaaacaacctatccgttatccgctatagtacttcgagaaacctagtatcacctttggattgttgacgcgttgcgctcagcacactaacccgtgtgtagcttgggtcgatgagtctggacataccccactggcgacagtggtccaggctgcgttggcggcctactcatggtgaaaaccatgagacgctagacatgaacaaggtgtgaagagtctattgagctactatagagtcctccggcccctgaatgcggctaatcctaaccatggagcaagtgctcacaggccagtgagttgcttgtcgtaatgcgcaagtccgtggcggaaccgactactttgggtgtccgtgtttcactttttacttttatgactgcttatggtgacaatttgatattgttaccatttagcttgtcaaattaattgcaaaggatcctaaatcttacttaccaatttgcattttgacaatcttgatttgaaaattttgaca

SEQ ID NO: 21456 - DNA, 667 bp, synthetic construct
  source 1..667: mol_type = other DNA
ctgttttatatccccctcacccccacttgaaatttagaagcaagaacatactgaccagtagtcggcgtggcaatccagccatgccttggtcaagcacttctgtttccccggaccgagtatcaatagactgctagcgcggttgaaggagaaaacgttcgttacccgactaactacttcgagaaacctagtagcatcatgaaagttgcagagtgtttcgctcagcacaaccccagtgtagatcaggccgatgagtcaccgcactcctcacgggcgaccgtggcggtggctgcgctggcggcctgcctgtgggataacccacaggacgctctaatacagacatggtgtgaagagtctattgagctagttagtagtcctccggcccctgaatgcggctaatcctaactgcggagcacgtgcccttactccaaggggtagcgtgtcgtaacgggcaactctgcagcggaaccgactactttgggtgtccgtgtttccttttatctttatactggctgcttatggtgacaattgagagattgttaccatatagctattggattggccatccggtgactaatagagctattgtgtacctctttgttggatacgttccactgaaccacaaggaattgaagacccttgattacatcttgcttttgaattcagcaaa

SEQ ID NO: 21457 - DNA, 743 bp, synthetic construct
  source 1..743: mol_type = other DNA
ttaaaacagctctggggttgttcccacccacagggcccactgggcgctagcactctggtatcccggtacccttgtgcgcctgttttatctacccttccccaattgcaatttagaagttcaacactcacggtcaatagacggctcagtacgccaactgagttacgaccaagtacttctgttaccccggaccgagtatcaataggctgctcacgcggctgaaggagaaaacgttcgttatccggccaattacttcgagaaacctagtaccaccatgaaggttgcgcagcgtttcgctccgcacaaccccagtgtagatcaggccgatgagtcaccgcactccccacgggcgaccgtggcggtggctgcgctggcggcctgcccatggggtaacccatgggacgcttcaatactgacatggtgcgaagagtctattgagctaattggtagtcctccggcccctgaatgcggctaatcctaactgcggagcaggtacccacatgccagtgggcaatctgtcgtaatgggcaactctgcagcggaaccgactactttgggtgtccgtgtttccttttattcctatactggctgcttatggtgacaattgagagattgttaccatatagctattggattggccatccggtgacaaacagagcaattgtttacttatttgttggttttgtaccattaaattttaaggctctaagaacacttaattacatattattactcaactcattcaa

SEQ ID NO: 21458 - DNA, 743 bp, synthetic construct
  source 1..743: mol_type = other DNA
ttaaaacaggctgtgggttgtttccacccacagggcccactgggcgctagcactttggtatcccggtacccttgtgcgcctgttttatttacccttccccaattgcaatttagaagttcaacactcacggtcaatagacggctcagtacgccaactgagttacgaccaagtacttctgttaccccggaccgagtatcaataggctgctcacgcggctgaaggagaaaacgttcgttatccggccaattacttcgagaaacctagtaccaccatgaaggttgcgcagcgtttcgctccgcacaaccccagtgtagatcaggccgatgagtcaccgcactccccacgggcgaccgtggcggtggctgcgctggcggcctgcccatggggtaacccatgggacgcttcaatactgacatggtgcgaagagtctattgagctaattggtagtcctccggcccctgaatgcggctaatcctaactgtggagcaggtacccacatgccagtgggcaatctgtcgtaatgggcaactctgcagcggaaccgactactttgggtgtccgtgtttccttttattcctatactggctgcttatggtgacaattgagagattgttaccatatagctattggattggccatccggtgacaaacagagcaattgtttacttatttgttggttttgtaccattaaattttaaggctctaagaacacttaattacatattattactcaactcattcaa

SEQ ID NO: 21459 - DNA, 628 bp, synthetic construct; identical to SEQ ID NO: 754
  source 1..628: mol_type = other DNA

SEQ ID NO: 21460 - DNA, 579 bp, synthetic construct
  source 1..579: mol_type = other DNA
ggtcaagcacttctgtttccccggaccaagtatcaataggctgctcacgcggctgaaggagaaagtgttcgttatccggccaattacttcgagaaacctagtaccaccatggaagttgcgcagcgtttcgctccgcacgaccccggtgtagatcaggccgatgagtcaccgcactccccacgggtgaccgtggcggtggctgcgctggcggcctgctcatggggcaacccatgggacgcttcaatactgacatggtgtgaagagtctattgagctaattggtagtcctccggcccctgaatgcggctaatcccaaccgcggagcggattcccacactccagtgggcagtctgtcgtaacgggcaactctgcggcggaaccgactactttgggtgtccgtgtttcattttattccttattggctgcttatggtgacaattgaaagattgttgccatatagctattggattggccatccagtgacaaacagagcgattgtctatctatttgttggtttcataccattaaatttcaaagttttaaagactatcaacttgattatattgcttaatacagcaaa

SEQ ID NO: 21461 - DNA, 646 bp, synthetic construct
  source 1..646: mol_type = other DNA
cccgaaagaaacttagaagctcaacttgtgtggtcaatagtaagatcagtacgccaactgagccacgaccaacgtacttctgttaccccggactgagtatcaataagctgctcacgtggctgaaggagaaaacgtccgttacccggccaattacttcgagaaacccagtaccaccatgaaagttgcgcggcgtttcgctccgcacaaccccagtgtagatcgggccgatgagtcaccgcgttccccacgggcgaccgtggcggtggctgcgttggcggcctgcccatggagcaatccatgggacgcttcaatactgacatggtgcgaagagtctattgagctaattggtagtcctccggcccctgaatgcggctaatcctaactgcggagcagatactcacatgccagtgggcagtctgtcgtaacgggcaacttcgcagcggaaccgactactttgggtgtccgtgtttccttttatttcatactggctgcttatggtgacaattgagagattgttaccatatagctattggattggccatccagtgtccaacagagcgatcatttacttgtttgttggattcgtacccttgaactacaaagcactcgtaacgctcaaacacattatagacctccacacagcaaa

SEQ ID NO: 21462 - DNA, 563 bp, synthetic construct
  source 1..563: mol_type = other DNA
ccccggaccaagtatcaataaactgctagcgcggttgaaggagaaaacgtccgttacccggccaattacttcgagaaacctagtaccaccatggatgttgcgcagtgtttcgctccgcacaaccccagtgtagatcaggccgatgagccaccgcattccccacgggcgaccgtggcggtggctgcgctggcggcctgcccatggggcaacccatgggacgcttcaatactgacatggtgcgaagagtctattgagctaattggtagtcctccggcccctgaatgcggctaatcctaactgcggagcagatgcccacatgccagtgggcggtctgtcgtaacgggcaactctgcagcggaaccgactactttgggtgtccgtgtttcctttttaaccttgtattggctgcatatggtgacaattgaaagattgttaccatatagctattggattggccacccggtgacgaacagagcaatcatttatttgttcgttggttttattccattgaatctcaaagtttggaacactctaaattttattatctcactcaacacaacaaa

SEQ ID NO: 21463 - DNA, 563 bp, synthetic construct
  source 1..563: mol_type = other DNA
ccccggactgagtatcaataagctgctcgcgcggctgaaggagaaaacgttcgttacccggccaattacttcgagaaacccagtaccaccatggaagttgcgtagtgtttcgttccacacaaccccagtgtagatcaggtcgatgagccaccgcatcccccacgggcgaccgtggcggtggctgcgttggcggcctgcccatggggtaacccatgggacgcttcaatactgacatggtgtgaagagtctattgagctaattggtagtcctccggcccctgaatgcggctaatcctaactgcggagcagatacccacacaccagtgggcagtctgtcgtaacgggcaactctgcagcggaaccgactactttgggtgtccgtgtttctttttattccatacattggctgcttatggtgacaattgagagattgttgccatatagctattggattggccatccggtgacaaacagagcaatcatttatttgttcgttggttttattccactgaatttcaaagtttggaacactctaaattttattatttcactcaacacaacaaa

SEQ ID NO: 21464 - DNA, 563 bp, synthetic construct
  source 1..563: mol_type = other DNA
ccccggaccaagtatcaataaactgctagcgcggttgaaggagaaaacgtccgttacccggccaattacttcgagaaacctagtatcaccatggatgttgcgcagtgtttcgctccgcacaaccccagtgtagatcaggccgatgagccaccgcattccccacgggcgaccgtggcggtggctgcgctggcggcctgcccatggggcaacccatgggacgcttcaatattgacatggtgcgaagagtctattgagctaattggtagtcctccggcccctgaatgcggctaatcctaactgcggagcagatgctcacatgccagtgggcggtctgtcgtaacgggcaactctgcagcggaaccgactactttgggtgtccgtgtttcctttttaaccttgtattggctgcatatggtgacaattgaaagattgttaccatatagctattggattggccatccggtgacgaacagagcaatcatttatttgttcgttggttttgttccgttgaatctcaaagtttggaacactctaaatttcattatctcactcaacacaacaaa

SEQ ID NO: 21465 - DNA, 563 bp, synthetic construct
  source 1..563: mol_type = other DNA
ccccggaccaagtatcaataaactgctagcgcggttgaaggagaaaacgtccgttacccggccaattacttcgagaaacctagtaccaccatggatgttgcgcagtgtttcgctccgcacaaccccagtgtagatcaggccgatgagccaccgcattccccacgggcgaccgtggcggtggctgcgctggcggcctgcccatggggcaacccatgggacgcttcaatactgacatggtgcgaagagtctattgagctaattggtagtcctccggcccctgaatgcggctaatcctaactgcggagcagatgctcacacgccagtgggtggtctgtcgtaacgggcaactctgcagcggaaccgactactttgggtgtccgtgtttcctttttaaccttgtattggctgcatatggtgacaattgaaagattgttaccatatagctattggattggccatccggtgacgaacagagcaatcatttattcgttcgttggttttattccattgaatctcaaagtttggaacactctaaattttattatctcactcaacacaacaaa

SEQ ID NO: 21466 - DNA, 624 bp, synthetic construct
  source 1..624: mol_type = other DNA
ttaaaacagcggatgggtatcccaccattcgacccattgggtgtagtactctggtactatgtacctttgtacgcctgtttctccccaaccacccttccttaaaattcccacccatgaaacgttagaagcttgacattaaagtacaataggtggcgccatatccaatggtgtctatgtacaagcacttctgtttccccggagcgaggtataggctgtacccactgccaaaagcctttaaccgttatccgccaaccaactacgtaacagttagtaccatcttgttcttgactggacgttcgatcaggtggattttccctccactagtttggtcgatgaggctaggaattccccacgggtgaccgtgtcctagcctcgtggcggccaacagcttatgctgggacgcccttttaaggacatggtgtgaagactcgcatgtgcttggttgtgagtctccggcccctgaatgcggctaaccttaaccctggagccttatgccacgatccagtggttgtaaggtcgtaatgagcaattccgggacgggaccgactactttgggtgtccgtgtttctcatttttcttcatattgtcttatggtcacagcatatatatacatatactgtgatc

SEQ ID NO: 21467 - DNA, 625 bp, synthetic construct; identical to SEQ ID NO: 742
  source 1..625: mol_type = other DNA

SEQ ID NO: 21468 - DNA, 626 bp, synthetic construct
  source 1..626: mol_type = other DNA
ttaaaacagcggatgggtatcccaccatccgacccactgggtgtagtactctggtactttgtacctttgtacgcctgttcttcccattgtacccttcctaaacttccaacccaagtaacgttagaagctcaactttcagtacaataggaagcaccacatccagtggtgtttagtacaagcacttctgtttccccggagcgaggtataggctgtacccactgccaaaagcctttaaccgttatccgccaaccaactacgtaaaagctagtaacatcatgtttgtaaatgggtgttcgatcaggtggatttcccctccactagtttggtcgatgaggctaggaattccccacgggtgaccgtgtcctagcctgcgtggcggccaacccagcgtatgctgggacgcctttttatagacatggtgcgaagactcgcatgtgcttggttgtgagtcctccggcccctgaatgcggctaaccctaaccctggagccttgagtcacaatccagtgatggcaaggtcgtaatgagcaattccgggatgggaccgactactttgggtgtccgtgtttctcatttttcttattattgtcttatggtcacagcatatatagtatatatactgtgatc

SEQ ID NO: 21469 - DNA, 588 bp, synthetic construct
  source 1..588: mol_type = other DNA
tgggtcacgaccaagcacttctgtaaccccggaccgagtatcaataggctgctcgcgcggctgaaggagaaaacgttcgtcatccggccaattacttcgagaaacctattaccaccatgaaagttgcgcggcgtttcgctccgcacaaccccagtgtagatcaggtcgatgagccaccgcgttccccacgggtgaccgtggcggtggctgcgttggcggcctgcccatggggcaacccatgggacgcttcaatactgacatggtgcgaagagtctattgagctaattggtagtcctccggcccctgaatgcggctaatcctaactgcggagcagatacccacatgccagtgggctgtctgtcgtaacgggtaactctgcagcggaaccgactactttgggtgtccgtgtttccttttattcttatactggctgcttatggtgacaattgagagattgttaccatatagctattggattggccatccggtatctaacagagcagtcatttatctgtttgttgggttcgtacccttgaattttaaagtcctcaacactcttaatcttgtgctacaactaaactcggtaaa

SEQ ID NO: 21470 - DNA, 732 bp, synthetic construct
  source 1..732: mol_type = other DNA
gggttgttcccaccccagaggcccacgtggcggctagtacactggtattacggtacccttgtacgcctgttttataccccctttccccgtaacttagaagttttaaatcaaagttcaacagtcagtggtacaacccagtactactacgaacaagcacttctgttaccccggtgagattgcataggctgttcccacggctaaaagcgattgatccgttacccgctcttgtacttcgagaagcctagtaagaccttgggatcctcgatgcgttgcgttcaacactcaaccccggagtgtagcttgggctgatgagtctggacattccccaccggtgacggtggtccaggctgcgttggcggcctacctgtggcccaaagccacaggacgctagttgtgaacaaggtgtgaagagcctattgagctacaagagagtcctccggcccctgaatgcggctaatcccaaccacggagcaggcgattgcaacccagcaactagcctgtcgtaatgcgcaagcctgtggcggaaccgactactttgggtgtccgtgtttccttttattacataatggctgcttatggtgacaatcacagattgttgtcataaagcgaattggattggccatccggtgagaattaaaacaatcatttatttgtttgttggatttgttcctatacacactcaaacaccttgcttgattgaagtaattctgttgataagacaatattattaca

SEQ ID NO: 21471 - DNA, 721 bp, synthetic construct
  source 1..721: mol_type = other DNA
cccacccacggggcctactgggcgccagcacactggtatcacggtacctttgtgcgcctgttttataacccctcccccgatcgtaacgtagaagctgaacctaagcggtcaataggcggctcagaacaccatctgggtcttgaccaagcacttctgttaccccggactgagtatcaataagctgctcacgcggctgaaggagaaaacgtccgttacccggccaattacttcaagaaacccagtaccaccatgaaggttgcgcagcgtttcgctccgcacaaccccagtgtagatcaggtcgatgagtcaccgcattcctcacgggcgaccgtggcggtggctgcgctggcggcctgcccatggggcaacccatgggacgcttcaatactgacatggtgcgaagagtcaattgagctaattggtagtcctccggcccctgaatgcggctaatcctaactgtggagcagatgcccacgtaccagtgggtagtctgtcgtaacgggcaactccgcagcggaaccgactactttgggtgtccgtgtttctctttattcttatgttggctgcttatggtgacaattgagagattgttaccatatagctattggattggccatccggtgacgaatagagcgattgtatatctttttgttggattcgtaccattaaacaaaacaaattacaaaaccttgtgttacattattagattaaacacagcaaa

SEQ ID NO: 21472 - DNA, 677 bp, synthetic construct
  source 1..677: mol_type = other DNA
tcccaccccaagggcccacgtggcggctagtactctggtatttcggtacctttgtacgcctgttttatctcccttcccaatgtaacttagaagctctcaaatcaaagctcgataggtggagcgcaaaccagcgctctcatgagcaagcactcctgtctccccggtgtggttgtataaactgttcccacggttgaaagcaacctatccgttatccgctatagtacttcgagaaacctagtatcacctttggattgttgatgcgttgcgctcagcacactaacccgtgtgtagcttgggtcgatgagtctggacataccccactggcgacagtggtccaggctgcgttggcggcctactcatggtgaaaaccatgagacgctaaacatgaacaaggtgtgaagagtctattgagctactatagagtcctccggcccctgaatgcggctaatcttaaccatggagcaagtgctcacaagccagtgagttgcttgtcgtaatgcgcaagtccgtggcggaaccgactactttgggtgtccgtgtttcactttttacttttatgactgcttatggtgacaattcaatattgttaccatttagcttgtcaaatcaattgcaaaagaccctaaaccttatttatcaacttgcattctgataacttcaatttgcaaattttaata

SEQ ID NO: 21473 - DNA, 576 bp, synthetic construct
  source 1..576: mol_type = other DNA
ctggtattttgtacctttgcacgcctgttttcccattgtacccatccttaaattcctccccaagtaacgttagaagtttaaggaaaccaatgtacaataggaagcatcacatccagtggtgtaatgtacaagcacttctgtttccccggagcgaggtataagtggtacccaccgctgaaagcctttaaccgttatccgccaatcaactacgtaatggctagtattatcatgtttgtaatctggcgttcgatcaggtggttccccccactagtttggtcgatgaggctgggaattccccacgggcgaccgtgtcctagcctgcgtggcggccaacccagctcttgctgggacgcctttttatagacatggtgtgaagacctgcatgtgcttgattgtgagtcctccggcccctgaatgcggctaaccttaaccccggagccttgcagcataatccaatgttgttgaggtcgtaatgagcaattctgggacgggaccgactactttgggtgtccgtgtttccttttattctttatattgtcttatggtcacagcatatatagtatatatactgtgatc

SEQ ID NO: 21474 - DNA, 654 bp, synthetic construct
  source 1..654: mol_type = other DNA
cggctagtactctggtacttcggtacctttgtacgcctgttttatctcccttcccaatgtaatttagaagcttttacatcaaggctcaataggtggggcgcaaaccagcgctctcatgagcaagcactcctgtctccccggtgtggttgtataaactgttcccacggttgaaaacaacctatccgttatccgctatagtacttcgagaaacctagtatcacctttggattgttgacgcgttgcgctcagcacactaacccgtgtgtagcttgggtcgatgagtctggacataccccactggcgacagtggtccaggctgcgttggcggcctactcatggtgaaaaccatgagacgctagacatgaacaaggtgtgaagagtctattgagctactatagagtcctccggcccctgaatgcggctaatcctaaccatggagcaagtgctcacaggccagtgagttgcttgtcgtaatgcgcaagtccgtggcggaaccgactactttgggtgtccgtgtttcactttttacttttatgactgcttatggtgacaatttgatattgttaccatttagcttgtcaaattaattgcaaaagatcctaaatcttacttaccaacttgcattttgacaaccttggtttgaaaattttaata

SEQ ID NO: 21475 - DNA, 644 bp, synthetic construct
  source 1..644: mol_type = other DNA
gtacctttgtacgcctgttttatatccctccccaatgtaatttagaagctttcaaatcaaagctcaataggtggagcgcaagccagcgcttccgtgagcaagcacttctgtttccccggtgcggttgtatagactgttcccacggttgaaaacgacctatccgttatccgctatagtacttcgagaaacctagtatcacctttggattgttgatgcgttgcgctcaacacactaacccgtgtgtagcttgggtcgatgagtctggacataccccactggtgacagtggtccaggctgcgttggcggcctactcatggtgaaaaccatgagacgctagacatgaacaaggtgtgaagagtctattgagctactatagagtcctccggcccctgaatgcggctaatcttaaccatggagcaagtgctcacaaaccagtgagttgcttgtcgtaatgcgcaagtccgtggcggaaccgactactttgggtgtccgtgtttcactttttacttttatgactgcttatggtgacaatttaatattgttaccattcagctagtcgaaataatcacataaaactttaaatcctatctaataattcacatttggatagtttcatttcgaggactttaaacctacttacaaag

SEQ ID NO: 21476 - DNA, 505 bp, synthetic construct
  source 1..505: mol_type = other DNA
caagcacttctgtttccccggttgcgtcctatatgctgtggaaacggcagaaggggacaatatcgttacccgcttatctactacgggaagcctagtaacaccattgaacactttgggagttgcgttcagcgcttaacccagcgtagctcaggctgatggggcttcggaacccccacgggcgaccgtgtcgaagcccgcgttggcggcctgcccgcaccgacaggtgtgggacgctcaatttgtgacatggtgcgaagagcctactgtgctaggtaagagtcctccggcccctgaatgtggctaatcctaaccactgaacccgtggttgcaagccagcaactagcgggccgtaatgcgcaagtcggtggcggaaccaactactttgggtgtccgtgtttcctttatttctaacattgcaagtttatggtgacatttatagtatttaagtgttaccatatactgcacaaatatattgtaataatacagaattgacactgcagagatc

SEQ ID NO: 21477 - DNA, 561 bp, synthetic construct
  source 1..561: mol_type = other DNA
tggggcgcaaaccagcgctctcatgagcaagcactcctgtctccccggtgtggttgtataaactgttcccacggttgaaaacaacctatccgttatccgctatagtacttcgagaaacctagtatcacctttggattgttgacgcgttgcgctcagcacactaacccgtgtgtagcttgggtcgatgagtctggacataccccactggcgacagtggtccaggctgcgttggcggcctactcatggtgaaaaccatgagacgctagacatgaacaaggtgtgaagagtctattgagctactatagagtcctccggcccctgaatgcggctaatcctaaccatggagcaagtgctcacaggccagtgagttgcttgtcgtaatgcgcaagtccgtggcggaaccgactactttgggtgtccgtgtttcactttttacttttatgactgcttatggtgacaatttgatattgttaccatttagcttgtcaaattaattgcaaaagatcctaaatcttacttaccaacttgcattttgataaccttgatttgaaaattttaata

SEQ ID NO: 21478 - DNA, 654 bp, synthetic construct
  source 1..654: mol_type = other DNA
cccccgcccccacttgaaacttagaagcaaaaacataccgaccaatagttggcaaggcaagccagccatgccttggtcaagcacttctgtatccccggaccgagtatcaataagctgctagcgcggctgaaggagaaaacgttcgttacccgactaactacttcgagaaacctagtagcatcatgaaagttgcagagtgtttcgctcagcacaaccccagtgtagatcaggccgatgagtcaccgcattcctcacgggcgaccgtggcggtggctgcgctggcggcctgcctgtggggcaacccacaggacgctctaatacagacatggtgcgaagagtctattgagctagttagtagtcctccggcccctgaatgcggctaatcctaactgcggagcacgtgcctctactccaagaggtagcgtgtcgtaacgggcaactctgcagcggaaccgactactttgggtgtccgtgtttccttttatctttatattggctgcttatggtgacaattgagagattgttaccatatagctattggattggccatccggtgactaatagagctattgtgtacctctttattggatacgttccactgaaccacaaggaattaaggaccctcgattacattctgcttttgaattcagcaaa

SEQ ID NO: 21479 - DNA, 655 bp, synthetic construct
  source 1..655: mol_type = other DNA
agccccttccccgaatgtaacgtagaagctgaacccaagcggtcaacaggcggctcagaacaccatctgggtcttgaccaagcacttctgttcccccggactgagtatcaataagctgctcacgcggctgaaggagaaaatgttcgttatccggccaattacttcgagaaacctagtaccaccatgaaggttgcgcagtgtttcgctccgcacaatcccagtgtagatcaggtcgatgagtcaccgcattcctcacgggcgaccgtggcggtggctgcgctggcggcctgcccatggggcaacccatgggacgcttcaatactgacatggtgcgaagagttaattgagctaattggtagtcctccggcccctgaatgcggctaatcctaactgcggagcagatgcccaagctccagtgggtagtctgtcgtaacgggtaactctgcagcggaaccgactactttgggtgtccgtgtttccttttattcttacattggctgcttatggtgacaattgagagattgttaccatatagctattggattggccatccggtgacgaatagagcaattgtgtatctttttgttggattcataccactagacaatacaaacttcaaaaccttgtgttacatcattagattaaacacagcaag

SEQ ID NO: 21480 - DNA, 641 bp, synthetic construct
  source 1..641: mol_type = other DNA
cctttgtacgcctgttttatatccctccccaatgtaatttagaagctttcaaatcaaagctcaataggtggagcgcaagccagcgcttccgtgagcaagcacttctgtttccccggtgcggttgtatagactgttcccacggttgaaaacgacctatccgttatccgctatagtacttcgagaaacctagtatcacctttggattgttgatgcgttgcgctcaacacactaacccgtgtgtagcttgggtcgatgagtctggacataccccactggtgacagtggtccaggctgcgttggcggcctactcatggtgaaaaccatgagacgctagacatgaacaaggtgtgaagagtctattgagctactatagagtcctccggcccctgaatgcggctaatcttaaccatggagcaagtgctcacaaaccagtgagttgcttgtcgtaatgcgcaagtccgtggcggaaccgactactttgggtgtccgtgtttcactttttacttttatgactgcttatggtgacaatttaatattgttaccattcagctagtcgaaataatcacataaaactttaaatcctatctaataattcacatttggatagtttcatttcgaggactttaaacctacttacaaag

SEQ ID NO: 21481 - DNA, 641 bp, synthetic construct
  source 1..641: mol_type = other DNA
cctttgtacgcctgttttatctccctccccaatgtaacttagaagctttcaaatcaaagctcaataggtggagcgcaagccagcgcttccgtgagcaagtacttctgtttccccggtgcggttgtatagactgttcccacggttaaaaacaacctatccgttatccgctatagtacttcgagaaacctagtatcacctttggattgttgatgcgttgcgctcaacacactaacccgtgtgtagcttgggtcgatgagtctggacataccccactggtgacagtggtccaggctgcgttggcggcctactcatggtgaaaaccatgagacgctagacatgaacaaggtgtgaagagtctattgagctactatagagtcctccggcccctgaatgcggctaatcttaaccatggagcaagtgctcacaaaccagtgagttacttgtcgtaatgcgcaagtccgtggcggaaccgactactttgggtgtccgtgtttcactttttacttttatgactgcttatggtgacaatttaatattgttaccattcagctagtcgaaataatcgcataaaactttaaatcctatctaacagttcacatttggatagttttattttaaggactttaaacctacctagaaag

SEQ ID NO: 21482 - DNA, 641 bp, synthetic construct
  source 1..641: mol_type = other DNA
cctttgtacgcctgttttatctccctccccaatgtaacttagaagctttcaaatcaaagctcaataggtggagcgcaaaccagcgcttccgtgagcaagtacttctgtttccccggtgcggttgtatagactgttcccacggtcgaaaacaacctatccgttatccgctatagtacttcgagaaacctagtatcacctttggattgttgatgcgttgcgctcaacacactaacccgtgtgtagcttgggtcgatgagtctggacataccccactggtgacagtggtccaggctgcgttggcggcctactcatggtgaaaaccatgagacgctagacatgaacaaggtgtgaagagtctattgagctactatagagtcctccggcccctgaatgcggctaatcttaaccatggagcaagtgctcacaaaccagtgagttgcttgtcgtaatgcgcaagtccgtggcggaaccgactactttgggtgtccgtgtttcactttttacttttatgactgcttatggtgacaatttaatattgttaccattcagctagtcgaaataatcgcataaaactttaaatcctatctaacagttcacatttggatagttttattttaaggactttaaacctacctagaaag

SEQ ID NO: 21483 - DNA, 641 bp, synthetic construct
  source 1..641: mol_type = other DNA
cctttgtacgcctgttttatctccctccccaatgtaacttagaagctttcaaatcaaagctcaataggtggagcgcaagccagcgctcccgtgagcaagtacttctgtttccccggtgcggttgtatagactgtccccacggttgaaaacaacctatccgttatccgctatagtacttcgagaaacctagtatcacctttggattgttgatgcgttgcgctcaacacactaacccgtgtgtagcttgggtcgatgagtctggacataccccactggtgacagtggtccaggctgcgttggcggcctactcatggtgaaaaccatgagacgctagacatgaacaaggtgtgaagagtctattgagctactatagagtcctccggcccctgaatgcggctaatcttaaccatggagcaagtgctcacaaaccagtgagttgcttgtcgtaatgcgcaagtccgtggcggaaccgactactttgggtgtccgtgtttcactttttacttttatgactgcttatggtgacaatttaatattgttaccattcagctagtcgaaataatcgcataaaactttaaatcctatctaacagttcacatttggatagttttattttaaggactttaaacctacctagaaag

SEQ ID NO: 21484 - DNA, 641 bp, synthetic construct
  source 1..641: mol_type = other DNA
cctttgtacgcctgttttatctccctccccaatgtaacttagaagctttcaaatcaaagctcaataggtggagcgcaagccagcgcttccgtgagcaagtacttctgtttccccggtgcggttgtatagactgttcccacggttaaaaacaacctatccgttatccgctatagtacttcgagaaacctagtatcacctttggattgtcgatgcgttgcgctcaacacactaacccgtgtgtagcttgggtcgatgagtctggacataccccactggtgacagtggtccaggctgcgttggcggcctactcatggtgaaaaccatgagacgctagacatgaacaaggtgtgaagagtctattgagctactatagagtcctccggcccctgaatgcggctaatcttaaccatggagcaagtgctcacaaaccagtgagttgcttgtcgtaatgcgcaagtccgtggcggaaccgactactttgggtgtccgtgtttcactttttacttttatgactgcttatggtgacaatttaatattgttaccattcagctagtcgaaacaatcgcacaaaactttaaatcctatctaacagttcacatttggatagttttattttaaggactttaaacctacctagaaag

SEQ ID NO: 21485 - DNA, 641 bp, synthetic construct
  source 1..641: mol_type = other DNA
cctttgtacgcctgttttatatccctccccaatgtaatttagaagctttcaaatcaaagctcaataggtggagcgcaagccagcgcttccgtgagcaagcacttctgtttccccggtgcggttgtatagactgttcccacggttgaaaacgacctatccgttatccgctatagtacttcgagaaacctagtatcacctttggattgttgatgcgttgcgctcaacacactaacccgtgtgtagcttgggtcgatgagtctggacgtaccccactggtgacagtggtccaggctgcgttggcggcctactcatggtgaaaaccatgagacgctagacatgaacaaggtgtgaagagtctattgagctactatagagtcctccggcccctgaatgcggctaatcttaaccatggagcaagtgctcacaaaccagtgagttgcttgtcgtaatgcgcaagtccgtggcggaaccgactactttgggtgtccgtgtttcactttttacttttatgactgcttatggtgacaatttaatattgttaccattcagctagtcgaaataatcacataaaactttaaatcctatctaataattcacatctggatagtttcatttcgaggactttaaacctacttacaaag

SEQ ID NO: 21486 - DNA, 641 bp, synthetic construct
  source 1..641: mol_type = other DNA
cctttgtacgcctgttttatctccctccccaatgtaacttagaagctttcaaatcaaagctcaataggtggagcgcaagccagcgcttccgtgagcaagtacttctgtttccccggtgcggttgtatagactgttcccacggttaaaaacaacctatccgttatccgctatagtacttcgagaaacctagtatcacctttggattgtcgatgcgttgcgctcaacacactaacccgtgtgtagcttgggtcgatgagtctggacataccccactggtaacagtggtccaggctgcgttggcggcctactcatggtgaaaaccatgagacgctagacatgaacaaggtgtgaagagtctattgagctactatagagtcctccggcccctgaatgcggctaatcttaaccatggagcaagtgctcacaaaccagtgagttgcttgtcgtaatgcgcaagtccgtggcggaaccgactactttgggtgtccgtgtttcactttttacttttatgactgcttatggtgacaatttaatattgttaccattcagctagtcgaaataatcgtataaaactttaaatcctatctaacagttcacatttggatagttttattttaaggactttaaacctacctagaaag

SEQ ID NO: 21487 - DNA, 641 bp, synthetic construct
  source 1..641: mol_type = other DNA
cctttgtacgcctgttttatatccctccccaatgtaatttagaagctttcaaatcaaagctcaataggtggagtgcaaaccagcgcttccgtgagcaagcacttctgtttccccggtgcggttgtatagactgttcccacggttgaaaacgacctatccgttatccgctatagtacttcgagaaacctagtatcacctttggattgttgatgcgttgcgctcaacacactaacccgtgtgtagcttgggtcgatgagtctggacgtaccccactggtgacagtggtccaggctgcgttggcggcctactcatggtgaaaaccatgagacgctagacatgaacaaggtgtgaagagtctattgagctactatagagtcctccggcccctgaatgcggctaatcttaaccatggagcaagtgctcacaaaccagtgagttgcttgtcgtaatgcgcaagtccgtggcggaaccgactactttgggtgtccgtgtttcactttttacttttatgactgcttatggtgacaatttaatattgttaccattcagctagtcgaaataatcacataaaactttaaatcctatctaataattcacatttggatagtttcatttcgaggactttaaacctacttacaaag

SEQ ID NO: 21488 - DNA, 641 bp, synthetic construct
  source 1..641: mol_type = other DNA
cctttgtacgcctgttttatatccctccccaatgtaatttagaagctttcaaatcaaagctcgataggtggagcgcaagccagcgcttccgtgagcaagcacttctgtttccccggtgcggttgtatagactgttcccacggttgaaaacgacctatccgttatccgctatagtacttcgagaaacctagtatcacctttggattgttgatgcgttgcgctcaacacactaacccgtgtgtagcttgggtcgatgagtctggacgtaccccactggtgacagtggtccaggctgcgttggcggcctactcatggtgaaaaccatgagacgctagacatgaacaaggtgtgaagagtctattgagctactatagagtcctccggcccctgaatgcggctaatcttaaccatggagcaagtgctcacaaaccagtgagttgcttgtcgtaatgcgcaagtccgtggcggaaccgactactttgggtgtccgtgtttcactttttacttttatgactgcttatggtgacaatttaatattgttaccattcagctagtcgaaataatcacataaaactttaaatcctatctaataattcacatttggatagtttcatttcgaggactttaaacctacttacaaag

SEQ ID NO: 21489 - DNA, 641 bp, synthetic construct
  source 1..641: mol_type = other DNA
cctttgtacgcctgttttatctccctccccaatgtaacttagaagctttcaaatcaaagctcaataggtggagcgcaagccagcgcttccgtgagcaagtacttctgtttccccggtgcggttgtatagactgttcccacggttaaaaacaacctatccgttatccgctatagtacttcgagaaacctagtatcacctttggattgttgatgcgttgcgctcaacacactaacccgtgtgtagcttgggtcgatgagtctggacataccccactggtgacagtggtccaggctgcgttggcggcctactcatggtgaaaaccatgagacgctagacatgaacaaggtgtgaagagtctattgagctactatagagtcctccggcccctgaatgcggctaatcttaaccatggagcaagtgctcacaaaccagtgagttgcttgtcgtaatgcgcaagtccgtggcggaaccgactactttgggtgcccgtgtttcactttttacttttatgactgcttatggtgacaatttaatattgttaccattcagctagtcgaaataatcgcataaaactttaaatcctatctaacagttcacatttggatagttttattttaaggactttaaacctacctagaaag

SEQ ID NO: 21490 - DNA, 641 bp, synthetic construct
  source 1..641: mol_type = other DNA
cctttgtacgcctgttttatatccctccccaatgtaatttagaagctttcaaatcaaagctcaataggtggagcgcaagccagcgcttccgtgagcaagcacttctgtttccccggtgcggttgtatagactgttcccacggttgaaaacgacctatccgttatccgctatagtacttcgagaaacctagtatcacctttggattgttgatgcgttgcgctcaacacactaacccgtgtgtagcttgggtcgatgagtctggacgtaccccactggtgacagtggtccaggctgcgttggcggcctactcatggtgaaaaccatgagacgctagacatgaacaaggtgtgaagagtctattgagctactatagagtcctccggcccctgaatgcggctaatcttaaccatggagcaagtgctcacaaaccagtgagttgcttgtcgtaatgcgcaagtccgtggcggaaccgactactttgggtgtccgtgtttcactttttacttttatgactgcttatggtgacaatttaatattgttaccattcagctagtcgaaataatcacataaaactttaaatcctatctaataattcacatttggatagtttcatttcgaggactttaaacctacttacaaag

SEQ ID NO: 21491 - DNA, 641 bp, synthetic construct
  source 1..641: mol_type = other DNA
cctttgtacgcctgttttatctccctccccaatgtaacttagaagctctcaaatcaaagctcaataggtggagcgcaagccagcgcttccgtgagcaagtacttctgtttccccggtgcggttgtatagactgttcccacggttgaaaacaacctatccgttacccgctatagtacttcgagaaacctagtatcacctttggattgttgatgcgttgcgctcaacacactaacccgtgtgtagcttgggtcgatgagtctggacgtaccccactggtgacagtggtccaggctgcgttggcggcctactcatggtgaaaaccatgagacgctagacatgaacaaggtgtgaagagtctattgagctactatagagtcctccggcccctgaatgcggctaatcttaaccatggagcaagtgctcacaaaccagtgagttgcttgtcgtaatgcgcaagtccgtggcggaaccgactactttgggtgtccgtgtttcactttttacttttatgactgcttatggtgacaatttaacattgttaccattcagctagtcgaaataatcgcacaaaactttgaatcctatctaacagttcacatttggacagtttcactttgaggacttcaaacctacttacaaag

SEQ ID NO: 21492 - DNA, 641 bp, synthetic construct
  source 1..641: mol_type = other DNA
cctttgtacgcctgttttatatccctccccaatgtaatttagaagctttcaaatcaaagctcaataggtggagcgcaagccagcgcttccgtgagcaagcacttctgtttccccggtgcggttgtataaactgttcccacggttgaaaacgacctatccgttatccgctatagtacttcgagaaacctagtatcgcctttggattgttgatgcgttgcgctcaacacactaacccgtgtgtagcttgggtcgatgagtctggacgtaccccactggtgacagtggtccaggctgcgttggcggcctactcatggtgaaaaccatgagacgctagacatgaacaaggtgtgaagagtctattgagctactatagagtcctccggcccctgaatgcggctaatcttaaccatggagcaagtgctcacaaaccagtgagttgcttgtcgtaatgcgcaagtccgtggcggaaccgactactttgggtgtccgtgtttcactttttacttttatgactgcttatggtgacaatttaatattgttaccattcagctagtcgaaataatcacataaaactttaaatcctatctaataattcacatttggatagtttcatttcgagaactttgaacctacttacaaag

SEQ ID NO: 21493 - DNA, 641 bp, synthetic construct
  source 1..641: mol_type = other DNA
cctttgtacgcctgttttatctccctccccaatgcaacttagaagctttcaaatcaaagctcaataggtggagcgcaagccagcgcttccgtgagcaagtacttctgtttccccggtgcggttgtatagactgttcccacggttaaaaacaacctatccgttatccgctatagtacttcgagaaacctagtatcacctttggattgttgatgcgttgcgctcaacacactaacccgtgtgtagcttgggtcgatgagtctggacataccccactggtgacagtggtccaggctgcgttggcggcctactcatggtgaaaaccatgagacgctagacatgaacaaggtgtgaagagtctattgagctactatagagtcctccggcccctgaatgcggctaatcttaaccatggagcaagtgctcacaaaccagtgagttgcttgtcgtaatgcgcaagtccgtggcggaaccgactactttgggtgtccgtgtttcactttttacttttatgactgcttatggtgacaatttaatattgttaccattcagctagtcgaaataatcgcataaaactttaaatcctatctaacagttcacatttggatagttttattttaaggactttaaacctacctagaaag

SEQ ID NO: 21494 - DNA, 641 bp, synthetic construct
  source 1..641: mol_type = other DNA
cctttgtacgcctgttttatctccctccccaatgtaacttagaagctttcaaatcaaagctcaataggtggagcgcaagccagcgcttccgtgagcaagtacttctgtttccccggtgcggttgtatagactgttcccacggttaaaaacaacctatccgttatccgctatagtacttcgagaaacctagtatcacctttggattgttgatgcgttgcgctcaacacactaacccgtgtgtagcttgggtcgatgagtctggacataccccactggtgacagtggtccaggctgcgttggcggcctactcatggtgaaaaccatgagacgctagacatgaacaaggtgtgaagagtctattgagctactatagagtcctccggcccctgaatgcggctaatcttaaccatggagcaagtgctcacaaaccagtgagttgcttgtcgtaatgcgcaagtccgtggcggaaccgactactttgggtgtccgtgtttcactttttacttttatgactgcttatggtgacaatttaatattgttaccattcagctagtcgaaataatcgcataaaactttaaatcctatctaacagttcacatttggatagttttattttaaggactttaaacctacctagaaag

SEQ ID NO: 21495 - DNA, 641 bp, synthetic construct
  source 1..641: mol_type = other DNA
cctttgtacgcctgttttatctccctccccaatgtaacttagaagctttcaaatcaaagctcaataggtggagcgcaaaccagcgcttccgtgagcaagtacttctgtttccccggtgcggttgtatagactgttcccacggtcgaaaacaacctatccgttatccgctatagtacttcgagaaacctagtatcacctttggattgttgatgcgttgcgctcaacacactaacccgtgtgtagcttgggtcgatgagtctggacataccccactggtgacagtggtccaggctgcgttggcggcctactcatggtgaaaaccatgagacgctagacatgaacaaggtgtgaagagtctattgagctactatagagtcctccggcccctgaatgcggctaatcttaaccatggagcaagtgctcacaaaccagtgagttgcttgtcgtaatgcgcaagtccgtggcggaaccgactactttgggtgtccgtgtttcactttttacttttatgactgcttatggtgacaatttaatattgttaccattcagctagtcggaataatcgcataaaactttaaatcctatctaacagttcacatttggatagttttattttaaggactttaaacctacctagaaag

SEQ ID NO: 21496 - DNA, 587 bp, synthetic construct
  source 1..587: mol_type = other DNA
ggccccggccaagcacttctgtatccccggactgagtatcagtaggctgctcgcgcggctgaaggagaaaacgttcgttacccggccacttacttcgagaaacctagtaacgccatgaaagttgcgcagcgtttcgctccgcacaaacccagtgtagatcaggtcgatgagtcaccgcattccccacgggcgaccgtggcggtggctgcgttggcggcctgcccatggggtaacccatgggacgcttcaatactgacatggtgcgaagagtctattgagctaagtggtagtcctccggcccctgaatgcggctaatcctaactgcggagcagatacccacactccagtgggcagtctgtcgtaacgggcaactctgcagcggaaccgactactttgggtgtccgtgtttccttttgtcttttacactggctgcttatggtgacaattgaaagattgttaccatatagctattggattggccatccgatatcaaacagagcaattatttacttgtttgttggttatatacctctcgacaccaaggttctaaaaacactcaactacatcttgttattgaatacgttgaa

SEQ ID NO: 21497 - DNA, 640 bp, synthetic construct
  source 1..640: mol_type = other DNA
cctttgtacgcctgttttatctccctcccaatgtaacttagaagctttcaaatcaaagctcaataggtggagcgcaagccagcgcttccgtgagcaagtacttctgtctccccggtgcggttgtatagactgttcccacggttgaaaacaacctatccgttatccgctatagtacttcgagaaacctagtatcacctttggattgttgatgcgttgcgctcagcacactaacccgtgtgtagcttgggtcgatgagtctggacataccccactggtgacagtggtccaggctgcgttggcggcctactcatggtgaaaaccatgagacgctagacatgaacaaggtgtgaagagtctattgagctactatagagtcctccggcccctgaatgcggctaatcttaaccatggagcaagtgctcacaaaccagtgagttgcttgtcgtaatgcgcaagtccgtggcggaaccgactactttgggtgtccgtgtttcactttttacttttatgactgcttatggtgacaatttaatattgttaccattcagctagtcgaaataatcgcataaaactttaaatcctatctaacagttcacatttggattgttttattttgaggactttaaacctacctacaaag

SEQ ID NO: 21498 - DNA, 610 bp, synthetic construct
  source 1..610: mol_type = other DNA
cccaccatccggcccactgggtgtagtactctggtattatgtacctttgtacgcctgttgttcccattgtacccgtcctaaaatttcctacccaagtaacgttagaagttttatcaataagtacaataggaagcatcacatccagtggtgttttgtacaagcacttctgtttccccggagcgaggtataggctgtacccactgccaaaagcctttaaccgttatccgccaaccaactacgtaaaagctagtatcatcatgtttctgactaggcgttcgatcaggtggactccccctccactagtttggtcgatgaggctaggaaatccccacgggcgaccgtgtcctagcctgcgtggcggccaacccagcttttgctgggacgccttttcatagacatggtgtgaagactcgcatgtgcttggttgtgattcctccggcccctgaatgcggctaaccctaaccctggagccctgtgttacaatccagtaacattagggtcgtaatgagtaattccgggacgggaccgactactttgggtgtccgtgtttctcatttttcttattattgtcttatggtcacagcatatatataacatatatactgtgatc

SEQ ID NO: 21499 - DNA, 643 bp, synthetic construct
  source 1..643: mol_type = other DNA
acctttgtacgcctgttttatctccctccccaatgtaacttagaagctttcgaatcaaagctcaataggtggagcgcaagccagcgcttccgtgagcaagtacttctgtttccccggtgcggttgtatagactgtccccacggttgaaaacaacctatccgttatccgctatagtacttcgagaaacctagtatcacctttggattgttgatgcgttgcgctcaacacactaacccgtgtgtagcttgggtcgatgagtctggacataccccactggtgacagtggtccaggctgcgttggcggcctactcatggtgaaaaccatgagacgctagacatgaacaaggtgtgaagagtctattgagctactatagagtcctccggcccctgaatgcggctaatcttaaccatggagcaagtgctcacaaaccagtgagttgcttgtcgtaatgcgcaagtccgtggcggaaccgactactttgggtgtccgtgtttcacttttttacttttatgactgcttatggtgacaatttaatattgttaccattcagctagtcgaaataatcgcataaaactttaaatcctatctaacagttcacatttggatagttttattttaaggactttaaacctacctagaaag

SEQ ID NO: 21500 - DNA, 502 bp, synthetic construct
  source 1..502: mol_type = other DNA
gccaattacttcgagaaacctagtaccaccatggaggttgcgcagcgtttcgctccgcacagccccagtgcagatcaggccgatgagtcaccgcattcctcacgggcgaccgtggcggtggctgcgttggcggcctgcccatggggcaacccatgggacgcttcaatactaacatggtgtgaagagtctattgagctaattggtagtcctccggcccctgaatgcggctaatcctaactgcggagcagatactcacatgccagtgggcagtctgtcgtaacgggcaactctgcagcggaaccgactactttgggtgtccgtgtttccttttattcttatactggctgcttatggtgacaattgagaaattgttaccatatagctattggattggccatccagtgacaaacagagcaattgtttacctatttgtcggcttcataccgttaaattttagagttttgaagacccttaacttgattatactattcaactctgcgaa

SEQ ID NO: 21501 - DNA, 742 bp, synthetic construct
  source 1..742: mol_type = other DNA
ttaaaacagctctggggttgtacccactcacagggcccactgggcgctagcacactggtatcacggtacctttgtgcgcctgttttataacccctttcccaaacgcaacgtagaagccacacacactgatcagtagtaggcacagcgcaccagttgtgtctcgatcaagcacttctgtctccccggaccgagtatcaatagactgctcacgcggttgaaggagaaagcgttcgttaaccggctgactacttcgagaaacctagtagtgctatgaaagttgcgaagcgtttcactcagcacttcccccgtgtagatcaggttgatgagtcactgcgttccccacgggtgaccgtggcagtggctgcgttggcggcctgcccatggggtgacccatgggacgcttcaatacggacatggtgcgaagagtctattgagctagccagtagtcctccggcccctgaatgcggctaatcctaactgcggagcatgtgccctcgatccagagggtagcatgtcgtaacgggcaactctgcagcggaaccgactactttgggtgtccgtgtttctttttattcttatattggctgcttatggtgacaattgagagattgttaccatatagctattggattggccacccggtgactaatagagctattatctactcctttgtaggttttgtgccattgaactacaaggtcttaaagactctaaactttatcataatacttaatactgcaaa

SEQ ID NO: 21502 - DNA, 617 bp, synthetic construct
  source 1..617: mol_type = other DNA
ctgttttatctcccttcccaatgtaatttagaagcttttaaatcaaggctcaataggtggggcgcaaaccagcgctctcatgagcaagcactcctgtctccccggtgtggttgtataaactgttcccacggttgaaaacaacctatccgttatccgctatagtacttcgagaaacctagtatcacctttggattgttgacgcgttgcgctcagcacactaacccgtgtgtagcttgggtcgatgagtctggacataccccactggcgacagtggtccaggctgcgttggcggcctactcatggtgaaaaccatgagacgctagacatgaacaaggtgtgaagagtctattgagctactatagagtcctccggcccctgaatgcggctaatcctaaccatggagcaagtgctcacaggccagtgagttgcttgtcgtaatgcgcaagtccgtggcggaaccgactactttgggtgtccgtgtttcactttttacttttatgactgcttatggtgacaatttgatattgttaccatttagctgtcaaattaattgcaaaagatcctaagtcttacttaccaatttgcattttgataaccttgatttgaaaactttaata

SEQ ID NO: 21503 - DNA, 641 bp, synthetic construct
  source 1..641: mol_type = other DNA
cctttgtacgcctgttttatctccctccccaatgtaacttagaagctttcaaatcaaagctcaataggtggagcgcaagccagcgcttccgtgagcaagtacttctgtttccccggtgcggttgtatagactgttcccacggttaaaaacaacctatccgttatccgctatagtacttcgagaaacctagtatcacctttggattgtcgatgcgttgcgctcaacacactaacccgtgtgtagcttgggtcgatgagtctggacataccccactggtaacagtggtccaggctgcgttggcggcctactcatggtgaaaaccatgagacgctagacatgaacaaggtgtgaagagtctattgagctactatagagtcctccggcccctgaatgcggctaatcttaaccatggagcaagtgctcacaaaccagtgagttgcttgtcgtaatgcgcaagtccgtggcggaaccgactactttgggtgtccgtgtttcactttttacttttatgactgcttatggtgacaatttaatattgttaccattcagctagtcgaaataatcgcataaaactttaaatcctatctaacagttcacatttggatagttttattttaaggactttaaacctacctagaaag

SEQ ID NO: 21504 - DNA, 714 bp, synthetic construct; identical to SEQ ID NO: 879
  source 1..714: mol_type = other DNA

SEQ ID NO: 21505 - DNA, 641 bp, synthetic construct
  source 1..641: mol_type = other DNA
cctttgtacgcctgttttatctccctccccaatgtaacttagaagctttcaaatcaaagctcaataggtggagcgcaaaccagcgcttccgtgagcaagtactcctgtttccccggtgcggttgtatagactgttcccacggttgaaaacaacctatccgttatccgctatagtacttcgagaaacctagtatcacctttggattgttgatgcgttgcgctcaacacactaacccgtgtgtagcttgggtcgatgagtctggacataccccactggtgacagtggtccaggctgcgttggcggcctactcatggtgaaaaccatgagacgctagacatgaacaaggtgtgaagagtctattgagctactatagagtcctccggcccctgaatgcggctaatcttaaccatggagcaagtgctcacaagccagtgagttgcttgtcgtaatgcgcaagtccgtggcggaaccgactactttgggtgtccgtgtttcactttttacttttatgactgcttatggtgacaatttaatattgttaccattcagctagtcgaaataatcgcataaagctttaaatcctatctaacgattcacatttggatagtttcattttgaggactttaaacctgcttacaaag

SEQ ID NO: 21506 - DNA, 597 bp, synthetic construct
  source 1..597: mol_type = other DNA
atccggctcaccgagcgtagtactctggtattttgtacctttgtacgcctgttttccaaaattccccatcctattcatttcctaccccgtaacgtaagaagttttcaaacagtacaataggaagcaccacatccagtggtgttgtgtacaagcacttctgtttccccggagcgaggtataggtggtcaccaccgccaaaagcctttaaccgttatccgccaaccaactacgtaatggctagtaacaccattgatttagattgacgttcgatcaggtggtacccccccactagtttggtcgatgaggctaggagcaccccacgggtgaccgtgtcctagcctgcgtggcggccaacccagcatacgctgggacgccagtttaatgacatggtgcgaagacttgcatgtgcttggttgagactcctccggcccctgaatgcggctaaccttaaccccagagccttgcagcataatccaatgttgttgaggtcgtaatgagcaattctgggacgggaccgactactttgggtgtccgtgtttcctgtttttctttacattgtcttatggtcacagcatatatattatatatactgtgatc

SEQ ID NO: 21507 - DNA, 632 bp, synthetic construct
  source 1..632: mol_type = other DNA
gtacctttgtacgcctgttttatctcccttcccaatgtaatttagaagctcttaaatcaaggctcaataggtggggcgcaaaccagcgctctcatgagcaagcactcctgtctccccggtgtggttgtataaactgttcccacggttgaaaacaacctatccgttatccgctatagtacttcgagaaacctagtatcacctttggattgttgacgcgttgcgctcagcacactaacccgtgtgtagcttaggtcgatgagtctggacataccccactggcgacagtggtccaggctgcgttggcggcctactcatggtgaaaaccatgagacgctagacatgaacaaggtgtgaagagtctattgagctactatagagtcctccggcccctgaatgcggctaatcctaaccatggagcaagtgctcacaggccagtgagttgcttgtcgtaatgcgcaagtccgtggcggaaccgactactttgggtgtccgtgtttcactttttacttttatgactgcttatggtgacaatttgatattgttaccatttagcttgtcaaattaattgcaaaagatcctgaatcttacttaccaacttgcattttgacaaccttgatttgaaaattttaata

SEQ ID NO: 21508 - DNA, 571 bp, synthetic construct
  source 1..571: mol_type = other DNA
cttctgtttccccggactgagtaccaataagctgctcgcgcggctgaaggggaaagcgttcgttacccgaccaattacttcgaaaaacctagtaccaccatgaaagttgcgcagtgtttcgctccacacaaccccagtgtagatcaggccgatgagtcaccgcattccccacgggcgaccgtggcggtggctgcgttggcggcctgcccatgggacaacccatgggacgcttcaatactgacatggtgtgaagagtctattgagctaattggtagtcctccggcccctgaatgcggctaatcccaactgcggagcagatactcacatgccagtgggcagtctgtcgtaacgggcaactctgcagcggaaccgactactttgggtgtccgtgtttccatttatttttatactggctgcttatggtgacaattgagagattgttaccatatagctattggattggccatccggtgacaagtagagcaatcatatacctgtttgttggttttgttccattaaattttaaggtcctaaaaacccttgacctgatcttagtgctcaacacggcaaa

SEQ ID NO: 21509 - DNA, 625 bp, synthetic construct
  source 1..625: mol_type = other DNA
gaacccaagtggtcaacaggcggctcagaacaccatctgggtcttgaccaagcacttctgtttccccggactgagtatcaataagctgctcacgcggctgaaggagaaaatgttcgttatccggccaattacttcgagaaacctagtaccaccatgaaggttgcgcagtgtttcgctccgcacaatcccagtgtagatcaggtcgatgagtcaccgcgttcctcacgggcgaccgtggcggtggctgcgctggcggcctgcccatggggcaacccatgggacgcttcaatactgacatggtgcgaagagtcaattgagctaattggtagtcctccggcccctgaatgcggctaatcctaactgcggagcagatgcccaagctccagtgggtagtctgtcgtaacgggtaactctgcagcggaaccgactactttgggtgtccgtgtttccttttattcttacattggctgcttatggtgacaattgagagattgttgccatatagctattggattggccatccggtgacgaatagagcaattgtgtatctttttgttggattcataccactagataatacaaacttcaaaaccctgtgttacatcattaggttaaacacagcaag

SEQ ID NO: 21510 - DNA, 544 bp, synthetic construct
  source 1..544: mol_type = other DNA
ataggctgcttacgcggccgaaggagaaaacgttcgttacccggccaattacttcgagaaacccagtaccaccatgaaggttgcgcagcgtttcgctccgcacaaccccagtgtagatcaggtcgatgggtcaccgcatccctcacgggcgaccgtggcggtggccgcgttggcggcctgcccatggggtatcccatgggacgcttcaatactgacatggtgcgaagagtctattgagctaattggtagtcctccggcccctgaatgcggctaatcctaactgcggagcagatacccacataccagtgggcagtctgtcgtaatgggcaactctgcagcggaaccgactactttgggtgtccgtgtttctttttattcctatttggctgcttatggtgacaattgaagaattgttaccatatagctattggattggccatccggtgactaatagagccattgtttacctctttgttggttttgtaccactgaatcacatagttctaaatactctaaatttgattttagtgctcaacacatcaaa

SEQ ID NO: 21511 - DNA, 631 bp, synthetic construct
  source 1..631: mol_type = other DNA
gtacctttgtacgcctgttttatctcccttcccaatgtaatttagaagctcttaaaccaaggctcaataggcggggcgcaacccagcgctctcatgagcaagcacttctgtctccccggtgtggttgtataaactgttcccacggttgaaaacaacctatccgttatccgctatagtacttcgagaaacctagtatcacctttggattgttgacgcgttgcgctcagcacactaacccgtgtgtagcttgggtcgatgagtctggacataccccactggcgacagtggtccaggctgcgttggcggcctactcatggtgaaaaccatgagacgctaaacatgaacaaggtgtgaagagtctattgagctactatagagtcctccggcccctgaatgcggctaatcctaaccatggagcaagcgctcacaagccagtgagttgcttgtcgtaatgcgcaagtccgtggcggaaccgactactttgggtgtccgtgtttcactttttacttttatgactgcttatggtgacaatttgatattgttaccatttagcttgtcaaattaattacaaaaggttctaaatcttacttaccaacttgcatttgataaccttgatttgaaaattttaata

SEQ ID NO: 21512 - DNA, 743 bp, synthetic construct
  source 1..743: mol_type = other DNA
ttaaaacagctctggggttgatcccactcacggggcctactgggcgctagcacactggtatcacggtaactttgtgcgcctgttttatccacccttccccgaaagaaacttagaagcttaacttgtgtggtcaatagtaaacccagtacgccaactgggtcacgaccaagcacttctgttaccccggactgagtatcaataagctgctcacgtggctgaaggagaaaacgttcgttacccggccaattacttcgagaaacccagtaccaccatgaaagttgcgcggcgtttcgctccgcacaaccccagtgtagatcgggccgatgagtcaccgcgttccccacgggcgaccgtggcggtggctgcgttggcggcctgcccatggggcaacccatgggacgcttcaatactgacatggtgcgaagagtctattgagctaattggtagtcctccggcccctgaatgcggctaatcctaactgcggagcagatacccacacgccagtgggcagtctgtcgtaacgggcaactctgcagcggaaccgactactttgggtgtccgtgtttccttttatatttatactggctgcttatggtgacaattgagagattgttgccatatagctattggattggccatccggtgtctaacagagcgatcgtttatttgtttgttggattcgtacccttgaattataaagcacttgtaacacttaaatacattatagatctcaacacaacaaa

SEQ ID NO: 21513 - DNA, 630 bp, synthetic construct
  source 1..630: mol_type = other DNA
cctttgtacgcctgttttatctcccttcccaatgtaatttagaagctcttaaatcaaggctcaataggtggggcgcaaaccagcgctctcatgagcaagcactcctgtctccccggtgtggttgtataaactgttcccacggttgaaaacaacctatccgttatccgctatagtacttcgagaaacctagtatcacctttggattgttgacgcgttgcgctcagcacactaacccgtgtgtagcttgggtcgatgagtctggacataccccactggcgacagtggtccaggctgcgttggcggcctactcatggtgaaaaccatgagacgctagacatgaacaaggtgtgaagagtctattgagctactatagagtcctccggcccctgaatgcggctaatcctaaccatggagcaagtgctcacaggccagtgagttgcttgtcgtaatgcgcaagtccgtggcggaaccgactactttgggtgtccgtgtttcactttttacttttatgactgcttatggtgacaatttgatattgttaccatttagcttgtcaaattaattgcaaaagatcctaaatcttacttaccaacttgcattttgacaaccttgatttgaaaatttttaata

SEQ ID NO: 21514 - DNA, 630 bp, synthetic construct
  source 1..630: mol_type = other DNA
acctttgtacgcctgttttatctcccttcccaatgtaatttagaagctcttaaatcaaggctcaataggtggggcgcaaaccagcgctctcatgagcaagcactcctgtctccccggtgtggttgtataaactgttcccacggttgaaaacgacctatccgttatccgctatagtacttcgagaaacctagtatcacctttggattgttgacgcgttgcgctcagcacactaacccgtgtgtagcttgggtcgatgagtctggacacaccccactggcgacagtggtccaggctgcgttggcggcctactcatggtgaaaaccatgagacgctagacatgaacaaggtgtgaagagtctattgagctactatagagtcctccggcccctgaatgcggctaatcctaaccatggagcaagtgctcacagaccagtgagttgcttgtcgtaatgcgcaagtccgtggcggaaccgactactttgggtgtccgtgtttcactttttacttttatgactgcttatggtgacaatttgatattgttaccatttagcttgtcaaattaattgcaaaagatcctaaatcttacttaccaatttgcattttgacaaccttgatttgaaaattttaata

SEQ ID NO: 21515 - DNA, 630 bp, synthetic construct
  source 1..630: mol_type = other DNA
cctttgtacgcctgttttatctcccttcccaatgtaatttagaagctcttaaatcaaggctcaataggtggggcgcaaaccagcgctctcatgagcaagcactcctgtctccccggtgtggttgtataaactgttcccacggttgaaaacaacctatccgttatccactatagtacttcgagaaacctagtatcacctttggattgttgacgcgttgcgctcagcacactaacccgtgtgtagcttgggtcgatgagtctggacataccccactggcgacagtggtccaggctgcgttggcggcctactcatggtgaaaaccatgagacgctagacatgaacaaggtgtgaagagtctattgagctactatagagtcctccggcccctgaatgcggctaatcctaaccatggagcaagtgctcacaggccagtgagttgcttgtcgtaatgcgcaagtccgtggcggaaccgactactttgggtgtccgtgtttcactttttacttttatgactgcttatggtgacaatttgatattgttaccatttagcttgtcaaattaattgcaaaagatcctaaatcttacttaccaacttgcattttgacaaccttgatttgaaaatttttaata

SEQ ID NO: 21516 - DNA, 630 bp, synthetic construct
  source 1..630: mol_type = other DNA
cctttgtacgcctgttttatctcccttcccaatgtaatttagaagctcttaaatcaaggctcaataggtggggcgcaaaccagcgctctcatgagcaagcactcctgtctccccggtgtggttgtataaactgttcccacggttgaaaacaacctatccgttatccgctatagtacttcgagaaacctagtatcacctttggattgttgacgcgttgcgctcagcacactaacccgtgtgtagcttgggtcgatgagtctggacataccccactggcgacagtggtccaggctgcgttggcggcctactcatggtgaaaaccatgagacgctagacatgaacaaggtgtgaagagtctattgagctactatagagtcctccggcccctgaatgcggctaatcctaaccatggagcaagtgctcacaggccagtgagttgcttgtcgtaacgcgcaagtccgtggcggaaccgactactttgggtgtccgtgtttcactttttacttttatgactgcttatggtgacaatttgatattgttaccatttagcttgtcaaattaattacaaaagatcctaaatcttacttaccaacttgcattttgacaaccttgatttgaaaatttttaata

SEQ ID NO: 21517 - DNA, 630 bp, synthetic construct
  source 1..630: mol_type = other DNA
cctttgtacgcctgttttatctcccttcccaatgtaatttagaagctcttaaatcaaggctcaataggtggggcgcaaaccagcgctctcatgagcaagcactcctgtctccccggtgtggttgtataaactgttcccacggttgaaaacaacctatccgttatccgctatagtacttcgagaaacctagtatcacctttggattgttgacgcgttgcgctcagcacactaacccgtgtgtagcttgggtcgatgagtctggacataccccactggtgacagtggtccaggctgcgttggcggcctactcatggtgaaaaccatgagacgctagacatgaacaaggtgtgaagagtctattgagctactatagagtcctccggcccctgaatgcggctaatcctaaccatggagcaagtgctcacaggccagtgagttgcttgtcgtaatgcgcaagtccgtggcggaaccgactactttgggtgtccgtgtttcactttttacttttatgactgcttatggtgacaatttgatattgttaccatttagcttgtcaaattaattgcaaaagatcctaaatcttacttaccaacttgcattttgacaaccttgatttgaaaatttttaata

SEQ ID NO: 21518 - DNA, 630 bp, synthetic construct
  source 1..630: mol_type = other DNA
cctttgtacgcctgttttatctcccttcccaatgtaatttagaagctcttaaatcaaggctcaataggtggggcgcaaaccagcgctctcatgagcaagcactcctgtctccccggtgtggttgtataaactgttcccacggttgaaaacaacctatccgttatccgctatagtacttcgagaaacctagtatcacctttggattgttgacgcgttgcgctcagcacactaacccgtgtgtagcttgggtcgatgagtctggacataccccactggcgacagtggtccaggctgcgttggcggcctactcatggtgaaaaccatgagacgctagacatgaacaaggtgtgaagagtctattgagctactatagagtcctccggcccctgaatgcggctaatcctaaccatggagcaagtgctcacaggccagtgagttgcttgtcgtaatgcgcaagtccgtggcggaaccgactactttgggtgtccgtgtttcactttttacttttatgactgcttatggtgacaatttgatattgttaccatttagcttgtcaaattaattgcaaaagatcctaaatcttacttaccaacttgcattttgacaaccttgatttgaaaattttaaata

SEQ ID NO: 21519 - DNA, 630 bp, synthetic construct
  source 1..630: mol_type = other DNA
acctttgtacgcctgttttatctcccttcccaatgtaatttagaagctcttaaatcaaggctcaataggtggggcgcaaaccagcgctctcatgagcaagcactcctgtctccccggtgtggttgtataaactgttcccacggttgaaaacaacctatccgttatccgctatagtacttcgagaaacctagtatcacctttggattgttgacgcgttgcgctcagcacactaacccgtgtgtagcttgggtcgatgagtctggacataccccactggcgacagtggtccaggctgcgttggcggcctactcatggtgaaaaccatgagacgctagacatgaacaaggtgtgaagagtctattgagctactatagagtcctccggcccctgaatgcggctaatcctaaccatggagcaagtgctcacaggccagtgagttgcttgtcgtaatgcgcaagtccgtggcggaaccgactactttgggtgtccgtgtttcactttttacttttatgactgcttatggtgacaatttgatattgttaccatttagcttgtcaaattaattgcaaaggatcctaaatcttacttaccaatttgcattttgacaatcttgatttgaaaattttaata

SEQ ID NO: 21520 - DNA, 745 bp, synthetic construct; identical to SEQ ID NO: 1115
  source 1..745: mol_type = other DNA

SEQ ID NO: 21521 - DNA, 520 bp, synthetic construct; identical to SEQ ID NO: 546
  source 1..520: mol_type = other DNA

SEQ ID NO: 21522 - DNA, 658 bp, synthetic construct
  source 1..658: mol_type = other DNA
tatccaccctctccccatagtaacttagaagtatgtttcatatggtcaataggcggctcagtatgccaactgagtctcgaccaagcacttctgttgccccggaccgagtatcaataagctactcacgtggctgaaggagaaaacgttcgttacccgaccaactacttcgagaaacctagtaccaccatggatgttgcgcggcgtttcgctccgcactaccccagtgtagatcaggtcgatgagtcaccgcattcctcacgggcgaccgtggtggtggctgcgctggcggcctgcccatggggcaacccatgggacgcttcaatacagacatggtgtgaagagtctattgagctagttggtagtcctccggcccctgaatgcggctaatcctaactgcggagcagatccccacacaccagtgggcagtctgtcgtaatgggtaactctgcagcggaaccgactactttgggtgtccgtgtttccttttattctcatactggctgcttatggtgacaattgaaagattgttaccatatagctattggattggccatccagtgtctaacagagcaataatttatctttttgttggattcgtcccacttgactacagagcacttgcaacgctcaattatattatagatctcaacacaacaag

SEQ ID NO: 21523 - DNA, 629 bp, synthetic construct
  source 1..629: mol_type = other DNA
cctttgtacgcctgttttatctcccttcccaatgtaacttagaagttcttaaatcaatgctcaataggtggggcgcaaaccagcgctctcatgagcaagcactcctgtctccccggtgaggttgtataaactgttcccacggttgaaaacaacctatccgttatccgctatagtacttcgagaaacctagtaccacctttggattgttgacgcgttgcgctcagcacactaacccgtgtgtagcttgggtcgatgagtctggacatacctcactggcgacagtggtccaggctgcgttggcggcctactcatggtgaaagccatgagacgctagacatgaacaaggtgtgaagagtctattgagctactatagagtcctccggcccctgaatgcggctaatcctaaccatggagcaagtgctcacaggccagtgagttgcttgtcgtaatgcgcaagtccgtggcggaaccgactactttgggtgtccgtgtttcactttttacttttatgactgcttatggtgacaatttgatattgttaccatttagcttgtcaaatcaattgcaaaagatcctaaatcttatttatcaacttgcatcttgataactttaatttgaaaattttaaca

SEQ ID NO: 21524 - DNA, 629 bp, synthetic construct
  source 1..629: mol_type = other DNA
cctttgtacgcctgttttatctcccttcccaacgcaacttagaagttttcaaatcgaggctcaataggtgaagcgcaaaccagcgctttcatgagcaagcacttctgtctccccggtgcagttgtatagactgtttccacggttgaaaacaacttatccgttatccgctatagtacttcgagaaacctagtatcacctttggattgttgatgcgttgcgctcagcacactaacccgtgtgtagcttgggtcgatgagtctggacgtaccccactggtgacagtggtccaggctgcgttggcggcctactcatggtgaaaaccatgagacgctaaacatgaacaaggtgtgaagagtctattgagctactatagagtcctccggcccctgaatgcggctaatcttaaccatggagcaagtgctcacaagccagtgagttgcttgtcgtaatgcgcaagtccgtggcggaaccgactactttgggtgtccgtgtttcactttttacttttatgactgcttatggtgacaatttaatattgttaccatttagcttgtcaaatcaattgcaaaagatcctaaatcttatttatcaacttgcatcttgataactttaatttgaaaattttaaca

SEQ ID NO: 21525 - DNA, 629 bp, synthetic construct
  source 1..629: mol_type = other DNA
cctttgtacgcctgttttatctcccttcccaatgtaatttagaagctcttaaatcaaggctcaataggtggggcgcaaaccagcgctctcatgagcaagcactcctgtctccccggtgtggttgtataaactgttcccacggttgaaaacaacctatccgttatccgctatagtacttcgagaaacctagtatcacctttggattgttgacgcgttgcgctcagcacactaacccgtgtgtagcttgggtcgatgagtctggacataccccactggcgacagtggtccaggctgcgttggcggcctactcatggtgaaaaccatgagacgctagacatgaacaaggtgtgaagagtctattgagctactatagagtcctccggcccctgaatgcggctaatcctaaccatggagcaagtgctcacaggccagtgagttgcttgtcgtaatgcgcaagtccgtggcggaaccgactactttgggtgtccgtgtttcactttttacttttatgactgcttatggtgacaatttgatattgttaccatttagcttgtcaaattaattgcaaaagatcctaaatcttacttaccaacttgcattttgacaaccttggtttgaaaattttaata

SEQ ID NO: 21526 - DNA, 629 bp, synthetic construct
  source 1..629: mol_type = other DNA
cctttgtacgcctgttttatctcccttcccaatgtaatttagaagctcttaaatcaaggctcaataggtggggcgcaaaccagcgctctcatgagcaagcacttctgtctccccggtgtggttgtataaactgttcccacggttgaaaacaacctatccgttatccgctatagtacttcgagaaacctagtatcacctttggattgttgacgcgttgcgctcagcacactaacccgtgtgtagcttgggtcgatgagtctggacataccccactggcgacagtggtccaggctgcgttggcggcctactcatggtgaaaaccatgagacgctagacatgaacaaggtgtgaagagtctattgagctactatagagtcctccggcccctgaatgcggctaatcctaaccatggagcaagtgctcacaggccagtgagttgcttgtcgtaatgcgcaagtccgtggcggaaccgactactttgggtgtccgtgtttcactttttacttttatgactgcttatggtgacaatttgatattgttaccatttagcttgtcaaattaattgcaaaagatcctgaatcttacttaccaacttgcattttgacaaccttgatttgaaaattttaata

SEQ ID NO: 21527 - DNA, 629 bp, synthetic construct
  source 1..629: mol_type = other DNA
cctttgtacgcctgttttatctcccttcccaatgtaatttagaagctcttaaatcaaggctcaataggtggggcgcaaaccagcgctctcatgagcaagcactcctgtctccccggtgtggttgtataaactgttcccacggttgaaaacaacctatccgttatccgctatagtacttcgagaaacctagtatcacctttggattgttgacgcgttgcgctcagcacactaacccgtgtgtagcttgggtcgatgagtctggacgtaccccactggcgacagtggtccaggctgcgttggcggcctactcatggtgaaaaccatgagacgctagacatgaacaaggtgtgaagagtctattgagctactatagagtcctccggcccctgaatgcggctaatcctaaccatggagcaagtgctcacaggccagtgagttgcttgtcgtaatgcgcaagtccgtggcggaaccgactactttgggtgtccgtgtttcactttttacttttatgactgcttatggtgacaatttgatattgttaccatttagcttgtcaaattaattgcaaaagatcctaaatcttacttaccaacttgcattttgacgaacttgatttgaaaattttaata

SEQ ID NO: 21528 - DNA, 629 bp, synthetic construct
  source 1..629: mol_type = other DNA
cctttgtacgcctgttttatctcccttcccaatgtaatttagaagctcttaaatcaaggctcaataggtggggcgcaaaccagcgctctcatgagcaagcactcctgtctccccggtgtggttgtataaactgttcccacggttgaaaacaacctatccgttatccgctatagtacttcgagaaacctagtatcacctttggattgttgatgcgttgcgctcagcacactaacccgtgtgtagcttgggtcgatgagtctggacataccccactggcgacagtggtccaggctgcgttggcggcctactcatggtgaaaaccatgagacgctagacatgaacaaggtgtgaagagtctattgagctactatagagtcctccggcccctgaatgcggctaatcctaaccatggagcaagtgctcacaggccagtgagttgcttgtcgtaatgcgcaagtccgtggcggaaccgactactttgggtgtccgtgtttcactttttacttttatgactgcttatggtgacaatttgatattgttaccatttagcttgtcaaattaattgcaaaagatcctaaatcttacttaccaatttgcattttgacaaccttgatttgaaaattttaata

SEQ ID NO: 21529 - DNA, 629 bp, synthetic construct
  source 1..629: mol_type = other DNA
cctttgtacgcctgttttatctcccttcccaatgtaatttagaagctcttaaatcaaggctcaataggtggggcgcaaaccagcgctctcatgagcaagcactcctgtctccccggtgtggttgtataaactgttcccacggttgaaaacaacctatccgttatccgctatagtacttcgagaaacctagtatcacctttggattgttgacgcgttgcgctcagcacactaacccgtgtgtagcttgggtcgatgagtctggacataccccactggcgacagtggtccaggctgcgttggcggcctactcatggtgaaaaccatgagacgctagacatgaacaaggtgtgaagagtctattgagctactatagagtcctccggcccctgaatgcggctaatcctaaccatggagcaagtgctcacaggccagtgagttgcttgtcgtaatgcgcaagtccgtggcggaaccgactactttgggtgtccgtgtttcactttttacttttatgactgcttatggtgacaatttgatattgttaccatttagcttgtcaaattaattgcaaaagatcctaaatcttacttatcaacttgcattttgacaaccttgatttgaaaattttaata

SEQ ID NO: 21530 - DNA, 629 bp, synthetic construct
  source 1..629: mol_type = other DNA
cctttgtacgcctgttttatctcccttcccaatgtaatttagaagctcttaaatcaaggctcaataggtggggcgcaaaccagcgctctcatgagcaagcactcctgtctccccggtgtggttgtataaactgttcccacggttgaaaacaacctatccgttatccgctatagtacttcgagaaacctagtatcacctttggattgttgacgcgttgcgctcagcacactaacccgtgtgtagcttgggtcgatgagtctggacacaccccactggcgacagtggtccaggctgcgttggcggcctactcatggtgaaaaccatgagacgctagacatgaacaaggtgtgaagagtctattgagctactatagagtcctccggcccctgaatgcggctaatcctaaccatggagcaagtgctcacaggccagtgagttgcttgtcgtaatgcgcaagtccgtggcggaaccgactactttgggtgtccgtgtttcactttttacttttatgactgcttatggtgacaatttgatattgttaccatttagcttgtcaaattaattgcaaaagatcctaaatcttacttaccaacttgcattttgacaaccttgatttgaaaattttaata

SEQ ID NO: 21531 - DNA, 629 bp, synthetic construct
  source 1..629: mol_type = other DNA
cctttgtacgcctgttttatctcccttcccaatgtaatttagaagctcttaaatcaaggctcaataggtggggcgcaaaccagcgctctcatgagcaagcactcctgtctccccggtgtggttgtataaactgttcccacggttgaaaacaacctatccgttatccgctatagtacttcgagaaacctagtatcacctttggattgttgacgcgttgcgctcagcacactaacccgtgtgtagcttgggtcgatgagtctggacataccccactggcgacagtggtccaggctgcgttggcggcctactcatggtgaaaaccatgagacgctagacatgaacaaggtgtgaagagtctattgagctactatagagtcctccggcccctgaatgcggctaatcctaaccatggagcaagtgctcacaggccagtgagttgcttgtcgtaatgcgcaagtccgtggcggaaccgactactttgggtgtccgtgtttcactttttacttttatgactgcttatggtgacaatttgatattgttaccatttagcttgtcaaattaattgcaaaagatcctaaatcttacttaccaatttgcattttgacaaccttgatttgaaaattttaata

SEQ ID NO: 21532 - DNA, 629 bp, synthetic construct
  source 1..629: mol_type = other DNA
cctttgtacgcctgttttatctcccttcccaatgtaatttagaagctcttaaatcaaggctcaataggtggggcgcaaaccagcgctctcatgagcaagcactcctgtctccccggtgtggttgtataaactgttcccacggttgaaaacaacctatccgttatccgctatagtacttcgagaaacctagtatcacctttggattgttgacgcgttgcgctcagcacactaacccgtgtgtagcttgggtcgatgagtctggacgtaccccactggcgacagtggtccaggctgcgttggcggcctactcatggtgaaaaccatgagacgctagacatgaacaaggtgtgaagagtctattgagctactatagagtcctccggcccctgaatgcggctaatcctaaccatggagcaagtgctcacaggccagtgagttgcttgtcgtaatgcgcaagtccgtggcggaaccgactactttgggtgtccgtgtttcactttttacttttatgactgcttatggtgacaatttgatattgttaccatttagcttgtcaaattaattgcaaaagatcctaaatcttacttaccaacttgcattttgacgaacttgatttgaaaattttaaca

SEQ ID NO: 21533 - DNA, 629 bp, synthetic construct
  source 1..629: mol_type = other DNA
cctttgtacgcctgttttatctcccttcccaatgtaatttagaagctcttaaatcaaggctcaataggtggggcgcaaaccagcgctctcatgagcaagcactcctgtctccccggtgtggttgtataaactgttcccacggttgaaaacaacctatccgttatccgctatagtacttcgagaaacctagtatcacctttggattgttgacgcgttgcgctcagcacactaacccgtgtgtagcttgggtcgatgagtctggacataccccactggcgacagtggtccaggctgcgttggcggcctactcatggtgaaaaccatgagacgctagacatgaacaaggtgtgaagagtctattgagctactatagagtcctccggcccctgaatgcggctaatcctaaccatggagcaagtgctcacaggccagtgagttgcttgtcgtaatgcgcaagtccgtggcggaaccgactactttgggtgtccgtgtttcactttttacttttatgactgcttatggtgacaatttgatattgttaccatttagcttgtcaaattaattgcaaaagatcctaaatcttacttaccaacttgcattttgacaaccttgatttgaaaattttaata

SEQ ID NO: 21534 - DNA, 629 bp, synthetic construct
  source 1..629: mol_type = other DNA
cctttgtacgcctgttttatctcccttcccaatgtaatttagaagctcttaaatcaaggctcaataggtggggcgcaaaccagcgctctcatgagcaagcactcctgtctccccggtgtggttgtataaactgttcccacggttgaaaacaacctatccgttatccgctatagtacttcgagaaacctagtatcacctttggattgttgacgcgttgcgctcagcacactaacccgtgtgtagcttgggtcgatgagtctggacataccccactggcgacagtggtccaggctgcgttggcggcctactcatggtgaaaaccatgagacgctagacatgaacaaggtgtgaagagtctattgagctactatagagtcctccggcccctgaatgcggctaatcctaaccatggagcaagtgctcacaggccagtgagttgcttgtcgtaatgcgcaagtccgtggcggaaccgactactttgggtgtccgtgtttcactttttacttttatgactgcttatggtgacaatttgatattgttaccatttagcttgtcaaattaattgcaaaaggtcctaaatcttatttaccaacttgcattttgacaatcttggtttaaaaattttaata

SEQ ID NO: 21535 - DNA, 629 bp, synthetic construct
  source 1..629: mol_type = other DNA
cctttgtacgcctgttttatctcccttcccaatgtaatttagaagctcttaaatcaaggctcaataggtggggcgcaaaccagcgctctcatgagcaagcactcctgtctccccggtgtggttgtataaactgttcccacggttgaaaacaacctatccgttatccgctatagtacttcgagaaacctagtatcacctttggatcgttgacgcgttgcgctcagcacactaacccgtgtgtagcttgggtcgatgagtctggacgtaccccactggcgacagtggtccaggctgcgttggcggcctactcatggtgaaaaccatgagacgctagacatgaacaaggtgtgaagagtctattgagctactatagagtcctccggcccctgaatgcggctaatcctaaccatggagcaagtgctcacaggccagtgagttgcttgtcgtaatgcgcaagtccgtggcggaaccgactactttgggtgtccgtgtttcactttttacttttatgactgcttatggtgacaatttgatattgttaccatttagcttgtcaaattaattgcaaaagatcctaaatcttacttaccaacttgcattttgacgaacttgatttgaaaattttaata

SEQ ID NO: 21536 - DNA, 629 bp, synthetic construct
  source 1..629: mol_type = other DNA
cctttgtacgcctgttttatctcccttcccaatgtaatttagaagctcttaaatcaaggctcaataggtggggcgcaaaccagcgctctcatgagcaagcactcctgtctccccggtgtggttgtataaactgttcccacggttgaaaacaacctatccgttatccgctatagtacttcgagaaacctagtatcacctttggattgttgacgcgttgcgctcagcacactaacccgtgtgtagcttgggtcgatgagtctggacataccccactggcgacagtggtccaggctgcgttggcggcctactcatggtgaaaaccatgagacgctagacatgaacaaggtgtgaagagtctattgagctactatagagtcctccggcccctgaatgcggctaatcctaaccatggagcaagtgctcacaggccagtgagttgcttgtcgtaatgcgcaagtccgtggcggaaccgactactttgggtgtccgtgtttcactttttacttttatgactgcttatggtgacaatttgatattgttaccatttagcttgtcaaattaattgcaaaagatcctgaatcttacttaccaacttgtattttgacaaccttgatttgaaaattttaaca

SEQ ID NO: 21537 - DNA, 629 bp, synthetic construct
  source 1..629: mol_type = other DNA
cctttgtacgcctgttttatctcccttcccaatgtaatttagaagctcttaaatcaaggctcaataggtggggcgcaaaccagcgctctcatgagcaagcactcctgtctccccggtgtggttgtataaactgttcccacggttgaaaacaacctatccgttatccgctatagtacttcgagaaacctagtatcacctttggattgttgacgcgttgcgctcagcacactaacccgtgtgtagcttgggtcgatgagtctggacataccccactggcgacagtggtccaggctgcgttggcggcctactcatggtgaaaaccatgagacgctagacatgaacaaggtgtgaagagtctattgagctactatagagtcctccggcccctgaatgcggctaatcctaaccatggagcaagtgctcacagaccagtgagttgcttgtcgtaatgcgcaagtccgtggcggaaccgactactttgggtgtccgtgtttcactttttacttttatgactgcttatggtgacaatttgatattgttaccatttagcttgtcaaattaattgcaaaagatcttgaatcttacttaccaacttgcattttgacaaccttgatttgaaaattttaata

SEQ ID NO: 21538 - DNA, 629 bp, synthetic construct
  source 1..629: mol_type = other DNA
cctttgtacgcctgttttatctcccttccctatgtaatttagaagctcttaaatcaaggctcaataggtggggcgcaaaccagcgctctcatgagcaagcactcctgtctccccggtgtggttgtataaactgttcccacggttgaaaacaacctatccgttatccgctatagtacttcgagaaacctagtatcacctttggattgttgacgcgttgcgctcagcacactaacccgtgtgtagcttgggtcgatgagtctggacataccccactggcgacagtggtccaggctgcgttggcggcctactcatggtgaaaaccatgagacgctagacatgaacaaggtgtgaagagtctattgagctactatagagtcctccggcccctgaatgcggctaatcttaaccatggagcaagtgctcacaggccagtgagttgcttgtcgtaatgcgcaagtccgtggcggaaccgactactttgggtgtccgtgtttcactttttacttttatgactgcttatggtgacaatttgatattgttaccatttagcttgtcaaattaattacaaaagatcctaaatcttacataccaacttgcattttgacaacctcgatttgaaaattttaata

SEQ ID NO: 21539 - DNA, 629 bp, synthetic construct
  source 1..629: mol_type = other DNA
cctttgtacgcctgttttatctcccttcccaatgtaatttagaagctcttaaatcaaggctcaataggtggggcgcaaaccagcgctctaatgagcaagcactcctgtctccccggtgtggttgtataaactgttcccacggttgaaaacaacttatccgttatccgctatagtacttcgagaaacctagtatcacctttggattgttgacgcgttgcgctcagcacactaacccgtgtgtagcttgggtcgatgagtctggacataccccactggcgacagtggtccaggctgcgttggcggcctactcatggtgaaaaccatgagacgctagacatgaacaaggtgtgaagagtctattgagctactatagagtcctccggcccctgaatgcggctaatcctaaccatggagcaagtgctcacaggccagtgagttgcttgtcgtaatgcgcaagtccgtggcggaaccgactactttgggtgtccgtgtttcactttttacttttatgactgcttatggtgacaatttgatattgttaccatttagcttgtcaaattaattgcaaaagatcataaatcttacttaccaacttgcattttgacaaccttgatttgaaaattttaata

SEQ ID NO: 21540 - DNA, 629 bp, synthetic construct
  source 1..629: mol_type = other DNA
cctttgtacgcctgttttatctcccttcccaatgtaatttagaagctcttaaatcaaggctcaataggtggggcgcaaaccagcgctctcatgagcaagcactcctgtctccccggtgtggttgtataaactgttcccacggttgaaaacaacctatccgttatccgctatagtacttcgagaaacctagtatcacctttggattgttgacgcgttgcgctcagcacactaacccgtgtgtagcttgggtcgatgagtctggacataccccactggcgacagtggtccaggctgcgttggcggcctactcatggtgaaaaccatgagacgctagacatgaacaaggtgtgaagagtctattgagctactatagagtcctccggcccctgaatgcggctaatcctaaccatggagcaagtgctcacaggccagtgagttgcttgtcgtaatgcgcaagtccgtggcggaaccgactactttgggtgtccgtgtttcactttttacttttatgactgcttatggtgacaatttgatattgttaccatttagcttgtcaaattaattgcaaaagatcctaaatcttactcaccaatttgcattttgacaaccttgatttgaaaattttaata

SEQ ID NO: 21541 - DNA, 629 bp, synthetic construct
  source 1..629: mol_type = other DNA
cctttgtacgcctgttttatctcccttcccaatgtaatttagaagctcttaaatcaaggctcaataggtggggcgcaaaccagcgctctcatgagcaagcactcctgtctccccggtgtggttgtataaactgttcccacggttgaaaacgacctatccgttatccgctatagtacttcgagaaacctagtatcacctttggattgttgacgcgttgcgctcagcacactaacccgtgtgtagcttgggtcgatgagtctggacataccccactggcgacagtggtccaggctgcgttggcggcctactcatggtgaaaaccatgagacgctagacatgaacaaggtgtgaagagtctattgagctactatagagtcctccggcccctgaatgcggctaatcctaaccatggagcaagtgctcacagaccagtgagttgcttgtcgtaacgcgcaagtccgtggcggaaccgactactttgggtgtccgtgtttcactttttacttttatgactgcttatggtgacaatttgatattgttaccatttagcttgtcaaattaattgcaaaagatcccaaatcttacttaccaatttgcattttgacaaccttgatttgaaaattttaata

SEQ ID NO: 21542 - DNA, 558 bp, synthetic construct
  source 1..558: mol_type = other DNA
ggactgagtatcaataagctgctcacgcggctgagggagaaaacgtccgttacccggccaattacttcgagaagcctagtaccaccacgaaagttgcgcagcgtttcgatccgcacaaccccagtgtagatcaggtcgatgagtcaccgcgttccccacgggcgaccgtggcggtggctgcgttggcggcctgcccatgggagaacccatgggacgcttcaatactgacatggtgtgaagagtctattgagctaattggtagtcctccggcccctgaatgcggctaatcctaactgtggagcagattcccgcatgccagcgggtggtctgtcgtaacgggcaactctgcagcggaaccgactactttgggtgtccgtgtttccttttattcctatattggctgcttatggtgacaattgagagattgttaccatatagctattggattggccatccggtgacaaacagagcaattatctaccaatttattggttttgtaccattgaattacaacgcattcaaaactcttaactttattttggctcttaatacagcaaa

SEQ ID NO: 21543 - DNA, 629 bp, synthetic construct
  source 1..629: mol_type = other DNA
cctttgtacgcctgttttatctcccttcccaatgtaatttagaagctcttaaatcaaggctcaataggtggggcgcaaaccagcgctctcatgagcaagcactcctgtctccccggtgcggttgtataaactgttcccacggttgaaaacgacctatccgttatccgctatagtacttcgagaaacctagtatcacctttggattgttgacgcgttgcgctcagcacactaacccgtgtgtagcttgggtcgatgagtctggacataccccactggcgacagtggtccaggctgcgttggcggcctactcatggtgaaaaccatgagacgctagacatgaacaaggtgtgaagagtctattgagctactatagaatcctccggcccctgaatgcggctaatcctaaccatggagcaagtgctcacagaccagtgagttgcttgtcgtaacgcgcaagtccgtggcggaaccgactactttgggtgtccgtgtttcactttttacctttatgactgcttatggtgacaatttaatattgttaccatttagcttgtcaaattaattgcaaaacatcctaaatcttacttaccaacttgcattttgataaccttggtttgaaaatttcagta

SEQ ID NO: 21544 - DNA, 629 bp, synthetic construct
  source 1..629: mol_type = other DNA
cctttgtacgcctgttttatctcccttcccaatgtaatttagaagctcttaaatcaaggctcaataggcggggcgcaacccagcgctctcatgagcaagcacttctgtctccccggtgtggttgtataaactgttcccacggttgaaaacaacctatccgttatccgctatagtacttcgagaaacctagtatcacctttggattgttgacgcgttgcgctcagcacactaacccgtgtgtagcttgggtcgatgagtctggacataccccactggcgacagtggtccaggctgcgttggcggcctactcatggtgaaaaccatgagacgctaaacatgaacaaggtgtgaagagtctattgagctactatagagtcctccggcccctgaatgcggctaatcctaaccatggagcaagcgctcacaagccagtgagttgcttgtcgtaatgcgcaagtccgtggcggaaccgactactttgggtgtccgtgtttcactttttacttttatgactgcttatggtgacaatttgatattgttaccatttagcttgtcaaattaattacaaaaggttctaaatcttacttaccaacttgcattttgataaccttgatttgaaaattttaata

SEQ ID NO: 21545 - DNA, 629 bp, synthetic construct
  source 1..629: mol_type = other DNA
cctttgtacgcctgttttatctcccttcccaatgtaatttagaagctcttaaatcaaggctcaataggtggggcgcaaaccagcgctctcatgagcaagcactcctgtctccccggtgtggttgtataaactgttcccacggttgaaaacaacctatccgttatccgctatagtacttcgagaaacctagtatcacctttggattgttgacgcgttgcgctcagcacactaacccgtgtgtagcttgggtcgatgagtctggacataccccactggcgacagtggtccaggctgcgttggcggcctactcatggtgaaaaccatgagacgctagacatgaacaaggtgtgaagagtctattgagctactatagagtcctccggcccctgaatgcggctaatcctaaccatggagcaagtgctcacaggccagtgagttgcttgtcgtaatgcgcaagtccgtggcggaaccgactactttgggtgtccgtgtttcactttttacttttatgactgcttatggtgacaatttgatattgttaccatttagcttgtcaaattaattgcaaaggatcctaaatcttacttaccaatttgcattttgacaatcttgatttgaaaattttgaca

SEQ ID NO: 21546 - DNA, 629 bp, synthetic construct
  source 1..629: mol_type = other DNA
cctttgtacgcctgttttatctcccttcccaatgtaatttagaagctcttaaatcaaggctcaataggcggggcgcaacccagcgctctcatgagcaagcacttctgtctccccggtgtggttgtataaactgttcccacggttgaaaacaacctatccgttatccgctatagtacttcgagaaacctagtatcacctttggattgttgacgcgttgcgctcagcacactaacccgtgtgtagcttgggtcgatgagtctggacataccccactggcgacagtggtccaggctgcgttggcggcctactcatggtgaaaaccatgagacgctaaacatgaacaaggtgtgaagagtctattgagctactatagagtcctccggcccctgaatgcggctaatcctaaccatggagcaagcgctcacaagccagtgagttgcttgtcgtaatgcgcaagtccgtggcggaaccgactactttgggagtccgtgtttcactttttacttttatgactgcttatggtgacaatttgatattgttaccatttagcttgtcaaattaattacaaaaggttctaaatcttacttaccaacttgcattttgataaccttgatttgaaaattttaata

SEQ ID NO: 21547 - DNA, 629 bp, synthetic construct
  source 1..629: mol_type = other DNA
cctttgtacgcctgttttatttcccttcccaatgtaatttagaagctcttaaatcaaggctcaataggtggggcgcaaaccagcgctctcatgagcaagcactcctgtctccccggtgtggttgtataaactgttcccacggttgaaaacaacctatccgttatccgctatagtacttcgagaaacctagtatcacctttggattgttgacgcgttgcgctcagcacactaacccgtgtgtagcttgggtcgatgagtctggacataccccactggcgacagtggtccaggctgcgttggcggcctactcatggcgaaaaccatgagacgctagacatgaacaaggtgtgaagagtctattgagctactatagagtcctccggcccctgaatgcggctaatcctaaccatggagcaagtgctcacaggccagtgagttgcttgtcgtaatgcgcaagtccgtggcggaaccgactactttgggtgtccgtgtttcattttttacttttatgactgcttatggtgacaatttgatattgttaccatttagcttgtcaaattaattgcaaaggatcctaaatcttacttaccaatttgcattttgacaatcttgatttgaaaattttaata

SEQ ID NO: 21548 - DNA, 629 bp, synthetic construct
  source 1..629: mol_type = other DNA
cctttgtacgcctgttttatctcccttcccaatgtaatttagaagctcttaaatcaaggctcaataggtggggcgcaaaccagcgctctcatgagcaagcactcctgtctccccggtgtggttgtataaactgttcccacggttgaaaacaacctatccgttatccgctatagtacttcgagaaacctagtatcacctttggattgttgacgcgttgcgctcagcacactaacccgtgtgtagcttgggtcgatgagtctggacataccccactggcgacagtggtccaggctgcgttggcggcctactcatggtgaaaaccatgagacgctagacatgaacaaggtgtgaagagtctattgagctactatagagtcctccggcccctgaatgcggctaatcctaaccatggagcaagtgctcacaggccagtgagttgcttgtcgtaatgcgcaagtccgtggcggaaccgactactttgggtgtccgtgtttcactttttacttttatgactgcttatggtgacaatttgatattgttaccatttagcttgtcaaattaattgcaaaggatcctaaatcttacttaccaatttgtattttgacaatcttgatttgaaaattttaata

SEQ ID NO: 21549 - DNA, 629 bp, synthetic construct
  source 1..629: mol_type = other DNA
cctttgtacgcctgttttatctcccttcccaatgtaatttagaagctcttaaatcaaggctcaataggcggggcgcaacccagcgctctcatgagcaagcacttctgtctccccggtgtggttgtataaactgttcccacggttgaaaacaacctatccgttatccgctatagtacttcgagaaacctagtatcacctttggattgttgacgcgttgcgctcagcacactaacccgtgtgtagcttgggtcgatgagtctggacataccccactggcgacagtggtccaggctgcgttggcggcctactcatggtgaaaaccatgagacgctaaacatgaacaaggtgtgaagagtctattgagctactatagagtcctccggcccctgaatgcggctaatcctaaccatggagcaagcgctcacaagccagtgagttgcttgtcgtaatgcgcaagtccgtggcggaaccgactactttgggtgtccgtgtttcactttttacttttatgactgcttatggtgacaatttgatattgttaccatttagcttgtcaaattaattacaaaaggttctaaatcttacttaccaacttgcattttcataaccttgatttgaaaattttaata

SEQ ID NO: 21550 - DNA, 629 bp, synthetic construct
  source 1..629: mol_type = other DNA
cctttgtacgcctgttttatctcccttcccaatgtaatttagaagctcttaaactaaggctcaataggcggggcgcaacccagcgctctcatgagcaagcacttctgtctccccggtgtggttgtataaactgttcccacggttgaaaacaacctatccgttatccgctatagtacttcgagaaacctagtatcacctttggattgttgacgcgttgcgctcagcacactaacccgtgtgtagcttgggtcgatgagtctggacataccccactggcgacagtggtccaggctgcgttggcggcctactcatggtgaaaaccatgagacgctaaacatgaacaaggtgtgaagagtctattgagctactatagagtcctccggcccctgaatgcggctaatcctaaccatggagcaagcgctcacaagccagtgagttgcttgtcgtaatgcgcaagtccgtggcggaaccgactactttgggtgtccgtgtttcactttttacttttatgactgcttatggtgacaatttgatattgttaccatttagcttgtcaaattaattacaaaaggttctaaatcttactcaccaacttgcattttgataaccttgatttgaaaattttaata

SEQ ID NO: 21551 - DNA, 629 bp, synthetic construct
  source 1..629: mol_type = other DNA
cctttgtacgcctgttttatctcccttcccaatgtaatttagaagctcttaaatcaaggctcaataggtggggcgcaaaccagcgctctcatgagcaagcacttctgtctccccggtgtggttgtataaactgttcccacggttgaaaacaacctatccgttatccgctatagtacttcgagaaacctagtatcacctttggattgttgacgcgttgcgctcagcacactaacccgtgtgtagcttgggtcgatgagtctggacataccccactggcgacagtggtccaggctgcgttggcggcctactcatggtgaaaaccatgagacgctagacatgaacaaggtgtgaagagtctattgagctactatagagtcctccggcccctgaatgcggctaatcctaaccatggagcaagtgctcacaggccagtgagttgcttgtcgtaatgcgcaagtccgtggcggaaccgactactttgggtgtccgtgtttcactttttacttttatgactgcttatggtgacaatttgatattgttaccatttagcttgtcaaattaattgcaaaggatcctaaatcttacttaccaatttgcattttgacaatcttgatttgaaaattttaata

SEQ ID NO: 21552 - DNA, 629 bp, synthetic construct
  source 1..629: mol_type = other DNA
cctttgtacgcctgttttatctcccttcccaatgtaatttagaagctcttaaatcaaggctcaataggtggggcgcaaaccagcgctctcatgagcaagcacttctgtctccccggtgtggttgtatagactgttcccacggttgaaaacaacctatccgttatccgctatagtacttcgagaaacctagtatcacctttggattgttgacgcgttgcgctcagcacactaacccgtgtgtagcttgggtcgatgagtctggacataccccactggcgacagtggtccaggctgcgttggcggcctactcatggtgaaaaccatgagacgctagacatgaacaaggtgtgaagagtctattgagctactatagagtcctccggcccctgaatgcggctaatcctaaccatggagcaagtgctcacaggccagtgagttgcttgtcgtaatgcgcaagtccgtggcggaaccgactactttgggtgtccgtgtttcactttttacttttatgactgcttatggtgacaatttgatattgttaccatttagcttgtcaaattaattgcaaaggatcctaaatcttacttaccaatttgcattttgacaatcttgatttgaaaattttaata

SEQ ID NO: 21553 - DNA, 629 bp, synthetic construct
  source 1..629: mol_type = other DNA
cctttgtacgcctgttttatctcccttcccaatgtaatttagaagctcttaaaccaaggctcaataggcggggcgcaacccagcgctctcatgagcaagcacttctgtctccccggtgtggttgtataaactgttcccacggttgaaaacaacctatccgttatccgctatagtacttcgagaaacctagtatcacctttggattgttgacgcgttgcgctcagcacactaacccgtgtgtagcttgggtcgatgagtctggacataccccactggcgacagtggtccaggctgcgttggcggcctactcatggtgaaaaccatgagacgctaaacatgaacaaggtgtgaagagtctattgagctactgtagagtcctccggcccctgaatgcggctaatcctaaccatggagcaagcgctcacaagccagtgagttgcttgtcgtaatgcgcaagtccgtggcggaaccgactactttgggtgtccgtgtttcactttttacttttatgactgcttatggtgacaatttcatattgttaccatttagcttgtcaaattaattacaaaaggttctaaatcttacttaccaacttgcattttgataaccttgatttgaaaatcttaata

SEQ ID NO: 21554 - DNA, 629 bp, synthetic construct
  source 1..629: mol_type = other DNA
cctttgtacgcctgttttatctcccttcccaatgtaatttagaagctcttaaatcaaggctcaataggtggggcgcaaaccagcgctctcatgagcaagcactcctgtctccccggtgtggttgtataaactgttcccacggttgaaaacaacctatccgttatccgctatagtacttcgagaaacctagtatcacctttggattgttgacgcgttgcgctcagcacactaacccgtgtgtagcttgggtcgatgagtctggacataccccactggcgacagtggtccaggctgcgttggcggcctactcatggtgaaaaccatgagacgctagacatgaacaaggtgtgaagagtctattgagctactatagagtcctccggcccctgaatgcggctaatcctaaccatggagcaagtgctcacaggccagtgagttgcttgtcgtaatgcgcaagtccgtggcggaaccgactactttgggtgtccgtgtttcactttttacttttatgactgcttatggtgacaatttgatattgttaccatttagcttgtcaaattaattgcaaaggatcctaaatcttacttaccaatttgcattttgacaatcttgatttgaaaattttaata

SEQ ID NO: 21555 - DNA, 629 bp, synthetic construct
  source 1..629: mol_type = other DNA
cctttgtacgcctgttttatctcccttcccaatgtaatttagaagctcttaaaccaaggctcaataggcggggcgcaacccagcgctctcatgagcaagcacttctgtctccccggtgtggttgtataaactgttcccacggttgaaaacaacctatccgttatccgctatagtacttcgagaaacctagtatcacctttggattgttgacgcgttgcgctcagcacactaacccgtgtgtagcttgggtcgatgagtctggacataccccactggcgacagtggtccaggctgcgttggcggcctactcatggtgaaaaccatgagacgctaaacatgaacaaggtgtgaagagtctattgagctgctatagagtcctccggcccctgaatgcggctaatcctaaccatggagcaagcgctcacaagccagtgagttgcttgtcgtaatgcgcaagtccgtggcggaaccgactactttgggtgtccgtgtttcactttttacttttatgactgcttatggtgacaatttgatattgttaccatttagcttgtcaaattaattacaaaaggttctaaatcttacttaccaacttgcattttgataaccttgatttgaaaattttaata

SEQ ID NO: 21556 - DNA, 629 bp, synthetic construct
  source 1..629: mol_type = other DNA
cctttgtacgcctgttttatctcccttcccaatgtaatttagaagctcttaaatcaaggctcaataggtggggcgcaaaccagcgctctcatgagcaagcactcctgtctccccggtgtggttgtataaactgttcccacggttgaaaacaacctatccgttatccgctatagtacttcgagaaacctagtatcacctttggattgttgacgcgttgcgctcagcacactaacccgtgtgtagcttgggtcgatgagtctggacataccccactggcgacagtggtccaggctgcgttggcggcctactcatggtgaaaaccatgagacgctagacatgaacaaggtgtgaagagtctattgagctactatagagtcctccggcccctgaatgcggctaatcctaaccatggagcaagtgctcacaggccagtgagttgcttgtcgtaatgcgcaagtccgtggcggaaccgactactttgggtgtccgtgtttcactttttacttttatgactgcttatggtgacaatttgatattgttaccatttagcttgtcaaattaattgcaaaggatcctaaatcttacttaccaatttgcattttgacaatcttgatttgaaaattttgata

SEQ ID NO: 21557 - DNA, 629 bp, synthetic construct
  source 1..629: mol_type = other DNA
cctttgtacgcctgttttatctcccttcccaatgtaatttagaagctcttaaaccaaggctcaataggcggggcgcaacccagcgctctcatgagcaagcacttctgtctccccggtgtggttgtataaactgttcccacggttgaaaacaacctatccgttatccgctatagtacttcgagaaacctagtatcacctttggattgttgacgcgttgcgctcagcacactaacccgtgtgtagcttgggtcgatgagtctggacataccccactggcgacagtggtccaggctgcgttggcggcctactcatggtgaaaaccatgagacgctaaacatgaacaaggtgtgaagagtctattgagctactatagagtcctccggcccctgaatgcggctaatcctaaccatggagcaagcgctcacaagccagtgagttgcttgtcgtaatgcgcaagtccgtggcggaaccgactactttgggtgtccgtgtttcactttttacttttatgactgcttatggtgacaatttgatattgttaccatttagcttgtcaaattaattacaaaaggttctaaatcttacttaccaacttgcattttgataaccttgatttgaaaatcttaata

SEQ ID NO: 21558 - DNA, 629 bp, synthetic construct
  source 1..629: mol_type = other DNA
cctttgtacgcctgttttatctcccttcccaatgtaatttagaagctcttaaatcaaggctcaataggtggggcgcaacccagcgctctcatgagcaagcacttctgtctccccggtgcggttgtataaactgttcccacggttgaaaacagcctatccgttatccgctatagtacttcgagaaacctagtatcacctttggattgtcgacgcgttgcgctcagcacactaacccgtgtgtagcttgggtcgatgagtctggacataccccactggcgacagtggtccaggctgcgttggcggcctactcatggtgaaaaccatgagacgctagacatgaacaaggtgtgaagagtctattgagctactatagagtcctccggcccctgaatgcggctaatcctaaccatggagcaagtgctcacaggccagtgagttgcttgtcgtaatgcgcaagtccgtggcggaaccgactactttgggtgtccgtgtttcactttttacttttatgactgcttatggtgacaatttgatattgttaccatttagcttgtcaaattaattgcaaaagatcctaaatcttacttactaacttgcattttgataaccttgatttgaaaattttaata

SEQ ID NO: 21559 - DNA, 628 bp, synthetic construct
  source 1..628: mol_type = other DNA
tttgtacgcctgttttatctcccttcccaatgtaatttagaagctcttaaatcaaggctcaataggtggggcgcaaaccagcgctctcatgagcaagcactcctgtctccccggtgtggttgtataaactgttcccacggttgaaaacaacctatccgttatccgctatagtacttcgagaaacctagtatcacctttggattgttgacgcgttgcgctcagcacactaacccgtgtgtagcttgggtcgatgagtctggacacaccccactggcgacagtggtccaggctgcgttggcggcctactcatggtgaaaaccatgagacgctagacatgaacaaggtgtgaagagtctattgagctactatagagtcctccggcccctgaatgcggctaatcctaaccatggagcaagtgctcacaggccagtgagttgcttgtcgtaatgcgcaagtccgtggcggaaccgactactttgggtgtccgtgtttcactttttacttttatgactgcttatggtgacaatttgatattgttaccatttagcttgtcaaattaattgcaaaagatcctaaatcttacttaccaacttgcattttgacaatcttgatttgaaaatttttaata

SEQ ID NO: 21560 - DNA, 628 bp, synthetic construct
  source 1..628: mol_type = other DNA
cctttgtacgcctgttttatctccctttccaatgtaatttagaagctcttaaaccaaggctcaataggcggggcgcaacccagcgctctcatgagcaagcacttctgtctccccggtgtggttgtataaactgttcccacggttgaaaacaacctatccgttatccgctatagtacttcgagaaacctagtatcacctttggattgttgacgcgttgcgctcagcacactaacccgtgtgtagcttgggtcgatgagtctggacataccccactggcgacagtggtccaggctgcgttggcggcctactcatggtgaaaaccatgagacgctaaacatgaacaaggtgtgaagagtctattgagctactatagagtcctccggcccctgaatgcggctaatcctaaccatggggcaagcgctcacaagccagtgagttgcttgtcgtaatgcgcaagtccgtggcggaaccgactactttgggtgtccgtgtttcactttttacttttatgactgcttatggtgacaatttgatattgttaccatttagcttgtcaaattaattacaaaaggttctaaatcttacttaccaacttgcatttgataaccttgatttgaaaattttaata

SEQ ID NO: 21561 - DNA, 628 bp, synthetic construct
  source 1..628: mol_type = other DNA
cctttgtacgcctgttttatctcccttcccaatgtaatttagaagctcttaaaccaaggctcaataggcggggcgcaacccagcgctctcatgagcaagcacttctgtctccccggtgtggttgtataaactgttcccacggttgaaaacaacctatccgttatccgctatagtacttcgagaaacctagtatcacctttggattgttgacgcgttgcgctcagcacactaacccgtgtgtagcttgggtcgatgagtctggacataccccactggcgacagtggtccaggctgcgttggcggcctactcatggtgaaaaccatgagacgctaaacatgaacaaggtgtgaagagtctattgagctactatagagtcctccggcccctgaatgcggctaatcctaaccatggagcaagcgctcacaagccagtgagttgcttgtcgtaatgcgcaagtccgtggcggaaccgactactttgggtgtccgtgtttcactttttacttttatgactgcttatggtgacaatttgatattgttaccatttagcttgtcaaattaattacaaaaggttctaaatcttacttaccaacttgcatttgataaccttgatttgaaaattttaata

SEQ ID NO: 21562 - DNA, 628 bp, synthetic construct
  source 1..628: mol_type = other DNA
cctttgtacgcctgttttatctcccttcccaatgtaatttagaagcttttaaatcaaggctcaataggtggggcgcaaaccagcgctctcatgagcaagcactcctgtctccccggtgtggttgtataaactgttcccacggttgaaaacaacctatccgttatccgctatagtacttcgagaaacctagtatcacctttggattgttgacgcgttgcgctcagcacactaacccgtgtgtagcttgggtcgatgagtctggacataccccactggcgacagtggtccaggctgcgttggcggcctactcatggtgaaaaccatgagacgctagacatgaacaaggtgtgaagagtctattgagctactatagagtcctccggcccctgaatgcggctaatcctaaccatggagcaagtgctcacaggccagtgagttgcttgtcgtaatgcgcaagtccgtggcggaaccgactactttgggtgtccgtgtttcactttttacttttatgactgcttatggtgacaatttgatattgttaccatttagctgtcaaattaattgcaaaagatcctaagtcttacttaccaatttgcattttgttaaccttgatttgaaaattttaata

SEQ ID NO: 21563 - DNA, 628 bp, synthetic construct
  source 1..628: mol_type = other DNA
cctttgtacgcctgttttatctcccttcccaatgtaatttagaagcttttaaatcaaggctcaataggtggggcgcaaaccagcgctctcatgagcaagcactcctgtctccccggtgtggttgtataaactgttcccacggttgaaaacaacctatccgttatccgctatagtacttcgagaaacctagtatcacctttggattgttgacgcgttgcgctcagcacactaacccgtgtgtagcttgggtcgatgagtctggacataccccactggcgacagtggtccaggctgcgttggcggcctactcatggtgaaaaccatgagacgctagacatgaacaaggtgtgaagagtctattgagctactatagagtcctccggcccctgaatgcggctaatcctaaccatggagcaagtgctcacaggccagtgagttgcttgtcgtaatgcgcaagtccgtggcggaaccgactactttgggtgtccgtgtttcactttttacttttatgactgcttatggtgacaatttgatattgttaccatttagctgtcaaattaattgcaaaagatcctaagtcttacttaccaatttgcattttgataaccttgatttgaaaattttaata

SEQ ID NO: 21564 - DNA, 628 bp, synthetic construct
  source 1..628: mol_type = other DNA
cctttgtacgcctgttttatctcccttcccaatgtaatttagaagcttttaaatcaaggctcaataggtggggcgcaaaccagcgctctcatgagcaagcactcctgtctccccggtgtggttgtataaactgttcccacggttgaaaacaacctatccgttatccgctacagtacttcgagaaacctagtatcacctttggattgttgacgcgttgcgctcagcacactaacccgtgtgtagcttgggtcgatgagtctggacataccccactggcgacagtggtccaggctgcgttggcggcctactcatggtgaaaaccatgagacgctagacatgaacaaggtgtgaagagtctattgagctactatagagtcctccggcccctgaatgcggctaatcctaaccatggagcaagtgctcacaggccagtgagttgcttgtcgtaatgcgcaagtccgtggcggaaccgactactttgggtgtccgtgtttcactttttacttttatgactgcttatggtgacaatttgatattgttaccatttagctgtcaaattaattgcaaaagatcctaagtcttacttaccaatttgcattttgataaccttgatttgaaaattttaata

SEQ ID NO: 21565 - DNA, 520 bp, synthetic construct
  source 1..520: mol_type = other DNA
ccagtgtggtttcgagcaagcacttctgtttccccggccgcgccctatatgctgtgcaaacggcagaaaggggcaacgtcgttatccgcttgcatactacgggaaacccagtaccaccattgattgtattgagagttgcgttcagcgcctctcccccctggcgtagctcgggccgatgaggctcagaagcccccacaggtgactgtgtctgagcctgcgttggcggcctgcccgcacctcttggtgtgggacgcttaatacatgacatggtgcgaagagtctactgtgctatgtaagattcctccggcccctgaatgtggataatcctaaccactgatcccatgtgcgcaaaccagcgtgcggtgggtcgtaacgcgcaagtcggtggcggaaccaactactttgggtgaccgtgtttcctttattacctattgaatgtttatggtgacaattgcttgattcagttgttgccatttattacattcgttgacctagagtgaaaaccaactgaaccaataca

SEQ ID NO: 21566 - DNA, 519 bp, synthetic construct
  source 1..519: mol_type = other DNA
aaaacgttcgttatccggccaattacttcgagaagcttagtaccaccatggaggttgcgcagtgtttcgttccgcacaaccccagtgtagatcaggtcgatgagtcaccgcactcctcacgggcgaccgtggcggtggctgcgctggcggcctgcccatggggcaacccatgggacgcttcaatactgacatggtgcgaagagcctattgagctaattggtagtcctccggcccctgaatgcggctaatcctaactgcggagcagatacccacgagccagtgggcagtctgtcgtaatgggtaactctgcagcggaaccgactactttgggtgtccgtgtttccttttattcctacattggctgcttatggtgacaattgagagattgttaccatatagctattggattggccgtccagtgacaaacagagcgattatctatctatttgttggtttcgtaccattaaaccttagagtcctaaagaccctcaatttgattatacaattaaactctgcgaa

SEQ ID NO: 21567 - DNA, 518 bp, synthetic construct
  source 1..518: mol_type = other DNA
ccagtgtggtttcgagcaagcacttctgtttccccggttgcgtcccatatgctgtgcaaacggcaaaaaggggcaatatcgttatccgcttgcatactacgggaaacctagtaccaccattgattgtattgagggttgcgttcatcacctcttccctggtgtagctcaggccgatgaggctcagagtcccccacaggtaactgtgtctgagcctgcgttggcggcctgccctcgccttatggcgtgggacgctcactacatgacatggtgcgaagagtctactgtgctatgtaagagtcctccggcccctgaatgtggataatcctaaccactgatcccacgaacgcaagccagcgtgtagtgggtcgtaacgcgcaagtcggtggcggaaccaactactttgggtgaccgtgtttcctttattacctattgaatgtttatggtgacaattgtttgattcagttgttgccatttactacattcatcagcttagtgttaaaaccgattgaactgctaca

SEQ ID NO: 21568 - DNA, 559 bp, synthetic construct
  source 1..559: mol_type = other DNA
gggcgcaaaccagcgctctcatgagcaagcactcctgtctccccggtgtggttgtataaactgtttccacggttgaaaacaacctatccgttatccgctatagtacttcgagaaacctagtatcacctttggattgttgacgcgttgcgctcagcacactaacccgtgtgtagcttgggtcgatgagtctggacataccccactggcgacagtggtccaggctgcgttggcggcctactcatggtgaaaaccatgagacgctagacatgaacaaggtgtgaagagtctattgagctactatagagtcctccggcccctgaatgcggctaatcctaaccatggagcaagtgctcacaggccagtgagttgcttgtcgtaatgcgcaagtccgtggcggaaccgactactttgggtgtccgtgtttcactttttacttttatgactgcttatggtgacaatttgatattgttaccatttagcttgtcaaattaattgcaaaagatcctaaatcttacttaccaacttgcattttgataaccttgatttgaaaattttaata

SEQ ID NO: 21569 - DNA, 630 bp, synthetic construct
  source 1..630: mol_type = other DNA
cctttgtacgcctgttttatctcccttcccaatgtaatttagaagctcttaaatcaaggctcaataggtggggcgcaaaccagcgctctcatgagcaagcactcctgtctccccggtgtggttgtataaactgttcccacggttgaaaacaacctatccgttatccgctatagtacttcgagaaacctagtatcacctttggattgttgacgcgttgcgctcagcacactaacccgtgtgtagcttgggtcgatgagtctggacacaccccactggcgacagtggtccaggctgcgttggcggcctactcatggtgaaaaccatgagacgctagacatgaacaaggtgtgaagagtctattgagctactatagagtcctccggcccctgaatgcggctaatcctaaccatggagcaagtgctcacaggccagtgagttgcttgtcgtaatgcgcaagtccgtggcggaaccgactactttgggtgtccgtgtttcactttttacttttatgactgcttatggtgacaatttgatattgttaccatttagcttgtcaaattaattgcaaaagatcctaaatcttacttaccaacttgcattttgacaaccttgatttgaaaatttttaata

SEQ ID NO: 21570 - DNA, 629 bp, synthetic construct
  source 1..629: mol_type = other DNA
cctttgtacgcctgttttatctcccttcccaatgtaatttagaagctcttaaatcaaggctcaataggtagggcgcaaaccagcgctcttatgagcaagcactcctgtctccccggtgtggttgtataaactgttcccacggttgaaaacaacctatccgttatccgctatagtacttcgagaaacctagtatcacctttggattgttgacgcgttgcgctcagcacactaacccgtgtgtagcttgggtcgatgagtctggacataccccactggcgacagtggtccaggctgcgttggcggcctactcatggtgaaaaccatgagacgctagacatgaacaaggtgtgaagagtctattgagctactatagagtcctccggcccctgaatgcggctaatcctaaccatggagcaagtgctcacaggccagtgagttgcttgtcgtaatgcgcaagtccgtggcggaaccgactactttgggtgtccgtgtttcactttttacttttatgactgcttatggtgacaatttgatattgttaccatttagcttgtcaaattaattgcaaaagatcctaaatcttacttaccaacttgcattttgacaaccttgatttgaaaattttaata

SEQ ID NO: 21571 - DNA, 539 bp, synthetic construct
  source 1..539: mol_type = other DNA
catgagcaagcactcctgtctccccggtgtggttgtataaactgttcccacggttgaaaacaacctatccgttatccgctatagtacttcgagaaacctagtatcacctttggattgttgatgcgttgcgctcagcacactaacccgtgtgtagcttgggtcgatgagtctggacataccccactggcgacagtggtccaggctgcgttggcggcctactcatggtgaaaaccatgagacgctagacatgaacaaggtgtgaagagtctattgagctactatagagtcctccggcccctgaatgcggctaatcctaaccatggagcaagtgctcgcaggccagtgagttgcttgtcgtaatgcgcaagtccgtggcggaaccgactactttgggtgtccgtgtttcactttttacttttatgactgcttatggtgacaatttgatattgttaccatttagctgtcaaattaattgcaaaagatcctaagtcttacttaccaatttgcattttgataaccttgatttgaaaattttaata

SEQ ID NO: 21572 - DNA, 629 bp, synthetic construct
  source 1..629: mol_type = other DNA
cctttgtacgcctgttttatctcccttcccaatgtaatttagaagctcttaaaccaaggctcaataggcggggcgcaacccagcgctctcatgagcaagcacttctgtctccccggtgtggttgtataaactgttcccacggttgaaaacaacctatccgttatccgctatagtacttcgagaaacctagtatcacctttggattgttgacgcgttgcgctcagcacactaacccgtgtgtagcttgggtcgatgagtctggacataccccactggcgacagtggtccaggctgcgttggcggcctactcatggtgaaaaccatgagacgctaaacatgaacaaggtgtgaagagtctattgagctactatagagtcctccggcccctgaatgcggctaatcctaaccatggagcaagcgctcacaagccagtgagttgcttgtcgtaatgcgcaagtccgtggcggaaccgactactttgggtgtccgtgtttcactttttacttttatgactgcttatggtgacaatttgatattgttaccatttagcttgtcaaattaattacaaaaggttctaaatcttacttaccaacttgcattttgataaccttgatttgaaaattttaata

SEQ ID NO: 21573 - DNA, 629 bp, synthetic construct
  source 1..629: mol_type = other DNA
cctttgtacgcctgttttatctcccttcccaatgtaatttagaagctcttaaatcaaggctcaataggtggggcgcaaaccagcgctctcatgagcaagcactcctgtctccccggtgtggttgtataaactgttcccacggttgaaaacaacctatccgttatccgctatagtacttcgagaaacctagtatcacctttggattgttgacgcgttgcgctcagcacactaacccgtgtgtagcttaggtcgatgagtctggacataccccactggcgacagtggtccaggctgcgttggcggcctactcatggtgaaaaccatgagacgctagacatgaacaaggtgtgaagagtctattgagctactatagagtcctccggcccctgaatgcggctaatcctaaccatggagcaagtgctcacaggccagtgagttgcttgtcgtaatgcgcaagtccgtggcggaaccgactactttgggtgtccgtgtttcactttttacttttatgactgcttatggtgacaatttgatattgttaccatttagcttgtcaaattaattgcaaaagatcctgaatcttacttaccaacttgcactttgacaaccttgatttgaaaattttaata

SEQ ID NO: 21574 - DNA, 629 bp, synthetic construct
  source 1..629: mol_type = other DNA
cctttgtacgcctgttttatctcccttcccaatgtaatttagaagctcttaaatcaaggctcaataggtggggcgcaaaccagcgctctcatgagcaagcactcctgtctccccggtgtggttgtataaactgttcccacggttgaaaacaacctatccgttatccgctatagtacttcgagaaacctagtatcacctttggattgttgacgcgttgcgctcagcacactaacccgtgtgtagcttgggtcgatgagtctggacataccccactggcgacagtggtccaggctgcgttggcggcctactcatggtgaaaaccatgagacgctagacatgaacaaggtgtgaagagtctattgagctactatagagtcctccggcccctgaatgcggctaatcctaaccatggagcaagtgctcacaggccagtgagttgcttgtcgtaatgcgcaagtccgtggcggaaccgactactttgggtgtccgtgtttcactttttacttttatgactgcttatggtgacaatttgatattgttaccatttagcttgtcaaattaattgcaaaagatcctgaatcttacttaccaacttgcattttgacaaccttgatttgaaaattttaata

SEQ ID NO: 21575 - DNA, 629 bp, synthetic construct
  source 1..629: mol_type = other DNA
cctttgtacgcctgttttatctcccttcccaatgtaatttagaagctcttaaatcaaggctcaataggtggggcgcaaaccagcgctctcatgagcaagcactcctgtctccccggtgtggttgtataaactgttcccacggttgaaaacaacctatccgttatccgctatagtacttcgagaaacctagtatcacctttggattgttgacgcgttgcgctcagcacactaacccgtgtgtagcttgggtcgatgagtctggacataccccactggcgacagtggtccaggctgcgttggcggcctactcatggtgaaaaccatgagacgctagacatgaacaaggtgtgaagagtctattgagctaccatagagtcctccggcccctgaatgcggctaatcctaaccatggagcaagtgctcacaggccagtgagttgcttgtcgtaatgcgcaagtccgtggcggaaccgactactttgggtgtccgtgtttcactttttacttttatgactgcttatggtgacaatttgatattgttaccatttagcttgtcaaattaattgcaaaagatcctaaatcttacttaccaatttgcattttgacaaccttgatttgaaaattttaata

SEQ ID NO: 21576 - DNA, 629 bp, synthetic construct
  source 1..629: mol_type = other DNA
cctttgtacgcctgttttatctcccttcccaatgtaatttagaagctcttaaatcaaggctcaataggcggggcgcaacccagcgctctcatgagcaagcacttctgtctccccggtgtggttgtataaactgttcccacggttgaaaacaacctatccgttatccgctatagtacttcgagaaacctagtatcacctttggattgttgacgcgttgcgctcagcacactaacccgtgtgtagcttgggtcgatgagtctggacataccccactggcgacagtggtccaggctgcgttggcggcctactcatggtgaaaaccatgagacgctaaacatgaacaaggtgtgaagagtctattgagctactatagagtcctccggcccctgaatgcggctaatcctaaccatggagcaagcgctcacaagccagtgagttgcttgtcgtaatgcgcaagtccgtggcggaaccgactactttgggtgtccgtgtttcactttttacttttatgactgcttatggtgacaatttgatattgttaccatttagcttgtcaaattaattacaaaaggttctaaatcttacttaccaacctgcattttgataaccttgatttgaaaattttaata

SEQ ID NO: 21577 - DNA, 516 bp, synthetic construct
  source 1..516: mol_type = other DNA
ccagtgtggtttcgagcaagcacttctgttttcccggttgcgtcccatatgctgtgcaaacggcaaaaaggggcaatatcgttacccgcttgtatactacgggaaacctagtaccaccattgattgtattgagagttgcgctcatcacctttccccggtgtagctcaggccgatgaggctcagaatcccccacaggtgactgtgtctgagcctgcgctggcggcctgccctcgccttatggcgcgggacgcttaatacatgacatggtgcgaagagtctactgtgctatgcaagagtcctccggcccctgaatgtggataatcctaaccactgatcccacgcacgcaaaccagtgtgtagtgggtcgtaacgcgcaagtcggtggcggaaccaactactttgggtgaccgtgtttcctttattacctattgaatgtttatggtgacaattgtttgattcagttgttgccattttctacattcatttacctagtgtcaaaccaattgaactgttaca

SEQ ID NO: 21578 - DNA, 629 bp, synthetic construct
  source 1..629: mol_type = other DNA
cctttgtacgcctgttttatctcccttcccaatgtaatttagaagctcttaaatcaaggctcaataggtggggcgcaaaccagcgctctcatgagcaagcactcctgtctccccggtgtggttgtataaactgtttccacggttgaaaacaacctatccgttatccgctatagtacttcgagaaacctagtatcacctttggattgttgacgcgttgcgctcagcacactaacccgtgtgtagcttgggtcgatgagtctggacgtaccccactggcgacagtggtccaggctgcgttggcggcctactcatggtgaaaaccatgagacgctagacatgaacaaggtgtgaagagtctattgagctactatagagtcctccggcccctgaatgcggctaatcctaaccatggagcaagtgctcacaggccagtgagttgcttgtcgtaatgcgcaagtccgtggcggaaccgactactttgggtgtccgtgtttcactttttacttttatgactgcttatggtgacaatttgatattgttaccatttagcttgtcaaattaattgcaaaagatcctaaatcttacttatcaacttgcattttgacaaccttgatttgaaaattttaata

SEQ ID NO: 21579 - DNA, 628 bp, synthetic construct
  source 1..628: mol_type = other DNA
ctttgtacgcctgttttatctcccttcccaatgtaatttagaagctcttaaatcaaggctcaataggtggggcgcaaaccagcgctctcatgagcaagcactcctgtctccccggtgtggttgtataaactgttcccacggttgaaaacaacctatccgttatccgctatagtacttcgagaaacctagtatcacctttggattgttgacgcgttgcgctcagcacactaacccgtgtgtagcttgggtcgatgagtctggacgtaccccactggcgacagtggtccaggctgcgttggcggcctactcatggtgaaaaccatgagacgctagacatgaacaaggtgtgaagagtctattgagctactatagagtcctccggcccctgaatgcggctaatcctaaccatggagcaagtgctcacaggccagtgagttgcttgtcgtaatgcgcaagtccgtggcggaaccgactactttgggtgtccgtgtttcactttttacttttatgactgcttatggtgacaatttgatattgttaccatttagcttgtcaaattaattgcaaaagatcctaaatcttacttaccaacttgcattttgacaaccttgatttgaaaattttaata

SEQ ID NO: 21580 - DNA, 628 bp, synthetic construct
  source 1..628: mol_type = other DNA
ctttgtacgcctgttttatctcccttcccaatgtaatttagaagctcttaaatcaaggctcaataggtggggcgcaaaccagcgctctcatgagcaagcactcctgtctccccggtgtggttgtataaactgttcccacggttgaaaacaacctatccgttatccgctatagtacttcgagaaacctagtatcacctttggattgttgacgcgttgcgctcagcacactaacccgtgtgtagcttgggtcgatgagtctggacataccccactggcgacagtggtccaggctgcgttggcggcctactcatggtgaaaaccatgagacgctagacatgaacaaggtgtgaagagtctattgagctactatagagtcctccggcccctgaatgcggctaatcctaaccatggagcaagtgctcacaggccagtgagttgcttgtcgtaatgcgcaagtccgtggcggaaccgactactttgggtgtccgtgtttcactttttacttttatgactgcttatggtgacaatttgatattgttaccatttagcttgtcaaattaattgcaaaagatcctaaatcttactcaccaatttgcattttgacaaccttgatttgaaaattttaata

SEQ ID NO: 21581 - DNA, 515 bp, synthetic construct
  source 1..515: mol_type = other DNA
ccagtgtggtttcgagcaagcacttctgttttcccggttgcgtcccatatgctgtgcaaacggcaaaaagggacaatatcgttacccgcttgtatactacgggaaacctagtaccaccattgattgtattgagggttgcgctcatcacctttcccggtgtagctcaggctgatgaggctcagaatcccccacaggtaactgtgtctgagcctgcgttggcggcctgccctcgccttatggcgtgggacgctcactacatgacatggtgcgaagagtctactgtgctatacaagagtcctccggcccctgaatgtggataatcctaaccactgatcccacgtacgcaaaccagcgtgtagtgggtcgtaacgcgcaagtcggtggcggaaccaactactttgggtgaccgtgtttcctttattacctattgaatgtttatggtgacaattgtttgattcagttgttaccatttaccacattcattaacctagagtcaaaccgattgaactgctaca

SEQ ID NO: 21582 - DNA, 627 bp, synthetic construct
  source 1..627: mol_type = other DNA
tttgtacgcctgttttatctcccttcccaatgtaatttagaagctcttaaatcaaggctcaataggtggggcgcaaaccagcgctctcatgagcaagcactcctgtctccccggtgtggttgtataaactgttcccacggttgaaaacaacctatccgttatccgctatagtacttcgagaaacctagtatcacctttggattgttgacgcgttgcgctcagcacactaacccgtgtgtagcttgggtcgatgagtctggacataccccactggcgacagtggtccaggctgcgttggcggcctactcatggtgaaaaccatgagacgctagacatgaacaaggtgtgaagagtctattgagctactatagagtcctccggcccctgaatgcggctaatcctaaccatggagcaagtgctcacaggccagtgagttgcttgtcgtaatgcgcaagtccgtggcggaaccgactactttgggtgtccgtgtttcactttttacttttatgactgcttatggtgacaatttgatattgttaccatttagcttgtcaaattaattgcaaaagatcctgaatcttacttaccaacttgtattttgacaaccttgatttgaaaattttaaca

SEQ ID NO: 21583 - DNA, 627 bp, synthetic construct
  source 1..627: mol_type = other DNA
tttgtacgcctgttttatctcccttcccaatgtaatttagaagctcttaaatcaaggctcaataggtggggcgcaaaccagcgctctcatgagcaagcactcctgtctccccggtgtggttgtataaactgttcccacggttgaaaacaacctatccgttatccgctatagtacttcgagaaacctagtatcacctttggattgttgacgcgttgcgctcagcacactaacccgtgtgtagcttgggtcgatgagtctggacacaccccactggtgacagtggtccaggctgcgttggcggcctactcatggtgaaaaccatgagacgctagacatgaacaaggtgtgaagagtctattgagctactatagagtcctccggcccctgaatgcggctaatcctaaccatggagcaagtgctcacaggccagtgagtagcttgtcgtaatgcgcaagtccgtggcggaaccgactactttgggtgtccgtgtttcactttttacctttatgactgcttatggtgacaatttgatattgttaccatttagcttgtcaaattaattgcaaaagacactaaatcttacttaccaacttgcattttgataaccttgatttgaaaattttaata

SEQ ID NO: 21584 - DNA, 627 bp, synthetic construct
  source 1..627: mol_type = other DNA
tttgtacgcctgttttatctcccttcccaatgtaatttagaagcttttaaatcaaggctcaataggtggggcgcaaaccagcgctctcatgagcaagcactcctgtctccccggtgtggttgtataaactgttcccacggttgaaaacaacctatccgttatccgctatagtacttcgagaaacctagtatcacctttggattgttgacgcgttgcgctcagcacactaacccgtgtgtagcttgggtcgatgagtctggacataccccactggcgacagtggtccaggctgcgttggcggcctactcatggtgaaaaccatgagacgctagacatgaacaaggtgtgaagagtctattgagctactatagagtcctccggcccctgaatgcggctaatcctaaccatggagcaagtgctcacaggccagtgagttgcttgtcgtaatgcgcaagtccgtggcggaaccgactactttgggtgtccgtgtttcactttttacttttatgactgcttatggtgacaatttgatattgttaccatttagcttgtcaaattaattgcaaaagatcctgaatcttacttaccaacttgcattttgacaaccttgatttaaaaattttaata

SEQ ID NO: 21585 - DNA, 627 bp, synthetic construct
  source 1..627: mol_type = other DNA
tttgtacgcctgttttatctcccttcccaatgtaatttagaagctcttaaatcaaggctcaataggtggggcgcaaaccagcgctctcatgagcaagcactcctgtctccccggtgtggttgtataaactgttcccacggttgaaaacaacctatccgttatccgctatagtacttcgagaaacctagtatcacctttggattgttgacgcgttgcgctcagcacactaacccgtgtgtagcttgggtcgatgagtctggacataccccactggcgacagtggtccaggctgcgttggcggcctactcatggtgaaaaccatgagacgctagacatgaacaaggtgtgaagagtctattgagctactatagagtcctccggcccctgaatgcggctaatcctaaccatggagcaagtgctcacaggccagtgagttgcttgtcgtaatgcgcaagtccgtggcggaaccgactactttgggtgtccgtgtttcactttttacttttatgactgcttatggtgacaatttgatattgttaccatttagcttgtcaaattaattgcaaaaggtcctaaatcttatttaccaacttgcattttgacaatcttggtttaaaaattttaata

SEQ ID NO: 21586 - DNA, 659 bp, synthetic construct
  source 1..659: mol_type = other DNA
ataaataaagaccaataggagtccaacatccagttggatcgcggtcaagcacttctgtctccccggacctagtagtgataggctgtacccacggccgaagatgaacccgtccgttatccggccagctacttcgagaagcctagtaacatcaaagatctgtcttggcgtttcgctcagcgcgttccccccgcgtagatcgggctgatgggtctccgcataccccacgggcgaccgtggcggaggccgcgtggcggcccgcctatggcgaaagccataggacgccatttcagtgacagggtgtgaagagcctattgagctagttggtagtcctccggcccctgaatgcggctaatcctaaccacggagcgtccaccagcaaaccagctgggagggcgtcgtaacgggtaactctgtggcggaaccgactactttgggtgtccgtgtttccttttgatcctatattggctgcttatggtgacaacgataagttgttatcataaagcttttgggttggccacctggaaaaagttatcagtgtttgatattattcggctttcacgcctaccaataaaacaagctttatacttgctagtttcattttatccatctgaggatattactgaattttacctacaacttttgctcactctaacagcaaa

SEQ ID NO: 21587 - DNA, 538 bp, synthetic construct
  source 1..538: mol_type = other DNA
gctcacgcggctgaaggagaaaacgttcgttacccggccaattacttcgagaaacctagtaccactatgaaggttgcgcagcgtttcgctccgcacaaccccagtgtagatcaggccgatgagtcaccgcatccctcacgggcgaccgtggcggtggctgcgttggcggcctgcccatggggcaacccatgggacgcttcaatactgacatggtgcgaagagtctattgagctaattggtagtcctccggcccctgaatgcggctaatcctaactgcggagcagatacccgcgcaccagcgggcagtctgtcgtaatgggcaactctgcagcggaaccgactactttgggtgtccgtgtttccttttattcttatactggctgcttatggtgacaattgagagattgttaccatatagctattggattggccacccggtgactaacagagcgattatctaccaatttgttggttttgtgccattggacttttcaaccctaagaaccctcaatttcatattagtgcttaacacagcaaa

SEQ ID NO: 21588 - DNA, 604 bp, synthetic construct
  source 1..604: mol_type = other DNA
caccatccgacccacagggtgtagtgctctggtattttgtacctttgcacgcctgttttcccatcgtacccctccttaaattcctccccaagtaacgttagaagtttaaggaaaccaatgtacaataggaagcatcacatccagtggtgtaatgtacaagcacttctgtttccccggagcgaggtataagtggtacccaccgctgaaagcctttaaccgttatccgccaatcaactacgtaatggctagtattatcatgtttgtaatctggcgttcgatcaggtggttccccccactagtttggtcgatgaggctaggaactccccacgggcgaccgtgtcctagcctgcgtggcggccaacccagctcttgctgggacgcctttttatagacatggtgtgaagacctgcatgtgcttgattgtgagtcctccggcccctgaatgcggctaaccttaaccccggagccttgcagcataatccaatgttgttgaggtcgtaatgagcaattctgggacgggaccgactactttgggtgtccgtgtttccttttattctttatattgtcttatggtcacagcatatatagtatatatactgtgatc

SEQ ID NO: 21589 - DNA, 622 bp, synthetic construct; identical to SEQ ID NO: 730
  source 1..622: mol_type = other DNA

SEQ ID NO: 21590 - DNA, 616 bp, synthetic construct
  source 1..616: mol_type = other DNA
ttaaaactgagtgtgggttgtacccacccacactgtctacggacgtagtacacttgtatctcggtacacttgtacgccagtttgcctccccttccctttatgtaacgcaagaagcttaaacacaacgaccaacaggtggtaacaagccatgttgcctacggtcaagcactcctgtctccccggtacaaagggtgttaagtcttacccaagactgaagccttgagtatcgttatccgcataactactggacaaagcctagtaacaccccacgatataggatggttggtcgctccaccagtgtaccccctggtagacctggcagatgaggctagagtttccccactggcgacagtgttctagcctgcgtggctgcctgctcccttatgggagaagccattctattgacaaggtgtgaagagccccgtacgctagttatgagtcctccggcccctgaatgcggctaatccaaccctgcagccattgcatgggaaccaccatgtagatggtcgtaatgagcaattgcgggacggaaccgactactttgggtgtccgtgtttcttgtttttcttatcaattgcttatggtgacaatatatactgctaatatattgttcacc

SEQ ID NO: 21591 - DNA, 593 bp, synthetic construct
  source 1..593: mol_type = other DNA
tgggtgtagtactctggtattatgtacctttgtatgcctgtttattcccaaaccccctcccgttacatttccaacccctgtaacgttagaagtttggaatttaacagtacaataggaggcaccatacccaatggtgtaatgtacaagcacttctgttttcccggagcgaggtataggtggtacccaccgctgaaagcctttaaccgttatccgccaaccaactacgtaacagctagtagcattttgttgttgactggacgttcgatcaggtggtttacccccccactagtttggtcgatgaggctggaagttccccacgggtgaccgtgttccagcctgcgtggcggccaacccagcttatgctgggacgccctttcaatgacatggtgtgaagactcacatgtgcttggttgtgaatcctccggcccctgaatgcggctaaccctaaccccggagccttgcatcacaatccagtgatgttagggtcgtaatgagtaattctgggatgggaccgactactttgggtgtccgtgtttctcatttttctttgaattgtcttatggtcacagcatatagaaatatatactgtgatc

SEQ ID NO: 21592 - DNA, 621 bp, synthetic construct; identical to SEQ ID NO: 63
  source 1..621: mol_type = other DNA

SEQ ID NO: 21593 - DNA, 614 bp, synthetic construct; identical to SEQ ID NO: 53
  source 1..614: mol_type = other DNA

SEQ ID NO: 21594 - DNA, 614 bp, synthetic construct
  source 1..614: mol_type = other DNA
taaaactggatccaggttgttcccacctggatctcctattgggagttgtactctattattccggtaattttgtacgccagttttatcttccccctccccaattgtaacttagaaggttatcaatacgaccaataggtggtagttagccaaactaccaaaggtcaagcacttctgtttccccggtcaaagttgatatgctccaacagggcaaaaacaactgagatcgttatccgcaaagtgcctacgcaaagcctagtaacacctttgaagatttatggttggtcgttccgctatttcccatagtagacctggcagatgaggctagaaatcccccactggcgacagtgttctagcctgcgtggctgcctgcgcaccccttgggtgcgaagccatacattggacaaggtgtgaagagccccgtgtgctcactttgagtcctccggcccctgaatgtggctaaccttaaccctgcagctagtgcatgtaatccaacatgttgctagtcgtaatgagcaattgcgggacgggaccaactactttgggtgtccgtgtttcactttttccttttaatattgcttatggtgacaatatatatagctatatatattgacacc

SEQ ID NO: 21595 - DNA, 614 bp, synthetic construct
  source 1..614: mol_type = other DNA
taaaactgggtccaggttgttcccacctggatctcctattgggagttgtactctattattccggtaattttgtacgccagttttatcttccccctccccaattgtaacttagaaggttatcaatacgaccaataggtggtagttagccaaactaccaaaggtcaagcacttctgtttccccggtcaaagttgatatgctccaacagggcaaaaacaactgagatcgttatccgcaaagtgcctacgcaaagcctagtaacacctttgaagatttatggttggtcgttccgctatttcccatagtagacctggcagatgaggctagaaatcccccactggcgacagtgttctagcctgcgtggctgcctgcgcaccccttgggtgcgaagccatacattggacaaggtgtgaagagccccgtgtgctcactttgagtcctccggcccctgaatgtggctaaccttaaccctgcagctagtgcatgtaatccaacatgttgctagtcgtaatgagtaattgcgggacgggaccaactactttgggtgtccgtgtttcactttttccttttaatattgcttatggtgacaatatatatagctatatatattgacacc

SEQ ID NO: 21596 - DNA, 614 bp, synthetic construct
  source 1..614: mol_type = other DNA
taaaactgggtccaggttgttcccacctggatctcctattgggagttgtactctattattccggtaattttgtacgccagttttatctttcccctccccaattgtaacttagaaggttatcaatacgaccaataggtggtagttagccaaactaccaaaggtcaagcacttctgtttccccggtcaaagttgatatgctccaacagggcaaaaacaactgagatcgttatccgcaaagtgcctacgcaaagcctagtaacacctttgaagatttatggttggtcgttccgctatttcccatagtagacctggcagatgaggctagaaatcccccactggcgacagtgttctagcctgcgtggctgcctgcgcaccccttgggtgcgaagccatacattggacaaggtgtgaagagccccgtgtgctcactttgagtcctccggcccctgaatgtggctaaccttaaccctgcagctagtgcatgtaatccaacatgttgctagtcgtaatgagtaattgcgggacgggaccaactactttgggtgtccgtgtttcactttttccttttaatattgcttatggtgacaatatatatagctatatatattgacacc

SEQ ID NO: 21597 - DNA, 614 bp, synthetic construct
  source 1..614: mol_type = other DNA
taaaactgggtccaggttgttcccacctggatctcctattgggagttgtactctattattccggtaattttgtacgccagttttatcttccccctccccaattgtaacttagaaggttatcaatacgaccaataggtggtagttagccaaactaccaaaggtcaagcacttctgtttccccggtcaaagttgatatgctccaacagggcaaaaacaactgagatcgttatccgcaaagtgcctacgcaaagcctagtaacacctttgaagatttatggttggttgttccgctatttcccatagtagacctggcagatgaggctagaaatcccccactggcgacagtgttctagcctgcgtggctgcctgcgcaccccttgggtgcgaagccatacattggacaaggtgtgaagagccccgtgtgctcactttgagtcctccggcccctgaatgtggctaaccttaaccctgcagctagtgcatgtaatccaacatgttgctagtcgtaatgagtaattgcgggacgggaccaactactttgggtgtccgtgtttcactttttccttttaatattgcttatggtgacaatatatatagctatatatattgacacc

SEQ ID NO: 21598 - DNA, 614 bp, synthetic construct
  source 1..614: mol_type = other DNA
taaaactggatccaggttgttcccacctggatctcctattgggagttgtactctattattccggtaattttgtacgccagttttatcttccccctccccaattgtaacttagaaggttatcaatacgaccaataggtggtagttagccaaactaccaaaggtcaagcacttctgtttccccggtcaaagttgatatgctccaatagggcaaaaacaactgagatcgttatccgcaaagtgcctacgcaaagcctagtaacacctttgaagatttatggttggtcgttccgctatttcccatagtagacctggcagatgaggctagaaatcccccactggcgacagtgttctagcctgcgtggctgcctgcgcaccccttgggtgcgaagccatacattggacaaggtgtgaagagccccgtgtgctcactttgagtcctccggcccctgaatgtggctaaccttaaccctgcagctagtgcatgtaatccaacatgttgctagtcgtaatgagcaattgcgggacgggaccaactacattgggtgtccgtgtttcactttttccttttattattgcttatggtgacaatatatatagctatatatattgacacc

SEQ ID NO: 21599 - DNA, 565 bp, synthetic construct; identical to SEQ ID NO: 612
  source 1..565: mol_type = other DNA

SEQ ID NO: 21600 - DNA, 657 bp, synthetic construct; identical to SEQ ID NO: 796
  source 1..657: mol_type = other DNA

SEQ ID NO: 21601 - DNA, 611 bp, synthetic construct
  source 1..611: mol_type = other DNA
acactggtatcgtggtacctttgtacgcctgttttatacccccttccccgcaactttagaagcatcaaaagcaccgctcaatagtcaccacacccccagtgtggtttcgagcaagcacttctgttttcccggttgcgtcccatatgctgtgcaaacggcaaaaagggacaatatcgttacccgcttgtatactacgggaaacctagtaccaccattgattgtattgagagttgcgctcatcacctttccccggtgtagctcaggccgatgaggctcagaatcccccacaggtgactgtgtctgagcctgcgttggcggcctgccctcgccttatggcgtgggacgcttaatgcatgacatggtgcgaagagtctactgtgctatgcaagagtcctccggcccctgaatgtggctaatcctaaccactgatcccacgcacgcaaaccagtgtgtagtgggtcgtaacgcgcaagtcggtggcggaaccaactactttgggtgaccgtgtttcctttattacctattgaatgtttatggtgacaattgtttgattcagttgttgccattctctacattcatttacccagtgtcaaaccaattgaactgttaca

SEQ ID NO: 21602 - DNA, 603 bp, synthetic construct
  source 1..603: mol_type = other DNA
tgtacccacccacactgtccacggacgtagtgctctcatattacggtatgtttgcacgccagtttttcccccccttcccccttttgtaactttagaagcttgtacttaatctgaccaataggcagtagtaatccatactacttacggtcaagcacttctgttaccccggtatgcggagaataggctctaaaagggctgaagcttcaagtatcgttatccgcacaattactacgcaaagcttagtaacttcccaagaaattctttggttggtcgctccgctggtaccccaccagtagacttggcagatgaggctgagtaatccccactggcgacagtgactcagcctgcgtggctgcctacacacctggcaacaggtgtgaagccatagaaaggacagggtgtgaagagccccgtgtgctaattgtgattcctccggcccctgaatgcggctaatccaaccccacatccaatgcgcataaaccaatgcgtatttggtcgtaatgggtaactgtgggacggaaccgactactttgggtgtccgtgtttccttttattctttaaattagttcatggtgacaagtataagaatttatatttgtcatc

SEQ ID NO: 21603 - DNA, 518 bp, synthetic construct
  source 1..518: mol_type = other DNA
aaacgttcgttacccggccaattacttcgaaaaacctagtaccaccatggaggttgcgaggtgtttcgctccgcacaaccccagtgtagatcaggtcgatgagtcaccgcgttccccacgggcgaccgtggcggtggctgcgttggcggcctgcccatggggcaacccgtgggacgcttcaatactgacatggtgcgaagagtctattgagctaattggtagtcctccggcccctgaatgcggctaatcctaactgcggagcagatgcccgcaagccagcgggtattctgtcgtaacgggcaactctgcagcggaaccgactactttgggtgtccgtgtttccttttatccttacaatggctgcttatggtgacaattgaaagattgttaccatatagctattggattggccacccggtaacaaatagagcgcttgtttatttatttgttggttttgtgccgctgaactacaaagtgttaagtactctcaattttattttatcactcaattcagtgaa

SEQ ID NO: 21604 - DNA, 634 bp, synthetic construct
  source 1..634: mol_type = other DNA
tagaagctacgctcaaacggtcaacagatagtccagtaatccagctgggccacgaccaagcacttctgtttccccggacagagtaccaataagctgctcgcgcggctgaaggggaaaacgttcgttacccggccaattacttcgagaaacctagtaccgccatggacgttgcgcagcgtttcgctccacacaaccccagtgtagatcaggtcgatgagccaccgcattccccacgggcgaccgtggcggtggctgcgttggcggcctgcccatggggtaacccatgggacgcttcaatacagacatggtgcgaagagtctattgagctaattggtagtcctccggcccctgaatgcggctaatcctaactgcggagcaggtacccacaacccagtgggtcacctgtcgtaatgggcaactctgcagcggaaccgactactttgggtgtccgtgtttccttttaacctttacactggctgcttatggtgacaattgaaagattgttaccatatagctattggattggccatcctgtgagtaatagagcgattgtatacttatttgttggctttataccactcaatttgaaagctttacagacactgaattatattgtggcattaaacacagcaaa

SEQ ID NO: 21605 - DNA, 514 bp, synthetic construct
  source 1..514: mol_type = other DNA
gattgtacccacggtcgaaaacggctgacccgttatccgcttaagtacttcgagaagcctagtatcaccttggaatcttcgacgcgttgcgctcagcactctaccccgagtgtagcttaggccgatgagtctgggcataccccaccggcgacggtggcccaggctgcgttggcggcctacccatggctaacgccatgggacgctagttgtgaacaaggtgtgaagagcctattgagctacttaagagtcctccggcccctgaatgcggctaatcctaaccacggagcaagtgctcacaaaccagtgagtggcttgtcgtaacgcgcaagtctgtggcggaaccgactactttgggtgtccgtgtttccttttatttttattatggctgcttatggtgacaatctaagattgttatcatatagcatttggattggccatccggtgatttcaaaagcgacacatttgtcctattgttttactgtatttatctacttgctacatccatccaaccata

SEQ ID NO: 21606 - DNA, 616 bp, synthetic construct
  source 1..616: mol_type = other DNA
gttttatctcccttcccaatgtaatttagaagctcttaaatcaaggctcaataggtggggcgcaaaccagcgctctcatgagcaagcactcctgtctccccggtgtggttgtataaactgttcccacggttgaaaacaacctatccgttatccgctatagtacttcgagaaacctagtatcacctttggattgttgacgcgttgcgctcagcacactaacccgtgtgtagcttgggtcgatgagtctggacataccccactggcgacagtggtccaggctgcgttggcggcctactcatggtgaaaaccatgagacgctagacatgaacaaggtgtgaagagtctattgagctactatagagtcctccggcccctgaatgcggctaatcctaaccatggagcaagtgctcacaggccagtgagttgcttgtcgtaatgcgcaagtccgtggcggaaccgactactttgggtgtccgtgtttcactttttacttttatgactgcttatggtgacaatttgatattgttaccatttagcttgtcaaattaattgcaaaagatcctaaatcttacttaccaacttgcattttgacaaccttgatttgaaaattttaata

SEQ ID NO: 21607 - DNA, 670 bp, synthetic construct
  source 1..670: mol_type = other DNA
gtgctcctgttttacgcaccctcccccgacagcaacttagaagatttccacacacggtcaataggcggctcagtatgccaactgggtcatgaccaagcacttctgtctccccggactgagtatcaataagctgctcacgtggctgaaggagaaaacgttcgttatccggccaattacttcgagaagcttagtaccaccatggaggttgcgcagtgtttcgttccgcacaaccccagtgtagatcaggtcgatgagtcaccgcactcctcacgggcgactgtggcggtggctgcgctggcggcctgcccatggggcaccccatgggacgcttcaatactgacatggtgcgaagagcctattgagctaattggtaatcctccggcccctgaatgcggctaatcctaactgcggagcagataccctcgagccagtgggcagtctgtcgtaatgggcaactctgcagcggaaccgactactttgggtgtccgtgtttccttttattcctatattggctgcttatggtgacaattgagagattgttaccatatagctattggattggccatccagtgacaaacagagcgattatctacttatttgttggctttgtaccattaaatcttggagtccttaagaccctcaacttgattatacaatttaactctgcgaa

SEQ ID NO: 21608 - DNA, 614 bp, synthetic construct
  source 1..614: mol_type = other DNA
ttaaaactgggtccaggttgttcccacctggatctcctattgggagttgtactctattattccggtaattttgtacgccagttttatctccccttccccaattgcaacttagaagtttatcaatacgaccaataggtggtagttagccaaactaccaaaggtcaagcacttctgtttccccggtcaaagttgatatgctccaacagggcaaaaacaactgagatcgttatccgcaaagtgcctacgcaaagcctagtaacacctttgaagatttatggttggtcgttccgctatttcccatagtagacctggcagatgaggctagaaatcccccactggcgacagtgctctagcctgcgtggctgcctgcgcaccccttgggtgcgaagccatacattggacaaggtgtgaagagccccgtgtgctcactttgagtcctccggcccctgaatgtggctaaccttaaccctgcagctagtgcatgtaatccaacatgttgctagtcgtaatgagtaattgcgggacgggaccaactactttgggtgtccgtgtttcactttttccttttaatattgcttatggtgacaatatatatagctatatatattgacacc

SEQ ID NO: 21609 - DNA, 604 bp, synthetic construct
  source 1..604: mol_type = other DNA
gtcgcggttgttcccaccacgactatctacggatgtagtgctcttgtattccggtacacttgcacgccagttttgttaccctccccacattgtaacttagaagattaacacaaagaccaataggcggcaatgaaccacattgtcaacggtcaagcacttctgtctccccggtcaatctggatatgctttaccaaaggcaaaaactggagcgatcgttatccgcaaggtgcctacgggaaacctagtagcactctttatttgatctggttggttgttcagccgttaaacccaaacggtaaacctggcagatgaggctggaaaatccccaccagcgatggtgttccagcctgcgtggctgcctgcacacccgaaagggtgtgaagccttttcaaagacagggtgcgaagagtctactgtgctcaccttgattcctccggcccctgaatgtggctaatcctaaccccgcagctgtagtgtgcaatccagcacatttgcagtcgtaatgggtaactgcgggatggaaccaactactttgggtgtccgtgtttctctttttacctttatatttgcttatggtgacaattatacagatatagttgtcatc

SEQ ID NO: 21610 - DNA, 564 bp, synthetic construct
  source 1..564: mol_type = other DNA
aggtggggcgcaaaccagcgctctcatgagcaggcactcctgtctccccggtgtggttgtataaactgttcccacggttgaaaacaacctatccgttatccgctatagtacttcgagaaacctagtatcacctttggattgttgacgcgttgcgctcagcacactaacccgtgtgtagcttgggtcgatgagtctggacacaccccactggcgacagtggtccaggctgcgttggcggcctactcatggtgaaaaccatgagacgctagacatgaacaaggtgtgaagagtctattgagctactatagagtcctccggcccctgaatgcggctaatcctaaccatggagcaagtgctcacaggccagtgagttgcttgtcgtaatgcgcaagtccgtggcggaaccgactactttgggtgtccgtgtttcactttttacttttatgactgcttatggtgacaatttgatattgttaccatttagcttgtcaaattaattgcaaaagatcctaaatcttacttatcaacttgcattttgacaaccttgatttgaaaattttaata

SEQ ID NO: 21611 - DNA, 561 bp, synthetic construct
  source 1..561: mol_type = other DNA
cccggactgagtatcaataggctgctcgcgtggctgatggagaaaacgtccgttacccggccaattacttcgagaaacctagtaccaccatgaaagttgcgcagcgtttcgctccgcacaaccccagtgtagatcaggtcgatgagtcactgcgttccccacgggcgaccgtggcagtggctgcgttggcggcctgcccatggggtatcccatgggacgcttcaatactgacatggtgcgaagagtctattgagctaattggtagtcctccggcccctgaatgcggctaatcctaactgcggagcagatacccacgcaccagtgggcagtctgtcgtaacgggcaactctgcagcggaaccgactactttgggtgaccgtgtttccttttattctaatactggctgcttatggtgacaattgaaagattgttaccatatagctattggattggccatccggtaacaaacagagcaattatttacctgtttattggttttatacctctcaatcacaaggctataaatactctcaacctcattttagcacttaacacagtaaa

SEQ ID NO: 21612 - DNA, 645 bp, synthetic construct; identical to SEQ ID NO: 780
  source 1..645: mol_type = other DNA

SEQ ID NO: 21613 - DNA, 563 bp, synthetic construct
  source 1..563: mol_type = other DNA
accctggaccgagtatcaataagctactcacgtggctgaaggagaaaacgttcgttacccggccaattacttcgagaaacctagtaccgccatgaaagttgcgcagcgtttcgctccgcacgaccccagtgtagatcaggctgatgagtcaccgcgttccccacgggtgaccgtggcggtggctgcgttggcggcctgcccttggggcaacccaagggacgcttcaatactgacatggtgcgaagagtctattgagctaattggtagtcctccggcccctgaatgcggctaatcccaactgcggagcagatacccacataccagtgggcagtctgtcgtaatgggcaactctgcagcggaaccgactactttgggtgtccgtgtttcctttatttctcacactggctgcttatggtgacaattgagagattgttgccatatagctattggattggccatccggtgtctaatagagcaattatctacctttttgttggatttatcccacttaactataaagcactcaaaacactaatatacattgtggatcttaacacaacaaa

SEQ ID NO: 21614 - DNA, 563 bp, synthetic construct
  source 1..563: mol_type = other DNA
ccccggaccaagtatcaataaactgctagcgcggttgaaggagaaaacgtccgttacccggccaattacttcgaaaaacctagtaccaccatggatgttgcgcagtgtttcgctccgcacaaccccagtgtagatcaggccgatgagccaccgcattccccacgggcgaccgtggcggtggctgcgctggcggcctgcccatggggcaacccatgggacgcttcaatactgacatggtgtgaagagtctattgagctaattggtagtcctccggcccctgaatgcggctaatcctaactgcggagcagatgcccacatgccagtgggcagtctgtcgtaacgggcaactctgcagcggaaccgactactttgggtgtccgtgtttcctttttaaccttgtattggctgcatatggtgacaattgtaagattgttaccatatagctattggattggccatccggtgacgaacagagcaatcatttatttgtttgttggttttattccattgaatctcaaagtttggaacactctaaattttattatttcactcaacacaacaaa

SEQ ID NO: 21615 - DNA, 618 bp, synthetic construct
  source 1..618: mol_type = other DNA
ttaaaactgggagtgggttgttcccacccactccacccatgcggtgttgtactctgttattacggtaactttgtacgccagttttctccacccttccccacaatgtaacttagaagtttgtacaatatgaccaataggtgacaattatccagattgtcaaaggtcaagcacttctgtttccccggtcaatgaggatatgctttacccaaggcaaaaaccttaaagatcgttatccccacactgcctacacagagcctagtatcacttttgatgtagttaggttggtcgctccctgcaaacccagcagtagacctggcagatgaggctggacattccccactggcgacagtggtccagcctgcgtggctgcctgctcaccctttttgggtgagaagcctaattattgacaaggtgtgaagagccgcgtgtgctcagtgtgcttcctccggcccctgaatgtggctaaccttaaccctgcagccgttgcccataatccaatgggtttgcggtcgtaatgcgcaagtgcgggacgggaccaactactttgggtgtccgtgtttcttgtttttcttttgattgcattttatggtgacaatttatagagtatagattgtcatc

SEQ ID NO: 21616 - DNA, 618 bp, synthetic construct
  source 1..618: mol_type = other DNA
ttaaaactgggagtgggttgttcccactcactccacccatgcggtgttgtactctgttattacggtaactttgtacgccagtttttcccacccttccccataatgtaacttagaagtttgtacaatatgaccaataggtgacaatcatccagactgtcaaaggtcaagcacttctgtttccccggtcaatgaggatatgctttacccaaggcaaaaaccttaaagatcgttatccccacactgcctacacagagcccagtaccatttttgatataattgggttggtcgctccctgcaaacccagcagtagacctggcagatgaggctggacattccccactggcgacagtggtccagcctgcgtggctgcctgctcacccttcttgggtgagaagcctaattattgacaaggtgtgaagagccgcgtgtgctcagtgtgcttcctccggcccctgaatgtggctaaccttaaccctgcagccgttgcccataatccaatgggtttgcggtcgtaatgcgtaagtgcgggatgggaccaactactttgggtgtccgtgtttcctgtttttcttttgattgcattttatggtgacaatttatagtgtatagattgtcatc

SEQ ID NO: 21617 - DNA, 590 bp, synthetic construct
  source 1..590: mol_type = other DNA
tgggtgtagtgctctggtattttgtacctttgcacgcctgtttcccctttgtacccacccttaatttcctccctctgtaacgttagaagtttgtgaaattaaaagtacaataggaagcatcacatccagtggtgtttagtacaagcactcctgtttccccggagcgaggtataggttgtacccacgaccaaaagcctttaaccgttacccgccaatcaactacgtaacggctagtaccatcatgtttttaatctggtgttcgatcaggtggtatcccccactagtctggtcgatgaggctaggaattccccacgggtaaccgtgtcctagcctgcgtggcggccagcccagcttatgctgggacgcctttttaaagacatggtgtgaagacccgcatgtgcttgattgtgagtcctccggcccctgaatgcggctaaccctaaccccggagcccagcaacataatccaatgttgtttgggtcgtaatgagtaattctgggatgggaccgactactttgggtgtccgtgtttccttttattcttatattgtcttatggtcacagcatatatattacatatatactgtgatc

SEQ ID NO: 21618 - DNA, 551 bp, synthetic construct
  source 1..551: mol_type = other DNA
aatcccttcccctcttttctatcacctccaattttccacgtaacttagaagcaaagtacatgagcccaataggagcggctaatccatagccgtatagggcaagcacttctgttaccccggatgtgtgaatagacttctcacgaggttgaagctgaagcattcgttacccgcacttgtactgcgcggaaattagtagcacctttgccagcctcatggcgtttcgctcagcgtttcccccacgtagatcagggcaatggggctacacaacccccaccggcgacggtggtgtagcccgcgtggtgccccgcccgagctatcagctcgggacgccatgatgaagacagggtgtgaaggttcgagtgcgctacaagtgagtcctccggcccctgaatgcggctaaccttaaccccgtagctgtggtatgcatgccagcataaacacagtcgtaatgggcaactacgggatgggaccgactactttgggtgtccgtgtttcactttttccttaaatttgtcttatggttacaggtttatgcaaatagatctgtaatc

SEQ ID NO: 21619 - DNA, 616 bp, synthetic construct
  source 1..616: mol_type = other DNA
ttaaaactgggagtgggttgttcccactcactccacccatgcggtgttgtactctgttattacggtaaccttgtacgccagttttcccacccttccccacaatgtaacttagaagtttgtacaatatgaccagtaggtgacaattatccagattgtcaaaggtcaagcacttctgtttccccggtcaatgaggatatgctttacccaaggcaaaaaccttaaagatcgttatccccacactgcctacacagagcctagtaccacttttgatgtagttaggttggtcgctccctgcaaacccagcagtagacctggcagatgaggctggacattccccactggcgacagtggttcagcctgcgtggctgcctgctcacccttttgggtgagaagcctaattattgacaaggtgcgaagagccgcgtgtgctcagtgtgcttcctccggcccctgaatgtggctaaccttaaccctgcagccgttgcccataatccaatgggtttgcggtcgtaacgcgcaagtgcgggacgggaccaactactttgggtgtccgtgtttcctgtttttcttttgattgcattttatggtgacaatttatagagtatagattgtcatc

SEQ ID NO: 21620 - DNA, 610 bp, synthetic construct; identical to SEQ ID NO: 666
  source 1..610: mol_type = other DNA

SEQ ID NO: 21621 - DNA, 612 bp, synthetic construct; identical to SEQ ID NO: 681
  source 1..612: mol_type = other DNA

SEQ ID NO: 21622 - DNA, 686 bp, synthetic construct
  source 1..686: mol_type = other DNA
tggggttgttcccactccaagggcccacgtggcggctagtactctggtacttcggtacctttgtacgcctgttttatctcccttcccaatgtaacttagaagttcttaaaccaatgctcaataggtggggcgcaaaccagcgctctcatgagcaagcactcctgtctccccggtgaggttgtataaactgttcccacggttgaaaacaacctatccgttatccgctatagtacttcgagaaacctagtaccacctttggattgttgacgcgttgcgctcagcacactaacccgtgtgtagcttgggtcgatgagtctggacatacctcactggcgacagtggtccaggctgcgttggcggcctactcatggtgaaagccatgagacgctagacatgaacaaggtgtgaagagtctattgagctactatagagtcctccggcccctgaatgcggctaatcctaaccatggagcaagtgctcacaggccagtgagttgcttgtcgtaatgcgcaagtccgtggcggaaccgactactttgggtgtccgtgtttcactttttacttttatgactgcttatggtgacaatttgatattgttaccatttagcttgtcaaatcaattgcaaaagatcctaactcttatttatcaacttgcatcttgataactttaatttgaaaattttaaca

SEQ ID NO: 21623 - DNA, 621 bp, synthetic construct; identical to SEQ ID NO: 725
  source 1..621: mol_type = other DNA

SEQ ID NO: 21624 - DNA, 600 bp, synthetic construct
  source 1..600: mol_type = other DNA
atccgacccactgggtgtagtactctggtactctgtacctttgtacgcctgttcttcccattgtacccttcctgaacttccaacccaagtaacgttagaagctcaactttcagtacaacaggaagcaccgcatccagtggtgtttagtacaagcacttctgtttccccggagcgaggtataggctgtacccactgccaaaagcctttaaccgttatccgccaaccaactacgtaaaagctagtaacatcatgtttctaaatcggcgttcgatcaggtggatttcccctccactagtttggtcgatgaggctaggaattccccacgggtgaccgtgtcctagcctgcgtggcggccaacccagcgtatgctgggacgcctttttacagacatggtgcgaagactcgcatgtgcttggttgtgagtcctccggcccctgaatgcggctaaccttaaccctggagccttgcgtcacaatccagtgatggtaaggtcgtaatgagcaattccgggatgggaccgactactttgggtgtccgtgtttctcatttttcttattattgtcttatggtcacagcatatatattgtatatactgtgatc

SEQ ID NO: 21625 - DNA, 618 bp, synthetic construct; identical to SEQ ID NO: 712
  source 1..618: mol_type = other DNA

SEQ ID NO: 21626 - DNA, 618 bp, synthetic construct
  source 1..618: mol_type = other DNA
ttaaaactgggagtgggttgttcccactcactccacccacgtggtgctgtacactgttattccggtaactttgtacgccagtttttccctcccttccctcattatgtaacttagaagcatgaacatatggaccaataggcaataatcatccagattattgaaggtcaagcacttctgtttccccggtcaataaagatatgctttacccaaggcaaaaacttttgagatcgttacccgcacatcaactacgcaaagcctagtatcacctttgatgtactaagactggtcgtttcctgcaaccccagcagtagacctggcagatgaggctggacgtaccccactggcgacagtggtccagcctgcgtggctgcctgctcgcccatatgggcgagaagccttattattgacaaggtgtgaagagccgcgtgtgcttggtgtgagtcctccggcccctgaatgtggctaaccttaaccctgcagccattgctcataatccaatgagttagtggtcgtaatgcgcaagtgcgggatgggaccaactactttgggtgtccgtgtttcttatttttctttcatgtgtgttatatggtgacaatttatagtatataagttgtcatc

SEQ ID NO: 21627 - DNA, 645 bp, synthetic construct
  source 1..645: mol_type = other DNA
agggattttaaaacagtcgaccggttgttcccaccggcgagcatactgtgcgttgtacactggaattacggttcctttgtatgcctgttttataatcccttcccctcttttctatcgtctctaattttccacgtaacttagaagcaaagtacatgagcccaataggagcggctaacccatagccgtatagggcaagcacttctgttaccccggatgtgtgaatagacttctcacgaggttgaagctgaagcattcgttacccgcacttgtactgcgcggaaattagtagcacctttgccagcttcatggcgtttcgctcagcgtttcccccacgtagatcagggcaatggggctacacaacccccaccggcgacggtggtgtagcccgcgtggtgccccgcccgagctatcagctcgggacgccatgatgaagacagggtgtgaaggttcgagtgcgctacaagtgagtcctccggcccctgaatgcggctaaccttaaccccgtagctgtggtatgcatgccagcataaacacagtcgtaatgggcaactacgggatgggaccgactactttgggtgtccgtgtttcacttttttccttaaatttgtcttatggttacaggtttatgcaaatagatctgtaatc

SEQ ID NO: 21628 - DNA, 615 bp, synthetic construct; identical to SEQ ID NO: 694
  source 1..615: mol_type = other DNA

SEQ ID NO: 21629 - DNA, 622 bp, synthetic construct; identical to SEQ ID NO: 731
  source 1..622: mol_type = other DNA

SEQ ID NO: 21630 - DNA, 622 bp, synthetic construct
  source 1..622: mol_type = other DNA
ttaaaactgaatcatggttgttcccaccatgattacctacgggtgtagtacacttgtatcccggtacatttgtgcgccagttttatatcccctaccccaattgtaacttagaagttaagcaacacaagatcaataggcggtggttatccaaaccatcaatgatcaagtacttctgtctccccggtaggtgtgaatatgctttaaccaaggcagaagctaatcctatcgttatccgcaaggtgcctacgggaagcctattaacactttgaaagaaatttggctggtcgctcagttgcgcaatcccacgcaatagacctggcagatggggctagacaaaccccaccagcgatggtggtctagcccgcgtggctgcctgcacacccttttttgggtgtgaagccagaaattggacagggtgcgaagagcctactgtgctcaccttgagtcctccggcccctgaatgtggctaatcctaaccctgcagctgttgcacaagatccattgtgtatacagtcgtaatgagcaattgcgggatggaaccaactactttgggtgtccgtgtttccttgttttcttttatcattgcttatggtgacaagtatatatagatatatttgtcatc

SEQ ID NO: 21631 - DNA, 613 bp, synthetic construct
  source 1..613: mol_type = other DNA
taaaactgggtttgggttgatcccacccaaaccacccatgtggtgtagtacactgttatttcggtaactttgtacgccagttttatctccccttcccccttcgtaacttagaagtaacacataatgaccaatagcgggcaatcatccagattgtcactggtcaagcacttctgtttccccggttcagattgatatgctccaacagggcaaaaacagtttgaatcgttacccgcaagatgcctacgcagaacctagtatcacactgaaagattcttggttggtcgttcagttacatccccagtaacagacctggcagatgaggctagaagttccccactggcgacagtgttctagcctgcgtggctgcctgcacacccatttgggtgtgaagcctagaattggacagggtgtgaagagtcgagtgtgctcatcttgagtcctccggcccctgaatgcggctaaccttaaccccgcagccattgcccacaaaccagtgggtttatggtcgtaatgagcaattgtgggatgggaccgactactttgggtgtccgtgtttcactttttacttattatttgcttatggtgacaatatatagatacatatattgacacc

SEQ ID NO: 21632 - DNA, 464 bp, synthetic construct
  source 1..464: mol_type = other DNA
ttgcgcagtgtttcgctccgcacaaccccagtgtagatcaggtcgatgagtcaccgcatcccccacgggcgaccgtggcggtggctgcgttggcggcctgcccatggggcaacccatgggacgctacaatactgacatggtgtgaagagtctattgagctaactggtagtcctccggcccctgaatgcggctaatcccaactgcggagcacgtgcttccaatccaggaggtagcgtgtcgtaacgggcaactctgcagcggaaccgactactttgggtgtccgtgtttcctttatctctttattggctgcttatggtgacaattgaaagattgttgccatatagctattggattggccatccggtatctaacagagcaatcatatacctgtttgttggatttgttccacttaacaaaacagagttctgtactttgtgttatattattaggttgaacacatcaaa

SEQ ID NO: 21633 - DNA, 621 bp, synthetic construct; identical to SEQ ID NO: 726
  source 1..621: mol_type = other DNA

SEQ ID NO: 21634 - DNA, 612 bp, synthetic construct; identical to SEQ ID NO: 682
  source 1..612: mol_type = other DNA

SEQ ID NO: 21635 - DNA, 697 bp, synthetic construct; identical to SEQ ID NO: 837
  source 1..697: mol_type = other DNA

SEQ ID NO: 21636 - DNA, 451 bp, synthetic construct
  source 1..451: mol_type = other DNA
ggacaatatcgttacccgcttatctactacgggaagcctagtaacaccattgaacactttgagagttgcgttcagcgcctaacccagcgtagctcaggccgatggggcttcggaatccccacgggcgaccgtgtcgaagcccgcgttggcggcctgcccgcgccgtcaggcgtgggacgctcaatttgtgacatggtgcgaagagcctactgtgctaggtaagagtcctccggcccctgaatgtggctaatcctaaccaccgaacccatggttgcaaaccagcgactagtgggccgtaatgcgcaagtcggtgacggaaccaactactttgggtgaccgtgtttcctttatttcctatattgcaagtttatggtgacatttatagtatttaagtgttaccatatactgcgaaaatatattgtaataacacagaattaatactgcagaaatt

SEQ ID NO: 21637 - DNA, 593 bp, synthetic construct
  source 1..593: mol_type = other DNA
cccacctggatctcctattgggagttgtactctattattccggtaattttgtacgccagttttatcttccccctccccaattgtaacttagaaggttatcaatacgaccaataggtggtagttagccaaactaccaaaggtcaagcacttctgtttccccggtcaaagttgatatgctccaacagggcaaaaacaactgagatcgttatccgcaaagtgcctacgcaaagcctagtaacacctttgaagatttatggttggtcgttccgctatttcccatagtagacctggcagatgaggctagaaatcccccactggcgacagtgttctagcctgcgtggctgcctgcgcaccccttgggtgcgaagccatacattggacaaggtgtgaagagccccgtgtgctcactttgagtcctccggcccctgaatgtggctaaccttaaccctgcagctagtgcatgtaatccaacatgttgctagtcgtaatgagtaattgcgggacgggaccaactactttgggtgtccgtgtttcactttttccttttaatattgcttatggtgacaatatatatagctatatatattggcacc

SEQ ID NO: 21638 - DNA, 593 bp, synthetic construct
  source 1..593: mol_type = other DNA
cccacctggatctcctattgggagttgtactctattattccggtaattttgtacgccagttttatcttccccctccccaattgtaacttagaaggttatcaatacgaccaataggtggtagttagccaaactaccaaaggtcaagcacttctgtttccccggtcaaagttgatatgctccaacagggcaaaaacaactgagatcgttatccgcaaagtgcctacgcaaagcctagtaacacctttgaagatttatggttggtcgttccgctatttcccatagtagacctggcagatgaggctagaaatcccccactggcgacagtgttctagcctgcgtggctgcctgcgcaccccttgggtgcgaagccatacattggacaaggtgtgaagagccccgtgtgctcactttgagtcctccggcccctgaatgtggctaaccttaaccctgcagctagtgcatgtaatccaacatgttgctagtcgtaatgagtaattgcgggacgggaccaactactttgggtgtccgtgtttcactttttcctttcaatattgcttatggtgacaatatatatagctatatatattgacacc

SEQ ID NO: 21639 - DNA, 593 bp, synthetic construct
  source 1..593: mol_type = other DNA
cccacctggatctcctattgggagttgtactctattattccggtaattttgtacgccagttttatcttccccctccccaattgtaacttagaaggttatcaatacgaccaataggtggtagttagccaaactaccaaaggtcaagcacttctgtttccccggtcaaagttgatatgctccaacagggcaaaaacaactgagatcgttatccgcaaagtgcctacgcaaagcctagtaacacctttgaagatttatggttggtcgttccgctatttcccatagtagacctggcagatgaggctagaaatcccccactggcgacagtgttctagcctgcgtggctgcctgcgcaccccttgggtgcgaagccatacattggacaaggtgtgaagagccccgtgtgctcactttgagtcctccggcccctgaatgtggctaaccttaaccctgcagctagtgcatgtaatccaacgtgttgctagtcgtaatgagtaattgcgggacgggaccaactactttgggtgtccgtgtttcactttttccttttaatattgcttatggtgacaatatatatagctatatatattgacacc

SEQ ID NO: 21640 - DNA, 742 bp, synthetic construct
  source 1..742: mol_type = other DNA
ttaaaacagctctggggttgtacccactcacagggcccactgggcgctagcacactggtatcacggtacctttgtgcgcctgttttataacccctttcccaaacgcaacgtagaagccacacacactgatcagtagtaggcacagcgcaccagttgtgtctcgatcaagcacttctgtctccccggaccgagtatcaatagactgctcacgcggttgaaggagaaaacgttcgttaaccggctgactacttcgagaaacctagtagtactatgaaagttgcgaagcgtttcactcagcacttcccccgtgtagatcaggccgatgagtcactgcgttccccacgggtgaccgtggcagtggctgcgttggcggcctgcccatggggtaacccatgggacgcttcaatacggacatggtgcgaagagtctattgagctagccagtagtcctccggcccctgaatgcggctaatcctaactgcggagcatgtgccctcgatccagagggtagcatgtcgtaacgggcaactctgcagcggaaccgactactttgggtgtccgtgtttctttttattcttatactggctgcttatggtgacaattgggagattgttaccatatagctattggattggccacccggtgactaatagagctattatctactcctttataggttttgtgccattgaactacaaggtcttaaagactctcaactttatcatcatacttaatactgcaaa

SEQ ID NO: 21641 - DNA, 616 bp, synthetic construct; identical to SEQ ID NO: 702
  source 1..616: mol_type = other DNA

SEQ ID NO: 21642 - DNA, 616 bp, synthetic construct
  source 1..616: mol_type = other DNA
ttaaaactgggagtgggttgttcccactcactccacccatgcggtgttgtacactgttattacggtaaccttgtacgccagttttgccacccttccctaatatgtaacttagaagtttgagcaataagaccaataggtgataattatccagattatcaaaggtcaagcacttctgtttccccggtcaacgaggatatgctttacccaaggcaaaaaccttagagatcgttatccccacactgcctacacagagcctagtatcacttttgatgtaattaggttggtcgctccctgcaaacccagcagtagacctggcagatgaggctggacattccccactggcgacagtggtccagcctgcgtggctgcctgctcaccctatcgggtgagaagcctacttattgacaaggtgtgaagagccgcgtgtgctcagtgtgcttcctccggcccctgaatgtggctaaccttaaccctgcagccgctgcccataatccaatgggtctacggtcgtaacgcgcaagtgcgggatgggaccaactactttgggtgtccgtgtttcttatttttcctttatttgcattttatggtgacaatttatggtatatagattgtcatc

SEQ ID NO: 21643 - DNA, 610 bp, synthetic construct
  source 1..610: mol_type = other DNA
tctcccttcccaatgtaatttagaagctcttaaatcaaggctcaataggtggggcgcaaaccagcgctctcatgagcaagcactcctgtctccccggtgtggttgtataaactgttcccacggttgaaaacaacctatccgttatccgctatagtacttcgagaaacctagtatcacctttggattgttgacgcgttgcgctcagcacactaacccgtgtgtagcttgggtcgatgagtctggacataccccactggcgacagtggtccaggctgcgttggcggcctactcatggtgaaaaccatgagacgctagacatgaacaaggtgtgaagagtctattgagctactatagagtcctccggcccctgaatgcggctaatcctaaccatggagcaagtgctcacaggccagtgagttgcttgtcgtaatgcgcaagtccgtggcggaaccgactactttgggtgtccgtgtttcactttttacttttatgactgcttatggtgacaatttgatattgttaccatttagcttgtcaaattaattgcaaaagatcctagatcttacttaccaatttgcattttgacaaccttgatttgaaaattttaata

SEQ ID NO: 21644 - DNA, 615 bp, synthetic construct
  source 1..615: mol_type = other DNA
ttaaaactgggttcgggttgttcccacccaaaccacccacgtggtgtagtacactgttatcccggtaactttgtacgccagttttatctccccacccccttttgtaacttagaagttatgcacaatgaccaatagtgggcaatcatccagattgtcatcggtcgagcactcctgtttccccggttcaagttgatatgctctaacagggcaaaaacaatttgaatcgttacccgcaaggtgcctacacagaacttagtaccattctggaaaattcttggctggtcgctcagttactaccccagtaatagacctggcagatggggctagaagttccccactggcgacagtgttctagcctgcgtggctgcctgcacacccttcttgggtgtgaagcctagaattggacagggtgtgaagagtcgcgtgtgctcatcttgagtcctccggcccctgaatgcggctaaccctaaccctgcagccattgcccacaacccagtgggtctatggtcgtaatgagcaattgcgggatgggaccgactactttgggtgtccgtgtttcactttttacttattatttgcttatggtgacaatatatagatacatatattgacacc

SEQ ID NO: 21645 - DNA, 618 bp, synthetic construct
  source 1..618: mol_type = other DNA
ttaaaactgggagtaggttgttcccacctactctacccacgtggtgttgtacactgttatcacggtaactttgtatgccagttttgccacccttccccgtagcgtaacttagaagtttgtacacttagaccaataggcgataatcatccagattatcaaaggtcaagcacttctgtttccccggtcaatgaggatatgcttttcccaaggcaaaaaccttagagatcgttatccccacattgcctacacagagcctagtatcacctttgatgtatttagactggtcgctccctgcaaacccagcagtagacctggcagatgaggctggacgttccccactggcgacagtggtccagcctgcgtggctgcctgcccacccatttgggtgggaagcctaactattgacatggtgtgaagagccgcgtgtgctcaatgtgcctcctccggcccctgaatgtggctaaccttaaccccgcagccgctgcccatgatccagtgggtatacggtcgtaacgcgcaagtgtgggatgggaccaactactttgggtgtccgtgtttcctgtttttcttttttttatgcattttatggtgacaatttatggtatatagattgtcatc

SEQ ID NO: 21646 - DNA, 614 bp, synthetic construct; identical to SEQ ID NO: 54
  source 1..614: mol_type = other DNA

SEQ ID NO: 21647 - DNA, 611 bp, synthetic construct; identical to SEQ ID NO: 672
  source 1..611: mol_type = other DNA

SEQ ID NO: 21648 - DNA, 618 bp, synthetic construct
  source 1..618: mol_type = other DNA
ttaaaactgggtctgggttgctcccacccagaccacccatgtggtgttgtacactgttattccggtaactttgtacgccagttttgaactcccctaccccttttgtaacttagaagctaaacacatcgaccaatagcaggcaatcacccagattgcttatggtcaagtacttctgtttccccggtctcctctgatatgctctaccagggcaaaaacagagtagatcgttatccgcaagatgcctacgcaacgcctagtaacactttgaagtgtttttggttggtcgctcagttacaaccccagtaatagacctggcagatgaggctagatatcccccactggcgacagtgatctagcctgcgtggctgcctgcacaccctttatgggtgtgaagccaaacatatgacaaggtgcgaagagccacgtgtgctcatcttgagtcctccggcccctgaatgcggctaacctcaaccctgcagccattgctcacaagccagtgggtatgtggtcgtaatgagaaattgcgggacgggaccgactactttgggtgtccgtgtttcacttttttaccttattttgcttatggtgacaatatatatacagatatatattgacacc

SEQ ID NO: 21649 - DNA, 612 bp, synthetic construct
  source 1..612: mol_type = other DNA
ttaaaactggatccaggttgttcccacctggatttcctacatggagttgtactctgttattccggtaaccttgtacgccagttttatatccccccccattgtaacttagaagttatgcatacagaccaataggtggtgatcctccagatcactaacggtcaagcacttctgtttccccggtttgaattgatacgctccaacagggcgaaaacagtttaaatcgttatccgcaaagtgcctacgcaaagcctagtagcactttagaaaatctatggttggtcgttcagctataccccctagtggacctggcagatgaggctagaagtaccccactggcgacagtgttctagcctgcgtggctgcctgcacacccttatgggtgtgaagccatatatttgacaaggtgtgaagagccccgtgtgctcactttgagtcctccggcccctgaatgtggctaaccttaaccctgcagctagtgcatgtaatccaacatgttgctagtcgtaatgagcaattgcgggatgggaccaactactttgggtgtccgtgtttcactttttccttttaatttgcttatggtgacaatatatatataacatatatattggcatc

SEQ ID NO: 21650 - DNA, 565 bp, synthetic construct
  source 1..565: mol_type = other DNA
actctactattccggtagttttgtacaccagttttatctcccttccccgtgtaacttagaagacaagcacttcagaccaataggatggtaactaaccaagttatcaaaggtcaagcacttctgtttccccggtcaaaattgatatgctccaccagggcaaaaacagttttgatcgttatccgcaaagtgcctacgcaaagcttagtaacactttgaagaatgtgtggttggtcgttccgctattccccatagtagacctggcagatgaggctagaaaatccccactggtgacagtgttctagcctgcgtggctgcctgcgcacctctttgaggtgcgaagccattcctttgacaaggtgtgaagagccccgtgtgctcactttgagtcctccggcccctgaatgtggctaaccttaaccctgcagctagtgcatgcaatccagcatgtctctagtcgtaatgagtaattgcgggatgggaccaactactttgggtgtccgtgtttctctttttacttttaaattgcttatggtgacaatatatatagtacatatatattgacacc

SEQ ID NO: 21651 - DNA, 616 bp, synthetic construct
  source 1..616: mol_type = other DNA
agatatcttaaaactgggttcaggttgttcccacctgaacttcccacgtggagtagtacactattatcacggtaatcttgtacgccagttttgcttccctccccaatagtaacttagaagatgtacacaacgaccaataggcggtggttatccaaaccatcaaaggtcaagcacttctgtttccccggtcaacgttgatatgctccaacagggcaaaaacaactgcgatcgttacccgcaagatgcctacgcaaagcccagtaatgcactggaagatttatggctggtcgctccactataccccatagtagacctggcagatgaggctagaagtaccccactggtgacagtgttctagcctgcgtggctgcctgcgcaccctacgggtgcgaagccatacattggacagggtgtgaagagccccgtgtgctcatcttgagtcctccggcccctgaatgtggctaaccttaaccccgcagccagagcatacaatccagtgtgtttctggtcgtaatgagtaattgtgggatgggaccaactactttgggtgtccgtgtttcactttttccctttattatgcttatggtgacaatatatacacatatatattgacacc

SEQ ID NO: 21652 - DNA, 612 bp, synthetic construct; identical to SEQ ID NO: 683
  source 1..612: mol_type = other DNA

SEQ ID NO: 21653 - DNA, 610 bp, synthetic construct
  source 1..610: mol_type = other DNA
tgggttgttcccacccacactgtctacggacgtagtactctcatatcacggtatgtttgtacgccagtttgccctcccccccccaaatgtaacttagaagtttgtactttataaaggccagtaggcgagtagtaaaccatactactcatggtcaagcacttctgtttccccggtatgcggagaataagctttaacaaaggctgaagcttcaattatcgttatccgcatgataactacgcaaagcttagtaacattttgaaagtttattggttggtcgctccactggaaaacccccccagtagacctggcagatgaggctaagtaatccccactggtgacagtgacttagcctgcgtggctgcctgcacacctggaaacaggtgtgaagccaagtaatggacaaggtgtgaagagccccgtgtgcttatcatgagtcctccggcccctgaatgcggctaatccaaccccacagctattgcacataatccaatgtgtatttagtcgtaacgggcaactgtgggacggaaccgactactttgggtgtccgtgtttcctttattctcatttaagtttcctatggtgacaaatataagtgattatatctgtcatc

SEQ ID NO: 21654 - DNA, 605 bp, synthetic construct
  source 1..605: mol_type = other DNA
tctcccacccacactgtctacggacgtagtgctctcatattacggtatgcttgcacgccagtttgccctccccttccccgttttgtaaccatagaagattgtacttaactttgaccaataggcggtagtgatccacactacttacggtcaagcacttctgttaccccggtatgcggagaataggctctcaaaagggctgaagcttcaattatcgttatccgcgcaattactacgcaaagcttagtaacttcccatgagattctttggttggccgctccgctggtaccccaccagtaggcttggcagatgaggctgagtaatccccactggcgacagtgactcagcctgcgtggctgcctacacacctggcaacaggtgtgaagccatagaaaggacagggtgtgaagagccccgtgtgctaattgtgattcctccggcccctgaatgcggctaatccaaccccacatccaatgcgcataaaccaatgcgtagttggtcgtaatgggcaactgtgggacggaaccgactactttgggtgtccgtgtttccttttattccttattattagttcatggtgacaagtataagtgtttatatttgtcatc

SEQ ID NO: 21655 - DNA, 608 bp, synthetic construct; identical to SEQ ID NO: 42
  source 1..608: mol_type = other DNA

SEQ ID NO: 21656 - DNA, 626 bp, synthetic construct
  source 1..626: mol_type = other DNA
ttaaaactgggtgtgggttgttcccacccacaccacccaatgggtgttgtactctgttattccggtaactttgtacgccagtttttccctcccctccccatccttttacgtaacttagaagttttaaatacaagaccaatagtaggcaactctccaggttgtctaaggtcaagcacttctgtttccccggttgatgttgatatgctccaacagggcaaaaacaacagataccgttatccgcaaagtgcctacacagagcttagtaggattctgaaagatctttggttggtcgttcagctgcatacccagcagtagaccttgcagatgaggctggacattccccactggtaacagtggtccagcctgcgtggctgcctgcgcacctctcatgaggtgtgaagccaaagatcggacagggtgtgaagagccgcgtgtgctcactttgagtcctccggcccctgaatgcggctaaccttaaacctgcagccatggctcataagccaatgagtttatggtcgtaacgagtaattgcgggatgggaccgactactttgggtgtccgtgtttcactttttcctttattaattgcttatggtgacaatatatatattgatatatattggcatc

SEQ ID NO: 21657 - DNA, 644 bp, synthetic construct
  source 1..644: mol_type = other DNA
ctctggtacttcggtacctttgtacgcctgttttatctcccttcccaatgtaatttagaagcttctaaatcaaggctcaataggtggggcgcaaaccagcgctctcatgagcaagcactcctgtctccccggtgtggttgtataaactgttcccacggttgaaaacaacctatccgttatccgctatagtacttcgagaaacctagtatcacctttggattgttgacgcgttgcgctcagcacactaacccgtgtgtagcttgggtcgatgagtctggacataccccactggcgacagtggtccaggctgcgttggcggcctactcatggtgaaaaccatgagacgctagacatgaacaaggtgtgaagagtctattgagctactatagagtcctccggcccctgaatgcggctaatcctaaccatggagcaagtgctcacagaccagtgagttgcttgtcgtaatgcgcaagtccgtggcggaaccgactactttgggtgtccgtgtttcactttttacttttatgactgcttatggtgacaatttgatattgttaccatttagctgtcaaattaattgcaaaagatcctaggtcttacttaccaatttgcattttgataaccttgatttgaaaattttaata

SEQ ID NO: 21658 - DNA, 626 bp, synthetic construct
  source 1..626: mol_type = other DNA
ttaaaactgggtgtgggttgttcccactcacaccacccaatgggtgttgtactctgttattccggtaactttgtacgccagttttccctccccctcctacccctttacgtaacttagaagttttaaacacgaggccaatagcaggcaactttccaggttgtctaaggtcaagcacttctgtttccccggttgatgttgatatgctccaacagggcaaaaacaactgatatcgttatccgcaaagtgcctacacagagcctagtaggattctgaaagatctttggttggtcgctcagctgcatacccagcagtagaccttgcagatgaggctggacattccccactggtaacagtggtccagcctgcgtggctgcctgcacacctcttacgaggtgtgaagccaaggattggacagggtgcgaagagccgcgtgtgctcactttgagtcctccggcccctgaatgcggctaaccttaaacctgcagccatagctcataagccaatgagtttatggtcgtaatgagtaattgcgggatgggaccgactactttgggtgtccgtgtttcattttttccttttatcaattgcttatggtgacaatatatatataaatatatattggcatc

SEQ ID NO: 21659 - DNA, 610 bp, synthetic construct
  source 1..610: mol_type = other DNA
ttaaaactggatctgggttgttcccactcagatctcccatgcggagttgtactctattattccggtaatcttgtacgccagtttttacaccctccccccttgtaacttagaagaaagtacataacgaccaataggtggcaattaaccaaattgtcaacggtcaagcacttctgtttccccggtcaagattgatacgctccaacagggcgaaaacaattgagatcgttatccgcaaagtgcccacgcaaagcctagtaacactttgaaaggtctatggttggtcgttcagctaaaccccatagtagacctggcagatgaggctagaaattccccactggcgacagtgttctagcctgcgtggctgcctgcacaccctcacgggtgtgaagccatatactcgacaaggtgtgaagagccccgtgtgctcactttgagtcctccggcccctgaatgtggctaaccttaaccccgcagctagtgcatacaaaccagtatgtggctagtcgtaatgagcaattgtgggatgggaccaactactttgggtgtccgtgtttcacttttttccttttgtttgcttatggtgacaatatatatagtatatattgacacc

SEQ ID NO: 21660 - DNA, 611 bp, synthetic construct
  source 1..611: mol_type = other DNA
ttaatactggatccaggttgttcccacctggatctcccaagcggagtggtacactattatcccggtaattttgtacgccagttttataacccctcccctttgtaacttagaagatgtaaacacagaccaataggtggtaactaaccaagttactaaaggtcaagcacttctgtttccccggctgatattgatatgctccaccagggcaaaaacaatagaagtcgttatccgcaaagtgcctacgcaaagcctagtaacactttgaattgtttatggttggtcgctcagctattccccctagtagacctggcagatgaggctagaaataccccactggtaacagtgttctagcctgcgtggctgcctgcgcacccctccgggtgcgaagccatacacatgacaaggtgcgaagagccccgtgtgctcactttgaatcctccggctcctgaatgtggctaaccttaaacctgcagccagtgcacataagccaatgtgtatctggtcgtaatgagtaattgcgggatgggaccaactactttggatgtccgtgtttcttgtttttccttaattttgcttatggtgacaatatatagataatatatattggcatc

SEQ ID NO: 21661 - DNA, 614 bp, synthetic construct
  source 1..614: mol_type = other DNA
ttaaaactggatctgggttgttcccacccagatcatccacgtgatgttgtgctctattattccggtaattttgcacgccagtttttcatcccttccccctttgtaacttagaagacttaaacaaatgaccaataggaagcaacaaaccagttgcgataggtcaagcacttctgtttccccggtcaatgttgatatgctccaacggggcaaaaacagcagcgatcgttatccgcaaggtgcctacgcaaagcctagtagcgctcttgaaattgtttggttggtcgctcaagtacaaacccagtactagacctggcagatgaggctagaaaacccccactggcgacagtgttctagcctgcgtggctgcctgcacacccatttgggtgtgaagccaaacaacggacagggtgtgaagagccacgtgtgctcatcttgattcctccggcccctgaatgcggctaaccttaaacctgcagccattgctcacaatccagtgagttggtggtcgtaatgagcaattgcgggatgggaccgactactttgggtgtccgtgtttcactttttaccttgttttatgcttatggtgacaatatatagtagtatatattgacacc

SEQ ID NO: 21662 - DNA, 611 bp, synthetic construct; identical to SEQ ID NO: 673
  source 1..611: mol_type = other DNA

SEQ ID NO: 21663 - DNA, 611 bp, synthetic construct; identical to SEQ ID NO: 674
  source 1..611: mol_type = other DNA

SEQ ID NO: 21664 - DNA, 656 bp, synthetic construct; identical to SEQ ID NO: 795
  source 1..656: mol_type = other DNA

SEQ ID NO: 21665 - DNA, 615 bp, synthetic construct; identical to SEQ ID NO: 696
  source 1..615: mol_type = other DNA

SEQ ID NO: 21666 - DNA, 613 bp, synthetic construct; identical to SEQ ID NO: 687
  source 1..613: mol_type = other DNA

SEQ ID NO: 21667 - DNA, 614 bp, synthetic construct
  source 1..614: mol_type = other DNA
ttaaaactgggtccaggttgttcccacctggatctcctattgggagttgtactctattattccggtaattttgtacgccagttttatctccccttccccaattgcaacttagaagtttatcaatatgaccaataggcggtagttagccaaactaccagaggtcaagcacttctgtttccccggtcaaagttgatatgctccaacagggcaaaaacaactgagatcgttatccgcaaagtgcctacgcaaagcctagtaacacctttgaagatttatggttggtcgttccgctatttcccatagtagacctggcagatgaggctagaaattccccactggcgacagtgttctagcctgcgtggctgcctgcgcaccccttgggtgcgaagccatacattggacaaggtgtgaagagccccgtgtgctcactttgagtcctccggcccctgaatgtggctaaccttaaccctgcagctagtgcatgtaatccaacatgttgctagtcgtaatgagcaattgcgggacgggaccaactactttgggtgtccgtgtttcactttttccttttaatattgcttatggtgacaatatatataaacatatatattgacacc

SEQ ID NO: 21668 - DNA, 612 bp, synthetic construct; identical to SEQ ID NO: 685
  source 1..612: mol_type = other DNA

SEQ ID NO: 21669 - DNA, 626 bp, synthetic construct
  source 1..626: mol_type = other DNA
ttaaaactgggtgtgggttgttcccactcacaccacccaatgggtgttgtactctgttattccggtaactttgtacgccagttttccctccccctcctacccctttacgtaacttagaagttttaaacacgaggccaatagcaggcaactttccaggttgtctaaggtcaagcacttctgtttccccggttgatgttgatatgctccaacagggcaaaaacaactgatatcgttatccgcaaagtgcctacacagagcctagtaggattctgaaagatctttggttggtcgctcagctgcatacccagcagtagaccttgcagatgaggctggacattccccactggtaacagtggtccagcctgcgtggctgcctgcacacctcttacgaggtgtgaagccaaggattggacagggtgcgaagagccgcgtgtgctcactttgagtcctccggcccctgaatgcggctaaccttaaacctgcagccatagctcataagccaatgagtttatggtcgtaatgagtaattgcgggatgggaccgactactttgggtgtccgtgtttcattttttccttttatcaattgcttatggtgacaatatatatatatatatatattggcatc

SEQ ID NO: 21670 - DNA, 622 bp, synthetic construct
  source 1..622: mol_type = other DNA
ttaaaactgggtgtgggttgttcccactcacaccacccaatgggtgttgtactctgttattccggtaactttgtacgccattttccctccctccccatccttttacgtaacttacaacttttaaacacaagaccaatagtaggcaactctccaggttgtctaaggtcaagcacttctgtttccccggttgacgttgatatgctctaacagggcaaaaacaactgatatcgttacccgcaaagtgcctacacagagcttagtaggattctgaaagatctttggttggtcgctcagctgcatacccagcagtagaccttgcagatgaggctggacattccccactggtaacagtggtccagcctgcgtggctgcctgcacactcttatgaggtgtgaagccaaagattggacagggtgtgaagagccgcgtgtgctcactttgagtcctccggcccctgaatgcggctaaccttaaacctgcagccatggctcataaaccaatgagcttatggtcgtaatgagcaattgcgggatgggaccgactactttgggtgtccgtgtttcactttttcctttatcaattgcttatggtgacaatatatacatagatatatattggcatc

SEQ ID NO: 21671 - DNA, 612 bp, synthetic construct
  source 1..612: mol_type = other DNA
ttaaaactggatctgggttgttcccactcaggtctcccacgtggagtagtacactgttattacggtaactttgtacgccagttttatatcccctcccctcaagtaatttagaagataaacacacagaccaataggagatgatcagccagatcattatgggtcaagcacttctgtttccccggtcgaagttgatatgctccaacagggcaaaaacaactgagatcgttatccgcaaagcgcctacgcaaagcctagtaactatctggaaattacttggttggtcgctccgccataccccatggtagacctggcagatgaggctagaaattccccactggcgacagtgttctagcctgcgtggctgcctgcacacccttttgggtgtgaagccaagtaacggacagggtgtgaagagccccgtgtgctcgctttgagtcctccggcccctgaatgtggctaaccttaaccctgcagctagagcacacaacccagtgtgtatctagtcgtaatgagcaattgcgggatgggaccaactactttgggtgtccgtgtttcttgtttttcttttatatttgcttatggtgacaatatatagtgatatatattggcatc

SEQ ID NO: 21672 - DNA, 610 bp, synthetic construct; identical to SEQ ID NO: 47
  source 1..610: mol_type = other DNA

SEQ ID NO: 21673 - DNA, 619 bp, synthetic construct; identical to SEQ ID NO: 717
  source 1..619: mol_type = other DNA

SEQ ID NO: 21674 - DNA, 610 bp, synthetic construct; identical to SEQ ID NO: 667
  source 1..610: mol_type = other DNA

SEQ ID NO: 21675 - DNA, 610 bp, synthetic construct; identical to SEQ ID NO: 668
  source 1..610: mol_type = other DNA

SEQ ID NO: 21676 - DNA, 451 bp, synthetic construct
  source 1..451: mol_type = other DNA
gctccgcactaccccagtgtagatcaggtcgatgagtcaccgcactcctcacgggcgaccgtggcggtggctgcgctggcggcctgcccgtggggcaacccatgggacgcttcaatacagacatggtgtgaagagtctattgagctagtcggtagtcctccggcccctgaatgcggctaatcctaactgcggagcagatccccacaagccagtgggcagtctgtcgtaatgggcaactctgcagcggaaccgactactttgggtgtccgtgtttccttttattcttatactggctgcttatggtgacaattgaaggattgttgccatatagctattggattggccacccggtgtctaacagagcaataatttatctttttgttggattcgtcccacttaactacagagcacttgcaacgctcaattacatcacagatctcaacacaacaaa

SEQ ID NO: 21677 - DNA, 621 bp, synthetic construct; identical to SEQ ID NO: 727
  source 1..621: mol_type = other DNA

SEQ ID NO: 21678 - DNA, 615 bp, synthetic construct
  source 1..615: mol_type = other DNA
ttaaaactggatctgggttgttcccacccagatcacccaagaggtgtagtgctctgtcattccggtgaccttgcacgccagttttatcaccccttccctcttgtaacttagaagaattaaactcagaccaataggaagcgacaagccagtcgtgacaggtcaagcacttctgtttccccggtcaaagttgatatgcttcaccaaggcaaaaacaacagcgatcgttatccgcaagatgcctacgcaaagcctagtagtgcctttgaaaatatttgtctggttgctcaagtacaaccccagtactaaacctggcagatgaggctggagcttccccactggtaacagtgttccagcctgcgtggctgcctgcacacccttacgggtgtgaagccaaatattggacaaggtgtgaagagccccgtgtgctcatcttgagtcctccggcccctgaatgcggctaaccttaaccccacagccattgctcacaatccagtgagtgtatggtcgtaacgagcaattgtgggatgggaccgactactttgggtgtccgtgtttctcttttttcctttttaattctgcttatggtgacaatatatagtgttatatattggcatc

SEQ ID NO: 21679 - DNA, 621 bp, synthetic construct
  source 1..621: mol_type = other DNA
ttaaaactggatctaggttgttcccacctagatctcctacatggagttgtactctattattccggtaattttgtacgccagttttatcctcccctccccttaaagtaacttagaagttggacatatcgaccaataggtaacatttatccaaaatgttaaaggtcaagcacttctgtttccccggtcaaggttgatgtgctctaacagggcaaaaacagctgcgatcgttatccgcaaagcaactacgcaaagcctagtagcattttttgagagtatgtggttggtcgctccactataaacccaatagtagacctggcagatgaggctagaaattccccactggtaacagtgttctagcctgcgtggctgcctgcgtgctccttgtgagcacgaagccatatatttgacaaggtgtgaagagccccgtgtgcttgctttgagtcctccggcccctgaatgtggctaaccttaaccctgcagctagcgtgtacaatccagtacaaagctagtcgtaatgagcaattgcgggatgggaccaactactttgggtgtccgtgtttcctgtttttcttttatatttgcttatggtgacaatatatatataacatatatattggcatc

SEQ ID NO: 21680 - DNA, 608 bp, synthetic construct; identical to SEQ ID NO: 660
  source 1..608: mol_type = other DNA

SEQ ID NO: 21681 - DNA, 611 bp, synthetic construct; identical to SEQ ID NO: 675
  source 1..611: mol_type = other DNA

SEQ ID NO: 21682 - DNA, 611 bp, synthetic construct; identical to SEQ ID NO: 676
  source 1..611: mol_type = other DNA

SEQ ID NO: 21683 - DNA, 600 bp, synthetic construct
  source 1..600: mol_type = other DNA
gttcaggttgttcccacctgaacttcccacgtggagtagtacactattactacggtaattttgtacgccagttttgcttccctccccaaatggtaacttagaagatgtacacaacgaccaacaggcggtggttacccaaaccatcaaaggtcaagcacttctgtttccccggtcaacgttgatatgctccaacagggcaaaaacaaccacgatcgttacccgcaagatgcctacgcaaagcctagtaatacactggaagatttatggctggtcgctccactataccccatagtagacctggcagatgaggctagaagtaccccactggcgacagtgttctagcctgcgtggctgcctgcgcaccctatgggtgcgaagccatacattggacagggtgtgaagagccccgtgtgctcatcttgagtcctccggcccctgaatgtggctaaccttaaccccgcagccagagcatacaatccagtgtgtttctggtcgtaacgagtaattgtgggatgggaccaactactttgggtgtccgtgtttcactttttccctttattatgcttatggtgacaatatatacacatatatattgacacc

SEQ ID NO: 21684 - DNA, 576 bp, synthetic construct
  source 1..576: mol_type = other DNA
aagcacttctgttgccccggactgagtatcaataggctgctcacgcggctgaaggagaaaacgttcgttacccggccaattacttcgagaaacttagtaccaccatgaaggttgcgcggcgtttcgctccacacaaccccagtgtagatcaggtcgatgagtcaccgcgttccccacgggcgaccgtggcggtggctgcgttggcggcctgcccatgggtcaacccatgggacgcttcaatactgacatggtgtgaagagtctattgagctaattggtattcctccggcccctgaatgcggctaatcctaactgcggagcagatacccacatgccagtgggcagtctgtcgtaacgggcaactctgcagcggaaccgactactttgggtgtccgtgtttccttttatccttatactggctgcttatggtgacaattgagagattgttaccatatagctattggattggccatccggtgacaagcagagcaattatttatttgtttgttggcttcgtgccattaaatagtaaagttctaataaccctcaacctcatcttgttacttaatagtgcaaa

SEQ ID NO: 21685 - DNA, 449 bp, synthetic construct
  source 1..449: mol_type = other DNA
tccgcactaccccagtgtagatcaggtcgatgagtcaccgcactcctcacgggcgaccgtggcggtggctgcgctggcggcctgcccgtggggcaacccatgggacgcttcaatacagacatggtgtgaagagtctattgagctagttggtagtcctccggcccctgaatgcggctaatcctaactgcggagcagatccccacaagccagtgggcagtctgtcgtaatgggcaactctgcagcggaaccgactactttgggtgtccgtgtttccttttattcttatactggctgcttatggtgacaattgtagaattgttgccatatagctattggattggccatccggtgtctaacagagcaataatttatctttttgttggattcgtcccacttaactacagagcacttgcaacgctcaattacatcacagatctcaacacaacaaa

SEQ ID NO: 21686 - DNA, 615 bp, synthetic construct; identical to SEQ ID NO: 698
  source 1..615: mol_type = other DNA

SEQ ID NO: 21687 - DNA, 614 bp, synthetic construct; identical to SEQ ID NO: 56
  source 1..614: mol_type = other DNA

SEQ ID NO: 21688 - DNA, 456 bp, synthetic construct
  source 1..456: mol_type = other DNA
gtttcgctccgcactaccccagtgtagatcaggtcgatgagtcaccgcactcctcacgggcgaccgtggcggtggctgcgctggcggcctgcccgtggggcaacccatgggacgcttcaatacagacatggtgtgaagagtctattgagctagttggtagtcctccggcccctgaatgcggctaatcctaactgcggagcagatccccacaagccagtgggcagtctgtcgtaatgggcaactctgcagcggaaccgactactttgggtgtccgtgtttccttttattcttataccggctgcttatggtgacaattgaaggattgttgccatatagctattggattggccatccggtgtctaacagagcaataatttatctttttgttggattcgtcccacttaactacagagcacttgcaacgctcaattacatcacagatctcaacacaacaaa

SEQ ID NO: 21689 - DNA, 614 bp, synthetic construct
  source 1..614: mol_type = other DNA
ttaaaactggatctgggttgttcccacccagatcacccaagtggtgtagtactctgtcattccggtgactttgtacgccagtttttacaccccccccttcttgtaacttagaagaattaagttcagaccaataggaaaacgacaaaccagtcgtttaaggtcaagcacttctgtttccccggtcaatgctgatatgcttcaccaaggcaaaaacagcagcgatcgttacccgcaagacgcctacgcaaagcctagtaatgcctttgaagatatttgtctggtcactcaggtacaatcccagtactagacctggcagatgaggctggaaaatccccactggcgacagtgttccagcctgcgtggctgcctgcacacccatacgggtgtgaagccaaatattggacaaggtgtgaagagccccgtgtgctcgtcttgagtcctccggcccctgaatgcggctaaccttaaccccacagccattgcttgcattccagcaagtctatggtcgtaatgagcaattgtgggatgggaccgactactttgggtgtccgtgtttcactttttaccttttattatgcttatggtgacaatatatagcgttatatattggcatc

SEQ ID NO: 21690 - DNA, 615 bp, synthetic construct
  source 1..615: mol_type = other DNA
ttaaaactggatcatggttgttcccaccatgattacctacgggtgtagtatacttgtattccggtacatttatacgccagttttataatccccaccccaaatgtaacttagaagcatgtacacaatgatcaatagggtggtggctatccaagtcacctaagatcaagcacttctgtttccccggtgagtgtggatatgctttacccaaggcagaaactaatctcatcgttatccgcaaggtgcctacgggaagcctagtaatactctgaaggtattttggttggtcgctcagttgcattcacccatgcaatagacctggtagatggggctaggcataccccactggtaacagtggcctagcccgcgtggctgcctgcacaccttcgggtgtgaagccataatattgacagggtgtgaagagcctactgtgctcaccttgagtcctccggcccctgaatgtggctaatcctaaccccgtatccattacacacaagccagtgtgtttatggtcgtaatgggtaactacgggatggaaccaactactttgggtgtccgtgtttcttgtttttctttaacattgcttatggtgacattatatattgatatagtgtcatc

SEQ ID NO: 21691 - DNA, 562 bp, synthetic construct
  source 1..562: mol_type = other DNA
ccccggactgagtatcaataagctgctcacgcggctgaaggagaaaacgttcgttacccggccaattacttcgagaaacctagtaccaccatgaaagttgcgcagcgtttcgctccgcacaaccccagtgcagatcaggttgatgagccaccgcgttccccacgggtgaccgtggcggtggctgcgttggcggcctgcccatggggtaacccatgggacgcttcaatactgacatggtgcgaagagtctattgagctaattggtagtcctccggcccctgaatgcggctaatcctaactgcggagcagatacccacacaccagtgggcggtctgtcgtaacgggtaactctgcagcggaaccgactactttgggtgtccgtgtttccttttattcttatactggctgcttatggtgacaattgagagattgttgccatatagctattggattggccatccggtgtctaacagagcaatcatttatctgtttgttgggttcgtacccttgaattttaaagtcctcaatactctcgatcttgtgctacaactaaactcggcaaa

SEQ ID NO: 21692 - DNA, 640 bp, synthetic construct; identical to SEQ ID NO: 769
  source 1..640: mol_type = other DNA

SEQ ID NO: 21693 - DNA, 562 bp, synthetic construct
  source 1..562: mol_type = other DNA
ccccggactgagtatcaataagctgctcacgcggctgaaggaaaaaacgttcgttacccggccaattacttcgagaaacctagtaccaccatgaaagttgcgcagcgtttcgctccgcacaaccccagtgtagatcaggtcgatgagccaccgcattccccacgggtgaccgtggcggtggctgcgttggcggcctgcccatggggcaacccatgggacgcttcaatactgacatggtgcgaagagtctattgagctaattggtagtcctccggcccctgaatgcggctaatcctaactgcggagcagatacccacacaccagtgggcggtctgtcgtaacgggcaactccgcagcggaaccgactactttgggtgtccgtgtttccttttattcttatactggctgcttatggtgacaattgagagattgttaccatatagctattggattggccatccggtgtctaacagagcaatcatttatctgtttgttggatttgtacccttgaatcttaaagccctcaacactctcaaccttgtgctacaactgaactcggcaaa

SEQ ID NO: 21694 - DNA, 513 bp, synthetic construct
  source 1..513: mol_type = other DNA
ttcgttacccggccaactacttcgagaagcccagtactaccatgaaggatgcgcggtgtttcgttcagcacgaccccagtgtagatcaggccgatgagtcaccgcaatccccacgggtgaccgtggcggtggctgcgccggcggcctgcccatggggcaacccatgggacgcttcaattccgacatggtgcgaagagtctattgagctagttggtagtcctccggcccctgaatgcggctaatcccaactgcggagcagacacccacaggccagtgggcagtttgtcgtaacgggcaactctgcagcggaaccgactactttgggtgtccgtgtttccttttatccctacattggctgcttatggtgacaattgaaagattgttgccatatagctgttggattagccatccggtaacaaacagagctattatttacctttttattggctttgtgccactgaatttcaaagttataaaaaccataaacgttatcttgacactcaacacagcaaa

SEQ ID NO: 21695 - DNA, 613 bp, synthetic construct
  source 1..613: mol_type = other DNA
ttgatcccaccagcgggcacaatgtgcgttgtacactgcgatctcggtcgctttgtatgcctgtttttaccacccaccccaactttactgtcttctttatttcacaagtaacatagaagcatgtacatgatgcccagtaggataacgtcccagacggctgttttaagggcaagcacttctgtttccccggatgtgtgaataggcttcacccgaggctgaaactgtagcattcgttatccgcatggctactacgcgactgctagtagcattctgtatggcatgtggggtttcgctcagcagagacccagtctgtagatcagggtaatgaggctacacaatccccactggtgacagtggtgtagcctgcgtggtgccctgcccgaggttcatcctcgggaccctccatgttagacagggtgtgaagacactagtgtgctagtcatgagtcctccggcccctgaatgcggctaatcttaaacctgcagccatcgcatgcatgccagcgtgtaggtggtcgtaatgagtaattgcgggatggaaccgactactttgggtgtccgtgtttccctttttacatttgtgtgtctcttatggttacatcattggtgtaatc

SEQ ID NO: 21696 - DNA, 618 bp, synthetic construct
  source 1..618: mol_type = other DNA
ttaaaactggatctgggttgttcccacccagatcacctacatggtgttgtacactattattgcggtaattttgtacgccagttttatattcccctccctttaatgtaacttagaagcaaagcaaactgatcaatagggggcaatcgtccagattgtcaaagatcaagcacttctgtttccccggtcaaagttgatatgctccacaagggcaaaaacagctgagatcgttatccgcaagatgcctacgcaaagcctagtaacacattgaaagatacttggttggtcactcagctgttaacccaacagtagacctggcagatgaggctagagattcccctccggcgacggagttctagcctgcgtggctgcctgcacacccgttgggtgtgaagccaaatattggacaaggtgtgaagagccgcgtgtgctcatcttgagtcctccggcccctgaatgtggctaaccttaaacctgcagccagtgcgcgcaatccagtgtgtagctggtcgtaatgagtaattgcgggatgggaccaactactttgggtgtccgtgtttcactttttccttttattattgcttatggtgacaatatatatagcatatatatattgttatc

SEQ ID NO: 21697 - DNA, 589 bp, synthetic construct; identical to SEQ ID NO: 640
  source 1..589: mol_type = other DNA

SEQ ID NO: 21698 - DNA, 618 bp, synthetic construct; identical to SEQ ID NO: 59
  source 1..618: mol_type = other DNA

SEQ ID NO: 21699 - DNA, 555 bp, synthetic construct
  source 1..555: mol_type = other DNA
actgagtatcaataagctgctcacgtggctgaaggagaaaacgttcgttatccgaccaattacttcgagaaacccagtaccaccatgaaagttgcgcggcgtttcgctccgcacaaccccagtgtagatcgggccgatgagtcaccgcgttccccacgggcgaccgtggcggtggctgcgttggcggcctgcccatggagcaatccatgggacgcttcaatactgacatggtgcgaagagtctattgagctaattggtagtcctccggcccctgaatgcggctaatcctaactgcggagcagatacccacaagccagtgggcagtctgtcgtaacgggcaacttcgcagcggaaccgactactttgggtgtccgtgtttccttttattttatactggctgcttatggtgacaattgagagattgttaccatatagctattggattggccatccggtgtccaacagagcgatcatttacttgtttgttggattcgtacccttgaactacaaagcactcgtaacgcttaaatacgttatagacctcaacacagcaaa

SEQ ID NO: 21700 - DNA, 625 bp, synthetic construct; identical to SEQ ID NO: 745
  source 1..625: mol_type = other DNA

SEQ ID NO: 21701 - DNA, 613 bp, synthetic construct; identical to SEQ ID NO: 688
  source 1..613: mol_type = other DNA

SEQ ID NO: 21702 - DNA, 599 bp, synthetic construct
  source 1..599: mol_type = other DNA
gttcaggttgttcccacctgaacttcccacgtggggtagtacactattattacggtaatcttgtacgccagttttgcttccctccccaatagtaacttagaagatgtacacaacgaccaataggcggtggttatccaaaccatcaaaggtcaagcacttctgtttccccggtcaacgttgatatgctccaacagggcaaaaacaactgcgatcgttacccgcaagatgcctacgcaaagcccagtaatgcactggaagatttatggctggtcgctccactataccccatagtagacctggcagatgaggctagaagtaccccactggtgacagtgttctagcctgcgtggctgcctgcgcaccctacgggtgcgaagccatacattggacagggtgtgaagagccccgcgtgctcatcttgagtcctccggcccctgaatgtggctaaccttaaccccgcagccagagcatacaatccagtgtgtttctggtcgtaatgagtaattgtgggatgggaccaactactttgggtgtccgtgtttcactttttccctttattatgcttatggtgacaatatatacacatatatattgacacc

SEQ ID NO: 21703 - DNA, 612 bp, synthetic construct
  source 1..612: mol_type = other DNA
ttaaaactggatctgggttgttcccacctggatctcctacatggagttgtactctattattccggtaatcttgtacgccagttttatacccctttcccttttgtaacttagaagttaaacacacagaccaataggtgatggctatccaagtcattaacggtcaagcacttctgtttccccggtttaaattgatacgctccaccagggcgaaaacaatttaaatcgttatccgcaaaatgactacgcaaagcctagtaacatcttgaagaacttatggttggtcgttccactaaaccccatagtagacctggcagatgaggctagaaataccccactggagacagtgttctagcctgcgtggctgcctgcacaccctatgggtgtgaagccatatttttgacaaggtgtgaagagccccgtgtgctcattttgagtcctccggcccctgaatgtggctaaccttaaccctgcagctagtgcatgcaatccagcatgttgctagtcgtaatgagcaattgcgggatgggaccaactactttgggtgtccgtgtttcactttttccttttatttgcttatggtgacaatatatatagtacatatatattggcatc

SEQ ID NO: 21704 - DNA, 614 bp, synthetic construct
  source 1..614: mol_type = other DNA
ttaaaactgggagtgggttgttcccacccagaccacccacgtggtgttgtgctctgttattccggtaaccttgcacgccaattttataaccccctttccccatgtaacttagaagttttgcacataggccaatagcaagcagcgaaccagctgtataaggtcaagcacttctgtttccccggtcaatgttgatatgcttcaacaaggcaaaaacaacagcgatcgttatccgcaagatgcctacacaaagcttagtacctcctttgacggtatttgtctggtcgctcaggtgtttccccagcactagacctggcagatgaggctagaaactccccactggtgacagtgttctagcctgcgtggctgcctgcacacccttctgggtgtgaagccaaatactagacaaggtgtgaagagccccgtgtgttcatcttgagtcctccggcccctgaatgcggctaaccttaaacccgcagccattactcacaatccagtgagcggatggtcgtaatgagcaattgtgggatgggaccgactactttgggtgtccgtgtttcatgtttttctttataatttgcttatggtgacaatatatagtgatatatattggcatc

SEQ ID NO: 21705 - DNA, 612 bp, synthetic construct
  source 1..612: mol_type = other DNA
gtgggttgttcccactcacaccacccaatgggtgttgtactctgttattccggtaactttgtacgccagttttccctccctccccatccttttacgtaacttagaagttttaaacacaagaccaatagtaggcaactctccaggttgtctaaggtcaagcacttctgtttccccggttgacgttgatatgctctaacagggcaaaaacaactgatatcgttacccgcaaagtgcctacacagagcttagtaggattctgaaagatctttggttggtcgctcagctgcatacccagcagtagaccttgcagatgaggctggacattccccactggtaacagtggtccagcctgcgtggctgcctgcacacctcttatgaggtgtgaagctgaagattggacagggtgtgaagagccgcgtgtgctcactttgagtcctccggcccctgaatgcggctaaccttaaacctgcagccatggttcataaaccaatgagcttatggtcgtaatgagcaattgcgggatgggaccgactactttgggtgtccgtgtttcactttttcctttatcaattgcttatggtgacaatatatacatagatatatattggcatc

SEQ ID NO: 21706 - DNA, 615 bp, synthetic construct
  source 1..615: mol_type = other DNA
ttaaaactgagtcatggttgttcccaccatgattacccacgggtgtagtatacttgtatcccggtacatttatacgccagttttataatccccaccccaaatgtaacttagaagcttgtacacaatgatcaataggatgatggctatccaagtcatctaagatcaagcacttctgtctccccggtgagtgtgaatatgctttacccaaggcaaaagctaatctcatcgttatccgcaaggtgcctacgggaagcctagtaatactctgaagatattttggttggtcgatcagttgcactcacccatgcaatagacctggcagatggggctaggcacacctcactggtaacagtggcctagcccgcgtggctgcctgcacaccttcgggtgtgaagccataatattgacagggtgtgaagagcctactgtgctcaccttgagtcctccggcccctgaatgtggctaatcctaaccccgtatccattgcacacaaaccagtgtgtctatggtcgtaatgggtaactacgggatggaaccaactactttgggtgtccgtgtttcttgtttttctttaatactgcttatggtgacattatatattgatatagtgtcatc

SEQ ID NO: 21707 - DNA, 592 bp, synthetic construct
  source 1..592: mol_type = other DNA
gatctcctacatggagttgtactctattattccggtaattttgtacgccagttttatctcccctaccccctttatgtaacttagaagttttgtacacaccgaccaataggtggtatttaaccaaaataccaaaggtcaagcacttctgttaccccggtcaagattgatatgctccaccagggcaaaaaacagtcgcgatcgttacccgcaaagcaactacgcaaagcctagtatcatttttgatggtgtatggttggtcgttccgctatgaacctgatagtagacctggcagatgaggctagaaaatccccactggtaacagtgttctagcctgcgtggctgcctgcgtaccccttgtgggtacgaagccgtacatttgacaaggtgtgaagagccccgtgtgcttgctttgagtcctccggcccctgaatgtggctaaccttaaccccgcagctagtgtgcacaagccagtgcatagctagtcgtaatgagcaattgcgggatgggaccaactactttgggtgtccgtgtttcttgtttttcttttatatttgcttatggtgacaatatatttaatacatatattgacacc

SEQ ID NO: 21708 - DNA, 604 bp, synthetic construct
  source 1..604: mol_type = other DNA
gtcgtggttgttcccaccacgactatctacggatgtagtgctcttgtatcccggtacacttgcacgccagttttgttaccctccccatattgtaacttagaagattgacacaaagaccaataggcggcaatgaaccacattgtcaacggtcaagcacttctgtctccccggtcaatctggatatgctttaccaaaggcaaaaactggagcgatcgttatccgcaaggtgcctacgggaaacctagtaacaccctttatttgatctggttggttgttcagccgttaaacccaaacggtaaacctggcagatgaggctggaaaatccccaccagcgatggtgttccagcctgcgtggctgcctgcacacccgaaagggtgtgaagccttttcaaagacagggtgcgaagagtctactgtgctcaccttgattcctccggcccctgaatgtggctaatcctaaccccgcagctgtagtgtgcaatccagcacatttgcagtcgtaatgggtaactgcgggatggaaccaactactttgggtgtccgtgtttctcttttttcctttacatttgcttatggtgacaattatacggatatagttgtcatc

SEQ ID NO: 21709 - DNA, 645 bp, synthetic construct
  source 1..645: mol_type = other DNA
agggattttaaaacagtcgaccggttgttcccaccggcgagcatactgtgcgttgtacactggaattacggttcctttgtatgcctgttttacaatcccttcccctcttttctatcgtctccaattttccacgtaacttagaagcaaagtacatgagcccaataggagcggctaatccatagccgtatagggcaagcacttctgttaccccggatgtgtgaatagacttctcacgaggttgaagctgaagcattcgttacccgcacttgtactgcgcggaaattagtagcacctttgccagcttcatggcgtttcgctcagcgtttcccccacgtagatcagggcaatggggctacacaacccccaccggcgacggtggtgtagcccgcgtggtgccccgcccgagctatcagctcgggacgccatgatgaagacagggtgtgaaggttcgagtgcgctacaagtgagtcctccggcccctgaatgcggctaaccttaaccccgtagctgtggtatgcatgccagcataaacacagtcgtaatgggcaactacgggatgggaccgactactttgggtgtccgtgtttcactttttcctttaaatttgtcttatggttacaggtttatgcaaatagatctgtaatc

SEQ ID NO: 21710 - DNA, 610 bp, synthetic construct; identical to SEQ ID NO: 669
  source 1..610: mol_type = other DNA

SEQ ID NO: 21711 - DNA, 531 bp, synthetic construct
  source 1..531: mol_type = other DNA
tccccggtgcggttgtatagactgtttccacggttgaaaacaacttatccgttatccgctatagtacttcgagaaacctagtatcacctttggattgttgatgcgttgcgctcagcacactaacccgtgtgtagcttgggctgatgagtctggacgtaccccactggtgacagtggtccaggctgcgttggcggcctactcatggtgaaaaccatgagacgctagacatgaacaaggtgtgaagagtctattgagctactatagagtcctccggcccctgaatgcggctaatcttaaccatggagcaagtgctcacaagccagtgagttgcttgtcgtaacgcgcaagtccgtggcggaaccgactactttgggtgtccgtgtttcactttttacctttacgactgcttatggtgacaatttaatattgttaccatttagcttgtcagattaatcgcgtaaaatcctgaatcttgttcaccaatttgtatttggatagctttatttgaaaattctaaactcattcataaag

SEQ ID NO: 21712 - DNA, 606 bp, synthetic construct; identical to SEQ ID NO: 658
  source 1..606: mol_type = other DNA

SEQ ID NO: 21713 - DNA, 604 bp, synthetic construct
  source 1..604: mol_type = other DNA
gtcgcggttgttcccaccacgactatctacggatgtagtgctcttgtattccggtacacttgcacgccagttttgttaccctccccacattgtaacttagaagattaacacaaagaccaataggcggcaatgaaccacattgtcaacggtcaagcacttctgtctccccggtcaatctggatatgctttaccaaaggcaaaaactggagcgatcgttatccgcaaggtgcctacgggaaacctagtagcactctttatttgatctggttggttgttcagccgttaaacccaaacggtaaacctggcagatgaggctggaaaatccccaccagcgatggtgttccagcctgcgtggctgcctgcacacccgaaagggtgtgaagccttttcaaagacagggtgcgaagagtctactgtgctcaccttgattcctccggcccctgaatgtggctaatcctaaccccgcagctgtagtgtgcaatccagcacatttgcagtcgtaatgggtaactgcgggatggaaccaactactttgggtgtccgtgtttctctttttacctttatatttgcttatggtgacaattatacggatatagttgtcatc

SEQ ID NO: 21714 - DNA, 552 bp, synthetic construct; identical to SEQ ID NO: 595
  source 1..552: mol_type = other DNA

SEQ ID NO: 21715 - DNA, 611 bp, synthetic construct; identical to SEQ ID NO: 677
  source 1..611: mol_type = other DNA

SEQ ID NO: 21716 - DNA, 611 bp, synthetic construct; identical to SEQ ID NO: 678
  source 1..611: mol_type = other DNA

SEQ ID NO: 21717 - DNA, 610 bp, synthetic construct; identical to SEQ ID NO: 670
  source 1..610: mol_type = other DNA

SEQ ID NO: 21718 - DNA, 604 bp, synthetic construct
  source 1..604: mol_type = other DNA
gttgtggttgatcccaccacactgcccactgggcgtagtgctctcatattccggtatgcttgcacgccagttttattcccccttcccccattgtaacttagaagcaaagcacacatgatcaataggagataacctgccaggttatttaagatcaagcacttctgtttccccggcaagtgtgaatatgctttacccaaggcaaaagctaatcttgtcgttatccgcaaggtgcctacgagaagcctagtaatgctcaagatgtaatttggctggtcgctccgctgtttcccacagtagacctggcagatgaggctagacattccccaccagcgatggtggtctagcctgcgtggctgcctgcacaccctatgggtgtgaagccaaatttactgacagggtgtgaagagcctattgtgctcaccttgattcctccggcccctgaatgtggctaatcctaaccccgctgctattgcacacgaaccagtgtgtggatagtcgtaatgagcaatagtgggatggaaccaactactttgggtgtccgtgtttcttgtttttctttaatttgtcttatggtcacaatatatatataacatatattgtgatc

SEQ ID NO: 21719 - DNA, 604 bp, synthetic construct
  source 1..604: mol_type = other DNA
catggttgttcccaccatgattacctacgggtgtagtatacttgtattccggtacatttatacgccagttttatgatcccccaccccaaatgtaacttagaagcatgtacacaatgatcaatagggtggtggctatccaagtcacctaagatcaagcacttctgtttccccggtgagtgtggatatgctttacccaaggcagaaactaatctcatcgttatccgcaaggtgcctacgggaagcctagtaatattctgaaggtattttggttggtcgctcagttgcattcacccgtgcaatagacctggcagatggggctaggcataccccactggtaacagtggcctagcccgcgtggctgcctgcacaccttcgggtgtgaagccataatattgacagggtgtgaagagcctactgtgctcaccttgagtcctccggcccctgaatgtggctaatcctaaccccgtatccattgcacacaagccagtgtgtttatggtcgtaatgggtaactacgggatggaaccaactactttgggtgtccgtgtttcttgtttttctttaatattgcttatggtgacattatatattgatatagtgtcatc

SEQ ID NO: 21720 - DNA, 609 bp, synthetic construct
  source 1..609: mol_type = other DNA
ggttgttcccactcacaccacccaatgggtgttgtactctgttattccggtaactttgtacgccagttttccctccctccccatccttttacgtaacttagaagttttaaacacaagaccaatagtaggcaactctccaggttgtctaaggtcaagcacttctgtttccccggttgacgttgatatgctctaacagggcaaaaacaactgatatcgttacccgcaaagtgcctacacagagcttagtaggattctgaaagatctttggttggtcgctcagctgcatacccagcagtagaccttgcagatgaggctggacattccccactggtaacagtggtccagcctgcgtggctgcctgcacacctcttatgaggtgtgaagctgaagattggacagggtgtgaagagccgcgtgtgctcactttgagtcctccggcccctgaatgcggctaaccttaaacctgcagccatggttcataaaccaatgagcttatggtcgtaatgagcaattgcgggatgggaccgactactttgggtgtccgtgtttcactttttcctttatcaattgcttatggtgacaatatatacatagatatatattggcatc

SEQ ID NO: 21721 - DNA, 567 bp, synthetic construct
  source 1..567: mol_type = other DNA
acactattattacggtaattttgtacgccagttttatacccccttcccaaaatgtaacttagaagcaatacaaactgatcaataggaagcaatcatccagattgctaacgatcaagcacttctgtctccccggtcaaggttgatatgctccaccagggcaaaaacagctaagatcgttatccgcaagatgcctacgcaaagcctagtaatgctttcgaagatacttggttggtcgctcagctgtgcacccgacagtagacctggcagatgaggctagaagtacccctctggtgacagagttctagcctgcgtggctgcctgcacaccctattgggtgtgaagccaaatattggacaaggtgtgaagagccccgtgtgctcatcttgagtcctccggcccctgaatgtggctaaccttaaacctgcagccagtgcacacaaaccagtgtgtagctggtcgtaacgagcaattgcaggatgggaccaactactttgggtgtccgtgtttcactttttacccttatattgcttatggtgacaatatatatagtatatatatattgttatc

SEQ ID NO: 21722 - DNA, 617 bp, synthetic construct; identical to SEQ ID NO: 709
  source 1..617: mol_type = other DNA

SEQ ID NO: 21723 - DNA, 617 bp, synthetic construct
  source 1..617: mol_type = other DNA
ttaaaactggatctgggttgttcccacccagatcacctacatggtgttgtacactattattacggtaattttgtacgccagttttatatccccttccccaaatgtaacttagaagcaatgcaaactgatcaatagggggcaatcatccagattgctaatgatcaagcacttctgtttccccggtcaaggttgatatgctccacaagggcaaaaacaaccgagatcgttatccgcaagatgcctacgcaaagcctagtaatgcttttgaagatacttggttggtcgctcagctgtgcacccgacagtagacctggcagatgaggctagaagtacccctctggcgacagagttctagcctgcgtggctgcctgcacacccttttgggtgtgaagccaagtattggacaaggtgtgaagagccccgtgtgctcatcttgaatcctccggcccctgaatgtggctaaccttaaacctgcagccagtgcacacaaaccagtgtgtagctggtcgtaatgagcaattgcgggatgggaccaactactttgggtgtccgtgtttcactttttacctttatattgcttatggtgacaatatatatagcacatatatattgttatc

SEQ ID NO: 21724 - DNA, 607 bp, synthetic construct
  source 1..607: mol_type = other DNA
tgttcccactcacaccacccaatgggtgttgtactctgttattccggtaactttgtacgccagttttccctccctccccatccttttacgtaacttagaagttttaaacacaagaccaatagtaggcaactctccaggttgtctaaggtcaagcacttctgtttccccggttgacgttgatatgctctaacagggcaaaaacaactgatatcgttacccgcaaagtgcctacacagagcttagtaggattctgaaagatctttggttggtcgctcagctgcatacccagcagtagaccttgcagatgaggctggacattccccactggtaacagtggtccagcctgcgtggctgcctgcacaccttcttatgaggtgtgaagccaaagattggacagggtgtgaagagccgcgtgtgctcactttgagtcctccggcccctgaatgcggctaaccttaaacctgcagccatggttcataaaccaatgagcttatggtcgtaatgagcaattgcgggatgggaccgactactttgggtgtccgtgtttcactttttcctttatcaattgcttatggtgacaatatatacatagatatatattggcatc

SEQ ID NO: 21725 - DNA, 617 bp, synthetic construct
  source 1..617: mol_type = other DNA
ttaaaactggatctgggttgttcccactcagatcacctacatggtgttgtacactattatcacggtaattttgtacgccagttttatacccccttccccaaatgtaacttagaagcaaagcaaactgatcaacagggggcaatcgtccagattgtcaaagatcaagcacttctgtttccccggtcaaagttgatatgctccacaagggcaaaaacaactgagatcgttatccgcaagatgcctacgcaaagcctagtaatacattgaaagatacttggttggtcgctcagctgttaacccaacagtagacctggtggatgaggctagagattcccctccggcgacggagttctagcctgcgtggctgcctgcacacccattgggtgtgaagccaagtattggacaaggtgtgaagagccgcgtgtgctcatcttgagtcctccggcccctgaatgtggctaaccttaaacctgcagccagtgcacacaaaccagtgtgtagctggtcgtaatgagcaattgcgggatgggaccaactactttgggtgtccgtgtttcactttttccttttattattgcttatggtgacaatatatatagcatatatatattgttatc

SEQ ID NO: 21726 - DNA, 598 bp, synthetic construct
  source 1..598: mol_type = other DNA
gtaattcacacagttcaatagagagggggtacaaaccagtaccaccacgaacaagcacttctgtttccccggtgaagctacatagactgtccccacggttgaaagtggcagatccgttatccgcttaagtacttcgagaagcctagtatcaccttggaatcttcgacgcgttgcgctcagcactctaccccgagtgtagcttaggctgatgagtctgggcataccccaccggcgacggtggcccaggctgcgttggcggcctacccatggctaacgccatgggacgctagttgtgaacaaggtgtgaagagcctattgagctacttaagagtcctccggcccctgaatgcggctaatcctaaccacggagcaagtgcccacaaaccagtgggtggcttgtcgtaacgcgtaagtctgtggcggaaccgactactttgggtgtccgtgtttccttttatttttatcatggctgcttatggtgacaatctaagattgttatcatatagctattggattggccatccggtgattcacagagacttgaaagctaactcaccttcctataacactcatttgtttatcaatcttatagcacaca

SEQ ID NO: 21727 - DNA, 618 bp, synthetic construct
  source 1..618: mol_type = other DNA
ttaaaactgagtgtgggttgctcccacccacactgtctacgggacgttgtactcttgtattccggtacacttgtacgccagtttgccaccctaaataccccgtaacaatagaagtctacgcacacttagaccaatagggggtgttcatccagttcacccaaggtcaagcacttctgtttccccggcataggggtgttaggcttcacccgaggccaaagctctgattgtcgttatccgcacaactactggacaaagcctagtagcgccctacgatgtagtatggttggttgttccgccagtatcccctggtaaacctggcagatggggctagaagttcctcactggcgacagtgttctagcccgcgtggctgcctgctccctcacgggagaagccattctactgacaaggtgtgaagagccccgtacgctagttgtgattcctccggcccctgaatgcggctaatccaaccctgcagccattacatggaagccaccatgtggatggtcgtaatgagtaattgcgggacggaaccgactactttgggtgtccgtgtttcttgtttttcttttactgacgtttatggtgacaatatatatataacgtatatattgttcatc

SEQ ID NO: 21728 - DNA, 618 bp, synthetic construct
  source 1..618: mol_type = other DNA
ttaaaactgggtctgggttgtccccacccagaccacccacgtggtgttgtacactgttatcccggtaactttgtacgccagttttaaactcccttaccccttttgcaacttagaagttatacacaccgaccaacagcagacaatcatccagattgtttatggtcaagcacttctgtctccccggtctcctctgatatgctccaacagggcaaaaacagagtagatcgttacccgcaagatgcctacgcaacgcctagtaacactttgaagtgattttggttggtcgctcatttacaaccccagtaatagacctggcagatgaggctagatgttccccactggcgacagtgatctagcctgcgtggctgcctgcacaccctttgtgggtgtgaagccaaatttatgacaaggtgcgaagagccacgtgtgctcatcttgagtcctccggcccctgaatgcggctaaccttaaccctgcagccattgctcacaaaccagtgagtatgtggtcgtaatgagaaattgcgggacgggaccgactactttgggtgtccgtgtttcactttttaccttatttttgcttatggtgacaatatatatatagatatatattgacacc

SEQ ID NO: 21729 - DNA, 431 bp, synthetic construct; identical to SEQ ID NO: 476
  source 1..431: mol_type = other DNA

SEQ ID NO: 21730 - DNA, 520 bp, synthetic construct
  source 1..520: mol_type = other DNA
tccccggtgtggttgtataaactgttcccacggttgaaaacaacctatccgttatccgctatagtacttcgagaaacctagtatcacctttggattgttgatgcgttgcgctcagcacactaacccgtgtgtagcttgggtcgatgagtctggacataccccactggcgacagtggtccaggctgcgttggcggcctactcatggtgaaaaccatgagacgctagacatgaacaaggtgtgaagagtctattgagctactatagagtcctccggcccctgaatgcggctaatcctaaccatggagcaagtgctcacaagccagtgagttgcttgtcgtaatgcgcaagtccgtggcggaaccgactactttgggtgtccgtgtttcactttttacttttatgactgcttatggtgacaatttgatattgttaccatttagcttgtcaaaccaattgcaaaagatcctaaatcttatttataaacttgcaatttgacaactttgatttaaaagttttaata

SEQ ID NO: 21731 - DNA, 477 bp, synthetic construct
  source 1..477: mol_type = other DNA
cctatccgttatccgctatagtacttcgagaaacctagtatcacctttggattgttgacgcgttgcgctcagcacactaacccgtgtgtagcttgggtcgatgagtctggacataccccactggcgacagtggtccaggctgcgttggcggcctactcatggtgaaaaccatgagacgctagacatgaacaaggtgtgaagagtctattgagctactatagagtcctccggcccctgaatgcggctaatcctaaccatggagcaagtgctcacaggccagtgagttgcttgtcgtaatgcgcaagtccgtggcggaaccgactactttgggtgtccgtgtttcactttttacttttatgactgcttatggtgacaatttgatattgttaccatttagcttgtcaaattaattgcaaaagatcctaaatcttacttaccaacttgcattttgataaccttgatttgaaaattttaata

SEQ ID NO: 21732 - DNA, 616 bp, synthetic construct
  source 1..616: mol_type = other DNA
ttaaaactggatctaggttgtccccacctagatctcccatgtggagtggtactctattattccggtaatcttgtacgccagttttatatcccctcccccttttgtaacttagaagttatgaacatagaccaataggtggtgatcatccagatcacttaaggtcaagcacttctgtttccccggtcgacgttgatatgctccaccagggcaaaaacaacagagatcgttatccgcaaggtgcctacacaaagcctagtaaccccttggagagtatgtggttggtcgctcagctattccccatagtagacctggcagatgaggctagaaattccccactggtaacagtgttctagcctgcgtggctgcctgcgcactcttatgagtgcgaagccatatatttgacaaggtgcgaagagccccgtgtgctcaccttgagtcctccggcccctgaatgtggctaaccctaaccctgcagctagtgcatgaaatccatcatgttgctagtcgtaatgagtaattgcgggatgggaccaactactttgggtgtccgtgtttcactttttccttttatatttgcttatggtgacaatatatatataacatatatattggcatc

SEQ ID NO: 21733 - DNA, 639 bp, synthetic construct; identical to SEQ ID NO: 766
  source 1..639: mol_type = other DNA

SEQ ID NO: 21734 - DNA, 608 bp, synthetic construct
  source 1..608: mol_type = other DNA
ttaaaactgagttcaggttgttcccatctgaacttcccacgtggagtagtacactattattacggtaattttgtacgccagttttgcctccctccccaaatgtaacttagaagatgtacacaacggccaacaggcggtggttatccaaaccatcaaaggtcaagcacttctgtttccccggtcaatgttgatatgctccaacagggcaaaaacaactgcgatcgttatccgcaagatgcctacgcaaagcttagtaacactttggaagatttatggctggtcgttccactataccccatagtagacctggcagatgaggctagaaataccccactggtgacagtgttctagcctgcgtggctgcctgcgcaccctatgggtgcgaagccatacattggacaaggtgtgaagagccccgtgtgctcatcttgagtcctccggcccctgaatgtggctaaccttaaccccgcagccaatgcacacaatccagtgtgtttttggtcgtaatgagtaattgtgggatgggaccaactactttgggtgtccgtgtttcactttttcctttattatgcttatggtgacaatatatatacatatatattgacacc

SEQ ID NO: 21735 - DNA, 518 bp, synthetic construct
  source 1..518: mol_type = other DNA
cccggtgtggttgtatagactgtccccacggttgaaaacaacttatccgttatccgctatagtacttcgagaaacctagtatcacctttggattgttgacgcgttgcgctcagcacactaacccgtgtgtagcttgggtcgatgagtctggacgtaccccactggcgacagtggtccaggctgcgttggcggcctactcatggtgaaaaccatgagacgctagacatgaacaaggtgtgaagagtctattgagctactatagagtcctccggcccctgaatgcggctaatcctaaccatggagcaagtgctcacaggccagtgagttgcttgtcgtaatgcgcaagtccgtggcggaaccgactactttgggtgtccgtgtttcactttttacttttatgactgcttatggtgacaatttaatattgttaccatttagcttgtcaaattaattgcaaaagatcctaaatcttatttaccaacttgcattttgataaccttgatttgaaaattttaata

SEQ ID NO: 21736 - DNA, 475 bp, synthetic construct
  source 1..475: mol_type = other DNA
tatccgttatccgctatagtacttcgagaaacctagtatcacctttggattgttgacgcgttgcgctcagcacactaacccgtgtgtagcttgggtcgatgagtctggacataccccactggcgacagtggtccaggctgcgttggcggcctactcatggtgaaaaccatgagacgctagacatgaacaaggtgtgaagagtctattgagctactatagagtcctccggcccctgaatgcggctaatcctaaccatggagcaagtgctcacaggccagtgagttgcttgtcgtaatgcgcaagtccgtggcggaaccgactactttgggtgtccgtgtttcactttttacttttatgactgcttatggtgacaatttgatattgttaccatttagcttgtcaaattaattgcaaaagatcctaaatcttacttaccaacttgcattttgataaccttgatttgaaaattttaata

SEQ ID NO: 21737 - DNA, 600 bp, synthetic construct
  source 1..600: mol_type = other DNA
acccacactgtctacggacgtagtgctctcatattacggtatgcttgcacgccagtttgcccccccctctccccgttttgtaactatagaagattgtacttaatttcgaccaataggcagtagtgatccacactacttacggtcaagcacttctgttaccccggtatgcggagaataggctcccaaaagggctgaagcttcaattatcgttatccgcgcaattactacacaaagcttagtaacttcccaagaaattctttggttggccgctccgctggtaccccaccagtaggcttggcagatgaggctgagtaatccccactggcgacagtgactcagcctgcgtggctgcctacacacctggcaacaggtgtgaagccatagaaaggacagggtgtgaagagccccgtgtgctaattgtgattcctccggcccctgaatgcggctaatccaaccccacatccaatgcgcataaaccaatgcgtagttggtcgtaatgggcaactgtgggacggaaccgactactttgggtgtccgtgtttccttttattccttattattagttcatggtgacaagtataagtgtttatatttgtcatc

SEQ ID NO: 21738 - DNA, 606 bp, synthetic construct
  source 1..606: mol_type = other DNA
ttaaaactgggttcaggttgttcccatctgaacttcccacgtggagtagtacactattattacggtaattttgtacgccagttttacctccctccccaaatgtaacttagaagatgtacacaacgaccaacaggcggtggttatccaaaccatcaaaggtcaagcacttctgtttccccggtcaatgttgatatgctccaacagggcaaaaacaactgcgatcgttatccgcaagatgcctacgcaaagcttagtaacactttggaagatttatggctggtcgttccactataccccatagtagacctggcagatgaggctagaaataccccactggtgacagtgttctagcctgcgtggctgcctgcgcaccctatgggtgcgaagccatacattggacaaggtgtgaagagccccgtgtgctcatcttgagtcctccggcccctgaatgtggctaaccttaaccccgcagccagtgcacacaatccagtgtgtttttggtcgtaatgagtaattgtgggatgggaccaactactttgggtgtccgtgtttcactttttcctttattatgcttatggtgacaatatatacatatatattgacacc

SEQ ID NO: 21739 - DNA, 619 bp, synthetic construct; identical to SEQ ID NO: 719
  source 1..619: mol_type = other DNA

SEQ ID NO: 21740 - DNA, 612 bp, synthetic construct
  source 1..612: mol_type = other DNA
ttaaaactggatccaggttgttcccacctggatctcccaaagggagtggaactctgttattacggtaactttgtacgccagttttatcctcccccaccccatgtaacttagaagcttttcacaaagaccaatagttggtaatcatccagattacttaaggtcaagcacttctgtttccccggtcaacgttgatatgctctaacagggcaaaaacaactgcgatcgttatccgcaaagcgcctacgcaaagcctagtaacacctttgaaattgtttggttggtcgttccgccattttccctggtagacctggcagatgaggctagaaacaccccactggcgacagtgttctagcctgcgtggctgcctgcacaccctgtgggtgtgaagccaaataatggacaaggtgtgaagagccccgtgtgctcgctttgagtcctccggcccctgaatgcggctaaccttaaccctgcagctagagcacacaagccagtgtgtatctagtcgtaatgagtaattgcgggacgggaccgactactttgggtgtccgtgtttcactttttacttataattgcttatggtgacaatatatatatagtatatatattgacacc

SEQ ID NO: 21741 - DNA, 606 bp, synthetic construct
  source 1..606: mol_type = other DNA
gtgggttgctcccacccacactgtctacggacgttgtactcttgtattccggtacacttgtacgccagtttgccaccctaaataccccgtaacaatagaagtctacgcacacttagaccaataggggggtgttcatccagttcacccaaggtcaagcacttctgtttccccggcataggggtgctaggcttcacccgaggccgaagctctgattgtcgttatccgcacaactactggacaaagcctagtaacaccctacgatgtagtatggttggttgttccgccagtatcccctggtaaacctggcagatggggctagaagttcctcactggcgacagtgttctagcccgcgtggctgcctgctccctcacgggagaagccattctactgacaaggtgtgaagagccccgtacgctagttgtgactcctccggcccctgaatgcggctaatccaaccctgcagccattacatggaagccaccatgtggatggtcgtaatgagtaattgcgggacggaaccgactactttgggtgtccgtgtttcttgtttttcttttactgacgtttatggtgacaatatatatataacgtatatattgttcacc

SEQ ID NO: 21742 - DNA, 613 bp, synthetic construct
  source 1..613: mol_type = other DNA
gtaggtgatctgggtgggaacaacccagatcccctacatggtgttgtacactattatcacggtaattttgtacgccagttttatatccccttcccttaatgtaacttagaagtaaagcaaactgatcaataggggacaatcatccagattgtcaaagatcaagcacttctgtttccccggtcaaagttgatatgctccacaagggcaaaaacaactgagatcgttatccgcaagatgcctacgcaaagcctagtaacatattgaaagatacttggttggtcgctcagctgttaacccaacagtagacctggcagatgaggctagagattcccctccggcgacggagttctagcctgcgtggctgcctgcacaccctttgggtgtgaagccaagtattggacaaggtgtgaagagccgcgtgtgctcatcttgagtcctccggcccctgaatgtggctaaccttaaacctgcagccagtgcacgcaatccagtgtgtagctggtcgtaatgagcaattgcgggatgggaccaactactttgggtgtccgtgtttcactttttcttttattattgcttatggtgacaatatatatagcatatatatattgttatc

SEQ ID NO: 21743 - DNA, 652 bp, synthetic construct; identical to SEQ ID NO: 790
  source 1..652: mol_type = other DNA

SEQ ID NO: 21744 - DNA, 464 bp, synthetic construct
  source 1..464: mol_type = other DNA
ttgcgcagtgtttcgctccgcacaaccccagtgtagatcaggtcgatgagtcaccgcatcccccacgggcgaccgtggcggtggctgcgttggcggcctgcccatggggtaacccatgggacgctacaatactgacatggtgtgaagagtctattgagctaactggtagtcctccggcccctgaatgcggctaatcccaactgcggagcacgtgcttccaatccaggaggtagcgtgtcgtaacgggcaactctgcagcggaaccgactactttgggtgtccgtgtttcctttatctctttattggctgcttatggtgacaattgaaagattgttgccatatagctattggattggccatccggtatctaacagagcaatcatatacctgtttgttggatttgttccacttaacaaaacagagttccgtactttgtgttatattattaggttgaacacatcaaa

SEQ ID NO: 21745 - DNA, 613 bp, synthetic construct; identical to SEQ ID NO: 689
  source 1..613: mol_type = other DNA

SEQ ID NO: 21746 - DNA, 641 bp, synthetic construct; identical to SEQ ID NO: 772
  source 1..641: mol_type = other DNA

SEQ ID NO: 21747 - DNA, 610 bp, synthetic construct; identical to SEQ ID NO: 48
  source 1..610: mol_type = other DNA

SEQ ID NO: 21748 - DNA, 445 bp, synthetic construct; identical to SEQ ID NO: 489
  source 1..445: mol_type = other DNA

SEQ ID NO: 21749 - DNA, 554 bp, synthetic construct
  source 1..554: mol_type = other DNA
tcttatgagcaagcacttctgtctccccggtgcggttgtatagactgtttccacggttgaaaacaacttatccgttatccgctatagtacttcgagaaacctagtatcacctttggattgttgatgcgttgcgctcagcacactaacccgtgtgtagcttgggctgatgagtctggacgtaccccactggtgacagtggtccaggctgcgttggcggcctactcatggtgaaaaccatgagacgctagacatgaacaaggtgtgaagagtctattgagctactatagagtcctccggcccctgaatgcggctaatcttaaccatggagcaagtgctcacaagccagtgagttgcttgtcgtaacgcgcaagtccgtggcggaaccgactactttgggtgtccgtgtttcactttttacctttatgactgcttatggtgacaatttaatattgttaccatttagcttgtcagattaatcgcgtgaaatcctaaatcttgttcaccaatttgtattcggatagcttcatttgaaaattctaaactcattcataaag

SEQ ID NO: 21750 - DNA, 523 bp, synthetic construct
  source 1..523: mol_type = other DNA
ggaaaaaacgtccgttatccggccaattacttcaagaaacccagtaccaccatgaaggttgcgcagcgtttcgctccgcacaaccccagtgtagatcaggtcgatgagtcaccgcattcctcacgggcgaccgtggcggtggctgcgctggcggcctgcccatggggcaacccatgggacgcttcaatactgacatggtgcgaagagtcaattgagctaattggtagtcctccggcccctgaatgcggctaatcctaactgtggagcagattcccgcatgccagcgggtggtctgtcgtaacgggcaactctgcagcggaaccgactactttgggtgtccgtgtttccttttattcctatatcggctgcttatggtgacaattgagagattgttaccatatagctattggattggccatccggtgacaaacagagcaattatttaccaatttattggttttgtaccattgaattttaacgtattcaaaactcttaaccttattttggctcttaatacagcaaa

SEQ ID NO: 21751 - DNA, 613 bp, synthetic construct
  source 1..613: mol_type = other DNA
ataaaactgggtccaggttgttcccacctggatctcctacatggagttgtactctattattccggtaatcttgtacgccagttttatatcccctacccctttgtaacttagaagttaaacacacagaccaataggcggtggctatccaggtcactaatggtcaagcacttctgtttccccggtcaagattgatacgctctaacagggcgaaaacagtcaagatcgttaaccgcaaagtgactacgcaaagcttagtaataccttgaagagtctatggctggtcgttccgctataaccccctagtagacctggcagatgaggctagaaacaccccactggtaacagtgttctagcctgcgtggctgcctgcacaccctttcgggtgtgaagccatatatttgacaaggtgtgaagagccccgtgtgctcactttgagtcctccggcccctgaatgtggctaaccttaaccctgcagctagcgtatgtaatccaacatattgctagtcgtaatgagcaattgcgggatgggaccaactactttgggtgtccgtgtttcactttttccttttattttgcttatggtgacaatatatatagtatatatattggcatc

SEQ ID NO: 21752 - DNA, 591 bp, synthetic construct
  source 1..591: mol_type = other DNA
cccaatgggtgttgtactctgttattccggtaactttgtacgccagtttttccctcccctccccatccttttacgtaacttagaagttttaaatacaagaccaatagtaggcaactctccaggttgtctaaggtcaagcacttctgtttccccggttgatgttgatatgctccaacagggcaaaaacaacagataccgttatccgcaaagtgcctacacagagcttagtaggattctgaaagatctttggttggtcgttcagctgcatacccagcagtagaccttgcagatgaggctggacattccccactggtaacagtggtccagcctgcgtggctgcctgcgcacctctcatgaggtgtgaagccaaagatcggacagggtgtgaagagccgcgtgtgctcactttgagtcctccggcccctgaatgcggctaaccttaaacctgcagccatggctcataagccaatgagtttatggtcgtaacgagtaattgcgggatgggaccgactactttgggtgtccgtgtttcactttttcctttattaattgcttatggtgacaatatatatattgatatatattggcatc

SEQ ID NO: 21753 - DNA, 553 bp, synthetic construct
  source 1..553: mol_type = other DNA
cttatgagcaagcacttctgtctccccggtgcggttgtatagactgtttccacggttgaaaacaacttatccgttatccgctatagtacttcgagaaacctagtatcacctttggattgttgatgcgttgcgatcagcacactgacccgtgtgtagcttgggctgatgagtctggacgtaccccactggtgacagtggtccaggctgcgttggcggcctactcatggtgaaaaccatgagacgctagacatgaacaaggtgtgaagagtctattgagctactatagagtcctccggcccctgaatgcggctaatcttaaccatggagcaagtgctcacaagccagtgagttgcttgtcgtaacgcgcaagtccgtggcggaaccgactactttgggtgtccgtgtttcactttttacctttatgactgcttatggtgacaatttaatattgttaccatttagcttgtcagattaatcgcgtgaaatcctaaatcttgttcaccaatttgtattcggatagcttcatttgaaaattctaaactcattcataaag

SEQ ID NO: 21754 - DNA, 604 bp, synthetic construct
  source 1..604: mol_type = other DNA
gtcgtggttgttcccaccacgactatctacggatgtagtgctcttgtattccggtacacttgcacgccagttttgttaccctccccacattgtaacttagaagattaacacaaagaccaataggcggcaatgaaccacattgtcaacggtcaagcacttctgtctccccggtcaatctggatatgctttaccaaaggcaaaaactggagcgatcgttatccgcaaggtgcctacgggaaacctagtagcactctttatttgatctggttggttgttcagccgttaaacccaaacggtaaacctggcagatgaggctggaaaatccccaccagcgatggtgttccagcctgcgtggctgcctgcacacccggaagggtgtgaagccttttcaaagacagggtgcgaagagtctactgtgctcaccttgattcctccggcccctgaatgtggctaatcctaaccccgcagctgtagtgtgcaatccagcacatttgcagtcgtaatgggtaactgcgggatggaaccaactactttgggtgtccgtgtttctctttttacctttatatttgcttatggtgacaattatacagatatagttgtcatc

SEQ ID NO: 21755 - DNA, 614 bp, synthetic construct
  source 1..614: mol_type = other DNA
ttaaaactgagtcgtggttgttcccaccacgactatctacggatgtagtgctcttgtattccggtacacttgcacgccagttttgttaccctccccacattgtaacttagaagatcaacacaaagaccaataggcggcaatgaaccacattgtcaacggtcaagcacttctgtctccccggtcaatctggatatgctttaccaaaggcaaaaactggagcgatcgttatccgcaaggtgcctacgggaaacctagtagcactctttatttgatctggttggttgctcagccgttaaacccaaacggtaaacctggcagatgaggctggaaaatccccaccagcgatggtgttccagcctgcgtggctgcctgcacacccgaaagggtgtgaagccttttcaaagacagggtgcgaagagtctactgtgctcaccttgattcctccggcccctgaatgtggctaatcctaaccccgcagctgtagtgtgcaatccagcacatttgcagtcgtaatgggtaactgcgggatggaaccaactactttgggtgtccgtgtttctctttttacctttatatttgcttatggtgacaattatacagatatagttgtcatc

SEQ ID NO: 21756 - DNA, 611 bp, synthetic construct
  source 1..611: mol_type = other DNA
ttaaaactgggtccaggttgttcccacctggatctcccaaagggagtggtactctgttattacggtaactttgtacgccagttttatcctccccctaccccctgtaacttagaagtttttcacaaagaccaatagttggtaatcatccagattacttaaggtcaagcacttctgtttccccggtcaatgctgatatgctccaacagggcaaaaacaactgcgatcgttatccgcaaagcgcctacacaaagcctagtagcacctttgaaattatttggttggtcattccgccatttcccctggtagacctggcagatgaggctggaagtaccccactggcgacagtgttccagcctgcgtggctgcctgcacaccctatgggtgtgaagccaaataatggacaaggtgtgaagagccccgtgtgctcgctttgagtcctccggcccctgaatgcggctaaccttaaccctgcagctggagcacacaaaccagtgtgtatctagtcgtaatgagcaattgcgggatgggaccgactactttgggtgtccgtgtttcactttttacttataattgcttatggtgacaatatatatatagtatatattggcact

SEQ ID NO: 21757 - DNA, 608 bp, synthetic construct; identical to SEQ ID NO: 43
  source 1..608: mol_type = other DNA

SEQ ID NO: 21758 - DNA, 590 bp, synthetic construct
  source 1..590: mol_type = other DNA
ccaatgggtgttgtactctgttattccggtaactttgtacgccagtttttccctcccctccccatccttttacgtaacttagaagttttaaatacaagaccaatagtaggcaactctccaggttgtctaaggtcaagcacttctgtttccccggttgatgttgatatgctccaacagggcaaaaacaacagataccgttatccgcaaagtgcctacacagagcttagtaggattctgaaagatctttggttggtcgttcagctgcatacccagcagtagaccttgcagatgaggctggacattccccactggtaacagtggtccagcctgcgtggctgcctgcgcacctctcatgaggtgtgaagccaaagatcggacagggtgtgaagagccgcgtgtgctcactttgagtcctccggcccctgaatgcggctaaccttaaacctgcagccatggctcataagccaatgagtttatggtcgtaacgagtaattgcgggatgggaccgactactttgggtgtccgtgtttcactttttcctttattaattgcttatggtgacaatatatatattgatatatattggcatc

SEQ ID NO: 21759 - DNA, 588 bp, synthetic construct
  source 1..588: mol_type = other DNA
ggtaactttgtgtttgagtagtactctattattacggtaatcttgtacgccagttttatatccccttccccctttgtaacttagaagttatgaacacagaccaataggtggtgatcatccagatcgcttaaggtcaagcacttctgtttccccggtcaacgttgatatgctccaccagggcaaaaacagcagagatcgttatccgcaaggtgcctacgcaaagcctagtaacatcttcgagggtacatggttggtcgctcagctattccccatagtagacctggcagatgaggctagaaaccccccactggtaacagtgttctagcctgcgtggctgcctgcgcactcttatgagtgcgaagccatatattcgacaaggtgtgaagagccccgtgtgctcactttgagtcctccggcccctgaatgtggctaaccctaaccctgcagctagtgcatgaaatccatcatgttgctagtcgtaatgagcaattgcgggatgggaccaactactttgggtgtccgtgtttcactttttccttttatatttgcttatggtgacaatatatatataacatatatattggcatc

SEQ ID NO: 21760 - DNA, 595 bp, synthetic construct
  source 1..595: mol_type = other DNA
accacccaatgggtgttgtactctgttattccggtaactttgtacgccagtttttccctcccctccccatccttttacgtaacttagaagttttaaatacaagaccaatagtaggcaactctccaggttgtctaaggtcaagcacttctgtttccccggttgatgttgatatgctccaacagggcaaaaacaacagataccgttatccgcaaagtgcctacacagagcttagtaggattctgaaagatctttggttggtcgttcagctgcatacccagcagtagaccttgcagatgaggctggacattccccactggtaacagtggtccagcctgcgtggctgcctgcgcacctctcatgaggtgtgaagccaaagatcggacagggtgtgaagagccgcgtgtgctcactttgagtcctccggcccctgaatgcggctaaccttaaacctgcagccatggctcataagccaatgagtttatggtcgtaacgagtaattgcgggatgggaccgactactttgggtgtccgtgtttcactttttcctttattaattgcttatggtgacaatatatatattgatatatattggcatc

SEQ ID NO: 21761 - DNA, 613 bp, synthetic construct
  source 1..613: mol_type = other DNA
caccggcgagcatactgtgcgttgtacactggaattacggttcctttgtatgcctgttttatgatcccttcccctcttttctatcgtctccaattttccacgtaacttagaagcaaagtacatgagcccaataggagcggctaacccatagccgtatagggcaagcacttctgttaccccggatgtgtgaatagacttctcacgaggttgaagctgaagcattcgttacccgcacttgtactgcgcggaaattagtagcacttttgccagcttcatggcgtttcgctcagcgtttcccccacgcagatcagggcaatggggctacacaacccccaccggcgacggtggtgtagcccgcgtggtgccccgcccgagctatcagctcgggacgccatgatgaagacagggtgtgaaggttcgagtgcgctacaagtgagtcctccggcccctgaatgcggctaaccttaaccccgtagctgtggtatgcatgccagcataaacacagtcgtaatgggcaactacgggatgggaccgactactttgggtgtccgtgtttcactttttccttaaatttgtcttatggttacaggtttatgcaaatagatctgtaatc

SEQ ID NO: 21762 - DNA, 601 bp, synthetic construct; identical to SEQ ID NO: 652
  source 1..601: mol_type = other DNA

SEQ ID NO: 21763 - DNA, 614 bp, synthetic construct
  source 1..614: mol_type = other DNA
gttaaaattgggtctgggttgctcccacccagatcacccacgtggtgttgtgctctgttattccggtaactttgcacgccaattttataaccccttcccccatgtaacttagaagttttgcacacagaccaatagcaagcagcataccagctgtataaggtcaagcacttctgtctccccggtcgacgttgatatgcttcaacaaggcaaaaacaacagagatcgttatccgcaagatgcctacacaaagcctagtacctcctttgacggtgtttgtctggtcgctcaggtgcttccccagcactagacctggcagatgaggctagaaactccccactggcgacagtgttctagcctgcgtggctgcctgcacacccttctgggtgtgaagccaaatactagacaaggtgtgaagagccccgtgtgctcatcttgagtcctccggcccctgaatgcggctaaccttaaacccgcagccattgctcacaatccagtgggtagatggtcgtaatgagcaattgtgggatgggaccgactactttgggtgtccgtgtttcatgttttactttatgatttgcttatggtgacaatatatagtgatatatattggcatc

SEQ ID NO: 21764 - DNA, 554 bp, synthetic construct
  source 1..554: mol_type = other DNA
ttgtacgcctgtttctcccttccctcccatcctaaattatcccagtaacttagaagacttgaactaccgtacaataggtgctgtcacatccagtgatggctagtacaagcacttctgtttccccggagcggagtatagatggccaccgctgtcaaaagctcttaaccgttatccgccaattaactacgcaacggctagtaacatcttgttattcttagggcgttcgatcaggtgagtacacccctcactagtctggtcgatgaggctgagaattccccacgggcgaccgtgtctcagcctgcgtggcggccagcccagcttatgctgggacgccttaattgtgacatggtgtgaagacccacgtgtgcttaattgtgagtcctccggcccctgaatgcggctaacctaaaccctggagccttgagacacaatccagtgttggcaaggtcgtaatgagcaattccgggacgggaccgactactttgggtgtccgtgtttcctgttatttccaaattgttcttatggtcacaatataagttatatatattgtgatc

SEQ ID NO: 21765 - DNA, 617 bp, synthetic construct
  source 1..617: mol_type = other DNA
taaaactgggagtgggttgttcccacccactccacccatgtggtgttgtactctgttattacggtaaccttgtacgccagttttccccacccttccccacaatgtaacttagaagtttgtacaacatgaccaataggtgacaattatccagattgtcaaaggtcaagcacttctgtttccccggtcaatgaggatatgctttacccaaggcaaaaaccttaaagatcgttatccccacactgcctacacagagcctagtaccacttttgatgtagttaggttggtcgctccctgcaaacccagcagtagacctggcagatgaggctggacattccccactggcgacagtggtccagcctgcgtggctgcctgctcaccctttatgggtgagaagcctaattattgacaaggtgtgaagagccgcgtgtgctcagtgtgcttcctccggcccctgaatgtggctaaccttaaccctgcagccgttgcccataatccaatgggtttgcggtcgtaatgcgcaagtgcgggacgggaccaactactttgggtgtccgtgtttcctgtttttcttttgattgcattttatggtgacaatttatagaatatagattgtcatc

SEQ ID NO: 21766 - DNA, 599 bp, synthetic construct
  source 1..599: mol_type = other DNA
ccacaccgtctacggacgtagtactcttgtatctcggtacatttgtacgccagttttccctccctcccccctttcacgtaacttatagaagcttgaacatacaggcgaataggaagccaacaaaccatgttggtaaacgccaagcacttctgtttccccggtattagagtgttaggcttctcacgaggctgaagcttgatatatcgttacccgcacagttactaagcagagcctagtaacactttgatctctatactggctggtcgctccgtcagaaaccccctgatagacctggcagatggggctggaaattccccactggtgacagtgttccagcccgcgtggctgcctgtccccctttcttgggggaaagccaatatatagacaaggtgccaagagccgcgtttgctaattgtgagtcctccggcccctgaatgcggctaatccaaccccacagctatcgcatggattccaccatgtaggtagtcgtaatgggcaactgtgggacggaaccgactactttgggtgtccgtgtttccttttataccttattttatctcatggtgacaacatatattgataagtatatgttgactacc

SEQ ID NO: 21767 - DNA, 635 bp, synthetic construct
  source 1..635: mol_type = other DNA
cgcctgttttatatccccttacccagtaactttagaagtaattcacacagttcaatagagagggggtacaaaccagtaccaccacgaacaagcacttctgtttccccggtgaagctacatagactgtccccacggttgaaagtggcagatccgttatccgcttaagtacttcgagaagcctagtatcaccttggaatcttcgacgcgttgcgctcagcactctaccccgagtgtagcttaggctgatgagtctgggcataccccaccggcgacggtggcccaggctgcgttggcggcctacccatggctaacgccatgggacgctagttgtgaacaaggtgtgaagagcctattgagctacttaagagtcctccggcccctgaatgcggctaatcctaaccacggagcaagtgcccacaaaccagtgggtggcttgtcgtaacgcgtaagtctgtggcggaaccgactactttgggtgtccgtgtttccttttatttttatcatggctgcttatggtgacaatctaagattgttatcatatagctattggattggccatccggtgattcacagagacttgaaagctaactcaccttcctataacactcatttgtttatcaatcttatagcacaca

SEQ ID NO: 21768 - DNA, 599 bp, synthetic construct
  source 1..599: mol_type = other DNA
ccacaccgtctacggacgtagtactcttgtatctcggtacatttgtacgccagttttccctccctcccccctttcacgtaacttatagaagcttgaacatacaggcgaataggaagccaacaaaccatgttggtaaacgccaagcacttctgtttccccggtattagagtgttaggcttctcacgaggctgaagcttgatatatcgttacccgcacagttactaagcagagcctagtaacactttgatctctatactggctggtcgctccgtcagaaaccccctgatagacctggcagatggggctggaaattccccactggtgacagtgttccagcccgcgtggctgcctgtcccccttccttgggggaaagccaatatatagacaaggtgccaagagccgcgtttgctaattgtgagtcctccggcccctgaatgcggctaatccaaccccacagctatcgcatggattccaccatgtaggtagtcgtaatgggcaactgtgggacggaaccgactactttgggtgtccgtgtttccttttataccttattttatctcatggtgacaacatatattgataagtatatgttgactacc

SEQ ID NO: 21769 - DNA, 593 bp, synthetic construct
  source 1..593: mol_type = other DNA
accacccaatgggtgttgtactctgttattccggtaactttgtacgccagtttttccctcccctccccatccttttacgtaacttagaagttttaaatacaagaccaatagtagcaactctccaggttgtctaaggtcaagcacttctgtttccccggttgatgttgatatgctccaacagggcaaaaacaacagataccgttatccgcaaagtgcctacacagagcttagtaggattctgaaagatctttggttggtcgttcagctgctacccagcagtagaccttgcagatgaggctggacattccccactggtaacagtggtccagcctgcgtggctgcctgcgcacctctcatgaggtgtgaagccaaagatcggacagggtgtgaagagccgcgtgtgctcactttgagtcctccggcccctgaatgcggctaaccttaaacctgcagccatggctcataagccaatgagtttatggtcgtaacgagtaattgcgggatgggaccgactactttgggtgtccgtgtttcactttttcctttattaattgcttatggtgacaatatatatattgatatatattggcatc

SEQ ID NO: 21770 - DNA, 602 bp, synthetic construct
  source 1..602: mol_type = other DNA
ctggatccaggttgtccccacctggatctcccacagggagtggtactctgttattacggtaactttgtatgccagttttatcctccccacccctatgtaacttagaagttttacataaagaccaataggtagtaatcatccagattacttaaggtcaagcacttctgtttccccggttgatgttgatatgctccaacagggcaaaaacaacagaaatcgttacccgcaaagtgcctacgcaaagcctagtagcactttagaagttgtctggctggtcgctccgccatttcccctggtagacctggcagatgaggctagaaataccccactggcgacagtgttctagcctgcgtggctgcctgcacaccctatgggtgtgaagccatacaatggacaaggtgtgaagagccccgtgtgctcactttgagtcctccggcccctgaatgtggctaaccttaaccctgcagctagggcacacaatccagtgtgtatctagtcgtaatgagcaattgcgggacgggaccaactactttgggtgtccgtgtttctcttttatccttatgtttgcttatggtgacaatatatgaatatatattgacacc

SEQ ID NO: 21771 - DNA, 593 bp, synthetic construct
  source 1..593: mol_type = other DNA
ctcccacccagatcacccaagcggtgtagtactctgtcattccggtgactttgtacgccagttttgcacccctccccttttgtaacttagaagaaataagttcagaccaataggaaggcgacaagccagtcgtctaaggtcaagtacttctgtttccccggtcaatgctgatatgcttcaccaaggcaaaaacagcagcgatcgttatccgcaagacgcctacacaaagcctagtaacgcctttgaagatatttgtctggtcactcaggtacaaccccagtactagacctggcagatgaggctggaaaatccccactggcgacagtgttccagcctgcgtggctgcctgcacacccatatgggtgtgaagccaaatattggacaaggtgtgaagagccccgtgtgctcgttttgagtcctccggcccctgaatgcggctaaccttaaccccacagccattgcttgcattccagcaagtctatggtcgtaatgagtaattgtgggatgggaccgactactttgggtgtccgtgtttcacttttttccttttattatgcctatggtgacaatatatagtgttatatattggcatc

SEQ ID NO: 21772 - DNA, 543 bp, synthetic construct
  source 1..543: mol_type = other DNA
ttcttatgagcaagcacttctgtctccccggtgcggttgtataaactgttcccacggttgaaaacaacctatccgttatccgctatagtacttcgagaaacctagtatcacctttggattgttgatgcgttgcgctcagcacactaacccgtgtgtagcttgggtcgatgagtctggacataccccactggcgacagtggtccaggctgcgttggcggcctactcatggtgaaaaccatgagacgctagacatgaacaaggtgtgaagagtctattgagctactatagagtcctccggcccctgaatgcggctaatcttaaccatggagcaagtgctcacaagccagtgagttgcttgtcgtaatgcgcaagtccgtggcggaaccgactactttgggtgtccgtgtttcactttttacttttatgactgcttatggtgacaatttgatattgttaccatttagcttgtcaaatcaattacaaaagacctaaatcttgtttatcaacttgcattttgataacttcaattagaaaaatttaata

SEQ ID NO: 21773 - DNA, 569 bp, synthetic construct
  source 1..569: mol_type = other DNA
ggagtggtacactattatcccggtaattttgtacgccagttttataacccctcccccttgcaacttagaagatgtaaacacagaccaataggtggtaactaaccaagttactaaaggtcaagcacttctgtttccccggctgacattgatatgctccaccagggcaaaaacaatagaagtcgttatccgcaaagtgcctacgcaaagcctagtagcactttagattgtatatggttggtcgctcagctattccccctagtagacctggcagatgaggctagaaataccccactggtaacagtgttctagcctgcgtggctgcctgcgcatccttctgggtgcgaagccatatacatgacaaggtgtgaagagccccgtgtgctcactttgagtcctccggctcctgaatgtggctaaccttaaacctgcagccagtgcacataaaccaatgtgtggctggtcgtaatgagtaattgcgggatgggaccaactactttggatgtccgtgtttcttgtttttccttaattttgcttatggtgacaatatatagataatatatattggcatc

SEQ ID NO: 21774 - DNA, 610 bp, synthetic construct
  source 1..610: mol_type = other DNA
taaaactgaatcatggttgttcccaccatgattacccacgcggtgcagtggtcttgtattacggtacatttccataccagttttatacaccccaccccgaaacacatagaagcttgtacacaatgaccaataggtggtgaccatccaggttactaacggtcgagcacttctgtttccccggtacccttgtatacgcttcacccgaggcgaaaaacgaggttatcgttatccgcaaagtgcctacgagaagcctagtagcacttttgaaacctatggctggtcgctcagctgctcacccagcagtagacctggcagatgaggctagacattccccaccagcgatggtggtctagcctgcgtggctgcctgcacaccctgtcgggtgtgaagccagaaagtggacaaggtgtgaagagcctattgtgctcactttgagtcctccggcccctgaatgtggctaatcctaaccccgtagctgttgcatgcaacccagcatgtatgcagtcgtaatgggcaactatgggatggaaccaactactttgggtgtccgtgtttcttgttttacttttcattgcttatggtgacaattgtagttgatacacttgttacc

SEQ ID NO: 21775 - DNA, 527 bp, synthetic construct
  source 1..527: mol_type = other DNA
cactgtttccccggtgtggttgtataaactgttcccacggttgaaaacaacctatccgttatccgctatagtacttcgagaaacctagtatcacctttggattgttgacgcgttgcgctcagcacactaacccgtgtgtagcttgggttgatgagtctggacataccccactggcgacagtggtccaggctgcgttggcggcctactcatggtgaaaaccatgagacgctagacatgaacaaggtgtgaagagtctattgagctactatagagtcctccggcccctgaatgcggctaatcctaaccatggagcaagtgctcacagaccagtgagttgcttgtcgtactgagcaagtctgtggcggaaccgactactttgggtgtccgtgtttcactttttacttttatgactgcttatggtgacaatttgatattgttaccatttagcttgtcaaattaattgcaaaagatcctaaatcttacttaccaacttgcattttgataaccttgatttgaaaattttaata

SEQ ID NO: 21776 - DNA, 527 bp, synthetic construct
  source 1..527: mol_type = other DNA
cactgtttccccggtgtggttgtataaactgttcccacggttgaaaacaacctatccgttatccgctatagtacttcgagaaacctagtatcacctttggattgttgacgcgttgcgctcagcacactaacccgtgtgtagcttgggttgatgagtctggacataccccactcgcgacagtggttcaggctgcgttggcggcctactcatggtgaaaaccatgagacgctaaacatgaccaaggtgtgaagagtgtattgagctactatagagtcctccggcccctgaatgcggctaatcctaaccatggagcaagagctcacagaccagtgagtcgcttgtcgtactgcgcaagtctgtggcggaaccgactactttgggtgtccgtgtttcactttttacttttatgactgcttatggtgacaatttgatattgttaccatttagcttgtcaaattaattgcaaaagatcctaaatcttacttaccaacttgcattttgataaccttgatttgaacattttaata

SEQ ID NO: 21777 - DNA, 527 bp, synthetic construct
  source 1..527: mol_type = other DNA
cactgtttccccggtgtggttgtataaactgttcccacggttgaaaacaacctatccgttatccgctatagtacttcgagaaacctagtatcacctttggattgttgacgcgttgcgctcagcacactaacccgtgtgtagcttgggtcgatgagtctggacataccccactggcgacagtggtccaggctgcgttggcggcctactcatggtgaaaaccatgagacgctagacatgaacaaggtgtgaagagtctattgagctactatagagtcctccggcccctgaatgcggctaatcctaaccatggagcaagtgctcacaggccagtgagttgcttgtcgtaatgcgcaagtccgtggcggaaccgactactttgggtgtccgtgtttcactttttacttttatgactgcttatggtgacaatttgatattgttaccatttagcttgtcaaattaattgcaaaagatcctaaatcttacttaccaacttgcattttgataaccttaatttgaaaatgttaata

SEQ ID NO: 21778 - DNA, 455 bp, synthetic construct; identical to SEQ ID NO: 495
  source 1..455: mol_type = other DNA

SEQ ID NO: 21779 - DNA, 568 bp, synthetic construct
  source 1..568: mol_type = other DNA
gagtggtactctgttattacggtaactttgtacgccagttttatcctccccttaccccgtgtaacttagaagtttttcacaaagaccaatagttggtaatcatccagattacttaaggtcaagcacttctgtttccccggtcaatgttgatatgctccaacagggcaaaaacaactgcgatcgttatccgcaaagcgcctacgcaaagcctaatagcacctttgagattatttggttggtcgttccgccatttcccctggtagacctggcagatgaggctggaagtaccccactggcgacagtgttccagcctgcgtggctgcctgcacaccctatgggtgtgaagccaaataatggacaaggtgtgaagagccccgtgtgctcgctttgagtcctccggcccctgaatgcggctaaccttaaccctgcagctggagcacacaaaccagtgtgtatctagtcgtaatgagcaattgcgggatgggaccgactactttgggtgtccgtgtttcactttttacttataattgcttatggtgacaatatatatatagtatatattggcact

SEQ ID NO: 21780 - DNA, 600 bp, synthetic construct
  source 1..600: mol_type = other DNA
acccctaccacccatgtggtgtagtgctcttgtattacggtacacttgcacgccagtttgcctccccaccccctttccatttacacccaaccttatgtaacttagaagcagtacactggaccaataggtggtaacaatccatgttaccaaaggtcaagcacttctgtctccccggcatgcgtggaataaacagtgcaaacggttgagaccacaaatgtcgttacccgcgcatgaactacgcagagcctagtatctccctgaaagtccattggttggtcactcagctaaaccccatagtagacctggcagatgaggcaagacgcaccccactggcgacagtggtcttgcctgcgtggctgcctgcacacccttcggggtgtgaagccaattgatagacagggtgtgaagagccgagtgtgcttcatgtgaatcctccggcccctgaatgcggctaatctaaccccgcagctgtggcacacaagccagtgtgtatgcagtcgtaacgggcaactgcgggacggaaccgactactttgggtgtccgtgtttccttttattcttttatcaagtacttatggtgacaataataaatattgttacc

SEQ ID NO: 21781 - DNA, 609 bp, synthetic construct
  source 1..609: mol_type = other DNA
actgaatccaggttgttcccacctggatttcccacgtggagtagtacactgttattccggtaactttgtacgccagttttatatcccctccccttttgtaacttagaagataagcacaaggaccaataggtggtggctatcccagtcactaaaggtcaagcacttctgtttccccggtcaatgttgatatgctccaccagggcaaaaacaacagagatcgttatccgcaaagtgcctacgcaaagcctagtagcactttgaatggtatgtggttggtcgttccgctatttcccatagtagacctggcagatgaggctagaaattccccactggcgacagtgttctagcctgcgtggctgcctgcgtgtcctaacggacacgaagccatatacttgacaaggtgtgaagagccccgtgtgctcactttgagtcctccggcccctgaatgtggctaaccttaaccctgcagctaaggcacacaacccagtgtgaacttagtcgtaatgagcaattgcgggacgggaccaactactttgggtgtccgtgtttcactttttaccttttataatgcttatggtgacaatatataataatttgtatattggcacc

SEQ ID NO: 21782 - DNA, 625 bp, synthetic construct
  source 1..625: mol_type = other DNA
ccggttgttcccaccggcgagcatactgtgcgttgtacactggaattacggttcctttgtatgcctgttttataatcccttcccctcttttctatcgtctctaattttccacgtaacttagaagcaatgtacatgagcccaataggagcggctaatccatagccgtatagggcaagcacttctgttaccccggatgtgtgaatagacttcttacgaggttgaagctgaagcattcgttatccgcacttgtactgcgcggaaattagtagcacctttgtcagcttcatggtgtttcgctcagcgtttcccccacgtagatcagggcaatggggctacacaaccctcaccggcgacggtggtgtagcccgcgtggtgccccgcccgagctatcagctcgggacgccatgatgaagacagggtgtgaaggttcgagtgcgctacaagtgagtcctccggcccctgaatgcggctaaccttaaccccgtagctgtggtatgcatgccagcataaacacagtcgtaatgggcaactacgggatgggaccgactactttgggtgtccgtgtttcactttttcctttaaatttgtcttatggttacaggtttatgcaaatagatctgtaatc

SEQ ID NO: 21783 - DNA, 626 bp, synthetic construct
  source 1..626: mol_type = other DNA
gatagaaactgggtgtgggttgtccccactcacaccacccaatgggtgttgtactctgttattccggtaactttgtacgccagtttttccccccctccccatcctttatgtaacttagaagtttaaaacataagaccaatagcaggcaactctccaggttgtctaaggtcaagcacttctgtttccccggttgacgttgatatgctccaacagggcaaaaacaactgatatcgttatccgcaaagtgcctacacagagcttagtaggattctgaaagatctttggttggtcgctcagctgcatacccagcagtagaccttgcagatgaggctggacattccccactggtaacagtggtccagcctgcgtggctgcctgcacacctcttatgaggtgtgaagccaaggattggacagggtgtgaagagccgcgtgtgctcactttgagtcctccggcccctgaatgcggctaaccttaaacctgcagccatggctcataaaccaatgagtttgtggtcgtaatgagtaattgcgggatgggaccgactactttgggtgtccgtgtttcactttttcctttattaattgcttatggtgacaatatatacatagatatatattggcatc

SEQ ID NO: 21784 - DNA, 601 bp, synthetic construct
  source 1..601: mol_type = other DNA
gatctaggttgtccccacctagatctcccacagggagtggtactctgttattacggtaactttgtatgccagttttatctcccctaccccttatgcaacttagaagttttacacaaagaccaataggcagtaaccatccaggttacttaaggtcaagcacttctgtttccccggttgacgttgatatgctccaacagggcaaaaacaacagaaatcgttacccgcaaagtgcctacgcaaagcctagtaacactttagaagttgtctggttggtcgctccgccatttcccctggtagacctggcagatgaggctagaaataccccactggcgacagtgttctagcctgcgtggctgcctgcacaccctatgggtgtgaagccatacaatggacaaggtgtgaagagccccgtgtgctcactttgagtcctccggcccctgaatgtggctaaccttaaccctgcagctagggcacataatccagtgtgtatctagtcgtaatgagcaattgcgggacgggaccaactactttgggtgtccgtgtttctctttttatccttatatttgcttatggtgacaatatatgaatatatattgacacc

SEQ ID NO: 21785 - DNA, 545 bp, synthetic construct
  source 1..545: mol_type = other DNA
ataagctgctcacgcggctgaaggagaaaacgtccgttacccggccaattacttcaagaaacccagtaccaccatgaaggttgcgcagcgtttcgctccgcacaaccccagtgtagatcaggtcgatgagtcaccgcattcctcacgggcgaccgtggcggtggctgcgctggcggcctgcccatggggcaacccatgggacgcttcaatactgacatggtgcgaagagtcaattgagctaattggtagtcctccggcccctgaatgcggctaatcctaactgtggagcagatgcccacgtaccagtgggtagtctgtcgtaacgggcaactccgcagcggaaccgactactttgggtgtccgtgtttctctttattcttatgttggctgcttatggtgacaattgagagattgttaccatatagctattggattggccatccggtgacgaatagagcgattgtatatctttttgttggattcgtaccattaaacaaaacaaattacaaaaccttgtgttacattattagattaaacacagcaaa

SEQ ID NO: 21786 - DNA, 580 bp, synthetic construct
  source 1..580: mol_type = other DNA
gtctactgggcgcagtgctctcatattccggtatgcttgcacgccagttttattcccccttccccattgtaacttagaagcaaagcacacatgatcaataggagataacctgccaggttatttaagatcaagcacttctgtttccccggcaagtgtgaatatgctttacccaaggcaaaagctaatcttgtcgttatccgcaaggtgcctacgagaagcctagtaatgctcaagatgtaatttggctggtcgctccgctgtttcccacagtagacctggcagatgaggctagacattccccaccagcgatggtggtctagcctgcgtggctgcctgcacaccctatgggtgtgaagccaaatttactgacagggtgtgaagagcctattgtgctcaccttgattcctccggcccctgaatgtggctaatcctaaccccgctgctattgcacacgaaccagtgtgtggatagtcgtaatgagcaatagtgggatggaaccaactactttgggtgtccgtgtttcttgtttttctttaatttgtcttatggtcacaatatatatataacgtatattgtgatc

SEQ ID NO: 21787 - DNA, 526 bp, synthetic construct
  source 1..526: mol_type = other DNA
tttccaacccctgtaacgttagaagtttggaacttaacagtacaataggaggcaccatatccaatggtgtaatgtacgagcacttctgtttccccggagcgaggtataggtggtacccaccgctgaaagcctttaaccgttatccgccaatcaactacgtaacagctagtagcattttgttgttgactggacgttcgatcaggtggtttacccccccactagtttggtcgatgaggctggaaattccccacgggtgaccgtgttccagcctgcgtggcggccaacccagctcatgctgggacgccctttcaatgacatggtgtgaagactcgcatgtgcttgattgtgaatcctccggcccctgaatgcggctaaccctaaccccggagccttgcatcacaatccagtgatgttagggtcgtaatgagtaattctgggatgggaccgactactttgggtgtccgtgtttctcatttttctttgaattgtcttatggtcacagcatatagtaatatatactgtgatc

SEQ ID NO: 21788 - DNA, 610 bp, synthetic construct
  source 1..610: mol_type = other DNA
ttaaaactgggtacaggttgttcccacctgtatcacccacgtggtgtggtgctcttgtattccggtacatttgcacgccagtttgccaccccctacccatcgtaacttagaagccatcaactcgaccaataggcggtggtaaaccataccacttacggtcaagcactcctgtttccccggtatgcgaggaatagactcctacagggttgaagcctcaagtatcgtcatccgcattggtactacgcaaagcttagtagtgccttgaaagtcttttggttggtcactccgctagtttcccctagtagacctggcagatgaggcaggacattccccactggcgacagtggtcctgcctgcgtggctgcctgcgcacccctaggggtgcgaagccaagtgacggacaaggtgtgaagagccccgtgtgctactaatgagtcctccggcccctgaatgcggctaatccaaccccacagctattgcacacaagccagtgtgtatatagtcgtaacgagcaattgtgggacggaaccgactactttgggtgtccgtgtttccttttattcttatcattctgcttatggtgacaatactgtgaagtagtgttgttacc

SEQ ID NO: 21789 - DNA, 611 bp, synthetic construct
  source 1..611: mol_type = other DNA
ttgaaactgaatcatggttgttcccaccatgattacccacgcggtgcagtggtcttgtattacggtacatttccataccagttttatacaccctaccccgaaacatatagaagcttgtacacaatgaccaataggtggtggccatccaggttactgacggtcaagcacttctgtttccccggtacccttgtatacgcttcaccagaggcgaaaaacgaggttatcgttatccgcaaagtgcctacgagaagcctagtagcactttcgaaacctatggctggtcgctcagctgcttacccagcagtagacctggcagatgaggctagacattccccaccagcgatggtggtctagcctgcgtggctgcctgcacaccctatcgggtgtgaagccagaaagtggacaaggtgtgaagagcctattgtgctcactttgagtcctccggcccctgaatgtggctaatcctaaccccgtagctgttgcatgcaacccagcatgtatgcagtcgtaatgggcaactatgggatggaaccaactactttgggtgtccgtgtttcttgttttacttttcattgcttatggtgacaattgtagttgatacacttgttacc

SEQ ID NO: 21790 - DNA, 611 bp, synthetic construct
  source 1..611: mol_type = other DNA
ttgaaactgaatcatggttgttcccaccatgattacccacgtggtgcagtggtcttgtattacggtacatttccataccagttttatacaccctaccccgaaacatatagaagcttgtacacaatgaccaataggtggtgaccatccaggttaccgacggtcaagcacttctgtttccccggtacccttgtatacgcttcaccagaggcgaaaaacgaggttatcgttatccgcaaagtgcctacgagaagcctagtagcactttcgaaacctatggctggtcgctcagctgctcacccagcagtagacctggcagatgaggctagacatcccccaccagtgatggtggtctagcctgcgtggctgcctgcacaccctatcgggtgtgaagccagaaagtggacaaggtgtgaagagcctattgtgctcactttgagtcctccggcccctgaatgtggctaatcctaaccccgtagctgttgcatgcaacccagcatgtatgcagtcgtaatgggcaactatgggatggaaccaactactttgggtgtccgtgtttcttgttttacttttcattgcttatggtgacaattgtagttgatacacttgttacc

SEQ ID NO: 21791 - DNA, 609 bp, synthetic construct; identical to SEQ ID NO: 663
  source 1..609: mol_type = other DNA

SEQ ID NO: 21792 - DNA, 598 bp, synthetic construct; identical to SEQ ID NO: 649
  source 1..598: mol_type = other DNA

SEQ ID NO: 21793 - DNA, 578 bp, synthetic construct
  source 1..578: mol_type = other DNA
aagtggtgtagtgctcttgtatttcggtacatttgcacgccagtttgccacccctaccccttatgtaacttagaagcttacacaaagaccaataggcggtggtaaacccataccactaacggtcaaatacttctgtttccccggcacgtgaggaataggctccaaaagggctgaagccactagtgtcgttatccgcattggtactacgcaaagcctagtatcagcctgaaaattccttggttggtcgctcggccagttatcccactggtagacctggtagatgaggcaggacttaccccactggcgacagtggtcctgcctgcgtggctgcctgcacacccctatggggtgtgaagcctaggaacggacagggtgtgaagagccccgtgtgctaccaatgagtcctccggcccctgaatgcggctaatcttaccccgcagctgttgcacacaatccagtgtgtatgcagtcgtaacgagcaattgtgggatggaaccgactactttgggtgtccgtgtttccttgtttttcttttatttgcttatggtgacaatattgatattatcagtgttgtcatc

SEQ ID NO: 21794 - DNA, 594 bp, synthetic construct
  source 1..594: mol_type = other DNA
ccacgtgggagatccaggtggagttgtactctattattccggtaattttgtacgccagttttatctccccttcccttttgtaacttagaagatgaacttaccgaccaataggtggcatttatccaaaatgtcaaaggtcaagtacttctgtttccccggttaaggatgatatgctccaacagggcaaaaacatctgcgatcgttatccgcaaaacaactacgcaaagcctagtaccacttttgagagtatgtggttggtcgctccactataaacccaatagtagacctggcagatgaggctagaagttccccactggtaacagtgttctagcctgcgtggctgcctgcgtgcctccagtaggcacgaagccatatatttgacaaggtgtgaagagccccgtgtgcttgttttgagtcctccggcccctgaatgtggctaaccttaaccctgcagctagtgtgcgcaatccagtgcatggctagtcgtaatgagcaattgcgggatgggaccaactactttgggtgtccgtgtttcttgtttttccttttatttgcttatggtgacaatatatataatacatatatattggcatc

SEQ ID NO: 21795 - DNA, 609 bp, synthetic construct
  source 1..609: mol_type = other DNA
ggcgagcacactgtgcgttgtacactggaattacggttcctttgtatgcctgttttataaccccttcccctcttttctatcatctctaatttccatgtaacttagaagcaacgtacatgagcccaataggagcggctaacccacagccgtacagggcaagcacttctgttaccccggatgtgtgaatagacttctcacgaggttgaagctgaagcattcgttatccgcacttgtactgcacggaaattagtagcacccttgccagcttcatggtgtttcgctcagcgtttcccccacgtagatcagggcaatggggctacacaacccccaccggcgacggtggtgtagcccgcgtggtgccccgcccgggctatcagcccgggacgccatgatgaagacagggtgtgaaggttcgagtgcgctacaagtgagtcctccggcccctgaatgcggctaaccctaaccccgtagctgtggtgtgcacgccagcacaagcacagtcgtaatgggtaactacgggatgggaccgactactttgggtgtccgtgtttcactttttcctttaaatttgtcctatggttacaggtttatgcaaatagatctgtaatc

SEQ ID NO: 21796 - DNA, 608 bp, synthetic construct; identical to SEQ ID NO: 661
  source 1..608: mol_type = other DNA

SEQ ID NO: 21797 - DNA, 591 bp, synthetic construct; identical to SEQ ID NO: 642
  source 1..591: mol_type = other DNA

SEQ ID NO: 21798 - DNA, 563 bp, synthetic construct
  source 1..563: mol_type = other DNA
cagtttaggtaactttgtgtttgacgccagttttatcatccctttcccttttgtaacttagaagttataaacttgagaccaataggtggtgatcaaccagatcactaaaggtcaagcacttctgtttccccggtcaatgctgatatgctccaccagggcaaaaacagccgcgatcgttatccgcaaagtgcctacgcaaagcctagtaatatcttgaatgatatatggttggtcgttcagctaaaccccatagtagacctggcagatgaggctggaaattcctcactggcgacagtgttccagcctgcgtggctgcctgcgcactctcacgagtgcgaagccatatatttgacaaggtgtgaagagccccgtgtgctcactttgagtcctccggcccctgaatgtggctaaccttaaccctgcagctagtgcatacaatccagtgtgtggctagtcgtaatgagcaattgcgggatgggaccaactactttgggtgtccgtgtttcactttttccttttataatttgcttatggtgacagtatatagcttatatattgttacc

SEQ ID NO: 21799 - DNA, 484 bp, synthetic construct
  source 1..484: mol_type = other DNA
gtacaataggttgcactacatccagtggtgtttcgtacaagcacttctgtttccccggagcggggtatagacggtacccactgtcaaaagcccttaaccgttatccgccaatcaactacgtaatggctagtaacatcatgaaggtgagttgacgttcgatcaggtggtaacccccactagtttggtcgatgaggctaggaatcccccacgggtaaccgtgtcctagcctgcgtggcggccaacccagcgtttgctgggacgccaattcactgacatggtgcgaatacttgcatgtgcttgattgtgattcctccggcccctgaatgcggctaaccttaaccccggagccttgcagcataaaccaatgttgtggaggtcgtaatgagcaattctgggatgggaccgactactttgggtgtccgtgtttcctgtttttctcaaattgtcttatggtcacagcatatatattgtatatactgtgatc

SEQ ID NO: 21800 - DNA, 594 bp, synthetic construct
  source 1..594: mol_type = other DNA
tgttcccacctggatctcccatagggagtggtactctgctattacggtagccttgtatgccagttttatctcccctcccccatgtaacttagaagttttacacaaggaccaatagtcggtaatcagccagattactaaaggtcaagcacttctgtttccccggtcaatgctgatatgctccaacagggcaaaaacagcagcgatcgttatccgcaaagcgcctacgcaaagcttagtagcatctccgaaattgtctggttggtcgttccgccattttccccttggtagacctggcagatgaggctagaaataccccactggcgacagtgttctagcctgcgtggctgcctgcacaccctatgggtgtgaagccaaacaatggacaaggtgtgaagagccccgtgtgctcgctttgactcctccggcccctgaatgtggctaaccttaaccctgcagctagagcacgcaaaccagcgtgtttctagtcgtaatgagcaattgcgggatgggaccaactactttgggtgtccgtgtttcactttttctttttatattgcttatggtgacaatatatatatcatatatattgacacc

SEQ ID NO: 21801 - DNA, 421 bp, synthetic construct; identical to SEQ ID NO: 462
  source 1..421: mol_type = other DNA

SEQ ID NO: 21802 - DNA, 599 bp, synthetic construct
  source 1..599: mol_type = other DNA
tcccaccaccaggcacacagtgcgtggtacactggaatttcggttcctttgtacgcctgttttcccaccctcatgtttgtttgtctttacgcgtaacttagaagcattgcacacagctcaataggaatagtccatccaggactgttacgagcaagtacttctgtctccccggacgtgtgaatagacctcaccaaggttgaagctgtagcgttcgttatccgctcatctactgcgcaaagactagtaactaactggaaccttaatggtgtttcgctcagcagtaccccactgtagatcagggcaatgaggctacgcatcccccactggtgacagtggcgtagcctgcgtggtgccctgcccaggtttcggcctgggacaccattttgatgacagggtgtgaagaccggcgtgcgctaggtgtgaatcctccggcccctgaatgcggctaatcctaaccctgcagccattgcatgtgatccaacatgtggatggtcgtaatgagtaattgcgggatggaaccgactactttgggtgtccgtgtttcttgtttttccaattattgtctcatggttacaaatttgtgtatcaagtttgtaact

SEQ ID NO: 21803 - DNA, 398 bp, synthetic construct
  source 1..398: mol_type = other DNA
ggcgaccgtggtggtggctgcgctggcggcctgcccatggggcaacccatgggacgcttcaatacagacatggtgtgaagagtctattgagctagttggtagtcctccggcccctgaatgcggctaatcctaactgcggagcagatccccacacaccagtgggcagtctgtcgtaatgggtaactctgcagcggaaccgactactttgggtgtccgtgtttccttttattcttatactggctgcttatggtgacaattgaaagattgttaccatatagctattggattggccatccagtgtctaacagagcaataatttatctttttgttggattcgtcccacttgactacagagcacttgcaacgctcaattacattatagatctcaacacaataaa

SEQ ID NO: 21804 - DNA, 570 bp, synthetic construct
  source 1..570: mol_type = other DNA
ggagtggtacactattatcccggtaattttgtacgccagttttataacccctcccccttgtaacttagaagatgtaaacacagaccaataggtggtaactaaccaagttactaaaggtcaagcacttctgtttccccggctgatattgatatgctccaccagggcaaaaacaatagaagtcgttatccgcaaagtgcctacgcaaagcctagtagcactttagattgtgtatggttggtcgctcagctattccccctagtagacctggcagatgaggctagaaataccccactggtaacagtgttctagcctgcgtggctgcctgcgcaccctttcgggtgcgaagccatatacatgacaaggtgtgaagagccccgtgtgctcactttgagtcctccggctcctgaatgtggctaaccttaaacctgcagccagtgcacataagccaatgtgtagctggtcgtaatgagtaattgcgggatgggaccaactactttggatgtccgtgtttcttgtttttcctttaattttgcttatggtgacaatatatagataatatatattggcatc

SEQ ID NO: 21805 - DNA, 575 bp, synthetic construct
  source 1..575: mol_type = other DNA
ggtgtagtatacttgtattccggtacatttatacgccagttttatgatcccccaccccaaatgtaacttagaagcatgtacacaatgatcaatagggtggtggctaaccaagtcacctaagatcaagcacttctgtttccccggtgagtgtggatatgctttacccaaggcagaaactaatctcatcgttatccgcaaggtgcctacgggaagcctagtaatattctgaaggtattctggttggtcactcagttgcattcacccgtgcaatagacctggcagatggggctaggcataccccactggtaacagtggcctagcccgcgtggctgcctgcacaccttcgggtgtgaagccataatattgacagggtgtgaagagcctactgtgctcaccttgagtcctccggcccctgaatgtggctaatcctaaccccgtatccattgcacacaagccagtgtgtttatggtcgtaatgggtaactacgggatggaaccaactactttgggtgtccgtgtttcttgtttttctttaatattgcttatggtgacattatatattgatatagtgtcatc

SEQ ID NO: 21806 - DNA, 603 bp, synthetic construct; identical to SEQ ID NO: 655
  source 1..603: mol_type = other DNA

SEQ ID NO: 21807 - DNA, 608 bp, synthetic construct; identical to SEQ ID NO: 662
  source 1..608: mol_type = other DNA

SEQ ID NO: 21808 - DNA, 597 bp, synthetic construct; identical to SEQ ID NO: 647
  source 1..597: mol_type = other DNA

SEQ ID NO: 21809 - DNA, 524 bp, synthetic construct
  source 1..524: mol_type = other DNA
aacctaacatatccaagtaacttagaagatttgaacactgcacaatagggactattgcaaccagcaatagtcagtgcaagcacttctgtctccccggagcggagtatagacggccaccgctgtcaaaagctcttaaccgttatccgccagttaactacgcaacagctagtaacatcttgttgttcttagggtgttcgatcaggtgagtttaccccctcactagtctggtcgatgaggctgagaaacccccacgggcgaccgtgtctcagcctgcgtggcggccagcccagcatatgctgggacgccttaagtatgacatggtgtgaagactcgcgtgtgcttagctgtgagtcctccggcccctgaatgcggctaacctaaaccccggagccttgaggcacaacccagtgcccgcaaggtcgtaatgagtaattctgggacgggaccgactactttgggtgtccgtgtttccttttatctttttgatgttcttatggttacaatatatagagtatattgtaatc

SEQ ID NO: 21810 - DNA, 578 bp, synthetic construct
  source 1..578: mol_type = other DNA
aagtggtgtagtgctcttgtatttcggtacatttgcacgccagtttgccacccttaccctttatgtaacttagaagcttacacaaagaccaataggcggtggtaaacccataccactaacggtcaaacacttctgtttccccggcacgtgaggaataggctccaaaagggctgaagccactagtgtcgttatccgcattggtactacgcaaagcctagtatcagcctgaaaattccttggttggtcgctcggccagttatcccactggtagacctggcagatgaggcaggacttaccccactggcgacagtggtcctgcctgcgtggctgcctgcacacccctatggggtgtgaagcctaggaacggacagggtgtgaagagccccgtgtgctaccaatgagtcctccggcccctgaatgcggctaatcttaccccgcagctgttgcacacaatccagtgtgtatgcagtcgtaatgagcaattgtgggatggaaccgactactttgggtgtccgtgtttccttgtttttcttttatttgcttatggtgacaatattgatattatcagtgttgtcatc

SEQ ID NO: 21811 - DNA, 523 bp, synthetic construct; identical to SEQ ID NO: 549
  source 1..523: mol_type = other DNA

SEQ ID NO: 21812 - DNA, 588 bp, synthetic construct
  source 1..588: mol_type = other DNA
ccacctggatctcccatagggagtggtactctgctattacggtagccttgtatgccagttttatctcccctccccatgtaacttagaagttttacacaaggaccaatagtcggtaatcagccagattactaaaggtcaagcacttctgtttccccggtcaatgctgatatgctccaacagggcaaaaacagtagcgatcgttatccgcaaagcgcctacgcaaagcttagtagcatctccgaaattgtctggttggtcgttccgccattttccccatggtagacctggcagatgaggctagaaataccccactggcgacagtgttctagcctgcgtggctgcctgcacaccctatgggtgtgaagccaaacaatggacaaggtgtgaagagccccgtgtgctcgctttgattcctccggcccctgaatgtggctaaccttaaccctgcagctagaacacgcaaaccagcgtgtttctagtcgtaatgagtaattgcgggatgggaccaactactttgggtgtccgtgtttcacttttttcttttatattgcttatggtgacaatatatacagcatatatattgacacc

SEQ ID NO: 21813 - DNA, 609 bp, synthetic construct
  source 1..609: mol_type = other DNA
gttgttcccacccctaccacccatgtggtgtagtgctcttgtattacggtacacttgcacgccagtttgcctccccaccccctttccatttacacccaaccttatgtaacttagaagcagtacactggaccaataggtggtaacaatccatgttaccaaaggtcaagcacttctgtctccccggcatgcgtggaataaacagtgcaaacggttgagaccacaaatgtcgttacccgcgcatgaactacgcagagcctagtatctccctgaaagtccattggttggtcgttcagctaaaccccatagtagacctggcagatgaggcaagacgcaccccactggcgacagtggtcttgcctgcgtggctgcctgcacacccttcggggtgtgaagccaattgacagacagggtgtgaagagccgagtgtgcttcatgtgaatcctccggcccctgaatgcggctaatctaaccccgcagctgtggcacacaagccagtgtgtatgcagtcgtaacgggcaactgcgggacggaaccgactactttgggtgtccgtgtttccttttattcttttatcaagtacttatggtgacaataataaatattgttacc

SEQ ID NO: 21814 - DNA, 389 bp, synthetic construct
  source 1..389: mol_type = other DNA
tggcggtggctgcgttggcggcctgcccatggggcaacccatgggacgctacaatactgacatggtgtgaagagtctattgagctaactggtagtcctccggcccctgaatgcggctaatcccaactgcggagcacgtgcttccaatccaggaggtagcgtgtcgtaacgggcaactctgcagcggaaccgactactttgggtgtccgtgtttcctttatctctttattggctgcttatggtgacaattgaaagattgttgccatatagctattggattggccatccggtatctaacagagcaatcatatacctgtttgttggatttgttccacttaacaaaacagagttctgtactttgtgttatattattaggttgaacacatcaaa

SEQ ID NO: 21815 - DNA, 544 bp, synthetic construct
  source 1..544: mol_type = other DNA
tgacgccagttttgccaccctcccctaacatgtaacttagaagtttgaacgataagaccaataggtgataatcatccagattatcaaaggtcaagcacttctgtttccccggtcgatgaggatatgctttacccgaggcaaaaaccttagagatcgttatccacacactgcctacacagagcctagtaccacttttgacgtaactaggttggtcgctccctgcaaacccagcagtagacctggcagatgaggctggacgttccccactggcgacagtggtccagcctgcgtggctgcctgctcaccctatagggtgagaagcctacttattgacaaggtgcgaagagccgcgtgtgctcagtgtgcttcctccggcccctgaatgtggctaaccttaaccctgcagccgctgcccataatccaatgggtttacggtcgtaacgcgtaagtgcgggatgggaccaactactttgggtgtccgtgtttcttatttttcctttatttgcattttatggtgacaattcatggtatatagattgtcatc

SEQ ID NO: 21816 - DNA, 427 bp, synthetic construct
  source 1..427: mol_type = other DNA
cagcgccttacccccggcgtagctcaggctgatgaggctccgaacaccccacaggcgactgtgtcggagcctgcgttggcggcctgcccataccttgcggtatgggacgctcacttcatgacatggtgcgaagagtctactgtgctagtcaagattcctccggcccctgaatgtggataatcctaaccactgatcctacgttcgcaatccagcgttcagtaggtcgtaacgcgcaagtcggtggcggaaccaactactttgggtgtccgtgtttcctttatttcctactgaatgcttatggtgacaattgttttgatcagttgttgccattactcgcgttcagtgtgtaattacaaaaacaagatcatcagttattaccatccctcacgttcagtgcacaattacaaaaacgagattttctgtcata

SEQ ID NO: 21817 - DNA, 579 bp, synthetic construct
  source 1..579: mol_type = other DNA
gtagtactcttgtactccggtacacttgtacgccagttttcccttcctacccccccttaggtaactcttagaagcatttgcactcagacgaataggcaaccaacactccatgttggtcaacgtcaagcacttctgtttccccggtattagggtgttaggctttccaagaggctgaagcctgaagtatcgttacccgcacaattactaagcagagcctagtatcactttggccctttcactggctggtcgttcaatgagaaaacccactcatagacctggcagatggggctggaaataccccactggtaacagtgttccagcccgcgtggctgcctgtccccctttttgggggaaagccaatgtaaggacaaggtgtgaagagccgcgtttgctaattgtgagtcctccggcccctgaatgcggctaatcttaccccacagctattgcatggaagccaccatgtggatagtcgtaacgggcaactgtgggacggaaccgactactttgggtgtccgtgtttccttttattccatttattatctcatggtgacaacgtatacagattatatgttgttcacc

SEQ ID NO: 21818 - DNA, 495 bp, synthetic construct
  source 1..495: mol_type = other DNA
tcccacggttgaaaacaacctatccgttatccgctatagtacttcgagaaacctagtatcacctttggattgttgacgcgttgcgctcagcacactaacccgtgtgtagcttgggtcgatgagtctggacataccccactggcgacagtggtccaggctgcgttggcggcctactcatggtgaaaaccatgagacgctagacatgaacaaggtgtgaagagtctattgagctactatagagtcctccggcccctgaatgcggctaatcctaaccatggagcaagtgctcacaggccagtgagttgcttgtcgtaatgcgcaagtccgtggcggaaccgactactttgggtgtccgtgtttcactttttacttttatgactgcttatggtgacaatttgatattgttaccatttagcttgtcaaattaattgcaaaagatcctaaatcttacttaccaacttgcattttgataaccttgatttgaaaattttaata

SEQ ID NO: 21819 - DNA, 587 bp, synthetic construct
  source 1..587: mol_type = other DNA
ccacctgtaccacccacgtggtgtggtgctcttgtattccggtacatttgcacgccagtttgccacccctcatcctttgtaacctagaagctatcaactcgaccaataggcggtggtaagccataccacttacggtcaagcacttctgtttccccggtatgcgaggaatagactctcacagggttgaagcctcaaatatcgttatccgcattggtactacgcaaagcctagtagcgcctcggaaatcccttggttggtcgttccgctagtttcccctagtagacctggcagatgaggcaggacattccccactggtgacagtggtcctgcctgcgtggctgcctgcgcaccctccggggtgcgaagccaagtgatggacaaggtgtgaagagccccgtgtgctactaatgagtcctccggcccctgaatgcggctaatccaaccccacagctattgcacacaaaccagtgtgtatatagtcgtaacgagcaattgtgggacggaaccgactactttgggtgtccgtgtttccttttattctcattatcttgcttatggtgacaatactgtaatatagtgttgttacc

SEQ ID NO: 21820 - DNA, 558 bp, synthetic construct
  source 1..558: mol_type = other DNA
gtttaggtaactttgtgtttgacgccagttttatcctccccttaccccgtgtaacttagaagtttttcataaagaccaatagttggtaatcatccagattacttaaggtcaagcacttctgtttccccggtcaatgttgatatgctccaacagggcaaaaacaactgcgatcgttatccgcaaagcgcctacgcaaagcctagtagcacctttgagattatttggttggtcgttccgccatttcccctggtagacctggcagatgaggctggaagtaccccactggcgacagtgttccagcctgcgtggctgcctgcacaccctatgggtgtgaagccaaataatggacaaggtgtgaagagccccgtgtgctcgctttgagtcctccggcccctgaatgcggctaaccttaaccctgcagctggagcacacaaaccagtgtgtatctagtcgtaatgagcaattgcgggatgggaccgactactttgggtgtccgtgtttcactttttacttataattgcttatggtgacaatatatatatagtatatattggcact

SEQ ID NO: 21821 - DNA, 585 bp, synthetic construct
  source 1..585: mol_type = other DNA
cgactatctacggatgtagtgctcctgtattccggtacacttgcacgccagttttgttaccctccccatattgtaacttagaagattaacacaaagaccaataggcggcaatgaaccacattgtcaacggtcaagcacttctgtctccccggtcaatctggatatgctttaccaaaggcaaaaactggagcgatcgttatccgcaaggtgcctacgggaaacctagtaacactctctatttgatctggttggttgttcagccgttaaacccaaacggtaaacctggcagatgaggctggaaaatccccaccagcgatggtgttccagcctgcgtggctgcctgcacacccgaaagggtgtgaagccttttcaaagacagggtgcgaagagtctactgtgctcaccttgattcctccggcccctgaatgtggctaatcctaaccccgtagctgtagtgtgcaatccagcacatttgcagtcgtaatgggtaactgcgggatggaaccaactactttgggtgtccgtgtttctctttttacctttatatttgcttatggtgacaattatacagatatagttgtcatc

SEQ ID NO: 21822 - DNA, 548 bp, synthetic construct; identical to SEQ ID NO: 589
  source 1..548: mol_type = other DNA

SEQ ID NO: 21823 - DNA, 513 bp, synthetic construct
  source 1..513: mol_type = other DNA
tgtggttgtataaactgttcccacggttgaaaacaacctatccgttatccgctatagtacttcgagaaacctagtatcacctttggattgttgacgcgttgcgctcagcacactaacccgtgtgtagcttgggtcgatgagtctggacataccccactggcgacagtggtccaggctgcgttggcggcctactcatggtgaaaaccatgagacgctagacatgaacaaggtgtgaagagtctattgagctactatagagtcctccggcccctgaatgcggctaatcctaaccatggagcaagtgctcacaggccagtgagttgcttgtcgtaatgcgcaagtccgtggcggaaccgactactttgggtgtccgtgtttcactttttacctttatgactgcttatggtgacaatttgatattgttaccatttagcttgtcaaatcaattgcaaaaggtcctaaatcttatttatcaacttgcattttgataactttaatttgaagattttaata

SEQ ID NO: 21824 - DNA, 526 bp, synthetic construct
  source 1..526: mol_type = other DNA
cccacctaacatatccaagtaacttagaagatttgaacactgcacaatagggactattgcaaccagcaatagtcagtgcaagcacttctgtctccccggagcggagtatagacggccaccgctgtcaaaagctcttaaccgttatccgccagttaactacgcaacagctagtaacatcttgttgttcttagggtgttcgatcaggtgagtttaccccctcactagtctggtcgatgaggctgagaaacccccacgggcgaccgtgtctcagcctgcgtggcggccagcccagcatatgctgggacgccttaagtatgacatggtgtgaagactcgcgtgtgcttagctgtgagtcctccggcccctgaatgcggctaacctaaaccccggagccttgaggcacaacccagtgcccgcaaggtcgtaatgagtaattctgggacgggaccgactactttgggtgtccgtgtttccttttatctttttgatgttcttatggttacaatatatagagtatattgtaatc

SEQ ID NO: 21825 - DNA, 576 bp, synthetic construct; identical to SEQ ID NO: 629
  source 1..576: mol_type = other DNA

SEQ ID NO: 21826 - DNA, 530 bp, synthetic construct
  source 1..530: mol_type = other DNA
ccacccttccctaatatgtaacttagaagtttgagcaataagaccaataggtgataattatccagattatcaaaggtcaagcacttctgtttccccggtcaacgaggatatgctttacccaaggcaaaaaccttagagatcgttatccccacactgcctacacagagcctagtatcacttttgatgtaattaggttggtcgctccctgcaaacccagcagtagacctggcagatgaggctggacattccccactggcgacagtggtccagcctgcgtggctgcctgctcaccctatcgggtgagaagcctacttattgacaaggtgtgaagagccgcgtgtgctcagtgtgcttcctccggcccctgaatgtggctaaccttaaccctgcagccgctgcccataatccaatgggtctacggtcgtaacgcgcaagtgcgggatgggaccaactactttgggtgtccgtgtttcttatttttcctttatttgcattttatggtgacaatttatggtatatagattgtcatc

SEQ ID NO: 21827 - DNA, 607 bp, synthetic construct; identical to SEQ ID NO: 659
  source 1..607: mol_type = other DNA

SEQ ID NO: 21828 - DNA, 574 bp, synthetic construct
  source 1..574: mol_type = other DNA
gtggagttgtgcactgttattccggtaactttacacgccagttttatttcccccctccccaaatgtaacttagaagatgtacacaacgaccaataggcggcaactaaccaagttgcttaaggtcaagcacttctgtctccccggtcaacgttgatacgctctcccagggcgaaaacaactgagatcgttatccgcaagacgcctacgcaaaacctagtaatatcttgaatggtacatggttggtcgttccgctaaaccccatagtagacctggcagatgaggctagaaactccccactggtgacagtgttctagcctgcgtggctgcctgcgtgtccttacgggcacgaagccatttacttgacaaggtgtgaagagtcccgtgtgctcgtcttgagtcctccggcccctgaatgtggctaaccttaaccctgcagccagtacgcgcaagccagtgcgtagctggtcgtaatgagcaattgcgggatgggaccaactactttgggtgtccgtgtttcactttttaccttttattatgcttatggtgacaatatatagatatatatattgacacc

SEQ ID NO: 21829 - DNA, 475 bp, synthetic construct
  source 1..475: mol_type = other DNA
ctacacccagtggtgttaagcacaagtacttctgtttccccggagcggagtatagacggtccccactgtcaaaagctcttaaccgttatccgccaaccaactacgtgacgactagtagcatcattttgacactttgacgttcgatcaggtaggttcaccccacctactagtttggtcgatgaggctgggagtccctcacaggtaactgtgtcccagcctgcgtggcggccaacccagcaattgctgggacgccaatttgttgacatggtgtgaagatcctaatgtgcttggttgtgagtcctccggcccctgaatgcggctaaccttaaccccggagccttgtggcacaagccagtgacattaaggtcgtaaggagcaattctgggatgggaccgactactttgggtgtccgtgtttcctatttttctttaaattgtcttatggtcacagcatatattaattatatactgtgatc

SEQ ID NO: 21830 - DNA, 610 bp, synthetic construct; identical to SEQ ID NO: 671
  source 1..610: mol_type = other DNA

SEQ ID NO: 21831 - DNA, 568 bp, synthetic construct; identical to SEQ ID NO: 617
  source 1..568: mol_type = other DNA

SEQ ID NO: 21832 - DNA, 529 bp, synthetic construct
  source 1..529: mol_type = other DNA
tttataacccctcccccttgcaacttagaagatgtaaacacagaccaataggtggtaactaaccaagttactaaaggtcaagcacttctgtttccccggctgacattgatatgctccaccagggcaaaaacaatagaagtcgttatccgcaaagtgcctacgcaaagcctagtagcactttagattgtatatggttggtcgctcagctattccccctagtagacctggcagatgaggctagaaataccccactggtaacagtgttctagcctgcgtggctgcctgcgcacccttctgggtgcgaagccatatacatgacaaggtgtgaagagccccgtgtgctcactttgagtcctccggctcctgaatgtggctaaccttaaacctgcagccagtgcacataagccaatgtgtagctggtcgtaatgagtaattgcgggatgggaccaactactttggatgtccgtgtttcttgtttttccttaattctgcttatggtgacaatatatagataatatatattggcatc

SEQ ID NO: 21833 - DNA, 540 bp, synthetic construct
  source 1..540: mol_type = other DNA
gtacgccagttttgccacccctccccacaatgtaacttagaagttttgcacttacagaccaataggatgtgattatccaaatcactaaaggtcaagcacttctgtttccccggttagatttgatacgctccaacagggcgaaaacagatctagtcgttatccgcaaggtgcctacgcaaagcctagtagcattctgaaagctttttgactggttgttccactacaaacccagtagtaaacctggcagatgaggctagaaattccccactggtgacagtgttctagcctgcgtggctgcctgcacaccctttgggtgtgaagccaatcagttgacagggtgtgaagagccccgtgtgctcaccttgagtcctccggcccctgaatgtggctaaccttaaacccgcagccaaggtgtgcaagccagcatattcttggtcgtaacgagcaattgtgggatgggaccaactactttgggtgtccgtgtttctttttattcttttataatgcctatggtgacaatatatagcatatattgtcatt

SEQ ID NO: 21834 - DNA, 494 bp, synthetic construct
  source 1..494: mol_type = other DNA
gaattaccgtacaataggtgctgtcacatccagtgatggcttgtacaagcacttctgtttccccggagcggagtatagatggccaccgctgtcaaaagctcttaaccgttatccgccaattaactacgcaacggctagtaacatcttgttattcttagggcgttcgatcaggtgagtacacccctcactagtctggtcgatgaggctgagaattccccacgggcgaccgtgtctcagcctgcgtggcggccagcccagcttatgctgggacgccttaattgtgacatggtgtgaagacccacgtgtgcttaattgtgagtcctccggcccctgaatgcggctaacctaaaccctggagccttgagacacaatccagtgttggcaaggtcgtaatgagcaattccgggacgggaccgactactttgggtgtccgtgtttcctgttatttccaaattgttcttatggtcacaatataagctatatatattgtgatc

SEQ ID NO: 21835 - DNA, 610 bp, synthetic construct
  source 1..610: mol_type = other DNA
ttaaaactggatctgggttgttcccacccgggtctcccacgtggagttgtactctattattccggtaatcttgtacgccagtttttacacccccccccttgtaacttagaagaaagtacacaacgaccaataggcggcaattaaccaaattgtcaatggtcaagcacttctgtttccccggtcaagattgatacgctccaacagggcgaaaacaatcaagatcgttatccgcaaagtgcctacacaaagcttagtaacattttggaaagtttatggttggtcgctcagctaaaccccatagtagacctggcagatgaggctagaaactccccactggcgacagtgttctagcctgcgtggctgcctgcacaccctcacgggtgtgaagccatatacttgacaaggtgcgaagagccccgtgtgctcactttgactcctccggcccctgaatgtggctaaccttaaccccgcagctagcgcatgcaaaccagtgtgtagctagtcgtaacgagcaattgtgggatgggaccaactactttgggtgtccgtgtttcactttttaccttttatttgcttatggtgacaataatatatagtatatattgacacc

SEQ ID NO: 21836 - DNA, 540 bp, synthetic construct; identical to SEQ ID NO: 579
  source 1..540: mol_type = other DNA

SEQ ID NO: 21837 - DNA, 472 bp, synthetic construct
  source 1..472: mol_type = other DNA
cacccagtggtattaagcacaagtacttctgtttccccggagcggagtatagacggtccccactgtcaaaagctcttaaccgttatccgccaaccaactacgtgacgactagtagcatcattttgacactttgacgttcgatcaggtaggttcaccccacctactagtttggtcgatgaggctgggagttcctcacaggtaactgtgtcccagcctgcgtggcggccaacccagcaattgctgggacgccaatttgttgacatggtgtgaagatcctaatgtgcttggttgtgagtcctccggcccctgaatgcggctaaccctaaccccggagccttgtggcacaagccagtgacattaaggtcgtaaggagtaattctgggatgggaccgactactttgggtgtccgtgtttcctgtttttctttaaattgtcttatggtcacagcatatattgattatatactgtgatc

SEQ ID NO: 21838 - DNA, 613 bp, synthetic construct
  source 1..613: mol_type = other DNA
cggggataccggttgttcccacctgtatcacccaagtggtgtggtgctcttgtatttcggtacatttgcacgccagtttgccaccccttcccttttacgtaacttagaagtttacacaaagaccaacaggcggtggtaaatccataccactaacggtcaaacacttctgtttccccggcatgcgaggaataggctccaaaagggctgaagccactagtgtcgttatccgcattggtactacgcaaagcctagtattaccttgaaaatttcttggctggtcgctccaccagataccccactggtagacctggcagatgaggcaggacttaccccactggcgacagtggtcctgcctgcgtggctgcctgcacaccccctacggggtgtgaagcccagaaacagacagggtgtgaagagccccgtgtgctaccaatgagtcctccggcccctgaatgcggctaatcttaccccacagctgttgcacgcaagccagcgtgtatgcagtcgtaatgagcaattgtgggatggaaccgactactttgggtgtccgtgtttctttttattcctattatttgcttatggtgacaatattgatattatcagtgttgtcatc

SEQ ID NO: 21839 - DNA, 586 bp, synthetic construct
  source 1..586: mol_type = other DNA
gttgtacactgcgatctcggtcgctttgtatgcctgtttttaccacccaccccaactttactgtcttctttacttcacaagtaacgtagaagcatgcacatgatgcccagtaagacaacgtcccaaccaggggcgttaagggcaagcacttctgtttccccggatgtgtgaataggcttcacccgaggctgaaactgtagcattcgttatccgcatggctactacgcgactgctagtaacattctgtgtgacatgtggggtttcgctcagcagagacccagtctgtagatcagggtaatgaggctacacaatccccactggcgacagtggtgtagcctgcgtggtgccctgcccgaggttcgtcctcgggaccctccatgttagacagggtgtgaagacactagtgtgctagtcatgagtcctccggcccctgaatgcggctaatcttaaacctgcagccatcgcatgcatgccagcatgtaggtggtcgtaatgagtaattgcgggatggaaccgactactttgggtgtccgtgtttccctttttacatttgtgtgtctcttatggttacatcattggtgtaatc

SEQ ID NO: 21840 - DNA, 606 bp, synthetic construct
  source 1..606: mol_type = other DNA
aggttgttcccacctagatctcctacatggagttgtactctattattccggtaattttgtacgccagttttatctcccctcccccctaatgtaacttagaagttgaacataccgaccaataggtaacatttatccagaatgttaaaggtcaagcacttctgtttccccggtcaaagttgatatgctccaacagggcaaaaacaaccgcgatcgttatccgcaaagcaactacgcaaagcctagtatcacttttgagagtatgtggttggtcgctccactataaacccaatagtagacctggcagatgaggctagaagttccccactggtaacagtgttctagcctgcgtggctgcctgcgtgctccccgtgagcacgaagccatatatttgacaaggtgtgaagagccccgtgtgcttgttttgagtcctccggcccctgaatgtggctaaccttaaccctgcagctagcgtgtgcaacccagtacaaagctagtcgtaatgagcaattgcgggatgggaccaactactttgggtgtccgtgtttcttgtttttcctttatatttgcttatggtgacaatatatatacagcatatatattggcatc

SEQ ID NO: 21841 - DNA, 570 bp, synthetic construct
  source 1..570: mol_type = other DNA
ggagtggtacactattatcccggtaattttgtacgccagttttataacccctcccccttgcaacttagaagatgtaaacacagaccaataggtggtaactaaccaagttactaaaggtcaagcacttctgtttccccggctgatattgatatgctccaccagggcaaaaacaatagaagtcgttatccgcaaagtgcctacgcaaagcctagtagcactttagattgtgtatggttggtcgctcagctattccccctagtagacctggcagatgaggctagaaataccccactggtaacagtgttctagcctgcgtggctgcctgcgcacccttctgggtgcgaagccatatacatgacaaggtgtgaagagccccgtgtgctcactttgagtcctccggctcctgaatgtggctaaccttaaacctgcagccagtgcacataagccaatgtgtatctggtcgtaacgagtaattgcgggatgggaccaactactttggatgtccgtgtttcttgttttttccttaattttgcttatggtgacaatatatagataatatatattggcatc

SEQ ID NO: 21842 - DNA, 478 bp, synthetic construct; identical to SEQ ID NO: 507
  source 1..478: mol_type = other DNA

SEQ ID NO: 21843 - DNA, 575 bp, synthetic construct
  source 1..575: mol_type = other DNA
gggtgtagtatacttgtatcccggtacatttatacgccagttttataatccccaccccaaatgtaacttagaagcttgtacacaatgatcaataggatgatggctatccaagtcatctaagatcaagcacttctgtctccccggtgagtgtgaatatgctttacccaaggcaaaagctaatctcatcgttatccgcaaggtgcctacgggaagcctagtaatactctgaagatattttggttggtcgatcagttgcactcacccatgcaatagacctggcagatggggctaggcacacctcactggtaacagtggcctagcccgcgtggctgcctgcacaccttcgggtgtgaagccataatattgacagggtgtgaagagcctactgtgctcaccttgagtcctccggcccctgaatgtggctaatcctaaccccgtatccattgcacacaaaccagtgtgtctatggtcgtaatgggtaactacgggatggaaccaactactttgggtgtccgtgtttcttgtttttctttaatactgcttatggtgacattatatattgatatagtgtcatc

SEQ ID NO: 21844 - DNA, 524 bp, synthetic construct
  source 1..524: mol_type = other DNA
aacccctcccccttgcaacttagaagatgtaaacacagaccaataggtggtaactaaccaagttactaaaggtcaagcacttctgtttccccggctgatattgatatgctccaccagggcaaaaacaatagaagtcgttatccgcaaagtgcctacgcaaagcctagtagcactttagattgtgtatggttggtcgctcagctattccccctagtagacctggcagatgaggctagaaataccccactggtaacagtgttctagcctgcgtggctgcctgcgcacccttccgggtgcgaagccatatacatgacaaggtgtgaagagccccgtgtgctcactttgagtcctccggctcctgaatgtggctaaccttaaacctgcagccagtgcacataagccaatgtgtatctggtcgtaatgagtaattgcgggatgggaccaactactttggatgtccgtgtttcttgtttttccttaattttgcttatggtgacaatatatagataatatatattggcatc

SEQ ID NO: 21845 - DNA, 573 bp, synthetic construct
  source 1..573: mol_type = other DNA
ctgtgattccggtcaccttgtacgcctgtttgctaccctaccccgactttctttcactcttcacttccagtaacttagaagctaacacagagtccaataggatgcagctaatccaagtctgctacggacaagcacttctgtttccccgggtgtgtgaatagactccaacagggttgaagctgtagcactcgttatccgcacaactactacgcgaatgttagtaacaccctctaggtatagtgggatttcgctccgcagaaaccccatctgtagattagggcaatgaggctacacggaccccactggcgacagtggtgtagcctgcgtggtgccctacctggggtttcataccccaggattccactttactgacagggtgtgaaggcgctagtgtgctagttgtgagtcctccggtccctgaatgtggctaatcctaaccccgtggccatttcatgtaaaccaacatgcaggtggtcgtaacgagtaatcacgggatggaaccaactactttgggtaaccgtgtttcctgttttactttaatgtgtgtcttatggttacaattatagagtaacc

SEQ ID NO: 21846 - DNA, 476 bp, synthetic construct
  source 1..476: mol_type = other DNA
ccccccgcgtagatcgggctgatgggtctccgcatcccccacgggcgaccgtggcggaggccgcgtggcggcccgcctatggcgaaagccataggacgccatttcagtgacagggtgtgaagagcctattgagctagttggtagtcctccggcccctgaatgcggctaatcctaaccacggagcgtccaccagcaaaccagctggcagggcgtcgtaacgggtaactctgtggcggaaccgactactttgggtgtccgtgtttccttttgatcctattgtggctgcttatggtgacaacttacagttgttatcataaagcttttggattggccatccggaaagagttaacagtttgttcgctcatcgctttatcaaagctacctttgagaaaggcaatttatttgttaatttcattttataaacttgaagatatatcaagtgctcatttggatttactcatacaactaaatcaaac

SEQ ID NO: 21847 - DNA, 598 bp, synthetic construct
  source 1..598: mol_type = other DNA
gtacaccaactgggccatgaccaagcacttctgtgaccccggaccgagtatcaataagctgctcacgtggctgaaggagaaaacgttcgttacccggccaattacttcgagaaacctagtaccgccatgaaagttgcgcagcgtttcgctccgcacgaccccagtgtagatcaggctgatgagtcaccgcgttccccacgggtgaccgtggcggtggctgcgttggcggcctgcccttggggcaacccaagggacgcttcaatactgacatggtgcgaagagtctattgagctaattggtagtcctccggcccctgaatgcggctaatcccaactgcggagcagatacccacataccagtgggcagtctgtcgtaatgggcaactctgcagcggaaccgactactttgggtgtccgtgtttcctttatttctcacactggctgcttatggtgacaattgagagattgttgccatatagctattggattggccatccggtgtctaatagagcaattatctacctttttgttggatttatcccacttaactataaagcactcaaaacactaatatacattgtggatcttaacacaacaaa

SEQ ID NO: 21848 - DNA, 644 bp, synthetic construct; identical to SEQ ID NO: 778
  source 1..644: mol_type = other DNA

SEQ ID NO: 21849 - DNA, 565 bp, synthetic construct
  source 1..565: mol_type = other DNA
aagccagcgcttccgtgagcaagcacttctgtttccccggtgcggttgtataaactgttcccacggttgaaaacaacctatccgttatccgctatagtacttcgagaaacctagtatcacctttggattgttgatgcgttgcgctcagcacactaacccgtgtgtagcttgggtcgatgagtctggacataccccactggtgacagtggtccaggctgcgttggcggcctactcatggtgaaaaccatgagacgctagacatgaacaaggtgtgaagagtctattgagctactatagagtcctccggcccctgaatgcggctaatcttaaccatggagcaagtgctcacaaaccagtgagttgcttgtcgtaatgcgcaagtccgtggcggaaccgactactttgggtgtccgtgtttcactttttacttttatgactgcttatggtgacaatttaatattgttgccatttagctagtcaaattaatcacataaaacttcaaaccctatctaacaattcacacttggatagcttcattttgaggactttaaacctatttacaaag

SEQ ID NO: 21850 - DNA, 592 bp, synthetic construct
  source 1..592: mol_type = other DNA
caccatgattacctacgggtgtagtatacttgtattccggtacatttatacgccagttttatgatcccccaccccaaatgtaacttagaagcatgtacacaatgatcaatagggtggtggctaaccaagtcacctaagatcaagcacttctgtttccccggtgagtgtggatatgctttacccaaggcagaaactaatctcatcgttatccgcaaggtgcctacgggaagcctagtaatattctgaaggtattctggttggtcgctcagttgcattcacccgtgcaatagacctggcagatggggctaggcataccccactggtaacagtggcctagcccgcgtggctgcctgcacaccttcgggtgtgaagccataatattgacagggtgtgaagagcctactgtgctcaccttgagtcctccggcccctgaatgtggctaatcctaaccccgtatccattgcacacaagccagtgtgtttatggtcgtaatgggtaactacgggatggaaccaactactttgggtgtccgtgtttcttgtttttctttaatattgcttatggtgacattatatattgatatagtgtcatc

SEQ ID NO: 21851 - DNA, 596 bp, synthetic construct; identical to SEQ ID NO: 646
  source 1..596: mol_type = other DNA

SEQ ID NO: 21852 - DNA, 570 bp, synthetic construct
  source 1..570: mol_type = other DNA
ggagtggtacactattatcccggtaattttgtacgccagttttataacccctccccccttgtaacttagaagatgtaaacacagaccaataggtggtaactaaccaagttactaaaggtcaagcacttctgtttccccggctgatattgatatgctccaccagggcaaaaacaatagaagtcgttatccgcaaagtgcctacgcaaagcctagtagcactttagattgtgtatggttggtcactcagctattccccctagtagacctggcagatgaggctagaaataccccactggtaacagtgttctagcctgcgtggctgcctgcgcaccctttcgggtgcgaagccatatacatgacaaggtgtgaagagccccgtgtgctcactttgagtcctccggctcctgaatgtggctaaccttaaacctgcagccagtgcacataagccaatgtgtagctggtcgtaatgagtaattgcgggatgggaccaactactttggatgtccgtgtttcttgtttttccttaattttgcttatggtgacaatatatagataatatatattggcatc

SEQ ID NO: 21853 - DNA, 524 bp, synthetic construct
  source 1..524: mol_type = other DNA
ctttacgtaacttagaagttttaaacacaagaccaatagcaggcaactttccaggttgtctaaggtcaagcacttctgtttccccggttgatgttgatatgctccaacagggcaaaaacaactgatatcgttatccgcaaagtgcctacacagagcctagtaggattctgaaagatctttggttggtcgctcagctgcatacccagcagtagaccttgcagatgaggctggacattccccactggtaacagtggtccagcctgcgtggctgcctgcacacctcttacgaggtgtgaagccaaggattggacagggtgcgaagagccgcgtgtgctcactttgagtcctccggcccctgaatgcggctaaccttaaacctgcagccatagctcataagccaatgagtttatggtcgtaatgagtaattgcgggatgggaccgactactttgggtgtccgtgtttcattttttccttttatcaattgcttatggtgacaatatatatataaatatatattggcatc

SEQ ID NO: 21854 - DNA, 577 bp, synthetic construct
  source 1..577: mol_type = other DNA
tcccacagggagtggtactctgctattacggtagccttgtatgccagttttatcccccctcccccatgtaatttagaagttttacacaaagaccaatagccggtaatcagccagattactaaaggtcaagcacttctgtttccccggttaatgctgatatgctccaacagggcaaaaacagcagcaatcgttatccgcaaagcgcctacgcaaagcttagtagcatctccgaaattgtctggttggtcgttccgccatttcccccttggtagacctggcagatgaggctagaaataccccactggcgacagtgttctagcctgcgtggctgcctgcacaccctatgggtgtgaagccagataatggacaaggtgtgaagagccccgtgtgctcgctttgagtcctccggcccctgaatgtggctaaccttaaccctgcagctagagcacgcaaaccagtgtgtttctagtcgtaatgagcaattgcgggatgggaccaactactttgggtgtccgtgtttcactttttcctttatattgcttatggtgacaatatatataccatatatattgacatc

SEQ ID NO: 21855 - DNA, 522 bp, synthetic construct
  source 1..522: mol_type = other DNA
accttcctccatgtaacttagaagatgtacactcagaccaataggtgataatcctccagattatctaaggtcaagcacttctgtttccccggtctaaactgatatgctccaacagggcaaaaacagtgcagatcgttatccgcaggatgcctacgcaaagtctagtaacccctttgaagatatttggttggtcgctccactattccccatagtagacctggcagatgaggctagaaattccccactggtgacagtgttctagcctgcgtggctgcctgcacaccctattgggtgtgaagccaaatattggacaaggtgtgaagagccccgtgtgctcatcctgagtcctccggcccctgaatgtggctaaccttaaccctgcagctagtgcatgcaatccagcatgtagctagtcgtaatgagcaattgcgggatgggaccaactactttgggtgtccgtgtttcactttttaccttatatttgcttatggtgacaatatatattgcatatatattggcatc

SEQ ID NO: 21856 - DNA, 574 bp, synthetic construct; identical to SEQ ID NO: 624
  source 1..574: mol_type = other DNA

SEQ ID NO: 21857 - DNA, 532 bp, synthetic construct; identical to SEQ ID NO: 567
  source 1..532: mol_type = other DNA

SEQ ID NO: 21858 - DNA, 561 bp, synthetic construct
  source 1..561: mol_type = other DNA
ttcttgtattacggtacatttccataccagttttatataccccaccccgaaactcatagaagtttgtacacaacgaccaataggcggtggccatccaggtcactaatggtcaagcacttctgtttccccggcacccttgtatacgcttcacccgaggcgaaaaacgaggtcgtcgttatccgcaaagtgcctacgaaaagcctagtaacactttgaaaacctatggttggtcgttcagctgttcacccaacagtagacctggcagatgaggctagacactccccaccagcgatggtggtctagcctgcgtggctgcctgcacaccctaccgggtgtgaagccagaaagtggacaaggtgtgaagagcctattgtgctcactttgagtcctccggcccctgaatgtggctaaccctaaccccgtagctgttgcatgtaatccaacatgtatgcagtcgtaatgggcaactatgggatgggaccaactactttgggtgtccgtgtttcctgttttactttttcattgcttatggtgacaattgtatctgatacacttgtcacc

SEQ ID NO: 21859 - DNA, 575 bp, synthetic construct
  source 1..575: mol_type = other DNA
acgtggtgttgtgctctgttattccggtaactttgcacgccaattttataacccctttccccatgtaacttagaagttttgcacacagaccaatagcaagcagcataccagctgtataaggtcaagcacttctgtctccccggtcgatgttgatatgcttcaacaaggcaaaaacaacagagatcgttatccgcaagatgcctacacaaagcctagtacctcctttgacggtatttgtctggtcgttcaggtgtttccccagcactagacctggcagatgaggctagaaactccccactggcgacagtgttctagcctgcgtggctgcctgcacaccctactgggtgtgaagccaaatactagacaaggtgtgaagagccccgtgtgctcatcttgagtcctccggcccctgaatgcggctaaccttaaacccgcagccattgctcacaatccagtgggtagatggtcgtaatgagcaattgtgggatgggaccgactactttgggtgtccgtgtttcatgttttactttataatttgcttatggtgacaatatatagtgatatatattggcatc

SEQ ID NO: 21860 - DNA, 571 bp, synthetic construct
  source 1..571: mol_type = other DNA
gtagtggtacactattatcccggtaattttgtacgccagttttataacccctccccccttgtaacttagaagatgtaaacacagaccaataggtggtaactaaccaagttactaaaggtcaagcacttctgtttccccggctgatattgatatgctccaccagggcaaaaacaatagaagtcgttatccgcaaagtgcctacgcaaagcctagtagcactttagattgtgtatggttggtcgctcagctattccccccagtagacctggcagatgaggctagaaataccccactggtaacagtgttctagcctgcgtggctgcctgcgcaccctttcgggtgcgaagccatatacatgacaaggtgtgaagagccccgtgtgctcactttgagtcctccggctcctgaatgtggctaaccttaaacctgcagccagtgcacataagccaatgtgtagctggtcgtaatgagtaattgcgggatgggaccaactactttggatgtccgtgtttcttgtttttcctttaattttgcttatggtgacaatatatagataatatatattggcatc

SEQ ID NO: 21861 - DNA, 603 bp, synthetic construct
  source 1..603: mol_type = other DNA
catactgtgcgttgtacactggaatcacggttcctttgtatgcctgttttataatcccttcccctcttttctatcgtctccaattttccacgtaacttagaagcaaagtacatgagcccaataggagcggctaacccatagccgtatagggcaagcacttctgttaccccggatgtgtgaatagacttctcacgaggttgaagctgaagcattcgttacccgcacttgtactgcgcggaaattagtagcacctttgccagcttcatggcgtttcgctcagcgtttcccccacgtagatcagggcaatggggctacacaacccccaccggcgacggtggtgtagcccgcgtggtgccccgcccgagctatcagctcgggacgccatgatgaagacagggtgtgaaggttcgagtgcgctacaagtgagtcctccggcccctgaatgcggctaaccttaaccccgtagctgtggtatgcatgccagcataaacacagtcgtaatgggcaactacgggatgggaccgactactttgggtgtccgtgtttcactttttcctttaaatttgtcttatggttacaggtttatgcaatagatctgtaatc

SEQ ID NO: 21862 - DNA, 591 bp, synthetic construct; identical to SEQ ID NO: 643
  source 1..591: mol_type = other DNA

SEQ ID NO: 21863 - DNA, 337 bp, synthetic construct
  source 1..337: mol_type = other DNA
tacccatggctaacgccatgggacgctagttgtgaacaaggtgtgaagagcctattgagctacttaagagtcctccggcccctgaatgcggctaatcctaaccacggagcaagtgcccacaaaccagtgagtggcttgtcgtaacgcgcaagtctgtggcggaaccgactactttgggtgtccgtgtttccttttatttttatcatggctgcttatggtgacaatctaagattgttatcatatagctattggattggccatccggtgatttacagagacttgagaactaacccgcctttctacaacactcatttacttattaatctcataatacaca

SEQ ID NO: 21864 - DNA, 337 bp, synthetic construct; identical to SEQ ID NO: 322
  source 1..337: mol_type = other DNA

SEQ ID NO: 21865 - DNA, 374 bp, synthetic construct; identical to SEQ ID NO: 366
  source 1..374: mol_type = other DNA

SEQ ID NO: 21866 - DNA, 699 bp, synthetic construct
  source 1..699: mol_type = other DNA
cgctagcacactggtattacggtacctttgtgcgcctgttttatgcacccttccccgaaagaaatttagaagctcaacttgtgtggtcaatagtaaatccagtacgccaactgggtcacgaccaagcacttctgttaccccggactgagtatcaataagctgctcacgtggctgaaggagaaaacgttcgttacccggccaattacttcgagaaacccagtaccaccatggaagttgcgcggcgtttcgctccgcacgaccccagtgtagatcgggccgatgagtcaccgcgttccccacgggtgaccgtggcggtggctgcgttggcggcctgcccatggggcaacccatgggacgcttcaatactgacatggtgcgaagagtctattgagctaattggtagtcctccggcccctgaatgcggctaatcctaactgcggagcagatacccacacgccagtgggtagtctgtcgtaacgggcaactctgcagcggaaccgactactttgggtgtccgtgtttccttttatttttatactggctgcttatggtgacaattgagagattgttgccatatagctattggattggccatccggtgtctaacagagcgatcgtttatttgtttgttggattcgtacctttgaattataaggtacttgcaacgcttaaatacattatagacctcaacacaacaaa

SEQ ID NO: 21867 - DNA, 573 bp, synthetic construct
  source 1..573: mol_type = other DNA
tgtggagtagtacactgttattacggtaaccttgtacgccagttttatcaccccttcccccttgtaacttagaagttataaactcgagaccaataggcagtgatcaaccagatcactaaaggtcaagcacttctgtttccccggtcaacgctgatatgctccaccagggcaaaaacagccgcgatcgttatccgcaaagtgcctacgcaaagcctagtaatatcttgaatgatgtatggttggtcgttcagctaaaccccatagtagacctggcagatgaggctggaaattccccactggcgacagtgttccagcctgcgtggctgcctgcgcactctcacgagtgcgaagccatatatttgacaaggtgtgaagagccccgtgtgctcactttgagtcctccggcccctgaatgtggctaaccttaaccctgcagctagtgcatacaatccagtgtgtggctagtcgtaatgagcaattgcgggatgggaccaactactttgggtgtccgtgtttcactttttcctttataatttgcttatggtgacagtatatagcttatatattgttacc

SEQ ID NO: 21868 - DNA, 353 bp, synthetic construct; identical to SEQ ID NO: 333
  source 1..353: mol_type = other DNA

SEQ ID NO: 21869 - DNA, 534 bp, synthetic construct; identical to SEQ ID NO: 572
  source 1..534: mol_type = other DNA

SEQ ID NO: 21870 - DNA, 570 bp, synthetic construct
  source 1..570: mol_type = other DNA
gggagtggtactctgttattacggtaactttgtacgccagttttatcctccccttaccccatgtaacttagaagtttttcacaaagaccaatagttggtaatcatccagattacttaaggtcaagcacttctgtttccccggtcaacgttgatatgccccaacagggcaaaaacaactgcgatcgttatccgcaaagcgcctacgcaaagcttagtagcacctttgagattatttggttggtcgttccgccatttcccctggtagacctggcagatgaggctggaagtaccccactggcgacagtgttccagcctgcgtggctgcctgcacaccctatgggtgtgaagccaaataatggacaaggtgtgaagagccccgtgtgctcgctttgagtcctccggcccctgaatgcggctaaccttaaccctgcagctagagcacacaagccagtgtgtatctagtcgtaatgagcaattgcgggatgggaccgactactttgggtgtccgtgtttcactttttacttataattgcttatggtgacaatatatatatagtatatattggcacc

SEQ ID NO: 21871 - DNA, 570 bp, synthetic construct
  source 1..570: mol_type = other DNA
gggagtggtactctgttattacggtaactttgtacgccagttttatcctccccttaccccatgtaacttagaagtttttcataaagaccaatagttggtaatcatccagattacttaaggtcaagcacttctgtttccccggtcaacgttgatatgctccaacagggcaaaaacaactgcgatcgttatccgcaaagcgcctacacaaagcctagtagcgcctttgagattatttggttggtcgttccgccatttcccctggtagacctggcagatgaggctggaagtaccccactggcgacagtgttccagcctgcgtggctgcctgcacaccctatgggtgtgaagccaaataatggacaaggtgtgaagagccccgtgtgctcgctttgagtcctccggcccctgaatgcggctaaccttaaccctgcagctagagcacacaagccagtgtgtatctagtcgtaatgagcaattgcgggatgggaccgactactttgggtgtccgtgtttcactttttacttataattgcttatggtgacaatatatatatagcatatattggcacc

SEQ ID NO: 21872 - DNA, 636 bp, synthetic construct
  source 1..636: mol_type = other DNA
ttcggtacctttgtacgcctgttttatctcccttcccaatgtaacttagaagttcttaaatcaatgctcaataggtggggcgcaaaccagcgctctcatgagcaagcactcctgtctccccggtgaggttgtataaactgttcccacggttgaaaacaacctatccgttatccgctatagtacttcgagaaacctagtaccacctttggattgttgacgcgttgcgctcagcacactaacccgtgtgtagcttgggtcgatgagtctggacatacctcactggcgacagtggtccaggctgcgttggcggcctactcatggtgaaagccatgagacgctagacatgaacaaggtgtgaagagtctattgagctactatagagtcctccggcccctgaatgcggctaatcctaaccatggagcaagtgctcacaggccagtgagttgcttgtcgtaatgcgcaagtccgtggcggaaccgactactttgggtgtccgtgtttcactttttacttttatgactgcttatggtgacaattcgatattgttaccatttagcttgtcaaatcaattgcaaaagatcctaactcttatttatcaacttgcatcttgataactttaatttgaaaattttaaca

SEQ ID NO: 21873 - DNA, 553 bp, synthetic construct
  source 1..553: mol_type = other DNA
aaaccagcgctctcatgagcaagcactcctgtctccccggtatggttgtataaactgttcccacggttgaaaacaacctatccgttatccgctatagtacttcgagaaacctagtatcaccttcggattgttgacgcgttgcgctcagcacactaacccgtgtgtagcttgggtcgatgagtctggacataccccactggcgacagtggtccaggctgcgttggcggcctactcatggtgaaaaccatgagacgctagacatgaacaaggtgtgaagagtctattgagctactatagagtcctccggcccctgaatgcggctaatcctaaccatggagcaagtgctcacaggccagtgagttgcttgtcgtaatgcgtaagtccgtggcggaaccgactactttgggtgtccgtgtttcactttttacttttatgactgcttatggtgacaatttgatattgttaccatttagcttgtcaaatcaattgcaaaagatcctaaatcttatttatcaacttgcattttgataactttgatttgaaaattttaata

SEQ ID NO: 21874 - DNA, 553 bp, synthetic construct
  source 1..553: mol_type = other DNA
aaaccagcgctctcatgagcaagcactcctgtctccccggtgtggttgtataaactgttcccacggttgaaaacaacctatccgttatccgctatagtacttcgagaaacctagtatcacctttggattgttgacgcgttgcgctcagcacactaacccgtgtgtagcttgggtcgatgagtctggacgtaccccactggcgacagtggtccaggctgcgttggcggcctactcatggtgaaaaccatgagacgctagacatgaacaaggtgtgaagagtctattgagctactatagagtcctccggcccctgaatgcggctaatcctaaccatggagcaagtgctcacaggccagtgagttgcttgtcgtaatgcgcaagtccgtggcggaaccgactactttgggtgtccgtgtttcactttttacttttatgactgcttatggtgacaatttgatattgttaccatttagcttgtcaaattaattgcaaaagatcctaaatcttatttaccaacttgcattttgataaccttgatttgaaaattttaata

SEQ ID NO: 21875 - DNA, 553 bp, synthetic construct
  source 1..553: mol_type = other DNA
aaaccagcgctctcatgagcaagcacttctgtctccccggtgtggttgtataaactgttcccacggttgaaaacaacctatccgttacccgctatagtacttcgagaaacctagtatcacctttggattgttgacgcgttgcgctcagcacactaacccgtgtgtagcttgggtcgatgagtctggacgtaccccactggtgacagtggtccaggctgcgttggcggcctactcatggtgaaaaccatgagacgctagacatgaacaaggtgtgaagagtctattgagctactatagagtcctccggcccctgaatgcggctaatcctaaccatggagcaagtgctcacaggccagtgagttgcttgtcgtaatgcgcaagtccgtggcggaaccgactactttgggtgtccgtgtttcactttttacttttatgactgcttatggtgacaatttgatattgttaccatttagcttgtcaaattaattgcaaaagatcctaaatcttatttaccaacttgcattttgataaccttgatttgaaaattttaata

SEQ ID NO: 21876 - DNA, 553 bp, synthetic construct
  source 1..553: mol_type = other DNA
aaaccagcgctctcatgagcaagcactcctgtctccccggtgtggttgtataaactgttcccacggttgaaaacaacctatccgttatccgctatagtacttcgagaaacctagtatcacctttggattgttgacgcgttgcgctcagcacactaacccgtgtgtagcttgggtcgatgagtctggacgtaccccactggcgacagtggtccaggctgcgttggcggcctactcatggtgaaaaccatgagacgctagacatgaacaaggtgtgaagagtctattgagctactatagagtcctccggcccctgaatgcggctaatcctaaccatggagcaagtgctcacaggccagtgagttgcttgtcgtaatgcgcaagtctgtggcggaaccgactactttgggtgtccgtgtttcactttttacttttatgactgcttatggtgacaatttgatattgttaccatttagcttgtcaaattaattgcaaaagatcctaaatcttatttaccaacttgcattttgataaccttggtttgaaaattttaata

SEQ ID NO: 21877 - DNA, 553 bp, synthetic construct
  source 1..553: mol_type = other DNA
aaaccagcgctctcatgagcaagcactcctgtctccccggtgtggttgtataaactgttcccacggttgaaaacaacctatccgttatccgctatagtacttcgagaaacctagtatcacctttggattgttgacgcgttgcgctcagcacactaacccgtgtgtagcttgggtcgatgagtctggacgtaccccactggcgacagtggtccaggctgcgttggcggcctactcatggtgaaaaccatgagacgctagacatgaacaaggtgtgaagagtctattgagctactatagagtcctccggcccctgaatgcggctaatcctaaccatggagcaagtgctcacaggccagtgagttgcttgtcgtaatgcgcaagtccgtggcggaaccgactactttgggtgtccgtgtttcactttttacttttatgactgcttatggtgacaatttgatattgttaccatttagcttgtcaaattaattgcaaaagattctaaatcttatttaccaacttgcattttgataaccttgatttgaaaattttaaca

SEQ ID NO: 21878 - DNA, 553 bp, synthetic construct
  source 1..553: mol_type = other DNA
aaaccagcgctctcatgagcaagcactcctgtctccccggtgtggttgtataaactgttcccacggttgaaaacaacctatccgttatccgctatagtacttcgagaaacctagtatcacctttggattgttaacgcgttgcgctcagcacactaacccgtgtgtagcttgggtcgatgagtctggacgtaccccactggcgacagtggtccaggctgcattggcggcctactcatggtgaaaaccatgagacgctagacatgaacaaggtgtgaagagtctattgagctactatagagtcctccggcccctgaatgcggctaatcctaaccatggagcaagtgctcacaggccagtgagttgcttgtcgtaatgcgcaagtctgtggcggaaccgactactttgggtgtccgtgtttcactttttacttttatgactgcttatggtgacaatttgatattgttaccatttagcttgtcaaatcaattgcaaaagatcctaaatcttacttaccaacttgcattttgataaccttgatttgaaaattttaata

SEQ ID NO: 21879 - DNA, 553 bp, synthetic construct
  source 1..553: mol_type = other DNA
aaaccagcgctctcatgagcaagcactcctgtctccccggtgtggttgtataaactgttcccacggttgaaaacaacctatccgttatccgctatagtacttcgagaaacctagtatcacctttggattgttgacgcgttgcgctcagcacactaacccgtgtgtagcttgggtcgatgagtctggacgtaccccactggcgacagtggtccaggctgcgttggcggcctactcatggtgaaaaccatgagacgctagacatgaacaaggtgtgaagagtctattgagctactatagagtcctccggcccctgaatgcggctaatcctaaccatggagcaagtgctcacaggccagtgagttgcttgtcgtaatgcgcaagtccgtggcggaaccgactactttgggtgtccgtgtttcactttttacttttatgactgcttatggtgacaatttgatattgttaccatttagcttgtcaaattaattgcaaaagatcctaaatcttatttaccaacttgcattttgataacctcgatttgaaaattttaata

SEQ ID NO: 21880 - DNA, 553 bp, synthetic construct
  source 1..553: mol_type = other DNA
aaaccagcgctctcatgagcaagcactcctgtctccccggtgtggttgtataaactgttcccacggttgaaaacaacctatccgttatccgctatagtacttcgagaaacctagtatcacctttggattgttgacgcgttgcgctcagcacactaacccgtgtgtagcttgggtcgatgagtctggacgtaccccactggcgacagtggtccaggctgcgttggcggcctactcatggtgaaaaccatgagacgctagacatgaacaaggtgtgaagagtctattgagctactatagagtcctccggcccctgaatgcggctaatcctaaccatggagcaagtgctcacaggccagtgagttgcttgtcgtaatgcgcaagtctgtggcggaaccgactactttgggtgtccgtgtttcactttttacttttatgactgcttatggtgacaatttgatattgttaccatttagcttgtcaaatcaattgcaaaagatcctaaatcttacttaccaacttgcattttgataaccttgatttgaaaattttaata

SEQ ID NO: 21881 - DNA, 553 bp, synthetic construct
  source 1..553: mol_type = other DNA
aaaccagcgctctcatgagcaagcactcctgtctccccggtgtggttgtataaactgttcccacggttgaaaacaacctatccgttatccgctatagtacttcgagaaacctagtatcacctttggattgttgacgcgttgcgctcagcacactaacccgtgtgtagcttgggtcgatgagtctggacgtaccccactggcgacagtggtccaggctgcgttggcggcctactcatggtgaaaaccatgagacgctagacatgaacaaggtgtgaagagtctattgagctactatagagtcctccggcccctgaatgcggctaatcctaaccatggagcaagtgctcacaggccagtgagttgcttgtcgtaatgcgcaagtccgtggcggaaccgactactttgggtgtccgtgtttcactttttacttttgtgactgcttatggtgacaatttgatattgttaccatttagcttgtcaaattaattgcaaaagatcctaaatcttatttaccaacttgcattttgataaccttaatttgaaaattttaata

SEQ ID NO: 21882 - DNA, 553 bp, synthetic construct
  source 1..553: mol_type = other DNA
aaaccagcgctctcatgagcaagcactcctgtctccccggtgtggttgtataaactgttcccacggttgaaaacaacctatccgttatccgctatagtacttcgagaaacctagtatcacctttggattgttgacgcgttgcgctcagcacactaacccgtgtgtagcttgggtcgatgagtctggacgtacctcactggcgacagtggtccaggctgcgttggcggcctactcatggtgaaaaccatgagacgctagacatgaacaaggtgtgaagagtctattgagctactatagagtcctccggcccctgaatgcggctaatcctaaccatggagcaagtactcacatgccagtgagttgcttgtcgtaatgcgcaagtctgtggcggaaccgactactttgggtgtccgtgtttcactttttacttttatgactgcttatggtgacaatttgatattgttaccatttagcttgtcaaattaattgcaaaagatcctaaatcttatttcccaacttgcattttgataaccttgatttgaaaattttaata

SEQ ID NO: 21883 - DNA, 553 bp, synthetic construct
  source 1..553: mol_type = other DNA
aaaccagcgctcttatgagcaagcactcctgtctccccggtgtggttgtataaactgttcccacggttgaaaacaacctatccgttatccgctatagtacttcgagaaacctagtatcacctttggattgttgacgcgttgcgctcagcacactaacccgtgtgtagcttgggtcgatgagtctggacgtacctcactggcgacagtggtccaggctgcgttggcggcctactcatggtgaaaaccatgagacgctagacatgaacaaggtgtgaagagtctattgagctactatagagtcctccggcccctgaatgcggctaatcctaaccatggagcaagtgctcacaggccagtgagttgcttgtcgtaatgcgcaagtctgtggcggaaccgactactttgggtgtccgtgtttcactttttacttttatgactgcttatggtgacaatttgatattgttaccatttagcttgtcaaattaattgcaaaagatcctaaatcttatttaccaacttgcactttgataaccttgatttgaaaattttaata

SEQ ID NO: 21884 - DNA, 557 bp, synthetic construct
  source 1..557: mol_type = other DNA
gttattacggtaactttgtacgccagttttatcctccccttaccccgtgtaacttagaagttttttcacaaagaccaatagttggtaatcatccagattacttaaggtcaagcacttctgtttccccggtcaatgttgatatgctccaacagggcaaaaacaactgcgatcgttatccgcaaagcgcctacgcaaagcctagtagcacctttgagattatttggttggtcgctccaccatttcccctggtagacctggcagatgaggctggaagtaccccactggcgacagtgttccagcctgcgtggctgcctgcacaccctatgggtgtgaagccaaataatggacaaggtgtgaagagccccgtgtgctcgctttgagtcctccggcccctgaatgcggctaaccttaaccctgcagctggagcacacaaaccagtgtgtatctagtcgtaatgagcaattgcgggatgggaccgactactttgggtgtccgtgtttcactttttacttataattgcttatggtgacaatatatatatagtatatattggcact

SEQ ID NO: 21885 - DNA, 507 bp, synthetic construct
  source 1..507: mol_type = other DNA
ttgtacacatcgaccgataggtggcatttatccaaaatgttgaaggtcaagcacttctgttaccccggttgaaattgatatgctccaacagggcaaaaacagttttaatcgttatccgcaaagcaactacgcaaagcctagtatcatttttgataatatacggttggtcgctccactgtgaacccgacagtagacctggcagatgaggctggaaaccccccactggtgacagtgttccagcctgcgtggctgcctgcgtacccctttgtgggtacgaagccatatgtttgacaaggtgtgaagagccccgtgtgcttgctttgagtcctccggcccctgaatgtggctaaccttaaccctgcagctagtgtgtacaatccagtacatagctagtcgtaatgagtaattgcgggatgggaccaactactttgggtgtccgtgtttcctatttttcctttatatttgcttatggtgacaatatatatacatcacatatatattggcacc

SEQ ID NO: 21886 - DNA, 461 bp, synthetic construct
  source 1..461: mol_type = other DNA
gtggtgtagtgtacaagcacttctgtttccccggagcgaggtataagtggtacccactgctgaaagcctttaaccgttatccgccaatcaactacgtaatggctagtattatcatgtttgtaatttggcgttcgatcaggtggttccccccactagtttggtcgatgaggctaggaactccccacgggcgaccgtgtcctagcctgcgtggcggccaacccagctctagctgggacgcctttttatagacatggtgtgaagacctgcatgtgcttgattgtgagtcctccggcccctgaatgcggctaaccttaaccccggagccttgcaacataatccaatgttgttaaggtcgtaatgagtaattctgggatgggaccgactactttgggtgtccgtgtttccttttattctttatattgtcttatggtcacagcatatatagtatatatactgtgatc

SEQ ID NO: 21887 - DNA, 564 bp, synthetic construct
  source 1..564: mol_type = other DNA
aaaccagcgctttcatgagcaagcacttctgtttccccggtgcggttgtatagactgtttccacggttgaaaacaacttatccgttatccgctatagtacttcgagaaacctagtatcacctttggattgttgatgcgttgcgctcagcacactaacccgtgtgtagcttgggctgatgagtctggacgtaccccactggtgacagtggtccaggctgcgttggcggcctactcatggtgaaaaccatgagacgctagacatgaacaaggtgtgaagagtctattgagctactatagagtcctccggcccctgaatgcggctaatcttaaccatggagcaagtgctcacaagccagtgagttgcttgtcgtaacgcgcaagtccgtggcggaaccgactactttgggtgtccgtgtttcactttttacctttatgactgcttatggtgacaatttaatattgttaccatttagcttgtcagattaatcgcgtgaaatcctaaatcttgttcaccaatttgtattcggatagcttcatttgaaaattctaaactcatttataaag

SEQ ID NO: 21888 - DNA, 342 bp, synthetic construct
  source 1..342: mol_type = other DNA
cttcaaaactgacatggtgtgaagagtctattgagctaattggtagtcctccggcccctgaatgcggctaatcctaactgcggagcagatacccacatgccagtgggcggtctgtcgtaacgggcaactctgcagcggaaccgactactttgggtgtccgtgtttccttttattcctatactggctgcttatggtgacaatcgagagattgctaccatatagctattggattggccatctggtgacaaacagagcgattgtttacctatttgttggtttcgtaccattgaattttaaagttttaaaaaccctcaaccttgttttagcacttaacgcagcaaa

SEQ ID NO: 21889 - DNA, 489 bp, synthetic construct
  source 1..489: mol_type = other DNA
gaaacctagtaccgccatggacgttgcgcagcgtttcgctccacacaaccccagtgtagatcaggtcgatgagccaccgcattccccacgggcgaccgtggcggtggctgcgttggcggcctgcccatggggtaacccatgggacgcttcaatacagacatggtgcgaagagtctattgagctaattggtagtcctccggcccctgaatgcggctaatcctaactgcggagcaggtacccacaacccagtgggtcacctgtcgtaatgggcaactctgcagcggaaccgactactttgggtgtccgtgtttccttttaacctttacactggctgcttatggtgacaattgaaagattgttaccatatagctattggattggccatcctgtgagtaatagagcgattgtatacttatttgttggctttataccactcaatttgaaagctttacagacactgaattatattgtggcattaaacacagcaaa

SEQ ID NO: 21890 - DNA, 491 bp, synthetic construct; identical to SEQ ID NO: 517
  source 1..491: mol_type = other DNA

SEQ ID NO: 21891 - DNA, 541 bp, synthetic construct
  source 1..541: mol_type = other DNA
accgcacgccagtttgccaccccctacccatcgtaacttagaagctatcaactcgaccaataggcggtggcaaaccataccacttacggtcaagcactcctgtttccccggtatgcgaggaatagactcctacagggttgaagcctcaagtatcgtcatccgcattggtactacgcaaagcttagtagtgccttgaaagtcccttggttggtcgctccgctagttccccctagtagacctggcagatgaggcaggacattccccactggcgacagtggtcctgcctgcgtggctgcctgcgcacccctaggggtgcgaagccaagtgacggacaaggtgtgaagagccccgtgtgctactaatgagtcctccggcccctgaatgcggctaatccaaccccacagctattgcacacaagccagtgtgtatatagtcgtaatgagcaattgtgggacggaaccgactactttgggtgtccgtgtttccttttattcttatcattctgcttatggtgacaatactgtgaaatagtgttgttacc

SEQ ID NO: 21892 - DNA, 545 bp, synthetic construct
  source 1..545: mol_type = other DNA
gacgccagttttgaactcccttaccccttttgtaacttagaagttaaacaaaccgaccgatagcaggcaatcacccagattgcttatggtcaagcacttctgtctccccggtctcctttgatatgctccaccagggcaaaaacagagtagatcgttatccgcaagatgcctacgcaacgcctagtagcattttgaagtaattttggctggtcgctcatttacaaccccagtaatagacctggcagatgaggctagatgctccccactggcgacagtgatctagcctgcgtggctgcctgcacaccctttctgggtgtgaagccaaatttatgacaaggtgcgaagagccacgtgtgctcatcttgagtcctccggcccctgaatgcggctaaccttaaccctgcagccattgcctacaagccagtgggtatgtggtcgtaatgagaaattgcgggatgggaccgactactttgggtgtccgtgtttcactttttaccttatatttgcttatggtgacaatatatatatagatatatattgacatc

SEQ ID NO: 21893 - DNA, 543 bp, synthetic construct
  source 1..543: mol_type = other DNA
ttgagccagttttatctcccctccccccaactgtaacttagaagtttatcattacgatcaataggtggtagttatccaaactaccaaaggtcaagcacttctgtctccccggtcaaggttgatatgctccaacagggcaaaaacaactaagatcgttatccgcaaagtgcctacgcaaagcctagtaatgcctttgaaaatttatggttggtcgctccgctattccccatagtagacctggcagatgaggctagaaattccccactggtgacagtgttctagcctgcgtggctgcctgcgcaccctttaggtgcgaagccatacattggacaaggtgtgaagagccccgtgtgctcactttgagtcctccggcccctgaatgtggctaaccttaaccctgcagctagtgcatgtaatccaacatgttgctagtcgtaacgagcaattgcgggatgggaccaactactttgggtgtccgtgtttcactttttccttttattattgcttatggtgacaatatatatagatatatatattgacacc

SEQ ID NO: 21894 - DNA, 360 bp, synthetic construct
  source 1..360: mol_type = other DNA
ggggcgacccatgggacgcttcaatacggacatggtgtgaagagtcaattgagctagttagtagtcctccggcccctgaatgcggctaatcctaactgtggagcatgcgcccccactccagagggtagcgtgtcgtaacgggtaactccgcagcggaaccgactactttgggtgtccgtgtttcctattattcttatattggctgcttatggtaacaattgagaggttgttgccatatagctattggattggccacccagtgacaaacagagctataatttaccaatttgtgggatttgttccaacaagtttgaaagtcttgaagacacttaatctaatattgctactcaatatcgcaaa

SEQ ID NO: 21895 - DNA, 514 bp, synthetic construct
  source 1..514: mol_type = other DNA
acctcccctaaatgtaacttagaagcaaagcaaactgatcaatagggggcaatcatccagattgtcaaagatcaagcacttctgtttccccggtcaaagttgatatgctccacaagggcaaaaacaactgagatcgttatccgcaagatgcctacgcaaagcctagtagcacattgaaagatacttggttggtcgctcagctgttaacccaacagtagacctggcagatgaggctagagattcccctccggcgacggagttctagcctgcgtggctgcctgcacacccgttgggtgtgaagccaaatattggacaaggtgtgaagagccgcgtgtgctcatcttgagtcctccggcccctgaatgtggctaaccttaaacctgcagccagtgcacacagtccagtgtgtagctggtcgtaatgagtaattgcgggatgggaccaactactttgggtgtccgtgtttcactttttccttttatcattgcttatggtgacaatatatattgttatc

SEQ ID NO: 21896 - DNA, 587 bp, synthetic construct; identical to SEQ ID NO: 637
  source 1..587: mol_type = other DNA

SEQ ID NO: 21897 - DNA, 553 bp, synthetic construct
  source 1..553: mol_type = other DNA
aaaccagcgctctcatgagcaagcactcctgtctccccggtgtggttgtataaactgttcccacggttgaaaacaacctatccgttatccgctatagtacttcgagaaacctagtatcacctttggattgttgacgcgttgcgctcagcacactaacccgtgtgtagcttgggtcgatgagtctggacataccccactggcgacagtggtccaggctgcgttggcggcctactcatggtgaaaaccatgagacgctagacatgaacaaggtgtgaagagtctattgagctactatagagtcctccggcccctgaatgcggctaatcctaaccatggagcaagtgctcgcaggccagtgagttgcttgtcgtaatgcgcaagtccgtggcggaaccgactactttgggtgtccgtgtttcactttttacttttatgactgcttatggtgacaatttgatattgttaccatttagcttgtcaaatcaattgtaaaagatcctaaatcttatttatcaacttgcattttgataactttgatttgaaaattttaata

SEQ ID NO: 21898 - DNA, 553 bp, synthetic construct
  source 1..553: mol_type = other DNA
aaaccagcgctctcatgagcaagcactcctgtctccccggtgtggttgtataaactgttcccacggttgaaaacaacctatccgttatccgctatagtacttcgagaaacctagtatcacctttggattgttgacgcgttgcgctcagcacactaacccgtgtgtagcttgggtcgatgagtctggacataccccactggcgacagtggtccaggctgcgttggcggcctactcatggtgaaaaccatgagacgctagacatgaacaaggtgtgaagagtctattgagctactatagagtcctccggcccctgaatgcggctaatcctaaccatggagcaagtgctcacaggccagtgagttgcttgtcgtaatgcgcaagtccgtggcggaaccgactactttgggtgtccgtgtttcactttttacttttatgactgcttatggtgacaatttgatattgttaccatttagcttgtcaaatcaattgtaaaagatcctaaatcttatttatcaacttgcattttgataactttgatttgaaaattttaata

SEQ ID NO: 21899 - DNA, 459 bp, synthetic construct
  source 1..459: mol_type = other DNA
aatggtcagtgcaagcacttctgtttccccggagcggagtatagacggccaccgctgtcaaaagctcttaaccgttatccgccagttaactacgcaacagctagtaacatcttgttgttcttagggcgttcgatcaggtgagtttaccccctcactagtctggtcgatgaggctgagaaaccctcacgggcgaccgtgtctcagcctgcgtggcggccagcccagcatatgctgggacgccttaagtatgacatggtgtgaagactcgcgtgtgcttagctgtgagtcctccggcccctgaatgcggctaacctaaaccccggagccttgaggcacaatccagtgcccgcgaggtcgtaatgagtaattctgggacgggaccgactactttgggtgtccgtgtttccttttatctttttaatgatcttatggttacaatatatagagtatattgtaatc

SEQ ID NO: 21900 - DNA, 576 bp, synthetic construct
  source 1..576: mol_type = other DNA
ggtgtagtatacttgtatcccggtacatttatacgccagttttataatccccaccccaaatgtaacttagaagcttgtacacaatgatcaataggatgatggctatccaagtcatctaagatcaagcacttctgtctccccggtgagtgtgaatatgctttacccaaggcaaaagctaatctcatcgttatccgcaaggtgcctacgggaagcctagtaatactctgaagatattttggttggtcgatcagttgcactcacccatgcaatagacctggcagatggggctaggcacacctcactggtaacagtggcctagcccgcgtggctgcctgcacaccttcgggtgtgaagccataatattgacagggtgtgaagagcctactgtgctcaccttgagtcctccggcccctgaatgtggctaatcctaaccccgtatccattgcacacaaaccagtgtgtctatggtcgtaatgggtaactacgggatggaaccaactactttgggtgtccgtgtttcttgtttttctttaatactgcttatggtgacattatatattgatatatagtgtcatc

SEQ ID NO: 21901 - DNA, 685 bp, synthetic construct
  source 1..685: mol_type = other DNA
tatcacggtacctttgtgcgcctgttttatacaccctcccccgagtgcaacttagaagatatccacacacggtcaataggcggctcagtatgccaactgagtcatgaccaagcacttctgttcccccggactgagtatcaataagctgcttacgtggctgaaggagaaaacgttcgttatccggccaattacttcgagaagcttagtaccaccatggaggttgcgcagtgtttcgttccgcacaaccccagtgtagatcaggtcgatgagtcaccgcactcctcacgggcgaccgtggcggtggctgcgctggcggcctgcccatggggcaacccatgggacgctccaatactgacatggtgcgaagagcctattgagctaattggtagtcctccggcccctgaatgcggctaatcctaactgcggagcagacacccacgagccagtgggcagtctgtcgtaatgggtaactctgcagcggaaccgactactttgggtgtccgtgtttccttttattcctacattggctgcttatggtgacaattgagagattgttaccatatagctattggattggccgtccagtgacaaacagagcgattatctatctatttgttggcttcgtaccattaaaccttagagtcctaaagaccctcaatttgattatacaatttaactctgtgaa

SEQ ID NO: 21902 - DNA, 558 bp, synthetic construct
  source 1..558: mol_type = other DNA
ctggggtaactttgtgtttgacgccagttttgccacccctccccacaatgtaacttagaagttttgcacttacagaccaataggatgtgattatccaaatcactaaaggtcaagcacttctgtttccccggttagatttgatacgctccaacagggcgaaaacagatctaatcgttatccgcaaggtgcctacgcaaagcctagtagcattctgaaaactttttgactggttgttccactacaaacccagtagtaaacctggcagatgaggctagaaattccccactggtgacagtgttctagcctgcgtggctgcctgcacaccctttgggtgtgaagccaatcagttgacagggtgtgaagagccccgtgtgctcaccttgagtcctccggcccctgaatgtggctaaccttaaacccgcagccaaggtgtgcaagccagcatattcttggtcgtaacgagcaattgtgggatgggaccaactactttgggtgtccgtgtttctttttattcttttataatgcctatggtgacaatatatagtatatattgtcatt

SEQ ID NO: 21903 - DNA, 552 bp, synthetic construct; identical to SEQ ID NO: 596
  source 1..552: mol_type = other DNA

SEQ ID NO: 21904 - DNA, 495 bp, synthetic construct
  source 1..495: mol_type = other DNA
ttgaggtctttaaagtagtgcaataggaagcatcacaaccagtgatgttatgcacaagtatttctgtttccccggagcgaggtatagacggtacccaccgtcaaaagcctttaaccgttatccgccaaccaactacgaaacagctagtaataccctgtattcttgcgaggtgttcgatcagacagattccccctctgttagtctggtcgatgaggctagaagtaccccacaggtaactgtgttctagcctgcgtggcggccagcccagctcctgctgggacgcctttcaagagacatggtgtgaagactcgattgtgcttggttgtgagtcctccggcccctgaatgcggctaaccttaaacccggatccatgctatgcaatccagcatagttatggtcgtaatgggcaactctgggatgggaccgactactttgggtgtccgtgtttccatttttactttttgtgtcatttatggttacaattaagttgtaatc

SEQ ID NO: 21905 - DNA, 607 bp, synthetic construct
  source 1..607: mol_type = other DNA
gcaggcgtggcacaccagccatgtctcggtcaagcacttctgtgaccccggactgagtatcaataaactgctcacgcggtcgaaggagaaaacgtccgttacccggctagctacttcgagaaacctagtaacgccatgaaaattgcgaggtgtttcgctcagcacatccccagtgtagatcaggtcgatgagtcaccgcattccccacaggtaactgtggcggtggctgcgttggcggcctgcccatggggtaactcatgggacgcttcaatacggacatggtgtgaagagtctattgagctagttagtattcctccggcccctgaatgcggctaatcctaactgtggagcatgcgcccccattccagagggtagcatgtcgtaacgggtaactccgcagcggaaccgactactttgggtgtccgtgtttccttttattttatcattggctgcttatggtgacaattgaaagattgttgccatatagctattggattggccatccggtgacgaacagagctataatttaccaatttgtgggatttgttcctataagtttgaaagtcttaaagacccttaatttaatattactactcaatagtgcaag

SEQ ID NO: 21906 - DNA, 288 bp, synthetic construct
  source 1..288: mol_type = other DNA
cccctgaatgcggctaatcctaactgcggagcagatacccacatgccagtgggcagtctgtcgtaacgggcaactctgcagcggaaccgactactttgggtgtccgtgtttccttttattcttatactggctgcttatggtgacaatcgaaagactgttaccatatagctattggattggccatccagtgtgcaacagagctgtcatatttctttttgttgggtttgtaccactcgattacagtagttataataccttactgtacatcgttcacctgaatacaagaaa

SEQ ID NO: 21907 - DNA, 445 bp, synthetic construct
  source 1..445: mol_type = other DNA
cttctgtttccccggagcggagtatagacggccgccgctgtcaaaagctcttaaccgttatccgccaattaactacgcaacggctagtaacatcttgttatttttagggcgttcgatcaggtgagtacacccctcactagtctggtcgatgaggctgagaattccccacgggcgaccgtgtctcagcctgcgtggcggccagcccagcttatgctgggacgccttaattgtgacatggtgtgaagacccacgtgtgcttaattgtgagtcctccggcccctgaatgcggctaacctaaaccctggagccttgagacacaatccagtgttggcaaggtcgtaatgagcaattccgggacgggaccgactactttgggtgtccgtgtttcctgttatttccaaattgttcttatggtcacaatataagatatatatatattgtgatc

SEQ ID NO: 21908 - DNA, 547 bp, synthetic construct
  source 1..547: mol_type = other DNA
tggacgccagttttatatcccctttccctcaatgtaacttagaagcaaagcaaactgatcaataggggacaatcatccagattgtcaaagatcaagcacttctgtttccccggtcaaagttgatatgctccacaagggcaaaaacaactgagatcgttatccgcaagatgcctacgcaaagcctagtaacacattgaaagatacttggttggtcactcagctgttaacccgacagtagacctggcagatgaggctagagattcccctctggcgacggagttctagcctgcgtggctgcctgcacaccctttgggtgtgaagccaaatattggacaaggtgtgaagagccgcgtgtgctcatcttgagtcctccggcccctgaatgtggctaaccttaaacctgcagccagtgcacacaatccagtgtgtagctggtcgtaacgagtaattgcgggatgggaccaactactttgggtgtccgtgtttcactttttccttttattattgcttatggtgacaatatatatagcatatatatattgttatc

SEQ ID NO: 21909 - DNA, 554 bp, synthetic construct; identical to SEQ ID NO: 598
  source 1..554: mol_type = other DNA

SEQ ID NO: 21910 - DNA, 516 bp, synthetic construct
  source 1..516: mol_type = other DNA
acttagaagtttctaaacacaggaccaacagcaggcaactctccaggttgtccaaggtcaagcactcctgtttccccggttgacgttgatatgctccaacagggcaaaaacaactgatatcgttatccgcaaagtgcctacacagagcttagtagtgctctgaaagatctttggttggtcgctcggctgcatacccagcagtagaccttgcagatgaggctggacattccccactggtaacagtggtccagcctgcgtggctgcctgcgcacctctcacgaggtgcgaagccaaagattggacagggtgtgaagagccgcgtgtgctcactttgagtcctccggcccctgaatgcggctaaccttaaacccgcagccatggttcacaaaccagtgaacttatggtcgtaatgagtaattgtgggatgggaccgactactttgggtgtccgtgtttcacttttttcctttattgattgcttatggtgacaatatatatatagatatatattgtcatc

SEQ ID NO: 21911 - DNA, 540 bp, synthetic construct
  source 1..540: mol_type = other DNA
cagacgccagttttatcctccccttaccccgtgtaacttagaagtttttcataaagaccaatagttggtaatcatccagattacttaaggtcaagcacttctgtttccccggtcaatgttgatatgctccaacagggcaaaaacaactgcgatcgttatccgcaaagcgcctacgcaaagcctagtagcacctttgagattatttggttggtcgttccgccatttcccctggtagacctggcagatgaggctggaagtaccccactggtgacagtgttccagcctgcgtggctgcctgcacaccctatgggtgtgaagccaaataatggacaaggtgtgaagagccccgtgtgctcgctttgagtcctccggcccctgaatgcggctaaccttaaccctgcagctggagcacacaaaccagtgtgtatctagtcgtaatgagcaattgcgggatgggaccgactactttgggtgtccgtgtttcactttttacttataattgcttatggtgacaatatatatatagtatatattggcact

SEQ ID NO: 21912 - DNA, 523 bp, synthetic construct
  source 1..523: mol_type = other DNA
ggtaacttagaagcttgtactttatgaaggccaataggcgggtagtcaaccacactactcacggtcaagcacttctgtttccccggtatgcggagaataagctttaacaaaggctgaagcttcaattatcgttacccgcatggtaactacgcaaagcttagtaacatcttggaaatttattggttggtcgctccactggagaaccctcccagtagacctggcagatgaggctaagtaatccccactggcgacagtgtcttagcctgcgtggctgcctgcacacctggaaacaggtgtgaagccaatcaatggacaaggtgcgaagagccccgtgtgcttatcatgagtcctccggcccctgaatgcggctaatccaaccccacagctattgcacataatccaatgtgtatttagtcgtaacgggcaactgtgggacggaaccgactactttgggtgtccgtgtttcctttattctcatttaagtttcctatggtgacaaatataagtaattatatctgtcatc

SEQ ID NO: 21913 - DNA, 324 bp, synthetic construct; identical to SEQ ID NO: 310
  source 1..324: mol_type = other DNA

SEQ ID NO: 21914 - DNA, 552 bp, synthetic construct
  source 1..552: mol_type = other DNA
agtatcaataaactgctcacgcggtcgaaggagaaaacgtccgttacccggctagctacttcgagaaacctagtaacgccatgaaaattgcgaggtgtttcgctcagcacatccccagtgtagatcaggtcgatgagtcaccgcattccccacaggtaactgtggcggtggctgcgttggcggcctgcccatgggataactcatgggacgcttcaatacggacatggtgtgaagagtctattgagctagttagtactcctccggcccctgaatgcggctaatcctaactgtggagcatgcgcccccattccagagggtagcatgtcgtaacgggtaactccgcagcggaaccgactactttgggtgtccgtgtttccttttattttatcattggctgcttatggtgacaattgaaagattgttaccatatagctactggattggccatccggtgacgaacagagctataatttaccaatttgtgggatttgttcctataagtttgaaagtcttaaagacccttaatttaatattactactcaatagtgcaag

SEQ ID NO: 21915 - DNA, 571 bp, synthetic construct
  source 1..571: mol_type = other DNA
gggcgcaaaccagcgctctcatgagcaagcactcctgtctccccggtgtggttgtataaactgttcccacggttgaaaacaacctatccgttatccgctatagtacttcgagaaacctagtatcacctttggattgttgacgcgttgcgctcagcacactaacccgtgtgtagcttgggtcgatgagtctggacatacctcactggcgacagtggtccaggctgcgttggcggcctactcatggtgaaaaccatgagacgctagacatgaacaaggtgtgaagagtctattgagctactatagagtcctccggcccctgaatgcggctaatcctaaccatggagcaagtgctcacaggccagtgagttgcttgtcgtaatgcgcaagtccgtggcggaaccgactactttgggtgtccgtgtttcactttttacttttatgactgcttatggtgacaatttgatattgttaccatttagcttgtcaaatcaattgcaaaagatcctaaatcttatttatcaacttgcattttgataactttgatttgaaaattttaataccattcataaag

SEQ ID NO: 21916 - DNA, 288 bp, synthetic construct
  source 1..288: mol_type = other DNA
cccctgaatgcggctaatcctaactgcggagcacatgccctcaacccagggggtattgtgtcgtaacgggcaactctgcagcggaaccgactactttgggtgtccgtgtttccttttattcttacatcggctgcttatggtgacaattgaaaggttgttaccatatagctattggattggccatccagtgtctaatagagctattatatacctctttgttggatttataccacttaatctaaaagtagtcaagacactacaactcattatacaactgaacacagcaag

SEQ ID NO: 21917 - DNA, 327 bp, synthetic construct; identical to SEQ ID NO: 311
  source 1..327: mol_type = other DNA

SEQ ID NO: 21918 - DNA, 543 bp, synthetic construct
  source 1..543: mol_type = other DNA
cgccagttttccccacccttccccacaatgtaacttagaagtttgtacaacatgaccaataggtgacaattatccagattgtcaaaggtcaagcacttctgtttccccggtcaatgaggatatgctttacccaaggcaaaaaccttaaagatcgttatccccacactgcctacacagagcctagtaccacttttgatgtagttaggttggtcgctccctgcaaacccagcagtagacctggcagatgaggctggacattccccactggcgacagtggtccagcctgcgtggctgcctgctcaccctttatgggtgagaagcctaattattgacaaggtgtgaagagccgcgtgtgctcagtgtgcttcctccggcccctgaatgtggctaaccttaaccctgcagccgttgcccataatccaatgggtttgcggtcgtaatgcgcaagtgcgggacgggaccaactactttgggtgtccgtgtttcctgtttttcttttgattgcattttatggtgacaatttatagaatatagattgtcatc

SEQ ID NO: 21919 - DNA, 325 bp, synthetic construct
  source 1..325: mol_type = other DNA
tgtgaagagtctattgagctagttggtagtcctccggcccctgaatgcggctaatcctaactgcggagcagatccccacaagccagtgggcagtctgtcgtaatgggcaactctgcagcggaaccgactactttgggtgtccgtgtttccttttattcttacactggctgcttatggtgacaattgaaggattgttaccatatagctattggattggccatccggtgtctaacagagcaataatttatctttttgttggattcgtcccacttaactacagagcacttgtaacgctcaattacatcatagatctcaacacaacgaa

SEQ ID NO: 21920 - DNA, 312 bp, synthetic construct
  source 1..312: mol_type = other DNA
ttgagctagttggtagtcctccggcccctgaatgcggctaatcctaactgcggagcagatccccacaagccagtgggcagtctgtcgtaatgggcaactctgcagcggaaccgactactttgggtgtccgtgtttccttttattcttatactggctgcttatggtgacaattgaagaattgttgccatatagctattggattggccatccggtgtctaacagagcaataatttatctttttgttggattcgtcccacttaactacagagcacttgcaacgctcaattacatcacagatctcaacacaacaaa

SEQ ID NO: 21921 - DNA, 530 bp, synthetic construct
  source 1..530: mol_type = other DNA
aatcccctccccttgtaacttagaagcaagtacacacaggccaatagcaagtagcaagccatgctacttatggtcaagcacttctgtttccccggtctgacgggatatgcttcacccgaggcagaaactcagatgatcgttatccgcaaagtgcctacgggaagcctagtagcaccctgaaaactgttaggttggtcgctcaattgctgaccccgagcaatagacttggcagatgaggctagacataccccaccagcgatggtggtctagcctgcgtggctgcctacccaccctaatagggtgggaagcctatcaatggacagggtgtgaagagcctactgtgctcactttgactcctccggcccctgaatgtggctaatcctaaccccgtatctatcgcatgcgcaccagcatgtaggtagtcgtaatgggcaactacgggatggaaccaactactttgggtgtccgtgtttccttgttttctttattatttgcttatggtgacaattgtatgaaatacgattgacacc

SEQ ID NO: 21922 - DNA, 484 bp, synthetic construct
  source 1..484: mol_type = other DNA
gaccaataggatgtgattatccagatcactaaaggtcaagcacttctgtttccccggttagatttgatacgctccaacagggcgaaaacagatctagtcgttatccgcaaggtgcctacgcaaagcctagtagcactctgaaagctttttgactggttgttccactacaaacccagtagtaaacctggcagatgaggctagaaattccccactggtgacagtgttctagcctgcgtggctgcctgcacaccctttgggtgtgaagccaatcagttgacagggtgtgaagagcctcgtgtgctcaccttgagtcctccggcccctgaatgtggctaaccttaaacccgcagccaaggtgtgcaagccagcatattcttggtcgtaacgagcaattgtgggatgggaccaactactttgggtgtccgtgtttctttttattcttttataatgcctatggtgacaatatatagcatatattgtcatt

SEQ ID NO: 21923 - DNA, 306 bp, synthetic construct
  source 1..306: mol_type = other DNA
tagttggtagtcctccggcccctgaatgcggctaatcctaactgcggagcagatccccacaagccagtgggcagtctgtcgtaatgggcaactctgcagcggaaccgactactttgggtgtccgtgtttccttttattcttatactggctgcttatggtgacaattgaagaattgttgccatatagctattggattggccatccggtgtctaacagagcaataatttatctttttgttggattcgtcccacttaactacagagcacttgcaacgctcaattacatcacagatctcaacacaacaaa

SEQ ID NO: 21924 - DNA, 440 bp, synthetic construct
  source 1..440: mol_type = other DNA
gtacggtcaagattgatatgctctaccagggcaaaaacagtcgcgatcgttacccgcaaagcaactacgcaaagcctagtatcatttttgatgatgtatggttggtcgttccgctatgaacctgatagtagacctggcagatgaggctagaaaatccccactggtaacagtgttctagcctgcgtggctgcctgcgtaccccttgtgggtacgaagccatacatttgacaaggtgtgaagagccccgtgtgcttgctttgagtcctccggcccctgaatgtggctaaccttaaccctgcagctagtgtgcgcaaaccagtgcatggctagtcgtaatgagcaattgcgggatgggaccaactactttgggtgtccgtgtttcttgtttttcttttatatttgcttatggtgacaatatatttaatacatatattgacacc

SEQ ID NO: 21925 - DNA, 450 bp, synthetic construct
  source 1..450: mol_type = other DNA
caagcacttctgtttccccggagcgaggtataggtggtacccaccgctgaaagcctttaaccgttatccgccaatcaactacgtaacagctagtagcattttgttgttgactggacgttcgatcaggtggtttacccccccactagtttggtcgatgaggctggaaattccccacgggtgaccgtgttccagcctgcgtggcggccaacccagctcatgctgggacgccctttcaatgacatggtgtgaagactcgcatgtgcttgattgtgaatcctccggcccctgaatgcggctaaccctaaccccggagccttgcatcacaatccagtgatgttagggtcgtaatgagtaattctgggatgggaccgactactttgggtgtccgtgtttctcatttttctttgaattgtcttatggtcacagcatatagtaatatatactgtgatc

SEQ ID NO: 21926 - DNA, 489 bp, synthetic construct; identical to SEQ ID NO: 515
  source 1..489: mol_type = other DNA

SEQ ID NO: 21927 - DNA, 519 bp, synthetic construct
  source 1..519: mol_type = other DNA
ccccttttgtaacttagaagattgaacaaatgaccaataggacgcaacaaaccagttgcaataggtcaagcacttctgtttccccggtcaatgttgatatgctccaacagggcaaaaacaacagcgatcgttatccgcaaggtgcctacgcaaagcctagtagcactcttgaaattgcttggttggtcgctcaggtgcaaacccagcactagacctggcagatgaggctagaaaatccccactggtgacagtgttctagcctgcgtggctgcctgcacacccatttgggtgtgaagccaaacaatggacagggtgtgaagagccccgtgtgctcatcttgattcctccggcccctgaatgcggctaaccttaaacctgcagccattgctcacaatccagtgagttggtggtcgtaatgagtaattgcgggatgggaccgactactttgggtgtccgtgtttcactttttaccttattttatgcttatggtgacaatatattgtaatatatattgacacc

SEQ ID NO: 21928 - DNA, 290 bp, synthetic construct
  source 1..290: mol_type = other DNA
gcccctgaatgcggctaatcctaaccatggagcaggcagctgcaacccagcagccagcctgtcgtaacgcgcaagtccgtggcggaaccgactactttgggtgtccgtgtttccttttattcttgaatggctgcttatggtgacaatcatagattgttatcataaagcgagttggattggccatccagtgtgaatcagattaattactcccttgtttgttggatccactcccgaaacgttttactccttaacttattgaaattgtttgaagacaggatttcagtgtcaca

SEQ ID NO: 21929 - DNA, 312 bp, synthetic construct
  source 1..312: mol_type = other DNA
ttgagctagttggtagtcctccggcccctgaatgcggctaatcctaactgcggagcagatccccacaagccagtgggcggtctgtcgtaatgggcaactctgcagcggaaccgactactttgggtgtccgtgtttccttttactcttatactggctgcttatggtgacaattgaaagattgttgccatatagctattggattggccatccagtgtctaacagagcaataatttatctttttgttggattcgtcccacttaacttcagagcacttgcaacgctcaattacatcatagatctcaacacaacaaa

SEQ ID NO: 21930 - DNA, 546 bp, synthetic construct
  source 1..546: mol_type = other DNA
ttgtacgccagttttgccaccctcccctaacatgtaacttagaagtttgaacgataagaccaataggtgataatcatccagattatcaaaggtcaagcacttctgtttccccggtcaatgaggatatgctttacccgaggcaaaaaccttagagatcgttatccacacactgcctacacagagcctagtaccacttttgacgtaactaggttggtcgctccctgcaaacccagcagtagacctggcagatgaggctggacgctccccactggcgacagtggtccagcctgcgtggctgcctgctcaccctattgggtgagaagcctatttattgacaaggtgcgaagagccgcgtgtgctcagtgtgcttcctccggcccctgaatgtggctaaccttaaccctgcagccgctgcccataatccaatgggtttacggtcgtaacgcgtaagtgcgggatgggaccaactactttgggtgtccgtgtttcttatttttcttttatttgcattttatggtgacaatttatggtatatagattgtcatc

SEQ ID NO: 21931 - DNA, 529 bp, synthetic construct
  source 1..529: mol_type = other DNA
ccccctccccttaatgtaacttagaagcaaagcaaactgatcaatagggggcaatcatccagattgtcaaagatcaagcacttctgtttccccggtcaaagttgatatgctccacaagggcaaaaacaactgagatcgttatccgcaagatgcctacgcaaagcctagtagcacattgaaagatacttggttggtcgctcagctgttaacccaacagtagacctggcagatgaggctagagattcccctccggcgacggagttctagcctgcgtggctgcctgcacacccgtcgggtgtgaagccaaatattggacaaggtgtgaagagccgcgtgtgctcatcttgagtcctccggcccctgaatgtggctaaccttaaacctgcagccagtgcacacagtccagtgtgtagctggtcgtaatgagtaattgcgggatgggaccaactactttgggtgtccgtgtttcactttttccttttatcattgcttatggtgacaatatatatagtatatatatattgttatc

SEQ ID NO: 21932 - DNA, 546 bp, synthetic construct
  source 1..546: mol_type = other DNA
ttgtacgccagttttgccaccctcccctaacatgtaacttagaagtttgaacgataagaccaataggtgataatcatccagattatcaaaggtcaagcacttctgtttccccggtcgatgaggatatgctttacccgaggcaaaaaccttagagatcgttatccacacactgcctacacagagcctagtaccacttttgatgtaactaggttggtcgctccctgcaaacccagcagtagacctggcagatgaggctggacgttccccactggcgacagtggttcagcctgcgtggctgcctgctcaccctattgggtgagaagcctacttattgacaaggtgcgaagagccgcgtgtgctcagtgtgcttcctccggcccctgaatgtggctaaccttaaccctgcagccgctgcccataatccaatgggtttacggtcgtaacgcgtaagtgcgggatgggaccaactactttgggtgtccgtgtttcttatttttcttttatttgcattttatggtgacaatttatggtatatagattgtcatc

SEQ ID NO: 21933 - DNA, 443 bp, synthetic construct
  source 1..443: mol_type = other DNA
tttggattgttgatgcgttgcgctcagcacactaacccgtgtgtagcttgggttgatgagtctggacctaccccactggtgacagtggtccaggctgccttggccgcctactcatggtgaaagccatgagacgctagacatgaacaaggtgtgaagagtctattgagctactatagagtcctccggcccctgaatgcggctaatcttaaccatggagcaagtgctcacaagccagtgagttgcttgtcgtaacgcgcaagtccgtggcggaaccgactactttgggtgtccgtgtttcactttttacctttatgactgcttatggtgacaatttaatattgttaccatttagcttgtcaaattaatcacgtgaaatcctaaatcttatttatcaatttgtatttggatagcttcatttgagaattctaaactcattcataaag

SEQ ID NO: 21934 - DNA, 415 bp, synthetic construct; identical to SEQ ID NO: 454
  source 1..415: mol_type = other DNA

SEQ ID NO: 21935 - DNA, 568 bp, synthetic construct
  source 1..568: mol_type = other DNA
gggtactctgctattacggtagccttgtatgccggttttacctcccctcccccatgtaacttagaagttttacacaaggaccaatagtcggtaatcagccagattactaaaggtcaagcacttctgtttccccggtcaatgctgatatgctccaacagggcaaaaacagtagcgatcgttatccgcaaagcgcctacgcaaagcttagtagcatctccgaaattgtctggttggtcgttccgccattttccccttggtagaccttgcagatgaggctagaaataccccactggcgacagtgttctagcctgcgtggctgcctgcacaccctatgggtgtgaagccaaacaatggacaaggtgtgaagagccccgtgtgctcgctttgattcctccggcccctgaatgtggctaaccttaaccctgcagctagagcacgcaaaccagcgtgtttctagtcgtaatgagtaattgcgggatgggaccaactactttgggtgtccgtgtttcactttttccttttatattgcttatggtgacaatatatatacagcatatatattgacacc

SEQ ID NO: 21936 - DNA, 289 bp, synthetic construct
  source 1..289: mol_type = other DNA
aagcctttaaccgttacccgccaattgactgcgagacagctagtaacattatgttgtttgttggacgttcgatcaggcagattaccccatctgctagtttggtcgatgaggctggaagtaccccacgggtgaccgtgttccagcctgcgtggcggccaacccagctgttgctgggacgcccttcaaatgacatggtgtgaagactctattgcgctcaattgtgagtcctccggcccctgaatgcggctaaccttaaacccggagccatgctacgcaatccagcttagtt

SEQ ID NO: 21937 - DNA, 276 bp, synthetic construct
  source 1..276: mol_type = other DNA
gctaatcctaactgcggagcagatgcccacatgccagtgggtggtctgtcgtaacgggcaactctgcagcggaaccgactactttgggtgtccgtgtttccttttattattatactggctgcttatggtgacaattgagagattgttaccatatagctattggattggccatccggtgactaacagagctattatttacttatttgttggttacgtaccgctcaactttagagttctaaacactattaactttattctaatactcaacacagcaaa

SEQ ID NO: 21938 - DNA, 570 bp, synthetic construct
  source 1..570: mol_type = other DNA
gagtggtacactattatcccggtaattttgtacgccagttttataacccctccccccttgtaacttagaagatgtaaacacagaccaataggtggtaactaaccaagttactaaaggtcaagcacttctgtttccccggctgatattgatatgctccaccagggcaaaaacaatagaagtcgttatccgcaaagtgcctacgcaaagcctagtagcactttagattgtgtatggttggtcgctcagctattccccctagtagacctggcagatgaggctagaaataccccactggtaacagtgttctagcctgcgtggctgcctgcgcaccctttcgggtgcgaagccatatacatgacaaggtgtgaagagccccgtgtgctcactttgagtcctccggctcctgaatgtggctaaccttaaacctgcagccagtgcacataagccaatgtgtagctggtcgtaatgagtaattgcgggatgggaccaactactttggatgtccgtgtttcttgtttttcctttgattttgcttatggtgacaatatatagacaatatatattggcatc

SEQ ID NO: 21939 - DNA, 480 bp, synthetic construct; identical to SEQ ID NO: 509
  source 1..480: mol_type = other DNA

SEQ ID NO: 21940 - DNA, 550 bp, synthetic construct; identical to SEQ ID NO: 593
  source 1..550: mol_type = other DNA

SEQ ID NO: 21941 - DNA, 518 bp, synthetic construct
  source 1..518: mol_type = other DNA
ccgatctaacttagaagcaacgtacatgagcccaataggagcggctaatccacagccgtatagggcaagcacttctgttaccccggatgtgtgaatagacttctcacgaggttgaagctgaagcattcgttatccgcacttgtactgcacggaaattagtagcactcttgccagcctcatggtgtttcgctcagcgtttcccccacgtagatcagggcaatggggctacacaacccccaccggcgacggtggtgtagcccgcgtggtgccccgcccgagctactagctcgggacgccatgatgaagacagggtgtgaaggttcgagtgcgctacaagtgagtcctccggcccctgaatgcggctaaccttaaccccgtagctgtggtgtacatgccagtacaaacacagtcgtaatgggtaactacgggatgggaccgactactttgggtgtccgtgtttcactttttcctttaaatttgtcttatggttacaggtttatgcaaatagatctgtaatc

SEQ ID NO: 21942 - DNA, 579 bp, synthetic construct
  source 1..579: mol_type = other DNA
caccgaacgttgtactcttgtattacggtacatttgcacgccagttttatacccccctcccctcgtaacttagaagcaagtacacacagaccaatagcaagtagcaagccatgctacttacggtcaagcactcctgtttccccggtctgacgggatatgcttcacccgaggcaaaaactcagatgatcgttatccgcaaagtgcctacgggaagcctagtaacgccttagaaattgttaggttggtcgctcaattgctgaccccgagcaatagacttggcagatgaggctggacgtgccccaccagcgatggtggtccagcctgcgtggctgcctacccaccccaacggggcgggaagcctatcaatagacaaggtgtgaagagcctactgtgctcactttgattcctccggcccctgaatgtggctaatcctaaccccgtatctatcgcatgcgcaccagcatgtaggtagtcgtaatgggcaactacgggatggaaccaactactttgggtgtccgtgtttccttgttttcttattacttgcttatggtgacaattgtatgaaatacgattgacacc

SEQ ID NO: 21943 - DNA, 529 bp, synthetic construct
  source 1..529: mol_type = other DNA
caccctcccctaacatgtaacttagaagtttgaacgataagaccaataggtgataatcatccagattatcaaaggtcaagcacttctgtttccccggtcgatgaggatatgctttacccgaggcaaaaaccttagagatcgttatccacacactgcctacacagagcctagtaccacttttgacataactaggttggtcgctccctgcaaacccagcagtagacctggcagatgaggctggacattccccactggcgacagtggtccagcctgcgtggctgcctgctcaccctattgggtgagaagcctatttattgacaaggtgcgaagagccgcgtgtgctcagtgtgcttcctccggcccctgaatgtggctaaccttaaccctgcagccgctgcccataatccaatgggtttacggtcgtaacgcgtaagtgcgggatgggaccaactactttgggtgtccgtgtttcttatttttcctttatttgcattttatggtgacaatttatggtatatagattgtcatc

SEQ ID NO: 21944 - DNA, 577 bp, synthetic construct
  source 1..577: mol_type = other DNA
ctcctacgtggagttgtactctattattccggtaattttgtacgccagttttatatccccacccccatgtaacttagaagttgagcacaacgaccaataggaggcaattaaccaaattgctaaaggtcaagcacttctgtttccccggtcaagattgatacgctccaccagggcgaaaacagttgagatcgttatccgcaaagtgcctacgcgaagcctagtaacattttgaagagtttatggttggtcgctccgctattccccatagtagacctggcagatgaggctagaaattccccactggcgacagtgttctagcctgcgtggctgcctgcacacccttatgggtgtgaagccatatacttgacaaggtgtgaagagcctagtgtgctcactttgagtcctccggcccctgaatgtggctaaccttaaacccgtagctagtgcacacaatccagtgtgtggctagtcgtaatgagcaattacgggatgggaccaactactttgggtgtccgtgtttcactttttccttttatacttgcttatggtgacaatatatagactatatattggcacc

SEQ ID NO: 21945 - DNA, 581 bp, synthetic construct
  source 1..581: mol_type = other DNA
ggccaagcacttctgtatccccggactgagtatcagtaggctgctcgcgcggctgaaggagaaaacgttcgttacccggccacttacttcgagaaacctagtaacgccatgaaagttgcgcagcgtttcgctccgcacaaacccagtgtagatcaggtcgatgagtcaccgcatcccccacgggcgaccgtggcggtggctgcgttggcggcctgcccatggggtaacccatgggacgcttcaatactgacatggtgcgaagagtctattgagctaagtggtaatcctccggcccctgaatgcggctaatcctaactgcggagcagatacccacactccagtgggcagtctgtcgtaacgggtaactctgcagcggaaccgactactttgggtgtccgtgtttccttttgtcttttataccggctgcttatggtgacaattgaaagattgttaccatatagctattggattggccatccggtgtcaaacagagcaattatttacttgtttgttggttatatacctctcgacaccaaggttctaaaaacactcaactacatcttgttattgaatacgttgaa

SEQ ID NO: 21946 - DNA, 563 bp, synthetic construct
  source 1..563: mol_type = other DNA
ctgttttaaacccccctcccccactctttctatcattcttttcttcctaatgtaacttagacgttataccacagtccaataggacgtggccaatccaggccatgacggacaagcacttctgtctccccgggcgtgtgaataggcctcaacaaggctgaagctgtagcgctcgttatccgcatttgtactacgcgatggctagtatcattcttctcttggtcttggcgtttcgctcagcgtggtaaccccccacgtagatcagggcaatgaggctgcatatgccccaccggcgacggtgatgcagcctgcgtggtgccccgcctgggttaacccccaggacgccataatcaagacagggtgagaagacctgagtgtgctacagatgagtcctccggcccctgaatgcggctaatcctaaccctgcagctatcgtatgcaaaccagcatattggtagtcgtaatgagcaattgcgggacggaaccgactactttgggtgtccgtgtttctctttttatttgaaatgttgcttatggttacaagttttggtattaaacttgtgacc

SEQ ID NO: 21947 - DNA, 253 bp, synthetic construct
  source 1..253: mol_type = other DNA
atgcggctaatcctaaccacggagcaagtgctcgcaaaccagtgagtggcttgtcgtaacgcgtgagtctgtggcggaaccgactactttgggtgtccgtgtttccttttatttttatcatggctgcttatggtgacaatctaagattgttatcatatagcttttggattggccatccggtgatttaaagagatataacatttatcttattgttctattatatctaattgctcattacaaccacattatcaca

SEQ ID NO: 21948 - DNA, 465 bp, synthetic construct; identical to SEQ ID NO: 501
  source 1..465: mol_type = other DNA

SEQ ID NO: 21949 - DNA, 529 bp, synthetic construct; identical to SEQ ID NO: 560
  source 1..529: mol_type = other DNA

SEQ ID NO: 21950 - DNA, 694 bp, synthetic construct; identical to SEQ ID NO: 832
  source 1..694: mol_type = other DNA

SEQ ID NO: 21951 - DNA, 259 bp, synthetic construct
  source 1..259: mol_type = other DNA
ggcccctgaatgcggctaatcccaaccacggagcaagcgcctgcatgccagcaggtagcttgtcgtaatgcgcaagtctgtggcggaaccgactactttgggtgtccgtgtttccttttattctcattatggctgcttatggtgacaatctaagattgttatcatatagcttttggattggccatccggagattactggtatttgaacagtttgttcacttcatctcattacatatttgtttgttcatcagttttcaca

SEQ ID NO: 21952 - DNA, 540 bp, synthetic construct
  source 1..540: mol_type = other DNA
taactttgtgtttgagtctccccccccctgcaacacttagaagaaatgtacttgtagaccaataggcggcggctacccaggtcgttgacggtcaagcacttctgtctccccggtgatactggatacgctttacccaaggcgaaaaccgggctcatcgttacccgcaaagtgcctacgagaagtctagtagcactctgaaaacctatgactggtcgctccactgcaatcccagcagtagacctggcagatggggctagacataccccaccagcgatggtggtctagcccgcgtggctgcctgcacaccctatgggtgtgaagccagaaagtggacagggtgtgaagaacctattgtgctcactttgagtcctccggcccctgaatgtggctaatcctaaccctgcagccgttgcgcacaacccagtgcgtatgcggtcgtaatgagtaattgcgggatggaaccaactactttgggtgtccgtgtttcttgttattcccttatttgcttatggtgacactgtatagccatacattgtcatc

SEQ ID NO: 21953 - DNA, 523 bp, synthetic construct
  source 1..523: mol_type = other DNA
agctacatagactgtccccacggttgaaagtggcagatccgttatccgcttaagtacttcgagaagcctagtatcaccttggaatcttcgacgcgttgcgctcagcactctaccccgagtgtagcttaggctgatgagtctgggcataccccaccggcgacggtggcccaggctgcgttggcggcctacccatggctaacgccatgggacgctagttgtgaacaaggtgtgaagagcctattgagctacttaagagtcctccggcccctgaatgcggctaatcctaaccacggagcaagtgcccacaaaccagtgggtggcttgtcgtaacgcgtaagtctgtggcggaaccgactactttgggtgtccgtgtttccttttatttttatcatggctgcttatggtgacaatctaagattgttatcatatagctattggattggccatccggtgattcacagagacttgaaagctaactcaccttcctataacactcatttgtttatcaatcttatagcacaca

SEQ ID NO: 21954 - DNA, 335 bp, synthetic construct
  source 1..335: mol_type = other DNA
cgttggcggcctactcatggtgaaagccatgagacgctagacatgaacaaggtgtgaagagtctattgagctactatagagtcctccggcccctgaatgcggctaatcctaaccatggagcaagtgctcacaggccagtgagttgcttgtcgtaatgcgcaagtccgtggcggaaccgactactttgggtgtccgtgtttcactttttacttttatgactgcttatggtgacaatttgatattgttaccatttagcttgtcaaatcaattgcaaaagatcctaaatcttatttatcaacttgcatcttgataactttaatttgaaaattttaaca

SEQ ID NO: 21955 - DNA, 290 bp, synthetic construct
  source 1..290: mol_type = other DNA
ggcccctgaatgcggctaatcctaactgcggagcaggcaccctcaatccagagggcagtctgtcgtaacgggcaactctgcagcggaaccgactactttgggtgtccgtgtttccttttattcttgaactggctgcttatggtgacaattgaaaggttgttaccatatagctattggattggccacccagtgacaaatagagcaattatatatctgtttgttggttttgttccattaaactataaaattttaaacacactcaaatttgtcttactactcaactcagcaaa

SEQ ID NO: 21956 - DNA, 478 bp, synthetic construct; identical to SEQ ID NO: 508
  source 1..478: mol_type = other DNA

SEQ ID NO: 21957 - DNA, 276 bp, synthetic construct
  source 1..276: mol_type = other DNA
gctaatcctaactgcggagcagatacccacataccagtgggcagtctgtcgtaacgggcaactctgcagcggaaccgactactttgggtgtccgtgtttccttttattcttatactggctgcttatggtgacaatcgaaagactgttaccatatagctattggattggccatccagtgtgcaacagatctgtcatatttctttttgttgggtttgtaccactcgattacagtagttataacaccttactgtacatcgttcacctgaatacaagaaa

SEQ ID NO: 21958 - DNA, 445 bp, synthetic construct
  source 1..445: mol_type = other DNA
cttctgtttccccggagcggagtatagacggccaccgctgtcaaaagctcttaaccgttatccgccaattaactacgcaacggctagtaacatcttgttatttttagggcgttcgatcaggtgagtacacccctcactagtctggtcgatgaggctgagaattccccacgggcgaccgtgtctcagcctgcgtggcggccagcccagcttacgctgggacgccttaattgtgacatggtgtgaagacccacgtgtgcttaattgtgagtcctccggcccctgaatgcggctaacctaaaccctggagccttgagacacaatccagtgttggcaaggtcgtaatgagcaattccgggacgggaccgactactttgggtgtccgtgtttcctgttatttccaaattgttcttatggtcacaatataagatatacatatattgtgatc

SEQ ID NO: 21959 - DNA, 349 bp, synthetic construct
  source 1..349: mol_type = other DNA
gttatttttagggcgttcgatcaggtgagtacacccctcactagtctggtcgatgaggctgagaattccccacgggcgaccgtgtctcagcctgcgtggcggccagcccagcttatgctgggacgccttaattgtgacatggtgtgaagacccacgtgtgcttaattgtgagtcctccggcccctgaatgcggctaacctaaaccctggagccttgagacacaatccagtgttggcaaggtcgtaacgagcaattccgggacgggaccgactactttgggtgtccgtgtttcctgttatttccaaattgttcttatggtcacaatataagatatacatatattgtgatc

SEQ ID NO: 21960 - DNA, 403 bp, synthetic construct
  source 1..403: mol_type = other DNA
acccaccgtcaaaagcctttaaccgttatccgccaaccaactacgaaacagctagtaataccctgtattcttgcgaggtgttcgatcagacagattccccctctgttagtctggtcgatgaggctagaagtaccccacaggtaactgtgttctagcctgcgtggcggccagcccagcttctgctgggacgcctttcaagagacatggtgtgaagactcgattgtgcttggttgtgagtcctccggcccctgaatgcggctaaccttaaacccggatccatgctatgcaatccagcatagttatggtcgtaatgggcaactctgggatgggaccgactactttgggtgtccgtgtttccatttttactttttgtgtcatttatggttacaattaagttgtaatc

SEQ ID NO: 21961 - DNA, 338 bp, synthetic construct
  source 1..338: mol_type = other DNA
ggacgttcgatcaggtggtttacccccccactagtttggtcgatgaggctggaaattccccacgggtgaccgtgttccagcctgcgtggcggccaacccagctcatgctgggacgccctttcgatgacatggtgtgaagactcgcatgtgcttgattgtgaatcctccggcccctgaatgcggctaaccctaaccccggagccttgcatcacaatccagtgatgttagggtcgtaatgagtaattctgggatgggaccgactactttgggtgtccgtgtttctcatttttctttgaattgtcttatggtcacagcatatactaatatatactgtgatc

SEQ ID NO: 21962 - DNA, 444 bp, synthetic construct
  source 1..444: mol_type = other DNA
ttccccggttgacgttgatatgctccaacagggcaaaaacaactgatatcgttatccgcaaagtgcctacacagagcctagtaggattctgaaagatctttggttggtcgctcagctgcatacccagcagtagaccttgcagatgaggctggacattccccactggtaacagtggtccagcctgcgtggctgcctgcacacctcttatgaggtgtgaagccaaggattggacagggtgcgaagagccgcgtgtgctcactttgagtcctccggcccctgaatgcggctaaccttaaacctgcagccatagctcataagccaatgagtttatggtcgtaatgagcaattgcgggatgggaccgactactttgggtgtccgtgtttcactttttcctttatcaattgcttatggtgacaatatatataaatatatatattggcatc

SEQ ID NO: 21963 - DNA, 276 bp, synthetic construct
  source 1..276: mol_type = other DNA
gctaatcctaactgcggagcatgcgcccccgttccagagggtagcgtgtcgtaacgggcaactctgcagcggaaccgactactttgggtgtccgtgtttccttttatcttctcattggctgcttatggtgacaattgcgagattgttaccatatagctattggattggccatccggtgtctaacagagctataatataccaatttgtgggattcgttccattaagtttgaaagtcttacaaaccctcaacttgatactgcaactcaatagtgtaaa

SEQ ID NO: 21964 - DNA, 326 bp, synthetic construct
  source 1..326: mol_type = other DNA
ggtgtgaagagtctattgagctaattggtagtcctccggcccctgaatgcggctaatcctaactgcggagcagatacccacataccagtgggcagtctgtcgtaatgggtaactctgcagcggaaccgactactttgggtgtccgtgtttccttttattttatactggctgcttatggtgacaattgatagattgttaccatatagctattggattggccatccagtgacaagcagagctatcatctacctgtttgttggttttgttccattgaattttaaagttctaaaaactatcgactttatcttagcactcaatacggcaaa

SEQ ID NO: 21965 - DNA, 308 bp, synthetic construct
  source 1..308: mol_type = other DNA
tagttggtagtcctccggcccctgaatgcggctaatcctaactgcggagcagatacccacgcaccagtgggcagtctgtcgtaatgggcaactctgcagcggaaccgactactttgggtgtccgtgtttccttttattcttatactggctacttatggtgacaattgagagattgtaaccatattgctattggattggccacccggcgacgaatagaacagttgtttacctgtttgttagtttcgtatcactgaactacaaagccttaaacaccctttaatttcatcataacgctcaacacgttaaat

SEQ ID NO: 21966 - DNA, 308 bp, synthetic construct
  source 1..308: mol_type = other DNA
tagttggtagtcctccggcccctgaatgcggctaatcctaactgcggagcagatacccacgcgccagtgggcagtctgtcgtaatgggcaactctgcagcggaaccgactactttgggtgtccgtgtttccttttattcttatactggctacttatggtgacaattgagagattgtaaccatattgctattggattggccacccggcaacgaatagaacagttgtttacctgtttgttagtttcgtatcactgaactacaaagccttaaacaccctttaatttcatcataacgctcaacacgttaaat

SEQ ID NO: 21967 - DNA, 308 bp, synthetic construct; identical to SEQ ID NO: 293
  source 1..308: mol_type = other DNA

SEQ ID NO: 21968 - DNA, 307 bp, synthetic construct; identical to SEQ ID NO: 289
  source 1..307: mol_type = other DNA

SEQ ID NO: 21969 - DNA, 308 bp, synthetic construct; identical to SEQ ID NO: 294
  source 1..308: mol_type = other DNA

SEQ ID NO: 21970 - DNA, 484 bp, synthetic construct
  source 1..484: mol_type = other DNA
ccaataggtggtgaccatccaggtcactgacggtcgagcacttctgtttccccggtacccttgtatacgcttcgcccgaggcgaaaaacgaggttatcgttatccgcaaagtgcctacgagaagcctagtagcacttttgaaacctatggctggtcgctcaactgcatacccagcagtagacctggcagatgaggctagacactccccaccagcgatggtggtctagcctgcgtggctgcctgcacaccctatcgggtgtgaagccagaaagtggacaaggtgtgaagagcctattgtgctcactttgagtcctccggcccctgaatgtggctaatcctaaccccgtagctgttgcatgcaacccagcatgtatgcagtcgtaatgggcaactatgggatggaaccaactactttgggtgtccgtgtttcttgttttacttttcattgcttatggtgacaattgtaattaatacgcttgttacc

SEQ ID NO: 21971 - DNA, 307 bp, synthetic construct
  source 1..307: mol_type = other DNA
tagttggtagtcctccggcccctgaatgcggctaatcctaactgcggagcagatacccacgcaccagtgggcagtctgtcgtaatgggcaactctgcagcggaaccgactactttgggtgtccgtgtttccttttattcttatactggccacttatggtgacaattgagagattgtaaccatattgctattggattggccacccggcgacgaatagaacagtcgtttacctgtttgttggtttcgtatcactgaactacaaagccttaaacaccctttaatttcatcataacgctcaacacgttaag

SEQ ID NO: 21972 - DNA, 307 bp, synthetic construct
  source 1..307: mol_type = other DNA
tagttggtagtcctccggcccctgaatgcggctaatcctaactgcggagcagatacccacgcaccagtgggcagtctgtcgtaatgggcaactctgcagcggaaccgactactttgggtgtccgtgtttccttttattcttatactggctacttatggtgacaattgagagattgtgaccatattgctattggattgaccacccggcgacgaatagaacagttgcttacctgtttgttagtttcgtatcactgaactacaaagccttgaacaccctttaatttcatcataacgctcaatacgttaaa

SEQ ID NO: 21973 - DNA, 307 bp, synthetic construct; identical to SEQ ID NO: 290
  source 1..307: mol_type = other DNA

SEQ ID NO: 21974 - DNA, 307 bp, synthetic construct
  source 1..307: mol_type = other DNA
tagttggtagtcctccggcccctgaatgcggctaatcctaactgcggagcagatacccacgcaccagtgggcagtctgtcgtaatgggcaactctgcagcggaaccgactactttgggtgtccgtgtttccttttattcttatactggctacttatggtgacaattgagagattgtaaccatattgctattggattggccacccggcgacgaataggacagttgtttacctgtttgttagtttcgtatcactgaactacaaagccttgaacaccctttaatttcatcataacgttcaacacgttaaa

SEQ ID NO: 21975 - DNA, 307 bp, synthetic construct
  source 1..307: mol_type = other DNA
tagttggtagtcctccggcccctgaatgcggctaatcctaactgcggagcagatacccacgcaccagtgggcagtctgtcgtaatgggcaactctgcagcggaaccgactactttgggtgtccgtgtttccttttattcttatactggctacttatggtgacaattgagagattgtgaccatattgctattggattggccacccggcgacgaatagaacagttgcttacctgtttgttagtctcgtatcactgaactacaaagccttaaataccctttaatttcatcataacgctcaatacgataaa

SEQ ID NO: 21976 - DNA, 307 bp, synthetic construct
  source 1..307: mol_type = other DNA
tagttggtagtcctccggcccctgaatgcggctaatcctaactgcggagcagatacccacgcaccagtgggcagtctgtcgtaatgggcgactctgcagcggaaccgactactttgggtgtccgtgtttccttttatccttatactggctgcttatggtgacaattgagagattgttaccatattgctattggattggccacccggtgacgaatagaatagctgtttacctatttgttagtttcgtaccactgaactacaaagccttaaacaccctttaatctcatcataacgctcaatacgttaaa

SEQ ID NO: 21977 - DNA, 307 bp, synthetic construct
  source 1..307: mol_type = other DNA
tagttggtagtcctccggcccctgaatgcggctaatcctaactgcggagcagatacccacgcgccagtgggcagtctgtcgtaatgggcaactctgcagcggaaccgactactttgggtgtccgtgtttccttttactcttatactggctacttatggtgacaattgagagattgtaaccatattgctattggattggccacccggcgacgaatagaacagttgcttacctgtttgttagtctcgtatcactgaactacaaagccttaaacaccctttaattccatcataacgctcaatacgttaaa

SEQ ID NO: 21978 - DNA, 307 bp, synthetic construct
  source 1..307: mol_type = other DNA
tagttggtagtcctccggcccctgaatgcggctaatcctaactgcggagcagatacccacgcgccagtgggcagtctgtcgtaatgggcaactctgcagcggaaccgactactttgggtgtccgtgtttccttttgttcttatactggctacttatggtgacaattgagagattgtaaccatattgctattggattgaccacccggcgacgaatagaacagttgcttacctgtttgttagtctcgtatcactgaactataaatccttaaacaccctttaatttcgtcataacgctcaatacgttaaa

SEQ ID NO: 21979 - DNA, 307 bp, synthetic construct
  source 1..307: mol_type = other DNA
tagttggtagtcctccggcccctgaatgcggctaatcctaactgcggagcagatacccacgcaccagtgggcagtctgtcgtaatgggcaactctgcagcggaaccgactactttgggtgtccgtgtttccttttattcttatactggctacttatggtgacaattgagagattgttaccatattgctactggattggccacccggtgacgaacagaacagttgtttacctatttgttagtttcgtatcactgaactacaaagccttaaacaccctttaatctcatcataacgctcaatacgttaaa

SEQ ID NO: 21980 - DNA, 307 bp, synthetic construct; identical to SEQ ID NO: 291
  source 1..307: mol_type = other DNA

SEQ ID NO: 21981 - DNA, 307 bp, synthetic construct
  source 1..307: mol_type = other DNA
tagctggtagtcctccggcccctgaatgcggctaatcctaactgcggagcagatacccacgcaccagtgggcagtctgtcgtaatgggcaactctgcagcggaaccgactactttgggtgtccgtgtttccttttactctcatactggctacttatggttacaattgagagattgtgaccatattgctattggattggccatccagcgacgaatagaatagttgcttacctgtttgttaacctcgtatcactgaactacaaagccttgaataccctttaacttcatcataacgctcagtacgctaaa

SEQ ID NO: 21982 - DNA, 307 bp, synthetic construct
  source 1..307: mol_type = other DNA
taattggtagtcctccggcccctgaatgcggctaatcctaactgcggagcagatacccacgcaccagtgggcagtctgtcgtaatgggcaactctgcagcggaaccgactactttgggtgtccgtgtttccttccgttcttatactggctgcttatggtgacaattggaagattgttaccatatcgctattggattggccatccggtgacgattagaacacttgtatacctatttgttagctttgcaccgctgaactacagagccttaagcaccctttgatcacattacaacacccaacacgtcaaa

SEQ ID NO: 21983 - DNA, 307 bp, synthetic construct
  source 1..307: mol_type = other DNA
tagttggtagtcctccggcccctgaatgcggctaatcctaactgcggagcagatacccacgcaccagtgggcagtctgtcgtaatgggcaactctgcagcggaaccgactactttgggtgtccgtgtttccttttgttcttatactggctgcttatggtgacaattgagagattgtaaccatattgctattgaattggccacccggcgacgaataaaacagttgcttacctgtttgttagtctcgtatccctgaactacaaatccttaaacaccctttaatttcgtcataacgctcaatacgttaaa

SEQ ID NO: 21984 - DNA, 307 bp, synthetic construct
  source 1..307: mol_type = other DNA
tagttggtagtcctccggcccctgaatgcggctaatcccaactgcggagcagatacccacacaccagtgggcagtctgtcgtaatgggcaactctgcagcggaaccgactactttgggtgtccgtgtttcctattgttcttattctaaccacttatggtgacaattgagaggttgtgaccacattgccactgagttgaccgcccggcgacgagcagaacagttgcttacctgtctgttggtctcgtatcatcaaactacaaatccttgaacgctctcctatttcgtcataacgcccaacacgttaaa

SEQ ID NO: 21985 - DNA, 307 bp, synthetic construct
  source 1..307: mol_type = other DNA
tagttggtagtcctccggcccctgaatgcggctaatcctaactgcggagcagatacccacacaccagtgggcagtctgtcgtaatgggcaactctgcagcggaaccgactactttgggtgtccgtgtttccttttgttcttattctaaccacttatggtgacaattgagaggttgtgaccatattgccactgagttgaccacccggtgacgagcagaacagttgcttacctgtctgttggtcacgtatcattaaaccacaagtccttgaacgctctcccattttgtcataacgcccaacacgtcaaa

SEQ ID NO: 21986 - DNA, 307 bp, synthetic construct
  source 1..307: mol_type = other DNA
tagttggtagtcctccggcccctgaatgcggctaatcctaactgcggagcagatacccacacaccagtgggcagtctgtcgtaatgggcaactctgcagcggaaccgactactttgggtgtccgtgtttccttttgttcttattctaaccacttatggtgacaattgagaggttgtgatcatattgccactgagttgaccacccggtgacgagcagaacagttgcttacctgtctgttggtcacgtatcattaagccacaaatccttgaacgctctcctattttgtcataacgcccaacacgtcaaa

SEQ ID NO: 21987 - DNA, 307 bp, synthetic construct
  source 1..307: mol_type = other DNA
tagttggtagtcctccggcccctgaatgcggctaatcctaactgcggagcagatacccacgcaccagtgggcagtctgtcgtaatgggcaactctgcagcggaaccgactactttgggtgtccgtgtttccttttgttcttatactggctacttatggtgacaattgagagattgtaaccatattgctattggattggccacccggcgacgaatagaacagttgcttacctgtttgttagtctcgtatcactgaactacaaatccttaaacaccctttaatttcgtcataacgctcaatacgttaaa

SEQ ID NO: 21988 - DNA, 307 bp, synthetic construct
  source 1..307: mol_type = other DNA
tagttggtagtcctccggcccctgaatgcggctaatcctaactgcggagcagatacccacgcaccagtgggcagtctgtcgtaatgggcaactctgcagcggaaccgactactttgggtgtccgtgtttccttttgttcttatactggctacttatggtgacaattgagggattgtaaccatattgctattggattggccacccggcgacgaatagaacagttgcttacctgtttgttagtctcgtatcactgaactacaaatccttaaacaccctttaatttcgtcataacgctcaatacgttaaa

SEQ ID NO: 21989 - DNA, 307 bp, synthetic construct; identical to SEQ ID NO: 292
  source 1..307: mol_type = other DNA

SEQ ID NO: 21990 - DNA, 307 bp, synthetic construct
  source 1..307: mol_type = other DNA
tagttggtagtcctccggcccctgaatgcggctaatcctaactgcggagcagatacccacgcaccagtgggcagtctgtcgtaatgggcaactctgcagcggaaccgactactttgggtgtccgtgtttccttttattcttatactggctacttatggtgacaattgagagattgtaaccatattgctattggattggccacccggcgacgaatagaacagttgcttacctgtttgttagtctcgtatcactgaactacaaagccttaaacaccctttaatttcatcataacgctcaatacgtcaaa

SEQ ID NO: 21991 - DNA, 307 bp, synthetic construct
  source 1..307: mol_type = other DNA
tagttggtagtcctccggcccctgaatgcggctaatcctaactgcggagcagatacccacgcaccagtgggcagtctgtcgtaatgggcaactctgcagcggaaccgactactttgggtgtccgtgtttccttttattcctatactggctacttatggtgacaattgagagattgtaaccatattgctattggattggccacccggcgacgagtagaacagttgcttacctgtttgttagtttcgtatcactgaactacaaagccttaaacaccctttaatttcatcataacgctcaatgcgttaaa

SEQ ID NO: 21992 - DNA, 306 bp, synthetic construct; identical to SEQ ID NO: 284
  source 1..306: mol_type = other DNA

SEQ ID NO: 21993 - DNA, 600 bp, synthetic construct
  source 1..600: mol_type = other DNA
aagtaattcacacagttcaatagagagggggtacaaaccagtaccaccacgaacaagcacttctgtttccccggtgaagctacatagactgtccccacggttgaaagtggcagatccgttatccgcttaagtacttcgagaagcctagtatcaccttggaatcttcgacgcgttgcgctcagcactctaccccgagtgtagcttaggctgatgagtctgggcataccccaccggcgacggtggcccaggctgcgttggcggcctacccatggctaacgccatgggacgctagttgtgaacaaggtgtgaagagcctattgagctacttaagagtcctccggcccctgaatgcggctaatcctaaccacggagcaagtgcccacaaaccagtgggtggcttgtcgtaacgcgtaagtctgtggcggaaccgactactttgggtgtccgtgtttccttttatttttatcatggctgcttatggtgacaatctaagattgttatcatatagctattggattggccatccggtgattcacagagacttgaaagctaactcaccttcctataacactcatttgtttatcaatcttatagcacaca

SEQ ID NO: 21994 - DNA, 306 bp, synthetic construct
  source 1..306: mol_type = other DNA
tagttggtagtcctccggcccctgaatgcggctaatcctaactgcggagcagatacccacgcaccagtgggcagtctgtcgtaatgggcaactctgcagcggaaccgactactttgggtgtccgtgtttccttttattcttatactggctgcttatggtgacaattgagagattgttaccatattgctattggattggccatccggtgacgaatagagcaattgtttacctatttgttagttttgtaccactgaactacaaagtcttaaacacccttaatttcatcataacgctcaatacgttaaa

SEQ ID NO: 21995 - DNA, 308 bp, synthetic construct; identical to SEQ ID NO: 295
  source 1..308: mol_type = other DNA

SEQ ID NO: 21996 - DNA, 306 bp, synthetic construct; identical to SEQ ID NO: 285
  source 1..306: mol_type = other DNA

SEQ ID NO: 21997 - DNA, 306 bp, synthetic construct
  source 1..306: mol_type = other DNA
tagttggtagtcctccggcccctgaatgcggctaatcccaactgcggagcatacaccctcaagccagggggcagtgtgtcgtaacgggcaactctgcagcggaaccgactactttgggtgtccgtgtttcattttatccctatactggctgcttatggtgacaattgagaggttgttaccatatagctattggattggccatccggtgactaatagagctattatatacctctttgttggatttataccacttagcttaaaagaagtcaaaacattacaactcgttataaaattgaacacaacaaa

SEQ ID NO: 21998 - DNA, 306 bp, synthetic construct
  source 1..306: mol_type = other DNA
taattggtaatcctccggcccctgaatgcggctaatcctaactgcggagcagacacccacacaccagtgggcggtctgtcgtaacgggtaactctgcagcggaaccgactactttgggtgtccgtgtttccttttattccttttctggctgcttatggtgacaattgagagattgttgccatatagctattggattggccatccggtgacaaacagagcaattatttatctatttgttgggtttataccacttaacttaaaagaatttaaaacattacaacttattataaaattgaacacagcaaa

SEQ ID NO: 21999 - DNA, 306 bp, synthetic construct
  source 1..306: mol_type = other DNA
tagttagtagtcctccggcccctgaatgcggctaatcctaactgcggagcacacgccctcaacccagggggtagtgtgtcgtaacgggtaactctgcagcggaaccgactactttgggtgtccgtgtttccttttatctttacattggctgcttatggtgacaattgaaagattgttaccatatagctattggattggccatccagtgtctaatagagctattatatacctctttgttgggtttataccacttagcctaaaagaagttaaaacactacaacttattatacaattgaacacagcaaa

SEQ ID NO: 22000 - DNA, 306 bp, synthetic construct
  source 1..306: mol_type = other DNA
tagttagtagtcctccggcccctgaatgcggctaatcctaactgcggagcacataccctcaacccagggggcagtgtgtcgtaacgggcaactctgcagcggaaccgactactttgggtgtccgtgtttccttttatccttatattggctgcttatggtgacaattgaaagattgttaccatatagctattggattggccatccagtgtctaatagagctattatatacctctttgttgggtttataccacttagcctaaaagaagttaagacactacaacttattatacaattgaacacagcaaa

SEQ ID NO: 22001 - DNA, 306 bp, synthetic construct
  source 1..306: mol_type = other DNA
taattggtaatcctccggcccctgaatgcggctaatcctaactgcggagcagatactcacacaccagtgggcggtctgtcgtaacgggtaactctgcagcggaaccgactactttgggtgtccgtgtttccttttattccttttctggctgcttatggtgacaatagagagattgttgccatatagctattggattggccatccggtgacaaacagagcaattatttatctatttgttgggtctataccacttaacttaaaggaatttaaaacattacaacttattataaaattgaacatagcaaa

SEQ ID NO: 22002 - DNA, 306 bp, synthetic construct
  source 1..306: mol_type = other DNA
taattggtaatcctccggcccctgaatgcggctaatcctaactgcggagcagatactcacacaccagtgggcggtctgtcgtaacgggtaactctgcagcggaaccgactactttgggtgtccgtgtttccttttattccttttctggctgcttatggtgacaatagagagattgttgccatatagctattggattggccatccggtgacaaacagagcaattatttatctatttgttgggtttataccacttaacataaaggaatttaaaacattacaacttattataaaattgaacatagcaaa

SEQ ID NO: 22003 - DNA, 306 bp, synthetic construct
  source 1..306: mol_type = other DNA
tagttagtagtcctccggcccctgaatgcggctaatcctaactgcggagcatgcaccctcaacccagggggcagtatgtcgtaacgggtaactctgcagcggaaccgactactttgggtgtccgtgtttccttttatcttttcattggctgcttatggtgacaattgaaagattgttaccatatagctattggattagccatccagtgtccaatagagccattatatacctctttgttggattcataccacttagcctaaaagaagttaagacattacaacttatcacacaattgaacacagcaaa

SEQ ID NO: 22004 - DNA, 306 bp, synthetic construct
  source 1..306: mol_type = other DNA
taattggtagtcctccggcccctgaatgcggctaatcccaactgcggagcagatacccacacaccagtgggcagtctgtcgtaacgggcaactctgcagcggaaccgactactttgggtgtccgtgtttctttttattcttacactggctgcttatggtgacaattgagagattgttgccatatagctattggattggccatccggtgacaaacagagctattgtttacttatttgttggttttgtaccactgagctacaaagtcctaagcacccttaattttattataacactcaacacaacaaa

SEQ ID NO: 22005 - DNA, 306 bp, synthetic construct
  source 1..306: mol_type = other DNA
tagttagtagtcctccggcccctgaatgcggctaatcctaactgcggagcacataccctcaacccagggggcattgtgtcgtaacgggtaactctgcagcggaaccgactactttgggtgtccgtgtttccttttattcttatattggctgcttatggtgacaattgaaaggttgttgccatatagctattggattggccatccagtgtctaatagagccattatatacctctttgttggatttataccacttaatctaagagaagttaagacactacaactcattatacaactgaacacagcaaa

SEQ ID NO: 22006 - DNA, 306 bp, synthetic construct
  source 1..306: mol_type = other DNA
tagttggtagtcctccggcccctgaatgcggctaatcctaactgtggagcatacaccctcaagccagggggtagtgtgtcgtaacgggcaactctgcagcggaaccgactactttgggtgtccgtgtttcattttatcctcacactggccgcttatggtgacaattgaaaggttgttaccatatagctattggattggccatccagcgactaacagagctattatatacctctttgttggatttataccacttagcctaaaagaagttaaaacgttgcagctcatcataaaattaaacacagcaaa

SEQ ID NO: 22007 - DNA, 306 bp, synthetic construct
  source 1..306: mol_type = other DNA
tagttagtagtcctccggcccctgaatgcggctaatcctaactgcggagcacataccctcaacccagggggcattgtgtcgtaacgggtaactctgcagcggaaccgactactttgggtgtccgtgtttccttttattcttatattggctgcttatggtgacaattgaaaggttgttgccatatagctattggattggccatccagtgtctaatagagctattatatacctctttgttggatttataccacttagtctaagagaagttaagacactacaactcattatacaactgaacacagcaaa

SEQ ID NO: 22008 - DNA, 306 bp, synthetic construct
  source 1..306: mol_type = other DNA
tagttggtagtcctccggcccctgaatgcggctaatcctaactgtggagcatacaccctcaagccagggggcagtgtgtcgtgacgggcaactccgcagcggaaccgactactttgggtgtccgtgtttcattttatccctatactggctgcttatggtgacaattgagaggttgttaccatatagctattggattggccatccggtgtctaatagagctattatatacctctttgttggatttataccacttagcttaaaagaagtcaaaacattacaactcatcatatatttaaacacagcaaa

SEQ ID NO: 22009 - DNA, 436 bp, synthetic construct
  source 1..436: mol_type = other DNA
ccccggagcgaggtataggctgtacccactgccaaaagcctttaaccgttatccgccaaccaactacgtaaaagctagtaacatcatgtttgtaaatgggtgttcgatcaggtggatttcccctccactagtttggtcgatgaggctaggaattccccacgggtgaccgtgtcctagcctgcgtggcggccaacccagcgtatgctgggacgcctttttatagacatggtgcgaagactcgcatgtgcttggttgtgagtcctccggcccctgaatgcggctaaccctaaccctggagccttgagtcacaatccagtgatggcaaggtcgtaatgagcaattccgggatgggaccgactactttgggtgtccgtgtttctcatttttcttattattgtcttatggtcacagcatatatagtatatatactgtgatc

SEQ ID NO: 22010 - DNA, 492 bp, synthetic construct
  source 1..492: mol_type = other DNA
acaccgaccaataggaggtggtcatccaggccactaaaggtcaagcacttctgtttccccggttggtttggatatgcttcacccgaggcaaaaaccgggccaatcgttatccgcaaagtgcctacgagaagcctagtagcacctttgaagccaatggttggtcgctccgttgcaaccccagcaacagacctggcagatgaggctgagcattccccaccagcgatggtggctcagcctgcgtggctgcctgcgcatccttcgggatgcgaagccagaaagtggacaaggtgtgaagagcctattgtgctcactttgagtcctccggcccctgaatgtggctaatcctaaccccgcagctactacacataagccaatgtgcaggtagtcgtaacgggcaactgtgggatggaaccaactactttgggtgtccgtgtttccttgttatctttttgaatgcctatggtgacaattgtacagtatacatttgttacc

SEQ ID NO: 22011 - DNA, 276 bp, synthetic construct
  source 1..276: mol_type = other DNA
gctaatcctaactgcggagcagatacccacacaccagtgggcagtctgtcgtaacgggcaactctgcagcggaaccgactactttgggtgtccgtgtttccttttattcatatactggctgcttatggtgacaattgaaagattgttaccatatagctactggattggccatccggtgacaaatagagcggttatatatctttttgttggttttgtaccactgaaccctatagttctaaaaactctcaatctaattatattgttcaacacagcaaa

SEQ ID NO: 22012 - DNA, 512 bp, synthetic construct
  source 1..512: mol_type = other DNA
gaggttgtataaactgttcccacggttgaaaacaacctatccgttatccgctatagtacttcgagaaacctagtaccacctttggattgttgacgcgttgcgctcagcacactaacccgtgtgtagcttgggtcgatgagtctggacatacctcactggcgacagtggtccaggctgcgttggcggcctactcatggtgaaagccatgagacgctagacatgaacaaggtgtgaagagtctattgagctactatagagtcctccggcccctgaatgcggctaatcctaaccatggagcaagtgctcacaggccagtgagttgcttgtcgtaatgcgcaagtccgtggcggaaccgactactttgggtgtccgtgtttcactttttacttttatgactgcttatggtgacaatttgatattgttaccatttagcttgtcaaatcaattgcaaaagatcctaaatcttatttatcaacttgcatcttgataactttaatttgaaaattttaaca

SEQ ID NO: 22013 - DNA, 304 bp, synthetic construct; identical to SEQ ID NO: 282
  source 1..304: mol_type = other DNA

SEQ ID NO: 22014 - DNA, 457 bp, synthetic construct
  source 1..457: mol_type = other DNA
cggtcaagcacttctgtctccccggttcgaattgatacgctccaacagggcgaaaacaatttgaatcgttacccgcaaagtgcctacgcaaagcctagtagcactttagaaaatttatggttggtcgctcagctataccccctagtagacctggcagatgaggctagaagtaccccactggcgacagtgttctagcctgcgtggctgcctgcacaccctcacgggtgtgaagccatatatttgacaaggtgtgaagagccccgtgtgctcactttgagtcctccggcccctgaatgtggctaaccttaaccctgcagctagtgcatgtaatccaacatgttgctagtcgtaatgagcaattgcgggatgggaccaactactttgggtgtccgtgtttcactttttaccttttatttgcttatggtgacaatatatatataacatatatattggcatc

SEQ ID NO: 22015 - DNA, 306 bp, synthetic construct; identical to SEQ ID NO: 286
  source 1..306: mol_type = other DNA

SEQ ID NO: 22016 - DNA, 306 bp, synthetic construct; identical to SEQ ID NO: 287
  source 1..306: mol_type = other DNA

SEQ ID NO: 22017 - DNA, 306 bp, synthetic construct
  source 1..306: mol_type = other DNA
tagttagtagtcctccggcccctgaatgcggctaatcctaactgcggagcacatgcccacaaaccagtgggtggtgtgtcgtaacgggtaactctgcagcggaaccgactactttgggtgtccgtgtttctctttattccaatactggctgcttatggtgacaattgagagattgttgccatatagctattggattggccatccggtgtcgaacagagcgatcatctacctatttgttggatttgtacctttgaattttgaagtattcaagactctcaaccttgtactacaactcaattcggcaaa

SEQ ID NO: 22018 - DNA, 306 bp, synthetic construct
  source 1..306: mol_type = other DNA
tagttagtagtcctccggcccctgaatgcggctaatcctaactgcggagcacatgcccacaaaccagtgggtggtgtgtcgtaacgggtaactctgcagcggaaccgactactttgggtgtccgtgtttctctttattccaatactggctgcttatggtgacaattgagagattgttgccatatagctattggattggccatccggtgtcgaacagagcgatcatctatctatttgttggatttgtacctttgaattttgaagtattcaagactctcaaccttgtactacaactcaattcggcaaa

SEQ ID NO: 22019 - DNA, 306 bp, synthetic construct
  source 1..306: mol_type = other DNA
tagttagtagtcctccggcccctgaatgcggctaatcctaactgcagagcacatgcccacaaaccagtgggtggtgtgtcgtaacgggtaactctgcagcggaaccgactactttgggtgtccgtgtttctctttattccaatactggctgcttatggtgacaattgagagattgttgccatatagctattggattggccatccggtgtcgaacagagcgatcatctacctatttgttggatttgtacctttgaattttgaagtattcaagactctcaaccttgtactacaactcaattcggcaaa

SEQ ID NO: 22020 - DNA, 306 bp, synthetic construct
  source 1..306: mol_type = other DNA
tggttggtagtcctccggcccctgaatgcggctaatcctaactgcggagcacatgcccacaaaccagtgggtggtgtgtcgtaacgggcaactctgcagcggaaccgactactttgggtgtccgtgtttctctttatccctatactggctgcttatggtgacaattgagagattgttgccatatagctattggattggccatccggtgtcaaatagagcgattatctatctatttgttggatttatacctttgaattttgaagtatttaagaccctcaaccttatattacaactcaattcggtaaa

SEQ ID NO: 22021 - DNA, 306 bp, synthetic construct; identical to SEQ ID NO: 288
  source 1..306: mol_type = other DNA

SEQ ID NO: 22022 - DNA, 593 bp, synthetic construct
  source 1..593: mol_type = other DNA
tcacacagttcaatagagagggggtacaaaccagtaccaccacgaacaagcacttctgtttccccggtgaagctacatagactgtccccacggttgaaagtggcagatccgttatccgcttaagtacttcgagaagcctagtatcaccttggaatcttcgacgcgttgcgctcagcactctaccccgagtgtagcttaggctgatgagtctgggcataccccaccggcgacggtggcccaggctgcgttggcggcctacccatggctaacgccatgggacgctagttgtgaacaaggtgtgaagagcctattgagctacttaagagtcctccggcccctgaatgcggctaatcctaaccacggagcaagtgcccacaaaccagtgggtggcttgtcgtaacgcgtaagtctgtggcggaaccgactactttgggtgtccgtgtttccttttatttttatcatggctgcttatggtgacaatctaagattgttatcatatagctattggattggccatccggtgattcacagagacttgaaagctaactcaccttcctataacactcatttgtttatcaatcttatagcacaca

SEQ ID NO: 22023 - DNA, 276 bp, synthetic construct
  source 1..276: mol_type = other DNA
gctaatcctaactgcggagcaggcaccctcaagccagagggcagtctgtcgtaacgggcaactctgcagcggaaccgactactttgggtgtccgtgtttccttttactcttgaactggctgcttatggtgacaattgaaagattgttaccatatagctattggactggccacccggtgacaaatagagcaattatatatctgtttgttggttttgttccattaaactataaagttttaaacacacttagatttgtcttactactcaactcagcaaa

SEQ ID NO: 22024 - DNA, 438 bp, synthetic construct; identical to SEQ ID NO: 480
  source 1..438: mol_type = other DNA

SEQ ID NO: 22025 - DNA, 473 bp, synthetic construct
  source 1..473: mol_type = other DNA
ccacatccagtggtgtttagtacaagcacttctgtttccccggagcgaggtataggctgtacccactgccaaaagcctttaaccgttatccgccaaccaactacgtaaaagctagtaacatcatgtttctaaatcggcgttcgatcaggtggatttcccctccactagtttggtcgatgaggctaggaattccccacgggtgaccgtgtcctagcctgcgtggcggccaacccagcgtatgctgggacgcctttttacagacatggtgcgaagactcgcatgtgcttggttgtgagtcctccggcccctgaatgcggctaaccttaaccctggagccttgcgtcacaatccagtgatggtaaggtcgtaatgagcaattccgggatgggaccgactactttgggtgtccgtgtttctcatttttcttattattgtcttatggtcacagcatatatagtgtatatactgtgatc

SEQ ID NO: 22026 - DNA, 339 bp, synthetic construct
  source 1..339: mol_type = other DNA
aggcgttcgatcaggtggctctcccctccactagtttggtcgatgaggctaggaaatccccacgggtgaccgtgtcctagcctgcgtggcggccaacccagcatcagctgggacgccttttcagagacatggtgtgaagactcgcatgtgcttgattgtgattcctccggcccctgaatgcggctaacctcaaccccggagccttgtattgcaatccagcaatattaaggtcgtaatgagcaattctgggacgggaccgactactttgggtgtccgtgtttcctgtttttcataaatttttcttatggtcacagcatatagtacatatatactgtgatc

SEQ ID NO: 22027 - DNA, 477 bp, synthetic construct
  source 1..477: mol_type = other DNA
ggcgccacatccagtggtgttttgtacaagcacttctgtttccccggagcgaggtataggctgtacccactgccaaaagcctttaaccgttatccgccaaccaactacgtaaaagctagtaacatcttgtttgtaatctggcgttcgatcaggtggatttcccctccactagtttggtcgatgaggctaggaatccctcacgggcgaccgtgtcctagcctgcgtggcggccaacccagcatatgctgggacgtccttttatagacatggtgtgaagactcgcatgtgcttggttgtgattcctccggcccctgaatgcggctaaccttaaccctggagccttgtattacaaaccagtgatattaaggtcgtaatgagcaattccgggacgggaccgactactttgggtgtccgtgtttcttattttacttattattgtcttatggtcacagcatatttgttaaatatactgtgatc

SEQ ID NO: 22028 - DNA, 276 bp, synthetic construct
  source 1..276: mol_type = other DNA
gctaatcctaactgcggagcagatacccacataccagtgggcagtctgtcgtaacgggcaactctgcagcggaaccgactactttgggtgtccgtgtttccttttattcttatactggctgcttatggtgacaatcgaaagactgttaccatatagctattggattggccatccagtgtctaatagagcaataatttacctttttgttggatttgtcccacttgactacagagcacttgcaacgctcaattacattatagatctcaacacaacaaa

SEQ ID NO: 22029 - DNA, 276 bp, synthetic construct
  source 1..276: mol_type = other DNA
gctaatcccaactgcggagcagacacccacaagccagtgggcagtctgtcgtaacgggcaactctgcagcggaaccgactactttgggtgtccgtgtttccttttactctcatactggctgcttatggtgacaattgagagattgttaccatatagctattggattggccatccggtgactaatagagcaattatttaccaatttgttggctttgtaccattaaatttcaaagttttaagaactctcaaccttattatagcattcaatacgacaaa

SEQ ID NO: 22030 - DNA, 276 bp, synthetic construct
  source 1..276: mol_type = other DNA
gctaatcctaactgcggagcagatacccacatgccagtgggcagtctgtcgtaatgggtaactctgcagcggaaccgactactttgggtgtccgtgtttccttttattcctacattggctgcttatggtgacaattgagagattgttaccatatagctattggattggccatccagtgacaaacagagcaattgtttatctatttgttggtttcatatcactgaatttcaaagtgttaaaaacccttaacctgatcatactacttaattcagcaaa

SEQ ID NO: 22031 - DNA, 290 bp, synthetic construct
  source 1..290: mol_type = other DNA
ggcccctgaatgcggctaatcctaactgcggagcagacgctcacacaccagtgggaagtctgtcgtaatgggcaactctgcagcggaaccgactactttgggtgtccgtgtttccttttattcttaccctggctgcttatggtgacaattgaaaggttgttaccatatagctattggattggccacccggtgacaagtagagcgattatttatttgtttgttgggtttgtaccactgaactacaaggttttaaacactttagacttcattctaatccttaactcactaaa

SEQ ID NO: 22032 - DNA, 318 bp, synthetic construct
  source 1..318: mol_type = other DNA
tcccctccactagtttggtcgatgaggctaggaaatccccacgggtgaccgtgtcctagcctgcgtggcggccaacccagcatcagctgggacgccttttcagagacatggtgtgaagactcgcatgtgcttgattgtgattcctccggcccctgaatgcggctaacctcaaccccggagccttgtattgcaatccagcaatattaaggtcgtaatgagcaattctgggacgggaccgactactttgggtgtccgtgtttcctgtttttcataaatttttcttatggtcacagcatatagtacatatatactgtgatc

SEQ ID NO: 22033 - DNA, 448 bp, synthetic construct
  source 1..448: mol_type = other DNA
gatggcccggttgatgttgatatgctccaacagggcaaaaacaactgatatcgttatccgcaaagtgcctacacagagcctagtaggattctgaaagatctttggttggtcgctcagctgcatacccagcagtagaccttgcagatgaggctggacattccccactggtaacagtggtccagcctgcgtggctgcctgcacacctcttacgaggtgtgaagccaaggattggacagggtgcgaagagccgcgtgtgctcactttgagtcctccggcccctgaatgcggctaaccttaaacctgcagccatagctcataagccaatgagtttatggtcgtaatgagtaattgcgggatgggaccgactactttgggtgtccgtgtttcactttttcctttattaattgcttatggtgacaatatatatataaatatatatattggcatc

SEQ ID NO: 22034 - DNA, 299 bp, synthetic construct
  source 1..299: mol_type = other DNA
tagtcctccggcccctgaatgcggctaatcccaactgcggagcatgcgacctcaaaccagaggatggcgtgtcgtaatgggcaactctgcagcggaaccgactactttgggtgtccgtgtttccttttacctctttactggctgcttatggtgacaattgaacagttgttaccatatagctattggattggccatccggtgacaagtagagcgattgtgtacctatttgtcggttacgtacccttaaataataaagtatataccacactacaatttatattgagacttaacaaaacgaa

SEQ ID NO: 22035 - DNA, 476 bp, synthetic construct
  source 1..476: mol_type = other DNA
ggtggtaaaccataccacttacggtcaagcacttctgtttccccggtatgcgaggaatagactctcacagggttgaagcctcaagtatcgttatccgcattggtactacgcaaagcctagtagcgcctcggaaatcccttggttggtcgttccgctagtttcccctagtagacctggcagatgaggcaggacattccccactggtgacagtggtcctgcctgcgtggctgcctgcgcacccttcggggtgcgaagccaagtgatggacaaggtgtgaagagccccgtgtgctactaatgagtcctccggcccctgaatgcggctaatccaaccccacagctattgcacacaaaccagtgtgtatatagtcgtaatgagcaattgtgggacggaaccgactactttgggtgtccgtgtttccttttattctcattatcttgcttatggtgacaatactgtgatatagtgttgttacc

SEQ ID NO: 22036 - DNA, 501 bp, synthetic construct
  source 1..501: mol_type = other DNA
ggttatcaatacgaccaataggtggtagttagccaaactaccaaaggtcaagcacttctgtttccccggtcaaagttgatatgctccaacagggcaaaaacaactgagatcgttatccgcaaagtgcctacgcaaagcctagtaacacctttgaagatttatggttggtcgttccgctatttcccatagtagacctggcagatgaggctagaaatcccccactggcgacagtgttctagcctgcgtggctgcctgcgcaccccttgggtgcgaagccatacattggacaaggtgtgaagagccccgtgtgctcactttgagtcctccggcccctgaatgtggctaaccttaaccctgcagctagtgcatgtaatccaacatgttgctagtcgtaatgagtaattgcgggacgggaccaactactttgggtgtccgtgtttcactttttttcttttaatattgcttatggtgacaatatatatagctatatatattgacacc

SEQ ID NO: 22037 - DNA, 554 bp, synthetic construct
  source 1..554: mol_type = other DNA
agtatcatacggctgctcgcgcggctgaaggagaaaacgttcgttacccggccaactacttcgagaagcctagtaccaccatgaacgaggcagagtgtttcgctcagcacaaccccagtgtagatcaggctgatgagtcactgcaacccccatgggcgaccatggcagtggctgcgttggcggcctgcccatggagaaatccatgggacgctctaattctgacatggtgtgaagagcctattgagctagctggtagtcctccggcccctgaatgcggctaatcctaactgcggagcacatgctcacaaaccagtgggtggtgtgtcgtaacgggcaactctgcagcggaaccgactactttgggtgtccgtgtttccttttattcttatattggctgcttatggtgacaatcaaggagttgttaccatatagctattggattggccatccggtgtgcaacagagcaattatttacctatttattggttttgtaccattgtcactgaagtctgtgatcactctcgagttcattttgaccctcaacacaatcaaac

SEQ ID NO: 22038 - DNA, 347 bp, synthetic construct
  source 1..347: mol_type = other DNA
gttgttgactggacgttcgatcaggtggtttaccccccactagtttggtcgatgaggctggaaattccccacgggtgaccgtgttccagcctgcgtggcggccaacccagctcatgctgggacgccctttcaatgacatggtgtgaagactcgcatgtgcttgattgtgaatcctccggcccctgaatgcggctaaccctaaccccggagccttgcatcacaatccagtgatgttagggtcgtaatgagtaattctgggatgggaccgactactttgggtgtccgtgtttctcatttttctttgaattgtcttatggtcacagcatatagtaatatatactgtgatc

SEQ ID NO: 22039 - DNA, 494 bp, synthetic construct; identical to SEQ ID NO: 522
  source 1..494: mol_type = other DNA

SEQ ID NO: 22040 - DNA, 374 bp, synthetic construct
  source 1..374: mol_type = other DNA
tcgccaaccaactacgaaacagctagtaataccctgtattcttgcgaggtgttcgatcagacagattccccctctgttagtctggtcgatgaggctagaagtaccccacaggtaactgtgttctagcctgcgtggcggccagcccagctcctgctgggacgcctttcaagagacatggtgtgaagactcgattgtgcttggttgtgagtcctccggcccctgaatgcggctaaccttaaacccggatccatgctatgcaatccagcatagttatggtcgtaatgggcaactctgggatgggaccgactactttgggtgtccgtgtttccatttttactttttgtgtcatttatggttacaattaagttgtaatc

SEQ ID NO: 22041 - DNA, 281 bp, synthetic construct
  source 1..281: mol_type = other DNA
tagttggtagtcctccggcccctgaatgcggctaatcccaactgcggagcagatacccacacaccagtgggcagtctgtcgtaatgggcaactctgcagcggaaccgactactttgggtgtccgtgtttccttttactcttatactggctgcttatggtgacaattgagagattgttaccatattgctattggattggccacccggtgacgaatagaacagttgtttacctatttgttagcctcgttccactgaactgcaaagccttgaataccctttaag

SEQ ID NO: 22042 - DNA, 406 bp, synthetic construct
  source 1..406: mol_type = other DNA
ggctgaagctgtagcgttcgttatccgcatgtctactgcgcaaaggctagtaactaactagatacttagtggtgtttcgttcagcagtaccccactgtagatcagggcaatgaggctacgcatcccccactggcgacagtggcgtagcctgcgtggtgccctgcccaggttcacgcctgggacaccactatctggacagggtgtgaagaccggcgtgcgctaggcatgagtcctccggcccctgaatgcggctaatcctaaccctgcagccattgcatgcaagccagcatgttggtggtcgtaatgagcaattgcgggatggaaccgactactttgggtgtccgtgtttcttgtttttccatttaattgtcttatggttacaagtttgtgcaacaaatttgtgacc

SEQ ID NO: 22043 - DNA, 434 bp, synthetic construct
  source 1..434: mol_type = other DNA
actagggtgttaaacttccccagaggttgaagcccgatgtatcgttatccgcatgattactaagcagagcctagtaacatcttactttatatatgggttggtcgctcagtcagttaccccctgatagacctggcagatgaggctggaaacaccccactggtaacagtgttccagcctgcgtggctgcctgcccctcttctgaggggaagcccatatgtagacaaggtgagaagagccgcgtttgctaatcatgagtcctccggcccctgaatgcggctaatccaaccccacagctactgcgcagaaaccactgcgtgggtagtcgtaatgagcaattgtgggacggaaccgactactttgggtgtccgtgtttcctgttttaccttacattgcttatggtcacaacatatattaaatcgtatatgttgttcacc

SEQ ID NO: 22044 - DNA, 276 bp, synthetic construct
  source 1..276: mol_type = other DNA
gctaatcctaactgcggagcagattcccacacgccagtgggcagtctgtcgtaatgggtaactctgcagcggaaccgactactttgggtgtccgtgtttccttttattctcatactggctgcttatggtgacaattgaaggattgttaccatatagctattggattggccatccagtgtctaatagagcaataatttacctttttgttggatttgtcccacttgactacagagcacttgcaacgctcaattacattatagatctcaacacaacaaa

SEQ ID NO: 22045 - DNA, 290 bp, synthetic construct
  source 1..290: mol_type = other DNA
ggcccctgaatgcggctaatcctaactgcggagcagatacccacaaaccagtgggcagtctgtcgtaacgggcaactctgcagcggaaccgactactttgggtgtccgtgtttccttttattcttatattggctgcttatggtgacaattgggaaattgttaccatatagctattggattggccatccggtgacaaatagagcgatcatttatctatttgttggtttcgtaccgctaaactttaaagctctaaaaactttaaatttcattttagtcctaaacacagcaaa

SEQ ID NO: 22046 - DNA, 276 bp, synthetic construct
  source 1..276: mol_type = other DNA
gctaatcccaactgcggggcagatacccacatgccagtgggcagtctgtcgtaacgggcaactctgcagcggaaccgactactttgggtgtccgtgtttccttttattattatattggctgcttatggtgacaattgagagattgttaccatatagctattggattggccatccggtatcaaatagagcaatcatttatctatttgttggatttgttccattaaattttaaagttttgcaaactctcaatttaattacattacttaattcagtgaa

SEQ ID NO: 22047 - DNA, 336 bp, synthetic construct
  source 1..336: mol_type = other DNA
gggtgttcgatcaggtggtatcccccactagtctggtcgatgaggctaggaattccccacgggcgaccgtgtcctagcctgcgtggcggccagcccagcttttgctgggacgccttttcaaagacatggtgtgaagacctgcatgtgcttggttgtgagtcctccggcccctgaatgcggctaaccctaaccctggagcccagtgacataatccaatgttatttgggtcgtaatgagtaattccgggatgggaccgactactttgggtgtccgtgtttccttttattctttatattgtcttatggtcacagcatatatagtatatatactgtgatc

SEQ ID NO: 22048 - DNA, 481 bp, synthetic construct
  source 1..481: mol_type = other DNA
aagtacctatccgttatccgctatagtacttcgagaaacctagtatcacctttggattgttgacgcgttgcgctcagcacactaacccgtgtgtagcttgggtcgatgagtctggacataccccactggcgacagtggtccaggctgcgttggcggcctactcatggtgaaaaccatgagacgctagacatgaacaaggtgtgaagagtctattgagctactatagagtcctccggcccctgaatgcggctaatcctaaccatggagcaagtgctcacagaccagtgagttgcttgtcgtaatgcgcaagtccgtggcggaaccgactactttgggtgtccgtgtttcactttttacccttatgactgcttatggtgacaatttgatattgttaccatttagcttgtcaaatcaattgcgaaagatcctaaatcttatttatcaacttgcattttgataactctaatttgaagatttaata

SEQ ID NO: 22049 - DNA, 289 bp, synthetic construct
  source 1..289: mol_type = other DNA
ggcccctgaatgcggctaatcctaactgcggagcagatacccacataccagtgggcagtctgtcgtaatgggtaactctgcagcggaaccgactactttgggtgtccgtgtttccttttattttatactggctgcttatggtgacaattgatagattgttaccatatagctattggattggccatccagtgacaagcagagctatcatctacctgtttgttggttttgttccattgaattttaaagttctaaaaactatcgactttatcttagcactcaatacggcaaa

SEQ ID NO: 22050 - DNA, 482 bp, synthetic construct
  source 1..482: mol_type = other DNA
aacaacctatccgttatccgctatagtacttcgagaaacctagtatcacctttggattgttgacgcgttgcgctcagcacactaacccgtgtgtagcttgggtcgatgagtctggacgtaccccactggcgacagtggtccaggctgcgttggcggcctactcatggtgaaaaccatgagacgctagacatgaacaaggtgtgaagagtctattgagctactatagagtcctccggcccctgaatgcggctaatcctaaccatggagcaagtgctcacaggccagtgagttgcttgtcgtaatgcgcaagtctgtggcggaaccgactactttgggtgtccgtgtttcactttttacttttatgactgcttatggtgacaatttgatattgttaccatttagcttgtcaaatcaattgcaaaagatcctaaatcttacttaccaacttgcattttgataaccttgatttgaaaattttaata

SEQ ID NO: 22051 - DNA, 276 bp, synthetic construct
  source 1..276: mol_type = other DNA
gctaatcctaactgcggagcagatacccacataccagtgggcagtctgtcgtaacgggtaactctgcagcggaaccgactactttgggtgtccgtgtttccttttattcctgatctggctgcttatggtgacaattgagaaattgttaccatatagctattggattggccatccggtgactaacagagcggttatttacttattcgttggtttcattccattgagctataaagtgctaaacactctgaattacatcctaatacttaacacaacaaa

SEQ ID NO: 22052 - DNA, 548 bp, synthetic construct
  source 1..548: mol_type = other DNA
tcgaacgccagttttatatccccctccccttaatgtaacttagaagcaaagcaaactgatcaatagggggcaatcatccagattgtcaaagatcaagcacttctgtttccccggtcaaagttgatatgctccacaagggcaaaaacaactgagatcgttatccgcaagatgcctacgcaaagcccagtagcacattgaaagatacttggttggtcgctcagctgttaacccaacagtagacctggcagatgaggctagagattcccctccggcgacggagttctagcctgcgtggctgcctgcacacccgttgggtgtgaagccaaatattggacaaggtgtgaagagccgcgtgtgctcatcttgagtcctccggcccctgaatgtggctaaccttaaacctgcagccagtgcacacagtccagtgtgtagctggtcgtaatgagtaattgcgggatgggaccaactactttgggtgtccgtgtttcactttttccttttatcattgcttatggtgacaatatatatagcatatatatattgttatc

SEQ ID NO: 22053 - DNA, 335 bp, synthetic construct
  source 1..335: mol_type = other DNA
gttcgatcaggtggattccccctccactagtttggtcgatgaggctaggaattccccacgggtgaccgtgtcctagcctgcgtggcggccaacccagcacttgctgggacgcccttttatggacatggtgtgaagactcgcatgtgcttggttgtgactcctccggcccctgaatgcggctaacctcaaccccggagccttgtgttgcaaaccagcagcattaaggtcgtaatgagtaattctgggacgggaccgactactttgggtgtccgtgtttccaatttttcttattattgtcttatggtcacagcatatttgataaatatactgtgatc

SEQ ID NO: 22054 - DNA, 530 bp, synthetic construct; identical to SEQ ID NO: 563
  source 1..530: mol_type = other DNA

SEQ ID NO: 22055 - DNA, 341 bp, synthetic construct
  source 1..341: mol_type = other DNA
tctggcgttcgatcaggtggatttcccctccactagtttggtcgatgaggctaggaatccctcacgggcgaccgtgtcctagcctgcgtggcggccaacccagcatatgctgggacgcccttttatagacatggtgtgaagactcgcatgtgcttggttgtgattcctccggcccctgaatgcggctaaccttaaccctggagccttgtattacaaaccagtaatattaaggtcgtaatgagcaattccgggacgggaccgactactttgggtgtccgtgtttcttattttacttattattgtcttatggtcacagcatatttgttaaatatactgtgatc

SEQ ID NO: 22056 - DNA, 425 bp, synthetic construct
  source 1..425: mol_type = other DNA
ggtataggctgtacccactgccaaaagcctttaaccgttatccgccaaccaactacgtaaaagctagtaacatcttgtttgtaatttggcgttcgatcaggtggattccccctccactagtttggtcgatgaggctaggaattccccacgggtgaccgtgtcctagcctgcgtggcggccaacccagcacctgctgggacgcccttttatggacatggtgtgaagactcgcatgtgcttggttgtgactcctccggcccctgaatgcggctaaccttaaccccggagccttgtgttgcaaaccagcaacattaaggtcgtaatgagtaattctgggacgggaccgactactttgggtgtccgtgtttccaatttttcttattattgtcttatggtcacagcatatttgataaatatactgtgatc

SEQ ID NO: 22057 - DNA, 339 bp, synthetic construct
  source 1..339: mol_type = other DNA
aggcgttcgatcaggtggatttcccctccactagtttggtcgatgaggctaggaatccctcacgggcgaccgtgtcctagcctgcgtggcggccaacccagcatatgctgggacgcccttttatagacatggtgtgaagactcgcatgtgcttggttgtgattcctccggcccctgaatgcggctaaccttaaccctggagccttgtattacaaaccagtgatattaaggtcgtaatgagcaattccgggacgggaccgactactttgggtgtccgtgtttctctttttactcattattgtcttatggtcacagcatatttgttaaatatactgtgatc

SEQ ID NO: 22058 - DNA, 276 bp, synthetic construct
  source 1..276: mol_type = other DNA
gctaatcccaactgcggagcagatacccacacaccagtgggcagtctgtcgtaatgggcaactctgcagcggaaccgactactttgggtgtccgtgtttccttttattcgaaaactggctgcttatggtgacaattgagagattgttaccatatagctattggattggccacccggtgacaaatagagcaatcgtttgcctatttgttggctttgttccattgaacttcaaatttttaaaaacccttaattacatcctaatacttaacacatcaaa

SEQ ID NO: 22059 - DNA, 290 bp, synthetic construct
  source 1..290: mol_type = other DNA
ggcccctgaatgcggctaatcctaactgcggagcacatgccctcaacccagggggtattgtgtcgtaacgggcaactctgcagcggaaccgactactttgggtgtccgtgtttccttttattcttacattggctgcttatggtgacaattgaaaggttgttgccatatagctattggattggccatccagcgtctaatagagctattatatacctctttgttggatttataccacttaatctaaaagaaatcaagacactacaactcattatacaactgaacacagcaag

SEQ ID NO: 22060 - DNA, 276 bp, synthetic construct
  source 1..276: mol_type = other DNA
gctaatcctaactgcggagcagatgcccacgcaccagtgggaagtctgtcgtaatgggtaactctgcagcggaaccgactactttgggtgtccgtgtttccttttattcttactatggctgcttatggtgacaattgaaaggttgttaccatatagctattggattggccatccggtgacaagtagagcgattatttacttgtttgttgggttcgtaccactgaactacaaagctctaaacactcttaactttattctaacccttaactcactaaa

SEQ ID NO: 22061 - DNA, 376 bp, synthetic construct
  source 1..376: mol_type = other DNA
taactacgtaacggctagtaacatcttgtcgtgcttagggtgttcgatcaggtgaagaaaaacccccttcactagtctggtcgatgaggctgagaagtccccacgggtaaccgtgtctcagcctgcgtggcggccagcccagcatatgctgggacgccttaagtatgacatggtgtgaagacccgcatgtgcttagctgtgagtcctccggcccctgaatgcggctaacctaaaccctggagccttggagcacaagccagtgcttgcaaggtcgtaatgagcaattccgggacgggaccgactactttgggtgtccgtgtttccttttatctcattattgttcttatggttacaatatatagagtatattgtaatc

SEQ ID NO: 22062 - DNA, 263 bp, synthetic construct
  source 1..263: mol_type = other DNA
tagttggtagtcctccggcccctgaatgcggctaatcctaactgcggagcagatacccacgcaccagtgggcagtctgtcgtaatgggcaactctgcagcggaaccgactactttgggtgtccgtgtttccttttattcttatactggctgcttatggtgacaattgagagattgttaccatattgctattggattggccacccggtgacgaatagaatagttaaacaccctttagcctcatcataacgctcaatacgttaaa

SEQ ID NO: 22063 - DNA, 276 bp, synthetic construct
  source 1..276: mol_type = other DNA
gctaatcctaactgcggagcacatgccctcaacccagggggtattgtgtcgtaacgggcaactctgcagcggaaccgactactttgggtgtccgtgtttccttttattcttacatcggctgcttatggtgacaattgaaaggttgttaccatatagctattggattggccatccagtgtctaatagagctattatatacctctttgttggatttataccacttaatctaaaagaagtcaagacactacaactcattatacaactgaacacagcaag

SEQ ID NO: 22064 - DNA, 276 bp, synthetic construct
  source 1..276: mol_type = other DNA
gctaatcctaactgcggagcacatgccctcaacccagggggtattgtgtcgtaacgggcaactctgcagcggaaccgactactttgggtgtccgtgtttccttttattcttacattggctgcttatggtgacaattgaaaggttgttgccatatagctattggattggccatccagcgtctaatagagctattatatacctctttgttggatttataccacttaatctaaaagaaatcaagacactacaactcattatacaactgaacacagcaag

SEQ ID NO: 22065 - DNA, 574 bp, synthetic construct
  source 1..574: mol_type = other DNA
tccacgtggagttgtacactgttattccggtaattttgtacgccagttttatgtacccttcccctgtaacttagaagttttgaacaaggaccaataggcagtggccagccaagctactaaaggtcaagcacttctgtttccccggtcaaagttgatatgctccaacagggcaaaaacagctgagatcgttatccgcaaggtgcctacgcaaagcctagtaaccccttgaacgatgtatggttggtcgctcagctgtaccccacagtagacctggcagatgaggctagatgttccccactggcgacagtgttctagcctgcgtggctgcctgcgcactctttgagtgcgaagccatacatttgacaaggtgtgaagagccccgtgtgctcaccttgagtcctccggcccctgaatgtggctaaccttaaccctgcagctagtacatgcaatccagcatgcagctagtcgtaatgagcaattgcgggacgggaccaactactttgggtgtccgtgtttcactttttccttttatatttgcttatggtgacaatatatagatttatatattgacacc

SEQ ID NO: 22066 - DNA, 465 bp, synthetic construct
  source 1..465: mol_type = other DNA
ggtcaaaggtcaagtacttctgtttccccggtcaaggttgatatgctccaacagggcaaaaacaaccgcgatcgttatccgcaaagcaactacgcaaagcctagtatcacttttgagaatatatggttggtcgctccactataaacccaatagtagacctggcagatgaggctagaagttccccactggtaacagtgttctagcctgcgtggctgcctgcgtgctccttgtgggcacgaagccatatatttgacaaggtgtgaagagccccgtgtgcttgttttgattcctccggcccctgaatgtggctaaccttaaccctgcagctagcgtgtgcaatccagcacaaagctagtcgtaatgagcaattgcgggatgggaccaactactttgggtgtccgtgtttcttgtttttcttttatacttgcttatggtgacaatatatataatatatatattggcatc

SEQ ID NO: 22067 - DNA, 504 bp, synthetic construct
  source 1..504: mol_type = other DNA
tagaagataaacacacagaccaataggagatgatcagccagatcattatgggtcaagcacttctgtttccccggtcgaggttgatatgctccaacagggcaaaaacaactgagatcgttatccgcaaagcgcctacgcaaagcctagtaactatctggaaattgcttggttggtcgctccgccataccccatggtagacctggcagatgaggctagaaattccccactggcgacagtgttctagcctgcgtggctgcctgcacacccttttgggtgtgaagccaagtaacggacagggtgtgaagagccccgtgtgctcgctttgagtcctccggcccctgaatgtggctaaccttaaccctgcagctagagcacacaacccagtgtgtatctagtcgtaatgagcaattgcgggatgggaccaactactttgggtgtccgtgtttcttgtttttcttttatatttgcttatggtgacaatatatagtgatatatattggcatc

SEQ ID NO: 22068 - DNA, 276 bp, synthetic construct
  source 1..276: mol_type = other DNA
gctaatcccaactgcggagcagatacccacacaccagtgggcagtctgtcgtaatgggtaactctgcagcggaaccgactactttgggtgtccgtgtttccttttattccaaaactggctgcttatggtgacaattgagagattgttaccatatagctattggattggccacccggtgataaatagagcaatcgtttacctatttgttggttttgttccattgaacttcaaagttttaaaaacccttaattacatcctaatactcaacacattaaa

SEQ ID NO: 22069 - DNA, 276 bp, synthetic construct
  source 1..276: mol_type = other DNA
gctaatcccaactgcggagcatgcgacctcaaaccagaggatggcgtgtcgtaatgggcaactctgcagcggaaccgactactttgggtgtccgtgtttccttttacctctttactggctgcttatggtgacaattgaacagttgttaccatatagctattggattggccatccggtgacaagtagagcgattgtgtacctatttgtcggttacgtacccttaaataataaagtatataccacactacaatttatattgagacttaacaaaacgaa

SEQ ID NO: 22070 - DNA, 276 bp, synthetic construct
  source 1..276: mol_type = other DNA
gctaatcccaactgcggagcagatacccacacaccagtgggcagtctgtcgtaatgggtaactctgcagcggaaccgactactttgggtgtccgtgtttccttttattccaaaactggctgcttatggtgacaattgagagactgttaccatatagctattggattggccacccggtgataaatagagcaatcgtttacctatttgttggttttgttccattgaacttcaaagttttaaaaacccttaattacatcctaatactcaacacattaaa

SEQ ID NO: 22071 - DNA, 276 bp, synthetic construct
  source 1..276: mol_type = other DNA
gctaatcccaactgcggagcagacacccacacaccagtgggcagtctgtcgtaatgggcaactctgcagcggaaccgactactttgggtgtccgtgtttccttttattccaaaactggctgcttatggtgacaattgagagattgttaccatatagctattggattggccacccggtgacaaatagagcaatcgtttacctatttgttggttttgttccattgaacttcaaagttttaaaaacccttaattacatcctaatacttaacacatcaaa

SEQ ID NO: 22072 - DNA, 311 bp, synthetic construct
  source 1..311: mol_type = other DNA
gattccccctctgttagtctggtcgatgaggctagaagtaccccacaggtaactgtgttctagcctgcgtggcggccagcccagcttctgctgggacgcctttcaagagacatggtgtgaagactcgattgtgcttggttgtgagtcctccggcccctgaatgcggctaaccttaaacccggatccatgctatgcaatccagcatagttatggtcgtaatgggcaactctgggatgggaccgactactttgggtgtccgtgtttccatttttactttttgtgtcatttatggttacaattaagttgtaatc

SEQ ID NO: 22073 - DNA, 697 bp, synthetic construct; identical to SEQ ID NO: 838
  source 1..697: mol_type = other DNA

SEQ ID NO: 22074 - DNA, 335 bp, synthetic construct
  source 1..335: mol_type = other DNA
cacgttcgatcaggtggtaacccccactagtttggtcgatgaggctaggaatcccccacgggtaaccgtgtcctagcctgcgtggcggccaacccagcgtttgctgggacgccaattcactgacatggtgcgaagacttgcatgtgcttgattgtgattcctccggcccctgaatgcggctaaccttaaccccggagccttgcagcacaatccaatgttgtggaggtcgtaatgagcaattctgggatgggaccgactactttgggtgtccgtgtttcctgtttttctcaaaattgtcttatggtcacagcatatatattgtatatactgtgatc

SEQ ID NO: 22075 - DNA, 276 bp, synthetic construct
  source 1..276: mol_type = other DNA
gctaatcctaactgtggagcatgcgcccccattccagagggtagcgtgtcgtaacgggtaactccgcagcggaaccgactactttgggtgtccgtgtttccttttattttatcactggctgcttatggtgacaattgaaagattgttgccatatagctattggattggccatccggtgacgaacagagctataatttaccaatttgtgggatttgttcctataagtttgaaagctttaaagacccttagtttaatattactactcaatagtgcaag

SEQ ID NO: 22076 - DNA, 521 bp, synthetic construct
  source 1..521: mol_type = other DNA
cccaacccccgtaacttagaagaaaagcacacagaccaataggaggtggtcacccagaccacttacggtcaagcacttctgtttccccggttgaactagatatgcttcacccgaggcaaaaactaaatcaatcgttacccgcaaagtgcctacgggaagcctagtaacactctaaaaacctatggttggtcgctccattgcaaacccagcaatagacctggcagatgaggctagacgtaccccaccagcgatggtggtctagcctgcgtggctgcctgcacaccctcatcgggtgtgaagccagaaagtggacagggtgtgaagagcctactgtgctcactttgagtcctccggcccctgaatgtggctaatcctaaccctgcagctgttgcacgcaagccagtgtgtatgcagtcgtaacgagcaattgcgggatggaaccaactactttgggtgtccgtgtttctctttattccttatgttgacctatggtgacaagtgtgcaattcacgtttgtcact

SEQ ID NO: 22077 - DNA, 430 bp, synthetic construct; identical to SEQ ID NO: 475
  source 1..430: mol_type = other DNA

SEQ ID NO: 22078 - DNA, 275 bp, synthetic construct
  source 1..275: mol_type = other DNA
gctaatcctaactgcggagcagatacccacataccagtgggcagtctgtcgtaatgggtaactctgcagcggaaccgactactttgggtgtccgtgtttccttttattttatactggctgcttatggtgacaattgatagattgttaccatatagctattggattggccatccagtgacaagcagagctatcatctacctgtttgttggttttgttccattgaattttaaagttctaaaaactattgactttatcttagcactcaatacggcaaa

SEQ ID NO: 22079 - DNA, 275 bp, synthetic construct
  source 1..275: mol_type = other DNA
gctaatcctaactgcggagcagatacccacatgccagtgggcagtctgtcgtaatgggtaactctgcagcggaaccgactactttgggtgtccgtgtttccttttattctgtattggctgcttatggtgacaattgatagattgttaccatatagctattggattggccatccagtgacaagcagagctatcatttacctgtttgttggttttgttccactgaattttaaagttctaaaaactattgactttattctagcacttaatacggcaaa

SEQ ID NO: 22080 - DNA, 275 bp, synthetic construct
  source 1..275: mol_type = other DNA
gctaatcctaactgcggagcagatacccacataccagtgggcagtctgtcgtaatgggtaactctgcagcggaaccgactactttgggtgtccgtgtttccttttattttatactggctgcttatggtgacaattgatagattgttaccatatagctattggattggccatccagtgacaagcagagctatcatctacctgtttgttggttttgttccattgaattttaaagttctaaaaactatcgactttatcttagcactcaatacggcaaa

SEQ ID NO: 22081 - DNA, 404 bp, synthetic construct
  source 1..404: mol_type = other DNA
ccaaaacagctgagatcgttatccgcaaagtgcctacgcaaagcctagtaacattttcgaagttatatggttggtcgttcagccaaaccccatggtagacctggcagatgaggctagaaataccccactggcgacagtgttctagcctgcgtggctgcctgcacaccctctgggtgtgaagccatataatagacaaggtgtgaagagccccgtgtgctcactttgagtcctccggcccctgaatgtggctaaccttaaccctgcagctagtgcatgcaatccagcatgtgtctagtcgtaatgagcaattgcgggatgggaccaactactttgggtgtccgtgcttcctttttatctctattgattgcttatggtgacaatatatagtactatatattgacacc

SEQ ID NO: 22082 - DNA, 276 bp, synthetic construct
  source 1..276: mol_type = other DNA
gctaatcctaactgtggagcatgcgcccccactccagagggtagcgtgtcgtaacgggtaactccgcagcggaaccgactactttgggtgtccgtgtttcctattattcttatattggctgcttatggtaacaattgagaggttgttgccatatagctattggattggccacccagtgacaaacagagctataatttaccaatttgtgggatttgttccaacaagtttgaaagtcttgaagacacttaatctaatattgctactcaatatcgcaaa

SEQ ID NO: 22083 - DNA, 438 bp, synthetic construct
  source 1..438: mol_type = other DNA
accccggtcaaagttgatatgctccaacagggcaaaaacagctgagatcgttatccgcaaagtgcctacgcaaagcctagtaatgcctttgaaaatttatggttggtcgttccgctattccccatagtagacctggcagatgaggctagaaactccccactggcgacagtgttctagcctgcgtggctgcctgcgcaccctttgggtgcgaagccatacattggacaaggtgtgaagagccccgtgtgctcactttgagtcctccggcccctgaatgtggctaaccttaaccctgcagctagtgcatgtaatccaacatgttgctagtcgtaatgagcaattgcgggacgggaccaactactttgggtgtccgtgtttcactttttccttttaatattgcttatggtgacagtatatatagatatatatattgacacc

SEQ ID NO: 22084 - DNA, 415 bp, synthetic construct
  source 1..415: mol_type = other DNA
ttacccaaggcaaaagctaatctcatcgttatccgcaaggtgcctacgggaagcctagtaacattctgaagatattatggttggtcgatcagttgcactcacccatgcaatagacctggcagatggggctaggcatacctcactggtaacagtggcctagcccgcgtggctgcctgcacaccttcgggtgtgaagccataatattgacagggtgcgaagagcctactgtgctcaccttgagtcctccggcccctgaatgtggctaatcctaaccccgtatccattgcacacaaaccagtgtgtctatggtcgtaatgggcaactacgggatggaaccaactactttgggtgtccgtgtttcttgtttttctttaatactgcttatggtgacattatatattgatatagtgtcatc

SEQ ID NO: 22085 - DNA, 551 bp, synthetic construct
  source 1..551: mol_type = other DNA
ggtgtacgccagttttatcacccctcccccctaatgtaacttagaagttgaacatatcgaccaacaggtaacatttatccagaatgttaaaggtcaagcacttctgtttccccggtcaaagttgatatgctccaacagggcaaaaacaaccgcgatcgttatccgcaaagcaactacgcaaagcctagtatcactttcgagagtatgtggttggtcgctccactataaacccaatagtagacctggcagatgaggctagaagttccccactggtgacagtgttctagcctgcgtggctgcctgcgtgctccttgcgagcacgaagccatatatttgacaaggtgtgaagagccccgtgtgcttgttttgagtcctccggcccctgaatgtggctaaccttaaccctgcagctagcgtgtacaatccagtacaaagctagtcgtaatgagcaattgcgggacgggaccaactactttgggtgtccgtgtttcttgtttttcttttatacttgcttatggtgacaatatatatacagcatatatattggcatc

SEQ ID NO: 22086 - DNA, 563 bp, synthetic construct
  source 1..563: mol_type = other DNA
cccccggactgagtatcaataagctgcttacgtggctgaaggagaaaacgttcgttatccggccaattacttcgagaagcttagtaccaccatggaggttgcgcagtgtttcgttccgcacaaccccagtgtagatcaggtcgatgagtcaccgcactcctcacgggcgaccgtggcggtggctgcgctggcggcctgcccatggggcaacccatgggacgcttcaatactgacatggtgcgaagagcctattgagctaattggtagtcctccggcccctgaatgcggctaatcctaactgcggagcagatacccacgagccagtgggcagtctgtcgtaatgggtaactctgcagcggaaccgactactttgggtgtccgtgtttccttttattcctacattggctgcttatggtgacaattgagagattgttaccatatagctattggattggccgtccagtgacaaacagagcgattatctatctatttgttggtttcgtaccattaaaccttagagtcctaaagaccctcaatttgattatacaattaaactctgcgaa

SEQ ID NO: 22087 - DNA, 523 bp, synthetic construct
  source 1..523: mol_type = other DNA
aacccctacccccaagtaacttagaagataagcacactcgaccaatagtgggtgattatccaaatcatcaaaggtcaagcacttctgtttccccggttgaagttgatatgctccaccagggcaaaaacaactgagatcgttatccgcaaaatgcctacacaaagcctagtatcatcttgaaaggcgcagagttggtcgttccactattccccatagtagacctggcagatgaggctagaaaacccccactggcgacagtgttctagcctgcgtggctgcctgcgtgccttgcaaggcacgaagccctgtgtttgacaaggtgtgaagagccccgtgtgctcattttgattcctccggcccctgaatgtggctaaccttaaccctgcagctagtgcacacaaaccagtgtgtatctagtcgtaatgagtaattgcgggacgggaccaactactttgggtgtccgtgtttctctttttactttttacttgcttatggtgacaatatatagatatatattgacacc

SEQ ID NO: 22088 - DNA, 449 bp, synthetic construct; identical to SEQ ID NO: 491
  source 1..449: mol_type = other DNA

SEQ ID NO: 22089 - DNA, 531 bp, synthetic construct
  source 1..531: mol_type = other DNA
gccaccctcccctaacatgtaacttagaagtttgaacgataagaccaataggtgataatcatccagattatcaaaggtcaagcacttctgtttccccggtcgatgaggatatgctttacccgaggcaaaaaccttagagatcgttatccacacactgcctacacagagcctagtaccacttttgacgtaactaggttggtcgctccctgcaaacccagcagtagacctggcagatgaggctggacgttccccactggcgacagtggtccagcctgcgtggctgcctgctcaccctattgggtgagaagcctacttattgacaaggtgcgaagagccgcgtgtgctcagtgtgcttcctccggcccctgaatgtggctaaccttaaccctgcagccgctgcccataatccaatgggtttacggtcgtaacgcgtaagtgcgggatgggaccaactactttgggtgtccgtgtttcttatttttcctttatttgcattttatggtgacaatttatggtatatagattgtcatc

SEQ ID NO: 22090 - DNA, 485 bp, synthetic construct
  source 1..485: mol_type = other DNA
taggatggtaactaaccaagttatcaaaggtcaagcacttctgtttccccggtcaaaattgatatgctccaccagggcaaaaacagttttggtcgttatccgcaaagtgcctacgcaaagcttagtaacactttgaagaatgtatggttggtcgttccgctattccccatagtagacctggcagatgaggctagaaaatccccactggtgacagtgttctagcctgcgtggctgcctgcgcacctctttgaggtgcgaagccattcctttgacaaggtgcgaagagccccgtgtgctcactttgagtcctccggcccctgaatgtggctaaccttaaccctgcagctagtgcatgcaaaccagcatgtttctagtcgtaatgagcaattgcgggatgggaccaactactttgggtgtccgtgtttctctttttacttttaaattgcttatggtgacaatatatataacacatatatattgacacc

SEQ ID NO: 22091 - DNA, 310 bp, synthetic construct; identical to SEQ ID NO: 298
  source 1..310: mol_type = other DNA

SEQ ID NO: 22092 - DNA, 413 bp, synthetic construct
  source 1..413: mol_type = other DNA
cgggaactttgtgtttgagtcgttatccgcaaagtgcctacgcaaagcttagtaacactttgaagaatgtatggttggtcgttccgctattccccatagtagacctggcagatgaggctagaaaatccccactggcgacagtgttctagcctgcgtggctgcctgcgcacctctttgaggtgcgaagccattcctttgacaaggtgcgaagagccccgtgtgctcactttgagtcctccggcccctgaatgtggctaaccttaaccctgcagctagtgcatgcaatccagcatgtctctagtcgtaatgagcaattgcgggatgggaccaactactttgggtgtccgtgtttctcttttttacttttaaattgcttatggtgacaatatatataacacatatatattgacacc

SEQ ID NO: 22093 - DNA, 439 bp, synthetic construct; identical to SEQ ID NO: 481
  source 1..439: mol_type = other DNA

SEQ ID NO: 22094 - DNA, 313 bp, synthetic construct
  source 1..313: mol_type = other DNA
cagattccccctctgttagtctggtcgatgaggctagaagtaccccacaggtaactgtgttctagcctgcgtggcggccagcccagcttctgctgggacgcctttcaagagacatggtgtgaagactcgattgtgcttggttgagagtcctccggcccctgaatgcggctaaccttaaacccggatccatgctatgcaatccagcatagttatggtcgtaatgggcaactctgggatgggaccgactactttgggtgtccgtgtttccatttttactttttgtgtcatttatggttacaattaagttgtaatc

SEQ ID NO: 22095 - DNA, 535 bp, synthetic construct
  source 1..535: mol_type = other DNA
atgccagttttatatcccctccccatgtaacttagaagataagcacacagaccaatagctggcaatcatccagattgttaatggtcaagcacttctgtctccccggtcaatgttgatatgctccaacagggcaaaaacagctgagatcgttatccgcaaagtgcctacgcaaagcctagtagcacttttgaagttatctggttggtcgctccgctgtaccccacagtagacctggcagatgaggctagagattccccgctggcgacagtgttctagcctgcgtggctgcctgcacacccttttgggtgtgaagccaaattacagacaaggtgtgaagagccccgtgtgctcactttgagtcctccggcccctgaatgtggctaaccttaaccctgcagctagagtacacaatccagtgtatttctagtcgtaatgagcaattgcgggatgggaccaactactttgggtgtccgtgtttcactttttaccttttatttgcttatggtgacaatatattgaattatatattgacacc

SEQ ID NO: 22096 - DNA, 527 bp, synthetic construct
  source 1..527: mol_type = other DNA
gcctcccctaacatgtaacttagaagtttgaacgataagaccaataggtgataatcatccagattatcaaaggtcaagcacttctgtttccccggtcgatgaggatatgctttacccgaggcaaaaaccttagagatcgttatccacacactgcctacacagagcctagtaccacttttgacgtaactaggttggtcgctccctgcaaacccagcagtagacctggcagatgaggctggacgttccccactggcgacagtggtccagcctgcgtggctgcctgctcaccctattgggtgagaagcctacttattgacaaggtgcgaagagccgcgtgtgctcagtgtgcttcctccggcccctgaatgtggctaaccttaaccctgcagccgctgcccataatccaatgggtttacggtcgtaacgcgtaagtgcgggatgggaccaactactttgggtgtccgtgtttcttatttttcctttatttgcattttatggtgacaatttatggtatatagattgtcatc

SEQ ID NO: 22097 - DNA, 548 bp, synthetic construct
  source 1..548: mol_type = other DNA
ttgtacgccagttttatatcccctttccctcaatgtaacttagaagcaaagcaaactgatcaataggggacaatcatccagattgtcaaagatcaagcacttctgtttccccggtcaaagttgatatgctccacaagggcaaaaacaactgagatcgttatccgcaagatgcctacgcaaagcctagtaacacattgaaagatacttggttggtcactcagctgttaacccgacagtagacctggcagatgaggctagagattcccctctggcgacggagttctagcctgcgtggctgcctgcacaccctttgggtgtgaagccaaatattggacaaggtgtgaagagccgcgtgtgctcatcttgagtcctccggcccctgaatgtggctaaccttaaacctgcagccagtgcacacaatccagtgtgtagctggtcgtaacgagtaattgcgggatgggaccaactactttgggtgtccgtgtttcactttttccttttattattgcttatggtgacaatatatatagcatatatatattgttatc

SEQ ID NO: 22098 - DNA, 548 bp, synthetic construct; identical to SEQ ID NO: 590
  source 1..548: mol_type = other DNA

SEQ ID NO: 22099 - DNA, 389 bp, synthetic construct
  source 1..389: mol_type = other DNA
atccgcaaagcaactacgcaaagcctagtatcacttttgagaatatatggttggtcgctccactataaacccaatagtagacctggcagatgaggctagaagttccccactggtaacagtgttctagcctgcgtggctgcctgcgtgctccttgtgggcacgaagccatatatttgacaaggtgtgaagagccccgtgtgcttgttttgattcctccggcccctgaatgtggctaaccttaaccctgcagctagcgtgtgcaatccagcacaaagctagtcgtaatgagcaattgcgggatgggaccaactactttgggtgtccgtgtttcttgtttttcttttatacttgcttatggtgacaatatatataatatatatattggcatc

SEQ ID NO: 22100 - DNA, 468 bp, synthetic construct
  source 1..468: mol_type = other DNA
tatccgctatagtacttcgagaaacctagtaccacctttggattgttgacgcgttgcgctcagcacactaacccgtgtgtagcttgggtcgatgagtctggacatacctcactggcgacagtggtccaggctgcgttggcggcctactcatggtgaaaaccatgagacgctagacatgaacaaggtgtgaagagtctattgagctactatagagtcctccggcccctgaatgcggctaatcctaaccatggagcaagtgctcacaggccagtgagttgcttgtcgtaatgcgcaagtccgtggcggaaccgactactttgggtgtccgtgtttcactttttacttttatgactgcttatggtgacaatttgatattgttaccatttagcttgtcaaatcaattacaaaagatcctaaatcttatttatcaatttgcatcttgataactttaatttgaaaatttcaaca

SEQ ID NO: 22101 - DNA, 519 bp, synthetic construct
  source 1..519: mol_type = other DNA
cccttcccctgtaacttagaagttttgaacaaggaccaataggcagtggccagccaagctactaaaggtcaagcacttctgtttccccggtcaaagttgatatgctccaacagggcaaaaacagctgagatcgttatccgcaaggtgcctacacaaagcctagtaaccccttgaacaatgtatggttggtcgctcagctgtaccccacagtagacctggcagatgaggctagatgttccccactggcgacagtgttctagcctgcgtggctgcctgcgcactctttgagtgcgaagccatacatttgacaaggtgtgaagagccccgtgtgctcaccttgagtcctccggcccctgaatgtggctaaccttaaccctgcagctagtacatgcaatccagcatgcagctagtcgtaatgagcaattgcgggacgggaccaactactttgggtgtccgtgtttcactttttccttttatatttgcttatggtgacaatatatagatttatatattgacacc

SEQ ID NO: 22102 - DNA, 348 bp, synthetic construct
  source 1..348: mol_type = other DNA
tttattggttggtcgctccactggaaaacccccccagtagacctggcagatgaggctaagtaatccccactggcgacagtgacttagcctgcgtggctgcctgcacacctggaaacaggtgtgaagccaagtaatggacaaggtgtgaagagccccgtgtgcttatcatgagtcctccggcccctgaatgcggctaatccaaccccacagctattgcacataatccaatgtgtatttagtcgtaacgggtaactgtgggacggaaccgactactttgggtgtccgtgtttcctttattctcatttaagtttcctatggtgacaaatataagtgattatatctgtcatc

SEQ ID NO: 22103 - DNA, 524 bp, synthetic construct
  source 1..524: mol_type = other DNA
tccccttatgtaacataagaagcttaaacacaatgaccaacaggtggtaacaagccatgttacttacggtcaagcactcctgtctccccggtacaaagggtgttaagtcttacccaagactgaagccttgagtatcgttacccgcataactactgaacaaagcctagtaacaccctacgatataggatggttagtcgctccaccagtgtacctcctggtagacctggcagatgaggctagagtttccccactggcgacagtgttctagcctgcgtggctgcctgctcccttatgggagaagccattctattgacaaggtgtgaagagccccgtgcgctagttatgagtcctccggcccctgaatgcggctaatccaaccccgcagccattgcatggaaaccaccatgtagatggtcgtaatgagcaattgcgggacggaaccgactactttgggtgtccgtgtttcttgtttttcttatcaattgcttatggtgacaatatatactgctaatatattgttcacc

SEQ ID NO: 22104 - DNA, 439 bp, synthetic construct; identical to SEQ ID NO: 482
  source 1..439: mol_type = other DNA

SEQ ID NO: 22105 - DNA, 311 bp, synthetic construct
  source 1..311: mol_type = other DNA
gattccccctctgttagtctggtcgatgaggctagaagtaccccacaggtaactgtgttctagcctgcgtggcggccagcccagctcctgctgggacgcctttcaagagacatggtgtgaagactcgattgtgcttggttgtgagtcctccggcccctgaatgcggctaaccttaaacccggatccatgctatgcaatccagcatagttatggtcgtaatgggcaactctgggatgggaccgactactttgggtgtccgtgtttccatttttactttttgtgtcatttatggttacaattaagttgtaatc

SEQ ID NO: 22106 - DNA, 442 bp, synthetic construct
  source 1..442: mol_type = other DNA
ggtggttatccaaaccatcaacggtcaagcacttctgtttccccggttagattgatacgctccaacagggcgaaaacaactctaatcgttatccgcaagatgcctacgcaaagcttagtatcatctttgattctatttggttggtcgttcagctacaaacccagtagtagacctggcagatgaggctagaaacaccccactggtaacagtgttctagcctgcgtggctgcctgcacaccctacgggtgtgaagccgactagttgacaaggtgtgaagagccccgtgtgctcatcttgattcctccggcccctgaatgtggctaaccttaaacctgcagccaatgtacacaatccagtgtgctgttggtcgtaatgagtaattgcgggatgggaccaactactttgggtgtccgtgtttctctttttaccttcattattgctt

SEQ ID NO: 22107 - DNA, 527 bp, synthetic construct
  source 1..527: mol_type = other DNA
atcccctccccaaatgtaacctagaagttatacacacagaccaataggcggtgatcctccagatcactaacggtcaagcacttctgtctccccggtttgaattgatacgctccaacagggcgaaaacaatttgaatcgtcacccgcaaagtgcctacgcaaagcctagtagcactttagaaaatttatggttggtcgctcagctataccccctagtagacctggcagatgaggctagaagtaccccactggcgacagtgttctagcctgcgtggctgcctgcacaccctcacgggtgtgaagccatatatttgacaaggtgtgaagagccccgtgtgctcactttgagtcctccggcccctgaatgtggctaaccttaaccctgcagctagtacatgtaatccaacatgttgctagtcgtaatgagcaattgcgggatgggaccaactactttgggtgtccgtgtttcactttttaccttttatttgcttatggtgacaatatatatataacatatatattggcatc

SEQ ID NO: 22108 - DNA, 531 bp, synthetic construct; identical to SEQ ID NO: 565
  source 1..531: mol_type = other DNA

SEQ ID NO: 22109 - DNA, 423 bp, synthetic construct
  source 1..423: mol_type = other DNA
tggagcgaggtatagacggtacccaccgtcaaaagcctttaaccgttatccgccaaccaactacgaaacagctagtaataccctgtattcttgcgaggtgttcgatcagacagattccccctctgttagtctggtcgatgaggctagaagtaccccacaggtaactgtgttctagcctgcgtggcggccagcccagcttctgctgggacgcctttcaagagacatggtgtgaagactcgattgtgcttggttgtgagtcctccggcccctgaatgcggctaaccttaaacccggatccatgctatgcaatccagcatagttatggtcgtaatgggcaactctgggatgggaccgactactttgggtgtccgtgtttccatttttactttttgtgtcatttatggttacaattaagttgtaatc

SEQ ID NO: 22110 - DNA, 644 bp, synthetic construct; identical to SEQ ID NO: 779
  source 1..644: mol_type = other DNA

SEQ ID NO: 22111 - DNA, 606 bp, synthetic construct
  source 1..606: mol_type = other DNA
gatctgggttgtccccacccagatcacccaagtggtgtagtgctctgttattccggtaaccttgcacgccagttttatcaccccttcccccacgtaacttagaagcttttaaacatagaccaacagggagcgacaaaccagtcgtgaaaggtcaagcacctctgtttccccggtcaacgttgatatgctctcccagggcaaaaacaacagcgatcgttacccgcaagatgcctacgcaaagcttagtaacgccctcgaagatactcggttggtcattcatgtgcaaccccagcattagacctggcagatgaggctagaagttccccactggcgacagtgttctagcctgcgtggctgcctgcacaccctaacgggtgtgaagcctagtattggacaaggtgtgaagagccccgtgtgctcatcttgagtcctccggcccctgaatgcggctaaccttaaacctgcagccattgctcacaatccagtgagtctatggtcgtaatgagcaattgcgggatgggaccgactactttgggtgtccgtgtttctctttttaccttacatttgagcttatggtgacaatatatagtgatatatattggcatc

SEQ ID NO: 22112 - DNA, 609 bp, synthetic construct; identical to SEQ ID NO: 664
  source 1..609: mol_type = other DNA

SEQ ID NO: 22113 - DNA, 554 bp, synthetic construct
  source 1..554: mol_type = other DNA
gagtaccaataagctgctcgcgcggctgaaggggaaaacgttcgttacccggccaattacttcgagaaacctagtaccgccatggacgttgcgcagcgtttcgctccacacaaccccagtgtagatcaggtcgatgagccaccgcattccccacgggcgaccgtggcggtggctgcgttggcggcctgcccatggggtaacccatgggacgcttcaatacagacatggtgcgaagagtctattgagctaattggtagtcctccggcccctgaatgcggctaatcctaactgcggagcaggtacccacaacccagtgggttacctgtcgtaatgggcaactctgcagcggaaccgactactttgggtgtccgtgtttccttttaacctttacactggctgcttatggtgacaattgaaagattgttaccatatagctattggattggccatcctgtgagtaatagagcgattgtatacttatttgttggctttataccactcaatttgaaagctttacagacactgaattatattgtggcattaaacacagcaaa

SEQ ID NO: 22114 - DNA, 341 bp, synthetic construct
  source 1..341: mol_type = other DNA
cttggcgttcgatcaggtggattccccctccactagtttggtcgatgaggctaggaataccccacgggtgaccgtgtcctagcctgcgtggcggccaacccagcacttgctgggacgcccttttatggacatggtgtgaagactcgcatgtgcttggttgtgactcctccggcccctgaatgcggctaaccttaaccccggagccttgtgttgcaaaccagcaacattaaggtcgtaatgagtaattctgggacgggaccgactactttgggtgtccgtgtttccaatttttctttttattgtcttatggtcacagcatatttgataaatatactgtgatc

SEQ ID NO: 22115 - DNA, 404 bp, synthetic construct
  source 1..404: mol_type = other DNA
agcccgatgtatcgttatccgcatgattactaagcagagcctagtaacatcttactttatatatgggttggtcgctcagtcagttaccccctgatagacctggcagatgaggctggaaacaccccactggtaacagtgttccagcctgcgtggctgcctgcccctcttctgaggggaagcccatatgtagacaaggtgagaagagccgcgtttgctaatcatgagtcctccggcccctgaatgcggctaatccaaccccacagctactgcgcagaaaccactgcgtgggtagtcgtaatgagcaattgtgggacggaaccgactactttgggtgtccgtgtttcctgttttaccttacattgcttatggtcacaacatatataaaatcgtatatgttgttcacc

SEQ ID NO: 22116 - DNA, 677 bp, synthetic construct
  source 1..677: mol_type = other DNA
ttctgctgtcccactcccctggtcccgtggcggctagtactctgtactcggtacctttgtacgctgtttatctccttccaatgtaatttagaagctcttaaatcaaggctcataggtggggcgcaaaccagcgctctcatgagcaagcactcctgtctccccggtgtggttgtataaactgttcccacggttgaaaacaacctatccgttatccgctatagtacttcgagaaacctagtatcacctttggattgttgacgcgttgcgctcagcacactaacccgtgtgtagcttgggtcgatgagtctggacataccccactggcgacagtggtccaggctgcgttggcggcctactcatggtgaaaaccatgagacgctagacatgaacaaggtgtgaagagtctattgagctactatagagtcctccggcccctgaatgcggctaatcctaaccatggagcaagtgctcacaggccagtgagttgcttgtcgtaatgcgcaagtccgtggcggaaccgactactttgggtgtccgtgtttcactttttacttttatgactgcttatggtgacaatttgatattgttaccatttagcttgtcaaattaattgcaaaagatcctaaatcttatttaccaacttgcattttgataaccttgatttgaaaattttaata

SEQ ID NO: 22117 - DNA, 360 bp, synthetic construct
  source 1..360: mol_type = other DNA
gggtaacccatgggacgcttcaatacagacatggtgcgaagagtctattgagctaattggtagtcctccggcccctgaatgcggctaatcctaactgcggagcaggtacccacaacccagtgggtcacctgtcgtaatgggcaactctgcagcggaaccgactactttgggtgtccgtgtttccttttaacctttacactggctgcttatggtgacaattgaaagattgttaccatatagctattggattggccatcctgtgagtaatagagcgattgtatacttatttgttggctttataccactcaatttgaaagctttacagacactgaattatattgtggcattaaacacagcaaa

SEQ ID NO: 22118 - DNA, 480 bp, synthetic construct
  source 1..480: mol_type = other DNA
aacaatcagccagattgttttaggtcaagcactcctgtttccccggtcaacgttgatatgctccaacagggcaaaaacaacagcgatcgttatccgcaaggtgcctacacagagcctagtatcatcttagaagaattgtggttggtcgctcagttgcaaacccagcaatagacctggcagatgaggctggacattccccactggtgacagtggtccagcctgcgtggctgcctgcacacctctatgaggtgtgaagccagaatttcgacaaggtgtgaagagccgcgtgtgctcaccttgagtcctccggcccctgaatgcggctaaccttaaacccgcagccatggtccacaaaccagtggatgtgtggtcgtaatgagtaattgtgggatgggaccgactactttgggtgtccgtgtttcctgtttttctttttatactgcttatggtgacaatatatataggatatatattgacacc

SEQ ID NO: 22119 - DNA, 306 bp, synthetic construct
  source 1..306: mol_type = other DNA
cttggcagatgaggctgggtattccccactggcgacagtgacccagcctgcgtggctgcctacacacctggcgacaggtgtgaagccaaaagtggacaaggtgcgaagagccccgtgtgctaattgtgattcctccggcccctgaatgcggctaatctaaccccacagccaatgcatgtaaaccaacatgtatttggtcgtaacgggtaactgtgggacggaaccgactactttgggtgtccgtgtttccttttatttttaaaatgacttgcttatggtgacaaatattggtatatatttgtcatc

SEQ ID NO: 22120 - DNA, 499 bp, synthetic construct
  source 1..499: mol_type = other DNA
agttttaaacaaagaccaataggtggtagccttccaggttactaaaggtcaagcacttctgtttccccggtcaaagttgatatgctccaacagggcaaaaacaactgagatcgttacccgcaaggtgcctacacaaagcttagtaaccccttgaacggtatatggttggtcgttcagctgtaccccacagtagacctggcagatgaggctagatgttccccactggcgacagtgttctagcctgcgtggctgcctgcgcactctctgagtgcgaagccatatatttgacaaggtgtgaagagccccgtgtgctcaccttgagtcctccggcccctgaatgtggctaaccttaaccctgcagctagtacatgcaatccagcatgcagctagtcgtaatgagcaattgcgggacgggaccaactactttgggtgtccgtgtttcactttttccttttatatttgcttatggtgacaatatatagatttatatattgacacc

SEQ ID NO: 22121 - DNA, 322 bp, synthetic construct; identical to SEQ ID NO: 307
  source 1..322: mol_type = other DNA

SEQ ID NO: 22122 - DNA, 545 bp, synthetic construct
  source 1..545: mol_type = other DNA
atcttcactttctatcattcttttcttccaagtaacttagaagctgaacaacagtccaataggaagtgaccaacccatggtcactaaggacaagcacttctgtttccccggatgcgtgaatagactctaaaagggttgaagctgtagcattcgttatccgcacttgtactacgcgatggctagtatcatcctgctctttccattggcgtttcgctcagcgtggtatcccccacgtagatcagggcaatgaggctacatgtaccccaccggcgacggtgatgtagcctgcgtggtgccccgcctgggtcttgtgcccaggacgccataggtcagacagggtgtgaagacttgagtgtgctacaagtgagtcctccggcccctgaatgcggctaatcctaaccccgcagctatcgtacgcaatccagcgtattggtagtcgtaatgagcaattgtgggatggaaccgactactttgggtgtccgtgtttcctttatttcttgacatgttgcttatggtcacaagtttatggttataaatttgtgatc

SEQ ID NO: 22123 - DNA, 588 bp, synthetic construct; identical to SEQ ID NO: 639
  source 1..588: mol_type = other DNA

SEQ ID NO: 22124 - DNA, 353 bp, synthetic construct
  source 1..353: mol_type = other DNA
cccgtaggacgcttcaatacagacatggtgcgaagagtcgattgagctagttagtagtcctccggcccctgaatgcggctaatcctaactgcggagcacatgccctcaacccagggggtattgtgtcgtaacgggcaactctgcagcggaaccgactactttgggtgtccgtgtttccttttattcttatactggctgcttatggtgacaattgaaagattgttaccatatagctattggattggccatccagtgtctaatagagctattatttacctctttgctggatttataccactcaacctaaaagaagttaaaacactacagctcattatacaactgaatacagcaaa

SEQ ID NO: 22125 - DNA, 530 bp, synthetic construct
  source 1..530: mol_type = other DNA
ccaccctcccctaacatgtaacttagaagtttgaacgataagaccaataggtgataatcatccagattatcaaaggtcaagcacttctgtttccccggtcgatgaggatatgctttacccgaggcaaaaaccttagagatcgttatccacacactgcctacacagagcctagtaccacttttgacgtaactaggttggtcgctccctgcaaacccagcagtagacctggcagatgaggctggacgttccccactggcgacagtggtccagcctgcgtggctgcctgctcaccctattgggtgagaagcctatttattgacaaggtgcgaagagccgcgtgtgctcagtgtgcttcctccggcccctgaatgtggctaaccttaaccctgcagccgctgcccataatccaatgggtttacggtcgtaacgcgtaagtgcgggatgggaccaactactttgggtgtccgtgtttcttgtttttcctttatttgcattttatggtgacaatttatggtatatagattgtcatc

SEQ ID NO: 22126 - DNA, 363 bp, synthetic construct; identical to SEQ ID NO: 340
  source 1..363: mol_type = other DNA

SEQ ID NO: 22127 - DNA, 350 bp, synthetic construct
  source 1..350: mol_type = other DNA
ggatggtatgtggttggtcgttccgctatttcccatagtagacctggcagatgaggctggaaattccccactggcgacagtgttctagcctgcgtggctgcctgcgtgtcccaacggacacgaagccatatacttgacaaggtgtgaagagccccgtgtgctcactttgagtcctccggcccctgaatgtggctaaccttaaccctgcagctaaggcacacaacccagtgtgaacttagtcgtaatgagcaattgcgggacgggaccaactactttgggtgtccgtgtttcactttttcccttttataatgcttatggtgacaatatataataacttgtatattggcacc

SEQ ID NO: 22128 - DNA, 401 bp, synthetic construct; identical to SEQ ID NO: 437
  source 1..401: mol_type = other DNA

SEQ ID NO: 22129 - DNA, 554 bp, synthetic construct; identical to SEQ ID NO: 599
  source 1..554: mol_type = other DNA

SEQ ID NO: 22130 - DNA, 554 bp, synthetic construct
  source 1..554: mol_type = other DNA
ttataggctgtactcacggctgaaaacaaacgatccgttatccgcttaggtacttcgagaagcctattaccatcttggaatcttcgacgcgttgcgctcagcactctaccccgagtgtagcttaggctgatgagtctgggcgttccccaccggtgacggtggcccaggctgcgttggcggcctacccatggctcacgccatgggacgctagttgtgaacaaggtgtgaagagcctattgagctacctaagagtcctccggcccctgaatgcggctaatcctaaccacggagcaagtgccttcagcccagaaggtagcttgtcgtaacgcgcaaggtctgtggcggaaccgactactttgggtgtcccgtgtttccccttattttcattgtggctgcttgcgggactataattgattgccatcataaagcgatttggattggccatccggagaaagttaaacacgttgtttatttattcgttggattcacctcattaacccaaattacacccagcttgatatatatagtgttgccgactagacaaaatcaccaca

SEQ ID NO: 22131 - DNA, 554 bp, synthetic construct
  source 1..554: mol_type = other DNA
gtataggctgtactcacggctgaaaacgaacgatccgttatccgcttaggtacttcgagaagcctattaccatcttggaatcttcgacgcgttgcgctcagcactctaccccgagtgtagcttaggctgatgagtctgggcgttccccaccggtgacggtggcccaggctgcgttggcggcctacccatggctcacgccatgggacgctagttgtgaacaaggtgtgaagagcctattgagctacctaagagtcctccggcccctgaatgcggctaatcctaaccacggagcaagtgccttcagcccagaaggtagcttgtcgtaacgcgcaaggtctgtggcggaaccgactactttgggtgtcccgtgtttccccttattttcattgtggctgcttgcgggactataattgattgccatcataaagcgatttggattggccatccggagaaagttaaacacgttgtttatttattcgttgcattcaccacattatcccaaattacacccacgttgatatatatagtgttgcagactagacaaaatcaccaca

SEQ ID NO: 22132 - DNA, 526 bp, synthetic construct
  source 1..526: mol_type = other DNA
cccctcccctcgtaacttagaagcaagtacacatagaccaatagcaagtagcaagccatgctacttacggtcaagcactcctgtttccccggtctgatgggatatgcttcacccgaggcaaaaactcagatgatcgttatccgcaaagtgcctacgggaagcctagtaacgccttagaaattgttaggttggtcgctcaattgctgaccccgagcaatagacttggcagatgaggctggacgtgccccaccagcgatggtggtccagcctgcgtggctgcctacccaccccaacggggtgggaagcctatcaatagacaaggtgtgaagagcctactgtgctcactttgattcctccggcccctgaatgtggctaatcctaaccccgtatctatcgcatgcgcaccagcatgtaggtagtcgtaatgggcaactacgggatggaaccaactactttgggtgtccgtgtttccttgttttcttattacttgcttatggtgacaattgtatgaaatacgattgacacc

SEQ ID NO: 22133 - DNA, 339 bp, synthetic construct
  source 1..339: mol_type = other DNA
ggttggtcgctccgttgcaaccccagcaacagacctggcagatgaggctgagcattccccaccagcgatggtggctcagcctgcgtggctgcctgcgcacccttcggggtgcgaagccagaaagtggacaaggtgtgaagagcctattgtgctcactttgagtcctccggcccctgaatgtggctaatcctaaccccgcagctactacacataagccaatgtgcaggtagtcgtaacgggtaactgtgggatggaaccaactactttgggtgtccgtgtttccttgttatccttttttaaatgcctatggtgacaattgtacagtatacacttgttacc

SEQ ID NO: 22134 - DNA, 699 bp, synthetic construct
  source 1..699: mol_type = other DNA
cgctagcacactggtatcccggtacctttgtgcgcctgttttatacaccctcccccgacagcaacttagaagatttccacacacggtcaataggcggctcagtatgccaactgggtcatgaccaagtacttctgtctccccggactgagtatcaataagctgctcacgtggctgaaggagaaaacgttcgttatccggccaattacttcgagaagcttagtaccaccatggaggttgcgcagtgtttcgttccgcacaaccccagtgtagatcaggtcgatgagtcaccgcactcctcacgggcgaccgtggcggtggctgcgctggcggcctgcccatggggcaccccatgggacgcttcaatactgacatggtgcgaagagcctattgagctaattggtaatcctccggcccctgaatgcggctaatcctaactgcggagcagataccctcgagccagtgggcagtctgtcgtaatgggcaactctgcagcggaaccgactactttgggtgtccgtgtttccttttattcctatattggctgcctatggtgacaattgagagattgttaccatatagctattggattggccatccagtgacaaacagagcgattatctacttatttgttggcttcataccattaaatcttagagtcctaaagaccctcaacttgattgtaaaatttaactctgtgaa

SEQ ID NO: 22135 - DNA, 502 bp, synthetic construct; identical to SEQ ID NO: 529
  source 1..502: mol_type = other DNA

SEQ ID NO: 22136 - DNA, 261 bp, synthetic construct
  source 1..261: mol_type = other DNA
tagcctgcgtggctgcctgcacaccctgccgggtgtgaagccagaaagtggacaaggtgtgaagagcctattgtgctcactttgagtcctccggcccctgaatgtggctaaccctaaccccgtagctgttgcatgtaacccaacatgtatgcagtcgtaatgggcaactatgggatgggaccaactactttgggtgtccgtgtttcctgttttactttttcattgcttatggtgacaattgtatctgatacacttgttacc

SEQ ID NO: 22137 - DNA, 534 bp, synthetic construct
  source 1..534: mol_type = other DNA
gccagttttatcctcccctcccccatgtaacttagaagttttgcacacagaccaataggcagtaatcatccagattacttacggtcaagcacttctgtttccccggtcaaagttgatatgctccaccagggcaaaaacagctgcgatcgttatccgcaaagcgcctacgcaaagcttagtagcattctggaagttgtctggctggtcgctccaccatttcccctggtagacctggcagatgaggctagaaattccccactggcgacagtgttctagcctgcgtggctgcctgcacaccctctgggtgtgaagccatacaatggacagggtgtgaagagccccgtgtgctcgctttgagtcctccggcccctgaatgtggctaaccttaaccctgcagctagagcacacaatccagtgtgtttctagtcgtaacgagcaattgcgggatgggaccaactactttgggtgtccgtgtttccttgttttctttaaatatttgcttatggtgacaatatatacgcatatattgacacc

SEQ ID NO: 22138 - DNA, 296 bp, synthetic construct
  source 1..296: mol_type = other DNA
cctccggcccctgaatgcggctaatcctaactgcggagcagatgctcacatgccagtgggcggtctgtcgtaacgggcaactctgcagcggaaccgactactttgggtgtccgtgtttcctttttaactttgtattggctgcatatggtgacaattgaaagattgttaccatatagctattggattggccatccggtgacgaacagagcaatcatttatttgttcgttggctttattccattgaatctcagagtttggaacactctaaattttattatctcactcaacacaacaaa

SEQ ID NO: 22139 - DNA, 296 bp, synthetic construct
  source 1..296: mol_type = other DNA
cctccggcccctgaatgcggctaatcctaactgcggagcagatgcccacatgccagtgggtagtctgtcgtaacgggcaactctgcagcggaaccgactactttgggtgtccgtgtttcctttttaaccttgtattggctgcatatggtgacaattgtaagattgttaccatatagctattggattggccatccggtgacgaacagagcaatcatttacttgttcgttggttttattccattgaatctcaaagtttggaacactctaaattttattatttcactcaacacaacaaa

SEQ ID NO: 22140 - DNA, 296 bp, synthetic construct
  source 1..296: mol_type = other DNA
cctccggcccctgaatgcggctaatcctaactgcggagcagatacccacacaccagtgggcagtctgtcgtaacgggcaactctgcagcggaaccgactactttgggtgtccgtgtttcctttttaaccttatattggctgcatatggtgacaattgaaaggttgttaccatatagctattggattggccatccggtgacgaacagagcaatcatttatttgttcgttggttttattccattgaatttcaaagtttggatctctcaaaatttcattatttcactcaacacgacaaa

SEQ ID NO: 22141 - DNA, 296 bp, synthetic construct
  source 1..296: mol_type = other DNA
cctccggcccctgaatgcggctaatcctaactgcggagcagacacccacacgccagtgggcggtctgtcgtaacgggcaactctgcagcggaaccgactactttgggtgtccgtgtttcctatttattcctattttggctgcttatggtgacaattgagagattgttaccatatagctactggattggccatccggtgacgaacagagcaatcatttatttgttcgttggttttattccattgcatctcaaagtttggaacactctaaattttattatctcactcaactcaatgaa

SEQ ID NO: 22142 - DNA, 296 bp, synthetic construct
  source 1..296: mol_type = other DNA
cctccggcccctgaatgcggctaatcctaactgcggagcagatacccacgtgccagtgggcagtctgtcgtaacgggcaactctgcagcggaaccgactactttgggtgtccgtgtttcccttttattcttacattggctgcttatggtgacaattgacagattgttaccatatagctattggattggccacccggtgacaaacagagcgatcatatacttgttcgtaggctttgttccattaaactttaaggtcttgaacaccctaaacttcattatatcactcaacacaacaaa

SEQ ID NO: 22143 - DNA, 296 bp, synthetic construct
  source 1..296: mol_type = other DNA
cctccggcccctgaatgcggctaatcctaactgcggagcagatgctcacatgccagtgggcggtctgtcgtaacgggcaactctgcagcggaaccgactactttgggtgtccgtgtttcctttttaaccttgtgttggctacatatggtgacaattgaaagattgttaccatatagctattggattggccatccggtgacgaacagatcaatcatttatttgttcgttggttttattccattgaatctcaaagtttggaacactctaaattttattatctcactcaacacaataaa

SEQ ID NO: 22144 - DNA, 296 bp, synthetic construct
  source 1..296: mol_type = other DNA
cctccggcccctgaatgcggctaatcctaactgcggagcagatgctcacatgccagtgggcggtctgtcgtaacgggcaactctgcagcggaaccgactactttgggtgtccgtgtttcctttttaaccttgtattggctgcatatggtgacaattgaaagattgttaccatatagctattggattggccatccggtgacgaacagagcaatcatttatttgttcgttggttttattcctttgaatctcaaagtttggaacactctaaattttattatctcacttaacacaacaaa

SEQ ID NO: 22145 - DNA, 296 bp, synthetic construct
  source 1..296: mol_type = other DNA
cctccggcccctgaatgcggctaatcctaactgcggagcagatgctcacatgccagtgggcggtctgtcgtaacgggcaactctgcagcggaaccgactactttgggtgtccgtgtttcctttttaaccttgtattggctgcatatggtgacaattgaaagattgttaccatatagctattggattggccatccggtgacaaacagagcaatcatttatttgttcgttggttttattccattgaatctcaaagtttgggacactctaaattttattatctcactcaacacaacaaa

SEQ ID NO: 22146 - DNA, 296 bp, synthetic construct
  source 1..296: mol_type = other DNA
cctccggcccctgaatgcggctaatcctaactgcggagcagatgctcacatgccagtgggcggtctgtcgtaacgggcaactctgcagcggaaccgactactttgggtgtccgtgtttcctttttaaccttgtactggctgcatatggtgacaattgaaagattgttaccatatagctattggattggccatccggtgacgaacagagcaatcatttatttgttcgttggttttattccattgaatctcaaagtttggaacactctaaattttattatctcactcaacacaacaaa

SEQ ID NO: 22147 - DNA, 296 bp, synthetic construct
  source 1..296: mol_type = other DNA
cctccggcccctgaatgcggctaatcctaactgcggagcagatgctcacatgccagtgggcggtctgtcgtaacgggcaactctgcagcggaaccgactactttgggtgtccgtgtttcctttttaaccttgtattggctgcatatggtgacaattgaaagattgttaccatatagctattggattggccatccggtgacgaacagagcaatcatttatttgttcgttggttttattccattgaatctcaaagtttggaacactctaaattttattatctcactcaacacaacaaa

SEQ ID NO: 22148 - DNA, 296 bp, synthetic construct
  source 1..296: mol_type = other DNA
cctccggcccctgaatgcggctaatcctaactgcggagcagatgctcacataccagtgggcggtctgtcgtaacgggcaactctgcagcggaaccgactactttgggtgtccgtgtttcctttttaaccttgtattggctgcatatggtgacaattgaaagattgttaccatatagctattggattggccatccggtgacgaacagagcaatcatttatttgttcgttggttttattccattgaatctcaaagtttggaacactctaaatttcattatctcactcaacacaacaaa

SEQ ID NO: 22149 - DNA, 296 bp, synthetic construct
  source 1..296: mol_type = other DNA
cctccggcccctgaatgcggctaatcctaactgcggagcagatgctcacatgccagtgggcggtctgtcgtaacgggcaactctgcagcggaaccgactactttgggtgtccgtgtttcctttttaaccttgtattggctgcatatggtgacaattgaaagattgttaccatatagctattggattggccatccagtgacgaacagagcaatcatttatttgttcgttggttttattcctttgaatctcaaagtttggagcactctaaattttattatcttactcaacacaacaaa

SEQ ID NO: 22150 - DNA, 296 bp, synthetic construct
  source 1..296: mol_type = other DNA
cctccggcccctgaatgcggctaatcctaactgcggagcagatgctcacacgccagtgggcggtctgtcgtaacgggcaactctgcagcggaaccgactactttgggtgtccgtgtttcctttttaaccttgtattggctgcatatggtgacaattgaaagattgttaccatatagctattggattggccatccggtgacgaacagagcaatcatttatttgttcgttggttttattccattgaatctcaaagtttggaacactctaaattttattatctcactcaacacaacaaa

SEQ ID NO: 22151 - DNA, 296 bp, synthetic construct
  source 1..296: mol_type = other DNA
cctccggcccctgaatgcggctaatcctaactgcggagcagatgctcacatgccagtgggtggtctgtcgtaacgggcaactctgcagcggaaccgactactttgggtgtccgtgtttcctttttaaccttgagttggctgcatatggtgacaattgaaagattgttaccatatagctattggattggccatccggtgacaaacagagcaatcatttatttgttcgttggttttattccattgaatctcaaagtttggaacactctaaattttattatctcactcaacacaacaag

SEQ ID NO: 22152 - DNA, 296 bp, synthetic construct
  source 1..296: mol_type = other DNA
cctccggcccctgaatgcggctaatcctaactgcggagcagatgctcacatgccagtgggtggtctgtcgtaacgggcaactctgcagcggaaccgactactttgggtgtccgtgtttcctttttaaccttgtattggctgcatatggtgacaattgaaagattgttaccatatagctattggattggccatccggtgacgaacagagctatcatttatttgttcgttggttttatcccactgaatctcaaagtttggaacactctaaattttattatctcactcaacacaacaaa

SEQ ID NO: 22153 - DNA, 296 bp, synthetic construct
  source 1..296: mol_type = other DNA
cctccggcccctgaatgcggctaatcctaactgcggagcagatactcacatgccagtgggcagtctgtcgtaacgggcaactctgcagcggaaccgactactttgggtgtccgtgtttcctttctaaccttgtattggctgcatatggtgacaattgaaagattgttaccatatagctattggattggccatccggtgacgaacagagcaatcatttatttgttcgttggttttattccattgaatctcaaagtttggaacactctaaattttattatcttactcatcacaacaaa

SEQ ID NO: 22154 - DNA, 296 bp, synthetic construct
  source 1..296: mol_type = other DNA
cctccggcccctgaatgcggctaatcctaactgcagagcagatgctcacacgccagtgggcggtctgtcgtaacgggcaactctgcagcggaaccgactactttgggtgtccgtgtttcctttttaaccttgtattggctgcatatggtgacaattgaaagattgttaccatatagctattggattggccatccggtgacgagcagaacaatcatttatttgttcgttggttttgttccattgaatctcaaagtttggaacactctaaattttattatctcactcaacacaacaaa

SEQ ID NO: 22155 - DNA, 296 bp, synthetic construct
  source 1..296: mol_type = other DNA
cctccggcccctgaatgcggctaatcctaactgcggagcagatgctcacatgccagtgggcggtctgtcgtaacgggcaactctgcagcggaaccgactactttgggtgtccgtgtttcctttttaaccttgtattggctgcatatggtgacaattgaaagattgttaccatatagctattggattggccatccggtgacgaacagagcaatcatttatttgttcgttggttttattccattgaatctcaaagtttggaacactctaaattttattatctcactcaacacaataaa

SEQ ID NO: 22156 - DNA, 296 bp, synthetic construct
  source 1..296: mol_type = other DNA
cctccggcccctgaatgcggctaatcctaactgcggagcagataccctcatgccagtgggcagtctgtcgtaacgggcaactctgcagcggaaccgactactttgggtgtccgtgtttcctttttaaccttatactggctgcatatggtgacaattgaaagattgttaccatatagctattggattggccatccggtgacgaacagagcaatcatttatttgttcgttggttttattccattgaatctcaaagcttggaaaactctaaattttattatttcactcaacacaacgaa

SEQ ID NO: 22157 - DNA, 296 bp, synthetic construct
  source 1..296: mol_type = other DNA
cctccggcccctgaatgcggctaatcctaactgcggagcagatgctcacatgccagtgggcggtctgtcgtaacgggcaactctgcagcggaaccgactactttgggtgtccgtgtttcctttttaaccttgtactggctgcatatggtgacaattgaaagattgttaccatatagctattggattggccatccggtgacgaacagagcaatcatttatttgttcgttggctttattccattgaatctcaaagtttggagcactctaaattttattatcttactcaacacaacaaa

SEQ ID NO: 22158 - DNA, 544 bp, synthetic construct
  source 1..544: mol_type = other DNA
ttgtttgatgccagttttatctccccccccaattgcaacttagaagatgtacacaaagaccaataggcagtggtcacccagaccactgaaggtcaagcacttctgtctccccggtcaaagttgatatgctccaacagggcaaaaacaacttagatcgttatccgcaaagtgcctacgcaaagcttagtaccatctttgagagcctatggttggtcgctccactgaaccccacagtagacctggcagatgaggctagaagacccccactggcgacagtgttctagcctgcgtggctgcctgcacacccttacgggtgtgaagccatatgtttgacaaggtgcgaagagccccgtgtgctcactttgagtcctccggcccctgaatgtggctaaccttaaccctgcagctagtgcacacaagccagtgtgttgctagtcgtaatgagcaattgcgggatgggaccaactactttgggtgtccgtgtttcactttttacctttattttgcttatggtgacaatatatatagtatatatattggcacc

SEQ ID NO: 22159 - DNA, 306 bp, synthetic construct
  source 1..306: mol_type = other DNA
acatgagagtcctccggcccctgaatgcggctaatcctaaccatggagcaggcagctgcaacccagcagccagcctgtcgtaacgcgcaagtccgtggcggaaccgactactttgggtgtccgtgtttccttttattcttgaatggctgcttatggtgacaatcatagattgttatcataaagcgagttggattggccatccagtgtgaatcagattaattactcccttgtttgttggatccactcccgaaacgttttactccttaacttattgaaattgtttgaagacaggatttcagtgtcaca

SEQ ID NO: 22160 - DNA, 258 bp, synthetic construct
  source 1..258: mol_type = other DNA
cgtggctgcctgtccccctccttgggggaaagccattatacagacaaggtgtgaagagccgcgtttgctaattgtgagtcctccggcccctgaatgcggctaatccaaccccacagctatcgcatggaaaccaccatgtggatagtcgtaacgggcaactgtgggacggaaccgactactttgggtgtccgtgtttccttttatattttactctatctcatggtgacaacatatagtgataaatatatgttgttaacc

SEQ ID NO: 22161 - DNA, 296 bp, synthetic construct
  source 1..296: mol_type = other DNA
cctccggcccctgaatgcggctaatcctaactgcggagcagatgctcacatgccagtgggcagtctgtcgtaacgggcaactctgcagcggaaccgactactttgggtgtccgtgtttcctttttaaccttgtattggctgcatatggtgacaattgaaagattgttaccatatagctattggattggccatccggtgacgaacagagcaatcatttacttgttcgttggttttattccattgaatatcaaagtttggaacactctaaatttcattatttcactcaacacaacaaa

SEQ ID NO: 22162 - DNA, 407 bp, synthetic construct
  source 1..407: mol_type = other DNA
aagggttgaagccacgaaagtcgttatccgcacacatactacgcaaagcctagtatttccttgaaagctcgtcggttggtcgttccgttaataccccattaacagacctggcagatgaggcaggaaactccccactggcgacagtgttcctgcctgcgtggctgcctgcacaccctttcgggtgtgaagccgactagtggacaaggtgagaagagccccgtgtgctatgtgtgagtcctccggcccctgaatgcggctaatccaaccccacatctgccgcacacaatccagtgtgtaggcagtcgtaatgggtaactgtgggacggaaccgactactttgggtgtccgtgtttcctttatttcttttatgattgcttatggtgacaatatcaagtaatattgttacc

SEQ ID NO: 22163 - DNA, 355 bp, synthetic construct
  source 1..355: mol_type = other DNA
agcgccttgaaagtctcttggttggtcgctccgctagtttcccctagtagacctggcagatgaggcaggacattccccactggcgacagtggtcctgcctgcgtggctgcctgcgcacccctaggggtgcgaagccaagtgacggacaaggtgtgaagagccccgtgtgctaccaatgagtcctccggcccctgaatgcggctaatccaaccccacagctattgcacacaagccagtgtgtatatagtcgtaatgagcaattgtgggacggaaccgactactttgggtgtccgtgtttccttttattcttattattttgcctatggtgacaatactgtgaaatagtgttgttacc

SEQ ID NO: 22164 - DNA, 512 bp, synthetic construct
  source 1..512: mol_type = other DNA
caccctgcgtaacttagaagctatgcacaagaccaataggtggtaacaatccatgttactaaaggtcaagtacttctgtttccccggcatgcgtggaataaacagtgcaaacggttgaggccacaaatgtcgttacccgcgcatgaactacgcagagcctagtatccccctgaaagtccattggttggtcgctcagctaatccccatagtagacctggcagatgaggcaagacgcaccccactggcgacagtggtcttgcctgcgtggctgcctgcacacccttcggggtgtgaagccaattgatagacagggtgtgaagagccgagtgtgcttcatgtgagtcctccggcccctgaatgcggctaatccaaccccgcagctgtggcacacaatccagtgtgtatgcagtcgtaacgggcaactgcgggacggaaccgactactttgggtgtccgtgtttccttttattctttaatcaagtacttatggtgacaataataaatattgttacc

SEQ ID NO: 22165 - DNA, 520 bp, synthetic construct
  source 1..520: mol_type = other DNA
aaataattaatgttgaagaagtttaaacacagaccaatagggagcgacaaaccagtcgtgaaaggtcaagcacctctgtttccccggtcaacgttgatatgctctcccagggcaaaaacaacagcgatcgttacccgcaagatgcctacgcaaagcttagtaacgccctcgaagatactcggttggtcattcatgtgcaaccccagcattagacctggcagatgaggctagaagttccccactggcgacagtgttctagcctgcgtggctgcctgcacaccctaacgggtgtgaagcctagtattggacaaggtgtgaagagccccgtgtgctcatcttgagtcctccggcccctgaatgcggctaaccttaaacctgcagccatagctcacaatccagtgagtctatggtcgtaatgagcaattgcgggatgggaccgactactttgggtgtccgtgtttctctttttaccttacatttgagcttatggtgacaatatatagtgatatatattggcatc

SEQ ID NO: 22166 - DNA, 438 bp, synthetic construct
  source 1..438: mol_type = other DNA
acccggcatgagaggaatagactctttcagggttgaagccacgagtgtcgttacccgcactggtactacgcaaagcctagtaacatcttgaaactctttttggttggtcgttccactagttaccccctagtagacctggcagatgaggcaggacgctccccactggcgacagtggtcctgcctgcgtggctgcctgcacacccttcggggtgtgaagccaaaagaaagacaaggtgtgaagagccccgtgtgctaccagtgaatcctccggcccctgaatgcggctaatcttaccccacagctattgcacacaatccagtgtgtatgtagtcgtaatgagcaattgtgggacggaaccgactactttgggtgtccgtgtttccttttattcccatgtttctgcttatggtgacaatactgacgtatagtgttgttacc

SEQ ID NO: 22167 - DNA, 673 bp, synthetic construct
  source 1..673: mol_type = other DNA
cataccaagggcccacgtggcggctagtactctggtacttcggtacctttgtacgcctgttttatctcccttcccaatgtaatttagaagcttttaaatcaaggctcaataggtggggcgcaaaccagcgctctcatgagcaagcactcctgtctccccggtgtggttgtataaactgttcccacggttgaaaacaacctatccgttatccgctatagtacttcgagaaacctagtatcacctttggattgttgacgcgttgcgctcagcacactaacccgtgtgtagcttgggtcgatgagtctggacataccccactggcgacagtggtccaggctgcgttggcggcctactcatggtgaaaaccatgagacgctagacatgaacaaggtgtgaagagtctattgagctactatagagtcctccggcccctgaatgcggctaatcctaaccatggagcaagtgctcacaggccagtgagttgcttgtcgtaatgcgcaagtccgtggcggaaccgactactttgggtgtccgtgtttcactttttacttttatgactgcttatggtgacaatttgatattgttaccatttagctgtcaaattaattgcaaaagatcctaagtcttacttaccaatttgcactttgataaccttgatttgaaaactttaata

SEQ ID NO: 22168 - DNA, 444 bp, synthetic construct
  source 1..444: mol_type = other DNA
gaccccggtatgcggagaataggctctcaaaagggctgaaacttcaattatcgttatccgcgcaattactacgcaaagcttagtaacttcccaagagattctttggttggccgctccgctggtaccccaccagtaggcttggcagatgaggctgagtaatccccactggcgacagtgactcagcctgcgtggctgcctacacacctggcaacaggtgtgaagccatagaaaggacagggtgtgaagagccccgtgtgctaattgtgattcctccggcccctgaatgcggctaatccaaccccacatccaatgcgcataaaccaatgcgtagttggtcgtaatgggcaactgtgggacggaaccgactactttgggtgtccgtgtttccttttattccttattattagttcatggtgacaagtataagtgtttatatttgtcatc

SEQ ID NO: 22169 - DNA, 386 bp, synthetic construct
  source 1..386: mol_type = other DNA
gacccgcactagtactacgcaaagcctagtaatatcttgaagctcttctggttggtcgttccactagtcaccccctagtagacctggcagatgaggcaggacactccccactggtgacagtggtcctgcctgcgtggctgcctgcacaccctccggggtgtgaagccaaaagaaggacaaggtgtgaagagccccgtgtgctactagtgagtcctccggcccctgaatgcggctaatcttaccccacagctattgcacacaatccagtgtgtatgtagtcgtaatgagtaattgtgggacggaaccgactactttgggtgtccgtgtttccttttattctcatgtttttgcttatggtgacaatactgacatatagtgttgttacc

SEQ ID NO: 22170 - DNA, 298 bp, synthetic construct
  source 1..298: mol_type = other DNA
gcccctgaatgcggctaatcctaaccacggagcaggcggtcgcgaaccagtgactggcttgtcgtaacgcgcaagtctgtggcggaaccgactactttgggtgtccgtgtttcctgttatttttatcatggctgcttatggtgacaatcagagattgttatcataaagcgaattggattggccatccggtgagtgttgtgtcaggtatacaactgtttgttggaaccactgtgttagctttacttctcatttaaccaattaatcaaaaacaatacgaggataaaacaacaatactaca

SEQ ID NO: 22171 - DNA, 578 bp, synthetic construct
  source 1..578: mol_type = other DNA
cttccgatctgggttgtactctattattccggtaattttgtacgccagttttatatccccacccccatgtaacttagaagttgaacacaacgaccaataggaggcaattaaccaaattgctaaaggtcaagcacttctgtttccccggtcaagattgatacgctccaccagggcgaaaacagttgagatcgttatccgcaaagtgcctacgcgaagcctagtaacattttgaagagtttatggttggtcgctccgctatttcccatagtagacctggcagatgaggctagaaattccccactggcgacagtgttctagcctgcgtggctgcctgcacacccttatgggtgtgaagccatatacttgacaaggtgtgaagagcctagtgtgctcactttgagtcctccggcccctgaatgtggctaaccttaaacccgtagctagtgcacacaatccagtgtgtggctagtcgtaatgagcaattacgggatgggaccaactactttgggtgtccgtgtttcacttttttccttttatacttgcttatggtgacaatatatagactatatattggcacc

SEQ ID NO: 22172 - DNA, 348 bp, synthetic construct
  source 1..348: mol_type = other DNA
ggtgtatggttggtcgttccgctatgaacctgatagtagacctggcagatgaggctagaaaatccccactggtaacagtgttctagcctgcgtggctgcctgcgtaccccttgtgggtacgaagccgtacatttgacaaggtgtgaagagccccgtgtgcttgctttgagtcctccggcccctgaatgtggctaaccttaaccctgcagctagtgtgcacaagccagtgcatagctagtcgtaatgagcaattgcgggatgggaccaactactttgggtgtccgtgtttcttgtttttcttttatatttgcttatggtgacaatatattcaatacatatattgacacc

SEQ ID NO: 22173 - DNA, 510 bp, synthetic construct
  source 1..510: mol_type = other DNA
taacttagaagttttgcacacagaccaatagcaagcagcataccagctgtataaggtcaagcacttctgtttccccggtcgacgttgatatgcttcaacaaggcaaaaacaacagagatcgttatccgcaagatgcctacacaaagcctagtacctcctttgacggtgtttgtctggtcgttcaggtgtttccccagcactagacctggcagatgaggctagaaactccccactggcgacagtgttctagcctgcgtggctgcctgcacacccttctgggtgtgaagccaaatactagacaaggtgtgaagagccccgtgtgctcatcttgagtcctccggcccctgaatgcggctaaccttaaacccgcagccattgctcacaatccagtgggtagatggtcgtaatgagcaattgtgggatgggaccgactactttgggtgtccgtgtttcatgttttactttatgatttgcttatggtgacaatatatagtgatatatattggcatc

SEQ ID NO: 22174 - DNA, 409 bp, synthetic construct
  source 1..409: mol_type = other DNA
caaaaacagagtagatcgttacccgcaagatgcctacgcaacgcctagtaacactttgaagtaaccttggttggtcgctcatttacaaccccagtaatagacctggcagatgaggctagatgttccccactggtgacagtgatctagcctgcgtggctgcctgcacaccctttgtgggtgtgaagccaagtttatgacaaggtgcgaagagccacgtgtgctcatcttgagtcctccggcccctgaatgcggctaaccttaaccctgcagccattgctcacaaaccagtgagtatgtggtcgtaatgagaaattgcgggacgggaccgactactttgggtgtccgtgtttcactttttaccttatttttgcttatggtgacaatatatatatagatatatattgacacc

SEQ ID NO: 22175 - DNA, 405 bp, synthetic construct; identical to SEQ ID NO: 442
  source 1..405: mol_type = other DNA

SEQ ID NO: 22176 - DNA, 484 bp, synthetic construct
  source 1..484: mol_type = other DNA
agcgcgttccccccgcgtagatcgggctgatgggtctccgcatcccccacgggcgaccgtggcggaggccgcgtggcggcccgcctatggcgaaagccataggacgccatttcagtgacagggtgtgaagagcctattgagctagttggtagtcctccggcccctgaatgcggctaatcctaaccactgagcgtccaccaacaaaccagttgggagggcgtcgtaatgggcaactcggtggcggaaccgactactttgggtgtccgtgtttcctgttgatcctattttggctgcttatggtgacaacgataagttgttatcataaagcttttgggttggccacctggaaaaagttgtcagtgtttgatattgttcggctttcacgcctaccaataagacaatcactttactacttggtttccttttatccaaaagaggaaatctctgaattttatcttcaattgctcttaaccttaacagcaaa

SEQ ID NO: 22177 - DNA, 396 bp, synthetic construct
  source 1..396: mol_type = other DNA
ccgttatccgcaaagtgcctacacagagcttagtagtattctgaaagatctttggttggtcgctcagctgcatacccagcagtagaccttgcagatgaggctggacattccccactggtaacagtggtccagcctgcgtggctgcctgcacacctctcacgaggtgtgaagccaaagattggacagggtgcgaagagccgcgtgtgctcactttgagtcctccggcccctgaatgcggctaaccttaaacccgcagccatggttcacaaaccagtgaacttatggtcgtaatgagcaattgtgggatgggaccgactactttgggtgtccgtgtttcactttttcctttattgattgcttatggtgacaatatatatatagatatatattggcatc

SEQ ID NO: 22178 - DNA, 403 bp, synthetic construct
  source 1..403: mol_type = other DNA
caaaaacagccgcgatcgttatccgcaaagcgcctacgcaaagcttagtagcactctggaagttgtctggctggtcgctccaccattccccctggtagacctggcagatgaggctagaaattccccactggcgacagtgttctagcctgcgtggctgcctgcacaccctctgggtgtgaagccatacaatggacagggtgtgaagagccccgtgtgctcgctttgagtcctccggcccctgaatgtggctaaccttaaccctgcagctagagcacacaatccagtgtgtttctagtcgtaacgagtaattgcgggatgggaccaactactttgggtgtccgtgtttccttgttttctttaaatatttgcttatggtgacaatatatacgtatatattgacacc

SEQ ID NO: 22179 - DNA, 410 bp, synthetic construct; identical to SEQ ID NO: 447
  source 1..410: mol_type = other DNA

SEQ ID NO: 22180 - DNA, 439 bp, synthetic construct; identical to SEQ ID NO: 483
  source 1..439: mol_type = other DNA

SEQ ID NO: 22181 - DNA, 259 bp, synthetic construct
  source 1..259: mol_type = other DNA
cctgcgtggctgcctgcgcacccttcggggtgcgaagccagaaagtggacaaggtgtgaagagcctattgtgctcactttgagtcctccggcccctgaatgtggctaatcctaaccccgcagctactacacataagccaatgtgcaggtagtcgtaacgggcaactgtgggatggaaccaactactttgggtgtccgtgtttccttgttatcctttttgaatgcctatggtgacaattgtacagtatacatttgttacc

SEQ ID NO: 22182 - DNA, 401 bp, synthetic construct
  source 1..401: mol_type = other DNA
ttgaagccataagcatcgttatccgctacgtgcctacgcaaaacctagtagcattttgaagcttacttggttggccgctcagccactaacccgtggtaggcctggcagatgaggctgggcacaccccactggcgacagtggcccagcctgcgtggctgcctgcccctcttcgaggggaagccatttaagtgacaaggtgtgaagagtctcgtgtgctcacgtggagtcctccggcccctgaatgtggctaatcctaaccccgcagctatcgcacacaatccagtgtgttggtagtcgtaatgggcaactgtgggatggaaccaactactttgggtgtccgtgtttcctgttttctttaaatacttgcttatggtgacaaatagtgtatactgtttgacacc

SEQ ID NO: 22183 - DNA, 385 bp, synthetic construct
  source 1..385: mol_type = other DNA
atccgcaaagtgcctacgcaaagcttagtaccatctttgagagcctatggttggtcgctccgctgaaccccacagtagacctggcagatgaggctagaagacccccactggcgacagtgttctagcctgcgtggctgcctgcacacccttacgggtgtgaagccatatgtttgacaaggtgtgaagagccccgtgtgctcactttgagtcctccggcccctgaatgtggctaaccttaaccctgcagctagtgcacacaagccagtgtgttgctagtcgtaatgagcaattgcgggatgggaccaactactttgggtgtccgtgtttcactttttacctttactttgcttatggtgacaatatatatagtatatatattgacacc

SEQ ID NO: 22184 - DNA, 265 bp, synthetic construct
  source 1..265: mol_type = other DNA
gttctagcctgcgtggctgcctgcacaccccatgggtgtgaagccaagtagttgacaaggtgtgaagagccccgtgtgctcatcttgattcctccggcccctgaatgtggctaaccttaaacctgcagccaatgtacacaatccagtgtattgttggtcgtaatgagtaattgcgggatgggaccaactactttgggtgtccgtgtttctctttttacctttattattgcttatggtgacagtatatagtgtatatattgtcact

SEQ ID NO: 22185 - DNA, 716 bp, synthetic construct
  source 1..716: mol_type = other DNA
ccatagggcccattgggcgctagcacactggtatcacggtaactttgtgcgcctgttttatctaccccctccccaatgtaacgtagaagcacgagccaagtggtcaataggtggcccagtaaaccaactgggcttagaccaagcactcctgttaccccggactgagtatcaataggctgctcacgcggctgaaggagaaaacgttcgttacccggccaactacttcgagaagcccagtaccaccatgaaggatgcgcagtgtttcgttcagcacaaccccagtgtagatcaggccgatgagtcaccgcaatccccacgggtgaccgtggcggtggctgcgctggcggcctgcccatggggcaacccgtgggacgcttcaatttcgacatggtgcgaagagtctattgagctagttggtagtcctccggcccctgaatgcggctaatcccaactgcggagcagacacccacgaaccagtgggcagtttgtcgtaatgggtaactctgcagcggaaccgactactttgggtgtccgtgtttccttttattcctacattggctgcttatggtgacaattgacagattgttaccatatagctattggattggccatccggtaacaaacagagctattatttatctttttgttggcttcgtgccgttgaatttcaaagttataacaactataaacttcatcttgacactcaatacagcaaa

SEQ ID NO: 22186 - DNA, 699 bp, synthetic construct
  source 1..699: mol_type = other DNA
cgccagcacactggtatcacggtacccttgtgcgcctgttttatccaccctctccccagcgcaacttagaagcacatatcatgcggtcaataggcggctcagtatgccaactgagttttgaccaagtacttctgttgccccggaccgagtatcaataagctactcacgtggctgaaggagaaaacgttcgttatccggccaattacttcgagaaacctagtaccaccatgaatgttgcgcggcgtttcgctccgcacaatcccagtgtagatcaggtcgatgagtcaccgcgtccctcacgggcgaccgtggcggtggctgcgctggcggcctgcccatggggcaacccatgggacgcttcaatacagacatggtgtgaagagtctattgaaataattgatagttatccggcccctgaatgcggctaatcctaactgcggagcagattcccacatgccagtgggcagtctgtcgtaatgggtaactctgcagcggaaccgactactttgggtgtccgtgtttccttttattcttgtgctggctgctaatggtgacaattgaaagattgttaccatatagctattggattggccacccagtgtctaacagagcaattgtttacctttttgttggattcatcccacttgattgtaaagcacttgtaacactcaaatacatcatagacctcaacacaacgaa

SEQ ID NO: 22187 - DNA, 480 bp, synthetic construct; identical to SEQ ID NO: 510
  source 1..480: mol_type = other DNA

SEQ ID NO: 22188 - DNA, 261 bp, synthetic construct
  source 1..261: mol_type = other DNA
agcccgcgtggctgcctgtcccccactctgggggaaagccgatgttaagacagggtgtgaagagccgcgtttgctaactgtgagtcctccggcccctgaatgcggctaatcttaccccacagctattgcatggaaaccaccatgtggatagtcgtaatgggcaactgtgggacggaaccgactactttgggtgtccgtgtttccttttattccatttattatctcatggtgacaacgtataagagttatatgttgtttacc

SEQ ID NO: 22189 - DNA, 264 bp, synthetic construct
  source 1..264: mol_type = other DNA
tgcggagcagacgcccaagctccagtgggtagtctgtcgtaacgggtaactctgcagcggaaccgactactttgggtgtccgtgtttccttttattcttacattggctgcttatggtgacaattgagagattgttaccatatagctattggattggccatccggtgacaaatagagcaattgtatatctttttgttggattcataccactcgacaaaacaaatttcagaaccttgtgttatattattagattaaatacagcaaa

SEQ ID NO: 22190 - DNA, 405 bp, synthetic construct; identical to SEQ ID NO: 443
  source 1..405: mol_type = other DNA

SEQ ID NO: 22191 - DNA, 535 bp, synthetic construct
  source 1..535: mol_type = other DNA
gttttgtcacccttccccgtaacgtaacttagaagtttgtacacttagaccaataggtgataattatccagattatcaacggtcaagcacttctgtttccccggtcaatgaggatatgcttttcccaaggcaaaaaccttagagatcgttatccccgcattgcctacacagagcctagtaccgcctttgatgtatttagactggtcgttccctgcaaacccagcagtagacctggcagatgaggctggacgttccccactggcgacagtggtccagcctgcgtggctgcctgcccacccatttgggtgggaagcctaattactgacatggtgtgaagagccgcgtgtgctcaatgtgtctcctccggcccctgaatgtggctaaccttaaccctgcagccgctgtccacaagccagtggatatacggtcgtaatgcgtaagtgcgggatgggaccaactactttgggtgtccgtgtttcctgtttttctttatacgcattttatggtgacaatttatggtatatagattgtcatc

SEQ ID NO: 22192 - DNA, 488 bp, synthetic construct
  source 1..488: mol_type = other DNA
caataggggacaatcatccagattgtcaaagatcaagcacttctgtttccccggtcaaagttgatatgctccacaagggcaaaaacaactgagatcgttatccgcaagatgcctacgcaaagcctagtaacacattgaaagatacttggttggtcactcagctgttaacccgacagtagacctggcagatgaggctagagattcccctctggcgacggagttctagcctgcgtggctgcctgcacaccctttgggtgtgaagccaaatattggacaaggtgtgaagagccgcgtgtgctcatcttgagtcctccggcccctgaatgtggctaaccttaaacctgcagccagtgcacacaatccagtgtgtagctggtcgtaacgagtaattgcgggatgggaccaactactttgggtgtccgtgtttcactttttccttttattattgcttatggtgacaatatatatagcatatatatattgttatc

SEQ ID NO: 22193 - DNA, 471 bp, synthetic construct
  source 1..471: mol_type = other DNA
tggttggtcgttccgctatgaacctgatagtagacctggcagatgaggctagaaaatccccactggtaacagtgttctagcctgcgtggctgcctgcgtaccccttgtgggtacgaagccgtacatttgacaaggtgtgaagagccccgtgtgcttgctttgagtcctccggcccctgaatgtggctaaccttaaccctgcagctagtgtgcacaagccagcgcatagctagtcgtaatgagcaattgcgggatgggaccaactactttgggtgtccgtgtgcttgctttgagtcctccggcccctgaatgtggctaaccttaaccctgcagctagtgtgcacaagccagcgcatagctagtcgtaatgagcaattgcgggatgggaccaactactttgggtgtccgtgtttcttgtttttcttttatatttgcttatggtgacaatatatttaatacatatattgacacc

SEQ ID NO: 22194 - DNA, 344 bp, synthetic construct
  source 1..344: mol_type = other DNA
ggatctggcgttcgatcaggtggatttcccctccactagtttggtcgatgaggctaggaatccctcacgggcgaccgtgtcctagcctgcgtggcggccaacccagcatatgctgggacgcccttttatagacatggtgtgaagactcgcatgtgcttggttgtgattcctccggcccctgaatgcggctaaccttaaccctggagccttgtattacaaaccagtaatattaaggtcgtaatgagcaattccgggacgggaccgactactttgggtgtccgtgtttcttattttacttattattgtcttatggtcacagcatatttgttaaatatactgtgatc

SEQ ID NO: 22195 - DNA, 336 bp, synthetic construct
  source 1..336: mol_type = other DNA
agggtcgttcaatgagaaacccactcatagacctggcagatggggctggaagtaccccactggcgacagtgttccagcccgcgtggctgcctgtcccccactctgggggaaagccgatgttaagacagggtgtgaagagccgcgtttgctaactgtgagtcctccggcccctgaatgcggctaatcttaccccacagctattgcatggaaaccaccatgtggatagtcgtaatgggcaactgtgggacggaaccgactactttgggtgtccgtgtttccttttattccatttattatctcatggtgacaacgtataagagttatatgttgtttacc

SEQ ID NO: 22196 - DNA, 464 bp, synthetic construct
  source 1..464: mol_type = other DNA
ctaaggtcaagcacttctgtttccccggttgacgttgatatgctccaacagggcaaaaacaactgatatcgttatccgcaaagtgcctacacagagcttagtaggattctgaaagatctttggttggtcgctcagctgcatacccagcagtagaccttgcagatgaggctggacattccccactggtaacagtggtccagcctgcgtggctgcctgcacacctcttatgaggtgtgaagccaaggattggacagggtgtgaagagccgcgtgtgctcactttgagtcctccggcccctgaatgcggctaaccttaaacctgcagccatggctcataaaccaatgagtttgtggtcgtaatgagtaattgcgggatgggaccgactactttgggtgtccgtgtttcactttttcctttattaattgcttatggtgacaatatatacatagatatatattggcatc

SEQ ID NO: 22197 - DNA, 308 bp, synthetic construct; identical to SEQ ID NO: 296
  source 1..308: mol_type = other DNA

SEQ ID NO: 22198 - DNA, 610 bp, synthetic construct
  source 1..610: mol_type = other DNA
ataggcggctcagtatgccaactgggtcatgaccaagcacttctgtctccccggactgagtatcaataagctgctcacgtggctgaaggagaaaacgttcgttatccggccaattacttcgagaagcttagtaccaccatggaggttgcgcagtgtttcgttccgcacaaccccagtgtagatcaggtcgatgagtcaccgcactcctcacgggcgactgtggcggtggctgcgctggcggcctgcccatggggcaccccatgggacgcttcaatactgacatggtgcgaagagcctattgagctaattggtaatcctccggcccctgaatgcggctaatcctaactgcggagcagataccctcgagccagtgggcagtctgtcgtaatgggcaactctgcagcggaaccgactactttgggtgtccgtgtttccttttattcctatattggctgcttatggtgacaattgagagattgttaccatatagctattggattggccatccagtgacaaacagagcgattatctacttatttgttggctttgtaccattaaatcttagagtccttaagaccctcaacttgattatacaatttaactctgcgaa

SEQ ID NO: 22199 - DNA, 680 bp, synthetic construct
  source 1..680: mol_type = other DNA
cggtaactttgtgcgcctgttttatctaccccctccccaatgtaacgtagaagcacgagccaagtggtcaataggtggcccagtaaaccaactgggcttagaccaagcactcctgttaccccggactgagtatcaataggctgctcacgcggctgaaggagaaaacgttcgttacccggccaactacttcgagaagcccagtaccaccatgaaggatgcgcagtgtttcgttcagcacaaccccagtgtagatcaggccgatgagtcaccgcaatccccacgggtgaccgtggcggtggctgcgctggcggcctgcccatggggcaacccgtgggacgcttcaatttcgacatggtgcgaagagtctattgagctagttggtagtcctccggcccctgaatgcggctaatcccaactgcggagcagacacccacgaaccagtgggcagtttgtcgtaatgggtaactctgcagcggaaccgactactttgggtgtccgtgtttccttttattcctacattggctgcttatggtgacaattgacagattgttaccatatagctattggattggccatccggtaacaaacagagctattatttatctttttgttggcttcgtgccgttgaatttcaaagttataacaactataaacttcatcttgacactcaatacagcaaa

SEQ ID NO: 22200 - DNA, 305 bp, synthetic construct
  source 1..305: mol_type = other DNA
ttgacctggcagatggggctagacataccccaccagcgatggtggtctagcccgcgtggctgcctgcacaccctatgggtgtgaagccagaaagtggacagggtgtgaagaacctattgtgctcactttgagtcctccggcccctgaatgtggctaatcctaaccctgcagccgttgcgcacaatccagtgtgtatgcggtcgtaatgagcaattgcgggatggaaccaactactttgggtgtccgtgtttcttgttattcctttatttgcttatggtgacactgtatagatatacattgtcatc

SEQ ID NO: 22201 - DNA, 321 bp, synthetic construct; identical to SEQ ID NO: 306
  source 1..321: mol_type = other DNA

SEQ ID NO: 22202 - DNA, 560 bp, synthetic construct; identical to SEQ ID NO: 609
  source 1..560: mol_type = other DNA

SEQ ID NO: 22203 - DNA, 620 bp, synthetic construct
  source 1..620: mol_type = other DNA
caagcggtcaatagatggctcagtgaaccaactgggcttggaccaagcacttctgttaccccggactgagtatcaataggctgctcacgcggctgaaggagaaaacgttcgttacccggccgactacttcgagaaacccagtaccaccatgaaggatgcgcagtgtttcgttcagcacaaccccagtgtagatcaggccgatgagtcaccgcaatccccacgggtgaccgtggcggtggctgcgctggcggcctgcccatggggcaacccatgggacgcttcaatttcgacatggtgcgaagagtctattgagctagttggtagtcctccggcccctgaatgcggctaatcccaactgcggagcagacacccacaaaccagtgggcagtttgtcgtaatgggtaactctgcagcggaaccgactactttgggtgtccgtgtttccttttattcctacattggctgcttatggtgacaattgatagattgttaccatatagctattggattggccatccggtaacaaacagagctattatttatctttttgttggcttcgtaccgttaaatttcaaggttataacaactataaacttcattttgacactcaatacagcaaa

SEQ ID NO: 22204 - DNA, 698 bp, synthetic construct
  source 1..698: mol_type = other DNA
ttaaaacagccttggggttgttcccactccaagggcccacgtggcggctagtactctggtacttcggtacctttgtacgcctgttttatctcccttcccaatgtaacttagaagctcttaaatcaatgctcaataggtggggcgcaaaccagcgctctcatgagcaagcactcctgtctccccggtgaggttgtataaactgttcccacggttgaaaacaacctatccgttatccgctatagtacttcgagaaacctagtaccacctttggattgttgacgcgttgcgctcagcacactaacccgtgtgtagcttgggtcgatgagtctggacatacctcactggcgacagtggtccaggctgcgttggcggcctactcatggtgaaaaccatgagacgctagacatgaacaaggtgtgaagagtctattgagctactatagagtcctccggcccctgaatgcggctaatcctaaccatggagcaagtgctcacaggccagtgagttgcttgtcgtaatgcgcaagtccgtggcggaaccgactactttgggtgtccgtgtttcactttttacttttatgactgcttatggtgacaatttgatattgttaccatttagcttgtcaaatcaattgcaaaagatcctaaatcttatttatcaacttgcatcttgataactttgatttgaaaattttaaca

SEQ ID NO: 22205 - DNA, 422 bp, synthetic construct
  source 1..422: mol_type = other DNA
gtatacgcttcaccagaggcgaaaaacgaggttatcgttatccgcaaagtgcctacgagaagcctagtagcactctcgaaacctatggctggtcgctcagctgcttgcccagcagtagacctggcagatgaggctagacattccccaccagcgatggtggtctagcctgcgtggctgcctgcacacccaatcgggtgtgaagccagaaagtggacaaggtgtgaagagcctattgtgctcactttgagtcctccggcccctgaatgtggctaatcctaaccccgtagctgttgcatgcaacccagcatgtatgcagtcgtaatgggcaactatgggatggaaccaactactttgggtgtccgtgtttcttgttttacttttcattgcttatggtgacaattgtagttgatacacttgttacc

SEQ ID NO: 22206 - DNA, 534 bp, synthetic construct
  source 1..534: mol_type = other DNA
caagcacttctgtttccccggtgtggttgtataaactgttcccacggttgaaaacaacctatccgttatccgctatagtacttcgagaaacctagtatcacctttggattgttgacgcgttgcgctcagcacactaacccgtgtgtagcttgggtcgatgagtctggacgtaccccactggcgacagtggtccaggctgcgttggcggcctactcatggtgaaaaccatgagacgctagacatgaacaaggtgtgaagagtctattgagctactatagagtcctccggcccctgaatgcggctaatcctaaccatggagcaagtgctcacaggccagtgagttgcttgtcgtaatgcgcaagtccgtggcggaaccgactactttgggtgtccgtgtttcactttttacttttatgactgcttatggtgacaatttgatattgttaccatttagcttgtcaaattaattgcaaaagatcctaaatcttatttgccaacttgcattttaataaccttgatttgaaaattttaata

SEQ ID NO: 22207 - DNA, 534 bp, synthetic construct; identical to SEQ ID NO: 573
  source 1..534: mol_type = other DNA

SEQ ID NO: 22208 - DNA, 694 bp, synthetic construct
  source 1..694: mol_type = other DNA
gcacactggtatcaaggtacctttgtgcgcctgttttatagccccttccccgaatgtaacgtagaagctgaacccaagcggtcaacaggcggctcagaacaccatctgggtcttgaccaagcacttctgttaccccggactgagtatcaataagctgctcacgcggctgaaggagaaaatgttcgttatccggccaattacttcgagaaacctagtaccaccatgaaggttgcgcagtgtttcgctccgcacaatcccagtgtagatcaggtcgatgagtcaccgcattcctcacgggcgaccgtggcggtggctgcgctggcggcctgcccatggggcaacccatgggacgcttcaatactgacatggtgcgaagagtcaattgagctaattggtagtcctccggcccctgaatgcggctaatcctaactgcggagcagatgcccaagctccagtgggtagtctgtcgtaacgggtaactctgcagcggaaccgactactttgggtgtccgtgtttccttttattcttacattggctgcttatggtgacaattgagagattgttaccatatagctattggattggccatccggtgacgaatagagcaattgtgtatctttttgttggattcataccactagacaatacaaacttcaaaaccttgtgttacatcattagattaaacacagcaag

SEQ ID NO: 22209 - DNA, 525 bp, synthetic construct
  source 1..525: mol_type = other DNA
ctgtttccccggtgtggttgtataaactgttcccacggttgaaaacaacctatccgttatccgctatagtacttcgagaaacctagtatcacctttggattgttgacgcgttgcgctcagcacactaacccgtgtgtagcttgggtcgatgagtctggacgtaccccactggcgacagtggtccaggctgcgttggcggcctactcatggtgaaaaccatgagacgctagacatgaacaaggtgtgaagagtctattgagctactatagagtcctccggcccctgaatgcggctaatcctaaccatggagcaagtgctcacaggccagtgagttgcttgtcgtaatgcgcaagtccgtggcggaaccgactactttgggtgtccgtgtttcactttttacttttatgactgcttatggtgacaatttgatattgttaccatttagcttgtcaaattaattgcaaaagatcctaaatcttatttaccaacttgcattttaataaccttgatttgaaaattttaata

SEQ ID NO: 22210 - DNA, 721 bp, synthetic construct
  source 1..721: mol_type = other DNA
cccacccacaaggcccaccgggcgttggcacactggtatcacggtacctttgtgcgcctgttttaaaacccctacccccaagcgcaacttagaagataagcacacagtccaatagagggcgtggcactccagccatgtcttggacaggcactcctgttaccccggactaagtaccaataaactgctcacgcggttgaaggggaaaacgttcgttatccggctaactacttcgaggaacctagtaacaccgtgaaagttgcagagtgtttcgctcagcacaaccccagtgtagatcaggtcgatgagtcaccacgttccccacgggcgaccgtggtggtggctgcgctggcggcctgcctatgggtcaacccataggacgctctaacatagacacggtgtgaagagtcgattgagctagttagtagtcctccggcccctgaatgcggctaatcctaactgcggagcgtgcgtccccaaaccaggagatagcgcgtcgtaacgggcaactctgcagcggaaccgactactttgggtgtccgtgtttcctttttacctctatttggctgcttatggtgacaattgaagaattgttaccatatagctattggattggccatccggtgaccaatagagctattatttacctctttgttggttttgtaccactgaaccacatagttctaaataccctaaatttgattttagtgctcaacacatcaaa

SEQ ID NO: 22211 - DNA, 557 bp, synthetic construct
  source 1..557: mol_type = other DNA
ctattattccggtaattttgtacaccagttttatatccccacccccatgtaacttagaagttgagcacaacgaccaataggaggcaattaaccaaattgctaaaggtcaagcacttctgtttccccggtcaagattgatacgctccaccagggcgaaaacagttgagatcgttatccgcaaagtgcctacgcgaagcctagtaacattttgaagagtttatggttggtcgctccgctattccccatagtagacctggcagatgaggctagaaattccccactggcgacagtgttctagcctgcgtggctgcctgcacacccttatgggtgtgaagccatatacttgacaaggtgtgaagagcctagtgtgctcactttgagtcctccggcccctgaatgtggctaaccttaaacccgtagctagtgcacacaatccagtgtgtggctagtcgtaatgagcaattacgggatgggaccaactactttgggtgtccgtgtttcactttttccttttatacttgcttatggtgacaatatatagactatatattggcacc

SEQ ID NO: 22212 - DNA, 689 bp, synthetic construct
  source 1..689: mol_type = other DNA
gccttggggttgttcccactccaagggcccacgtggcggctagtactctggtacttcggtacctttgtacgcctgttttatctcccttcccaatgtaatttagaagcttttaaatcaaggctcaataggtggggcgcaaaccagcgctctcatgagcaagcactcctgtctccccggtgtggttgtataaactgttcccacggttgaaaacaacctatccgttatccgctatagtacttcgaaaaacctagtatcacctttggattgttgacgcgttgcgctcagcacactaacccgtgtgtagcttgggtcgatgagtctggacataccccactggcgacagtggtccaggctgcgttggcggcctactcatggtgaaaaccatgagacgctagacatgaacaaggtgtgaagagtctattgagctactatagagtcctccggcccctgaatgcggctaatcctaaccatggagcaagtgcccacaggccagtgagttgcttgtcgtaatgcgcaagtccgtggcggaaccgactactttgggtgtccgtgtttcactttttacttttatgactgcttatggtgacaatttgatattgttaccatttagctgtcaaattaattgcaaaagatcctaagtcttacttaccaatttgcattttgataaccttgatttgaaaattttaata

SEQ ID NO: 22213 - DNA, 689 bp, synthetic construct
  source 1..689: mol_type = other DNA
gccttggggttgttcccactccaagggcccacgtggcggctagtactctggtacttcggtacctttgtacgcctgttttatcccccttcccaatgtaatttagaagcttttaaatcaaggctcaataggtggggcgcaaaccagcgctctcatgagcaagcactcctgtctccccggtgtggttgtataaactgttcccacggttgaaaacaacctatccgttatccgctatagtacttcgagaaacctagtatcacctttggattgttgatgcgttgcgctcagcacactaacccgtgtgtagcttgggtcgatgagtctggacataccccactggcgacagtggtccaggctgcgttggcggcctactcatggtgaaaaccatgagacgctagacatgaacaaggtgtgaagagtctattgagctactatagagtcctccggcccctgaatgcggctaatcctaaccatggagcaagtgctcgcaggccagtgagttgcttgtcgtaatgcgcaagtccgtggcggaaccgactactttgggtgtccgtgtttcactttttacttttatgactgcttatggtgacaatttgatattgttaccatttagctgtcaaattaattgcaaaagatcctaagtcttacttaccaatttgcattttgataaccttgatttgaaaattttaata

SEQ ID NO: 22214 - DNA, 693 bp, synthetic construct
  source 1..693: mol_type = other DNA
cagccttggggttgttcccactccaagggcccacgtggcggctagtactctggtacctcggtacctttgtacgcctgttttatctcccttcccaatgtaatttagaagctcttaaatcaaggctcaataggtggggcgcaaaccagcgctctcatgagcaagcactcctgtctccccggtgtggttgtataaactgttcccacggttgaaaacaacctatccgttatccggtatagtacttcgagaaacctagtatcacctttggattgttgacgcgttgcgctcagcacactaacccgtgtgtagcttgggtcgatgagtctggacataccccactggcaacagtggtccaggctgcgttggcggcctactcatggtgaaaaccatgagacgctagacatgaacaaggtgtgaagagtctattgagctactatacagtcctccggcccctgaatgcggctaatcctaaccatggagcaagtgctcacaggccagtgagttgcttgtcgtaatgcgcaagttcgtggcggaaccgactactttgggtgtccgtgtttcactttttacttttatgactgcttatggtgacaatttgatattgttaccatttagcttgtcaaattaattacaaaagatcctaaatcttacttaccaacttgcattttgacaaccttgatttgaaaatttttaata

SEQ ID NO: 22215 - DNA, 697 bp, synthetic construct
  source 1..697: mol_type = other DNA
ttaaaacagccttggggttgttcccactccaagggcccacgtggcggctagtactctggtacttcggtacctttgtacgcctgttttatctcccttcccaatgtaatttagaagcttttaaatcaaggctcaataggtggggcgcaaaccagcgctctcatgagcaagcactcctgtctccccggtgtggttgtataaactgttcccacggttgaaaacaacctatccgttatccgctatagtacttcgagaaacctagtatcacctttggattgttgacgcgttgcgctcagcacactaacccgtgtgtagcttgggtcgatgagtctggacatgccccactggcgacagtggtccaggctgcgttggcggcctactcatggtgaaaaccatgagacgctagacatgaacaaggtgtgaagagtctattgagctactatagagtcctccggcccctgaatgcggctaatcctaaccatggagcaagtgctcacaggccagtgagttgcttgtcgtaatgcgcaagtccgtggcggaaccgactactttgggtgtccgtgtttcactttttacttttatgactgcttatggtgacaatttgatattgttaccatttagctgtcaaattaattgcaaaagatcctaagtcttacttaccaatttgcattttgataaccttgatttgaaaactttaata

SEQ ID NO: 22216 - DNA, 689 bp, synthetic construct
  source 1..689: mol_type = other DNA
gccttggggttgttcccactccaagggcccacgtggcggctagtactctggtacttcggtacctttgtacgcctgttttatctcccttcccaatgtaatttagaagctttcaaatcaaggctcaataggtggggcgcaaaccagcgctctcatgagcaagcactcctgtctccccggtgtggttgtataaactgttcccacggttgaaaacaacctatccgttatccgctatagtacttcgagaaacctagtatcacctttggattgttgacgcgttgcgctcagcacactaacccgtgtgtagcttgggtcgatgagtctggacataccccactggcgacagtggtccaggctgcgttggcggcctactcatggtgaaaaccatgagacgctagacatgaacaaggtgtgaagagtctattgagctactatagagtcctccggcccctgaatgcggctaatcctaaccatggagcgagtgctcacaggccagtgagttgcttgtcgtaatgcgcaagtccgtggcggaaccgactactttgggtgtccgtgtttcactttttacttttatgactgcttatggtgacaatttgatattgttaccatttagctgtcaaattaattgcaaaagatcctaagttttacttaccaatttgcattttgataaccttgatttgaaaactttaata

SEQ ID NO: 22217 - DNA, 693 bp, synthetic construct
  source 1..693: mol_type = other DNA
aacagccttggggttgttcccactccaagggcccacgtggcggctagtactctggtacttcggtacctttgtacgcctgttttatctcccttccccatgtaatttagaagcttttaaatcaaggctcaataggtggggcgcaaaccagcgctctcatgagcaaacactcctgtctccccggtgtggttgtataaactgttcccacggttgaaaacaacctatccgttatccgctatagtacttcgagaaacctagtatcacctttggattgttgacgcgttgcgctcagcacactaacccgtgtgtagcttgggtcgatgagtctggacataccccactggcgacagtggtccaggctgcgttggcggcctactcatggtgaaaaccatgagacgctagacatgaacaaggtgtgaagagtctattgagctactatagagtcctccggcccctgaatgcggctaatcctaaccatggagcaagtgctcacaggccagtgagttgcttgtcgtaatgcgcaagtccgtggcggaaccgactactttgggtgtccgtgtttcactttttacttttatgactgcttatggtgacaatttgatattgttaccatttagctgtcaaattaattgcaaaagatcctaagtcttacttaccaatttgcattttgataaccttgatttgaaaattttaata

SEQ ID NO: 22218 - DNA, 689 bp, synthetic construct
  source 1..689: mol_type = other DNA
gccttggggttgttcccactccaagggcccacgtggcggctagtactctggtacttcggtacctttgtacgcctgttttatctcccttcccaatgtaatttagaagcttttaaatcaaggctcaataggtggggcgcaaaccagcgctctcgtgagcaagcactcctgtctccccggtgtggttgtataaactgttcccacggttgaaaacaacctatccgttatccgctatagtacttcgagaaacctagtatcacctttggattgttgacgcgttgcgctcagcacactaacccgtgtgtagcttgggtcgatgagtctggacataccccactggtgacagtggtccaggctgcgttggcggcctactcatggtgaaaaccatgagacgctagacatgaacaaggtgtgaagagtctattgagctactatagagtcctccggcccctgaatgcggctaatcctaaccatggagcaagtgctcacaggccagtgagttgcttgtcgtaatgcgcaagtccgtggcggaaccgactactttgggtgtccgtgtttcactttttacttttacgactgcttatggtgacaatttgatattgttaccatttagctgtcaaattaattgcaaaagatcctaagtcttacttatcaatttgcattttgataaccttgatttgaaaattttaata

SEQ ID NO: 22219 - DNA, 689 bp, synthetic construct
  source 1..689: mol_type = other DNA
gccttggggttgttcccactccaagggcccacgtggcggctagtactctggtacttcggtacctttgtacgcctgttttatctcccttcccaatgtaatttagaagcttttacatcaaggctcaataggtggggcgcaaaccagcgctctcatgagcaagcactcctgtctccccggtgtggttgtataaactgttcccacggttgaaaacaacctatccgttatccgctatagtacttcgagaaacctagtatcacctttggattgttgacgcgttgcgctcagcacactaacccgtgtgtagcttgggtcgatgagtctggacataccccactggcgacagtggtccaggctgcgttggcggcctactcatggtgaaaaccatgagacgctagacatgaacaaggtgtgaagagtctattgagctactatagagtcctccggcccctgaatgcggctaatcctaaccatggagcaagtgctcacaggccagtgagttgcttgtcgtaatgcgcaagtccgtggcggaaccgactactttgggtgtccgtgtttcactttttacttttatgactgcttatggtgacaatttgatattgttaccatttagctgtcaaattaattgcaaaagatcctaagtcttacttaccaatttgcattttgataaccttgatttgaaaattttaata

SEQ ID NO: 22220 - DNA, 689 bp, synthetic construct
  source 1..689: mol_type = other DNA
gccttggggttgttcccactccaagggcccacgtggcggctagtactctggtacttcggtacctttgtacgcctgttttatctcccttcccagtgtaatttagaagcttttaaatcaaggctcaataggtggggcgcaaaccagcgctctcatgagcaagcactcctgtctccccggtgtggttgtataaactgttcccacggttgaaaacaacctatccgttatccgctatagtacttcgagaaacctagtatcacctttggattgttgacgcgttgcgctcagcacactaacccgtgtgtagcttgggtcgatgagtctggacacaccccactggcgacagtggtccaggctgcgttggcggcctactcatggtgaaaaccatgagacgctagacatgaacaaggtgtgaagagtctattgagctactatagagtcctccggcccctgaatgcggctaatcctaaccatggagcaagtgctcacaggccagtgagttgcttgtcgtaatgcgcaagtccgtggcggaaccgactactttgggtgtccgtgtttcactttttacttttatgactgcttatggtgacaatttgatattgttaccatttagctgtcaaattaattgcaaaagatcctaagtcttacttaccaatttgcattttgataaccttgatttgaaaattttaata

SEQ ID NO: 22221 - DNA, 689 bp, synthetic construct
  source 1..689: mol_type = other DNA
gccttggggttgttcccactccaagggcccacgtggcggctagtactctggtacttcggtacctttgtacgcctgttttatctcccttcccaatgtaatttagaagcttttaaatcaaggctcaataggtggggcgcaaaccagcgctctcatgagcaagcactcctgtctccccggtgtggttgtataaactgttcccacggttgaaaacaacctatccgttatccgctatagtacttcgagaaacctagtatcacctttggattgttgacgcgttgcgctcagcacactaacccgtgtgtagcttgggtcgatgagtctggacataccccactggcgacagtggtccaggctgcgttggcggcctactcatggtgaaaaccatgagacgctagacatgaacaaggtgtgaagagtctattgagctactatagagtcctccggcccctgaatgcggctaatcctaaccatggagcaagtgctcacaggccagtgagttgcttgtcgtaatgcgcaagttcgtggcggaaccgactactttgggtgtccgtgtttcactttttacttttatgactgcttatggtgacaatttgatattgttaccatttagctgtcaaattaattgcaaaagatcctaagtcttacttaccaatttgcattttgataaccttgatttgaaaattttaata

SEQ ID NO: 22222 - DNA, 498 bp, synthetic construct
  source 1..498: mol_type = other DNA
aattacttcgagaaacccagtaccaccatgaaggttgcgcagcgtttcgctccgcacaaccccagtgtagatcaggtcgatgggtcaccgcatccctcacgggcgaccgtggcggtggccgcgttggcggcctgcccatggggtatcccatgggacgcttcaatactgacatggtgcgaagagtctattgagctaattggtagtcctccggcccctgaatgcggctaatcctaactgcggagcagatacccacataccagtgggcagtctgtcgtaatgggcaactctgcagcggaaccgactactttgggtgtccgtgtttctttttattcctatttggctgcttatggtgacaattgaagaattgttaccatatagctattggattggccatccggtgaccaatagagctattgtttacctctttgttggttttgtaccactgaaccacatagttctaaataccctaaatttgattttagtgctcaacacatcaaa

SEQ ID NO: 22223 - DNA, 676 bp, synthetic construct
  source 1..676: mol_type = other DNA
tcccactccaagggcccacgtggcggctagtactctggtacttcggtacctttgtacgcctgttttatctcccttcccaatgtaatttagaagcttttaaatcaaggctcaataggtggggcgcaaaccagcgctctcatgagcaagcactcctgtctccccggtgtggttgtataaactgttcccacggttgaaaacaacctatccgttatccgctatagtacttcgagaaacctagtatcacctttggattgttgacgcgttgcgctcagcacactaacccgtgtgtagcttgggtcgatgagtctggacataccccactggcgacagtggtccaggctgcgttggcggcctactcatggtgaaaaccatgagacgctagacatgaacaaggtgtgaagagtctattgagctactatagagtcctccggcccctgaatgcggctaatcctaaccatggagcaagtgctcacaggccagtgagttgcttgtcgtaatgcgcaagtccgtggcggaaccgactactttgggtgtccgtgtttcactttttacttttatgactgcttatggtgacaatttgatattgttaccatttagctgtcaaattaattgcaaaagatcctaagtcttacttaccaatttgcattttgataaccttgatttgaaaactttaata

SEQ ID NO: 22224 - DNA, 689 bp, synthetic construct
  source 1..689: mol_type = other DNA
gccttggggttgttcccactccaagggcccacgtggcggctagtactctggtacttcggtacctttgtacgcctgttttatctcccttcccaatgtaatttagaagcttttaaatcaaggctcaataggtggggcgcaaaccagcgctctcatgagcaagcactcctgtctccccggtgtggttgtataaactgttcccacggttgaaaacaacctatccgttatccgctatagtacttcgagaaacctagtatcacctttggattgttgacgcgttgcgctcagcacactaacccgtgtgtagcttgggtcgatgagtctggacacaccccactggcgacagtggtccaggctgcgttggcggcctactcatggtgaaaaccatgagacgctagacatgaacaaggtgtgaagagtctattgagctactatagagtcctccggcccctgaatgcggctaatcctaaccatggagcgagtgctcacaggccagtgagttgcttgtcgtaatgcgcaagtccgtggcggaaccgactactttgggtgtccgtgtttcactttttacttttatgactgcttatggtgacaatttgatattgttaccatttagctgtcaaattaattgcaaaagatcctaagttttacttaccaatttgcattttgataaccttgatttgaaaactttaata

SEQ ID NO: 22225 - DNA, 689 bp, synthetic construct
  source 1..689: mol_type = other DNA
gccttggggttgttcccactccaagggcccacgtggcggctagtactctggtacttcggtacctttgtacgcctgttttatctcccttcccaatgtaatttagaagcttttaaatcaaggctcaataggtggggcgcaaaccagcgctctcatgagcaagcactcctgtctccccggtgtggctgtataaactgttcccacggttgaaaacaacctatccgttatccgctatagtacttcgagaaacctagtatcacctttggattgttgacgcgttgcgctcagcacactaacccgtgtgtagcttgggtcgatgagtctggacataccccactggcgacagtggtccaggctgcgttggcggcctactcatggtgaaaaccatgagacgctagacatgaacaaggtgtgaagagtctattgagctactatagagtcctccggcccctgaatgcggctaatcctaaccatggagcaagtgctcacaggccagtgagttgcttgtcgtaatgcgcaagtccgtggcggaaccgactactttgggtgtccgtgtttcactttttacttttatgactgcttatggtgacaatttgatattgttaccatttagctgtcaaattaattgcaaaagatcctaagttttacttaccaatttgcattttgataaccttgatttgaaaactttaata

SEQ ID NO: 22226 - DNA, 678 bp, synthetic construct
  source 1..678: mol_type = other DNA
gttcccactccaagggcccacgtggcggctagtactctggtacttcggtacctttgtacgcctgttttatctcccttcccaacgtaacttagaagctcttaaatcaaggctcaataggtggagtgcaaaccagcactcttatgagcaagtactcctgtttccccggtgcggttatataaactgttcccacggttgaaagtaacctatccgttatccgctatagtacttcgagaaacctagtaccacctttggattgttgacgcgttgcgctcagcacactaacccgtgtgtagcttgggtcgatgagtctggacataccccactggcgacagtggtccaggctgcgttggcggcctactcatggtgaaaaccatgagacgctagacatgaacaaggtgtgaagagtctattgagctactatagagtcctccggcccctgaatgcggctaatcctaaccatggagcaagtgctcacagaccagtgagttgcttgtcgtaatgcgcaagtccgtggcggaaccgactactttgggtgtccgtgtttcactttttacccttatgactgcttatggtgacaatttgatattgttaccatttagcttgtcaaatcaattgcgaaagatcctaaatcttatttgtcaacttgcattttgataactctaatttgaagatttaata

SEQ ID NO: 22227 - DNA, 549 bp, synthetic construct
  source 1..549: mol_type = other DNA
gctcaataggctgctcacgcggctgaaggagaaaacgttcgttacccggccaactacttcgagaagcccagtaccaccatgaaggttgcgcagcgtttcgctccgcacaaccccagtgtagatcaggtcgatgggtcaccgcatccctcacgggcgaccgtggcggtggccgcgttggcggcctgcccatggggtatcccatgggacgcttcaatactgacatggtgcgaagagtctattgagctaattggtagtcctccggcccctgaatgcggctaatcctaactgcggagcagatacccacataccagtgggcagtctgtcgtaatgggcaactctgcagcggaaccgactactttgggtgtccgtgtttctttttattcctatttggctgcttatggtgacaattgaagaattgttaccatatagctattggattggccatccggtgaccaatagagctattgtttacctctttgttggttttgtaccactgaaccacatagttctaaataccctaaatttgattttagtgctcaacacatcaaa

SEQ ID NO: 22228 - DNA, 564 bp, synthetic construct; identical to SEQ ID NO: 611
  source 1..564: mol_type = other DNA

SEQ ID NO: 22229 - DNA, 461 bp, synthetic construct
  source 1..461: mol_type = other DNA
gtatagggcaagcacttctgttaccccggatgtgtgaatagacttcttacgaggttgaagctgaagcattcgttatccgcacttgtactgcgcggaaattagtagcacctttgccagcttcatggcgtttcgctcagcgtttcccccacgtagatcagggcaatggggctacacaacccccactggcgacggtggtgtagcccgcgtggtgccccgcccgagctatcagctcgggacgccatgatgaagacagggtgtgaaggttcgagtgcgctacaagtgagtcctccggcccctgaatgcggctaaccttaaccccgtagctgtggtatgcatgccagcataaacacagtcgtaatgggtaactacgggatgggaccgactactttgggtgtccgtgtttcactttttcttttaaatttgtcttatggttacaggtttatgtaaatagatctgtaatc

SEQ ID NO: 22230 - DNA, 565 bp, synthetic construct; identical to SEQ ID NO: 613
  source 1..565: mol_type = other DNA

SEQ ID NO: 22231 - DNA, 565 bp, synthetic construct; identical to SEQ ID NO: 614
  source 1..565: mol_type = other DNA

SEQ ID NO: 22232 - DNA, 552 bp, synthetic construct
  source 1..552: mol_type = other DNA
actgctcacgcggttgaaagcgatcgatccgttacccgctcgcgtacttcgagaagcctagtatcaccttggaatcttcgatgcgttgcgctcagcgctcgaccccggggcgtagcttaggctgatgagtctggacgttcctcaccggtgacggtggtccaggctgcgttggcggcctacctgtggctaatgccataggacgctagatgtgaacaaggtgtgaagagcctattgagctacacgagagtcctccggcccctgaatgcggctaatcctaaccacggagcaagcggtcacaaaccagtggctggcttgtcgtaatgcgcaagtctgtggcggaaccgactactttgggtgtccgtgtttcctgttatttttatcatggctgcttatggtgacaatctgtgattgttatcataaagcaatttggattggccatccggtgagtgtcgtatcgaatacttgactatttgccaggactactatattatattcatttcatatttgagaaatcagttaaaaacagtaggaagataaaacaataataccaca

SEQ ID NO: 22233 - DNA, 552 bp, synthetic construct
  source 1..552: mol_type = other DNA
actgctcacgcggttgaaagcgatcgatccgttatccgctcgcgtacttcgagaagcctagtatcaccttggaatcttcgatgcgttgcgctcagcgctcgaccccggggcgtagcttaggctgatgagtctggacgttcctcaccggtgacggtggtccaggctgcgttggcggcctacctgtggctaatgccataggacgctagatgtgaacaaggtgtgaagagcctattgagctacacgagagtcctccggcccctgaatgcggctaatcctaaccacggagcaagcggtcacaaaccagtgactggcttgtcgtaatgcgcaagtctgtggcggaaccgactactttgggtgtccgtgtttcctgttatttttatcatggctgcttatggtgacaatctgtgattgttatcataaagcaatttggattggccatccggtgagtgttgtatcgaatacttgactatttgccaggactactatattatattcatttcacatttgagaaatcagtcaaaaacagtaggaagataaaacaataataccaca

SEQ ID NO: 22234 - DNA, 742 bp, synthetic construct; identical to SEQ ID NO: 1022
  source 1..742: mol_type = other DNA

SEQ ID NO: 22235 - DNA, 744 bp, synthetic construct
  source 1..744: mol_type = other DNA
ttaaaacagcctgtgggttgttcccacccacagggcccactgggcgccagcacactggtatcacggtacctttgtgcgcctgttttatccacccccacccccagtgtaacttagaagcacgtttcacacggtcaataggtgactcagcatgccagctgagttttgaccaagcacttctgttaccccggaccgagtatcaataagctactcacgtggctgaaggagaaagcgttcgttatccggccaattacttcgagaaacctagtatcaccatgaaggttgcgtggcgtttcgctccgcacaaccccagtgtagatcaggtcgatgagtcaccgcgtccctcacgggcgaccgtggcggtggctgcgctggcggcctgcccatggggcaacccatgggacgcttcaatactgacatggtgtgaagagtctattgagctaattggtagtcctccggcccctgaatgcggctaatcctaactgcggagcagatacccacacgccagtgggcagtctgtcgtaatgggcaactctgcagcggaaccgactactttgggtgtccgtgtttccttttattcttatattggctgcttatggtgacaattaaaagattgttaccatatagctattggattggccatccagtgtctaatagagcgatcatttacctttttgttgggtttgttccactcaactataaagcactcacaacgctcgaatatattataaacctcaatacaacaaa

SEQ ID NO: 22236 - DNA, 617 bp, synthetic construct
  source 1..617: mol_type = other DNA
catcggtcaatagcggctcagtataccaactgagtctcgaccaagcacttctgttaccccggaccgagtatcaataagctactcacgtggctgaaggagaaaacgtccgttacccggccaactacttcgagaaacctagtaccaccatgaatgttgcgcggcgtttcgctccgcacaaccccagtgtagatcaggtcgatgagtcaccgcatccctcacgggcaaccgtggcggtggctgcgctggcggcctgcctatggggcaacccataggacgcttcaatacggacatggtgagaagagtctattgagctagttggtagtcctccggcccctgaatgcggctaatcctaactgcagagcagattcccacacgccagtgggtagtctgtcgtaacgggcaactctgcagcggaaccgactactttgggtgtccgtgtttccttttattcttgtactggctgcttatggtgacaattgaaagattgttaccatatagctattggattggccacccagtgtctaatagagcaattatttatctttttgttggatttatcccacttgactataaagcacttgtaacgctcaagtatattatagatctcaacacaacaa

SEQ ID NO: 22237 - DNA, 660 bp, synthetic construct
  source 1..660: mol_type = other DNA
gtactctggtatttcggtacctttgtacgcctgttttatctccctccccaatgtaacttagaagctttcaaatcaaagctcaataggtggagcgcaagccagcgcttccatgagcaagtacttctgtttccccggtgcggttgtatagactgttcccacggttgaaaacaacctatccgttatccgctatagtacttcgagaaacctagtatcacctttggattgtcgatgcgttgcgctcaacacactaacccgtgtgtagcttgggtcgatgagtctggacataccccactggtgacagtggtccaggctgcgttggcggcctactcatggtgaaaaccatgagacgctagacatgaacaaggtgtgaagagtctattgagctactatagagtcctccggcccctgaatgcggctaatcttaaccatggagcaagtgctcacaaaccagtgagttgcttgtcgtaatgcgcaagtccgtggcggaaccgactactttgggtgtccgtgtttcactttttacttttatgactgcttatggtgacaatttaatattgttaccattcagctagtcgaaataatcgcataaagctttaaatcttatctaacagttcacatttggatagtttcattttgaggacttcaaacctacttacaaag

SEQ ID NO: 22238 - DNA, 696 bp, synthetic construct
  source 1..696: mol_type = other DNA
cagcacactggtattgcggtacccttgtgcgcctgttttatgcaccccctccccaaacgtaacctagaagccaaccactgaagaccaaaagcaagcgcagcacaccagctgcgtaccggtcaagcacttctgttgccccggactgagtatcaataggctgctcacgcggctgaaggagaaaacgttcgttacccggccaattacttcgagaaacctagtaccaccatgaaggttgcgcagtgtttcgctccgcacaaacccagtgtagatcaggtcgatgagccaccgcattccccacgggagaccgtggcggtggctgcgctggcggcctgcccatgggccaacccatgggacgcttcaatactgacatggtgcgaagagtctattgagctaattggtagtcctccggcccctgaatgcggctaatcctaactgcggagcagatacccacatgccagtgggcagtctgtcgtaatgggcaactccgcagcggaaccgactactttgggtgaccgtgtttccttttatctcatactggctgcttatggtgacaattgagaaattgttaccatatagctattggattggccatccggtgacaaatagagcaattgtttaccaatttgttggttttgtaccattgaatttcaaagttctaaaaaccctcaacctaatcttatttcttaatacaacaaa

SEQ ID NO: 22239 - DNA, 564 bp, synthetic construct
  source 1..564: mol_type = other DNA
tgacgttgcatagactgctcacgcggttgaaagcgattgatccgttatccgcttgtgtacttcgagaagcctagtatcgccttgggatcttcgacgcgttgcgctcagcacccgaccccggggtgtagcttaggctgatgagtctggacattcctcaccggtgacggtggtccaggctgcgttggcggcctacctatggctaatgccataggacgctagatgtgaacaaggtgtgaagagcctattgagctacacaagagtcctccggcccctgaatgcggctaatcctaaccacggggcaggcggtcgcaaaccagcgattggcttgtcgtaacgcgcaagtctgtggcggaaccgactactttgggtgtccgtgtttcctgttatttttatcatggctgcttatggtgacaatcagagattgttatcataaagcgaattggattggccatccggtgagaattgtgtcaagcgcacaactgtttgttggaatcactgtgttagttttaattctcatttaaccgattaatcaaaactacacgagaacaaaacactagcatcaca

SEQ ID NO: 22240 - DNA, 564 bp, synthetic construct
  source 1..564: mol_type = other DNA
tgacgttgcatagactgctcacgcggttgaaagcgattgatccgttatccgcttgtgtacttcgagaagcctagtatcgccttgggatcttcgacgcgttgcgctcagcacccgaccccggggtgtagcttaggctgatgagtctggacattcctcaccggtgacggtggtccaggctgcgttggcggcctacctatggctaacgccataggacgctagatgtgaacaaggtgtgaagagcctattgagctacacaagagtcctccggcccctgaatgcggctaatcctaaccacggagcaggcggtcgcaaaccagcgactggcttgtcgtaacgcgcaagtctgtggcggaaccgactactttgggtgtccgtgtttcctgttatttttatcatggctgcttatggtgacaatcagagattgttatcataaagcgaattggattggccatccggtgagaattgtgtcaagcgtacaactgtttgttggaatcactgtgttagttttaattctcatttaaccgattaatcaaaactacacgagaacaaaacactagcatcaca

SEQ ID NO: 22241 - DNA, 354 bp, synthetic construct; identical to SEQ ID NO: 334
  source 1..354: mol_type = other DNA

SEQ ID NO: 22242 - DNA, 738 bp, synthetic construct
  source 1..738: mol_type = other DNA
ttaaaacagcctgtgggttgatcccacccacagggcccattggggctagcactctggtatcacggtacctttgtgcgcctgttttatacccctccccaactgtaacttagaagtaacacacaccgatcaacagtcagcgtggcacaccagccacgttttgatcaagcacttctgttaccccggactgagtatcaatagactgctcacgcggttgaaggagaaagcgttcgttatccggccaactacttcgaaaaacctagtaacaccgtgaagttgcagagtgtttcgctcagcactaccccagtgtagatcaggtcgatgagtcaccgcattccccacgggcgaccgtggcggtggctgcgttggcggcctgcccatggggaaacccatgggacgctctaatacagacatggtgcgaagagtctattgagctagttggtagtcctccggcccctgaatgcggctaatcctaactgcggagcacacaccctcaagccagagggcagtgtgtcgtaacgggcaactctgcagcggaaccgactactttgggtgtccgtgtttcattttattcctatactggctgcttatggtgacaattgagagattgttaccatatagctattggattggccatccggtgaccaatagagctattatatatctctttgttgggtttataccacttagcttgaaagaggttaaaacattacaattcattgttaagttgaatacagcaaa

SEQ ID NO: 22243 - DNA, 611 bp, synthetic construct; identical to SEQ ID NO: 679
  source 1..611: mol_type = other DNA

SEQ ID NO: 22244 - DNA, 453 bp, synthetic construct
  source 1..453: mol_type = other DNA
tgcacttctgtttccccggtcgatgaggatatgctttacccaaggcaaaaaccttagagatcgttatccacacactgcctacacagagcctagtaccacttttgatgtaattaggttggtcgctccctgcaaacccagcagtagacctggcagatgaggctggacattccccactggcgacagtggtccagcctgcgtggctgcctgctcaccctattgggtgagaagcctatttattgacaaggtgtgaagagccgcgtgtgctcagtgtgcttcctccggcccctgaatgtggctaaccttaaccctgcagccgctgcccataatccaatgggtctacggtcgtaacgcgtaagtgcgggatgggaccaactactttgggtgtccgtgtttcttatttttcctatatatttgcttatggtgacaatatataattacttgtatattggcacc

SEQ ID NO: 22245 - DNA, 635 bp, synthetic construct
  source 1..635: mol_type = other DNA
tcggtacctttgtacgcctgttttatctcccttcccaatgtaacttagaagttcttaaatcaatgctcaataggtggggcgcaaaccagcgctctcatgagcaagcactcctgtctccccggtgaggttgtataaactgttcccacggttgaaaacaacctatccgttatccgctatagtacttcgagaaacctagtaccacctttggattgttgacgcgttgcgctcagcacactaacccgtgtgtagcttgggtcgatgagtctggacatacctcactggcgacagtggtccaggctgcgttggcggcctactcatggtgaaagccatgagacgctagacatgaacaaggtgtgaagagtctattgagctactatagagtcctccggcccctgaatgcggctaatcctaaccatggagcaagtgctcacaggccagtgagttgcttgtcgtaatgcgcaagtccgtggcggaaccgactactttgggtgtccgtgtttcactttttacttttatgactgcttatggtgacaattcgatattgttaccatttagcttgtcaaatcaattgcaaaagatcctaactcttatttatcaacttgcatcttgataactttaatttgaaaattttaaca

SEQ ID NO: 22246 - DNA, 745 bp, synthetic construct
  source 1..745: mol_type = other DNA
ttaaaacagcctgtgggttgatcccacccacagggcccattgggcgctagcactctggtatcacggtacctttgtgcgcctgttttatatccctttcccccccgcgtaacttagaagttgaacttactcggtcaatagacaactcagtgagccaactgagcaatgaccaagcacttctgtttaccccggaccaagtatcaatagactgctagcgcggttgaaggagaaaacgtccgttacccggccaattacttcgagaaacctagtaccaccatggatgttgcgtagtgtttcgctccgcacaaccccagtgtagatcaggccgatgagccaccgcattccccacgggcgaccgtggcggtggctgcgctggcggcctgcccatggggcaacccatgggacgcttcaatactgacatggtgcgaagagtctattgagctaattggtggtcctccggcccctgaatgcggctaatcctaactgcggagcagatacccacgtgccagtgggcagtctgtcgtaacgggcaactctgcagcggaaccgactactttgggtgtccgtgtttccctttaatcttacattggctgcttatggtgacaattgaaagattgttaccatatagctattggattggccatccagtgacaaatagagcgatcatttatttgttcgttggttttattccattgaacctcaaagttttgaacactctaaactttattatatcactcaacacaacaaa

SEQ ID NO: 22247 - DNA, 821 bp, synthetic construct
  source 1..821: mol_type = other DNA
ttcaaacagcctgggggttgtacccacccccggggcccacgcggcgccagtacactggttcgcttaggacctttgtacgcctgtttttccctcccttaaataaattaagatctctaccaatgtggggagtagtccgactccgcaccgatacgtcgcaccagcagaccggttcgcttagaacccttctgtggattggtatgagttcctttccccccgtaacttagaaatactcaactaaccgaccaataggaacgtggcacccagccatgtaaaggtcaagcacttctgtttccccggccagaaatggtcgttacccgcccttcctactacgagaagcctactaactgttgaaagcggtgaggagttgcgatcagccacaaccccagtggtagctctgagagatggggctcgcaaacacccccgtggtgacacggttgcttgcccgcgtgtgctctcgggtccagtcacatgactgttcactccaatccgccgtaaccagccaagagccgattgtgctaggaaggttttcctccggagccgtgaatgctgctaatcctaacctccgagcgtgtgcgcacaatccagtgttgctacgtcgtaacgcgcaagttgggggcggaacagactactttcggtactccgtgtttccttaattttatttaataaatatatggtgacattgtctgatattgttgaatttgctcgcttgccactgaacattgctctgtattacttggttgcatttcatagaaccactcaactcaccgtcgaaatcgtagactttgcagttttcttgaaccaaatacacaaacagcacgacc

SEQ ID NO: 22248 - DNA, 817 bp, synthetic construct; identical to SEQ ID NO: 1262
  source 1..817: mol_type = other DNA

SEQ ID NO: 22249 - DNA, 741 bp, synthetic construct
  source 1..741: mol_type = other DNA
ttaaaacagcctgtgggttgtacccacccacagggcccactgggcgctagcactctggtattgcggtacctttgtgcgcctgttttacccaccctcccccaacgtaacttagaagcctgacatatacggtcacaagccagcccagtacgccaactgggtaccgaccaagcacttctgttaccccggactgagtatcaataagctgccaaagcggctgaaggaaaaacgttcgttacccggccaattacttcgagaaacccagtaacaccatgaaagttgcgtagcgtttcattcagcacaatcccagtgtagatcaggtcgatgagtcaccgcattccccacaggcgactgtggcggtggctgcgttggcggcctgcccatggggcaacccatgggacgcttcaatactgacatggtgcgaagagtctattgagctaattggtagtcctccggcccctgaatgcggctaatcctaactgcggagcaggcactcgcagaccagcgagcagcttgtcgtaatgggcaactccgcagcggaaccgactactttgggtgtccgtgtttcctatttcctttacactggctgcttatggtgacaattgagaaattgttaccatatagctattggagtggccatccggtgactaacagagcaataatatatttgtttgttggctttgtgccacttaatttgaaggttgttaagacgctcaatctgatactacttctaaataaagcaaa

SEQ ID NO: 22250 - DNA, 816 bp, synthetic construct
  source 1..816: mol_type = other DNA
ttaaaacagcctgggggttgtacccacccccggggcccacgcggcgctagtactctggtacgctagtacctttgtacgcctgtttttccctcccttaaataaattaagattgccactactgaggggagtagtccgactccgctccggtactgccgcaccagtactccggtacgcctagtaccctagtacggagtagatggcaccccccccaccctgaaacttagaagcatgtaactaaccgaccaataggtgcgcgacaaccagttgtgtgacggtcaagcacttctgtttccccggtccgaaaggatcgttacccgcccgacccactacgagaagcccagtaactggccaagtgattgcgaggttgcactcagccacgacccctgtggtagctctggaagatggggctcgcgcctcccccgtggtaacacggtcgcttgcccgcgtgtgcttccgggttcggctatgccgatcaccctctacatcatgtaaccagccaagagcctattgtgctgggacggttttcctccggagccgtgaatgctgctaatcctaacctccgagcgtgtgcgcacaaaccagtgttgctacgtcgtaacgcgtaagttggaggcggaacagactactttcggtactccgtgtttccttataattttatattttattttatggttacactgactgatatttgtgagtttgctcgcctgcccctgaacattgctttgtactaccttatagcatttcataaaaccacccagttcacagttgagcttattgactttgctgtctacctaaacattttacacaagagaaata

SEQ ID NO: 22251 - DNA, 748 bp, synthetic construct
  source 1..748: mol_type = other DNA
ttaaaacagctctggggttgtacccaccccagaggcccacgtggcggctagcactccggtatcacggtacccttgtgcgcctgttttatacccccccacccgcaacttagaagcacgaaaccaagttcaatagaagggggtacaaaccagtaccaccacgaacaagcacttctgtttccccggtgacattgcatagactgctcacgcggttgaaagtgatcgatccgttacccgcttgtgtacttcgaaaagcctagtatcgccttggaatcttcgacgcgttgcgctcagcacccgaccccggggtgtagcttaggctgatgagtctggacattcctcaccggtgacggtggtccaggctgcgttggcggcctacctatggctaacgccataggacgctagatgtgaacaaggtgtgaagagcctattgagctacataagagtcctccggcccctgaatgcggctaatcctaaccacggagcaggcggtcgcgaaccagtgactggcttgtcgtaatgcgcaagtctgtggcggaaccgactactttgggtgtccgtgtttcctattatatttatcatggctgcttatggtgacaatcagagattgttaccataaagcgaattggattggccatccggtgagtgctgtgtcaggtatacaactgtttgttggaaccactgtgttagctttacttctcatttaaccaattgatcaaaaataatacgaggataaaacgacaatactaca

SEQ ID NO: 22252 - DNA, 748 bp, synthetic construct
  source 1..748: mol_type = other DNA
ttaaaacagctctggggttgtacccaccccagaggcccacgtggcggctagcactccggtatcacggtacccttgtgcgcctgttttatgcccccccacccgcaacttagaagcacgaaaccaagttcaatagaagggggtacaaaccagtaccaccacgaacaagcacttctgtttccccggtgacattgcatagactgctcacgcggttgaaagtgatcgatccgttacccgcttgtgtacttcgaaaagcctagtaccgccttggaatcttcgacgcgttgcgctcagcacccgaccccggggtgtagcttaggctgatgagtctggacattcctcaccggtgacggtggtccaggctgcgttggcggcctacctatggctaacgccataggacgctagatgtgaacaaggtgtgaagagcctattgagctacataagagtcctccggcccctgaatgcggctaatcctaaccacggagcaggcggtcgcgaaccagtgactggcttgtcgtaacgcgcaagtctgtggcggaaccgactactttgggtgtccgtgtttcctattatatttatcatggctgcttatggtgacaatcagagattgttaccataaagcgaattggattggccatccggtgagtgctgtgtcaggtatacaactgtttgttggaaccactgtgttagctttacttctcatttaaccaattgatcaaaaataatacgaggataaaacgacaatactaca

SEQ ID NO: 22253 - DNA, 648 bp, synthetic construct
  source 1..648: mol_type = other DNA
cttcccgtaacttagacgcacaaaaccaagttcaatagaagggggtacaaaccagtaccaccacgaacaagcacttctgtttccccggtgatgttgtatagactgcttgcgtggttgaaagcgacggatccgttatccgcttatgtacttcgagaagcccagtaccacctcggaatcttcgatgcgttgcgctcagcactcaaccccagagtgtagcttaggctgatgagtctggacatccctcaccggtgacggtggtccaggctgcgttggcggcctacctatggctaacgccatgggacgctagttgtgaacaaggtgtgaagagcctattgagctacataagaatcctccggcccctgaatgcggctaatcccaaccacggggcaggtggtcacaaaccagtgattggcctgtcgtaacgcgcaagtccgtggcggaaccgactactttgggtgtccgtgtttccttttattttattgtggctgcttatggtgacaatcacagattgttatcataaagcgaattggattggccatccggtgaaagtgagattcattttctatctgtttgctggattcgctccattgagtgtgattactctaagtacaatttcaacagttatttcaatcagacaattgtatcata

SEQ ID NO: 22254 - DNA, 747 bp, synthetic construct
  source 1..747: mol_type = other DNA
ttaaaacagctctggggttgtacccaccccagaggcccacgtggcggctagcactccggtattacggtacccttgtgcgcctgttttatactcccctcccgcaacttagaagcacgaaaccaagttcaatagaagggggtacaaaccagtaccaccacgaacaagcacttctgtttccccggtgacattgcatagactgctcacgcggttgaaagtgatcgatccgttacccgcttgtgtacttcgaaaagcctagtatcgccttggaatcttcgacgcgttgcgctcagcacccgaccccggggtgtagcttaggctgatgagtctggacattcctcaccggtgacggtggtccaggctgcgttggcggcctacctatggctaacgccataggacgctagatgtgaacaaggtgtgaagagcccattgagctacataagagtcctccggcccctgaatgcggctaatcctaaccacggagcaggcggtcgcgaaccagtgactggcttgtcgtaacgcgcaagtctgtggcggaaccgactactttgggtgtccgtgtttcctgttatttttatcatggctgcttatggtgacaatcagagattgttatcataaagcgaattggattggccatccggtgagtgttgtgtcaggtatacaactgtttgttggaaccactgtgttagctttacttctcatttaaccaattaatcaaaaacaatacgaggataaaacaacaatactaca

SEQ ID NO: 22255 - DNA, 747 bp, synthetic construct
  source 1..747: mol_type = other DNA
ttaaaacagctctggggttgtacccaccccagaggcccacgtggcggctagcactccggtatcacggtacccttgtgcgcctgttttataccccccacccgcaacttagaagcacgaaaccaagttcaatagaagggggtacaaaccagtaccaccacgaacaagcacttctgtttccccggtgacattgcatagactgctcacgcggttgaaagtgatcgatccgttacccgcttgtgtacttcgaaaagcctagtatcgccttggaatcttcgacgcgttgcgctcagcacccgaccccggggtgtagcttaggctgatgagtctggacattcctcaccggtgacggtggtccaggctgcgttggcggcctacctatggctaacgccataggacgctagatgtgaacaaggtgtgaagagcctattgagctacataagagtcctccggcccctgaatgcggctaatcctaaccacggagcaggcggtcgcgaaccagtgactggcttgtcgtaacgcgcaagtctgtggcggaaccgactactttgggtgtccgtgtttcctgttatatttatcatggctgcttatggtgacaatcagagattgttatcataaagcgaattggattggccatccggtgagtgctgtgtcaggtatacaactgtttgttggaaccactgtgttagctttacttctcatttaaccaattaatcaaaaacaatacgaggataaaacgacaatactaca

SEQ ID NO: 22256 - DNA, 747 bp, synthetic construct
  source 1..747: mol_type = other DNA
ttaaaacagctctggggttgtacccaccccagaggcccacgtggcggctagcactccggtatcacggtacccttgtgagcctgttttattctccccacccgcaacttagaagcacgaaaccaagttcaatagaagggggtacaaaccagtaccaccacgaacaagcacttctgtttccccggtgacattgcatagactgctcacgcggttgaaagtgatcgatccgttacccgcttgtgtacttcgaaaagcctagtatcgccttggaatcttcgacgcgttgcgctcagcacccgaccccggggtgtagcttaggctgatgagtctggacattcctcaccggtgacggtggtccaggctgcgttggcggcctacctatggctaacgccataggacgctagaagtgaacaaggtgtgaagagcctattgagctacataagagtcctccggcccctgaatgcggctaatcctaaccacggagcaggcggtcgcgaaccagtgactggcttgtcgtaacgcgcaagtctgtggcggaaccgactactttgggtgtccgtgtttcctgttatatttatcatggctgcttatggtgacaatcagagattgttatcataaagcgaattggattggccatccggtgagtgttgtgtcaggtatacaactgtttgttggaaccactgtgttagctttacttctcatttaaccaattaatcaaaaacaatacgaagataaaacgacaataccaca

SEQ ID NO: 22257 - DNA, 747 bp, synthetic construct
  source 1..747: mol_type = other DNA
ttaaaacagctctggggttgtacccaccccagaggcccacgtggcggctagcactccggtatcacggtacccttgtgcgcctgttttataccccccacccgcaacttagaagcacgaaaccaagttcaatagaagggggtacaaaccagtaccaccacgaacaagcacttctgtttccccggtgacattgcatagactgctcacgcggttgaaagtgatcgatccgttacccgcttgtgtacttcgaaaagcctagtatcgccttggaatcttcgacgcgttgcgctcagcacccgaccccggggtgtagcttaggctgatgagtctggacattcctcaccggtgacggtggtccaggctgcgttggcggcctacctatggctaacgccataggacgctagatgtgaacaaggtgtgaagagcctattgagctacataagagtcctccggcccctgaatgcggctaatcctaaccacggagcaggcggtcgcgaaccagtgactggcttgtcgtaacgcgcaagtctgtggcggaaccgactactttgggtgtccgtgtttcctattatatttaccatggctgcttatggtgacaatcagagattgttatcataaagcgaattggattggccatccggtgagtgctgtgtcaggtatacaactgtttgttggaaccactgtgttagctttacttctcatttaaccaattaatcaaaaacaatacgaggataaaacgacaatactaca

SEQ ID NO: 22258 - DNA, 747 bp, synthetic construct
  source 1..747: mol_type = other DNA
ttaaaacagctctggggttgtacccaccccagaggcccacgtggcggctagcactccggtatcacggtacccttgtgcgcctgttttataccccccacccgcaacttagaagcacgaaaccaagttcaatagaagggggtacaaaccagtaccaccacgaacaagcacttctgtttccccggtgacattgcatagactgctcacgcggttgaaagtgatcgatccgttacccgcttgtgtacttcgaaaagcctagtatcgccttggaatcttcgacgcgttgcgctcagcacccgaccccggggtgtagcttaggctgatgagtctggacattcctcaccggtgacggtggtccaggctgcgttggcggcctacctatggctaacgccataggacgctagatgtgaacaaggtgtgaagagcctattgagctacataagagtcctccggcccctgaatgcggctaatcctaaccacggagcaggcggtcgcgaaccagtgactggcttgtcgtaacgcgcaagtctgtggcggaaccgactactttgggtgtccgtgtttcctgttatatttatcatggctgcttatggtgacaatcagagattgttatcataaagcgaattggattggccatccggtgagtgctgtgtcaggtacacaactgtttgttggaaccactgtgttagctttacttctcatttaaccaattaatcaataacaatacgaggataaaacgacaatactaca

SEQ ID NO: 22259 - DNA, 455 bp, synthetic construct; identical to SEQ ID NO: 496
  source 1..455: mol_type = other DNA

SEQ ID NO: 22260 - DNA, 822 bp, synthetic construct
  source 1..822: mol_type = other DNA
tttaaaacagcctgggggttgttcccacccctggggcccacgtggcgctagtactctggtacgctagtacctttgtacgcctgtttttcccctcccttaaataaatcaaggttgccactactgaggggagtagtccgactccgctccagcaatgctgcaccagtgcactggtacgctagtaccttttcacggagtagatggtatcccttaccccggaacctagaagattgcacacaaaccgaccaatatgcgcaccgcatccagccgtgcagcggtcaagcacttctgtctccccggtctgtaaagatcgttatccgcccgacccactacgaaaagcctagtaactggccaagtgaacgcgaagttgcgctccgccacaaccccagtggtagctctggaagatggggctcgcaccacccccgtggtaacacggttgcctgcccgcgtgtgcttccgggttcggtctcgtgccgttcacttcaacttcacgcaaccagccaagagcctattgtgctgggacggttttcctccggggccgtgaatgctgctaatcccaacctccgagcgtgtgcgcacaatccagtgttgctacgtcgtaacgcgtaagttggaggcggaacagactacttcggtaccccgtgtttcctctcattttatttaatattttatggtgacaattgttgagatttgccctcttgcaacgttgccattgaatattggcttatactatttggttgccttttacaaaacctctgatatacccagttcttacattgatctgcttgtttttctcaatttgaagtatagactacaaatagcaaa

SEQ ID NO: 22261 - DNA, 822 bp, synthetic construct
  source 1..822: mol_type = other DNA
tttaaaagagtcagggggttgtacccacccctagggcccacgtggcgccagtactctggtacattagtacctttgtacgcctgttttcccctcccttaaataaatcaagattaccactactgaggggagtagtccgactccgctccagcaatgctgcaccagtgcactggtacgctagtaccttttcacggagtagatggtatccccaccccgaaacttagaagcatgtgatcaaatcgaccaataggcgcgcggttgccagccgcgtttcggtcaagcacttctgtttccccggtccgcaaggatcgttacccgcccgacccactgcgagaagcccagtaactggccaagcggtagcgaggttgcactcagccacaaccccagtggtagctctggaagatggggctcgcagttcccccgtggtaacacggatgcctgcccgcgtgtgcttccgggttcggtctcgtgccgttcacctcaataccgcgtaaccagtgaagagcctattgcgctgggacggttttcctccggggccgtgaatgctgctaatcctaacctctgagcgtgtgcgcacaatccagtgttgctacgtcgtaacgcgtaagtcaggggcggaacagactactttcggtaccccgtgtttccttttattttatatttatcattttatggtgacaattgctgagatttgcgatttagcggttttgccattgaacattgctttgtactacttggttgcatttcacaaaacctccgacatacccagctcctacatcgacttgcttgtttttcttaattaagacataaactagagaacacaaa

SEQ ID NO: 22262 - DNA, 732 bp, synthetic construct
  source 1..732: mol_type = other DNA
gtgggttgttcccatccacagggcccactgggcgccagcactctggtattgcggtaccttagtgcgcctgttttatatacccaccccccaaatgtaatttagatgcatgtcaacaaagaccaatagtaagcgcagcacaccagctgtgttctggtcaagcacttctgttaccccggactgagtatcaataagctactcgcgtggctgaaggagaaaacgttcgttacccggccaattacttcgagaaacctagtaacaccatgaaggttgcgcagtgtttcgctccgcacaaccccagtgtagatcaggtcgatgagtcaccgcattccccacgggtgaccgtggcggtggctgcgctggcggcctgcccatggggtaacccatgggacgcttcaatactgacatggtgcgaagagtctattgagctaattggtagtcctccggcccctgaatgcggctaatccttactgcggagcagatacccacacaccagtgggcagtctgtcgtaacgggcaactctgcagcggaaccgactactttgggtgtccgtgtttctctttatccttatactggctgcttatggtgacaattgagagattgttaccatatagctattggattggccatccggtgacgaatagagcaattgtgtatttgtttgttggttttataccattaaattacaaggttctaaacacccttaatcttattatagtattcaatacaataaa

SEQ ID NO: 22263 - DNA, 732 bp, synthetic construct
  source 1..732: mol_type = other DNA
gtgggttgttcccatccacagggcccactgggcgccagcactctggtattgcggtaccttagtgcgcctgttttacatacccatcccccaaatgtaatttagatgcatgtcaacaaagaccaatagtaagcgcagcacaccagctgtgttctggtcaagcacttctgttaccccggactgagtatcaataagctactcgcgtggctgaaggagaaaacgttcgttacccggccaattacttcgagaaacctagtaacaccatgaaggttgcgcagtgtttcgctccgcacaaccccagtgtagatcaggtcgatgagtcaccgcattccccacgggtgaccgtggcggtggctgcgctggcggcctgcccatggggtaacccatgggacgcttcaatactgacatggtgcgaagagtctattgagctaattggtagtcctccggcccctgaatgcggctaatcctaactgcggagcagatacccacacaccagtgggcagtctgtcgtaacgggcaactctgcagcggaaccgactactttgggtgtccgtgtttctctttatccttatactggctgcttatggtgacaattgagagattgttaccatatagctattggattggccatccggtgacgaatagagcaattgtgtatttgtttgttggttttataccattaaattacaaggttctaaacacccttaatcttattatagtattcaatacaataaa

SEQ ID NO: 22264 - DNA, 732 bp, synthetic construct
  source 1..732: mol_type = other DNA
gtgggttgtacccatccacagggcccactgggcgccagcactctggtattgcggtaccttagtgcgcctgttttatatacccaccccccaaatgtaatttagatgcatgtcaacaaagaccaatagtaagcgcagcacaccagctgtgttctggtcaagcacttctgttaccccggactgagtatcaataagctactcgcgtggctgaaggagaaaacgttcgttacccggccaattacttcgagaaacctagtaacaccatgaaggttgcgcagtgtttcgctccgcacaaccccagtgtagatcaggtcgatgagtcaccgcattccccacgggtgaccgtggcggtggctgcgctggcggcctgcccatggggtaacccatgggacgcttcaatactgacatggtgcgaagagtctattgagctaattggtagtcctccggcccctgaatgcggctaatcctaactgcggagcagatacccacacaccagtgggcagtctgtcgtaacgggcaactctgcagcggaaccgactactttgggtgtccgtgtttctctttatccttatactggctgcttatggtgacaattgagagattgttaccatatagctattggattggccatccggtgacgaatagagcaattgtgtatttgtttgtcggttttataccattaaattacaaggttctaaacacccttaatcttattatagtattcaatacaataaa

SEQ ID NO: 22265 - DNA, 565 bp, synthetic construct
  source 1..565: mol_type = other DNA
tgacattgcatagactgctcacgcggttgaaagcgatcgatccgttatccgcttgtgtacttcgaaaagcctagtatcgccttggaatcttcgacgcgttgcgctcagcacccgatcccggggtgtagcttaggctgatgagtctggacgtccctcaccggcgacggtggtccaggctgcgttggcggcctacctatggctaacgccataggacgctagatgtgaacaaggtgtgaagagcctattgagctacacgagagtcctccggcccctgaatgcggctaatcctaaccacggagcaagcggtcacgaaccagtggctggcttgtcgtaacgcgcaagtctgtggcggaaccgactactttgggtgtccgtgtttcctgttatttttatcatggctgcttatggtgacaatctgtgattgttatcataaagcgatttggattggccatccggtgagtgttgtatcgaacatttgactgttcatcagaactactgtgttagattcacttcttattcaactaattaatcaaaaacagtacgaagacaaaacaacaatactaca

SEQ ID NO: 22266 - DNA, 950 bp, synthetic construct
  source 1..950: mol_type = other DNA
ttaaaacagcctgtgggttgtacccacccacagggcccaatgggcgctagcacactggtattccggtacctttgtgcgcctgttttataacccccccccagttcgcaacttagaagcaaagaaacaatggtcaatagctgacgcagcaacccagctgtgttttggccaagcacttctgtgtccccggactgagtatcaataagctgcttgcgcggctgaaggagaaaccgttcgttacccggccaactacttcgagaagcctagtaacgccatgaacgttgaggagtgtttcgctcagcacttcccccgtgtagttcaggtcgatgagtcaccgcgttccccacgggtgaccgtggcggtggctgcgttggcggcctgcctgtggggcaacccgcaggacgctctgatacagacatggtgtgaagagcctattgagctagttggtagtcctccggcccctgaatgcggctaatcctaactgcggagcacacgttcgcaagccagcgagtggtgtgtcgtaacgggcaactctgcagcggaaccgactactttgggtgtccgtgtttccttttattcttaccttggctgcttatggtgacaattgaaagattgttaccatatagctattggattggccgtccagtgtcaaatagagcaatcatatatctgtttgttggtttcgatcccttggactacagaaatcttaaaactctttatttcatattgagactcaatacgataaaatgggaacacaggtgtcaacacaaaagacaggggcacacgagactagattgagcgccagtggaaactcaattattcattacaccaacataaactattacaaggatgctgcttcaaattcggccaataggcaagattttacacaagaccctagtaaattcacagaaccggtaaaggatgtgatgataaagtcgctgccagcgctcaat

SEQ ID NO: 22267 - DNA, 714 bp, synthetic construct; identical to SEQ ID NO: 880
  source 1..714: mol_type = other DNA

SEQ ID NO: 22268 - DNA, 715 bp, synthetic construct
  source 1..715: mol_type = other DNA
agggcccattgggcgctagcacactggtatcacggtacctttgtgcgcctgttttatccatcccttcccaaattgcaacttagaagcatgctacaatcggatcaataggtggttcagtaaaccaactgagccttgaccaagtacttctgttaccccggactgagtatcaataggctgctcgcgtggctgatggagaaaacgtccgttacccgaccaattacttcgagaaacctagtaccaccatgaaagttgcgcagcgtttcgctccgcacaaccccagtgtagatcaggtcgatgagtcaccgcgttccccacgggcgaccgtggcggtggctgcgttggcggcctgcccatggggtaacctatgggacgcttcaatactgacatggtgcgaagagtctattgagctaattggtagtcctccggcccctgaatgcggctaatcctaactgcggagcagatacccacgcaccagtgggcagtctgtcgtaacgggcaactctgcagcggaaccgactactttgggtgaccgtgtttccttttatttcaatgctggctgctttatggtgacaattgaaagattgttaccatatagctattggattggccatccggtgacaaaaaaaacaattatctacctgtttattggctttatacctctcaattacaaggttataaatactcttaacttcattttaatgcttaacacagcaaa

SEQ ID NO: 22269 - DNA, 688 bp, synthetic construct
  source 1..688: mol_type = other DNA
tcccaccccaggggcccacgtggcggctagtactctggtatttcggtacctttgtacgcctgttttatctcccttcccaatgtaacttagaagttttcaaatcgaagctcaataggtggggcgcaaaccagcgctttcatgagcaagcacttctgtttccccggtgcggttgtatagactgtctccacggttgaaaacaacttatccgttatccgctatagtacttcgagaaacctagtatcacctttggattgttgatgcgttgcgctcagcacactaacccgtgtgtagcttgggttgatgagtctggacgtaccccactggtgacagtggtccaggctgcgttggcggcctactcatggtgaaagccatgagacgctagacatgaacaaggtgtgaagagtctattgagctactatagagtcctccggcccctgaatgcggctaatcttaaccatggagcaagtgctcacaagccagtgagttgcttgtcgtaacgcgcaagtccgtggcggaaccgactactttgggtgtccgtgtttcactttttacctttatgactgcttatggtgacaatttaatattgttaccatttagcttgtcaaattaatcacgtgaaatcctaaatcttatttatcaatttgtatttggatagcttcatttgagaattctaaactcattcataaag

SEQ ID NO: 22270 - DNA, 688 bp, synthetic construct
  source 1..688: mol_type = other DNA
tcccaccccaagggcccacgtggcggctagtactctggtatttcggtacctttgtacgcctgttttatctcccttcccaatgtaacttagaagttctcaaattgaagctcagtaggtggggcgcaaaccagcgctttcatgagcaagcacttctgtttccccggtgcggttgtatagactgtttccacggttgaaaacaacttatccgttatccgctatagtacttcgagaaacctagtatcacctttggattgttgatgcgttgcgatcagcacactgacccgtgtgtagcttgggctgatgagtctggacgtaccccactggtgacagtggtccaggctgcgttggcggcctactcatggtgaaaaccatgagacgctagacatgaacaaggtgtgaagagtctattgagctactatagagtcctccggcccctgaatgcggctaatcttaaccatggagcaagtgctcacaagccagtgagttgcttgtcgtaacgcgcaagtccgtggcggaaccgactactttgggtgtccgtgtttcactttttacctttatgactgcttatggtgacaatttaatattgttaccatttagcttgtcagattaatcgcgtgaaatcctaaatcttgttcaccaatttgtattcggatagcttcatttgaaaattctaaactcattcataaag

SEQ ID NO: 22271 - DNA, 688 bp, synthetic construct
  source 1..688: mol_type = other DNA
tcccaccccaagggcccacgtggcggctagtactctggtatttcggtacctttgtacgcctgttttatctcccttcccaatgtaacttagaagttctcaaattgaagctcagtaggtggggcgcaaaccagcgctttcatgagcaagcacttctgtttccccggtgcggttgtatagactgtttccacggttgaaaacaacttatccgttatccgctatagtacttcgagaaacctagtatcacctttggattgttgatgcgttgcgctcagcacactaacccgtgtgtagcttgggctgatgagtctggacgtaccccactggtgacagtggtccaggctgcgttggcggcctactcatggtgaaaaccatgagacgctagacatgaacaaggtgtgaagagtctattgagctactatagagtcctccggcccctgaatgcggctaatcttaaccatggagcaagtgctcacaagccagtgagttgcttgtcgtaacgcgcaagtccgtggcggaaccgactactttgggtgtccgtgtttcactttttacctttatgactgcttatggtgacaatttaatattgttaccatttagcttgtcagattaatcgcgtgaaatcctaaatcttgttcaccaatttgtattcggatagcttcatttgaaaattctaaactcattcataaag

SEQ ID NO: 22272 - DNA, 676 bp, synthetic construct
  source 1..676: mol_type = other DNA
tcccaccccaagggcccacgtggcggctagtactctggtacttcggtacctttgtacgcctgttttatttcccttcccaatgtaacctagaagttttcaaatcaaagctcgataggtggagcgcaaaccagcgctctcatgagcaagcactcctgtctccccggtgcggttgtataaactgttcccacggttgaaaacaacctatccgttatccgctatagtacttcgagaaacctagtatcacctttggattgttgatgcgttgcgctcagcacactaacccgtgtgtagcttgggtcgatgagtctggacatacctcactggcgacagtggtccaggctgcgttggcggcctactcatggtgaaaaccatgagacgctagacatgaacaaggtgtgaagagtctattgagctactatagagtcctccggcccctgaatgcggctaatcttaaccatggagcaagtgctcacaagccagtgagttgcttgtcgtaatgcgcaagtccgtggcggaaccgactactttgggtgtccgtgtttcactttttacttttatgactgcttatggtgacaatttgatattgttaccatttagcttgtcaaatcaattacaaaagacctaaatcttgtttatcaacttgcattttgataacttcaattagaaaaatttaata

SEQ ID NO: 22273 - DNA, 604 bp, synthetic construct
  source 1..604: mol_type = other DNA
caactcggtaagccaaccgggcaatgaccaagcactactgttaccccggaccaagtatcaataaactgctagcgcggttgaaggagaaaacgtccgttacccggccaattacttcgagaaacctagtaccaccatggatgttgcgcagtgtttcgctccgcacaaccccagtgtagatcaggccgatgagccaccgcattccccacgggtgaccgtggcggtggttgcgctggcggcctgcccatggggcaacccatgggacgcttcaatactgacatggtgcgaagagtctattgagctaattggtagtcctccggcccctgaatgcggctaatcccaactgcggagcagatacccacatgccagtgggcagtctgtcgtaacgggcaactctgcagcggaaccgactactttgggtgtccgtgtttcctttttaaccttatattggctgcatatggtgacaattgaaagattgttaccatatagctattggattggccatccggtgacaaacagagcaatcatttatttgttcgttggttttattccattgaatctcaaagttttgaacactctaaactttattatttcactcaacaacaaa

SEQ ID NO: 22274 - DNA, 497 bp, synthetic construct
  source 1..497: mol_type = other DNA
tacttcgagaaacccagtaccaccatgaatgttgcgcggcgtttcgctccgcacaatcccagtgtagatcaggtcgatgagccaccgcatccctcacgggcgaccgtggcggtggctgcgctggcggcctgcccatggggcaacccatgggacgcttcaatacagacatggtgtgaagagtctattgagctaattggtagtcctccggcccctgaatgcggctaatcctaactgcggagcagattcccacatgccagtgggcagtctgtcgtaatgggtaactctgcagcggaaccgactactttgggtgtccgtgtttccttttattcttgtactggctgctaatggtgacaattgaaagattgttaccatatagctattggattggccacccagtgtctaacagagcaatcatttacctttttgttggattcatcccactcgattataaagcacttgtaacacctcaaatacatcatagacctcaacacaacaaa

SEQ ID NO: 22275 - DNA, 1000 bp, synthetic construct; identical to SEQ ID NO: 146
  source 1..1000: mol_type = other DNA

SEQ ID NO: 22276 - DNA, 496 bp, synthetic construct; identical to SEQ ID NO: 524
  source 1..496: mol_type = other DNA

SEQ ID NO: 22277 - DNA, 546 bp, synthetic construct
  source 1..546: mol_type = other DNA
ccaagcacttctgtttccccggtgcggttgtatagactgtttccacggttgaaaacaacttatccgttatccgctatagtacttcgagaaacctagtatcatctttggattgttgatgcgttgcgctcagcacactaacccgtgtgtagcttgggtcgatgagtctggacgtaccccactggcgacagtggtccaggctgcgttggcggcctactcatggtgaaaaccatgagacgctaaacatgaacaaggtgtgaagagtctattgagctactatagagtcctccggcccctgaatgcggctaatcttaaccatggagcaagtgctcacaaaccagtgagttgcttgtcgtaatgcgcaagtccgtggcggaaccgactactttgggtgtccgtgtttcactttttacttttatgactgcttatggtgacaattcaatattgttaccatttagcttgtcagatcaatcacgtaaaattccaaatcttatttggtaatttgtgtttggataacttcatttgaaaatcttaaacttatttgtaaag

SEQ ID NO: 22278 - DNA, 446 bp, synthetic construct; identical to SEQ ID NO: 490
  source 1..446: mol_type = other DNA

SEQ ID NO: 22279 - DNA, 527 bp, synthetic construct
  source 1..527: mol_type = other DNA
cactgtttccccggtgtggttgtataaactgttcccacggttgaaaacaacctatccgttatccgctatagtacttcgagaaacctagtaccacctttggattgttgacgcgttgcgctcagcacactaacccgtgtgtagcttgggtcgatgagtctggacgtaccccactggcgacagtggtccaggctgcgttggcggcctactcatggtgaaaaccatgagacgctagacatgaacaaggtgtgaagagtctattgagctactatagagtcctccggcccctgaatgcggctaatcctaaccatggagcaagtgctcacaagccagtgagttgcttgtcgtactgcgcaagtctgtggcggaaccgactactttgggtgtccgtgtttcactttttacttttatgactgcttatggtgacaatttgatattgttaccattgagcttgtcaaattaattgcaaaagatcctaaatcttatttaccaacttgcattttgataaccttgttttgaaaattttaata

SEQ ID NO: 22280 - DNA, 440 bp, synthetic construct
  source 1..440: mol_type = other DNA
cacttctgtttccccggatgtgtgaataggcttcacccgaggctgaaactgtagcattcgttatccgcatggctactacgcgactgctagtagcattctgtatgacatgtggggtttcgctcagcagagacccagtctgtagatcagggtaatgaggctacacaatccccactggcgacagtggtgtagcctgcgtggtgccctgcccgaggttcgtcctcgggaccctccatgttagacagggtgtgaagacactagtgtgctagtcatgagtcctccggcccctgaatgcggctaatcttaaacctgcagccatcgcatgcatgccagcatgtaggtggtcgtaatgagcaattgcgggatggaaccgactactttgggtgtccgtgtttccctttttacatttatgtgtctcttatggttacatcattggtgtaatc

SEQ ID NO: 22281 - DNA, 451 bp, synthetic construct
  source 1..451: mol_type = other DNA
tatcacctttggattgttgatgcgttgcgctcagcacactaacccgtgtgtagcttgggtcgatgagtctggacataccccactggtgacagtggtccaggctgcgttggcggcctactcatggtgaaaaccatgagacgctaaacatgaacaaggtgtgaagagtctattgagctactatagagtcctccggcccctgaatgcggctaatctcaaccatggagcaagtgcttacaaaccagtgagttgcttgtcgtaatgcgcaagtccgtggcggaaccgactactttgggtgtccgtgtttcactttttacttttatgactgcttatggtgacaatttaacattgttaccatttagctagtcaaattaatcacataaaattttaaatcctatctaataattcacatttggatagcttcattttaaggactttaaacctatttacaaag

SEQ ID NO: 22282 - DNA, 451 bp, synthetic construct
  source 1..451: mol_type = other DNA
tatcacctttggattgttgatgcgttgcgctcagcacactaacccgtgtgtagcttgggttgatgagtctggacataccccactggtgacagtggtccaggctgcgttggcggcctactcatggtgaaaaccatgagacgctaaacatgaacaaggtgtgaagagtctattgagctactatagagtcctccggcccctgaatgcggctaatcttaaccatggagcaagtgctcacaaaccagtgagttgcttgtcgtaatgcgcaagtccgtggcggaaccgactactttgggtgtccgtgtttcactttttacttttatgactgcttatggtgacaatttaatattgttaccatttagctagtcaaattaatcacataaaactttaaatcctatctaataattcacatttggatagcttcattttgaggactttaatcctatttacaaat

SEQ ID NO: 22283 - DNA, 451 bp, synthetic construct
  source 1..451: mol_type = other DNA
tatcacctttggattgttgatgcgttgcgctcagcacactaacccgtgtgtagcttgggtcgatgagtctggacataccccactggtgacagtggtccaggctgcgttggcggcctactcatggtgaaaaccatgagacgctaaacatgaacaaggtgtgaagagtctattgagctactatagagtcctccggcccctgaatgcggctaatcttaaccatggagcaagtgctcacaaaccagtgagttgcttgtcgtaatgcgcaagtccgtggcggaaccgactactttgggtgtccgtgtttcactttttacttttatgactgcttatggtgacaatttaatattgttaccatttagctagtcaaattaatcacataaaactttaaattctatctaataattcacatttggatagcttcattttgaggaccttaaacctatttacaaag

SEQ ID NO: 22284 - DNA, 451 bp, synthetic construct
  source 1..451: mol_type = other DNA
tatcacctttggattgttgatgcgttgcgctcagcacactaacccgtgtgtagcttgggtcgatgagtctggacataccccactggtgacagtggtccaggctgcgttggcggcctactcatggtgaaaaccatgagacgctaaacatgaacaaggtgtgaagagtctattgagctactatagagtcctccggcccctgaatgcggctaatcttaaccatggagcaagtgctcacaaaccagtgagttgcttgtcgtaatgcgcaagtctgtggcggaaccgactactttgggtgtccgtgtttcactttttacttttatgactgcttatggtgacaatttaatattgttaccatttggctagtcaaattattcacataaaactttaaatcctatctaataattcacatttggatagcttcattttgaggactttaaacctatttacaaaa

SEQ ID NO: 22285 - DNA, 449 bp, synthetic construct
  source 1..449: mol_type = other DNA
tcacctttggattgttgatgcgttgcgctcagcacactaacccgtgtgtagcttgggtcgatgagtctggacataccccactggtgacagtggtccaggctgcgttggcggcctactcatggtgaaaaccatgagacgctaaacatgaacaaggtgtgaagagtctattgagctactatagagtcctccggcccctgaatgcggctaatcttaaccatggagcaagtgctcacaaaccagtgagttgcttgtcgtaatgcgcaagtccgtggcggaaccgactactttgggtgtccgtgtttcactttttacttttatgactgcttatggtgacaatttaatattgttgccatttagctagtcatattaatcacataaaactttaaattctatctaataattcacatttggatagtttcattttgaggactttaaacctatttacaaaa

SEQ ID NO: 22286 - DNA, 449 bp, synthetic construct
  source 1..449: mol_type = other DNA
tcacctttggattgttgatgcgttgcgctcagcacactaacccgtgtgtagcttgggtcgatgagtctggacataccccactggtgacagtggtccaggctgcgttggcggcctactcatggtgaaaaccatgagacgctaaacatgaacaaggtgtgaagagtctattgagctactatagagtcctccggcccctgaatgcggctaatcttaaccatggagcaagtgctcacaaaccagtgagttgcttgtcgtaatgcgcaagtccgtggcggaaccgactactttgggtgtccgtgtttcactttttacttttatgactgcttatggtgacaatttaatattgttaccatttagttagtcatattaatcacataaaactttaaattctatctaataattcacatttggatagtttcattttgaggactttaaacctatttacaaaa

SEQ ID NO: 22287 - DNA, 449 bp, synthetic construct
  source 1..449: mol_type = other DNA
tcacctttggattgttgatgcgttgcgctcagcacactaacccgtgtgtagcttgggtcgatgagtctggacataccccactggtgacagtggtccaggctgcgttggcggcctactcatggtgaaaaccatgagacgctaaacatgaacaaggtgtgaagagtctattgagctactatagagtcctccggcccctgaatgcggctaatcttaaccatggagcaagtgctcacaaaccagtgagttgcttgtcgtaatgcgcaagtccgtggcggaaccgactactttgggtgtccgtgtttcactttttacttttatgactgcttatggtgacaatttaatattgttaccatttagctagtcatattaatcacataaaactttaaattctatctaataattcacatttggatagtttcattttgaggactttaaacctatttacaaaa

SEQ ID NO: 22288 - DNA, 439 bp, synthetic construct
  source 1..439: mol_type = other DNA
taccacctttggattgttgacgcgttgcgctcagcacactaacccgtgtgtagcttgggtcgatgagtctggacatacctcactggcgacagtggtccaggctgcgttggcggcctactcatggtgaaaaccatgagacgctagacatgaacaaggtgtgaagagtctattgagctactatagagtcctccggcccctgaatgcggctaatcctaaccatggagcaagtgctcacaggccagtgagttgcttgtcgtaatgcgcaagtccgtggcggaaccgactactttgggtgtccgtgtttcactttttacttttatgactgcttatggtgacaatttgatattgttaccatttagcttgtcaaatcaattgcaaaagatcctaaatcctatttatcaacttgcatcttgataactttgatttgaaaattttaaca

SEQ ID NO: 22289 - DNA, 438 bp, synthetic construct
  source 1..438: mol_type = other DNA
tatcacctttggattgttgacgcgttgcgctcagcacactaacccgtgtgtagcttgggtcgatgagtctggacataccccactggcgacagtggtccaggctgcgttggcggcctactcatggtgaaaaccatgagacgctagacatgaacaaggtgtgaagagtctattgagctactatagagtcctccggcccctgaatgcggctaatcctaaccatggagcaagtgctcacagaccagtgagttgcttgtcgtaatgcgcaagtccgtggcggaaccgactactttgggtgtccgtgtttcactttttacccttatgactgcttatggtgacaatttgatattgttaccatttagcttgtcaaatcaattgcaaaagatcctaaatcttatttatcaacttgcattttgataactttaatttgaagatttaata

SEQ ID NO: 22290 - DNA, 438 bp, synthetic construct
  source 1..438: mol_type = other DNA
tatcacctttggattgttgacgcgttgcgctcagcacactaacccgtgtgtagcttgggtcgatgagtctggacataccccactggcgacagtggtccaggctgcgttggcggcctactcatggtgaaaaccatgagacgctagacatgaacaaggtgtgaagagtctattgagctactatagagtcctccggcccctgaatgcggctaatcctaaccatggagcaagtgctcacacaccagtgagttgcttgtcgtaatgcgcaagtccgtggcggaaccgactactttgggtgtccgtgtttcactttttacccttatgactgcttatggtgacaatttgatattgttaccatttagcttgtcaaatcaattgcaaaagatcctaaatcttatttatcaacttgcattttgataactttaatttgaagatttaata

SEQ ID NO: 22291 - DNA, 438 bp, synthetic construct
  source 1..438: mol_type = other DNA
tatcacctttggattgttgacgcgttgcgctcagcacactaacccgtgtgtagcttgggtcgatgagtctggacataccccactggcgacagtggtccaggctgcgttggcggcctactcatggtgaaaaccatgagacgctagacatgaacaaggtgtgaagagtctattgagctactatagagtcctccggcccctgaatgcggctaatcctaaccatggagcaagtgctcacagaccagtgagttgcttgtcgtaatgcgcaagtccgtggcggaaccgactactttgggtgtccgtgtttcactttttacccttatgactgcttatggtgacaatttgatattgttaccatttagcttgtcaaaccaattgcaaaagatcctaaatcttatttatcaacttgcatttcaacaactttaatttgaagatttaata

SEQ ID NO: 22292 - DNA, 438 bp, synthetic construct
  source 1..438: mol_type = other DNA
tatcacctttggattgttgatgcgttgcgctcagcacactaacccgtgtgtagcttgggtcgatgagtctggacataccccactggcgacagtggtccaggctgcgttggcggcctactcatggtgaaaaccatgagacgctagacatgaacaaggtgtgaagagtctattgagctactatagagtcctccggcccctgaatgcggctaatcctaaccatggagcaagtgctcacagaccagtgagttgcttgtcgtaatgcgcaagtccgtggcggaaccgactactttgggtgtccgtgtttcactttttacccttatgactgcttatggtgacaattcgatattgttaccatttagcttgtcaaaccaattgcaaaagatcctaaatcttatttatcaacttgcatttcgacaactttaatttgaagatttaata

SEQ ID NO: 22293 - DNA, 438 bp, synthetic construct
  source 1..438: mol_type = other DNA
tatcacctttggattgttgatgcgttgcgctcagcacactaacccgtgtgtagcttgggtcgatgagtctggacataccccactggcgacagtggtccaggctgcgttggcggcctactcatggtgaaaaccatgagacgctagacatgaacaaggtgtgaagagtctattgagctactatagagtcctccggcccctgaatgcggctaatcctaaccatggagcaagtgctcacagaccagtgagttgcttgtcgtaatgcgcaagtccgtggcggaaccgactactttgggtgtccgtgtttcactttttacccttatgactgcttatggtgacaatttgatattgttaccatttagcttgtcaaatcaattgcaaaagatcctaaatcttatttatcaacttgcattttgataactttaatttgaagatttaata

SEQ ID NO: 22294 - DNA, 438 bp, synthetic construct
  source 1..438: mol_type = other DNA
tatcacctttggattgttgacgcgttgcgctcagcacactaacccgtgtgtagcttgggtcgatgagtctggacataccccactggcgacagtggtccaggctgcgttggcggcctactcatggtgaaaaccatgagacgctagacatgaacaaggtgtgaagagtctattgagctactatagagtcctccggcccctgaatgcggctaatcctaaccatggagcaagtgctcacagaccagtgagttgcttgtcgtaatgcgcaagtccgtggcggaaccgactactttgggtgtccgtgtttcactttttacccttatgactgcttatggtgacaatttgatattgttaccatttagcttgtcaaatcaattacaaaagatcctaaatcttatttatcaacttgcattttgataactttaatttgaagatttaata

SEQ ID NO: 22295 - DNA, 438 bp, synthetic construct
  source 1..438: mol_type = other DNA
tatcacctttggattgttgacgcgttgcgctcagcacactaacccgtgtgtagcttgggtcgatgagtctggacataccccactggcgacagtggtccaggctgcgttggcggcctactcatggtgaaaaccatgagacgctagacatgaacaaggtgtgaagagtctattgagctactatagagtcctccggcccctgaatgcggctaatcctaaccatggagcaagtgctcacagaccagtgagttgcttgtcgtaatgcgcaagtccgtggcggaaccgactactttgggtgtccgtgtttcactttttacccttatgactgcttatggtgacaatttgatattgttaccatttagcttgtcaaatcaattgcaaaagatcctagatcttacttatcaacttgcattttgataacattaatttgaagatttaata

SEQ ID NO: 22296 - DNA, 438 bp, synthetic construct
  source 1..438: mol_type = other DNA
tatcacctttggattgttgacgcgttgcgctcagcacactaacccgtgtgtagcttgggtcgatgagtctggacataccccactggcgacagtggtccaggctgcgttggcggcctactcatggtgaaaaccatgagacgctagacatgaacaaggtgtgaagagtctattgagctactatagagtcctccggcccctgaatgcggctaatcctaaccatggagcaagtgctcacagaccagtgagttgcttgtcgtaatgcgcaagtccgtggcggaaccgactactttgggtgtccgtgtttcactttttacccttatgactgcttatggtgacaatttgatattgttaccatttagcttgtcaaatcaattgcaaaagatcctaaatcttatttatcaacttgcattttgataactttaatttaaagattcaata

SEQ ID NO: 22297 - DNA, 437 bp, synthetic construct
  source 1..437: mol_type = other DNA
ccacctttggattgttgatgcgttgcactcagcacactaacccgtgtgtagcttgggtcgatgagtctggacatacctcactggcgacagtggtccaggctgcgttggcggcctactcatggtgaaagccatgagacgctagacatgaacaaggtgtgaagagtctattgagctactatagagtcctccggcccctgaatgcggctaatcctaaccatggagcaagtgctcacaggccagtgagttgcttgtcgtaatgcgcaagtccgtggcggaaccgactactttgggtgtccgtgtttcactttttacttttatgactgcttatggtgacaatttgatattgttaccatttagcttgtcaaatcaattgcaaaagatcctaaatcttatttatcaacttgcattttgataactttaatttgaaaattttaaca
